United States Patent Application Publication US 2015/0376612 A1 - sequence listing, part 14

SEQ ID NO: 34703 - DNA, 1031 bp, Homo sapiens
atacccctaatactcagtgtatcttcctcaaaatgagaaattataagaccaaaatacaataatcaaaatctggaaattaactttttttttttttttttgagatggattcttgctctgtcacccaggctggagtgcagtggtgcaatctcggctcactgcaacctctgtttcctggcctcaggtgatcctcctgcctcagcctcccacgtgtagctgggactacaggcatgcaccaccattgttgggctaatttttttgtatttttgatagagatggggtttcaccatattgcccatgctggtcttaaactcctgaccttaagcaatccacccacctcggcctcccaaagtgctaagattacaggcgtgagccacagtagctggcctgaaattaacatttatacaatgttattatctaatctacagaccttgtttggattttatcatttgtctcagttacgtcctttacagcaaaagaaaatccaagatgatgcattataatagctgtcatgtctctttagtctcctataatctggaacaatttctgaatcttttttatatttcatgacactgacatttttgaatactatagacagataagttattttgtagactgtctctcaacttagatttgtttcctcctcatgattagattcaggttatatgctcctggcaaggacggcatagatgggcggctaagttctccgtgcaacctatcttgcacaatgctgctgcttagtctgatttctgtcaacattatctttgatcgtttgcttaagtgctgtgtgccaggtttttctactgtaaatacactattttactctttgtaactagtaaacatgtggctgagagacacttttagactatcttgttctcaaacttttcccactagtctcagcatccgctgataattcttgactgaattggttattggtggttactaaatggtaacttttgtaatctcatctttccttctatattcattcgttggcattcttctgtaaggaagagctttcctttctcccttgttta

SEQ ID NO: 34704 - DNA, 1041 bp, Homo sapiens
gtttggatctgtgatgttttctcatgattaggttgaggttatgccttttttctaagaacaccatggatgtgatcttgtgtcctcagtgcatcctatcatagatacaggatgtcaataacgtcttattattagtgaggataatcttgattatttggttaagatgattcagcatcccactgaaactagtgctgggttccttcactagtaaagtgactattttttcctttgtaatcgataactgtcttggcaggagaaggaggtacttatgcttatatcctgtttgtccttaaacattcatccactaattttagcatccactgctaaagaggcactaatttttttaaaaactgagatattacatactataaaatccacccttataaagtatacaaatcagtggtttttagtatattaacaagagtatacaaccattagcactgtgtaattccagaacattttcctcaccctgaaaagaaaccctgtacctatcagcagccactcattctatccaccccgtggcactcactgctctgctctgtctctatggattttcctatgctggacgtttcacgtgtgtatggagacattagaatatatggccttttgtgtctggcttcttccacttagcatagtggtttcaaggttgacctgggttgtagcatgtatcagtgcttcagtccttgttaggggtaaataatatttcattgtgtggacacatcctattttgtttctttttcagttgatggacatttggattgtttccatcttttagctataatgtggttatgaacatttgtgtacaagtttttgtcgaggcattaacttttaattaggaaactttgaaacaaaaatctcaacactgtaccttgtttttttcaaactaaaattggagtacttattacttttaaaaatcaacgtgttgtcacttttagaaattgcatttggtggtttctggtgtgtttgttaatttttatagtttagaaggtggtgatttccacaaacaggaaagtctgttgtgaaaagaccagcccaggttgagta

SEQ ID NO: 34705 - DNA, 1068 bp, Homo sapiens
tagcacaagtagcctaggtcaaactaggaagtaatttttaggaacctgacttctcctgatccaaatactagagggttacctaatcctttccaaaccaggtgtggtactttgtatcacaatcctctatttttccatttttatcacattctttcagaatcttgtttgggtaatttattaatctgattaaggacttctaggtgtcagtaactgaagatgtctttactaattatccctgtaagagtttttcctcccttttttttcacttcacttttaaaagattgagtggattttgaagtccttttctttgtttgaataatgtagggtgttttttattgaatatcacgtaaggccattttaccagggagcatacagccatttggtttataatgagaaagatactccactgctatatattctcttttggaagagctccattttgctgaatgtgaaagtattttgaaataactgagataactagaatgtctctgtgttacattagcatgttagtagaactcctgacatgatgacttaaattttcaaaagtgagaacagatgcatttgaattagtaattgaaaataggagtttgatagtaaaagtgattttacatttgtatatagcttactatatgtgccaaaaaaatactgtataatttttttaaattcttagattcactatttttgtactccccagatgattgtgttttcctattaggttgagattcctttcagaggtctttttagataataaatagaaataagaaagctgtgttgcataagaaccattaagagaaaagtacagacctcatgttttataagtaagaaatatgactttaaaaatatgctcactttatctgtcatccctgcaaaaccagaactgtatgttccaaaatctgattcagcttagtgaaacaaacctgtgatacttcactattaatgttgagtgggaaaatgtcataattattttctggaaaatgtttttctagtttcttctaaatatatgaatcagacatttaaaaattctatttacgaaaagaaaaagagcaactcaactcactttgctgacacatt

SEQ ID NO: 34706 - DNA, 1024 bp, Homo sapiens
ggctgggtgtggtggctcatgcctgtaatcccagcactttgggaggccgaggtgagaggatcacttgtgcctgggagtttgagaccagtctgggtaacatagggaaatcccatctctaccaaaaatacaaaaatcaactgggcatggtggtgcacacctgtggtcccagatacttgggaggcagaggtgggaggattgcttgagcctgggaggttcaggctgcaatgagctgtgattgtgccactgcactccagcctgggtgacagagcaataccttgtctctcggaaaataatattcagttatggccttaacaactgggtgaatggtgatacgatttactaaggctggaacacaggaagcagaacaggtttggtacagagagatcttttggacaagttaagtttgagatgtctaatagacttccaaatggaaaggcagagtaggtggttgggtagaagagtcaggaactcaggggagaagtctaaactgaagatggacatttggaaatcattaccagttgagtaatatttaaacctgtgtaactggatgagatcatggggagataatgcaaatagaaaagaaagaaaggtctcaggattgagccctgggccactgttagaggtcaggaaaaggaggatgatccagcaaaggagaggagagagtggctagtgaagtaggaacatcaggagaggttgatatcttacagaagccaaagaaagtatttcagggaggagcgctcatctctgtcagaggttccaggcttagctgccggctgttagaactcccttcctcttgcttagcttaagtgtcactttcccagactacctcaactatattagaaacccctccgatatactctgtcacactctgtcatagctactattatcatttattatacttgctatttaattagaatggcaagtataggctctaaggtcccctcaccaggactctcactcaaccatttgtctcaaccatttatgtctcactcaaccattgttacatcagtgcttatcttagtgt

SEQ ID NO: 34707 - DNA, 1029 bp, Homo sapiens
taaaggatgaggaagttggaatgttacatatttaattttttaattcttgaaagcgggaaaagatcatttaagccataagaaaaaatgataattattcgaatttaaattgagttctcagaatggaaactcattttactattgacctcaaccagtcaatattagcgataaatttgtttccaaatgagataataaatagattccttataaatagagcatacctatgctacacttgtgaccttctctactttggcagatattggattcatctgtttctggccatttaggaaacagacataccagataaattatggtgaaagtagtcccctgagttaaagaaagcctgccccatagtgtgtgtttgttgattctatcacttcctccatagaacaatgtaatcattctcacatattggtttgccaatgttctgggctacttgtcaagccaagacattaatctacaggattgggtttttttatttttatttttggtacttctcttgaacatatcaatagaactaagtgagacaggtctgtctataggatatttattagggattggatatggtcagggagtagccataaatttgactttctggctggtgtacattgcagctgttactgatagatacacttatctctcactggtgtatttaatcagcaacagtcaagaaaaagtgccttatttttaacttaaggtttatgctgattttgcttgattttctttgaaatatagctttcacaaaatacagatgagtctggattaaatgatgaagccatcgccaagcaattacagcttgatgaagatgcggaggtattggcattttgcttagaatcattagtaacttgatattctgactagctatttagtccagccaggttttgaattgaacctcattggaagttacatgtaaaataagttaaaatctaataaatgaaaatctaaatttctatacaagataaatgatgagaccaggggagaattatttactgaaagatttatttttagagaagattgatcaagtgctgtgag

SEQ ID NO: 34708 - DNA, 1083 bp, Homo sapiens
aggtaaactaccttgttaattttttattattgatcccattttgaaatgctaataatttggatctattgggttagataaaatatacagttaaaattaatttcacttgtttctttctacttttaaaaatgtggctgtgagaaaatttgaaattttatatgtggcttgcattttacttctattgcatagtgctttataaacaatgaaaaacagatttaggaaaaatgtaggtttcaagtatttttgcttatattattatacagctagctttttagattattgttatacagatttttaggctttccgtttcactccatgagaaatatttttcatcatcactttgattagatctgtcttctactaggatttattgatttttaaaaactaatttaaccacattaatttcccaagttacaggaaaaggaaagaactgcttataaatatctttatagccaactattgactctagtaaaatgttcttcaaggttggtaaaaacccaaatacttgttgtactgggtaaatatatttacttttagctgtttaatgaagtgagagaccttgagtcttgtttggcgaagattgaccttttattacggtttcatcagggcctgttgtttgatcgaaaatggtgggggtttttcctgtcttgaattgtttgactggtaattttaattgtgcatataattctggaggcagttagtactcctgaagttaaaattatttgaggagtgtttaaatgggaaaaaaattggcgatgttgtgttctctaggtgacaggttaccatgtaataagagtgacttgtgactttggaaaatagtagcagaaaatattcttggggatgtgtgtaacattctctttgctaacttttagagacatatagtcttgtgtatcagacaaataggtatatattctgtatatgatagagagcttctcttagatgtttgcagggaaacctagagtgataaaggtagaaaatttccttcaagtgagtattgtatttttttgattatacttgttaaaaaatcaataatttgtacactaaaattctgtataaaagaaactaaatttagaatttttgaagatg

SEQ ID NO: 34709 - DNA, 1046 bp, Homo sapiens
taagctctgatcacagattttctttcacatgggactagttatttcagacaagcaatttttttctttctgtatccagtcatccattaagatgagcagtttttgaatgttgttttgtgaagagatgtccagctttttatctggactttttatgaacgttaggcagtatttgtgtcatttgctggtagcatatacatgtgaaagtaaacattgtcctcatgttttagctaaaaatcttggggtatgatgtacctgtctcagatggtgttcagtattatgcattattctatttttttcttagaattgagatgtagggaagaagcttgctttattattgcctgttttatcttttcatactttattgtttgaaatgataggtgaatgggaggaagataagccctttccttcatacaagagaatgagactattaaaaaaagcccacaataagattggcataataaaatcacaaatgtaagagtttcaaaaaagaaaagtgcagctttttcaaattaatatagtactggaaaatccttgacgttaaagtaatgctttcattactctttacgttaggctaaaaccatacttttcaatattgggtcataaatatttttgttttatattaccagtataaggttaaataaaatgtgtgtgtgtgtataatagaattgggcaatacctcattccataaaacagaataagtgttcccaatatttgtgtaatagtttaaaaattctaatctaaaactgtattgattgtctggagattggagcttcttgtgaaaaagtgtcatatgacatgattcagttttaaaaaacctgttaattccaaaagatagaattttttcttcattattgcatactttatcttttcctatcttctgtattctgactttaaaaacaacctttggttctattggcatttttcttgcggcatagcatgtatactgtttaaaagcatggccttgtttacttaactttccttgtgttttagtttacttatatgtaaaatggagacatcgctagtacctgcatcagcagcctttgtgataa

SEQ ID NO: 34710 - DNA, 1069 bp, Homo sapiens
gtccagctaattttttgtatttttcctagagatggggttttaccatattggccaagctggtctcaaactcctgacctgaagtgattggcctgtctcccacaatgctgggattacaggcgtgagccaccacacctggcctagaacttgctttttcattttctgaaatacggacaggctgagaattttacaaatcttcaagttctggtcccttttggctgaccggtttcttcattagttcatctcttccgttttgcatttgactacaagcagtcaggaggactcaggccgcatcttcaagattttgctttgaaatctcctcagctaaatatctgatttcatcattcacaggttccatctttcacaaagcactaggacacaacttggccaagttctgtgccactttataataagaattgtctttcttccaatttccaataatctctttctcatttccatgtaaaaccttaccaggttggcctttaacattcatatttataccaacattctgttcatgatgatatatgtattctctgagatgaaagaggcttcttctctagctcttctcttctcttcatcagctctcattgttattacatttaacgttcatatttctaccagcagttccttcatggcagtctaggctttttctacatgctagaaaatatctagcctctccccagttccaaagtcacttctgtattttaggttttgttttgtttttgtttgtttgtttgttttatagtagtatcccatttcttggtaccaaaatctgtattatacagtcagagttctgtagagaaacagaaccaataggatgtatgtgtgtatacatagagagatttattaccaagaattggtagagctgatgttttagttggagtccaacggcaggaagaaagtgtcccagagatatcccagctctaaggcagtcgggcaggaggaattccctctcattcagcagagggttggcctttgttctttccaggctttcagctgattagatgaggcttaatgccattagggagggcagtctgctttacttagtcaattgatttaaatattaagctca

SEQ ID NO: 34711 - DNA, 1029 bp, Homo sapiens
tctcgttacccttctccacttgtttttgtcaatagcatttgtaattttaatatttacaattggttgtgtattgatgatgtgtttttttctgctaggatgtaaccttcacaaggaggtaattttgtactctggtgtattccagctaccagaacaatggcatgtagctgtttcctggattgccaaggaactcagtaatagcagtgggactggaagagagagattttgggaaggtattgacaggatttcaaaacagtatgaggcttgtgggagaaatttccaagtggcaatattctagtggggtggagatgctcatgagaggatcagcttatggggagtagctgctgtgggagtaaatgagatttctttgagcatgaaatggactggcatgctgggtctgaccttcataaggtaacttaagagactgtagctaaacagtgattttttttttttaataacttgggtataacaaatgagcctagttctccagggaaaacttaattattgtcttctgtgtctactatggataagcacttgtgcactatttttgcaatttttagatgtaggtgtccacatatttttgagacggggtctctgtcacccaggttggagtgcagtggcgtgatcttggttcactgcaacctctgtctcccaggctcaagcagtcctcccacctcagccttctgtgtagctgggaccacaaatacgtgccaccatgcctggctagttttttgtagagagggttttgccacgttgcccaagctggtctcaaactcctggaatcaagcaatccgcccaccttggcctcccgaagtgctggggttacaggtgtgagccaccacacctgagccacattttttgagaaaatatacccagaagtaacataccaagttggtgcacaactaggcagaaagggattcaggggaggcagtcttggggcagagcccatttacaatgccaaacccattcacattcaacagttcttaaaattgaccaggttgttagttgaatacaagtggtcagcatgaacca

SEQ ID NO: 34712 - DNA, 1998 bp, Homo sapiens
cagacgttctttctttgctgcgtctactgcgaggtaaggatgtttctgtgctcgtgggggtactgggaatctgaaaccatctgctctgggaaaggctgcggcgcggctcccactctcggaaccttgtcctgtttgtcccccagctcggcaagcgccatatgagcctggcggcgccagatgcgaatcctgttgtgggctttttggcctattcccgcccctcagtcttgccgggatggcaccgcccgcataggacttccagggttgggctgagtgggagttcgactgctgggcctcgtaattctcgctttggggctgctccttccaggctgggacacactggggcccgctgtcggtctcccgtcctccgacatcttgtctggaacttccgcctggcagtctccagtaggagtggagctctgtgcggcgtagtttggtggaaaaacgggccttgcgtcggcctcacccccagtgtttgtgtttcagaatgaagactattctcagcaatcagactgtcgacattccagaaaatggtatgagacttgatgtcttttacttacatctttactgcacgttccaagcgttgtgtggcctgacgagtgtgttctctcttctagtcgacattactctgaagggacgcacagttatcgtgaagggccccagaggaaccctgcggagggacttcaatcacatcaatgtagaactcagccttcttggaaagaaaaaaaagagggtgagggtttttcttctgataattcagttgctcgttggaaggtggtttataacagcatcacatttggttgctttaacaattttcgaattaaggttcagtgcttcagctttaaatgttgctgtccagaataccagcctgttcagtgaaattgaaaaaccagattctgaacacagccaattatataaagctcaaatgtaatagtggtcatcagtgacacgtcttaatggtgttagaagtttggtttattttcctagtgattgctttgtaaaaatcacaggaaccggcagtaggtcatttaaacctgatgatttaattttccagaagggaagtttgttgcaacttctacaaagcttaactgttgggaggttttataggtggttggatttttccagttgaaaaccatgtgctttgataagggttaattctagaatcttaaagtaattcggtaagtggtctgttgtcttttaagcctgcatatttctggaaagaatacattttttgttctgttacagctccgggttgacaaatggtggggtaacagaaaggaactggctaccgttcggactatttgtagtcatgtacagaacatgatcaagggtgttacactggtaagcagatgtatcagacttccttgttttggaaagggaggtttctcaaacctgtgctttatacagcgtaagtgtctctttcagagaatgggtcatgtattttatttggtgtaatacgcaagaacttggcaaaaataggcatctgtgggtctttaagcgatagagctgagagcaaagaccagatgggtacaacatgtttgtttttttctgttgttgggttttttttttttttaatcaaggctggggtctcgctattttgtccaggctgagctcaagtgatcctcccaccttggcctcccatagtactgggattgcaggcatgagccaccatgcatggctagatgggtacaacttttaaaaagtaggctaatgatgaattttcataccttccgaattctttaagataggaaatctacagttgcagtactagttggtagtcacatctcaccatcaggaccccttgttgggatagaaaaagatgtagtttctgagttttctgtctgctgccataatgtatgtcattattctttccaacccaccgtctctcccctcaagataaaaagttcatgctgaaatggttttctttgcattataccttctagaatgcacctgataatggcaccctgtacatctattataaatctgttaagattcccccat

SEQ ID NO: 34713 - DNA, 1028 bp, Homo sapiens
attatatatatgaaactgaaacaagacgcagtaaggtaattgtaaagagacttgttatacattatgatttttattactttgtgtactgggtgtcccatcaaattccacagatataacagcttagagaagtgggagctagtgcagtgcctagcctaaagtagaaattttgtgggaacctagtccatttgggtgatatatatgccttcaagacaagaaagcaatagaaatgtgcattgttaggacaatgggtggtggttccctccctccagacttctttacttctccagtagcattcattaatctacaatgtacagctcaaatatttgcctcaacaggtaaagctaaaacctgttttcctagttgaaaataattttattgaacctccccatgggaaaacacgtgtttattacatgtgcggcttttgtgactctttaaccagccccgcctataaccaaatatagtcattcctgtgggtaaaatgtcacttcctaactctaaaaagaaaggtgaaactttgaacattcatttaggcatattggcaagtttttctttccccccagttcttttagcagttggtaaaaatcctttctgagagctaggcttttaaatggttaaacagtagtttactgtgagggatagaattatttttcttatattctaaattttctccagtgagcttatacttttttcttaaaataataaaacatattttgtagctatctttatatttagatactactattcaattggatagtattgtgctactattcaattggaaaaagttattttttaaaattaaatatatgttttaggatcgtgggaatttgaggcttcttaagaattgaaataagccttgaagaaatacgttttattctcttctgacttttttaaattggttgctttcgttcatttctgccttttatttctgtagttgtattttgtatatattccattgtcttatttttttactcttccccttttcataggtgttattccattgttttagaacagtgtttaatcattgtgat

SEQ ID NO: 34714 - DNA, 1025 bp, Homo sapiens
ctgggattataggcgtgagcccccacgcctagccttttttttaggattaaaaaattttctctccatgacacaggaggtcctgatgacatgtgccctcttgggtggaaattttagaaaacgttttcaaattatgaaacttatggttatgatattgaatacaaacaaagatgatttaattgaaaagctttcctttgtttgactctttatgatcagttttacccctggaccttgaccaggcacagagagaattcttaggattgtacaagagtaaactgcggccaggaaaggacaggacattagtaggtgagagaccaagattaagaacagaagacttctttcttttctttcccttttatgcagatgagtgataactttggccccagtggaacacacacactccagagcactatacagagaacttgggctaagggttaaagatactttggtcttcaactgaccccaagttttaaaactttttcagtttattaagtactgttacaaattctcacttgatctttgcgcaactgtttaaaatgaatagtttcaattatcactcttgttttatagataaactgaagtcacaacaaggctaagtgatttatctattaatatttctcagtactgccttaagttttttgtctaaggatgttctttctgctgtcccatgatgttttggcaagtgttgtctaaagtgatcctagaataggagtcagatagaggtaaagaaaaaagggtcgccaaggaaagagaaggtaatgtttaagacagtcctttggtctgaatgcttgtgttccccacaattcatatttgaaatcctaacccccagtgtgatagtattaggaggaggtgggcctttgggtagtgattaagtcatgagggtggagccatcatcatgaggagtagtgcccttataaaagagggctcagagagctgcttgccctcttccaccatagtaggacacagtgagaaggcaccatctaccaaccagagagtgggtcctcagcagacactgaatctaccagtgc

SEQ ID NO: 34715 - DNA, 1584 bp, Homo sapiens
tgtaatcccagcactttgggaggccgaggcaggcagaccacgaggtctagagttcaagaccatcctgaccaacatggtgaaacaccgtctctactaaaaatacaaaaaatgagctgggcatggtggcacgcacctgtagtcccagctactcaggaggctgagacaggagtatcgcttgaacccgggaggtggagcttgcagtgagcccagatcacaccactgcactccagcctggcaacagagcgagactccatctcaaataaataaataaataaataaataaataaaaatgtggaatgaattaggcaagttgggctgctaatgccttgccactgaattgaacagccacagacaaaccagaatgcacttctcagggcaaaagaacaaatattgatgaagtcaatcccaacatgctcattccttttccctaatctcatctattagatgagttcctccttctcccaaagaggagtaggtgagaggaggtgagaaagaggccatgtcccactctcctgtgcttccagggatcagaatttccctccctattagggaaatgcgtttaaaaaaaaaaaaaaaacacgccagtttggttgggatgtttttagtatgctaaaacgtttatgtttacccagctcatgagtcagaagttattttgctgcttataaattcattttgccatagtatgataaatagcttttaatgttgtaagcaaatagggcattggatagcagcactaagtcattgaaaacaaaaacttctttattggtgtttggtttttatatagtttagggaaaggctctttaaaccaagtttcaggtgaaaaaatgaaaaaactttttaaggattttagataacatgccaagcacagtgactcatgcctgtaatcccagtagtgaatctgagaagcgcaggcttcccagatcgcttgagctcaggagttgaagaccagcctgggcaacataatgagatcccgtctgtacaaataatttaaaaattagccagccatggtggtgtgcgcctatagttctagctatttgggaggctcaggctggacgctgagcctggaggaccacttgaacccaggagttggggctgagtgagccatgatcgtgccactgtacttcagcctgagtgacagagtgagatcctgatgcttaagtttaaaaaaaaaaaaaaagattttagataacaactatggaaatgaaatcattttcgtttggtttatatcttctccacatcttttctaactttgcgttctattcttaaccctaaggtaaaaatgcatttgcaaagggagaaaatgaaggccaaacagaagcaggctccagcttctgcaaaaacttggattcacaaatgtccctgaacagaaaatgaagctcacttcagaacacacactctctgccttgaaaactaaagagactattacttccttttcacatgaccacaagtcctctgatggaaatgtacagcagaaactcttgagagagaggctaaaagcaactctgttctcccccttcccctagacttttcttacgaaaagtcaataattaagcaaattgcttaacacttggttccagttcctgc

SEQ ID NO: 34716 - DNA, 1585 bp, Homo sapiens
tttagcttgattcctacctatagggtttatttactggttcaaggatactttattccaccaaaacagagagaggaagatatgcaaaattctcctggcctcagttttagctgggagctgatgctaaaggttttaacttgtaaaggtaacgttagaatttttagatcggatttttgtggtaaatgtattccctcagctatttgcatgtatgtgggtttcagtaagtattcctgtttatgttttgggctgcatttagacttgttattccttttgcaaaaattccttgagttcacccaataaaaccagtaaaaatcagccatttgcagtgtggtcaggaaacagtcaacagtattagctggacattagtgttgggtctctgagtttcggatgaaggaatgatcatttcagtagtttagttcacttgtttttcctctttgtgttaaggctatcattcagagggcaaacagttcccggtgttgtgaattgaaaatatgttctgaatagatttgctgattgttgagtatgttttgcttacacttaaggccaaattcttccttgaagatgagcttgtcaataaacatcaatggaaaaataaccccaaatttgtgacttctggggaatttgaatttaaagagaatatctgtaggataacagactgtgggtttctagtcgttggattaacatgttttgtttagcatgcttagtgtgggagtgttcaaggatcttagaatttgtttttcttaaagcaaagaattgactgagtttttgtgctcatttgtataatgagaaggtttcctcccatcatgtgggttcgtatctcaaaattaacccctaagtatatatcctcaaatgtgtatcctcatgtgttaaacagctatatattagttcaatatgaattttttttagtaacaagtgaatttttctcaaaataacatgaaatttttcagaagccaagtgcttgcagtgatggcagttcatcttggtacatagaatcaagtccaggagctcttccagtgacctgggtctttcagaagtctgtgagagcagcccaagaaatacagaggactcagggctaggaaagggaagcttcctgaaggtgtagcaggcagcttgtaaataattctttggccgggtccagtggttcatgcctgtaatctcagcactttggaggccaaagcaggctgatcactaggtcaggagttcaagaccagcctggccaacatagtgaaaccccatctctactaaaaatacaaaaattagctgcgcgtgggggcgcaacctatagtcccagctactcaagaggccgaggcaggagaatcgcttgaacctgggaggtggaggttgtggtgagccgagatcatgccaagcactccagcctgggcaacagagcaagactctgcctcaaaaaaaaaaaaattctttaatagcatattgttaaaattgcttcaaatagtataacaaattaatagtctctgtatgaattgtaataatcacttagctcttttagcattgttacctttataaaatatgtatgtagtaaaggagtttgggaatatatctttctttctcttttaggtgtaaaattgtg

SEQ ID NO: 34717 - DNA, 1618 bp, Homo sapiens
tcttttctaatagagatcattaatatttaaggaatttgtgtttatagaattgttttgtgcttttttaggaaattaattctgatcaggctacccagggcaacatcagcagtgaccgaggaaagaaaagaacagtaacagcagctggtgcagagaatatccaacaaaaaacagatgagaaagtagatgaatcgggacctcccgccccttccaaacccaggagaggacgtcgacccaagtctgaatctcagggcaatgctaccaaaaatgatgatctaaataaacctattaacaagggaaggaagagagctgcagtgggtcaggagagccctgggggtttggaagcaggtaatgccaaagcacccaaactgcaagatttagccaaaaaggcagcaccagcagaaagacaaattgacttacaaaggtaatgtacgccattcttcctcaagtgggaatttagacattttgttttattcgtagtatattcttagtgccagtcaccccaaacacctaagcatttgagagagaaacctgcatctggttttcctgggtccgtttataatagcatctgttattatctcataacttccagttttaaggcacaaatttgaagaaaaatcttttttctttgtgtaatttttatttaggatatggtattttgatatttctatttttattaacaagacaaatatttcttttgcttagtgcctttcaagtggttgcagaggtttacataaaataagggctaccttttggatacaaggtcccagaaatggagaaaacagtcacgaaatgtcaataggtaataggtcccactctttaattcttcgtgttatagttaattctaacacaggtcaacaacttacatcttccccaccctgcccagaaaaacaacttaccaaactgttcatctttgatcattcttgtgctgagatttcagacttttcctgttggaaatctagaaggtggctcctttcaccttggccttagaacttaactcatcctccttttttccttacatacctaactcatttacccctgaattagactgtaggcatttgagtttcttctagggaagagtcccagatttgatcagctcaggatacccccactatcctgcttcagtatttttataaaactcaatgtcaggccatgctcagtggctcatgcctgtaatcccaacactttgggaggcctaggtgggtggatcacctgaggtcaggagttcaagaccagcctgaccaacatggtgaaaccccatctctactaaaaaaaaaaaaaaaaaaaaaaggaaatgcaaaaagttagccaggtgtggtggtgcatgcctgtaatcccagctactcaggaggctgaggcaggagaatgacttgaacccaggaggcagaggttgcagtgagccaagattgcgacactgcactccagcctgggtgacagaaggagactgtgtctcaaaaaaaaaaaaaaaagttactgaagcatgtgtgtaaaaacatttaaaatattatcatttatgagctgggcccagtgactctcgcctgtaatcccaacactttgggaggccacggcgggtagatcacgtgaggtcaggagtttgagaccaacgtggccaacatggtga

SEQ ID NO: 34718 - DNA, 1029 bp, Homo sapiens
gtctcttaaaatatatatatatatatatatatatatataaaaataggataagtttacattgttctaacattttctaattataaaaatattccatgtttattttaacatgttaagtattcagtatattagctactgcataagaatttctacctgcaatttttttcataaacatacttattttgatatataataattgtacatatttatggggtgtttgtgatattttggtatatgcatagcatgtatagtgatcaaatcagggtaattaggatatccgtcacatcaaacctttatcatttctgaccctactcttaggaacacttaatattgtggtttttatagatattattcttacacatgaaatcttaagaataaactcaaccaatgatgttttaaaccacttttagcaaaaatgaagcccaagatatgaaatcagttaacatggtttaaagaatagtggggcctcaaatacctaccaaatagcctcttctgacagccccctttttagtagaacactatggaaatgacaactatactatggtctgtagttttatttttgttttaggattttctattcccaaaagataaagcttacagtggttgtgttattttgtctcttgacaattaacccttttgtcaagtagtcttaggcagtcatttctgtcttaatgttattaaggcaaaatggaaattgataccactttatcaaagctaaatggaaaatgatatttttaaagcaatagtctataactacagagtatccgaatcttgctattgttgcttcaattgtcaaggtttcgaaaccagcctaagcctttctttattggtacggtgagagagtgaactttctcttcatggaaatatgaagtcttggtttatttgttttaaacagggaacagagttcagaggcagcagaaactggagttagtgaaaatgaagagaaccctgtgaggattatttcagtcacacctgtaaagaatattgacccagtaaagaataaggtaaattttaaaatttaacaagtggatt

SEQ ID NO: 34719 - DNA, 1049 bp, Homo sapiens
tgtgccttgcttttgatagaaataatgagaatttgcaaaagtatgctctctaattgaatccactgatctgtataaaaaaaattttttttttttgagtctccgtcacccacgctggagtgcagtggcttgatcttggctcactgcagcctccaactccctggctcaatcagttctcctacctcagcctctcaagtagctgtgactacaggcatgtgtcaccatgcctggctaattttttaacttttttgtagacaggtggtttcatcatgttggccaggcctcaaactcctgggctcaagtgatcaacccacctccagcatcccaaagtgctgggattgcatgagccaccatgcccagcctataagatattcttaagtgagctgttgaattaaaattaatcctgttgctgacccaggaccatcatgaatagaatagtaccaaatagaatctatgtaacagtggtgataccatcatcaagaattaaattcctacttgtcactacaccttatctggactcatagataacaattttttttttcttttgttaccttcagtgttacagagttttagtcttcttaataataacaacttaggtttttctgttttcagtatgcaacgttccttatttatgtaacatgttgcttttaatgtgttataaattcataaaccctagaacactaggtttgtgaagttagtcaacctagtgaagctatactatatctttatgaatgaagtgaatgaactttggtacacaggtttcttaatgtttattttagctgcatagaagactttgtgcaaaagaaatgatacagctttgcctagcacacatgacaaaactgtgatttcctcacaggcacactttgttctttcctacttctgtgaaggtaaatttaatacaataaaaaatattttttaataggattatttaaaacttaattatatttcctgagtttagtagctagttttgcttcactgacacaacattgtggtttgtttgccattttcagatattaagcaggaaaaggcatcaagagatcaagtttgaactc

SEQ ID NO: 34720 - DNA, 1666 bp, Homo sapiens
ctcgatctcctgacctcttgatctgcccacctcggcctcccaaagtgctaggattacaggcatgagccaccgcgcccagcctcgaatttctgggttcaggcaatctacccaccttagccacccaaagtgctgaggttataggcacgagccaccatatccagctagggtgaatctttatatgccttatgaaactgtcagactttctcatattaagctatgttttcattttttatatgttattttatgctttaattttccatttgaatagaatattattaggataataacatatattagtcattaaggttgatcattttattttattttattcagacaacagaaattcccagctaacatatttattgctttaagctaaagcatctatctacgtctagtctctttaatatgtttacatttaggtgcctatggttcatgcttgaagttttaatgacaaagaatgaaaacaatagccatgcctttatgaagaagatggcagagaacatcaagttaaccagagatgcccagtctccagatgaatccaagacaaatgaagtaagatgagtgttaggccagtgggtgttaagatgtaatagaaaaatatattgtcccacttggttttttttttttttttttggccatacgtagtaatttaaattttagaatgtttacaaaagtaaatgtgtagtcagtttttattgcacttcattacaagtgaattttatttcaggaatctttagtactctgaaaagacattataaccttagagcaagaggataagaataaaatgtacaactatggtatattacgaacttacagtaagagttacagacaaatgcttattctttttgtgtgctttctttgggttggttcatttgtttgttattttccatgcatattggcatccatgttaaattcatatagagggatttttatttatcagaaggctgcataaacagtgctgaacagaaatatggaatgttcaaggaataaataacaaccacagtatccttcttttaactctaaattatacatttagtggaattggtaattatgattattttgcaatactaaaagttatatatgattcgttttcctccctagaaactgtatacagtatgtgatgtggctctctgtgttataaatagtaaaagtgctttgtgcaatgcagattcaccaaaggacccagtcctcccaatgaaattttttacacaacctgaaaaggtaattttcttcctctcatttttcctaccacactaaactgatttcaatgtcaattaccatcaaccattgtggcaaatattgaattgtcttgaccacagagtaaagaaaaaatctgggtttatcaaagagtgggaaattgtcttacacagccctgaacattattctgacttgaacagaagactacacatactgttgatcttatgtttattctaggaatttctagtattaaagttttcagatttttaaaattattttaatctcattttattgaaacatgggtagtatttttgcagataagaaaaattttaaatctttggcacagtgtaaggagggacaggttctctcctctaagcctccatttcttcatctttataatgcagatgttaataatacatatggacaattgctaatatctaggtttatatgaagagtttatcacataaaa

SEQ ID NO: 34721 - DNA, 1048 bp, Homo sapiens
cctcctcagggttaattcctaattctttcttcttccctgtgaattagtcatatttgcctgattctttatgtgatttgtagtttttcgttaggaattggacattttaagtactataatgtgataactctaaaaatctggttcttcctctctttctagattgcttttggttcttgtagggcgcagtccaccattctgacttttccaaactactttcacaaagtctgtattccttgttttgtgtagaccttgaagttatagttctgttatctttatggtcagcctgtgaccctgacatagattcccttcactgttgaggttcatcccctcttcctccatcagaccaggtgtttacccctggttgctgggtcccatgaggttccagagttctgcacaggtgattatgattgtttttttccagcttaatagttgttttgttgttgcaattgatatctgaaatttcttactctgccatttttctgacatcagtaataatgtatttgaatttgaaaaatcgtacttaaatatagcctttaatgtttaataattacctttctcctttattgatattcagtaagaaaaaattgaaaatgaattcattaagaagaaaacaattattcgtaattataccccctaaaagcccttcattgctgttaacaatttggtctgtatctttcaacactttttcttcttcatatgttcatatttccttaacaaatatttatagagtactttcaatgtgccaggtacgctaagttcttgggttgtgaggttatgtaatatgaatatcatatatattcccttaaggtttacaatctaatggaagatgaagaaagataaagaggtggttacaatatgatatgtgatatatgctctgctattgtgggagtacctagaataggcacataactcacacttgcagggagtcagaagttaaaaagaggaggaagaaaaaaataatctgtagagcagaacttctaatagtgtagacttcagacataccactactggaaagaacagagaatcagaaaacgacctggaggaagaatat

SEQ ID NO: 34722 - DNA, 1061 bp, Homo sapiens
ggtggaggttgcaatgagccgaggtcacaccattgcactccagcctgggcaataagagtgaaactgcatcttaaaaaaaagaaaattttactgcattttcttccatgacttatagtttttagctctttagttaagatctttgatccattgtaaattaattgttgcatgtggtataaggtaaacattcagattcattcttttgtttgtgaatatccagtttttccagtaccatttttgaagagactgttctttccccagagattggttttggcacccttgtcaaaaatcaactgaccatatatgcaagggcttacttctgggctctcaatcctatttaatttgtctgtatgtctggccttatgccatgtaactctgtcattactgtaactttataataagtttcagaattgagaagtctgatttctgttctttttcaagattgttttggcttttgatatttcctgtgaattttaggttgcatttatctatatttctaaaaaattccattgtacttttgataggaatgggactgaatctgtatattgccttgggtgatattgttatcttaccagtattaagtcttctaatctattagcacaggatgtctttgcatttatttagacctttaattttttattttatttatgtattcatttatttatttttccagcactgttctgtagttttctgggtataggtcttcgtcttccttggttaaatttatttctaaacattttattcttggccaggcatggtggctcacacctgtaatctcagcaactttgggaggccggggcgggagaattgcttgggcccaggaatttgagaccagcctggcagcatagtgagactctgtctctatttttaaaaattaaaaagaaaaaagaaaatgggttattggtgtctccagttcttattaaggcactcactatttctcccttcagttctgtccattttttgcttcatagattgggggactttcttgtttgttttgtatatatttattacagtcacattttcttgctggattgaccttttatcactacagtctttgtggtctc

SEQ ID NO: 34723 - DNA, 1061 bp, Homo sapiens
ttgtattttttgtagagatggggtctcactgtgttgcccaggctggtctcaaactcgtggactcaagcgaccctcctgcctcagcttcctgaagtgctaggattacaggcgtgagccactgtgcctggccttcactctttcagtgcccacatatgagtgagaccatgcgatatttgtctctgggcttggcttatttcactgagcataatgacttcaagttctgttcattttgctgaaaatgacagaatttcattcttttttatggatgagtaatttttcattgtatgtgtgtatatcctccattttcctaattaatttatctgttgagggacacttaggttgattccatatcttggctgttgtaaatagtgctacagtaaacatggaaatgcatccatctcttagatctactaatttcctttctttttttcctttttttcctttttttttttgagacaagtgtcttactctgttgccctggctggagtgcagtggaatgatctcaactcactgtaacctttgcctccccacttaaagctattctcatgcctcagcctcccaaggagttagcactacagacgtgtaccaccacaaccagctaatttttgtatttttagtagagaccagttttcaccatgttgcccaggctggtctcccaactactggcctcaagtgatccacccgcctgggccttccgaagtgctgggattgcaggcatgagccactgtgcccggccaagatgtactgaattcctttattttggatatatatccagcagtgagattgctggattatatggcagatctgtttttgtttttttgagaaacctttttttttctctctctttatagagatgcgatcttgttatgttgcccaggctagtcttgaactcctgggctcaagcaatcctcccaccttggtctcccaaatttctgggattacaggcatgagccaccacacccagcctgaggaaccatcatactgttttccatagtagcttcaacatggtgtccccactgattggagcagtgagtagtcaccagagtttaagcacagtcagt

SEQ ID NO: 34724 - DNA, 1042 bp, Homo sapiens
aatcctatggctactggtaagtaactcagagttctccgtgtgcaaatatattttgtcaatgtatccatttttaggttttttttttcttgtcatgtgtttctattatagtttataataaaactgggagttttatagaatgctgtcattgtagttatgatgtacttaaaaactgaactcctgagtcctatttatgctgcattaactctggcaaactgcatttttcctatgggatcaggagtgtagtttaatttgaacatattgctcggatgtcagactaaataattttttcctagctttgccagggacctgttgtttaatgggtttaatatctgatacctttgacttcagtatctttcaaaagtgaaatacaactgcataccaggtaccagaaaaagaaattgaaaagtgaagtgtaaagtattttagtatccaggtatcatgttgtgcctaatttagaaataactgagggaaaaaatgaaaacttaagtggttagaactcagtccactaaggcattttataaaggttgtttttaataatgtttttacttcagagaaattattatcactgttgcctgaatatgtagttccatacatgattcacctgctagcccatgatccagattttacaagatcacaagatgttgatcagcttcgtgatatcaaagagtaagtcttgttgtttttcaagaactctaaaaattatgtttagttttcaaaaaatggtaaattttttgtttattatttttatttattatttacattagaattagaatctccttatggttttattcatttattataaatttccagtttcgtctttcaaaaattttcccatctaccaggttttggttgttcattttctgtttgtttgcagctagttaagctatctaagtctttgaaataggttagtttggttatcttagttattatatttgatttttactatttatattgagagggtttgaatatgggaagagtactgaagtatgtgaaataattggagttggaactgaaaacagtggagcatattttttattctttg

SEQ ID NO: 34725 - DNA, 1056 bp, Homo sapiens
agctactggggaggctaaggcatgaaaatcacttgaacccaggaggtggaggttgcagtgtgccaagatcacgccattgtactccagctttggctagttatgtggtactgctatgctattaatttttttaaaaattattgtgattaggaatgggatctcactatgttgcccaggctagctgggctcaagcaatcctcctgcctcagcctcctgagtagtgggactataggtgtgcaccactacgctctatttttatcatagaataagccaaaggcagccttttataacactgtttagagctgagttagggataatgaaagctttaaattgggggtaattatgtacagtacatggcaaaggcataataatgagctcttacaagtcagtgatacctaggcaggacccccagtggagatgaagtttagctattatcagtttacttttaaaagtttaacatcactaaatgcagtcaatacaatttaaacttaatcaatacctcttttcattacaaatcagaaagaaaaaaaaacgttataagcaatcattcctcagtatgatcatggaaatgggttccttcattactcctatgagtataaattagcaggactctttggcattttgcatctagatcctcaaaaatgttatccttgactctttatttttacactcataattcatgagtataaaagaatcatatgaaagcttatacacaagcatgttcctccagcattattttccatcacaaaaaataggggaatggttaaccatagaatgaacacccattggacagatcctaactggatatcatataatatagtattaccttttgtaagcctcaatttcctcatcttatggagtgaaaattaattgagataaagcctataaagtgtttttcacacctgcctggcacggagtaagcactcacataatagctattaactttgattcctgaatgaatgccatagaaaccatttgaggctccctcattgttaccagtgctcattttaacaatcctgttgtccaagagtgccaggttttcttctctctatgcttagc

SEQ ID NO: 34726 - DNA, 1074 bp, Homo sapiens
atacctgtgtaacaaacctgcacattgtgcacatgtatcccataacttaaagcattaaaaaaaaaaaaagattataacggaactgaaggattcctatcacctagtgacatcttggtgatcctgacctggcgtaggcctaggctattgtatgtggttgtatcttagttttgcacaaaaaaaagttttaaaactttctttttttttttttaaacagggttttgctctgtcacccagactggagttcagtgatgttatcatggcccactgcatcctcagcctcctgggttcacgtgatcctctcccttcaatctcctgagtagctgggactataggcacatgccaccatgcccagctaattttttattttttgtagagacagggtttctccatgttgtccaagctggtctggaactcctgagctgaagaaacctacctgcctcagccccacaaaatattgggattacaggtgtgagccaccacatgcagccaaaaaaatttttaataggaagaagctagtagaataaggatataaggaaagaaaccattttgtgtacagctgtacacaaaatgtgttttaagctaagtgttactacaaaagagtcaaaaagctaaaaaaaaaaaaaaaaaagatcagtacattggctcacacctgtaatctcagcactttgggaggcctaggcaggaggatcacttgaagccaggaatttgagaccaacctgggcaatatatcaaaacccccgcctctacaaaacattaaagaaaactagctgcacatggtggcgcacacctgtagtcctgactactccagaggccaagatgggaggatcacttgagcccaggattttaagcctacagtgagctatggtcacaccactgcattccagcctgggtgacagaacaagatcctgtctccaaaaatttttttaaaagctaaaaaaaaaaaaaaccgggccaggtgtggtggctcacacctgtaatcccagcactttgggaggccgaggttggcagatcatgaggtcgggagatcgagaccatcctggctaacacggtgagaccccgtctctactaaaaata

SEQ ID NO: 34727 - DNA, 1943 bp, Homo sapiens
taaatgaatggacatgactatattccatcgaaactactaacaaaaacaggtagctcatgggggcatagttttctaacttttgaactaaattattcaaatttagtataaatgaaaactaataagtaatgttttatgggatacaggaaagggaagtacgttttagaaaggaggttttcctgaaggtatttaagtaacgggccacaaagtagctaacagaactctattgcagaaaaaaaagtttcttctctatatttttagttaattttttgtggcatgtagtttcatagtaattctgatatgataagtttatatgttgattgcttcattgatcttttttcaatcttctggcaatgtaactttcctgtgaaagttatatacttgtgggtttttaagtaccttcctcccaacatctcctttccttctatttgtcttaatagttgctactatgtaattctttgttgttagtttagcgtatatatgtggtaaaaccattttccattgagcagactgtgatgaactttattttttaacgtcatgaaaaatgtacagtaatgagtattgatttttgttagggaaatttgttaacacatatgactagttgttcttttgtttctgttttaaatttcagtcagaggctaactgttctgccatgtttggaaaactgatgaccatagcaagtgagtatgtttatttactcactaaacatgtagtaaacgtaaatgcagacaaagtatttacccagtgggactactgatttaatgttaagtaaaagaaaataatctttatcttaattttgtttctaagaaccagctaggctgattttcttttagtggctccgcaatattttgatggcacctgtttttagcttagtagaatagttttttttttttccttctctaatattgattctcttttaattttatagagaatttgcctgaccccgggaaagcacaagattttgtgaagaaatttaaccaggttctcggcgatgatgagaaacttcggtctcagttggagttattaattagcccaacctgttcttgcaaacaagcagatatttgtgtggttagtaaatcatacttcacactttttctctagctttacttacagaaatatgtattttattaaagcctgttttacatacagtgatttgtgtaaatgtaacaatattgtgagctctgaattactttggagtatatctattgtcaagttaattctctatttaccattcactctcagccacattccaggaaaataactaaagaactaagccagggagattggtcttaggaattttacaagataaagtactttgaacttagtagacattcattgagtaatgataagtattttctgaatgcttgtgtacatgtgcattttcttctttcatgtattagaatggaaataatcgtcaataaattagtagtagtaacattgccatatatctggtttcatttacagataaagtaaattcctatctagacttttgtcttcattcttctcttgaactcatttaaaaccaatattcttaaagctatcaggagggaaaacttatgcattcatttattcagctttttttttttttttcctgagatagtcttgcttttgtcacccaggctggagttcagtggcacaatcatagttcactacagcgttaaagtcctgtgctcatgtgatcctataccccagccttctgaatagctagaactattggcacacgcatccacacccagctaagtttttaaattttttggaggccatgcacattggctcacacctgtaatcccagcaccttgggagtccaaggcgtgtggatcacctgaggttgggagttcgagaccagcctagccaacttggtgaaaccccatctctactaaaaatacagaaatttgccaggtgtggtggtacatgcctgtaatctgagctactcaagaggctgagac

SEQ ID NO: 34728 - DNA, 1048 bp, Homo sapiens
tttaattaaactaacttctctggcatcactggatatgtatttcatttgttaattaagagatcttgtatattcttaatccagtgatattaaataatagaagcaagaagatacaagcaataggtactagcaagaaggatattccaatattggtaaggaatttagatcatggagagaacaataatcagatgtacacaggaaaaactacattttctggaagtaatatgaaggggggtccccctgtttttaactatgtgacaacatggaaaatgggctgaactgtaatcagaggaaattaatgagtttcttgagaattagctctaccgcggatcatagctttatatgttgcgttaatgaatttgcttttgttctagactgctgaagaagaataggcggaacagcctagcaccctgtgtttaggaataacatttaaaccttctagaacaaatgtttcatactgacaaattataaagccacagacagtaaccgtgtctctaaagttaaactgtactgaaagctttccaagaaggaagtcattataaactgatatcttccattgtatgtgcacacatagctattatcttgatatggtatcctggcataagatggttaaaacttaaaatgttggctgggtgtggtgcctcatgcccgtcgtaatcccagcacttcaggacgctaaggcaggcggattgcctgagctcaggagttccagatcagccttggcaacatagggacaccttgtctctacaaaaaatataaaaattagctgggcatggtggcacgcgcctgtagtcctagctactggagaggctgaggtgggagaatcgcttgaacctgcgagacagaggttgcattgagccgagtttgcaccactgtactccagcctgggtgacagagcaagaccctgtctccaaaaaaaaaaaaaaaaattgcttcttaaaaatggaataattgtgtcacttaggttttttttgttgttgttatttcctagactgttggtagagaaaatctttgctcagtatcttgtcccccacaacctggaaacagaaga

SEQ ID NO: 34729 - DNA, 1050 bp, Homo sapiens
atgactttttattatgaagtgtaaaactcattaaagcatgaaatgaaatagcaattttaaggagcctgaagaaggctcctttaataataaaatataaaagaagcatagttaatgatgttgccaaatatcaaatgaatgttattgtccatatggggccaggaactatctgggctagatttaaaatgaataataagaggcttaagttcctcataaatgaggtactagtgcagacaatgtgcctgagaaggtgatacttgtttatgggttttttagactagccgtttcatgcttgtgatcttttctgaaattcttaaatgaagatttataaaaagttgactgtgaactgtctggtggccaccgattgctaatggagatgacttttttttttttaaatcacatcctccactgatttctaaattccaggagttaattattttgtgtttttgtacatttttacagatggtagtgaaaacctttatggatatggatcaggactcagaagatgaaaaacagcagtatctcccactagccttgcatcttgcatctgaattcttcctcaggaaccccaataaagatgtgcgtctccttgtagcatgttgtttggctgatatctttcgtatctatgccccagaagctccatatacttcccatgataaacttaaggtaaatacagcctttttcactttattgtatttttcattcaccactgttcagaaggtatacttttatttttatattttacctttatgaacataggtttcatattagtctcttcatcttaagaatatattgtaagttgcaaaattattcattcagttagtatttccacaaatgactgggttgcttggttgtttgatttgaagcatagaaaggtatagttcaaaactagtccctgtatgctcaaatccaattttctggctaattcatcacaaaagcccagatagctatgttccagggataaatagcagattaatgatactttttaaaataatagcataccagaatttacatattcatatgactattttcccctataagttattcagcatg

SEQ ID NO: 34730 - DNA, 1048 bp, Homo sapiens
tagttctcttccacgtagtctatgtggtatacacagcctctgttttttgaatagtctgggattcctaatagcatggtgggtacattcccataggggcattgcaatctcaacgtacaaatgcttatcaggcctgttcttgcatcaggcttgctaatgtctgtttggccaaaataagtcacatggactgggcatggaggctcatgcctgtaatcccagcatttggggaggctgaggcaggtggatcatctgaggtcaggagttgaagaccaacccagccaacgtggtgaaatcctgtctctactaaaaatacaaaacttagccagacttggtggcgagtgcctgtagttcccagctacttgggaggctgaggcagaagaatcccttgaacctgggaggcagagattgcagtgagccaagatcatgccactgcagtttagcctgggcgacagagcaagactctgtcttaaaaaaaaaaaaaaaaaagtcacctgaccaaatccagagtcattgtggaagaagactatataaggtatacatatgagaaggcattgtatcatagcctccaagatagctctgaatgatccttatttccttgtatttactcccttgtatagtcccctgcaacactgaacggggctgtcctgagtaacggaacaggctgtggtagaagtgacaatgtatgcttttcaaggttaggtcgtaaaagactgccacttcatatttgctctcttggatcttgcaccaggggaaaaccaactgccttttcacttgagctgtctagaaaggcccatgtagtgtggaactgaagcctttcaacaacagcaagtgtcaacttagaaccgtaagaatgagttaccttcaaaacacaccctccacgcccagtcaagccttcagataactgcagccttgaccaggtacagcctcttgagagattccaggcccacacgacttagctaagccactttccaattcttcaaccacatatgataaatacatgttattgttttaaggcactgagttttggggtattttgttacatagcaataat

SEQ ID NO: 34731 - DNA, 1046 bp, Homo sapiens
cagcacattaaaaatgtgcacagtaacgacatatttaaaaaagggaagaatgaatggaatttcatttctgttcctgtgtggtaaagcaaaatctagtggcttaaaatgaataattgtttctttcaattctgtgaatagactttgtggtccttcttttccatgtggtgccttctggggtcactggttttttttttaaacagtttattttaatttaataacaatctgggaagtctgcatcagcggttctagtgcaatatcaagtgcaattgggaattcagaaatttcagtggaactgttagtttagtgaatctcgtaggtaaaaatatatgcatgctttaacttttattttatttttctagaggtagcattttgttctgtcaccaggctggagtgcattggcatgatcatagctcactgcagcctagaacttctgggctcaagcagtcatcttgtctcagcctcccaagtagctgagattgtaagtgcaagccaccattcttgacaatacatacatacttttgatagcacacatgaacagacctctctaaaattgctctcaatgagttcattctcagcaaactgatctgggtcattcaacatggttttggttttggttttggttttgagacggagttttgcttttgtcacccaggctggagtgcaatggcacgatcttggcttactgcaatctctgcctcctggattcaagcgttactcctgccccatcctcccgagtagctgggactacaggcacctgccaccatgcccggctaatttttgtatttttgattgaggcagggtttcaccatgttggtcaggatggtctcgaactcctgacctcatgtgatccacgctcctcagcctcccaaagtgctgggattataagcatgagccactgtgcttggcttcagcatggccttttgattgttcctcatgttagtgcatgttctctctttttttttgaaatggagtcttgctcctgtagcccaggctggagtgcagtggcgtgatctcagctcactgcaacctccgcctcctaggttcaa

SEQ ID NO: 34732 - DNA, 1028 bp, Homo sapiens
agaatatatgacagctgaaaacacataaggaaaaaagaaaagagatttggagaggcacgtcaccaagaaaacgtagagtaggtggcaaatacgtgaaaagatgcttaattttgagttaatttgtctcaaaaaaatatttatagagtgctggaatgtggtaaatattcagtaaatgttaatcattattaatagtattggtgttagtgtttcttttttatcaatattataaaaacctagctgtgggcaaaaaaacttagtttgattttttcctgctcatttcttaaaaaaaaaaaaaaaaagaaaaaaaaagaaatactaagaccgcaatagataaatagccagagggtattaaaacacaatccacaggaaaaaattcacacagacttaccaagaaattgtttaattctcataagtgtatgataaattagatgaggtaagaagagattagtctacaaagagccaatagcatttaaaaaggcctgaatggcacaggggattctgacatgttgaaggatctgagagaaaatcagagtcatgtttcaaacaccagtcaagctttagttatgttattttaagcagacagggaacttgctatttaaaaagtgatttggaattgctggaagagcacccttaattcaggcttacaggactagactccgagaacacttcgtatagctggcccacaaggagagctgaatcctgtgctctaatcagaaaggtgggaaaatcaggaagccaccctggagctcttaagtagggacacacgtttagccgtaatccagtgattaggaagtcaccattggtataatttggtacagagcctcacacagtttaatagattagtaccagcacaaaatggatgcttcttccctctatcttcacaatactaacagccagttagtagaaagctgctgtgtatgtgcctgcccgcacacacatacacacaacagctcactccatacttgccagctgacaacagcagaaactacaccaccacctcttctgaactttcaccttccaaatcttga

SEQ ID NO: 34733 - DNA, 1030 bp, Homo sapiens
tagttttcaccttgaatgcatattaaataaataaaagggctatgttacaaataatagtacgaaataggaaaggaagctgcaaagaagcacgtattggcaaataggttgttcattctcaatcttagccagcagtccatgtatatgctcagtgagtaaactgccattttaatataaaagttagatggcctgtttaattcagaactcactttgtctttacacctgacaggttgatttttgttgctcaaagattggtatacatgtaaagttttctgggataatagtttcattaattcaagaaatactgagtacttactctgtatgaggcacattttttgtagactctaggactacacaaatttttaaatctattgccttcacagaacttaaaagtctagtgcaggaaagacagaataagcaagtaaaatgtaagaaaaattggagaaaagtaaaactacgaagagaaagtgcttttacagcatatgagttaaaatggtgtccttgcaagtattagattggcaatcctgaaacctgggttttagttttcagttctagacctaccattaactcattatgtttcttcagttaatatctctaggctgagcatagtggctcatgcctgtaattccaggactttgggaggccaagacgggtggattgcttgagcctagaagtttgagtcagcctgggcaacatgatgaaatcctgtctctgcaaaaataaaaacaaacaacaagaccccaaaatttagccaggcatagtggcacatgcctgtagactcagcttctcaggaggctgaagtgggaggatcatttgagccctggaggtggaggctgcagtgagcgcctctgcgctccagcctgggtgacaaagcaagaccctgtctccaaaaaattaaaataaaaatctgtaggtctgtttcttcctctctttctctcctgttcctcctcgtctcttctttatttttatgtgaaggaattcacatttctgaagcccctacattatctaaaaggtggttagattaactgcttta

SEQ ID NO: 34734 - DNA, 1052 bp, Homo sapiens
agccactctgcctggctaggacttttcaaactaaggagtttgtgtcttagagatggtaacataggtacagtacttagaattttggagtcaacaggtagttcagaggttatgtatttctgttctaatttttcaggtgaagaaactgaccatttgataggttgtgaacaacgctagtcacctaaagctgaaaagtgtcattaacttctgctacttagataatagaagttacaattatatattaattgacaaatattaaaaccatactaaagttagctatgtggaaggatggccaatagtttagtatcattgttacattaagaatcacaaatagctggcacggtggcttacgcctgtaatcccagcactttgggatgcctaggcgggcggatcacctgaggtcaggagttcaagaccagcctgaccaacatggagaaaccccgtttctactaaaaatataaaattagttgggtgtggtggcacatgcctgtaatcccagctactcaggaggctggggcagtagaatcccttgaacctgggaggcagaggttgcagtgagccgagatcacgccactgcactccagcctgggggacagggcaagactctgtcacgagaaaaaaaaaaagtaaaagcatacactgagcaagtgattttttaaaaaattcatattacaggccgggcacagtggctcatgcatgtaatcccagcactttggaaggccgaggtgggtgaatcacctgaggtcgggagttcgagaccagcctgaccaacgtggagaaaccctgtctctactaaaaatataaaattagccgggtgtggtggcgcatgcctgtaatctcagctactcaggaggctgaggcaggagaatcgcttgaacccaggaggcggaggttgtggtgagccgacatggtgccattgcactccagcctgggcaacaacagtgaaactctgtctcaaaaaaaaaaaaaaaattaatattataattaagtaatctaagcaccattgcactccagcctgggcaacaagagcgaaactccatctcaaaaaaaaaaaa

SEQ ID NO: 34735 - DNA, 1028 bp, Homo sapiens
gatgtgtgctctgttgaatcatagttacatgggggaagtcctcctgcctgaacttctaaatttatgggaatcacagtcaaggttgctcaatccatgtgccctctacccaaccctcaccccatttcctctaaagatcctctactgggggtaagattttacaacttccatttaaatctgtgatggggtttcaccatattgaccagtctggtctcgaactcctgacctcaagtcatcacccactttggcctcctaaagtactgggattacaggcatgagccaccacacccagcccaaatttaaaaatttttgctgatatagtaggactcactgtttcgatttctatctattttaatcagacaaagtttgatttgaatagagttgaactattttcatgtttattcatcatagaatcttgtttttctgcaaactgcctgctgatatctttgctcgtatgtattgtgttgtatttttttgttgatacggaagcactctggcatattaaggaaattggctctttaatgacacactcctaattgtagtttgtctttgattttgttttaataaatgttttaaaattccatttaatgctcagttcttggaaaaaggaagagtgattgggaccaatgtttagttcaatttgaaattcagataaataatcagtttcttccttagctactgtatttagtttctaaactcttcacactaagctcttttttttttttttttttttttttttttgaaacagggttttgctctgttgtccaagctagaatgcagtggtccaaatatggctcactacagttggagcttccgggctcaagcagttctcccacctcacacccccaagtagttgggactacaggcgcatgccaccatgcctagctaatgtttgtatttttttttttttttttacacagatggccttttgccatgttgcccaggctggtctcaaactcctggactcaagcaatccgcccacctcagcctcccaaaatgctaggattacatgagtgagccaccctacccgg

SEQ ID NO: 34736 - DNA, 1061 bp, Homo sapiens
aaaaaaaatgccgggcgtggtgactcacgtctgtaatcccagcattttgggaggctgaggaaggtggatcacgaggtcaggagatcgagaccatcctggctaacacagtgaaaccccgtctctactaaaaatacaaaaaattagccgggcatggtggctcccacttgtagtcccagctacttgagaggctgaggcaggagaatctcttgaacccaggaggtagaggttgcagtgaactgagactgcgccactgcactccagcctgggtgacagagcaagactccatctcaaaaaaaaaaaaaaagataaaaaaaaaagagagagattgatgtatggcaaaaccaaggctgggagttcaggccccacagaatacccaggtctagaactcctgtctttggaagctaattctcttttgtcctcacccccctgcctcacttaacgatatctttcacggcctttcctcttcattcgcactaccatcttcctagttcaagtcataatgttaattcctaaattactgcactagccagagaaggaggaaaaaaactgtaagaaaccacatcaaaatgtcatctgtggttggtagacatctgattttaatttttttatatctgcttttctgacatttatacattttacataataaacaagttttattttcctaaaggaaaaacacacatcattactggcatagccttcaccctggtatctgagcgcatgtccattgtacaacctatctgtgcctagctatcagagttgcctttctaaaatgtgttctccaggctcctctgaaaccctcagggtgtcctggaatttcaaagtcataacccagacccacccttccgcctatccccttatctccaaccacacccaacccaaccctctctgcttggcaggccagcatcctccttgtcctaggaccaggggagctccattcagctccttcgcagctactctcctctatacagagaaccccatactctttgtcctttcctctttatctctccagatgttatcctttgaagctcagctagtctgtggccagaccaccctgatcactc

SEQ ID NO: 34737 - DNA, 1027 bp, Homo sapiens
aggctggagtgcagtgtcacgatctcggccccctgcagccttcgcctcccgggttcaagcgattctcctgcctcagcctcccaaatagatgggattacaggcatgcaccaccatgccccactaattttttgtatttttagtagagacggggtttcactatgttcgccaggctggttttgagctcccgacctcaagtgatccaccggccttagtgctgggattacaggcatgagccactgcgcccggccccgtaattacatttgaagttacttcacatgcagcatcctctgtagttccaacaattgatactctctcataaatataaaatttgttccatatgtatttcaattcaaagagggtaactttcttagtaactttgcaggaaattcactgagcattttgagagctagagaagccatttccttatagctgtaaagtagaactaaatactgagtttctgataggattctctgcccccttcttccagctgcagaattgtgaacttgaaagcttaacaacatgtttgtcagagaacttgagttttgagataactttggtttggttttgaaaaaaaaaaaaaaaaaaaatatatatatatatatatatatgcatagaaaatattccttctgcagtcagtattttcagcagatgggaaagggcaggagtgacttgagcttccagccatttcaatctgggtaccttataacatggaagcttgtctggggatgaataaattatagcagttggaataattatgatagaggacaagcagcagccgagagtacaattgacaatggggccaagttggcctgattctgtcgtatcagagcatgcatctgtttgccaggttacctgaaaatgctgttttcgaggattctggtgtgttttgtttttcatcgccctcccttttaaaacactgtaagagccatcatctgctagtgaccttttagaaataaaatggctggggcagacgtccacatggctgccgcttcacatgttgggcatccgtgtaagatttaaattgagc

SEQ ID NO: 34738 - DNA, 1030 bp, Homo sapiens
agcagctggagcatctggcgggagcacctagcgggagcacttcacgggagtgcggccgggtggggcggggccacgcgcctccccagcagccaatgggcggccgcggcgggcggggcagggagggcgcagggaggcgcgggcgccgctctcttcaacttgagcccggggcagtgcgcgcggctgcttgagcgacggcaccgctggctggtgccggcaccctggggcttgtcgtagcacctggggcggcatccccgcccgacttcggaaggaccgggaggcaaaggtgaggaagttggcgaaggaacggctctcctttgtttgcaggtgcgttcagggggaacgggggtcgagcccaagctcgctcgcggggacagcgaggcgggcgcgggagacctgcgggacaaaggctgcgccctcccttccccgagtcagcgcttagcgagttgcctggtcctggacggctggaagggctgaagagggggctttctgccccgccggtgggaagaaggagtgaggcttgtatgaaatgggggggaggcgtccttggacccccaattcgccagtgcagcaggactgttcggggtgggctattcattgatggggtctgcacggggcatttctgccgtggacagcgttctatgattgaggcagtgactgccttcgcctcacgtgccccctggtgaggccacatttctgtcttcctgtctacattaggactgaaagatatttcagggttttggtaatccagtatttggattaaaagcaatatcctttcgtgtagaaaaactgtgcatttccaaatgattttagttacacgatttaggatattggtgtgacttccatgcgagaaaatatctcaaattccccaaatgtagaaacgcagccagctcttggcattgagaaagaagtagtgtttttgaaaagaaaggcgtgaagatttaaatattgcttacaacactctattagcttgtgggggaatctgtgccttttctattatctgtttccctataccaatattgtaaccaggcac

SEQ ID NO: 34739 - DNA, 1007 bp, Homo sapiens
gataatttcagaaaggaaaaaataagtacagataccaaatgtgtatgaaactcacatcaaaccggaaaagctgtattcctggtgtgctctgagacctgtggaaaaagcattttgggagcatcttggaatagtgtttgctacatgaatagatagatgttgttctctctgcttctagtgaacagagcagtggtagaaaagtttgctttttggttgggctgattgggactccactcacattttctcctagcagcacatcccaatgggaagtaggtttccaagcctttccatggtggagtttgtctccttaaagtggagctgaatcactgcattgccaagctgacttttagattctaggcataagggagagctggaagaattttcttccatccaagaaaagccatttaccctcttctgttgtttgactttaccgtcctctctcaccgcattatctcccatccaaatacccaagcctggctgagcatagtggcttatgcctgtaatcccagcactttgggaggccgaggcaggtggatcacctgagctcaggagtttgagaccagcctggccaacatggtgaaaccctgtctctactaaaaatacaaaaattagctgggtatgatggcacgcacctgtagtcccagctactcgagaggctgaggtaggagaatcacttgaacctgggaggcggagaggttgcagtgagctatcgtgccattgcactccagcctgggtgacaaagtgagactctatctcaaaaaaaaaaaaaaaaaagaacaaaacccaggcctatgtttcccaccaaattctccacctgtcttctctctccttcagtcaaaactgctgttctttcttggctaggatttagaaggtaggtggttgtgacttacactaatatgtgaatgactgacctttggaggagccataggtctaaggcagcatgctcagccttctgagtagctggtgaatctgtttcaccacaacagtgcacaagttctgttttctgccag

SEQ ID NO: 34740 - DNA, 1035 bp, Homo sapiens
cctcagaccactgaccttcatcaaactcattctcgcttccccactcgagccacacaaggggtcaggaaggtgtctaggctgctgttctggaccatcgtacccttaccaaagagatctctcagtgcggaggagtgaggagctttggcctcccctgaataagcgtgaggaagcaaagattccccagcaataaagtagatgctgaatccccagcaataaagtagatgccgaatgtcatctcagcccccactggagtgagactgcctttgtgcattctctccagcacatcagtggttcctataaatctcacaatgattgcttttctcaaggttgcttcgtggcaagtctgcaagtgcgctttctccaacagagggaggaggttaggaatagacttcgcaggcaggagctgacttgggaatggcccaggggagaacaagtaaagatgcatctgctttgaaagaatcctttcgttttcatttaaggacttgacatcagggaagttttatatcctgggaactcgcctggctccgtgttgtgtgtgaagaaggattgtgaggccgctgctcaactgcgttgcctctttctccttccttgtgtcaaataatgtagcttttattttgtatgattgcgtgtgcgctgggtgtttcccaactgcaggggatggggttagtattcctggccctgtgagcagagacagaggtgacccaggctgggaactgcccttcatgaagggaccagccattagtgggtggcgggcaggcaaggagatggatatcgtgggcgatatttcaattatggatcaacccttagtgcctggcacatggtaagcgctacatgggggttagccatgatcatgaccgtcctctttgtagaagggcctgtcagaggttaacatcaggggagcttttccagttatgtgtcttgctctgaaaaataggaagggggaaagttaagttaatggcagtagtgggcccagggcttcaaagggccatgcatcgtgttttctacctgagtgctcagtgtattgtagacagtctg

SEQ ID NO: 34741 - DNA, 1075 bp, Homo sapiens
tgtgccactgcaatccggcctgggctaaagagcgggactccgtctcaaaaaaaaaaaaagaaaaaaattgatggagaactgatggtttttcctacagaacaattagattaattcagatgctggctgggtgcagtggctcatgcctgtaatcccagcactttgggaggccgagcggggtggatcctttgagctcaggagttcaagaccagcctggccaacatagtgagcccccttctataaaaaaaaaaaaaaatacaaaatttagctggatgtggtagaatacacctggagtcccagctactcaggaggctgacgtgggaagacgacttgagcctgggaggcagaggttgcacagagccgagattgcgccactgcactccagcctggccaacagaaccagatcctatctcaaaaaataagtaaataaataattcagatgccaagccatttctagctaagccacaatactttgtcacttataggattcctatttaaaatctcatccaattgtgaggccctatagctaagtcacaaagatcaaggtctgagttctccctctgcttctgactcgtgcttataagaaaatcatttcagtagtcagccttccacattttcagactctaaactgacaccaagagtggcagctctcaacagcagtctgcagtagattcatctgttcactcggcatgtatgtattcaatagctagtacatacatagcagggtagtagatcagtcagactggggaaggaaacaaaataatgcagcagagacaatgctaatatcatttaagaatgacaattacagtgctgctggaattgaagaagtagcttgcaactgcactgcaagttggatttctgttgcttcatgttgaagcagttcggttagatgagttcactaagccctaacacataaataatttcacttagctttaggagaccctcagactaatgatcgcttcatgaaaggtgtatttagttgttgaatccacacattcctaccccagatctctagccagacatgcttagttccccctctgttgttggcaccaataggatatgtgtccctttcgatcca

SEQ ID NO: 34742 - DNA, 1024 bp, Homo sapiens
ggagaatcacttgaacccaggaggcagaggttgcagtgagctgagatcgcgccactgcactccagcctgggtgacagagcgagactccatctcgaaacaaaacaaaacaaaacatcttaacaagccaagagaaagcatacggaagaaaggaaaaacttttatgttttattattgtttgtagcgtcttccccctgctttttgaacggggcgggggcttgcattttcgttttgcatttttcatttacaagttatgcatctgatcttcggtgctaacaaccatggaattccaccttgtctacttcagcaccttcccctcccctccccttcaccctcctgtgccatggagagagaaagaatcttcccagattcttttttatttgttctgaatcccaaagcagatctgtgtctacaagtaacatcgcaaataggttttcttagtagcacttaagaggggaacaccatacaggttcaaaaccttgactcctttgccagaaactgccatattgccagttggttctgtaagtatcttagggcttgcagtgaaatctgtgctgcttctggtcaagtcagctttgttctgagcacagccagtaatatcatggccactctagagccagtggcattctgaacaagtccttgggctgcttctaacattgctggtctttaaagataaattttatggtaaggaacgcaggttgtgaacaatttgctttgctacttgatgttttacaaattctatcagcaaaggctggaagaggagcagtgaatatctctgtccaccactaagggctggggcagtgatgtatgtggagccagggtgtgaaattgacaagagggaaagcatggaatggagatggaattgtaataggaataggaggactggttccattaaatccaagtcagtgggttgggctttctctttttcccttccggctgtgttgcttactgaattctttatctgccacctttttattgccagcatgtctatttcaatgcctgttatgagtctgttcacgttagtaag

SEQ ID NO: 34743 - DNA, 1032 bp, Homo sapiens
ggggacagggggaaattcccagcataatttgagactagtggcacttttgcttctggcagatttaaatgaggaaagtgactgcatgcatgcacatccgtggccacagtcttcatcagcccctttgtttgatttctctatttctcacggtggctctgctcccgtgatgcctgcgcacgtgatgcagcgacacttgcacagagccaggcccactcgtgttctcctttgaattgccggaaagcactccggttgcttttgtatggccacataggaaacagcctaatccttagaataaaattgatccctgggtttagagctcaagtttttaaagtttttcttcctacatacattgattcagctgcctgtgattcccttattacccctccatctcggtggatgtctcattctacttcctctcccctctgttctctcttctctagcactgttacccatttcctagtcaactcaaggccaaaaatgagatttttaaaagccagcagatattcagtaaactgataagatatgtagaaaggccagatatgatgggaattgtctagtagacgtattttatttggccatcgcagtgtttaaaggattattttctggaattgggatgactggactttgcaggtgcttgcccattttccagtcacccacctttgttgtctctcacactctgcttcacatgtttacatcactggcctgtctgtagagtcagtctggtccattgttgacttccgaggcttttccaatctgctttccttgggaatgttttttttttttttttttttttggagatagagtctcactctgtcgcccaggctggagcgcaacggtgtgatctcagctcactgcaacctccgcctcctgggttgaagcgtttctcctgcctccacctcccgagtaactgggactgcaggtgtgcgccaccatgcccagctaattttgcatttttagtagagacaggctttcaccacattggtcaggctggtctcaaactcctgacctcaggtgatccacccacctcggcctccc

SEQ ID NO: 34744 - DNA, 1073 bp, Homo sapiens
ctcggcatacttcctgcctttccttgtggaacttctcagtatgaaaaataaacaaaatctcactcaagatttcttggtctccagcccagtactcttcctaatttattgtattatatttttttttatccatgaggacgttcacatatgccatcaagggatagataaatgttagtaagtcttgggagtcatgaagttgctctgttctgtgaaatcgcatagaactgatttctttagaatttctcttttgctaagtgccaagttccagttcccatcattgaaagacctaattgatttgctcatttcttccttctttatttattctttctttccctccctctctccctccctcccatctctccatccatccaattttgattgaatacctgccatgctggatgtcgaatatgatggtgaataagacagttatggtatctgcctaccctcacaaggcttaaatcccttaaaccaatgtgagataatatgaagggattctataaatgattgtagacctattaataataccgtaggtgtgcccactttgcatctgtcaccagcaccattgttaccacctatttctagcaacagaataaacctcctctttttatttcaacaaaatctcagcgtaagcttagtaaaactagggtgggtttaattgaagataaacagtctgattcgtgccattcagcataaagttcctctcatgatacctctaggtacctccttatcagcccaacttgaaagccaccaaccttggcctctgccgttggtctgacatggtgtcatattttgataatgtatgtagctattcttcatacacgctaatgtctcagtggtaaagacaactaggctaaatgtgtaaattcaggcctccagtcctcataaaccacagaaatggtaactggcagcttctttgtatcttttcagtgtctagttccagagctcgctgtctgtgagccactagaatgggacgagggaacccacttgctagggttttctccaactttatcccaaaacctatgtatctaaccttatgtgtcccagttgagatgccgaaaacaaaataatagcagaag

SEQ ID NO: 34745 - DNA, 1064 bp, Homo sapiens
taaaaaaatactattttaatttcagtgtttctggtaagaaatctgcctttactaatgactgaaatggacctggtttttgttttcccctttattacagtttgtggattagtcggtgtattgaacatgaaattcaatataactaaagtgggttttaaaagataatgaaatcaatactaacgtgaaaagacttgtcttcatcagagccaccccacaattggccctgtgctctctgttgctgcatacttaggtcctacagttcttcatgtaaccgcctgaaaagctctacttttctactaagaataaataatcctgctgaaatggaccataggtaactcaattaaacatagcttcctaccactgggttgtttaattatttttcaataattaaatagatagattgaaattttattaatttattaactgcatttttttttaagaaaagacatactcattgaagacaaagttaggaaacatagataaacgtaaaatttaaagtcatctggggctggacacagtggctcacgcctgtaatcccaacacgttggaggctgaggcaagaggatcatgtgaacccagaagtctgagaccagcctgggcaatatggtgaaaccccatctctacaaaaaaaaaaattagctgggtgtggtggtgccttgtagttctaactacttgagaggttgagatgagagaatcacttgagccacgaggttgaggctgcagtgagccatgatcacaccactgcactacagcctgggcaagagagtgagaccctgtctcaaaaaaaaaatcatctgtaactacaacagagatcaaaactgttatgtaaatgctaaatacggtgttcaccaagagggtgtgatttaaaaaaatatctagtaccacgtatttttaaaattaatttcatgtactccccacaacatgagaactggggtatgtcagcctctttatgcaaactattctttaccaaaaaataaataaataaataagaataagcaatgcactgaattcccagctttgtctgggcagtttttctttgcccctttgctacttgttagctgttactc

SEQ ID NO: 34746 - DNA, 1050 bp, Homo sapiens
aggttgattccatgtctttgctgttgtgaatagcgctgcagtgaacattcatgtccatgtgtgtttatgatttatattcctctgagtatatacccagtaacaggattactgggtcgaatggtagttctgcttttaactttttgagaaatcgccacactgctttccacaacagttgaactaattcacactcccaccgacagcatataagtgttcccttttctccgcaatctcaccagcatctattattttttgactttttagtaatagccattctgatttgatttgcatattctttaatgatcagcggtattgagctttttttcatatgcttcttggccaaatgtatgtcttcttttcagaagtgtctgttcatgtcctttgctcactttttaatgggtttgtttttctcctgtaaatttgtttaattaagttccttatagggttgtgggagtgaaggaggaccggagagatcatggtgaaactggaggatttttattgagtgcactcagacccagcggattaacatccaaaaactgggcctggaacaaagacagcacttgaattttagacacatttctaaaagggggtgggctagcctgaaacaagtttacagtggcgcgaatcgtagtggcgtgaaagcaaggatacagaggcagaacaaagggagttaattaaattgtgacaggttcataactcaggattacaggtgactcttcctgtgcagtccagatggctgttatggaggcttgctctagtgccttgcacaggcttatctcttaaccttcactatggcgcccagatggctgcagcccaggcctgctcaggcatgtcttataatcttcactgtgctgcttagataaaaacagaatactcaagttaccggaaaacaggaatctgtaaactcataagttttactcataggggaaaggaaaatttgttttcttctccctatgttgaaggagggctgggagagtctccagggcacattcctttgagctctggcttcttagataatattattgagacttcacctgggtccaggctttgcct

SEQ ID NO: 34747 - DNA, 1044 bp, Homo sapiens
atgtcaatgggctcgttccctgtcctctgaaagcctatttcctcatctttaaaggagagttaataataggttctgacagggccctggacagaccagttaagagaaggggtgaaatatgagagatggagaaatgatagatctgggactgcaggctgctgctagctgttgtttagccctgagagtgtgctgggaactgtactaagaactttgcctgttttattttatttaatcttatatctgctttcagcagtggatgttattaccccattttcaagattttgaaactgagcccctggcaggtaaaataacttgtccaatgtcacacagccaaggagtggcattgtcactacttgaacccaccactgtaactgtcatgtttatgctcttaaccattttgccacatttataagtgatcttttctgtttcactcctttaatatcctccttgcatcctgtgttgtttttaacttgaattgatcatatttatgtaacattttatttaatttgctatactataagatcccgagggctggggtcaggtctcatgaatttttttgtctttcgtagcaccttgcttaataaaatatggcagataacactcaataaaatgtggttgacagaggctgggtgcggtggctcatccctataatcccagcactttgggaggccaaagcaggcaggtcacttgaggttaggagttcgagtccagcctagccaacatagcgaaaccccgtctctactaaaaatacaaaaattagctgggcgaggtggcatgtgcctgtaatcccagctactcgggatgctgaggcaggagaatcgcttgaacccgggagacagaggttgtggtgagccaagatcgcaccactgctctccagcctgggtgacaaagggagactccctcttaaaaaaagtggctgatagaattaataatctctaagattccttctgtcttctaaagttaaataatttttcattctataggtaaagcttcagttgcagttatacagttaaagtccagtagaacttaaaaagggcttcttggatg

SEQ ID NO: 34748 - DNA, 1234 bp, Homo sapiens
actgagaaccattaattgcttcagaaaagaaatagaattggatttcttttttttttaagaaatggactaaatgctctaacactgaagaactatattcctatgtgcgtcagtttcttttcaaccattagctcctttatgatctctttatacagggtgggtatagcccacaagtaactatggttactagtttttataggttgtgaccagtctgctgtataaggtgttaacattttgcccaatctgccttatctccatctcttctgtttttttgtgtctgtgtctctttacacgcacacacttaaaacatgtttgctgaaccatctgagttagttgtagagattatgaccttttcaacatgtatttctcaagcacaaggatattttcccacatagcctataataagatgatcaccaataaatattatctgatatataaataatacttgaatacatgttcagatttcacctgttaccctaatactgtcttttatacccgcctcccaatccaggatgagtcaacagtcattcattgaattttgtctttttagtttcctttaatctaaaacagtcaccctgtttttgttttgtttttgtggttcatggcattggtgtcttgaaagatacctttgttttgtagaatgtatcacaatctggttttgtgtgattgttaccttatgattagatacagattaagcatgtttggcaaaaatgctacatagtgactgtggcgatacctactgttccattgtcctggaattgattatgccgagcaccacttggttgagctggtctgccagaactctccgtttgtaaagatgccttttctcttaggtaatctgtggggtgatattctgagactgtgtgtgagtgttctgtcctacaacaaccctttctagaatggttttagcatgtattaatgattgttgactgaatcagtgattgcattggtagttgcaaagtgggattttcttctgctctccctttgatatttattagctggcatcctttataaagaagagtttcccccattattttttcaatgaatatttgtgggtttatggtttcttttttaatccaatgtattatagttcatcaacatcattcttttttttgagaaagggtctcactgtgttgcccagactggagtgcagcggtgtgatctcagctcactgtaacctccgtctcccaggttcaagagattctcccacctcagtctctcaagtagctgggactac

SEQ ID NO: 34749 - DNA, 1015 bp, Homo sapiens
cccaaagtactgggattacaggcgtgagctaccgcacctggcctgtcatgacattttaaccctcaatactttagcatccatctccaaaaaaataaggaagcttcataataaaagtacaccaccattatcataccaaacaaaattaacagtagtccccaaatattacttaatattagtccataatcaaactttctaaattcatttcccagacctttagtgttttaacaaaattttaaaccagaatccaggcaaaaggctgtgtattgtattaaatacacaatcatgtcatctgcaaacagagacaatttgacttcctctctttttatttgaatactctttatttctttctcttgcctgattgccctggccagaactttcaatactatgttgactagatgagtgacaatttagtcaaattgtccctgtttgcagatgacgtgattttgtattgcattgttatgcctcttacctctctttaaatctaaaattccagctatgatattgagatttttaggatttggaacattgaaaagattatggagctttcccccaactcagatatccctatctaacaccaaaataattcaaaaaagaaacaatactgaatttcaaagtaaatgtaaggaagtccatataaattcagatattttttctctcatcaggttggtgcctttgatactagttttgcaatttcaggtaatcacatttttaaactcagcatatgcttgctttccttcagttaaataacccagccctggactcacagaattcaatagacatacagtggctcgttgttttctgttgagctgaatatctggtatgtctaaccttcacagatatgaaaccacattgtttttttttttgagacagagtctcgctctgtcgcccaggttggagtgccattgtgcaatctcggctcactgcaacctccgcctcctggattcaagcagttcttctgcctcagcctcctgagtagctgggattacaggtgcatgccaccacacccggctaattt

SEQ ID NO: 34750 - DNA, 1028 bp, Homo sapiens
tatttcctaaatgtaatttgaaggacaatgaattcaatcttgctgaagtgtgtttgaaggtgtacctttatgcttagtttgtttgctttcaaaggagctttggactgaattgtatttgcttttcagactgcagggctggaggtggccatggaagcctccagaatctgattgctaatcaggaaagctgtttgctaagaaaggcctgcctgtttggacttgaagtaatgactgatgcacagataaagccagggtgactttttaaatatcttttgacttctgtgtccagattttgcttttctcttaattaaaacccttagacaaaggtcacaggtcaaaggagatgattcctctaaactcttctggtagcaatagctgcttaactcttcaactcttgataggcttgtctggaaactgttgtgttcatttttctatgacgtgatttacctcctttggcttagtttgagtgctgaaatgtagtaatagatacgaagatggaaatttttttttacaatgtagataatggtagtctggagaagaaaggcattgtgctaacctttatccatatttcatatggaatacttgaagttttatttttactttttatttatttatttatttatttatttttgagacagagtcttgctctgtcgcccaagctggagtgcagtggtgcagtcttgactcactgcaacctccgcctcctgggttcaagtgattctcctgcctcagcctcctgagtagctgggactacaggtgtgtgccaccatgcctggctaatttttgtatttttagtagagacagggttttgccatgttgcccaggctggtcttgaactcctggcctcaggtgatccacccgccttggcctcccaaagtgctgggattacagacgtgatccactgtgcccggccgaagttttatttttaaaaatcagtaaacagtgttatttttctaatttcataagaattttagaaacgtattttcctaaaatggtttgttaaatacctcatccgactcagtaatgtttat

SEQ ID NO: 34751 - DNA, 1028 bp, Homo sapiens
ttccataggattgtatagactctgcatttttttgagtgaaacagttgttgacatagtgtaagggttgacacattgtatttttgaacttcttggaatctgcttaatggcaaacaggttgctgagaaccgaaggtcttagctgcaaagtgagcatacatacacagccctgcaaagctaggtgcataccagacaagtgaataacatactaattattatcctaccttggtagtaatagaattgtagcttcaggcactatgtaagacctagctttttgagctggcaaaatagtgattactatttttagttcaatttctgctctttaaaaaaacatagtatactacttgctactcctggatggttttatgtattttaattaatgttatcttattgcatttgtaccctgaggctgctttagtgaaagatataatttcagaaggctgatgaaattagataggtctgactaggaagactctgttattcatatttatggttataaaatatttcgggtacatctgtgtaagacattcttgtgctataaacatacagacactgttgtgaatcaatttgccttagagtgtggtagagtagttacagaccagtatagtagctctagtgtgggggtgatttgttgtttttgttgggggtgtttttggtattaaacatgactttacatttttcacttgaaatctcatcgtgcagtgctgtgtaaagaaatgaaagtgattctaaaccaaacacacacaacactcctcagctctattactttatagtcaggcttaacacattctgatggaattggcatgaagtacgtgaccaggtagaaatcagctttatttggtctaaatgactagccggttatagggcatggaaaatctattttaaatcactttccagagccaaatgcaattaagatgttgcaataaagtgaaggccaattctctgagaaagaaagaaatactattttgaatgaaaaaaatactattttatttgacatagtcaataaagaagaaaagctataataaactattt

SEQ ID NO: 34752 - DNA, 1044 bp, Homo sapiens
gtcaccaaggctagagtgcggtgacatgatcttacctcactgtggccatccatcctcagacgattctcccacgtagcggggactacaggcgcctgccaccatgcccggctaatttttgtatttttggtagagacagggttttgccatcttgcccaagctggtctcaaactcctgggctcaagcagtccacctgccgtggcctcccaaagtgctgggattacaggcatgagccactgtgaccggccccagatgtgtatatttattttatctatactgatatctgtatatctgtatctataaatgatctctcttcttttcttttttgagagagagtttcgctctgttgcccaggctggagtgcagtggcacaatcatggctcattgcagccttgaactcctgggttcaagcagtcttcctgcctcagcccccggagtaactgggaagacaggcacacaccatcacatccagctaattaaaacaattttttttttttttgtagagatgcagtctcactgtgttgcccagaatggtttcaaactcctcaaagattgggctcaaagttcgggctcaagtgatcctcccgccttggcctcccgaagttcttggattacaagcttgagccactgcctggcctcaatttcactcttaacaaaatatttcaaatatacaaataatctaaaaagtggggactaatgttctagatactgatattcctaccacacccatcagaaaagaaatgcgaacactgttctagatgttttcagatttatctttacttctccattattgcagttatttttactatttttacttgtgccattcaacatacaccctcttacaactacttgctagtgtgagtgcatgggtgtgttttctctctctctctccctctctctctctacccagactcttctaccctgcctagggctatcctgtgtttttcagacagttgctgtaacagcagcagtggtggttctgtatccaactgggtcctgggagacctgcagaagtaataatgcagaaaacagcagcctccgcaagga

SEQ ID NO: 34753 - DNA, 1031 bp, Homo sapiens
tatgattttccttagctctgtctattttgggaatggtgagaaaatgggaagcgggtcaggggagatgttgcattacttcctgattgccatagctcccttctctgtaaaatcccgtgaaggattgagaggcaggtggtagtgcttgcttagtaactcttccctttacacccaccagctccactcccaagttgggtgcctactacttccaaaataccccgtaattgggtcacaacattatctgcctgcttggaatcatatttaaaaatcaaagcaaagatgcagactatgtcagcaggatttgaaatgtttccatcctctgctttgaggctttgcagaattattctgaaaacaaaagaaggtaaacttgttatcccaatgaggtggcagtttctatgtggcctagaattatgcctaatttttgcttgtaaaagggctcaaaccatgatcctttctgactttccacagggatgtgagcttttgtggacatcactcaacagatcagatttactgttgaattttcataacataattgacttggaaagcatttcattcagtgttttgaatggtgactagagagaaattaagaagctcagttgttatatctttcgaattcctttcccatgacacagtcatctctcccctgaatgagagcagtggcctcctggcttatccagctctgttcactcagtttggcttcccaagtgctgggcactgttccagatgccacacgtggacactgaccaggatggccactgcctctacctgctcggagctctgggtctatagagaaaggctgacagctaaggaatgaatgacggtactatgtgatacgtattactgggagaaatactcagtgcttcccagacgagcacttatcctgcttgggtgtggggagtgtgtggggcaaagcttccaggagaagggatgctaagtctattccacagtgcacctggacctctatcttatggttccttaaggcaccctgactctagctcccgcatggagcctgctgtttctgaatgcgtgcctcc

SEQ ID NO: 34754 - DNA, 1025 bp, Homo sapiens
cgcattttgtgtgtgggggcgtggttgtgatgttttagtctgtttttctaagatgggagaaataacagcatgtttacaaaaatttaggaattctgtaaatatcttatacattatgaaacttaggaagcttaaggaaacctggaaaagcaaacacaaattaattatgggcatttcccaggatacctcccattaagtggactcaaattagggtcccagcatcttctatacttgaaatcactggcccatgatggataaacaattgcttggttctgatcaaggcaggccttattgacctcaggaaggacaagataccacagccatgagtaattctgtcctggttattggatgaggggattatcaggacgggacatcccccaccttgaccatcaggaatgattatctggttgacaacactgccatcatcttccttcttctaagaagggcctcacgggcatctagtatatcatagcttgtatatagtaaatattcaataattgacatgggctgtcaatccatatagaaaatgtcataaggaaattggatcagtttgagtaattccttggaacttcaagcagtgatgatattagaccatctatcatccaatcccttaatgctcttttaacctcaacatgatctgccatagttccaggagtaatctagaagtcatcttataaaatctcttttaaataggatttaacaaaatataaataatcatacattacaggaggatttctttaaattgtgaactcttctagtgcatctaaaaatagatttagaaatatttaatttatagatttagaaatatttaatttacacaatgtccaggaacttatttttctttcttttttttttttttttgagacggagcctcgctctgtcacccaggctggagtgcagtggcgcaatctcggctcactgcaacctccgcctgctgggttcaagcgattctcctgcctcagcctcctgagtagctgggactgcaggcacgtgccaccacgcccggctaattttttgtgtttttacca

SEQ ID NO: 34755 - DNA, 1057 bp, Homo sapiens
ctaaatgacctcagaccatggcagataggttttaaaaagagaaatgtgagaggtgtatatgtttcgggggatcatggtacaaatcatctctgaagagttatgctaccaggatgtttcagaggggtcagagccagaaagaaccattgacttcttggatttggcaaaatcctaggaaatacataatggatttgccacttttggagttttctctaacttgttaactcccttggaaagggcctaaatctttaaagataaaatagcctttttacacaaagaaaaatgaaagattccattcacagcaacaagaagaaaccttaccagttatgtgaatggttagtaggagaaaaactagaaaatttgacaaaaatgagagaaatattttaaaagttgaataaataaacataccattctctgaatagaaggatcattaaattgtaagttcttcccaatttgtgagccatttgggggaacaaaaaaaaatacaccttctcctcttgattgtaatctagtctaggaaaataattataaatgcagagaaagagattagagtctgactgaaaatagaggcattattatactattttgagtgcttctcatatcagtaaaaattaaagttttttcctctttaaattttataataaaaatttttcaataacttagtaacttagtcgttaaatcaataatatatttcaacaaatatatgtcaaagcgctattctagtttctgggaatacaaccatgaaagaaaatctctgcctttgggaggttataatctagagaagaaaaacatacaaacataagtctattatacagcaggctggactgtgttaaatgctctggaggacttgagtgcaggggagaggatggggtggggtggggtgctgttttcaatggggtggtcacacaaggcctcactgtacctgaagtgttgtgaccaggacctgtggctatctggaagaaaattccagatggaaatagacaaatgctgagagcctgaagactgcagggtggtggaagctgaatgagggagggggtgactagtaaaagcactattattc

SEQ ID NO: 34756 - DNA, 1025 bp, Homo sapiens
ttcacagggcagtgagagttactgcatagaaaataagaaaaataatgaataacatgtgcagaaactacagccaaaataatatctgaaaagcatattgcactcagtgcacgtctaggttgtatcagaaaggaccaccctctgtttgtggagccacagggaagagaaagggacgtttacagtacacattggatacgtagtctttttccatggagtctcttctaccaaagaagaaaaagcaacggtggaacagaagataactgtgaataatttaaatcctggatgcagacccacaaatggttaaaataaaacaatctcagggaagaaaacagtgcctttatgatgtttcagaattatacgttgagtcactattggcatttgtttaggttttagatattctcagccatggatatgtgattttttttatagacataggaagaattaagttgttgtgtggtaaggtagttctagactcatggaaattgtatgaatctagaagcaagtgtactgacaatcaagaaagtaaataaactctgagtagagtaatcttttaacaggtggagacacagcagtagaaaataatatattctggagaattttgagtgtgaagttaaaatttattatgtgctatttctgttacctgaagtgaactctcctctcctttcaaaggccaagtcaaattctaacttatcaagggaggcctcttaaagcccatgttgatttctgaaattatcaaagaggggcaatcatatcaaagctttatgctacattcatttttaatgtcttataattttgttttgctatattgtaacccccttgtagcaaggaaccattttttaaatggatgctataaaaatagtggatcttttttactgacttcagcttgacaaacctgaatccctttcagccacattccttccctacagccttctgccaggtactcacagcacactatgctcacacccagaggctcttgggtgtgtacatgctcttcggcttccatgaattgacttggtgcattgtaagtg

SEQ ID NO: 34757 - DNA, 1031 bp, Homo sapiens
aggtaaacttacacctgagccagcaattgtgctcatagttatatagcagaaatggaagtttctgtttctaaaaagacttggaacaaaatgctcctatcagctttattcagagtagccaaaaactagaaaccaaaccaaatgcccatcaatagaagaatggataaacaaattgtgatacagtctcacaatggaacatctaaacaataaaaaagaatgagttattgattcatcaacagcatggatgaaaaatgaatcaaaacatgaatcaaaaacattatgccgagcaaaaaaaaaaaaaaaagccagacacaaaggagtgcatcctttttaatttcatttttatgcagctcaagatcaggaaaaagtgatttatggtgatagaattcagaacagtggttgcctcagggcagggaagaggttgattggaaaagggcacaaggggatttataggatgggaatattttatatcttgattggggtgctaattaccacactgcacaattttcatttgactctgtgttaaaggtctgtgcattttattatatataaattgtctcatttaaaaattattatttagtttctgtgtagtattgccttctattttacctgtacagtattcatagctgaacatcgttgtatttggtaattatttttttgttttttaaattttgtgtttcccaacaccaattattttttttagagatggggtcttgctctgtcacccaggctggagtgcagtggtgcagtcatagctaaccatagccttgaacccctgggctcaagtgaccctcctgcctcagcctctaaaatagttgggattatagataggcatgtgccaccgcacctgatattttttttaatttatttttttaatagagatggggtcttgctatattgccaaggctggtcttgaactcctgagctcctttgattctcccacctcagcctcccaaagcactgggattacaggcatggccaccagacctggccactttttccatcattttctaaagataaatctcttacctgtt

SEQ ID NO: 34758 - DNA, 1025 bp, Homo sapiens
ttaagaagtgcaccatagcgggagttgcttatgggtgagttttttcctttaattaggatatgaaatacatgcttaattagtgctaacagtttggtacatttgggagttcttattaggggagggtatggggttgtttggttttttttagtctgaaaagcagctgttataattttaggacacatgtatatttcgcgtttctagtttagcattgttttcatttgggatgacatgaggtgggtgctctgcccaatggtattttcagtgtttagtgttgctgaaagtctctctcttgccctggtaataaggaacaaatatatttccttttacactactataaactggagtatagcttggatctggtaaggacagataatcaggccttgagcagttttcaagttaaaatagtgacagttaccccttttgatactttttttttcttctatcatctctcctttttgcagtcatagagcaatctaaaattctgatgatggaaaggaggtagagacatgaaactcttgaatctggaggataattaatatcatcagaaacttttatcaggctgttaatttctttagaattgcttgttgagcacccatttaatttatttcttacttccaggtatgcttacaagctgttccatagccttctctttaaaatattttatagggtaatgtgagaaaattaatttctacatttcctagaaaagacatcaaaaggtgaaacactctcctggctggttgacattggcctattgtcaaacttgccaattatccttatctacctagaagtgagactagtaaatatcagcctcctactcatacaagcatggacacttgcttctaggttttctggcttgcacccactcttccccactcactctgagcagtaagccagtgacaaagagtgttacattttgaaatgccttagttaaaattataaataagtaaacatttcatgaaaaatcccaaaagtatatggttattcctagatatccttgttctttgcgttacgagagcatgactaaa

SEQ ID NO: 34759 - DNA, 2003 bp, Homo sapiens
ggcagggactagtatactttttttttcaagaccctatcacaaccctaaaaaataattttcattattattttcttccttttttggtacaagtggacatacagtagatggcatgaggttgagaaatttgagaaagaaaaatctagactataatgtagttctctataaaatatgctttaatttgataagcttatgagtaaacttttaaaaattaagttttcacactaaaactttaaattgggctaaaaagcaaataaataaccctcaaatattaaatgttttcttatgccttcagacctgatcaaaataagttttgaaaaaaattggcattagatgtttttattaacatgtattattttctataataatttcgaactttctgtctcttttgtccatttgtttgttttttttcctctgttcatttttttttttggccattttaattattttatactgggacgtgtaggtggcagtaggggagatagtgaaagtgaccaatggggaacatctcccagcagatctcatcagtctgtcctcaaggttagaaccactgagtcgtataggatgcgtgtatgtgggtcctcaccgtaaaccggagaacagttgcacccaaatatggttgagttctgtgtctcttcctttaaaacacaaactttttatactgcttggtgatggacatttcacagatgttttaaagggatttttgaatactatgttgactgatgcttgtccttcagctgggcaaattgaactcctgttgttatcaataggagtctaagaggcatgacagtaaaggtagattttaatttcctgtgcaccattaatatatattcgtatttaataacatgcctaagtactaaggcttaatttattatctctccgggatattattttgaataatgttaagcttttcatgaaacagtcattgaaaattgattagattataaacatgtcttattcttgtattttaaatttttctgtaagttctgtaaaatccttccagcgattgtgactataatttgggctcatagggtttatagaggaccccctgcacaaagctggatgttgcacattttgtaccgcatgctttgggatcgacttttatcccacttgtatctagtgacaaagtgcacgttactgtgatcaatttcagctgtctactagtgactgtattgtgatatgcatcttgtttcatttttcacttactaatcaaaaagcctgctttgcctctcttgactagtttgtgttttagatgtcatcataatttgctgaaatatttatgatctagcatgattccttatctgagacttcttgctgccttttcacagcactattaagaattgcttcagtaactgctgtcctaagtgattgttgagaatgttctgaatttcgatgcttattttattaccccaacttcaaatagaacttagccatttgaacttcctaacttcctagccatttaaagacctagataagttactttatgcaaaaaaaaaaagtagaattagaatattattctaattgtcagaatatggaatcaacattgtcatttagtattttctttgtcatcgtgcttctatattatcaggtgtgttttataaattcataaactatgtttcaaatgtatacataagtaaattacaaatttcgagcaatttccagagccaaattgctattgtgacagtgattttaaaaataaaattttgaataagttatagagtgaaaatataaatattgaaggacttaattttggggaaaagtagcagcttttacgaaagaaagctcatagggtaaattgaagaacctgcagagctactttaaaatgaatcagtaaaatatttttgattaatgtctatgtgtttaagcaattttcacaaatcttcgggccacaaaattaagctacatgcccatttctgaaactaggaatagtctgttttgcacatgtacaagttggaagttgattagaaaattccaggtgtttgtaatttgtaaatttttttctttct

SEQ ID NO: 34760 - DNA, 1051 bp, Homo sapiens
aaagtattgttttcccaattaaactcttagagacataattatagaatgaatcatataggctgaaccgttaaatacaatttttatttttgatgctcaaaaatgtgaagataatcgactatactgccctgaatttgtatttaattttaagttggaaattttcaaaatctttgccgtctgactctatccaacttcagaaactccccagcaagctacttgtatttcttaaactttagaccacttttacagaatttgttttataagcattaaaaacacttactggtggctatgaatttcaatttatcgaaatagtttctgtgtcttaatatggtctccacagcgattaacttcctccaagattatatttttaaaagattatctgattcattgctttttgttattgagtagaattcaaaataaaagctgtgctgctagacatttcaatccaagtagcagagtaccacctttcagtattttttttcctcaaagggttttagcattacttagctcctttgaatctacattaacctcatgaaataggtagtagttgtttaatcatttaactgaaagagaaattttgactttaggtaatgactaagtcagggttggaatactcctaatttactatcttcacactgtccactatcaaaagaagtacatgatgatttttacccgcaagtgagcaaccacttagcagtaagagtaaacaactgtttataatattttaattttcaatttttttaatttttaattactaagagtacatcttctgtgaggtagtttgaaattaaagcatgaacatggttgaaagttactgtgtttcgtaggctttcattttgaaatgaaacagattttagcatttaataaataatgaatacatttatgtgttaagaaagtataaagtagggtaaaataactcaagctgttaattcaagtccatattctccgcatgtctatttcataccctctctgaaaaaatttctctggattcaaaggcttacccttccaaaacaatgcattctctagacttcattaattgctaagtaactcaaaa

SEQ ID NO: 34761 - DNA, 1021 bp, Homo sapiens
cagaaggctgtaggtagtggactgaaagccctaaacatttccttaactttggcattttggggactaaaattgctttatcatgacattcctccaattagaatatgtatgattaaagcatttttgtcatcttgactttttcttctcttggttcctcttatgcacacactaggctggaaggggaatgccgtattaggagctcagaatccaaaaggaaagacaggtgtttggatgtcttttgagaaattgatcttaaacatagacattctaaggagttaagttccctactttccttacagtaaagaactttagcagtcattgatttagcatgctttagtaagaacttcagcatttagtaagcccctggttttcccaggccactggggtaccatataaattgttactattttattgagtttaggaaccacaagcccttcttttgtcttacaatgagtaaagatgttggaaagcagcacaatcaattagggatttgtttaagtctgactgttagactctaacacgatagtgtagaggacgtgattctgattttgtgaagcacacagttgaatttaagaggaaacattaacatacaggagttgattaaagaaaattaaatggtaacctggatgcattctaagtgccatgatttcagagaatttacattttattatctttctcagtgagtgtaatcacagtaccatcacagcacattattttaaggaccagtttacatttatacttgcagtttttaatttttcctctttgcccttttttgaggtagggggtgtttgattccaagatccctggtaatttgccagtttcagctagtccaactttcagatttcagctgaattattttttgaatcaagggacccagaacttaagcatacgtgtcataaataaaaagacaatacccctgccccaaccttttctaacctcttcttttggtaaataatagactgcagtgggctgcctctgcagtaatttcttattatgattcccacaaaagacactattctgttct

SEQ ID NO: 34762 - DNA, 1050 bp, Homo sapiens
tcaattttattaattttatgacagcttagcatttttatgttagtacagaataacttactaaagaaccctgtgggtggacatttaggtcatttcagttttttaaactcttgaataagcatctttgtatctttttgtacacctttctgatggttttgttcaaagtccctagaaatgggatttctgggtcaaaagtatatatctttttatgacttttgatacatatttgaaaattgctagaaagattatactggtttacactcccactgaaagtgaatgagagtgcctgtttatcccttttgcagcactgtatagcatttttcttcctccttatggatatagaatgtaaaaagtaagtctttaagtttacattgctttattaggtttaacatattttggtaaatgtagtgattatttttttctgaattgtttatcaagttttgtattgaagtttaagaacttatatgttaacgataataccttttttccttattcatagtttatcttaactttgtagtgctttaacatgtatgtaaattaatttttatgaagtataatctttcctttttttaaatttctgctttaatgtcatatttttcaagataatttttcaattatatttttcttttagtacttttgggtttcattttaaacagttatattagtaattcctgtgtgatttactttgtggtgaaatgtgaggcctggatctaagtttttcctcaaattatttacctgacataataaccatatatttaataatcctttcttcccacactgatttgaggtgcttccgtatgtatatatttgagtttttttctggagtcagtctctctttcccttccccccaccccacccgccgccacctctctttattttggtcccttttagcccctggtatcaaattcctttattgcaacataacaaaaaatattctcttagctgtcccatttgctttgctcttttctctaggtttttctgggttttctttcccccacagttgtatttttctactagaatttatgagtacatcattgaatcaagttaaaaaac

SEQ ID NO: 34763 - DNA, 1050 bp, Homo sapiens
aaagttgattatttttctcccgagttactacttatttttacaattacaatgtgaaaattttctctgcagccacatggctgaatgacttttgaattagtgaggaataagcaaaagcagaggataactttttaaaacatcaagattctgatttaatgtagctagttccagtaataaagcagacaaaatgacaaaaatcttggagtgcaaaaagtttagaggctgtgctatgacaccgattgttgtttaatggcattgaacttttatatctggcataattctgtctttgaacttatatttttttgtattgctatggctttggctttccctgccacctttttcagctttgtgtgggtcaatctttatgcaggtaatgaagctgaaaaactgagtggctacaagctttatttgacaaggttctttctcttgtagcttaggatgctaggacttgcaatttgtgtgtgtgtgtgtgtgtgtgtgtataccttagttaagaaaaagcctctttggaaaaaagaaatatgtataaaaccagtatttaattattatctatttgactgtcataaattattagctggaatttgtttaaaaatgtgaaaatgattgtctgcttgtcatttaaaagtcaccctttttatagttaataagtttttaaattttttatttttttgagacagagttttgctctgtcacccaggctggagtgcagtggtgtgactcggctcactgcaacctccgcctcccaggttcaagtcattctcctgcctcggcctcccgagtagctgggattacaggcacctgccaccacgcccagctaatttttgtatttttagtagagatggggtttcaccgtgttggacaggctggtcttgaactcctgacctcaggtgatccacctgcctaggactcccaaagtgctgggattacaggcgtgagctgccatacctgtccataattttatatatagttaattgataatctatatctttaaatgttctcattacaaaaaataagattaaataactctttaaaatcataaaagtagtacattta

SEQ ID NO: 34764 - DNA, 1032 bp, Homo sapiens
aaaaccacagtgtgatatccacagcctaaaattcacagcctaaaaacattctcagcaatagatttttatatagaaacactgatgcaatggaaagaaaaaaagattttaagctagttttgctatatttaaagctacataacatacttaagcaataaaacaatgccagaaactatttataacccaaaacttcttatttccccagtcaaaaacaatcaaacatatgtaataataaaatttgaaatacatctttttaatataaatatttgtctttaatagatagtaagcaattaatttgtcagttttgttaattgctgtgatttatcactgtttttcgttccacaatatgtatatgtatgtgtgtgtatacacacacacaaataaaacaagctcatgtaagtcataaagatcattacatcatttgatacattttacatcatttgataaatatatttaaaatagtcctgaaaatcaattctgccacatgaatttgagagtatatgtcttattagtcccatttttgaatgtctgctgtgaacataatactgtatatttcatttatcatttaatcaatttattagttaatcagaatagaaataaatttatatgtatatcttatttttaataaaatgctaatagtaaatgactatgaaaagagaatctattgataggggttttcctatgttatatgatattttcaagtatattacgctgataaaatattaagaaagcctcttacacagagatttcattctaaatagatacacattaattttgacaaggtaaaaaaagtgaggttaaaaaaagttgtcttgtttgagtattcattaattcaacaaacctttattgaacatttattgcatctcaggaactgtgctaggtgctatgaagaatgtaagaatgcagttaaatgctcaagtgaatcaccagaatagaatataagccttctatataattatagtagatggtaagtgatggcaacaatgagatatctaaaagaaagattttcaacttaaagcagtgattgcctatgat

SEQ ID NO: 34765 - DNA, 1056 bp, Homo sapiens
catgtgtatatgtatgtatatttcttttgaaaggaattggtccagatggtcatatcgctttcaatgagcctggatccagtttagtgtcaaggacaagattaaagactctagcaatggataccatcttggcaaatgccaaatattttgatggagatttatcaaaagtgccaactatggctctaactgttggtgtggggacagtgatggatgctagagaagtaagcattaaatattctttgctgtctttcttttcatgttaatatattaatattttggaggagttatgatgctgaataagtgatattttgattgcattctatttgcagtataaattgttttctagttttcagtaaccaacttttgtcagtctcattgacatgtttagggatcaattaagtcttttggagctgtaaactaagaattaagcaccaccacttttgaggtactatttcacttgcctattcctgctccagtttgaggtcctaaaatcttactgatcacatcgtttgttttttattgaaagtgtctcatgacaggactgttgggacaatgatgcaatgctagttacactacatcttttttggagctcacaggatgatttaaatgctttttgactgtatgttatgtaggatgatagagccctgttggtttccagcagaaaaggaactcagctagggctgcaactgttctacatttggcatatttaagcatggaagagctctgaacagaagaccctgtgtaatttttaagtttttttaaattgggctgtcattttcttccttgagaatacagaacacattgtagtcagttcgtggttatatgtagttaaattatatggaaacccagaactctgttcctttctggtagccagattggacaggttcagaggaaaaaactatagacaaggtatgatgaaaaagtaacttatcttgatataattatatttaaacttgaacatactaatagaactgtcaatcaaaatatatgagaaacctagaaatcataggtatatgaataaaagacctttcaaggactgaaacttcatagtcaataagt

SEQ ID NO: 34766 - DNA, 1098 bp, Homo sapiens
gaatgattggataaagaaaatgtggtatatatatacaccgcgaaattcagccattgaaaatgaaatcatgtcctttgcagtaactggaggccatcatcttaagtgaaacaactcccaaatagaaagaaaaataccacatgttctcacttacaagtgggagttaaataatgtgtacacgtggtgatggaaagtagactgatattagaggcttagaagggttggggagtaggagtgggtagatgatgagaaattgctaggatcattgtacattattcaggtgatagatacaccaaaaccccagacctagtcactaaataatatatccatgtaacaaaattgcatttgtaccccttaaatttataccatttttttaaaaaaaaggaaaacaatatgtcttacagataacagaagctgtgagttactgtaagaatgctgatttccacatctttcatggtataagtcaacctacattgtgtaaaatggaattatgtagcttttaagtgactccgatctcttaatatacgtataataatttttcttaattttagaataatttttgaggaactaaaattgctttttgtcaagaaatttctcctccagagatgagcagtttatttagttcactttgttttctttttcttctgttgaattctcttattaaaaataacatgtctagtgtgatcctattgttataatttgaattctgaccttgttgcttactacctgtgtgaccttagtcaaattatgtgagtccatttcctcatctataactgggcattttatttacttcacaagatggttgtaaggattaaaatatgtacacttgtccctagtatctgttggggattgattctaggatcccccttcagataccaaaatccacagatgcttaagtccctcatattgtatgacatagtacttgcatatcacctgcacccatactcccatatactttatctctagattacttataatacctaatacaatgtaaatactgtgtaaatagttgttatactgtattgtttagggaataatgacaaaaaaaagtctgtacctgtttaatacagatgcaaacatctttttcccctaaatattttc

SEQ ID NO: 34767 - DNA, 1034 bp, Homo sapiens
tgaggataggcttagagtgttttctgagtgtgatctaaacagtgctactcaaaatgtgtctgcagagaagtgcttgtctgtgaactgtttgttacaggtcagtgattcaataaggagcttgggccagaaagtgtatcagtatactgctgtcttcatcgagaaattttggttttaaaaaaattatcagctgaaggaaatagtgtgcttagtgtggtagttaatttatcttcttgtgcaagttatttgttatgatgggccagtgatggtttgtagaacagcacttcgagtagcactcattgtgaagtctcttctaaatttcagctttccatgcagtatctcctttacaagaaaaacgtcttgctatagttagtctctctctcaccacttggtaacactccattagcacattcagcagctttatcgaaattgaatcagtatactaaatactgtgcatactaaagtgtgcaatgtgatattttgacatatacatatttacatccatgaaagcatcaccacaaattaggataatgaacatttgatcactcctgaagctttcctcttggtcctctatagtccctgtcccttccatttcccacaagtaaccactgatctgcttcctgtcactatagatggttgcatttttggaagtttagtataaaggaatcatatagtgtgtaatttttttttaatctggcttctttcagcattattttgcgtttcatccatgttgcatgtatccgtagttcatttctttttattgttcagaagtattatgttgtagagttctgccacaatttattcacctattgatggatattttggttggttcaagttttaggcattagaatacacagaatgctgcgaactttcttgcatacatctttgaacgaacatatgcttttttttgagcaagtactttagaatgaaatggctggatgatatggtaggtttattttttcaagatactaccgaaattaaaaaaaaattttatttgaataatttttgagggtacaggtggtttttggttgcacgga

SEQ ID NO: 34768 - DNA, 1030 bp, Homo sapiens
tctcacctggcttcaccttggcctgcttccttcctctcacagtctgaagttctttgcacttcagatgtgccagctctccttgctgctgctttgaggcttgacagccaaatggcaagtaattccctttaaactgaagattttcagctgctatacttggctttcttttcttggtagcctaatttagctctttttttttctttggcgatggagttttgctcttgtcacccaggctggagtgcaatggccgatctcagctcactgcagcctccagctcccaggttcaagcgattcttatgcctcagcctcctgagtagctggggttacaggtgcctgccatcacacctagctaatttttgtattttttgtagaaatggggttttgccatgctggccaggctggccttgaactcctgacctcaggtgagtcgcctgcctcagcctcccaaagtgctgttattacaggtgtgaaccaccgcacctggccataatttaatggtttttactaaaatagtcatatgatcagagtctgtttccatgtgtttctccaatggtactttttttttttttcttttttttgagatggagtctagccctgtagcccaggctggagtgcagtggcatgatcttggctcactgcaacctccacctctagggtttaagtgattctcctgcctcagcctcctgagtagctgggactataggtgcacgccaccacatccggttaattcgtactttagaactgatactaaactcatgtggcattcatgtagcctgaaattgtcctccttctttttgcttctacccagacacagggctgtctttgccattactcctgactccttctttttagcacttgcttgatgtaacaatcaccacgtatgtacatgtccttcaccccaggagactctttcaaacaacaggttgggttttttcttgttctgtttttggtttctgccatacccgggttgacaggagggaagacatcaaaagagacattatttttcacaatatactcataacaaaaagaagaa

SEQ ID NO: 34769 - DNA, 1062 bp, Homo sapiens
ctctgcctccctggttcacgccattctcctgccttagcctcccgagtagctgggactacaggcacccgccaccatgcccggctaattttttgtatttttagtatagatggggtttcaccatgttagccaggatggtcttgatttcctcaccttgtgacccgcctgcctcagcctcccaaagtgctgggattacaggcgtgagccaccgtgcccggcctaatcagacattttaatatttagtatcatagtcagccctacagtttgaaatattctcttctgttatctcccagtctcctttctgcttacctaaaccctgaatttgttgaatacaatcagtagtggagagtagtgttttaaaaaatcaaatcaatatattgactatatatcattactattaaaacattacccaaattgatttttatgtaaatggaaactttcaaatcaatgtatgcattgaatttaattaaaatgatgctgtttttatttaggctgaactagaagcttttgaaaacagactgaagggtcgtcggaagaagaacaggaaaagagatgaagtggcagttgagctatcactatggcaaaaacataaatattatctcatttcagtgtgtggagttgtggttgtagtgtttgcctggtacatcacccatgatgtcaattaaaaaaagttttgatcttttaatgtaactcagattggatttagataagttgttaaatttgaaatattagaaaatgtatattatagaacatgatatatatttacattcatctctgtattctctcagctgttgttagaaggacagaatgttaaactttatcttaattagtatactagaaagggcagtataatactgttttaaagtgaaggcatgactgaaactaaaatatttcataaggcttagctagaggcagagtaacgtgtttttgttcattgggcttccttgtacttagttttttcatttaataattcaaaccaacacttttaaaaaaataattcagatgagactgagccatatctgcagtaagagaaatatttcttaatgttttggttacttatgatag

SEQ ID NO: 34770 - DNA, 1023 bp, Homo sapiens
aggatctctgcatcctaagggggctttacagtgagatgactacttaaaccaccatctcgctcttttaagtttttagattcccgagagagaaaacctaatagactcaccatggatccaagggctccttttggcacaggcagccacagtcagggaactagaacaggtagcatagccatggctgtggctactgggggaattatggtgaaccaggcagccatcccaatgtatgtcttctacaaattttaccagtatgtggcagggtcaaatgaagggtttagagaaaaaaagatacatttattgaaggcagaagacctagccagagaaaagacagactttgaagtcgtcaatgaaattgtgaagatgagtatgaggtcttttaggaggcagaaagatataacatcaagaccagtgatttttaacttttcatcaacccccagcgcaacagaatactgattaaagtgaaaggcgacactatagccatgatcctatgtattttcaaaaggtcttcctttattgaatctgataagcttccctattcactttctcctatagaatcattgatttaaatgatagatatcagagactgagaaggattgggggaaggggatgaagtgatgttgattaaggtatatttccaaatagctggaagagaggacttgaaatgtttgcaaaacatagaagtgatcaatactcaagatgataaataccctcaaataccctgacttgatcgttacacattctatgtatgtaagaaaattacatgtgccctataaatacatacaaatattatgtatcaataaatatataataaatttgaagtggaagggttagttactttttaagagaaaatgactaatgtaattaccttagagattaattaaggaaagaggatatagagacgtattttgagagtaagaataagtggtgagctaatgccaaatgtttatgaagtctggctaaaggcactggcaggaatgaaggtaagaatgaaattaagcaatacaaaggcttgaaacaaccact

SEQ ID NO: 34771 - DNA, 1086 bp, Homo sapiens
tggtgagaacacttaaaatctctcttggcaatttttaagaatacaatgtatgttattaactatagtcatcattttgtacaatagatcttttgagtttattcctcatatctaactgaaattttgtatactttgactaacatccccccaatccccttctgtccttcagtcactggcaactaccattctgctctttcacttctacgagttcagtttttttatatttcacgtatgagtgagatcatgtggtatttctactttttttgtttgtttgtttttttttttttttttttttttttttttgagatggagtctcactctgttgcctgggttggagtacggtggcgcaatcttggctcactacaacctccacctcccaggttcaagcgattctcctgcctcagctgcctgagtagctgagattacaggcgcccgccactacgcccagcaaattttttgtatttttagtagaaacggggtttcaccatgttggctaggctggtcttgaacccctgaactcgtggtttgcccacattggcctcccaaagtgctgggattacaggcgtgagacattgcacctggccggtatttctgctttttaaaattatttatgaatttggttgtctcattcccatgcaagcttttctactttttacttgggaaaattatttaacttctgtgtaactgaacttattcatatataaaatggggcactaataatacccacttcagagtgctgagtattatatgaggtaataacatgtaacggacttagttaatggtaagcgctatatatgtggtagctatggtgattatgattatctacaaataatattgttctacaagtgtttcttagttcttttgaaagagggcttttcctattattggaattaaagtggaacgttttgatgcagacagtgttgtttgtaggtaaaccatttggtatgacttactgaagtgctagcagaatgatgttgagggctgagtagagtagaaaaaacctgtcccactttgattgggaagggtaacacatctcatctctaagtgaatattttagaaagacctctgttttttgctatgaaatctgta

SEQ ID NO: 34772 - DNA, 1047 bp, Homo sapiens
tctctgtctcccagactggatgcagtggcgcactcacggctcactgcagccttgacctcccaggctcaggtgatcttcccacctcagctttcctagtagctgggactacaggtgcacaccatcgcaccaggctaattttggtgtttttttgtagagacggggttttgccatgttgccaaggctggtctcgaactcctgggctctggcagttcaccttcctcggcctccggcagttcaccttcctcggcctccgaaagtgctgggattagaggcatgagccactgcacccagcctggtgtacttgttaaaatccattccctttagttagtgctgtggtctaccagggtattttcagtattttcatatttagggggacctttttctgttgtgattttagctcagcctcctcttctgtttttcatttagtttttttcagaactccactagctctatgaaaatacttgcattgggagcttgaaaaatagctctctcaggagttgtttttttttttttcctagttataggtaatttgaagtttgtagaaatttgtgtcttctagttgtgctgtggtcgtgggattcagtgattttgttattaatgagctatatgttttttgagggggacatgtggatatatttggattaaggtggcttccattacctcagcactacagattttttttcttaaatacatattaaagtatatgttttaatatagaattctatcgcttcagttctaataatttcgtttgctttcaattcagtgaattatttaagtcatcttttccttttagtcctgtgtggaaaaaaacacaaactgtttttcctctgctcttaaaacacaacaatcaacacaaaagacttttgtgaccaaatgtgtgggagtttctttcaaccaagaagaaaacaatcacttctgtagcaggcaccagctgggtgtcctctaattcatttctgagactacctggagaaagtgtcagatcctgtaggttgagggcttagtcccacaagactgccttcccttcagacactggtctgaagttcaggc

SEQ ID NO: 34773 - DNA, 1049 bp, Homo sapiens
tcattgctactatataggaaatcagttgacctttgtatattaacttcgtgtcctgtaactttactataattgcttattccatatgtatttatttttttaatgctagtagagttagcatctttaggtattatttttgaataatttgtaatgttttcattttattttattttttccttgtagggaatgtcttgggaaacatgaggtaagttacaggcacaatttttaagtaaagcttataatctatactgttacatactagtataactttactagagttgttagaaataacaaagtcaaagtattgttattttactgttataaagagtacaagagtttatctactaatttaaaaaatatgtagtgcctttatttgagaattagcctgtggatatgcattcactacagaatcatattgaattttccttttaggaggagaacattttgcttcttggcattcattactttgaaatattttgacaggttactttgattttgatattattattattcgtgcaaacttatacctttctgaaacttgttctcaaatgatagcagagtaattttggaaacatataatatgtccagaaacgtttgagtaatgtgtgctgtgctgatttcctttattttttaaggtgagtccactaccatgccatgctgtaggaccctactcttgtaaaagagtttgtggaagaatcttggattgtcagaatcacacatgtatgaaagaatgccacaaagtaaccaaaactgatggctgcactggaaaaaacaaggtaatgttcttagattgaatgtatatctgcccatagtattcttgaaacgttttttcaacagttataccataaatatttttctgttttgctttagcttcctgtctctttttttgccctcatcccttctccttcttttcctttcctaagacagctggccttagacagcttggtgtgtatagttctgtgtctttattccagctcataataatgtgccttttaatgtggaaccctttacatactgtacctgtgttaatacataggatatggttttatgat

SEQ ID NO: 34774 - DNA, 1050 bp, Homo sapiens
atttgaattataattcttaatttgtgtttgttttagggaactattttgaacttctagaggcacttaagccaggatattgtccatctttaatcttttttttatcaggttaactcccggtccatgttttgcttggtcctgacacctaggcaacagtctctttaagatattcatttcttcattgaaaactcttcttcctttattatttcatttctgatagagttccttactgggaaaactagagtggaagaaagcccttaagatgatgacagaacctcttggagcgaactttatagcctgctttaaagatttctttgattttgtttttttatatttttgccaacccataacaaaagagcgtaaaaagctgaaaccaaaataacatttttttttatgtttagaagagaaatatttgggattatatcctaaaatggtggcttagtacttagtctttcacaaagcacaattaatggaaaattgactgtgcttgctactaaccaatatcaggtcatgagaaagaagttattgggaattcatctaaaaattgtgtacttggatagatgtatgaaagtaggccaacgatattattgttaatgttaaattttccaaagacttaaatccatttttgcttgttttagttttgaatgagtaatgtgttaaatttgttatttagaacagaagttttagcacattttagagaaatgtctaaaactttatgaggtaccagtgtacagagaaaaaagtgttataaatcagaggctgggtgcagtggctcacgcctgtacacccagcatttgggaagctgaggtgggaagattgcttgagtccaggagtttgagaccagcctggatgacatagtgagacccctccatctctataaataatcaaaaattagctgggcatggtggtgtgtgtctgtagtcccagctacttggaaggctgacgtgggaggattgcttgagcccagaaagttgaggctgcactgagctgtgatcatgcaacagcactcagcttgagcaacaggttgagaccctgttacaaaaaaaaaaagag

SEQ ID NO: 34775 - DNA, 1050 bp, Homo sapiens
atttatgtggcatttatttggaaacagaacatgttctcgtgacaatgaaaatattttgtatatgatacaaaagaaatttaaatgttaatatgaaacttgttctagcataatatactaactatactcatttgggagttaaggttagagcatcttttgagaatgaactgatctatgatgatctacaagtatatttttgatagagctgaaggttaacacttctactgccaacacttatgtattttaatgatggaagtttaaagtctttcatggtatttgaacttttctttgacttaggcacattcgaattatatctttttttgggctgggcacagtggctcacgcctgtaatcccagcactttgggaggccaaggctggtgaatcacttgaggtcaggagttaagaccagcctggccaacatggcaaaaccccggatctactaaaaatacaaaaaattagctggacgtggtggcgtgcacctgtattcgcagctacttgggacactgaggcacgagaatttcttgtacctaggaggcagaggttgcagtgagccgagattgcgccactatactccagcctgggtgacagagtgagactttttctcaaaaaagaaaaaaaaaagaattatatgtctttttgtgctagatgttgagaattatgaaattctttattttcaagtttattcccccttaattctaaattgtagtcatgtttcttgcggtattgcatgtctataccctgacttctctcttctgtttgttgttgctaatatattttgtttatttgtaaaccacaaaacaaaacttaaaaagttgagctttgtgaaaagcagagtgaattcctcaataaagttcaggtggttagtagaaaactaatgttactttctttttgtagctgtattctagatatgtgctgtttaattcatggtaactagccacatgtagctgtttcagtatttagaaattataagaaatttgattccttcctcagttgtaagcactagccacgtttcaagtgctcacagtatgtggctaattgctactgtattggac

SEQ ID NO: 34776 - DNA, 1033 bp, Homo sapiens
caggagtttgagaccagcctggccaacatggtgaaaccccgtctctactaaaaatacaaaaaaattagctgggcatggtggcacacacctgtaatcccagctactcaggaggctgaggcaggagaattgcttgaacttgggaggtgaaggttgccgtgagctgagattgcgccactgcactccagcctgggagacagagcaagactccgtctcaattaaaaaaaaaaaaagaaagaaagaaatatttttgcatgtaatgtcaacatttattaatatatttgtagatatgtcatattgtttatataccttttattagtaatatatatttatgcccttgcttggttctttttcttactttagtatactgttaaaaccaggaaaaaccttacaaatattttgggaaacaattctacagaggagaggtgactttcctagagttagacaattagtaattggcagagctgggtttaaacctagttgacttagctttagagccattactgggctgatttcattttctctgtaaaagcaggaaaattctgaggagactagacggttacttttgtacctgtttatggggaaaaagcagcattgtacagcagttaagaacattgacacttgaatcagattgctacggtttgattcttggctttgttacttggctgtaggatgtttgacatattgcttagcatcttaggggcttagtttcttttgtaaaatgggtataatgatactaaatactgtagagttgttaggatgaaatgaatcagtatgtgtaagtactgtagtgcttacagtagtgcctgttgtgtagtctgtgctgtatatctgtttgctggaatgtttaatgtattttgtggcttgattattagagattttctatcgtaactgctgctttcttttaaaaaatttgtttcttttttttttttttttttgcgacggagtctcactctgtcgcccaggctggagtgcagtggcgcaatctcagctcactgcaagctccaccacccgggttcatgccaatctcctgcct

SEQ ID NO: 34777 - DNA, 1033 bp, Homo sapiens
tcaccagtattttgatagttttattgtattttcatattttttttcttgatttgttaatcaccgttatcataaaaatttgctgcattttagcaggatacttagaaaagtgaaagtttttgttgtggtattctctttagttgtgtgtcaaggaatttgaaaatacttttctcgtggattacaggaaggtagaatgctccaaaggtgactttcaaatgtgtgttgtaaaatgatatattagcacattatgcttttctttttgagagattgttttgcagaaatgaaacttttttcttttaaacagagctaatgtctcagaaaaaatttgaagaaatcaagaaagctaaccaagctgcagccagaaaacttgttgaagaacagtttagctcttcatctgaagaaggagatgaagattttgaaggaaaacagggaaaaatacttgcaaatacgtttataacatacactactcagacaggtactgatcttttaaattttgacttttgacgtcaatgaaactgtattcctgacatttttttggtaatgcctttgttctatatggaatagattttatatcttaagatgagcactgtatgttatagagttgaatttttgtacactttggtatttgagttatatattgtgtaacactaatttttctataaagcaaatagaatggcagtggctcttttatagccttaggaggcctttgtgtgtatttaattggcatttcagtagaatgcttggatggggctgctaaagctcctgagcggtggactggggcaagttttttctggttgtgatgatttgattgaactagagtactttgtgtactcctttcaatctattcattttttttcatcatgttaaatgcgtcttgaagtctttttaattctttatttccttattttatatcttatttacaacatctgattttcatgtatttatttttagagttggggtcttgttctgttgcccaggctggagcgcagtggtacgtagtggtgcgtagttcactgcagtcttcaactcctgggct

SEQ ID NO: 34778 - DNA, 1049 bp, Homo sapiens
agccacggcacctgacccattctggagtttttttgggggggcaggacagaacagtttcatcttgataaattaaaggatttaataattttgattacaataatcacagtgttagtattttgaataattttagcagttagtgggaaacatgatttagataattttaaagaaattgcaatattttgaatcagagcaaaatttccttaacaatattactgttaatttttttatgtcttatgattctaatgtttctcctttttttcttttaacagaagaaatacagaaaggggtttattgatgtttcaaaaatcaagtgtgtggaaatagtgaagaatgatgatggtgtcattccctgtcaaaataagtatccatttcaggtgagctggtgtatttttgtggcagtgcagtgctgggcttagtcatgtttgctctttgacattacagtttcctgtccttgctttgctggctgatttgtaggttcatttgccactttaatagttgtgacttttcttcatgaactgtttaagtctttgtggaaacattttctgattcttaaggagttggggctaagactgaaaagtgaggttgaagtgttccctatgaatctgagaaactgagaagtgaaaggctcaagtggaaatgagattaaaaggctgcttgtgatgaaaaaaataatattagacatatattaattaaactatgcttcttcggggtaatcatgttattttttttcccgacaatggttctgttgcataagggaggtaaatatctcattattctcatttatgtctgaggaaatcagtgctcacctgttaaatagcttctccaaggtcaccttgtaaatgaaaagtctgccaagcacacacacgcgcatctcctctccagaagaggagggtccggcgtcctgagctactccgcattcctgccagtatcttggttcccacctgccttgagaactcaggaatgtggagttggatcctgataatctggagctctcagcccctccccagcacctcaccacttccttccctgctcaaggatgtttttatgct

SEQ ID NO: 34779 - DNA, 1035 bp, Homo sapiens
atattttgaaatgaaggcactttggcttccttattagcaagccatctttaaaatgctcatactcatatggctaaggtttagatcattcaattcaacaaatatttattgtgctttcggtagatgccaggcattcagctaggtgccagaaagaagaataggacatggatggccctgttttcagagaacgttctcttgctgtctattaagacagagaaggcttttaaaaaaatttcatttcaggccgggcactgtggcttacgcctgtaatcccagcactttgggaggccgaggtgggcagatcatgaggtcaggagatcgagaccatctggccaacatggtgaaactccgtctctactaaaaatacaaaaattagctgggtgtggtggtgcacacgtgtagtcccagctactcggaaggctgaggcaggagaatcacttgaacccgggaggcggaggttgcagtgagctgagatgtcaccattgcactctagcctggcaacagtgcgagactctgtcccaaagaaaaaaaaaagagcgagagagagattgagaccatcctggcgaacatggtgaaaccccgtctctactaaaaatacaaaaattagctgggcctggtggcatgcacctgtagtcccatctactcgggaggctgaggcaggagaatcacctgaatgtgggaggcggaggttacagggagccgagatcgcgccactgcagtccaacctggcaacagagtgagactccatctcaaaaataaaaaattaaaaaaaaaaaaaaaagaaattacatttcagtgtggaaaattcaataataggttcaaggctttatgaaaactgagaggaaagtgatcagctgtgcactgggagtgatggtaagaaaggacaggtttcatggtaactgggacattccaggcagagggacacaatgtagaaagggatggcagtgtgaaatagcatgatgtgtctagctaaaagcaggaaattgagtatttccagagagtaaaatgggaggagggagaggaagagcaataggagca

SEQ ID NO: 34780 - DNA, 1034 bp, Homo sapiens
tgcccttcccaccagctggaggctgctggtcaccactggtggattacgtgcctgaaacgtcatcacctggattacctcttcacaggtggactacagcgtcattccttttacatatgcaccaagttgctgctgaacactgtcggctttctttgtgctatctgacaacacagaatgaaagcaatcttctttatggagatactgcaacacagatcaatgtgtttagattctaagaaatctaaaaaactcagaattctaactttataaaattaatattattaaatctaattctgctgctgcttttctgggtgtctggcatagttacttgacctttctgggacccagttactacatctgaaaaatatgactttcctatggtaggcactattattttgcatcgagttaaattgaattctacttagcaaaatcacaatagagcaattactgcattctttcaaaatgtattaatgcaccaaacatgtattgaacacctactgtggcaagcagtgtgctaagtctcaaggttgaaagatgaagaaaatgtggctcctgagttcaaggaacccttagcccttatgttctgttccatctctttaacttaatggttaacgttttcttcagctgtatttgtttttcctcctttttccttgataagttgtatttttccatgaaatgtgatattaaagtcttcaagtaattttgtaccaaattctctctaggtttactgagatctagtaaaacgttaatgaaactcttatttgtcataggtgtaacatagcagtgatccttttgactgatctcatcattgatcatagtgtgaaggtggaatggggaagctacctccatcttcttcttcatgcaatttttataggtaataaatatttggttctaattctttcatgttatatttttatgataatttaaaagcagtatggttttatgacagtttttatgtgtttctgtttcctgttatttttatgttatttccatgacacttttcactatgattcctctggtctcttggggagttatgtctg

SEQ ID NO: 34781 - DNA, 1025 bp, Homo sapiens
atgccagaatattattttaggtagaaataattgattaaaagtttaagcttttggattataaggtggaaattaatgtacgtcatagtaaacttttgttagtattttgtgtactgtgtcctttttttttttttattgagatggagtctcgctctgttgccagactggagtgcagtggtgcaatctcagctcaacctctgcctcccaggttcaagcaattctcctgcctcagcctccggagtagctgggactacaggcacacgtcaccacgctcggctaatttttggtattttagtagacacggggtttcaccatgttggccaggatggtctcgatctcctgacctcatgatcctcctgccttggcctcccaaagtgctgggattacaggcttgaaccatggcgtccgtcctccttttttaaacagagaaagtgaaacataaagtataaataccattgcaccgtgaactgtgactaacttcagtgatcattcccatagctatgtgcacctggacatttacagtggactaaacagtcatttgaatcggcaacatcacagactagaatcccgatacagtagcagctctggaggatcttatgaagaagaaaaaagtaataaattccaaatgtttttaatataactataagggtgaggtgtattgttaattacattaatgttaataaatatatattttcagtaaattgtttttaaaaagcgtatttaactgccactagtggtgttccaacataatctgaaacatcttgattttaagaagcaacgtaattgggtgaaattttttttaaagcactggtttcctatagataaatcacaaggaacataagaactggttctcaggaagcatcatagaacaaatactggaaacaggctgattttttttagcaggattgctccttctgcatggattcactttttccttaaaagattctcccttggcaattgcaaagtgaataatctacccaagtttcactataacgttaaggcagggtatcatagaagcacaggctttc

SEQ ID NO: 34782 - DNA, 1024 bp, Homo sapiens
agaacagtttttatgtagaataggacttaaatatctttaatgtataatttttaataatattttgaaaatacaatttaacaatatgaaagtgttatttcatgtgtacctaaaaactaatgggacttatttaagactttattttttttagagcagttttaggttcacagtaaaattgagaggagggtaccgagatttcctgtgggtaaatttccctacccacactcatacctagcttcccccgtaatcagcatcccccttcagagtgatacatttgttaaaactggtaaacatacattgacacatctttatcacacaaagcccacagcttacattagagtttactcttggtgtgttgtacattctatgggtttggacaaatgtataatgacatgtatctaccattatagtatcatgcagagtattttcactgccctaaaaatccttcatgctttgcctattcatttctctctacctccctaactcctggctgaactattttgacatctgatatcttatatttaaatgatagaaaagaaaattatgttttctcaaagacattactacaaaatgcttggttgttatatttgtagtatacattatatgttactttagttacattactaacaaacataattggaaattgctgggggagtatatttgaaatttgggatcattatggatctggcagtggagacagggattgatactgcgagtctaatgagcacagtaactgatcctccatttttaattatatcaaatctttatccaaatagatgtgcaaaaatctaaaatgtaaattcacaacaatcagtacatcctaaaactaatcaacggatgtataaagagtttctccgtaaaaaaaaaaaaaggagattattagctacatttcaaaattattggtcatttgagaactttattttttataacagctagaatgaagaaaaagtttgctgatcaaattgtaattgaaatggaataactgattctaaataataataatttaaataatgtccttattctaaat

SEQ ID NO: 34783 - DNA, 1034 bp, Homo sapiens
gtcttggacatttcaaatttcttctaaatagagaccttggtgaagagctgtcttgttttgtgcttattttcatctaacatgcatgtgctgcatctcatgtttatgtttgctgtctcacattgctttatttagatgccatctaacaacagtatcagaaaacaaatagaaacactccaggtgagttgtgtcgacattacaaagtaaaatactgctttatttcctttaagcgtggcatttgtttttccttttcccattgttgcattgcatgtctaatgtatttattccaacctgcttctagtattttaagagaagagtagcacacagcagaaacattcttcagaaggtttaatatcagtgtggccccaagaagatgaatttaagaaatagaactgacactgaatgctgattcttcaccaaaagtcacaattttaaaatattctgtttaacatacattatctagctgttataaatgaaaatgttttaaaaatttccagtgaaattaaggagacagtagcttagattttgaatatagtttgttgttgttgttgctgttatttttaatttttgtgggtacatagtagatgtatatatttatgggatacatgagatgttttgatacaggcatgcactgtgaagtaagcacaccatggagaatgggtattcatcccctcaagcatttatcctttgagttacaaagaatccaagtctactctttaagttaatggaatacagtactgacaaattaatttttaaaagtttatcctattgatttgggtttgttttttgttttttgttttaattttttcagagagagggtctgactagcccaggctagactccaactcctgagttcaagctgagactacaggcatgcaccaccatgcctggctttactgattttggttttaaacaaatcatttttttagttcacagtagaaaaaaagagaagaaacattaaaatgattgttgccaaagactatatttgactgacataccaaaattttgttttatattaagttcattagatttttatt

SEQ ID NO: 34784 - DNA, 1050 bp, Homo sapiens
aggaatatttgttaattcttttagaattatagagtattaatctcacaaaaccttctagatacttattttgtcttttgagaaaatcagtaatgttggtttaagtctgaacaatatgagaaaaagctttgataatatcactaaaatcacatttaagtatgcccggccatatctaaaagttggtactggatctgcacagatgtaaaagctcctgaaatgattctgacttgaatgaaagggtacttgtcattaacactatttggcacatccatattcagcctctcttagtcctgaaaacaaaactgtgagagatagaaggatcattttcttcccaggatgctctgctagcaggatcctcttttcttctttgggtaggaacacaattctgacagtgtgggaatattcttcagctgcatgtcatgcgaatgcttgatttgaatattcttttgatatatacttagatgagcctatttgaatatttgcttgcaagttatagaaatattgcagacatgacattccatttcctggtattcctctaagttagacttgagactgaaaaccttatactttgaagataatggaaccgaggcagatagagaaagtgacttgtctctgggtatgcagctcgttgtgctattgtaggaataggactggatcttctttcatatttcaggaatgatccactggatgttatcctgtacgtctttttcatgattttatgtataattttcaaaactgcctcagtttcttaggtatacggaatatatactactttgagaaatgtttttgtctattttccttctagataaacgttgatattactcatgtttggatgagaatttatatgccttatttgactatttatgaaaattcccaggaccaaatcaaactgattgaactctttatgtcatgcaaccaggaaataaattttatttaattaattacattatacttatttctgttcttatttttggtaatttgtacagatatagggaccaaaagagaattgatcatttttctggatagtatgatttttcatacgttcattaaaat

SEQ ID NO: 34785 - DNA, 1041 bp, Homo sapiens
aactagtgtataaaataggtagtatgtcagattgtggagagtaatgtgaagaaatgtaaacagggtagggggcataggattgccaaaggggtgagggagttgaaattttaaaaagagtatgattagggaagaccaccacatcgaaagagttggtagcaattgagcaaaatctaaaggaatgagacagtaagacttcctgtgtctgtgggaagagcttcttgggcagcaggccccagcgtagacatcctaaggcaagaaattctttgatgcgttctaggaacagcaaggaagctccaaaggctgggtccccatgcacatggtcagagggtgggagataaggccagcaaggttaaatgggaggctttagcactatttctgttaagagatgttggatgcagcttagatgttacttccttgttgagtttttccataggggccccttttgagtgctccaagagcacagagaatttgctctcagtggacctgttatactgtgtcctcttagcctgtattcccactttgttcactcagggctgggactaggtttatcttatgtacttaacatttggtcacttggcacattgtagtacttcagtgagagtctcagtgaattattaaccaatttcaaaccttacagaaagttcttgtattctttgtatagtttaatctaacatctgtatcattttctttgtttgcattatctttttactaggctgttaaaaatgaagtgaatgttccctgtttgaaaaattttgtggagatgctttatcagactacttttgaactgagctcgagaaagaagcattcattggtattaagaaacatttcaaaccttttcatatttaattgggatttttagtaattgatttatgaattcagtggaaatttaagagaatggtaaaatctgaaattgtaaaatccctgaagtgcaatacaagggcaagttttacatacgtatgttttgcgtggctctatttaaatgttctgttcttaattttactagctctgcatttgttgagttgttcagacttccttctaggt

SEQ ID NO: 34786 - DNA, 1028 bp, Homo sapiens
actacttgaatattgaaaatctgaattgaaatgttcattaatagggggctcctcaaattgtgatatatacatatcaaattgtgatatatacatattgagtgtatatatgtatacatattgagtgtatacatatatacatatatacatatttcaatatatacaatatattgaacatatatataatatatgtatatatacaatatataatacatgtatataatatatgtatataatatatatgtatataatatatgtatataatatataatataatatatgtatatatacaatatatacatatatactatatatacatatttcaatatgtatataggtatacatattgagtatatggtttatatatacatatcaaattgtgatatatacatattgagtggctgttagaaagtataaggaggcgctctaaatactgacatggaaagatacattatttggttaagtaaaactaaggaatgcacgcatgcatgtgaggatgtgtaggaaaaagtctggaaggatgtacatgaagttgttaatagtgattatatgtggtggaggagtagggcttttattactggtttaaatgtttaaaatttgttttacataataggaactagcatatactcttttagagttgaaatgagactatttaaatgtcgggtttttaataataagtctataaatagtttaagattgttagaaaagatagtgtcccttgtgaccattttcatgatagttcaaaattgagttatattaaatgtagggctgactcattacaaaggtgcttttctgtaagtgttacagggaggtgtacatgtctttttagtttgctgacagtaaatattaagcagtaataacaactattgcttttcccactgcatagtccatagttcagtgatttgtgattatgaagctaatattcttaaatttagagcttgtgaaatttgatgagtaaccaaattcttagagaaaacgagattctcagaaaaaaggaagattgacagattagtaataatcccatgaacatt

SEQ ID NO: 34787 - DNA, 1071 bp, Homo sapiens
gctaatctttgtctttggatctgtcaccatattattccaacctatagtatcctttctacttacttcttcccctctgttactattatccccatacgctaatttaaatgcactcatcaaaaaatatatacatttatatgtatctcaccaagaacatagatacactttattcatctaaaatcctatgtagggattattcccgctggtaaaaggcaagtctttgtagcttctctaataaaactagagaaaacgatgtaaaaatcaatagagcttgctgaaatatcaccactaactaacccaattttcttctgtcagaataacatgaggtttaatagatccagagagtaaacaatgtaatatatctacaatttaataggacttttacttttgccccatataatacacctatattaaaatgtgattcaggtttattgtgatgaggcacacagtctacagaggattgaagtgttgataaatggttgtttcagtcttgacgagtaaaatattccttataggttagactttgacctcatgtattagaaattatttgtatcttgaataatttgttttgtctgtaataatcacacgtttggaactcttcaaaatgtatgaaggactctatctcttttgtgccaactgatcattgtaataaaccctgggagatggccatggcaagtactattaatatgccagctctcttgcttgctttgtaactttgggcaagttattatccctgactcttccttcctctataaaaatgtgtgatatcatttttgtagaatcataagaattaaatataataacgcctaatgcatggaaagtcctcaatacatattatctattattttcactttacaggtgaagaaatgttcttaattgtagtgatttgctgaagattataaagcaaattcattgattttactccaaattttctctttaatgataaaaataaacttaattctcattggtaaaatatgtgatacattaggtgaaatggccagtatttttttttttattattatactttaagtgctggggtacatgtgcagcacatgcaggttttttacataggta

SEQ ID NO: 34788 - DNA, 1062 bp, Homo sapiens
ttgttttgcagcctatattatttgctgctgatgtttgttaaatattttatttgttttctttgtctctggctgctggatacctttaggtatacagttatattactttgtttgctacttgagtgtaggtcagactgctaccgtcttttaagaagtaatcccaagagtgatggaagggaaagcagcctaagttagcagcagttaacagcctgttaagatagtaggagggagcccctttccttcttgtcttttctcatcatctcaccctctaagctacagaggactcagcccatctatttcaattctgctcagcttcatagcagtcagagaaaagggctacacatctctatgtagttgtcaacctcccccagtccctgggtccaggtatgtttgctggatgaggtcctgcaggattctggtgtttacaggactattttgtgttgattcgcaggtccatttccagctagaggagaaaagtcagccacaatagctttttcactggcagtgaatatttatatcaggggaagagtggagaacaaaaatgaaaacaacattcttgttgcttcttacacatactcatggtagcaatataattcagcttgttcatttgctagaagggaagcaaaagaggttaaatttgaccaagattataaccatcatgagtagccaagtcaagtctggagcccttgtcttctggctcccaggtccatgcacatttttaaaatacctcattatctctaggtttttagaatagtttcttagttgagctcccaaagattaccaaaaaagcacaagaaaacaataacctcaaggaaactatagctgagtgaataatggattatttggatgataggtcatttttcttgagctttataataagtgatatttctgtagtagacttcaagtaaaaaacattggacatatgccaaagatgtcataggacttctatgtttagaaactcttttcaataagaatagtttaggataaataaacattttagggacagctgtccaaagaacaagcagaagtaataatttttctgtccatcgaaatggaaccagaagc

SEQ ID NO: 34789 - DNA, 1034 bp, Homo sapiens
ataagttgtatgaaaaattttagtgtgtgttcatgtgcatttttccagtgagaggtttgtggttttcatcagattctcagagcagggcccagcacacaagaaagattaaaaatggctcctttagaggtataagttacatcaaagacatttgccaatcacctcaacaccaaagcttctgccatctgtcacataccctcccctgatttccatcctgtgtctgtaacctttccttagggacattaaaaatagaatttattgttacccaagtgtttaggaataggccaagaagcaacacaagagttcattattagaggagaagagacacttggaagtcagttatattaccccagcaatcatttttttaagaaggatgttcatacattcacatatggttgatgggatcctgcaaaacaataggctctatgtgtcaagatatgttaaaatgttcataatatctaagccaatatattacactttggggaatgtcttcatcagttctggctgcaataacgaagtaccttagacttcatggttcataaacaatagaaattaatttctcatagttctggcagctggaattctgagatctgcatgccagcatggttggatgctggtgaggaccctcctccaggttgcagactttggacttctctgtgcatcctcacttggtggaaagagagctagttagctctcttgcctctcctgggcactaatcctattcatgaggaatctaccctcataacctgattacttcctaaaggtcccacctcctgtcatcactttgggtagagatgtagccatacgcctaacaatggggatacattctgagaaatgtgtccttagtgacttttgtcattgtgcgaacatcatagaatgtacttactcaaaaccaagatggtacagcctgctacacatctaggctgtatgatatagtctcttgctcctaggctacaaacctttacaccatgttactgtactgaacattgtaggcaattgtaacaaataagtatttctatgtttagatacttactcgt

SEQ ID NO: 34790 - DNA, 1085 bp, Homo sapiens
tgttgtagataagcataatagactttgctctgtattaatggcctgcaaagaaacagggaagtctttaatcttggtaaggtttcattcatcccaaagcacactgtggagtgaaaactactggaaaagcagatgcagaggtgaggcctaactgaatatgtattttctgaaaaatcaggggagtcctttctttaaaatgtgacataaatgtaattttatactatggctatttcattttggtagctacattttcatgccccagtaagaaatcaaacattcgcttaaattggcaaccaagacaagataactttccgaaatcttaaattgaaaattaaatttgctgcttattgctgttagtttttatatattattgtgaataagtcaattcattttcctttttccaggcattatgaaaaacctctatttcagagtcattaccatagttataggtctttattttactggaataatgacaaatgcatcaagaaaaagcaatattttattcaattctgaatgccaatggaatgaatatattctgacaaattgttcttttaccggaaagtgtgatatacctgtggacatatcacagacagcagccactgtggatgtaagtttcaatttctttagagttctcttacagtctcacacgaaaaaagaagagtggaaaataaaacatctggacctcagtaacaatctcatatcaaaaataaccttaagcccttttgcatatttacatgctttggaagtgttaaacctcagcaacaatgccatccactccctctcattggatctactcagtcctaagtcctcatgggtgaaacgccacagaagcagcttcagaaacaggtttccattgctgaaggtgctcattcttcaaagaaataaactcagtgacactcccaagggtgagtacaattttaactaggcagagaaacaatgcttacgtggagttgtttcatgttcataagaattccacatttgttttcaggttcaagggacagctgaaagtaaagcaatttgatcagagcacatataataatgtttcttagtggcattggaagttatagtgtgtggaatttacagctaat

SEQ ID NO: 34791 - DNA, 1065 bp, Homo sapiens
aataaatcatattactattctcctaataggaaaacagtatcatcctaaatggatctgtgatggtcagcaccacccgcctacccagttcctccagtggagaccagttgggtagtggtgactgggtacgctacaagctctgcatgtgtgctgatgggacgctcttcaaggtgcaagtaaccagccagaacatgggctgccaaatctcagacaacccctgtggaaacactcattaaaagaaccccagaggtcaccaacatgtttatatcttgacttgacttttttatgcatgcaaatcattgtttttacagagtttgtgataactcataattattttaatggcagagcactgctgtatctgttttatggtctacatagttaaaatcttctcagagagcctaaattctaatacattttattaatttatactaatcttcatatttactgttctctaaaataattatgagaagcaaataaaatcaaaagtcatgtttaaagacgtgtttttaaaattccactatcccttttctaaaggttaaaggtctgaagcagctgtttagattcactgtaagtaaactttggtaactctaatggggatagacccacttaagatatttaaaaaggtatggcatcagcgtttcatgctctgccttttagcttctaaaaggaaagatgcagatttctagtgcattaagcctgagccatattctcacatgcaagtgaagtcattaaagaactttacatatgtgagatagaaacaatggttccttagttttgcactgggaagaaaatattttgtaaaagaatgtttatttgaaataatgataactatcaattgttcacaatgtggtggaaattaaaacaccatctcagctttaacttttaaataataatgataactatctttattgagcatcttctacatcctaggcattgtcctaggcattgcatgtttatatccccaattctcaccacaaccctgcaagtaggtggtattatccaagttttacccattaagaaactgaagatcagagaagttaagaaacttgctcaacatcatatagtaag

SEQ ID NO: 34792 - DNA, 1030 bp, Homo sapiens
gaaactctggcatgtgcatgtacagatattttcagaaggaatgattattgatatacttaagactgatcatgaacatagtctgcagcagttttgaagtgattctttttgtgttattttctacttctaatgcatgcaaggcagtctttttgtatttatgtatgtccaaagcacttctgtctaattcttcactcaaatcagaaagacctcttcctatatatttcatattagatatataaatttttactaggagcacaaatctgaatgcattttattttataaatgtattttatcggagacttctggtcaagatggcagcataaagacatttttatcttcttctctaaaaagctcgttccaaagtaacaatgtcacgaaacagaaatatctttgaagaaagtcggaagcaactgaaatcctaaatcataataaatgaagacacaaagtaggaggaacaatggcagataacttatcagagaggagaatctgcttgttggggaggggatgttggtggaagtaccttgtagaaccctaaaaagccttgggaattagaagttccagtaccttgaaaagcagaagtgaggcaagaactgaaaacagagaagtcatttgaaaatctgtataagaagcagtgagatccctaggcctcctctcccttccagccagcagttagacagctacccctcctaatgtcatacaaaactagtgtgtctctggacacactggaccagagaggattctatctgcctgcggatactggagggtaggggttgggtttccatactgaaacaggaaagtctgggtcctgagactccctttcccacgctctcttttcctcattctccacctccagctccctggcagccaggcaagagacagaagagccttctctgggattcctgatgcatatagaaaaaagatctgaagatactgtcatttggcaagtcccggtgaaaaagccatgtaatttccctcttgtgacacctgtcagtcacaagccctacccctcaaataattttctatgaattcatca

SEQ ID NO: 34793 - DNA, 1034 bp, Homo sapiens
aatagttactgtatttgtgtggcattcctattattttgttgctaaaaatattgtagtttttatttaaaataatctgtaccttaattttttaaaatgtaaccaattcaagcactttaagcaataatgtcaatcttgtgaaattttaatcagtttaacaccctgcctctaaaattgtttgcaaaaaataaataaatgaataaaatgggaattctctttctagagaattatatccgggtaatgctacacacatggacttaaaatcctttttataaagtgtgagtcagtggcaggtcttatgtccaagtaattattacaaacaattttgaagcagtggaaatgtacagaacattctgatcattataatatataaaggcagtattactctcaaggttgataaaaatcaatgttctggagataactcatcactttttttgagtgaaaaagatcaacagaatttaattcaggaaatggtatctggagaatagcaaattgagaatatcagtgaaaagaatttagggatagttaactaggcatcacagtgaatttatttttggggactttgcatataaaatccttttaaccagttatgaaatgaaagatccattccccaaataagaaggcagcttccagtatctggtttctaggaaggagtaggactgtgattggtccctggtgccctgacttctgggcctgtttctgagccatgggggaccccccagcttcagaaatactcacgtgggttcacaccactccctgccccagaaggagggcaggcacaggtccatgccatgtggcctcagtgaagcctacagtaactatgggtagggctgcttttccctgtcaatcacccagggcacctgtgggtggacagaagattgtcatcggaatacatgcttgggcccaattatgggaataaaacctcatagaccaagagcagggaatgtgccagtaagtgttgagtctcccagctgctgtccatcttctcggggcagtgcagttgaacctgactgagctggaacagagactgttgggaa

SEQ ID NO: 34794 - DNA, 1068 bp, Homo sapiens
gttgctgagaaaggagcattaaaatatttttgtgggattgttctgtttctccttttaattctgtcaatttttgttttatgaattttttgactttttaaaaacaactttggtgaggtataatttacgtgccataaacctatccagttagtgattttttttctttaagtaatttgctgagttgtgtaaccagtactgtaacctagttttagaaaattttcatcacaccagtaagatccctcatgactggcagttaattcctgttttatttgaggtcactactaatctactttttgtctttagagatttgccttttctggatgtttcatgtaaatggaatcatacaatatgtggtcttttatgtatgacttccttcacttacataacgtttttgagattcattggtggtgtagcatgtatcaggagtttattcccttttgttggtgaaatagtgttccagcttcatgtgtttttgaggctctattatgggggctatccatatttgactgttgtgtttttctgataagttgacattcttatcattaggaaatgtcctcttttatttctcttaataactttatcttaaaacctattttatctgatattagccctctacaaacttacgctaactcttcgcatagtatgtcgtttttccaaccatttactttcaacctgtgtctttatatataaagtttagctcttgcggacggcatagaaattggtcttgccttaaaaaaacaaatacttccttcaatttttgtctcttacttgtaattattagtccattaatgtttatggtaattattgatatagttgggtttggggctgccatttcatttgttttctatttatttcctctattttttgttcttctgttcctcttctatattttctttttgaattattttttgaatatatttttataattccattttaattttcctcttgatcttttctgagtacattttcgcatgcctgggtgtatttttagtgattttgctagagattacaatagacattcttcacttttcacagtatccttacacataataatgatactatttcacataa

SEQ ID NO: 34795 - DNA, 1071 bp, Homo sapiens
attcattgctgacttttccagataaccttgataaaggcacttcagaattgggtcttggggattttccactgtagccttgcatgctcccttggttattcttttgtttggttcgtaagatttgttagcccagttggagcttaattttgccactgtttattttaattttccctctttccatttaagctgagcttttgctctacaaatctctgatttttccgtgcttctcagtggctttaacatgtttgtatctgttactggagccaaaaggttgttttaagaactgctttattaagtaccaattttacagctcctcattgctttgtttgcagaggttcaaattgattcagtagagtttctgaggctttcgcagataggagtagggctgggtaatggagggaggtgtgatactcagtggagattctgagttccagagattcattcaaattggttgtagttgcacttttccaaagcccaccattgggtaccttttaaagccagcacattttcggctcatgattgaacagtgcagaacagccacctcatcaccttttctactgaacccaagaaaggaatatggggatttagaagctgactttatttatttatttatttagagttagggtctctctctgttgcccaggctggaatacagtagtgcacaccaccatgcctggctattcaataagattttttttttagatggagtctcactctgtcacccaggctggagtgtagtggcgtgatcttggcttactgcaacctctgcttcctgggttcaagcgcttttgctgccttagcctcccgaatagctggaattataggctcctgccaccatgcctggttaatttttgtattttttagtaaagacagggtttcaccatgttggccaggctggtcttaaaatcccgacctcagatgatctgcccacctgagccttccaaagtgctgggattacaggtgtttttgtagagtctgggcctcactatgttgcccaggctggtcttgaactcctggccttaagtaattctcccaccttagccatccaaagcactgggattataggcgtgagcc

SEQ ID NO: 34796 - DNA, 1041 bp, Homo sapiens
tattctctctgtcacagaggctgacttaacctaggggtgccagtgtagaattctcctgggagctgacctttaagctggccttgcaggatgctgggacacaggcgtctgaagaagcagggaaggaggagcactcagatggtaagcagggggcatttgaggtaccggagaacagcaggagggccattggaacaggggatgaggggcaggagatgaggttggaaacagcagtgaaggtcactggaggattttaagcagattcatattttaaaagagcactttttgcagcgttgacagtggggttagaggtaggtaaggtgggcagtagaagccattcaggatgtggttgtaattcagatgagagatctggtagtctggcctagctggtggcagtagagtaaaagagaagcacatgagattgagagatttagtgagggtgaggcaataggacagtgatggatgggcagagagtgcagaggacgatgtcggcatgacccataggtttttgacatgagccaagaagaggagggtattgttcttttctgagcagggaaacaccagataaatgaaaaatctagttttagttaaattgattttgagatcctgtaagacaagtaagtggatttgccagtattcattcagcctggagctcagaaatgaggtgtccaggctgccgagaaagagttggaaatggttggcatgtagcagctgattgaagccatgtgagtggttcctgcctgggcctgggagagggtggagggccccagacagcccttggaaaaagccagccacctaaaagtgccatggagtttgccagatttgaagctcaacagtgatgaagtgagggtagagcccagaaggggcttttcgaggagtgatttggagataaggaagtagagacaagtcttaagattttattaggaggctgggtgcagtggctcatacctgttatcccagcactttgggaggccaaggtgggcaggttgcttgagtccaggagtttgagactagcctgagcaacatggaaaaccctgtccctacaaa

SEQ ID NO: 34797 - DNA, 1035 bp, Homo sapiens
attactataattatttacccaattcaagttactcccattttttttttcctgttagaaagcttgctgcagggatatgactactgattgtcccctcagtatccatttttcagccaggcacaatggctcacaccagtaatcccagcactttaggaggtcaaggggaaaggattgtttgagcccaggaatttcgagaccagcctggacaacatggcaagaccctgactctaccaaaaaaaaaaaaaaaaaaaaaaacccaggcatggtagcatatgcctgtagtaccagctactcatggggctgaggtgggaggatcacttgagcctgaaaggttgacgctgcagtgaaccctgttagcaccactgcactccagcctgggcgacagagtgagaacctgtctgaaaaaaaaaattcacttttcatttctagagacattttacctggtcgtggctgcccaggtaaagaccacctttgccaaactcccttgcagctaggtgtggccatatgactagattagattctagctagcaggattgtgagcaaaagtaatgtgtgcagcttccaggagcatcctagaggaggatcagtcctttcccatttttttttctgcttccccctggcagaaggcatttggtggtaggagctagagtagccatattggttccaaagatggaaactggctcttgaggatgacagtgcaacaagataaaaggaccccgagtcctcaacactgcagagcagctgtatcaggcccacgctgcatcctcttgcatacttacatgagagaaaaataaattttcatcttgtttaatccacacttacattatttgggtctttttacagcctttatctctttttccacttctgtgaaaatatagtagaataaaaaaagtcaaattgcagggttgaaggatatggtcatttaaaactttgatgctactgcttaatttatctttaagcaattatcatcatgatctcatgaaacattccccatcatgtctgtgttcttttattatgcaaacatttacatttaacata

SEQ ID NO: 34798 - DNA, 1108 bp, Homo sapiens
ttggctcagataagaggttttttgtagtggctcaaataatcggctcttggaggagcaccatttgttgaactactttgtagatgatggtctggtcggtgagcttccttgggaggcaagtgagcacatggctgagatatggttggactttctacaccactgttgattgggtatgagagcttgatgttctctacccttgtaaagacatgcttcttatccatagcctgtgggtgatgagagaacttaccttcctgggtcattgtggggcttaagcagagagattgatgtctagtgcttagcctgttgcctgggcattgcattaccactttcttccagtgcccttcttatttccattagtgaaagagtccaccaaacactgtagtagacagagccctgagctaggactcagaaatcccaggctctgattgctttccagctttagcggtgttgggcaggtcactgaggcctctctgggtctataaaataagaaccactcctgctggtgagcagtggcaagaagacgagcatgtgtgttataaaccagctatggttttcagtcaaggagaactagggaagggctgcaggacaaaaggaggaagaagctatgatttctgacaaaaatgccattggaagacacatgctggtggtgtgtggccaagcttttgttgtcactagtcaagatacaatgtttttccttttcctgagaatgagagcacattctgtagtaaaagatatgttgtctttgaatgagcttataccacactcttttgtgtcatttggcacacacagccttcctaactgagaaatacatgaagtagctaagcgcagtttcttttctaaatttttaagtaaagtgtctgaataggtactatgagtttatgtggcagaaatttcaaaatgtgcacaaggttgtatgttgaaaatagacccagtgtccaattcttatctctggcatctatcaatagttatagtttcttatgcttccatttagagttatatgcatatacaagcaactgtgtttatatttctctcttagtttttaaaaacacaaagagtacatagagtataccctgatctgtcctgatctgccccttgctgtttgtgtcttgta

SEQ ID NO: 34799 - DNA, 1025 bp, Homo sapiens
aaaaacaactggacaaggttctggatagttgtctgttgcaaagttgttctgaaacagtaaccgattaactcacaagatgtgtgtaaactggctttccacatccactctagatcatgtgaattttcagagggaccatagtttgatttgaaaaggcatcatctaattaatgtgaattaacattagcaagtacagtactgttacagacacattaaaggctttacagagaagaaaagtcatgaaatgacatgctaatttagtatgtgggcaccggaagagctattacctattcaaaaatagttgtaaaagaaaagaatcagccaagacaagctggttgctaatggttttagtgtgggaggagaaaactgcattgcaattcttggctctgagttagggtcaggaagatcagtagcccagcgttgacctttgtgtttggaatctttcatattgactcaccagacgcttgtaatttggtgagccagataacagaaatgtagacaaggtctctgtgcctgaactttaaacctccgagtagcttgtcctttatgataataattagcattgcttgggatctaaagcagagtaatcacctaagacctaccatattaatctaaattaactcagtaagttaccaccagagaacccactgggaaaatgaaggtgggaagctgagaagctcagctgcataactttatatattgtttgtttgtaagtctgtttggaggtgatttttttaagtgatatgtctcacagaaggaaagaatttcaacaacgttgatacaatcacacatttacaagtgtcagggttgtccaacccctttgaatccaagaggaacttttactccttatttcttctcctgatgttgaagtagtaagtgttcttttataatcaggccaatggtattattttaaattaagtaatatctatttatggtagaaaagtatgaagataaacattttaaatagaatttattctcaccatctagtcactgtaaatattttgataaacttatttcaattcataagca

SEQ ID NO: 34800 - DNA, 1184 bp, Homo sapiens
tccagtaaactaatagcaacagcttatgtgatctactgcaagttactgaattgttctgtgactcattcttgatataggaggattggacaagatgacctaataaatgttcatttattattattagaaataaatgttcatgaggccagccgccgtggctcatgcctgtaatcctagcactttggggggccaagacgggtggatcacctgaggtcgggagttcgagaccagcctggctgacatggtgaaaccccatctctactaaaaatacaaaaattagctgggtgcggtggcacacacctgtattcccagctacttgggtggctgagacaggagaattgtttgaacccaggaggcggaggttgcagtgagccaagatcatgccactgcactccagcttgggcaacagagtgagactctgtctcaaaaaataataaataaaaaataaatgttcatgagtccaggaaagatagaataagtttttaatacagtaaagatgattgagcatttgtcaaactagggtataaatattactggaatttcccatgatttttccagaaaacttgtgtatatgcaaaaatgagaaataaaaattagatcttaatactgaaatatgacccataaaacacaagcacttaaaggaattctattaataaagttttgaatgcgctgatcaaatggagaacttctatttttatgttgttatttttcttgccacactgtgagatcttaaaattaaatgtgatcacacttaggctcataacctatatttatatcccccaaagctagattttctccagagaacaaggagtgttcttccttataggaagaaaatacaatgcaagttctatgatgataccattgggtgcttaaaggatatatacaagatatacatcttagaactgaactgtattcctagacctttacttggcatactttgagtgagcaatatgtaaaatgacttctggtacgtttaaattagggcaattaccaagcatattttctccaagttctactctgctgttgaatgaagaaataatttgttctcaaagaagagggaaggggaagcagcccgtgttggataaatgcaagtgtggctggcagcctactttgagccggtgtagagaaaggctgctggggagctcctgctcatcaccatttaaaggttcattaaatttgatggagaa

SEQ ID NO: 34801 - DNA, 1049 bp, Homo sapiens
aaatattaaagaaaatttcaatgttattcattttttagttacatagttcaaaatccaaaagtttaaaaattacatacagtgaaatgttttccctccatcctggcccccacccatccctagccccttcaccctgctattcttcctggagatgactgatgctaccgtttcttgagtgctcctgcaaagatatacatctctacacacacacaaatacatattttttttctattaccttttaaaatacaaatcatagcattgaaatctgccttggtttttcatttaatatatatcttggagactgttttatatcagcatgtaaagagctttctattaaatttttatggttgcgtggtattctgttgtatgggtattctatagtttctctaacttatctcacagtggccattgaagttgtttaaaatctattgctattacacagaagccttccagatacattatttcacacatgtgtgagtacatctgtaggatatattcctagaagaagaattcctggatcaaaagttatatatattgatatttttgacagatattgccaaattattgccaaattgctctcaatggaaattgcactgatttactctcacatcaatactgtttcttcagactcttgccttaacacatttcattcttctttcagcagccatggtgatccttttttaaaaatataagtcaaaacatgccatcccttgaacaactatttgctgaacacctatcatttgcagtcactgttttgggcactggtataaaccctgtgctccaaacttttcagcagcttccctaggtcagtcagcaaaaaaaagtcaaaatccatacagttgcctacaagaccacttatgatcaactctcctctttttcccaatgttttaacagtatctcctgctcctctgtcctccctcattcaaccacactgagccctctgaaaggcactgtgcacactccagccatggacactactcttctgtcctctctgcttcgaatatccacgtgactcactcttgtacctccttcagagcagcctttctcaccaa

SEQ ID NO: 34802 - DNA, 1034 bp, Homo sapiens
agtgattctcctgcctcagcctcctgagtagctgggattacaggcatgcaccatcatgcctagctaatttttgtatttttagtagagacagtgtttcactatgttggccgggctggtctcgaactcctgacttgaagtgatttacccacctcggcttcccaatgtgctgggattacaggcatgagccaccgtgcccagacagaaacttgattttagtagcaagattacaaatgtttatgttgggcctcttctttccagttacttaaaaatgcatttcaagtctctactaagtaacagtgaattctatcagagttgtttcccaaagtggcttttgttcccccatgtgatatggataccactgaaacaaaagccttttattttattttttttttacgtagatgccttgtagattataagagggaatagatatagtgtggcagttaaaaggcagaagcagggagggaagtcttctagagtcagaatcgaatgtatccctgctaattatgtctgtgaccttggcaagttcttacttctcagttttgtcctttgtaaatcagaagtcatttgtgtcccgccctctgggtggtgggtgggatcactgctcagcccacccttagtaagcactcagccactaatatgttacctttattactgctttactgttattgtaccttgctgtaaactgaacctggaagaaaattctacttattgcaattatgagatgtcatgttttcaaaggattttcaaaatactttttttctgatacaaatatttgatttatctctctttgtgattgaatctcatttcaaattttattgaccaccacaacctctttatttaatcaataactactcaaagacggagaaatgcagtcaccaatatgacttatgtcacttaattttaactaccaggagaccacgaactgcttgagctggtcatttcatcagttgtcccttatttactgagcacctactatgtgccaggcaggaatgggttctgggaaaacaatggcaaataagaaaaaatcccctgcc

SEQ ID NO: 34803 - DNA, 1058 bp, Homo sapiens
cacagaatgtcaactagtgccccttataggaatacattttgggaagcacgttgatactttgagattaacctttctgtgtttattttcatctgcttatcctgtctattaagttttcttggtgcattcttctacctttcctgcctctcacccttgccattattttgctcctcactccagaatccttcaattaattctattctctttttttgtcctgggcttagacatcctactttctgaaatatgtctatctgtcccattcttacattttacaccaattctgtcctctgtgttttctcctttgaaacaccccctccttttctgaacctcctctaaaaatcttggaataattctagactcttttgcttatactccgtattcagtctagcaacaaaccactgcctttaacttcaaaatctctgcaaattccaccagttcacattacattcaatgctccttccttgatccaagccccattgtttctcacttggtttattgaaattgcttcctgtctccctgcctatacccttgtccctctagtttgttctcttcaccatagccgaaatgagaaaacctttaaaacaagatcataccagttctgtgctcagaacctctgtgacttccatgtcagaagaaatgcagaagttctaacaatgggccggctacaccaccctaaatgatctggccccttctctgccttgtcttaccactcttctgtttccattgctaaaggaactaaatctatcttgacaatttctgtaacattgatctagcaccctctcccttctttgcatctgaagcccatgccatagttccagtctatcatctttaaataagctgctcatggagaccatttctaccctgttagaggactttggaatctgattctttttcgtgcatttttttgtgcatatctcttaagtgcatcccatcctttttcatatagtggtaggtatacatacaaaatactgcatttgcacagcatatactgggttcacagaaattatggtcactggcccaggggcactagctgtcgtaggccccagccagctgtcactagg

SEQ ID NO: 34804 - DNA, 1025 bp, Homo sapiens
atgaatcaaacaacagaatgcagggagttaagggttcatgcttacaaacgataaggaaaggtactagactatatacagcaggactttcaacccttccctggccaggcaggcagtagaaacaagatgtaagacaatagggagtcgtggggacagtggtgaacctgaaaacaggtgcctagtgtcaaggggcaactactctttagttcctctttttattaagcagttcaacttcggtgttgcttaaagttgcagatttttaagagaagtcagcagtttgaatttgtaatgggaaatttgttaattttcaagacactctttttgctaaacaaaacatttgactcccagagtccagagctggggattcctgacattaaatgttaatattactgttcccctgttaaggcatgtggggacagccagggctaaacttatctttccatttacctagagtggtctctactggaaaggaaatcaggaaaagagtgctccagggacagggactgttacaagcagtagaagtgggactttttgcatccaggaagcccctttctaattggtgctttctgtttttccaatagacaaacctttttgcagtcacaaagtgtgttcctattgttttctatgacagttacttatttaatttctgtaagagaacatataaccagccaggcgcggtggctcacgcctataatcccagcactttgggaggccgaggcaggtggatcacgaggccaggagtttaagaccagcctggccaagatggtgaaaccccttctctactaaaaatacaaaaattagctgggcacggtggcatgcacctgtaatcccagctactcgggaggctgaggcaggagaatcactggaaccggggtggcagaggttgcagtgagcggagatcgtgccactgcactccagcctgggtgatagagtgagactctatctcaaaaaaacaaaaaacaaaacccatataaccataatttatgaatattttcacacttgatttttttgctaatgaatatcactca

SEQ ID NO: 34805 - DNA, 1123 bp, Homo sapiens
ctgctctactggagcacgctgctggtcaggtatggtccaccagcacaggagctatgatgtgggccccctggaggtacctggagactggattgcaaacaggcacagccaggctgggagaggccagcacactgaggggtgcttgggttggactggccctgtctcatggggaagactgccttgcagagttcagatctgacacttcccttgggggctaaagtctcctatggcagcaagttgagcctaggggatgggtatctctgtccatgctccactatagttgccaccgcaccaaatcctctgggctttgcagtggctggaattctgcccctcgtacttttctgagcatctctctgccaactcatttgtctttggtggttgaggggtctcctcctgccaggattccagaagcctatggtgagagcaggttgctccttgcctattcaactcacctcttctgcaggagttgttgggggctagaaataagtcctggtgctggtagcactgtacagcattcccagcttccttccccttcagtctagtatctgtgtcttccatctgtctgctctcaatgccttccctctgaagatctgctagaagtgtgccagtcttcctgatgtcctggtcccttggtgtgggaggtgttcctcctggccgtgtctagttgaccatcttggagaggtccattcaatgttcttttcttcatctcaaactgtttctaagaaatcgaactcaaggcactggatagcagaagccatcgaccactgccctgtggcataggcagccacttccggatgcctgactgcatgtctttttcaagctttgctttatttcttaacttgttcagaaccagagctgcaaagaggtttttgttttgttttgttttctgtagctattttgagattcaaacagtaatcagaagttgttttgaatgaaatgttttaaatatttttggacaaacgtcaaatgggaaagtattagttgcccctttggtcatttgtatttaatagttgtatgcaaaaagaagttggaatcaatgaaatggtgacataatacaggcaaccttccctttttgaggattaagttgaaaatagtgaaggtcactttccattctgtaaacaaaagg

SEQ ID NO: 34806 - DNA, 1049 bp, Homo sapiens
ggcaacacagcaatagtgggggactttaatactccactgacagcactagacaggtcatcaagacagaaagccaacaaagaaacaatggacttaaattgttcctacaacaaatggacttaacagatatttacagaacattctatccaacaactgcagaatatgcgttctattcatcagcacatggaatgttctccaagatagactatatgataggccacaaaacaagtctcagtaaatgtaagaaaatataaattatagtagatactctctcagaccacagtggaataaaattggaagtcaactccaaaaggaaccctcaaaaccatgcaagtacatggaaattaaataacctgctcctgaataatctttgggtcaacaatgaaatcaagatgcaaattaaaagtctgaacaataatagtgacacaacctatcaaaacctctaggatacagcaaaaggtgctaataggaaagtttatagcactaaatgcctacatcaaaaagtctgaaagagcacgaatagataaactaaggtcacatctcaagaaactacagaagcaagaacacaccaaacccaaacccagcagaagaaaagacataacaaagatcagagcagaactaaatgaaattgaaacaaacaagcaaacaaacaaaaatacaaaagataaatgaaacaaaaagctggttctttggaaagataaaattgatagaatattagcgacattaaccaagaaaagaagaaagacgatccaaataagctcaattagaaatgaaacgggatatattactactgataccacagaaatacaaacgatcattcaaggctactgtgaacacctttacatgcttaaactagaaaacatagaggagatggataaattcctggaaatatacaacccttctagattaaaccaggaagatatagaaactctgaacagaccaacaacaagcagcaagattgaaatggcaataaaaaaattgccaacaaaaaaagtccaggaccagatggattcacagctgaattttatcagacattcaaagaattggtatca

SEQ ID NO: 34807 - DNA, 1051 bp, Homo sapiens
tagatttttgtgaaatttaaactatgacattcattctgcatggactgaatgcctactatgtgtcaggcattgttccaggtgtttgggatatgtcagtgaacagaatacagatcctttgtggcatgtacagtctagtgaggggagggggatgggaagcaaataaaacaccataaccataagaaaatatattaatatgttagaagttctgtgtgctaagaaaatagcagtgcagggtaagggttccaaagacagggttgggggatatgggaggctggtagtgggttacaattttgtataggggagacagggtagcctccattgagaagataacatgagcaaagatgtgaagctggtgagggagtaagccatgtggatatctagaggcagcagattcaaggcaaagggaagagccattacaaaggccagaggacaggagtatgtcaggcatgtttgacagcaaagatcaaagaagacagagtggttggagaggcagaagtgaagtaactgcagatcaggttgtataggaccttgaggctattgtcagagcttggtgtgaaatgggggagcccgtctaactaatcatttaacagattgctgatgtgggtgggtggctatgggaggtttgtgttgttgatctaactctgtgaatgattgggtgaaaattgacgatgcaggaaagaggagaatgtgcttgagtatgagaggggttggtgccagggactcatggggagttttcatagggactaggcaggaaggctgagagtgtgggtacagtgactggtaggagagtatgtggttgtgggagtctgtggaggttttcttctgcttctctcacttttcttagagaaataggtagcatagtaatcacctaagagtaagtggggaaaggagtattcttgaggggaagaaggaagtatgagcttgttctctaggagaacaggagagtgaatggatgaggggaacctcatcctgctgtgaacctcatgcctggctatgaatgccaggcagcattaagggcccagttaagggttaatgactatgaactcaaaac

SEQ ID NO: 34808 - DNA, 1050 bp, Homo sapiens
ataaatatttcaattgccaggaaaaagctgggtgtagtgggcatgccagtagtctagctggggaggctgaggcagcaggatcacttgcgtctaggagtacaaagacagtttgggtaacatagcaatacccacctctctttaaaaaaaataataataagctggggagaaaaaatgtgttctgctggattttcttagagtatatatatatatttgtgatagttgaaagtgagaataatgtagcttaaaaaatttataaaaatgaattttaaaagttaaactagcaaataaaattcattttatctaatgaatttgggcctttttaaccatgtgtccctcttttcttcaacttttctttaacttacaggaatttaattttgttaaaagaaaataattatccttgattataatttgaacattggagatactaaaaaatatatatatatatattccaccttggcactaacttttctttgttcagatatggtagagatggatgatttagaataaatgagacaagtggccagtctctatgtgtggcttctgaaggaaaaatttgtagaatatattatttaaaaactaatagttcaaatgtaggcaaagatagcctttattttatgttatgtattaaaagtgtatattataaagtgtggggatgcccatacctggggactaaaattataaagactgattgaggacatacttgaaatacaaaattatttatttaatgttgactcctaagtagtttaaacatttaattgtcaaattttaaagctgcaaagaatcttgttatctagttcaatgcttttattttatagataagaaacctgagaaacaggaaaatctagctcaaatgaagaagctagttgggagaaagtattttaacagggagctagtgaatattttgtaggcaaatcacaggtcaggagagtggcaaatgtgacagctaagccttagtgcaggatacctagagtaggacaggaatatttttgagccaggtatagaagtgtatcttctttattgaggcagatcaaaagccaggagaactgaaga

SEQ ID NO: 34809 - DNA, 1038 bp, Homo sapiens
tgtgctagaaatgttccactcaaatcaagggttcctttctggttttgtatgttctcacctgctcctcactgtaaatcattgagatgtcaagtgcaatgattaattaagctgcacgtgcaagtgctttttttttcacctgtcaagcaggaaagaagtcttatagcaaaattagatggtgctaattcacagcttttacttcagactgtgaagtgtgtagaaatattttatatttatatgcttattcagaatgtggcatatcagggcttgtttgttttataattcttaaatattgtaagatacaattattataccaagccctatcattaaactcctaattataaacagagaagaaattcagaattcctacttaaatattttggaattcaagatttatactttgtaattatcttttattcaaatactagtagttgatttaagttaaagtaaatatttttaagttttaaaattgtgtgtatgtatgtgtctatatatcataatgagatctattcttattatagcatgggtttaaacttctgatgaaatgatggtggtaactacatttttttctttaagtaataagtatttgcagaatgtagtattaagcttttgggtactattttatacattaatataaaacagtgggcttggaaaacttgttctgctctagttctttcatcatccacccacccccaaaatcatcagtaaaagtaaaacctcaaattgtatagtaatcttaatctattattaaaaggccctagaaagaaagattacaaggtagattcaggttttgaatcggttttgccattggtttagcagcgggtgggcaggcagatgcctgctcagagtagaacctattgccatttttcaccattgatagagtagcctttcagagtcaatgagctctgtcaatgtgagcttgtcaaggctacaacttcatagacctgagaggcggtttgagaggtcagcccttttcaggttcgctgtgatgcaaatgaactttaatgcttaaacaactattggaatttttatgtctgctcc

SEQ ID NO: 34810 - DNA, 1073 bp, Homo sapiens
aaataccactcagaaaaaaacttaaaagacttaagtaagtgggggaaaatattggttcttgtgtcagaagaggaaatacttttttttttttgagacagagttttgctcttgttgcccaggctgaactggattggtgtgatctcagctcaccacaacttctgcctcccaggttcaagcgattctcctgccttagcctcccgagtagctggaattacaggtatgcaccaccatgcctggctaattttgcatttttagtagagatagggtttcttgatattggtcaggctggtctcgaacccccgacctgaggtgatctgtccacctcagcctcccaaagtgttgggattacaggcatgagccaccgcgtctggcgaggaaatacttttaagtggccaatttctccaaactgatccatagatttagtgcaatccaaactaaattcccagcaggactttttttttttagaaattgacagactgattctaaaattcatatggaatacagacaacctacaaaagcaaaacaactctgaaaagggaatacaaagttggagaaccaacgctacccaatttcaagacataattataaagctacaatactcaaagtagtgtggtactcgcatcaagatagacaaacagataaacagaagagacagagccaaaaaatagacccctttatgaactgatttccaccaaaggtggaaaggcaattcagtaaagaaagaacagtcttttaaagagatgtaattggtaaaattaaatgcctatatatatttttaaaatccttcaatctgtacattaaaccgtatattaatagaaagtttaactcaaaatgtaaaacctaaacctataaaactctagaagaaaacataggagaaaaatccttgtgacctgggcttaggaagaattactaggtataacattagcagcacaatccctaaaagaacaccagacaaattggactccataaaagttaaaaatttccgtttttgaaaactattggaggatttaaagacaaactactgactgggagaaatctttgcaaagcagatacttttgtccagaatatataaa

SEQ ID NO: 34811 - DNA, 2096 bp, Homo sapiens
tctgtctaggtactgtatgttaagaaccctcgatcgagaggcatgagtataaaaaattgccagcctgtgaacttctgttttctttcttgtgatgtgaaatcctcttatgtggttagaatggtctcagactctaagacaaatcaggaccaaaggcatacttgatatgcagctcagtgcttttactttcttcacattattcactgatttggaaaactgcagttctgtcttgccttcaaaatccatcccctcacgaggtcaggagatcgagaccatcctggccaacatggtgaaaccccatctctactaaaaatataaaaattagctggcatggtggcacgtgcctgtaatcccagctactcgggaggctgaggcagaagaatcgcttgaaccagggagttggaggttccgtctcaaaaaaaaaaaaaaatctatccccaacttagtgccctctttttatgacctgatattattcccaagaccttgtttttattctgttctattattattattcttattatgattgagacggtgttttactcttgtcatccaggctggagtgcaatggcatgatctctactcacagcaacctcctcctcccaggttcaagcaattctcctgcctcagcctcctgagtagctgggattacaggcacctgcagccacacccagctaatttttttttttttttttttttttttgagacagagtttcacttttatcacccaggctggagtgcagtggtgtggtctctcagctcatcacaacctacacctccccggttcaagtgattctcttgcctcagcctccggagtagctggaattacaggctcctgacactatgcccagctaatttttgtatttttagtagagacggggtttcaccatgtttgccaggctggtcttgaactcctgacctcaggtgatctgcccgcttcggcctcccaaagtgctgagattcaggtgtgagccaccgtgctcggctaatttttatatttttggtagagacggggtttcaccattttggccaggctgatcttgagctcctgacctctggtgatctgcctgcctcggcctcccaaagtgctgggattacaggcgtgagccactgcgcccagcatgttctgttattttgattattttttagaccttccaaattgccttttttcttaactacctttgcctatttttgaaaattgttttttaatatacagtaaaatttttataaacagttctgtgatttttgataaacgcatagagttttgtaaccaccaccagaatcaagatacataacagttttccataaaaaacttacttgtgctgtagtaagttttttacttactacctctgtagttgaaccctcgtcaactcttaaaccctggcaaccagtgatctgttgtctatccctacaatactgtcttttctagaatattatataaatggagtaaaatagtgtatataactttttgagtctggcttctttcatgtagcttagtgcatttgagattcatctattttcttttatgtattaatagtttattcttttttattgttgagtagtattccattgtatggatgtatcacagtttgtttatccatttatcagttgaagacactgactttccagtttttgaataaagcttgccataaacattcacatgcatgtttttgtgtgaacacaagttttcatttttaggaaggggattgccgggttatatggtaagtgaatgtttaatttataaaaaatctccaaactgttttccaaagtgggtgaaccattttgcattccagccagcaatgcatgagagatccagttgcttagcatccttgcaggacttgatatggttagttatagaaattatagtcattctaaaagatacatagtagcatctcattgtggttttaatttgcattaccctcatgagtaatgatattgagcaccttttcatgtgcttatttgccatttgtacctctttgttaaagtgttcattgaaatattttgcctatttaaaaattgttatttcttgttgagttttgagagttcttcatataattctgaaaataagtcccctggcagatacgtgctaatatatatttgca

SEQ ID NO: 34812 - DNA, 1064 bp, Homo sapiens
gtctgaagggggttcagcttcctactcaatgcaggaatcattgctcttctttcaagtacatcaaattattattttatgggatgaaacttggcctttctaatactgtgctgaaccagttgtactttgtcttagaataaaggaaattatttttaccatatataaaaagttttatgtaaacttgtaggtacatttataatgctgtcaattgaaaacaaaacatagatgccattttcattctaacagtctctgcctcctgctgaacttaaaaaagaagccagaactaaggtattgtcaaaattaagtggtttatgtcaaaaataaatcattagaggtgatattttacagttatattatcaaacaagaagtgtgacttttcctatccatttaataaaataagaccgtcttgctaaaattctacctgctactattgttttggttggtctagatttggattaaaaaaaaaggttttggcagggatgaaaaacatagcaaaggagatatttgctgtggcctgtgccaaataagaaattctgacattcaagctctttgccaggagaaagcatgctatatgaaagaagacttgctgaaaagagttgttttcaactactctgatgagaacagtcttattagtaaagaagtgtgtaggaaagcctggattgtggtagtttgaataatgaatgggaggtaacgtaaagatagttaatgtaaaggagtctttcaaaacattagttgaggaaggaaagaaatagatgccatcagacattgagagagaagaagaaataaggattcacatcctcaggtggatagactaattcaggtttgtaggctatgtttaaggagcctgaagcgaggtagaaatacagtgaattgcagaggagactggaggagatgcactcagaagtaaatggttagtttttggaagctttcctccattgagagatggtaaaaatactgaagatatataagtaaatccaaaaataaaagggagggaaggtaaagcagtttatattccatgacatttttttctctcagagttgacaactgtggttatttgcaaaaaaatg

SEQ ID NO: 34813 - DNA, 1032 bp, Homo sapiens
gctaatgctagattattataagactatgtataatggtgaggtttatgatagagtaaatttaacacatgctttggagaattaagtctttgatttcactagtttcctgaatgagattaaactttcataaaaccagatgaactcaaatattgttcagaatgtggttacagagttaagatttttagaattattctgaaacccaaatatacgtctccaactccagggtctctgtatcttttgtataaatagagtatactttcaattagatcccatcctccttgagctacattgatattcagacgtatgttgaatcaaccagataaacttaaagcatgatttatatgcatcaaagcctgttaatttttttccatagttatgactttatctccaaaactagctaaaaatttgagttcattgagctcaaagttcaacattaggaaataagcactctcttcatgtgccatctgcataaccaatatgttcagtttgaaatttctagttcatatgctcataggtcttgtcatatctgtaggaacataaaaattctctgtatctatagatttgtacaggtggaatgtctcagaatccagaatatccaaaatggaattcataatctacaccccaaatcagcttcaacggcagccttccattctcagttgatggcagatcgaggaccctgtttgtttagatcaaaaactttttgatgtattcttgattttcctctttctctttcactacatccattctgtcttgacatcttggctctgtcttcaaaatttggccctattttgccacctacacgactggagtgaattgccagtctcccttctgccttacgcttaatgtatttcttaagtcagttatggtggcatgtacctataatcccagctacacgggaggctgaggcagaaagatcacttgagcccaggagtttgagactacactgggcaacatagcaagaatccatctaaattacaaaaaatatatatatatttttttcttccccctgtctccacctttccacctttgcctctc

SEQ ID NO: 34814 - DNA, 1522 bp, Homo sapiens
catttgtttgggtctccgaagtggggacggacgctgtccttcctcctccacacacccctttagcaggccctacaggcccgggcgatgtgacgatcccagtaggcacgggttttcattagggtctgccctgcgggccacccttcctcttcagggtggaagtacgtgtattgacagggagcctccttgttttctcgcccagttaccctgtggttgtctgtgcctttgcacccagtgacatggctcagaggccagatctgggccgtgtgagaccccagtgacaattggcagcgaagctccgtttcgtgtctatttcacacatacccacaggtctcccagtttttccactaatttccgcagaactaatgcaagttcttgtaattgtacgtgataaaaatatatagttgaacacaaatttaagatatacagaaagaaatatgtttacaacaacaacaacaacaactacgtgagggacatacactctgctcaggttactgagggaaaattgtagtcctgaagctcctccttggggcacgaacttggggcttgttaatttggaaagtcccactagtaacattaaaagtctgatattaataaggaatgaaagctttcggaaagaccatgacaaaggaatgtgaagccttgaaccaaataatgagctgtccggaagcaggaagttttgtaatgtttcactatgaagtccacagttttgtaccacttgatgtattacattgatactctctcattttagatctcttgttcaaataatagatcagacttccatacttgtcaggtatctctgtacttcttcaccttttcagtgaaacaaaagagccagcaagtctgagaatgtctggaatagtcttcattatattttggtgaagagtgagtgggatgtgctgtgaataacttagggaaacagtaagacttctcatataagtttgtcagcaaaataattgcatttctcgtatgaccagccatattgttgtttgagtatgcttatgtaatgctttaatttctttagtacctgttagtttatgttcaggtgacttaacagggtaaaaacactgcataattgccatcacagcaccatgacaagacagtggaatttaattcaccacaataatactttctaagtgttgtcaccagcttaagaagtataaccaaatatcatggatattaaacttttaacatatatcacagaattcataacctgccatttgattttattttgacttttaggacctttttgcactgttttaagcctaaggagtatgtggatgcttaaagaagtgatttccaaactttgtcatgccatctatccctccttctacattcctcatgtcaaagaaaagctagagaattttgtcatttaaaaaggcgacgctgtagttgtaatgtttcctctgttaaggagaagaaaagctaagcactttgttgggcaagtggaaaatgcaatagtgggcaaagtgctcagaacctaggtaatcagtaaacttgattgtagttggctacgtggagaggt

SEQ ID NO: 34815 - DNA, 1070 bp, Homo sapiens
ttcattttgagttaatgtttttttttttttgagatggagtctcgctcttttgcccaggctggaatgcagtggcaggatctcggctcactacatcctccgcctcctcagttcagggaattctcctgcctcagccgccggagtagctgggatcacaaggcatctgccatcatgcctggctaaattttgtatttttggtagagacggggtttcaccctgttggccaggctggtctcaaactcctgacctcaggtgatctgcctgcttcagcttcccaaagtgctgggattacaggtgtaagccaccacacctggtcttgagttaatttttgtatatggtgtaagagattccaacttcattcttcttctctttctttaaatagaaaatgaagccaaaactttctggctataacacataaattttcatttctttacatgtgtatgtacatacaggtacttttgccttgttatagacaaaaactgatttttttgttgttgttaacagtattgtgaatttgagatctctgaactgaaccacaagaaaacatttattttactctgtctccatagagccaagattctgggtcagataatcgtataaacacagtcagtctcaaggaagcattggaaaggtttgatcacagcccaaccccttctgcctcttctcggagttcaagaaaatcatctcacacggccgtctcagacccttcctgtgagtacccttgcttcaaagcagacttcctttaaagtaactaactaaacttttagttacttatatcagcatttctcatcaaacgcttctttaaaattataagtttttacatttctgaaatgtagtaacctttccagtgagttaaagggacattgcccactttcagcaaagaattaagttcttcaagtagcctattaaaatgtgtaggtggtaatggtgatggtgatgtttttaatcatccctcaaaaagaaaggcaactatttattgtgtttttttactgtagggccagtaagtgttcttaggtttgctttttgaaagttttttattgtcttctctttttgaagacttgtataattgtcat

SEQ ID NO: 34816 - DNA, 1047 bp, Homo sapiens
agcacataattacaaatgtgagtagtgcttgtaaactgtttgcagcaaaaacacaggaaagagtatgtcagggagacttttaaaatagttgatttttcaactgagtcttttagattaaggaagacagcatgtcacacaaagggaatatgtgcaaaagcagagaggcagggagacttcattgtcactgaagcatgtttgtgttggaaaattatgggtgtatttgaaagaaaggaaaaagctggatagtataaagttcttatgtgtcattttaaaaggtttcaatgtatatctagtaaatcaacactataaaataaagtatttgttaatagaagaaaatcatcttgacaaatgagtcatggaaagaaaatttaaagaatattaagtattttggtaacagataataatagatttaaaaaaaacctgtaaaaggaaatttcctttttcaaatgcaaatgaaactgtaaaactcaggacagttagtaattagtgcctctgttttacttctgcctagctcagttggtaatgccttacaggactggtttatgctccaccactcgttgaaagtgtttttgttaatttcactaatgacattaccttcctatccctcaataaagcaatagctttttcttataccgcatcttcttctgcatctgtacagcactggaaatttttatccctcctcccttggcttcccttatattgtactttctcctccccttttctaactgaaactaacttctttcctctctttctaccctctaaatgtgacattcctaagtcttatccttgttctcttgctttctgtacactctttctcttgcttatctcattccatagcttcagctattgtgtctctattaacctaccagatttctatttttagatgcaaacattttagccatgtatttccagataacttctagatctttcttttgcatgtcctcaaactcagtgcatctaaaattgaatttattttcattttgtcaagttacctctttctcttaacttgccttttttcatttttataccaccatccttttagtcacc

SEQ ID NO: 34817 - DNA, 1025 bp, Homo sapiens
tgctctagggtgcatgtccagcctattttacttactcctttcccttaagtaaaatgtgtatgtcaattggctggaaagatgaagatcttgtgctagactgttaagagttatatctgaccggtcatggtggctcacacctgtaatcccagcactttgggaggctgaggcaggcggatcaccagagttgaggagttcgagaccagcctgaccaatatggtgaaaccccatctctactaaaaatagataaattagctggcttgtggtggtctgggcctgtaatcccagctactcaggaggctgaggcaggagaatcacctgaacctgggaggcggaggttgcaatgagatgagatcgtgccactgcactccagcctgggccacagagggagaccctgtctcaaaaaaagagagagagagagagatcttacgttgttctattagctggacgacaaataatttttggaagaatattgttaacaacaatagtaaaacagcctaataaagcatcagcctgcatcttctaaactatattggattcacccttctagtagtcagcaaggcttttcctgtagtataacccttaattcttggcgttgcctagtccccgccaccaccccctgccctttttttggtagtttgtcttattttctaccttttgataattaagccatacttactgggtgccttataaggctcagatctggccttttgaactttttactcttaacaattctttttgaattcactgaaatttgccctattacttttatactgttcttcctcttctagtgatagaatcagcctcacttcttaccatgaagataaatatgtctgttggaccagagaaatgtacttaggtggtctttaaattctcttctacctctaaaattctgtagttctgtgttccatctgctgatactacctcagacacttaaaatcacaacttttcatcctggtgttagtcctttttattttattatttctatctttgactctgtcactcattttcttttaagaactcttagc

SEQ ID NO: 34818 - DNA, 1049 bp, Homo sapiens
aggcaaggaaacattctctgctagagcttacaggagggaattcagccctgccaacacctcggttttagcccaccttgattttagcccagtgagacctatattgggctctcaccaacagaactgtaagatagtaaatttgtgttgttttaatccattaactttgtgataatttttatagaggccataggaagcacatagtacctcttcagtttttcactaataacataaagtttatatcatgattagttgaatcttgatgtgaatgacaatatgattttctgtgaaggtcaattccagtttattgtattaagatatttatgttgataatatattgggtactggtggacaaacctttgttttacgtagaggtctttattttctactatctaggaatggtgacgtgattccttagtgtagctggagaataaggagtctgtgtacagtaaagtagaatgggaaatgaggaaggagaaataagactaaagctagaaaggaaaattggtgtcttggaatgtgataaataatcttcagaagccttagagccctgaacaagtttttcattatttgcattatatgtgtttgtgttagtaaatactgtaaattggaattttaaaaagtttttatagtcagcacaacttgaactatattaaagtggtaagcaatcattacattttgccacagaatagcttatcaatatgataagtgtataaaggactcagtggtcaaaaggaaggctagagtttagagaaacatgaaaaagaatgaagcatttctcatagaaggtaattaacaacataaccaatcattgactgtcactatgtttagtcttcccgaccatgtcaaataaacttgctttactcccttgtgcctttactaggaagagaaactgaggctccaacaaagattatgagctggcacagttttttttttctttttaaagacccaacataaataagttagagctatattgtcagtttttttgtttttgttttttgattgtttcttttttttttgagacgacctctcgctctgtcacctaggatggagtg

SEQ ID NO: 34819 - DNA, 1102 bp, Homo sapiens
ccctaggcatggtggtgcatgcctgtagtctcggctgctgaggaggctgaggcaggaggatcacttgaacccaggagatcgaggctgcagtgagctgagattgtgccactgcactccagcctgggtgacagaataagaccctgtctcaaaaacaagcgcaaaaacagacaaacaaacagaaacactggagaacgatcggcttacaaactcaccacagtgcatactcctaatgaaataatgattctagataacaattagtcgtgactactaaagccattaggtgaaatttaattgggaaatggataaaacataatggataggcaaaagtggagtaagcctctctgattagaacttaaaaccccggttaggccgatgctatggctcatgcctttaatcccagcaatttgggaggtcacggcaggaggattgcttgagcccaggagttagagaccagcctgggcaacataatgagatcttgtctctgcaaaaaattaaaaagttaaaaatcaatagggcatgatggtgtgtacctgtaatcccagctacattgggaggctgaggcagggaattgcttgagcccaggaggtcgaggctgcagtgagctgtgttcacaccactgcactgcagccttggtgagagagtgaggccctatctcaaaacacaccactccccccaaacaaaacaaaaacaacaacaaaaaccctctagatagaaacaaaaacaattatctgaagactttcgaaagtaaacagtaataggcaaactgagaagggaagtcaaaacctgaatagcttgtgtagtgcttagcttaccattttttttttctttttgttatccagctttaaccaaatggtaggctgggttgtagaagtacatgttgagtgcagcagttagcaaaaactccaagagaaaccctttatttctagtcataggacaaagaaaattcccccctttttttctctcccagctgtgccctgagaccatctccatttgtaaaattacattgccatagtggtatatgtacttaaaatcccaagaagaaagccgtctctctggccagaggaattgggaaagagaactctggaagctggagcatgctttg

SEQ ID NO: 34820 - DNA, 1029 bp, Homo sapiens
gaggctgaggcatgagaattacttgaacccaggaggtggaggttgcagtgagccaagattgtgccactgcattccagcttgggtgatagagcaagaatctctctgtctcaaaaaaaataaaataaaataaaagggaatactatgcagccataaaaaaggatgagttcatgtcctctgtagggacatggatgaagctggaaaccatcattctcagcaaactgtcacagggacaaaaaaccaaacaccacatgttctcactcataggtgggaattgaacaatgagaacacttggacacgggaaggggaacatcacacaccggggcctgtcatgggcttgggggaggggggagggatagcattaggagatatacctaatgtaaatgacgagttaatgggtgcagcacacaaacatggcacatgtatgcatatgtaacaaacctgcacattgtgcacatgtaccctagaacttaaagtataataaaaaaaagaaaaaaggaagttcatctgatggtcttgaatgcttctgtagaaaaagaaaccaaactgtatttgtgtatgatgtgaattggttttgcccaatacagtcttcagcaaattttccatgacttaggagatacttccttaatattctctatatgtattctaaattgatattttattaaaattttgagtggagcatataatcccattagtgctgggaagcaggaaaaagtaggtcactttgctttattcttcaaaaccaattaactgtagagttcatgaacaattgaatacttggaagtgctacatcttaatgaattttccaaatacatattaaagtgtacaaccatgttaattttcttttcttttctttttgtgtaggatcccaatgaagatacagaatggaatgacattttaagagatttcggcattcttcctcctaaagaagagtcaaaagatgaaattgaagaaatggttttacgtttacagaaagaagcaatgggtatggtcgtagatttggtgggctggatgatgggaataatacagtta

SEQ ID NO: 34821 - DNA, 1049 bp, Homo sapiens
tgaaagcaataactctcctatttcacaatgatttcatctctcttcacatcaaccctaggtgatgtttttattctcaccttatgaacgagaatactgcggctcaaaattcaagagtcttgcccagagttttttggcaagtacgaaagggttatggctccaaactggttagctccgaagtccttgcaaaccctgtccgagaccatgcgcgaccccaaggagcgcctgagcagataaccaaaagtgaaaaagcctatagacctcttcactcaagttagcgcctcggcttcaggagaggcagcgccagctccacgcagccggcccggggtcgctcgcactgacgtcacgtagcgacgcggaagatttacgtatggtgcctcgctctgggatagctttacggcttctgggagctgctgcttcgctgtgagaagtatccgcgacgagctatccgggaaagggccgaatgcgatcaaacctaatccgcgagacttgctaagtgagtcgcggcagggcgcggtgtccggcgggggtctgtgtgaaggaggcgaagtgccgctaggcctgagcctgcttccacatacatttgctcagcttcaggaccactgcctgacctcggatttgatacatcggggtctggcgtgctggtgtggtgcagactaaccctgacctgtgtgtacactcctgcgtcactagcctccgcccctccattcaaatggaaataagtgtgctccgcgctcagctaccccctagagtggtttcgaagagcaatgaagaaatgtttaggaagctgtaaattgcattgttactcgttgcataccgtaaatttagaagccggggaattgggaaaataaagtttctagattatttatccatttttaaaacagccagtggcctagagagaggccccatagcaattgaatttgctgacactcttaagatctttgttgactaaatagcagcttctacagttgtagcaagtaaatttattccttttacatgtaaaatctgcttaccagagtttgcttttttttttccttttttttttttttttt

SEQ ID NO: 34822 - DNA, 1024 bp, Homo sapiens
tgaaaaggataccaaagtgcgataactgaacatttccaattgcatataatacaacaatatgtggtgttcttttttttacacaagcattggctagcctttttaacctggtcagagaaggcaggtggtcactgacatttcccaagtccatgctttaaagggtttgcaagaagttagggttaaggagaggtgatgccaacaagacaggtgagttaaatataccatttcacacaaagtttgaatagaatacattatacctcataggtgtctagcctctacagttctggctgtagttatgaccttggcttccctgtctaactgtagacaaatctttaaaaaaaaataataataatctggtgcctcagtttccccacatgtgcaatgggatacttattaaataattaataagaatgtgaataagtgtcatacttttgtgatttgagccatcatttcacttctgattttaagacaactcatgattgttagctttcagaaagctaatgattgttaactttttgaaattagtttacaattaattaagatttcattatgatggaaggagacataattggcagatctttgccatctctctttgagatgtcctaaaaagggttgtaaaaatctgtgaaaaagtttttcctacatttgactagaaaatgtgatccatagtatttagtgccctgatactataagctcagcaagtaacctggtacatttgaaataaaaaccaaatttttagattcaaacaatccctttatccttaatttaattaattatcatatgctttttttaatgaagtgcttgatcacttgcaaacatatatacatgtagatgtacatatacatgtacacatacacataaatattattgcaattaagtgatcaagtacagacacaataggggccagttttgtttaaggatcaaagagacaaccactttggggaattagtatcaacttacaatccaagtccaagtatcatcttataatcacttttttctactatattaagatctaatgaatttgatt

SEQ ID NO: 34823 - DNA, 1047 bp, Homo sapiens
taatttcatcatttattgcaatagtgaaaaagaataaagtcaaagaacctggaaatggcatatctccctgttggtgaatataatttagtaaattgatatatcagtgtgatgaaatatgatgcagccattaaatactaagaagactgcgtagcaaaaatgggaaaatctattctaataaagtttaaaaaggaaatgtggacactgagtatagccatgtaaacgtacctgatgaaaggcaaaaaaaacaataacagacaaaaacaactctgttgtagtagtaaggtttttgttataacctggtaaattgtatttttctttttaaaatggtaagataagggataagcagaagtacctggtattacaagagaaaagtggctctaggaatgtaaagacatcaaatgagaagtaggatatctagacaaagaaacttcctcatgattaggtgaaagaaaaaaaaaaccaagaagcagctttgtagaaagaataatttattacccatatgttgttactgaatattctgcaaaacaattttgtattgtatttgcacaatgaaagaattttgcatagtcttaaaaaccttgtgtgcaatgatttctttccaaggtacacattcgagtagcttcaccaccaattaaatatccatgcttcatgggaataaacattcctacaaaagaagagctcattgccaataaaccagaatttgatcaccttgcagaatatctaggtaagtattaaaatttctataaactttgattattaacagagaaaatccaaagcttgacagtctttacacctttagtaaaaaggagtattcagtgtttgttaaaagtagttatatatgttaaacagatattgaatactattctcaacagtgagagtagtgggcatgggcagacaccacagagtcttgtgttggagagctaagccaaggtgagatcagagaaggaagaggtggtttccaggtggagggaagtgcaatcataatcacttaaagcctcccaaaagtcagatcccaagaaaaacaaaaataatttaatcagattctaa

SEQ ID NO: 34824 - DNA, 1049 bp, Homo sapiens
agaaaaaaacgttcactaaagcgttcagaaattggcacccttctttttaaaaagataacatcatgaatatacagttgacccttgaacaatttgggagttaaaggtgccaaccctctgcacagtcaaatctgtgtatgcattttaatgcccccaaacttaaatactgataacctactgttgactggaagcctgaccaataacataaacagttgattaacatattttgtatatgtattatatgctgtattcttgcaataacgtaagctagagaaaagtaaatgctttgaagaaaatcataaggaggagaaaatatatttactattccttatgtgaaagtggatcttcataaaggtcttcatcctcattgttgtcttcacgttgagtaggctgaggagggaagaggaaaaggggctggacttgctgtcccaggggtggcagagatggaagaaaacccacctataagtagactcatgtacttcaaacccatggtgttcatcaactatatattcagtggaaaaatttacttaatattaaaataaacgtcttgaattatcttcacaagtcactggaatatttgcttgctactaagtatgggtaataataaagctgtttatgttcatttagcatgatgttgtcagtgttacgctttattttcataaccaggtagatggtgtaactgtagtaatcctggggtataacatccaatattcactaccttggatactttattaacttctaaaagaattaatatgcatacattttagaaaagattaccttgataaatgggttaattacttcctatccctaaaaagtatctcattggtctactggtttttatttatttattttaattcatttctttaaaaattatcattttgataatgaatttttctgacagtgatttaatctttgtcatgtcttcatatgcttactgttatctttcaaaacagaggaataatgtttaagacaaaaacattatgagtcctcacaaaatgaattggtttttccaccaagtatattttgtttagtggtttttctttttgcctttt

SEQ ID NO: 34825 - DNA, 1081 bp, Homo sapiens
agttattgataatagccgaaaggcagaaacaacccagataaccatcgatggatgaataaacaaaatggtgtatccatacaatggaatattaaaatgaaggaaattctgataaatgctacaacatggaggagccctaaagatattataagtgaaataagccaggcacaaatggacgaatattgtatgattccacttatatgaggtacctagaatagtcaaattcacaaagatggaaaggagaatagtggtcaccacaggctaaggagagttgggatggaggagttattgtttaatggctacagaagtttcagtttggaatgatgaaaaagctctggagatggagagtggtgatgtttgcacaacaacgtgaacgtacttatgggtataatggtaaatattttatgtatattttaccaaaatgggaaaaaaattgtaccagaatgttcatagcaacagtattcataggagccagaaaatggcagtgacccaaatgtctgtcagttgataagtgggaaaacaaaatatggtatatctgtaaattggaatattattcagccataaaaaggaatgaaatactgatatatgctacaacgtggatgaaccgtgaaacaaaagaagccagacacaaaaatgtatattggagggtaccactcatgtccagaataggcaaattcttagaaacagaaagttggttagtggttgtcaggggttacagaggtgtggtcaagcagttaaactactgatggatatggggtttctttcttttttttttttgagacagagtcttgctcagtcgcccaggctggagtgcagtggtgtgaccacggctcactgcaacctccgcctcctgggttcaagtgattctcctgcctcagcctcccgagtagctgagaccacaggtgcgcggccaccacgcccagctaatttttgtatttttagtagagatggggtttcaccatgttggccaggatggtcttgatctcttgacctcgtgttctgcctgccttggcctcccacagtgttgggattacaggcgttagccaccgtgcctggcagatacgggatttctttgtggggtgat

SEQ ID NO: 34826 - DNA, 1030 bp, Homo sapiens
gagaattatctattgtgattgtcctttttggcaaaaaggaaggtaggaaaaacgctgcatctcattatttatttatttatttatttatttatttatttatttatttattttgagacagagtttcactcttgttgcccaggctggagtgcaatggtgagaccttggctcacggcaaccttcgcctccctgattcaagtgattctcctgcctgagcttcccgagtagctgggattacaggcgcccaccaccacgcgggctaatttttgtatttttagtagagacagggtttcaccatgttggcaggctggtcttgaactcctgacctcagctgatctgcccgcctcagcctcccaaagtgctgggattacaagcatgagccaccgtgcccggcctgcatctcgctttttaacttgtaagtgggactaagaactccaggggacaaagtggatggtggaaatttttccccaattttcgtgtgcttaagaggacacttgttagcgcgtttgttggtctgtggatctgtctcttgcttcaacgatgtttggataaaacggacctgggactccctttcttctagcctctgactgccctcccatctcctctccacctgcaacctccagaatcaccttctccaccatctcctgcttctggggctgttgcaggacttttccttagttcagctaaagatggagtcattgtcccacagccacgagagtttaggcttgaagacggtttgaagggtgagtaaagcagagctttattgggtgaaaaggaaaaaagaggggaacagggactctccgaaaggccgcagttcctcttggtgctcttcctgcctcgcagtttgaatcccaggttccacacaggaagaggaggggccaggctcttccgtgctgcaaactgcgtgaacttctcaaggctccaccctagcgcacaggctagttggagtttttctggtaacccttcccacctgactgtgttaggaccagccacaccatttttgtggttagctccctattgctgaccgaccaac

SEQ ID NO: 34827 - DNA, 1055 bp, Homo sapiens
cctacccgagcggctgccagctgcgcgccgccagccagagggccgagagccgcggggagaaggccatcacccaggtcagcaagggcacctgcgagcaaggtgggcacgagcgcttccctctccaaccctgcgccgctcggcccagcgaagggcacatccgacggggcgtccgcggcggcctcgccccgcgctgctcactgcgattcccccgcgggcatcccaggagccagatgggagggaaagagttggcagccgcggaatgccaggagcggtgggcgacgcccccccttctcctttttggtggttttattttgagagtttgctgcgtgcgtccagaaagtgagggccgggtgtatatgtagaaaagattttccgagacctcagacttccccatgcccaaagcgcacccaactcgtgctaacatctgtccatttctcatcattcttggcttggggatgtagagagaggtgaagtcaagagatgggggaaaggagtttgacaattaaatataaagtaaggacttccagacagacttttttttttaaaagataggatcttgctctgtcgcccagggtggagggcagtggcacgatcttggcccactgcaacctctgcctcaagcgatcctcctgcctcagcctcccaagtagctgggactataagcctgtgccaccacgcctggccaatttttggttttttgttttgttttgttttgttttatagcgacggagtttcactatgttgcctaggctggtctcgaactcctgagctcaagtaatcccggcctgctgggattacaggcataaaccaccgtgcacagccctgatttcttagtattgaagaaaatagtccactttctaaaaattataggttctcaaacagtaatctaactagctaattatttgtgggcaaaaataaaatacaaactctttgaagactgtttttgtgatgcactttgttgtcaaccttctgaccattttgtttttccttcctatttctttgatttgtattgttttgcataatttgtccccaggatacactgttcagcagaaatg

SEQ ID NO: 34828 - DNA, 1057 bp, Homo sapiens
agtgggaaggaatgtatcttgtggtttgactgccaattcatccactgtatgataaaacaccagtttgagttctaaggcttttgactccagtccttgagtcccagaaattacctttagacttgcctagcatcttgggagaactcgctgccctgaagggtaaaacacaagcctagctggctatgaaacctgctgattgtagagccccaggtgctgactgtagtgccccagggccttggagaaacatacgcagtaggcacgcagttgttacagtaagccttggataaaacccagtgctgtactggctttaggtctgacccagagcagtcccagtggtgatggccacagtggtgcttgtgtcactctactcccagcttcaagtatctcagaacagagaaagaggctctgtttggtagaaagtaattgaagagaacaagagtttctgcctggcaatcctgagaattcttctggatcttatccaagatcggcaaggcagtacctctacaagtcaacaagagtttcggcctggcaatccagagaactcttctggatcttatccaagatcggcaaggcagtacctctacaagtctgcaagaaccaaagtgttactgaccttggggtgcccctgatgcagatatggcttagatcacaacacctaactccttttgaacatctgaaaagccttcctgatatggtttggctatgtccccaacccaaatctcatcttcaaatgtaactcccacaattcccatctgtcatgggaggaacctggtgggaggtgatttaattatgggagtggttctttcctgcactgttctcgtgatagtgaatgagtctcatgagatcaaacgttttttaaaacaagaatttccctgcacaagctctcggtttttgcctgctgccattcatgtaagatgtgacttgcccctccttgccttctgccatgagtgtgaggcttcccaagccatgtggaactgtaagtccattaaacctctttcttttgtaaattgcccagtcttgggtatgtcttgttttttttttttttttgtttttttctgag

SEQ ID NO: 34829 - DNA, 1034 bp, Homo sapiens
accccctgtctgccattacctgttttgctgccataacatattatgccataatccaagtccctaattatttttgttatcccaagatggtatataaggttctgcaccttactgagggttaagtaatctcacgttgaggttacctgtgtacatgttaataaattttatattgtttttctttaattaatttgccttgtgtgaattgatttttcaacaaacctttagagaacaaagaggtgtttttttttcttttttttgactcctacagtttctatgtgtcttttagtagaatacaaaaaaaagtaaacaaatattcattttttataaatatattttacttcactgttctttacatagcagttagttgcattttaaaagaaattgtgagtattgctatttatttaataatacagttaacagagctaaggaggaaattagagcaataataaatgtgttatcagtgaaataattgctccattgtggcttcctcattaaagaccataagtcaatgagctgtgaaaaaaaaaaaaaaaaaaaaaaaaaagaatcactatgcattcttttttgttttcagttacctgaagcaccttttttaaaaaaacactttctatgtaccttttcttttttctttgtttttagtgagtcttttatatgccatataattatgtcttctttgtgagtcaaaataaaaatctttttttttaaacaggtgagttaagctcattctaacttattattatgaatcataagtttttttctcaactctgtaataatatgttatcattttaaaacttttatttgctacatttaattttctaaaaatgtgtattttttctttatttgtgtatttgcttgttgtatttagaaagttttgtatttcttcaagttctttactttttacttatgttttaatgtctttaaatgtttaatgacttactttatcagtttattgtgatatcctataatacacatttgcttatataaaaataaacttttccattttcttttttctattgccaaaatatatttattttaaa

SEQ ID NO: 34830 - DNA, 1050 bp, Homo sapiens
tttccacctagtatcctagatctttatttctgctctgtgaaatatagattcttctcttcttgtttctccatgctattgctataaattgagcagcagagtgtattaaaatatttatttatgctaaaatattcataaaatgtttgggcttttttagagattcagattagagttttccaatttgtttgtttgcttctggagggactttggaaggtcagggggcagaaagatttcatgtatatgctgaactcattaatcactttttctcatataatttgacttctgcaatctatagatgcttagtgatttcccaaagactgtgtgtgtatgtgtgtgtgtgcgtattatgaatgctcccattatgtgaaaaaaagttttaaaacatacagaataaatgtaagtgtatattcatagctgctattctagtcatttcttaaatttaactttgttagatataaccaagcagaattgaatagaaaaagccaaacatatatctggaattttggactgatatgaaatgtgtttatttggcatgtttgaatatgttggatagcagacaataagaggaaaatttaccctttagtctaaattctaagcaatttataagataaatatatccttagtagttttagtatattagtcataaactacatgtgaaaggaatatttgatctacagtataatattcaaaacttttttattataaaagatttcagaggtatatttagaaacagacttgtctctgatcaagcaggacaaatattagcaagtgtatctgcaagtgaaaatttaaataaatttagtaagtaaagggttcatgtccactgctatgaattttggaggtggccctgaacttattcagtagctgccactttttgctgtctggagatatatttgtaaacaagcattatttgacaagtgcttttcacagcagggattcttggccaattactgctgaacagccctgcattgaaaatgattcacccgcagtgaatcaagcttaattcattgaagctacagtcagtaatgtcccagtaaagtgcttctgacagtt

SEQ ID NO: 34831 - DNA, 1090 bp, Homo sapiens
agagagagtgtgactctaccccacatgcaagcctgaacctggagggcactcttcctgtggggatgcagtcaccctgacgtgttccagaaaggctgtctaaaggtgcacccacatgaagctcccatgggagaagccccagctctgtctgcagtggtagattaagggggaaaagaagtctctgctctgttgcccaggctagagtgtagtggcgtgatcttggctcactgcatcctctgcctcctgggttcaagcagttctcctgcctcagcctcccgagtagctgagattacaggtgcccgctaccatgcccagctaatttttatatttttagtagagacggggtttcatcatattagccaggctggtctcgaattcctgacctcatgatctgcccaactcagcctcccaaagaggtgggattacaggcataagccactgcgcccggctagaagtctctttctttaagacccttcatgagcatgagggctgcctgacaaagtagagctacagactttctacgctaagcccagcaccgcacctgtgcttcccacaaatgaaggttctggaactcaaggcctgccatctggattcttttgtcatacgggatgctcccttgatacggtatactcccctttccttcagtagtgggagtccctgagagccagactactgtgaatgctctgctggggctagccacccagtggggctgccacactccaggctggtgcaggggaatgtctgcaaggaatccagtgatatgagctgtcctcaaattttccagcagtggctcccagggccagctgtggtgggggtggcaggggagtgacataggctctgagactccttggttataaatagccttagtgtgtttgctttctcagaggccagttgcagtagttacgaactggtcacatggacagactcaggacctcctgcttagccaggatggtacaggcaatggtgatagctgaagtcacacacaggtttctcccttccttggcactgtgttattctacctagacgtgctgtaatggactgtgttggttggcctccagctaggaggtggtgcttgccaaagagtgccagctgc

SEQ ID NO: 34832 - DNA, 1033 bp, Homo sapiens
tatgctttttggttcatattttctgttggaggcagtgtccttcgccattgctttctgtatgtggcctcaactttccctttttaatatcaatcaatacatctaagctaaaaattctaatcaaggtttttggtatggttagcatataattctcattaactctgaagaaattgatgttttacggtaaaaatatttttaggccaactcccttttcaggtcttatttaaccattaaatacacacatttaaagcaactctggtgtaggacttaggaagaatgaagtgtgatggctctttttttatactttataattttctattgtgatttctcttttattgagtcatttttaattttttttttacttttatttctttgaatatatttgttatgaagtcttattgaaggcttgactaatcaagtatctgggcccatacagatttagttttcactgaatgctttttttcctttagtatatttcactttcatatgtttttacatgtctaataatttttggttgacagctggacattttaggtagcatattgtagcaactcaattttgttttatatctaagggatttgtattgttttaaatttagcattttgactggactcaaattgtggaatctatcttatatatgatgtgaagttattgctgtctgtgctcagtttttaagttctttatttcaatatttattcttgcttgctaggggtagttcctgtgtctgcatagcttagcagtcagccaatcatttggacaaaggttaagatcaaacacttgagtctataagccttccacccactgttggttgttctgtgtgggatgggggatgcattcattgtaggaggcagttcccaaattccccttggtttttacatttgccatgctctcttgagtctcccctgtgcatgcatcatttcagtttgccaaagatgtttggagagctcatgttacccttttctgcccttctgtttccaggaccttgttaaatgtctggctgctctgttgctcttcaagaactaggactgtaaccttt

SEQ ID NO: 34833 - DNA, 1013 bp, Homo sapiens
tttccacatgctgttctgtccatctgagtgggagctgcaagttagtcctactttctatcctccactttttcctgtatgtgctatacttttatgtgactggcagttcagtagatttatttacatcagcatcaccacaaacatgtgagtaatgcttttcactgggacatcatgatggctgtgaggtcactaggcaatacgattttttaaatgccattgtaaccttataggaccactatcatgtaggcagtttgctgttgactgaaacatcgttaggcagtgcatgactgtatcacaaatttaatggcttaatactcttgggctgggcgcggtggctcacacctgtaatcccagcactttgggaggccgaggcgggcagatcaccaggtcaggagatcgagaccatggtgaaaccccgtctctactaaaaatacaaaaaaaaattagccaggcgcgatggcgggcgcctgtagtcccagctactcaggaggctgaggctggagaatggcatgaaccctggaggcggagcttgcagtgagccgagatcgcctcactgtactccagcctggatgacagagtgagactccatctcaaaaaacaagaaacaatactcttgtattatctatctcacagttatgtagagagaaccatgagcttgaccaggtattctctttagagtattacaagactggaatcaagatgttgacaggtttgtatttctttctggaggctgtaaggacgaatctgcttccagtctgcttccagtctcgttcagactgttggcagaactcagttttaagtggttgtgggactgaggttcccatttcctcactggctgttggccagggtgtcattcttagattttagaaataactcatgtttcttggcatatggccccacatctttagtgccagcaacggtgcaagtccctttcatgcttcaaatttctgtgactgttccttctctttcgtttcttctctgcttccagcaggagaaagtactctatttttaagggc

SEQ ID NO: 34834 - DNA, 1035 bp, Homo sapiens
tatgcccaagctatggttaacatagacatttctaaagtgttttatatacctctatctcacttagagattatgcaaaacatcacttaataccttgataatgcaagagtttacatgttaaggcttacagaaaataggaagtttagggtgtttgcttttatattaaatcattatgggtttttaagtttgaatttttgtttatcagagtgatttataaataggaagagacttctttgcgtttgacagttttataacttctctatagctatattttgtactgaactttttgggattgagaataattttaagtaagtagtttgtatttcaatggtatttcttttgcagagactaacttaatggtaaatctaggtatacctcttggagatcctttgcagccaacgagggtaaaggacccagaaacaagagagattattctcatgggtaagatcaggcatgatactgaaaatacttaattaaacaatttgtaagaaaatattgcttgcttgatgattggcctgtctactttccctttctctccccaattctatcagtgctaaagtccagaagagtctaattccaacgagcaacctatgtgaagacaactgtgggggaatattgatatcagacagctccaggggacacttaacaccccggacttgtcctctggggcacaagtagtgctacaatcaggaatgtcgtctcccccaacagggtctaggccttctttgaccaggaggacacatgggaacagaggctgtttatggggaattgtagatagatagttggcagactcaaggatacgcttatcatgaagccaggcagggattgtgggtagggcacagacaaacttctgggcctacagatggcagtaatgttacctgggatatgaatcctttgtgaggatgactagcaagggcatcaatcagttgtacagatgccaggtttaaccttaaagctggtgctgcaaagtcctggaagcctcctgctgtattggattaaatatttagtctctagcaggtcatgtaagatccccaaggg

SEQ ID NO: 34835 - DNA, 1045 bp, Homo sapiens
aagagcgatgggaagccattagagggttttgagcagaagagagacatgacttgacctgtattaacagaatcactgcagctcctgtgttaggagttgactgatggggttgaagggatggaggaaggttggaagcaaggagactagctggagagatgttgaaataatcctagtgagaggtgttggcttagaccaatgtggtagcagtagaaagtggaaagcaggaggaggatttttaggtatttttgagggtaaagtcaacaggattttctgatggacgatacgtggtgtataagaaaaagagaggcgttagagagaacttgaaggtttttggcccgagctcctggaagaatggcaatattactacctgatctggggactactggggaagaagcagattttgaggaaaagaacaggatgttagatttggacatactaagcttgatgttctcaacctatgtattctttttatttgagatctattaaggactgctagagttgaagtaaagtgttcccactgcaactgtctttgcccttgtattttctgtagtctttgttatgtacatttcagtgctgttactgatcacataagccttcatatggagtgtacctgctttggtcaaatttatctgcttcgttgtgttaaatgctttttactttgtagtttgttttgtctaatattagtattgtgacttctgctttcttttggttggttgttgtttctttatctttttatttaacttttattagagaattaaaagtggctaagaaacagcatatgattgaattgtttttgactcgctgtgtcagtactttttcctttaataaattgtttaatatatatacacttattgtcaacagatatacttgttacttctttgtaaagttggtagacattctcacatattctagcaaggactcaggattttttttttctttttaaacacaatgaaccaccagctaaatagagaacataatcttgagtcatgatctttttttctttaaactatcaccgtattgctattttgcttcatgagagttaatgctt

SEQ ID NO: 34836 - DNA, 1046 bp, Homo sapiens
atacagtcactaggaagagtgtatcttgtttgcatatatttggagtaaactaactaccaaagagatgagctcagtccctctgaggaccctattgcccctcagtaggctgactagggatatcaaagaagccaattttagttgtttatggattctccagtaaaccatgatagattaactgtaatatatatcaagctgcttatagataaggtctccttatgtccctttcaccaccttccttggcaggtgtcttctccatttctctcatcagaatttttcaaattgggactcttggtaggtcctagaaaccagtttccttccttagctagttgcaagtctcagaacctgaacagggtgatctgatattcgttatagccaatattacattgtctttgtacccacctgtgtatcgtttctggaagaaaattttattttgaagaagtataaacactcatacatttatcatttttatagatctacaagaagctcaaagaatgaagataacattatgactgcacagaatgttcccctaaagcctcagaccagtggatatacatgtaatataccaacagagtcaaacttggattctggagagcataagacttcagttttagaggaaaggtatgcgtgtattgtaaggataatagttgtatatattagttacccattgctgtataacagattacccaagaactttattttaattttgttaaaagcttaaaaacacttattgtttcatagtttctatggctcagcaatctgggaggcttagctagctagttttggctcggatattctcaggaggtagcagtcatctttctggttttaaccctttaaagtcttgtctggaactggagaatccacctataaaatgtctcacatcgctgttggctggagaccccagttccgttctggctgtttccagtagaccttagtttcttaaccatgtggccctctcagctgctgaatatggcaactggcttcccacaaagcaaatgctccaagagaaggtgtgactatgatggatatcacagtgtcttttaatgact

SEQ ID NO: 34837 - DNA, 1029 bp, Homo sapiens
cacctgtgactaattcatcaccagttttctatgacaaacgtctaagtataaatgtcttagtatgcatagacacattaatttatcattttcagctttgctgtccctgctcttttttttttcttcaatctacccttagacctatcacataggttttgtcatgtactctctctgtatcacagagagtccctttgcttttctcctgaattgcaactcttatttcttggatctgaaatcttccttttttcttggcctctccttttttggtgggactcatcctttagtagctttctgagaatttgagaccttaattgtttaaaaataccatggttttaccttcatgatgggtaatttgggtgagtacagaattctagattagaaattattttcctttaattaaaaaataatatatattttttcatatcaagcctcccttttagtcaggtgtattttcccttagacttacaaatgttgctttcttttattttagcttctcctgttgagaatactgttgtgattccatgatcctttgtgactatttttttcctctttgcaggcttttaggatcatgtcatctgtctttagtgatctaaatttttattatattccttgacattaggttcatctaacccttttcataaatatttcttcagtttctgttttctgcaagtaccttttttacttactttgctcattacctcgcctttttcatatgtccagtgatccttagctgtctcctcttgtttgaaagtgggaaactaaaacacattggaagctctatatgcctagtaaaatttgtagactggtggatgtcactgtggtgtagtttggtccatttcatcattggtatcctggtgttaatatctgtagatttcttttctcttggcctagtaagtatttctgacaaagaaatctttcccgcttggcggttcaagtctaactgcgattgttttcaatttcagtcagatgtggcaaaggggaaagtgcagtttaaatgctcctacttaatatctctggttttcatgtattgcc

SEQ ID NO: 34838 - DNA, 1024 bp, Homo sapiens
aaaacattttggggcatagcatacacttgtctaacggttcacacgtggctatgatcacaagcaactttgaactggaatgctatttacaaaagttttgtgtattaatctgtgtattaatctctctggataaaaagaaggaaaaaatatgtatgaccagaacagatatggatgaagaaattgaaagcaacgaatgcaactattcaaaaagtttaattttatgaatttcttttttgtttagtcttgaagactgattttctatgcaaatagtgtttggcatcctgcacctctgatatgatttggctttgagaatttaataccactgggaagaagtatggtagtggtggatgaagggtggatattttaaattgtgcagttacagtttactgtcctattacctctgctcgtttaaccagtttgttatatcactgtgtccccaaaatcaggatttttgttgatagcatcagtgttgtaggagcaataggtcagatgagacatattaacttagactaaacgtgaacagtattatatggactctcacaacgctcttagagaatccgtgaatgtgaacagacaaatgtggctaaccatttgattcttcagtatgccttctaatgtggctattttatttatgtgagactctaaacctgattgtcctaatatataaaactaaaagattttgtaaagggagtgtctttagaaatagatgaaatgtagaatgttaaaaattattgctagggtagtcttttttttttccagaaacctaattagggtattaaattttgtgttttttttgttttttttttttaaacagaagcatgttatttcattcccattcccagaaagggagttaatgaagataaaaatttattttttaaggtctttattgagagaaactttgttttctgatatgaactattgcagatgtttttataaatactttcattaaaatgatgtaaacagtagtacccaacactgtaaactcagtgaaaatagtaaatgattcttttattactaagactgtcat

SEQ ID NO: 34839 - DNA, 1032 bp, Homo sapiens
taactgttaacatgtatagagtaggttgaaagtttgaaagtataaaatatactaaaagtatacagacctgtaataagaaatttatattactatagtcccatagctgcttttactatccacagagaaatgcttgaaaacgtgaaagttgaatagatgcaattaaaatcacggatagttttaggctgtttatattatcagatcaccttcttttatctaggttgccttggagatgatcaaagtaactggtggctatccatttgaagcttacaaaaattgttttcttaacttagccattccaattgtagtatttacagagacaactgaagtaaggaaaactaaaatcaggtatgtatgaaagtctatttctcttgtataatgagaatgaaataaaatattttaccttttaaaagggaaaaatactagcttcacctcttttttcttctattgtgtatgtgtaaatttttgccatcacttcaagatcagctcaaacctcatcttcattaaatatttctgactaaagtagccaaagaacccttacagcactttatctgccacattatttggcattatggtttcatctgtgtctgccagatgaattagaaggtaccctggtgtctgactgtaggtcatgagatttagaagaattccacaagcttgagacaaagcagaacaattcctgggcctgtactttttagttttcagattggcaacaaccaaaaacttgaaaaaaaacctaccttaacaagggtgtgagaaagcagacactctcatacattactaatgagagtacaaaatactataatccacagtaagggatatatagcactatatttcagatacatttgcacaagtctcaaactatatatttgcaagataattattctggcattatttatcgtggccaatgattagaataaccgaagtgtccagtaatggggtactggaacatccacacagtgaaacccattttaaaaagagagagacaacactgtcttgctaaaacatactgatttataatacactggaaggatc

SEQ ID NO: 34840 - DNA, 1049 bp, Homo sapiens
cacataaaaaattactaaatattagctgttattcttacctccagttaaatatagttgctggaatgtgtgttgccttctctttagtctttccctctctttaggatcttaagttcatcttccttagaaacaactttaaaaaaaaacaaaaaaacagggtttccctatgttttccagtctggcctggaactcctgggctcaagtgatccctgcctcagcccttaagtagctgaggctgcatgtgcacgccaccacaccccacttaaaaaatatttcgtttatacttcttctttttactttcaacagagctctacttcttggaaaagtggtctgtactactcaatgttaccacttctttacccagtaaatttgacttctttgctcattactcttcagattgttcttaacatggttatcaatgacccgtttcaaaaatctaaggaactctttagttcttatcttctgtgcattttttttaaactttttttataatgaaaaatattcagccatagaaatgtagaggaaatagtataatgaaccctaatgtaattgtcaattacctatcacccagggttagcagttatcaattcatagataaatcttgtttcatcaccattcccgttcattcttaccttcccccaggtgattttgaagcaaatctcaaacatgtatcaatttcaaaaatacaaagtactgtgtgttttttctggttttgttatttaagtactagctctttaaaaagaacagaatgacatgtaaaatatgccatttatataaaaaggagtgaagtaatctacatttgtttgctgtagataccacctcccaataaacctacaaatagtgatagaaaatgatatttgaatttttcatttatgagggacattgacaggagaatggacagatggaatacaagggtggtagggagacttcactgtgtctcttttaatgtgttttgatttttgaatcatgtgcatatatttactacacacattttttaattttattttttaatttttcctcagataatattaagtagtgggtgtctttaattc

SEQ ID NO: 34841 - DNA, 1080 bp, Homo sapiens
atttatttttggatttttaataggcttaaagctcaaaactagattaaatcaataaaaattggtcattgcttccccttaagtacctgttgtcatattttataaattagcgggatcccccagaagaggaaataccattttgtactctaaaatcctttccagctgctattgaacataccatacagtgggcaagagataaggtaaaagttcctttttaaatttattttctttgaagtgagaaagaagatatttctgactttaaacagacttctatttgtaattttttttttcttttctctgttacagtttgaaagttccttttcccacaaaccttcattgtttaacaaattttggcaaacctattcatctgcagaagaagtcttacaggtaaaaatcagtaaattttaatacaaacttaacactttgtgtcagtgtaatcttattttcaagtcatctacaagtgatttattttacctccataaagagtgattgtatataaaaaatgaaatgatacataaggaatcttgaaattaggtcacaaattatcattttggttgtttgaactacatggaattgtcgatatttgagcatgttcgactcacaaaacagcaattcgtatggtgcgagctaataaagatatgataattatgatagaagggctacaaataataaaagggcttttattaagccctttggaaagaaaaaattgaggtaagttctagttaaaatttcatgagggaacaataatctccaagacttattactcttatagtgaaggcaactttaaagatgttttctcactttcttttaatcttttgctaacaaggcccactttttagtatcaaatattcatagcacttatagtgagtacatatattatagtactaataacttacagctaggaaaatatgaggataacttgtaagataagaaatcagagttaaaattttgtatgctatctcttaccattccccttctcaaacagaaaagaaaagaaaggttaaagaagaaggaagggaaaaggagcttgaggtgaaaaaagaaaagcataaaacacatgagttgacacttcaaacttaggct

SEQ ID NO: 34842 - DNA, 1033 bp, Homo sapiens
ttccctttgtgggtaacccaatctctctctctggctgcctttaacattttttccttcattttatccttggtgaatctgacaattatgtgtcttggggttgctcttctcgaggagtatctttgtgttgttctctgtatttcctgaatttgaatgttggcctgccttgctaggttggagaagttcttctggataataccctgaagagtgttttctaagttggttccattctccctgtcacttttagttacaccagtcaaacgcagatttggtcttttcacatagtcccatatttcttggaggctttgttcatttctttttactcttttttctctaatcttgtcttcttgctatattttattaatctgatcttcaatcactgatatcctttcttccatttgatcgaatcagctattgaagcttgtgcatgcatcgtgaagttctcgtgctgtggttttcagctccatcaggtcatttaaggtcttctctacactgtttattctagttagcaattcttctaaccctttttcaaggtttttagcttccttgcaatgggttagaacatgctcctttagctcggagaagtttgttattaccaaccttctgaagcctacttctgtcagctcatcaaagtcattctccatccagttttgttccgttgctggcgaggatctccaatcctttggaggagaagaggcactctggtttttagaatttttggcttttctgctctggtttctccccatctttgtatttttacctacttttggtctttgatgttggtgacctacagatggcgttttggtgtggatgtcctttttgttgatgttgatgctattcctttctgtttgttagttttccttctaacagtcaggcccctcaactgcaggtctgttggagtttgctggaggtccactccagaccctgtttgcctgggtatcaccagcggaggctgcaaaacagcaaatattgctgcctgatccttcctctggaagcttcgtcccagaggggcacccacctgtatgaggtgtctgtc

SEQ ID NO: 34843 - DNA, 1074 bp, Homo sapiens
cagaaatttatttggctcacagttatggaggctaggaagtgtaagatcaaggggtcatatctggtgaggggcttattactgcatcgtcccatggtggaaggcagaagggcaagagtaagagagggcaatagggggctgaacctacttttagatataacccactcccacaataatgaaaccactcctacaataatggtattaatcaattcacgagggtagagccctcatgacctaaacacctcccactaggcaacacctcccattaggtcctacgtaacggggtttaagtttccaacacacaaactccgggaaacacattcaaagtgtagcatttgctcctggccccccaaatttttgtcctcataatgcaaaatacttttattacctcccagtagtaaaaaaaatctgaacttgttcaaacatcaactcaaaaaagtccagtctcatctaaattgggtatgattcatcctgaggcaaaagatgacactagagaactaagcagggactagttcatgaatgccttgtgactaaagaatttagactttattgtaaaggaaatagaaaaccactggggttttttaagcaagaaaatggtttgactagatctgtttcagaaagatcatttatctttcttagtaggaagttaataggtaatatataaaactcaaaaaatcaagaaataaaagtatacacgtgttatttagaaatatgggagtaaatattaagagaaatgactaaaaaattgagactagttatctttggggagtgggaatcagggtaggaaagaattaggtcagggaactgatggttgtttttttctctctctcataaaccttgaggaatgatttggctttcttaatctgtatgcattgtggcataatagttaagagtatggatgctaaggctagactgcctggattgactcttaacctccactacttacttaattctaggtgcttatgtattcctatctgtaaaaatgagaataataatagaaattatctcatagtatttttgtgaggaataaatgagttaatacaagtaaaacacttaaaacaacatgtggtgcatagt

SEQ ID NO: 34844 - DNA, 1498 bp, Homo sapiens
atttagcataattggcagtatatatggataatagttgaaggtcatcactagttaatatctttggcctaaatcttactgaagggatcagatggaaaagtcattaaagttaagtggaaaactgcataaagagatttgaataatctgttgtagatgtctaatgaggcatcatcctttttctaaaccatgtcagcatattaccttctgtgaattaatttattattgcatttctttggattgttctctccgccgattataatacagagacttttctttttttatattttaaaattgtttatataaatttttttttcaaatcagggatccacttaacactatttgcctttttgacatacctaacacatttctttccttttctagcatgattatgatatgagggtggatgatttccttcgtcgcacacaagctgttgtcagtggccggagaagtagaccccgtgaaagagaccgggaacgagagcgagaccgccctagagataacagacgagacagagagcgagatagaggacgtgatagagaaagagaaagagagcgattatgtgatcgagacagagaccgaggggagagaggtcgatatagaagataatgggcttttggaagcactgattgtttaaagatacaaaaaatcttgtattttttttttgtgtgtgtttacaagtagtaaatttattttcagctgtctgcctatgaagttcattgtgtagaaggatttattatgaccccctttgttccaagcatgcagtatcataagaactggaaaaactcaaatccgccaaaaatccacagctgacagttgaattgacacttttattggggcagaatggaacagtccaagaatgtagatactgattctttctccataaatgttcttatagtgtgttcatcctagagttatttttttgtttgtttttttcctttttggatcttgattgataactgccatgatattttgctttgatgtgtttctacatgtagttgcacacggttcagtaaaaataatgctgctatcgagtatgcaaatattgaagtatgatggtttgactgtatggcagtgttgtagcagcctcttgtttttttccccattgcctctttttttaaaaaacttataaagtcactttttatttttcctcagtcttcaatgacgagagcaatattaagaagacattgctatctaatttttaatctttttaaatgaaaaattcctatgttcagtagcgtggttgatgctattgtttagccttcccctccaaattgtatacattggcttggaatgttcacaacttgcgtgcgtggcagcggaagacgattcccatattctacattgctactgttttgtataaaataaattggtaaagattgacggttatcttttgtatctttttcttatccaattgcaggtttgttttattatgcaataatggacataaaagcatgctttttgttcaggaattttaggaaccccatttgctttttttgaggca

SEQ ID NO: 34845 - DNA, 1034 bp, Homo sapiens
gactgataataggcacatgtatcagaataacatgatggaggaatatgattcgtcaaaagtttgtcctgcggtaaagaagaaagagaaaatcctcaaatcaagctgcatggactagtttgtggcttcattgaggatttcacatggtcaccttggtctcagtcatttttcaagaggaaaatggggatctttccttatgcagaaaaaagtataaccagtgataaccagtttagattagataatactctgataatacaatgtatacaattgaaatgaggtaggcatttgttgctaagaacaggctagaaaggaggaagaggaggaagtctttatttgcaaaaattgttaatactttttaaaaagccttttctttcaggtatgtctctggataagccttatcagatatgggacttttataaaggatcactaatattttttcagaagatgacgcctcatttagaggataaaatattttaagttattttgatattcaagaggagcattattgggactgtttcagattttatcaccgtgatgtgttaaccctattgccaaatattctctaacatgtacccagtgaattcacacatcttgctgagcttctgaaaacaataggttctttccaaaggggatcaagtggccctgggagacccggcaacaaaccaaaaagaagggctgttgctgtgtctgtttacaacttttccagatgctggcagtacctgtggacttaaaagtgttttttagaggatcgccatggttattgatcactactttatgaactaaacagcattttccagaaaaagggggtttaacttgttacagaattggagaagtctttgcaaaggactgatttaagcccttctacccaacaccttcccctgtgtagatttgcatacagctaaatctaaaatattctgctaaagactattggatgtatggttgatgggatgaaacctttgattaaatttccttttggtggagacatcctgtggtaggtacagataatccaacaagagtccccatttctttgagcttaa

SEQ ID NO: 34846 - DNA, 1986 bp, Homo sapiens
aagggacttgagcatcctcagattttggtatctgcatgggtcctggaaccagtccccagtggagactgaggaacaactgtaagcacttagtttgaatgagatgtcatttgtatgagcagatggtgtgagctgaatgatagcatctgccttattattccatttctttttatctgttatgaatgaagaattggttaaaatgctttagaaattaacaaatatcttccagctgtaggtaaaacgtaggcctcttcagtcaaactattgatacataaaaatttgaacttaaaaactgctttaaaaaacgaacttaaatagaaaaatgctagattcttgactaatagagtaattttaaattatttgatcaggtacggttttgcaagaagactaacttctaagtggcgattcaccttcaaacaggatgtatttaccacagtaaatggttgtaatattaaaataattgtagtgattggttttactatatagaattctagtcccttagatttgaacctcatctccatctatttactacttgctttaatggttttgtaaaattggtaattgtctccattttttcccttaggtttttataaattattactacgttattctgacagctgataaataaaacctttcttcattatagcttacttaaattgaaagcacaccaaaatatgtagttttttttcaaacataactggaaacacaaaagagttgtagttaatttcactttgtggtctttatgttatttatgtagggtgtatggtccacgctccctgtaaatgagaagaaattaaatcttgcatttagatctgcaaggagtgttatcttaatattttctgtcagagagagtggaaaatttcaaggtaagaataaaaataatttggacatataaaaacattaattatattagcatctacatattatattatgatatgattctcttagggtttgcaagactttcttcagaatcacatcacggaggatctcctatacactgggtgcttccagcaggaatgagtgctaaaatgctgggaggtgtctttaaaattgactggatttgcaggtaaattatacacttcagtatagataactgaaattttgaatacactaccagtttagaataatgtgttaaagtgaaaaagtcactgtatacttatcttaccttgttcagtaactacctttatctaatgtgggacacaacaaaggcgtatttagtctaaagttacatgtatttgatttgttttgtatattagtaataaagcagtaaatgaattggacagttgcttgaaatgttgtctggcgtatctgtataattttagtgatttaacatgtcacttaagttattgaggaatgggaaataagtactatgacttggctaacaatttcggaggtaactagtttagtcgtggacagtattttttaaggaggttagcaaatgatgtttagttgccattgtgatcttctgaaactgagttaagatttaactgtatttattagaaaaataatcaggcttattttgaacactgagttgtcactatttttaggtccttactgcacactgaagtattgtacacaagaagctcattatttaagtgatctttacgtggcatacacaaatgtattacctgtaaaattaattttagttaaaaagtgtctgaaaggagatggttactttgtgagttttaagttgtttttgggtattagatcttgatgagcctgaaggggtcggatgaaaaagaagaaaaatgctatgcatatgatggaaatcagcctaagccaagaagagcatggaaacaaactatggggttgcagggttgtggggagcagtgggagggcatatggatgtgtgagtgggatagggagctacctttttttatgaaggagatggttaggaaaagagaagaacagagggcaaagatggataagaatgaatgaatgtgagtcagcctaaatgtttattgtaggatagtgaggagctgtgaagat

SEQ ID NO: 34847 - DNA, 1046 bp, Homo sapiens
agaagtggaagctctgcatcagagtcatatgcaggtattctcattttgtgatcatatctgacttgattctaatgtaatctgctttagaaagcgtgtggaggctgtagtttagtgtgaacttgttgatgtccattagcactgatttttggcatgttcagtgtaataattctagagaaaactaagctttttcttattattttaatcctgttctgttactgcttaagtggaattttcactttttttttcttggaagatgatgattcagtgactagttttctgagtgggaaactgttcaaatatacatacttttaaaaaaatccaaacaacccaaaaagcaaaacactcgtacacattgagaagttttttttgtgtgtgtgggtgcgccaggaagaataatttgtcttgaatgagaattttatgtgacaagactgtagaaattttgtcttatctctattaaagctcaatctgaacaaatgtactttggctaaatacaggttcagaaaagaagcatgagaaattatcatcttccgttcgtgctgtccgaaaaggtatcatttaaatttgaaattgttttcattgcatgctgcatagtcattatttttccttattggttctccattaatagctgcttttaatgtagtaatgttccgatatattacatgaagcaaaaaataatatcttaacatagaaagctctgtgtctgcttcttactgcatattttttagaataataccaaacatttcaggatattttagtttttggacaaaatgggatgggtgtgtgtgtgtatgtgtgtatgtgttatatatagatgtgtgtgtatatatatgtatgtatataatggtctgttattcttgaatctgagtaagaaaatctataaaacttggtaaccattttcatacttaaatatggatttgatatatcggaacatcactaggttaggtttactttcttgcaatatgctgattgtcttttcttagctttgctttattacatgtggcttagccttccaggttgaatgggtgattgttgcgttttaaaagttt

SEQ ID NO: 34848 - DNA, 1059 bp, Homo sapiens
ggagtggggtgatggagcagtggtcgtcgttgggggtggggggtgggggttggggaggttagctggcctcgcgaggagccggtggcccccaccgagacacttagactctggcggagaccaggcctgccctttcgtcctcagtctccatatggcctagcacttcatctcagtagggtttttctttgatgcggatttcacgcttgactttccgtttagctgtcttgggctgagaggggccctttctgagttgcaagctcctaggtttatttcctggtaggatcatgcggatgtaacgcgtattttcaggacaaccatttctgttaggctaaaatttgaaaacccctaatgccgcgatcaacactggtggtgtggtaagtgagcaagtttaggaagtggcactggcaggttattaatcttgagaaatatctgcaaataacttctggctgttcctgttaaataggcaaagtgaattacccgttttgttcctcgaatacttattttggaaaaacatagtacttggaaaaaggaatacttagtttggaaagatgactgtgtgacttaggctggcaaagaaatcctgggtgctattatgttagaaaaaccgtgtgtagctcccagagggtacagtcagaaacaaatgaatgcaagttacagagagttggagggataaatttcagtgaaatgtagagagaactgacgttgctgtaatggaaagatagtaatactaagttcccaagccctagagatattaatgtaggtcctagatcagtgtctctctggagagtggtctagattaaatgctgctttaagatctttttcaaccctaagattaacataatagtcttggaaagattatagttaaaaatatgacacggtcgctgctctgtgtctcacacatctcttctgtgtgcctaattgatttggggtttttttgtcgggggttgttaagtgggctctagagtcaagttacattaggcgtgtaatccttttttcttaatttttctggtttctgcatcaggagagtcttcatgcttcaatgaactgccctaggttagggac

SEQ ID NO: 34849 - DNA, 1050 bp, Homo sapiens
tacagatgtgcaccaccacgcctgactaatttttgtatttttagtagagatggggtttcatcatgttggccaggctggtctggaactcctggcctccagtcatttgcctgcctcggcctcccaaagtgctgggattacaggcatcagccaccacacccagccgtcattggagtttttttgagggagatttgcagtaaggtgaataaatgttaagtgtatcatttgatgaggttttttctttttttttttttttttttgagatggagtcttgtatcgcccaggctagagtgcagtggcctggtcttggctcactgcaacctccacctcctgggttcaagggagtctcctgcctcagcctcccgagtagctgggattacaggtgtgagccaccatacccagactcatttgatgagttttgatgtaaaagcatgtaactcaaacccctatgtctggaacatctgtattacatctgaattttttcacctagtcaattcctgcacctctctctcctgtcccttcttccctcccctggcagtcagctactgttaggattttgttcactgtagattaattttgcctattctagaacttcatataacggactcacttatgcagtatgtattctgtaagttccttttactcagcatgtttgtatgttcatcagtgtgtttaagctttgttcctttttatggctgagcagtgttctatgtatgaatgccacattttaacgtttcacctgttaggtgaacaactaactggtgaacaatgggctgtttctagtttggggctatcatgaataaagttggtatgaacatgtacaacctttttgtgaacctacattttaatttaatttaatttggataagtatttaggagtgagattatcctgagttgatgtattttaaattttactagaagacgacaaaccttttcctaaatggttatcctggtttacattcccagagttctagtaggtccatatccttaccatttgctgttgtcagtctataattttagccattgtgtagtggtatcttctggttttaatttg

SEQ ID NO: 34850 - DNA, 1027 bp, Homo sapiens
ggtgtggcacacgcctgtaatcccagttacttgggaggccaaggcaggagaatcgcttgaacctgggaggcagaggttgtagcgagccaagatcacaccattgcactccagcctgggcaacagagtgagactctgtcaaaatcaaaaaaaccaaaatacaaaaaactccattgttctgagagtttcccctaaattatcggaagacactcacattgaattggtaggacctatagtatagaggagaatggtatgtatgtcagcagtagagttccaatccaaattgcgctatcgcattagaaatacattaccctcccactccccaagttcagcaaattagaagagaatctgaagtttgtaggaagggaataaagctgctataaacatttatgtgcaggtttttgtgtagactcgttttcagctcctttgggtaaataccaaggaaccaggttgctggattgtaagttaagagtatgtttagttttggaagaaactgccaaactgttccaacatgactattttgaattcccattgacaatgaataagagttcctgtagctcctcaccctcattagtatttggtgatgtcactcttgcattttagctaatgggtgaatagtggtctcatcgttttaattcccaatcccatagtgatgtggagcaccttttcatatacttaatctgccatccttatatcatcattggtgaggtgtctggattttctgtccagaattttagttctagtggttttcttatttttagaaaggaagtataggaaggaaggtttaatctgtcttaagcctgattatatgaaaatcaagaataggctaggtgtggtggctgacatctgtaatccccgcactttgtgaggctgaagtgggaggactgcttgagcctgggaagtcaagcctgcagtgagccatgactgttgctgcactccagcctgagtgacagagtgagaccctgtctcagaaaaaaaaaaagcaggctcattttaaagttgtttatattttattttttgaaggaaataa

SEQ ID NO: 34851 - DNA, 1050 bp, Homo sapiens
tttctccatgttggtcatggctggtcttgaactcctgacctcaggtgatccgcctgcctcggcctcccaaagtgctgggattacaggcgtgagccactgtgtccggcctactttttattttttttgagacagagtcttgctttgttgagcagactagattgcagtgatgcagtctgggctcactgcaaactccgcctcctgggttcaagtgattctcctgcctcagtctcccgagtagctgggactgcaggtgcccgccacaatgcctggctaatttttttgtatttttagtagagatgaggtttcaccatgttggccaggctcatcttgaactaactcctggcctcaagtgatttacctgccttggcttcccaaagtgctgggattacaggagtgagccactgctcccagccataattccttatgatttatatggtagctttgagcattatctccatatagaatttttatgcataatttccaacatcatgctgtttgccaaaaaatagccacctttagtagctataaatcgtaatagactggatatgtgacttgcattagctttttttccccacttaaatttaaacacgttttccattttctcaggttacttttgttttttttttttttttttttttgatatgaaatctcactctttttgcccagggtgaagtgcagtggcacaatctcagctcactgcaacccctgcctcccgggttcaagtgattcttctgcctcagcctcccaagtagctaggattacaggcattctctaccacatccagctaatttttgtatatttagtagagacggggtttcaccatgttggccaggctggtctcaaactcccgacatccagtgatccgctagcctcagcctcccaaagtgctgggattacaggtgtgagccaccacgcccagccattttctgttttaaggtatttttaaaaggataccatgtgaaaccagagtgtatcatccataaacacagttaatgtgccactgtttccttttcctaaaatggcattttttttttgccttaggaagtacat

SEQ ID NO: 34852 - DNA, 1969 bp, Homo sapiens
agtattttcagtagagatggggtttcaccatgttggccaggctggttttgatctcctgacctcaagcgatccactgtcctcggcctcccaaagtgttgagattacaggtgtgagccaccatgctcgctgagagcagatatttgaaatgtcactttgagttctgagaaaaagtaaaaagccagaagacatactagatatataaatatattactgcttaaaaagatttcctaaaaagaaatgtatcaagtgtatgaatcaaagtctgaaagaaagatgaagagccaccagacttctaggtaggtttacatccatcatgttcctcttgactgcctttgtttgtcgtttagttttttgctccactcaagcctgttagaatcaccatggaatacagctccagtgggaaggccactggagaagctgatgtgcactttgagacccatgaggatgctgttgcagcgatgctcaaggatcggtcccacgttcgtaagtcctgcctttggcttttgttgtcatttttgatgcttgtctttgcttacaaatatctttttctgttttgggattgtagaatttttccttgagaaatttgtattcttttagtactagtaaattaaacgtaacagataaaacactatattataatttaaaaaattttgtctgctaattatcctgcaaatctctttctttcttttttttttgtcacccacgctggagtgcagcggtgccatctcggctcaccgcagtctcagcctcctgtgttcaagcaattctcctgcctcagccacctgagtagctgggattacaggtgcctggcaccgtgcctgactaatttttctatttttagtagacacaggtttcgccatgttggccaggctggtctcgaactcctgggttcaaatggtccacctgcctcgacctcccaaagtgccgggattacaggcatgagccaccgcatccagcctgtttgtccattttacattttgtttgtttgtggttgtttgagacggagtcttgtctgtcgcccagtctgtagtgcagtggtatgatctcagctcactgcaacctccgcctcctgggttcaagtgattgtcctgccacagcctcccgagtagctgggactataggcacccaccaccacactggctaatttttgtatttttagtagagatggggtttcgctacattggccaggctggcttgaactccttacctcaggtgatcctcccacttcggcttcccaaagtactgggattacaataggcgtgagccaccgtgtctggcctaaattttgtttttaattagggaaaggaaagggcaaagggtttgagttgctgtctgaactgtgagaaaaatggctgtaatatttttctaccttttcaactttttaaaactaatctttctcattatcctcagatcataggtatattgaactgttcctgaattcatgtccaaaaggaaaataagactctaggggctccagataataaggtaaatttaagaggtaatactgtgggctgggtgcagtggctcacacctgtaatcccagtactttgggaggccaaggtgggcggaccacctgaggtcaggagttcaagccagcctggccaacatggtgaaaccctgtctctactaaaaatacaaaaattaaccgagcatgatggtgggtgcctgtaattccagctactcaggaggctgaagcgggagaatcacttgaacccgggaggcagcggttgcagtgagctgagattgtgccactgcactccagcctgggcaacagagcgagactcaaaaaaaaaaaaaaaaaagagagagatacaactgtggaaattatttgctattgataaactaataatcattcactcactaatttgtaatatggtagaaaccattctctttttatttttcaaatttttttagggactaggtcttgctctgttgcccaggctagcagtggtgcgatcatagctcactg

SEQ ID NO: 34853 - DNA, 1041 bp, Homo sapiens
gtaatagtaatttttctcattataattcttgtaataaaaaaagtgaaaatccaaattgaataggtgtatttcactcccacgggacttattgaaattattttgattatggatggacaaaattcatgcagggagaaatttcagttttcttgaattgttctttttgtataaagttctcagctgcactgtgctgtatcttcactggaagaaggaaaagtgtgttcaaagtcatgtgagaatataagctctcaaggaggttgctgtgcctgttacgaaaagtgtgattgcatatctgctttgggccaggtgctgaagccactctaggcctacttgttgaagaatgaactggcaagagatgaagtggttttgggctgagtgaacatcatatgcattgctaaaaagttcagactgcatttttttaaggaaaaacatattcatggaagtttttaaacaaggaaatgatttttttcccctatgcaacaactttactggctttgtggacagtaagccaaaatttagagaaactagtggcagggatattcatgtgtggatgtgatgtttttgctattgagcaatttatccacaataaacatatcttttagatactaatatcttagtatactttgatgtgtggatataaaatggaatttagaccttcatgtctactgaattttgtttgaaaaatactatgaaactcatctttcatttgtccactttgacacttttttgtgtaattagtattatataattgtcaccatttttttaggcagtaacaagtaacctttatcaaaattgtgaagtttcaaatattagtggtattttaaagtattttggtttattcctatttgaagtagaaaagctcttaactgattttctgcatatattttgaaattttgcattggcattattagatatagttctttaaaaagtcataagtaaccatctcagtgaatttgtaaacaattgagtgaaaaaaatacaaaaataattggagaaggaagcaacttttttttagaaaattattgcctttggaaatatatttta

SEQ ID NO: 34854 - DNA, 1027 bp, Homo sapiens
cttataattgtctaacagagataatgagtttacttcataaacaacaacaacaacaacaaaacaagagagtatgaaagaagggtataaaatattctatacattttaaggataaaacttagtagtttgttttgaatcagtctttcataattctaagaagacagtatcatgtagtaaacaacccatgctgtggaatctttctaccttagacctgccactggttagctgtttcatttttacaattcaggataaaatggaataatcgtggacctacaggctagggttagagcaggcaaagtttttaacaaactgcaagtcctcaataaatgtttgtttattggtaacagaaccatcttttgttgtctcccagttttaatgacatatctaggaacaaccgcattttatttaaagtaaaacgaccacttctatttacagtaaaacatctaaaaatgtaactagttcaaagaatcatgtaatatctaatttgaggtagttctcattcctttctgcctgactaatactagaccactgaatattccaaacctcttaagattttattcccttatactacaagtcaattaaagtgctattactgtcatttatgtgtttaatggttttcaacccataaatgtaaaatggtttatctttaatttttgttatgtcctgccagtttcttgtaggttatgcctatgggcaataagcaaacggaacctgataaaatttgcttataatgtagaacatttcaggttaccaaacaaagctcactttgtttactaattttaatttctattataaatgtagcacatctttatttcatgtggtatttagaaatactaaaagatattttaatcatagaagaagaaaaaaatgctcacatccctacacctcaaagatctctacttatattttgggtgacttccttccatgatgatttctacaaacttaagactacgatcttccaataaatgccactttgaatatgttcactttaacaagtttctcaaagactttcttttgtcttttaatcctt

SEQ ID NO: 34855 - DNA, 1068 bp, Homo sapiens
tggccaataggtatatgaaaaagtgctccacatcactaatcatcagggaaatgcagatcaaactcacagtgagatatcgcatcacacctgttgaaatggctactaggagaaaagtgaaagataagtgttggtgagatatggagaaaagggaatgtctgtacactactgatgggaatgtaaatggtgcagcacttatgaaaaacagtatggaggctcctcaaaaaattaaaaataaaactacatatattccagcgatctacttttgggtatatatacagcaacttccttatctgtgagaaatatgttccgagaccctcagtggatgtctgaaaccttagaaagtaatgaaccctatatatactatattttttcctgcacatacatgcctatgattaagtttataaaataggcacaataagaaattaatacaaataactaataataaaatatgcatgtgaggatgtgagatgataaaatgcctatgtgatgaaatgaagtgaggtgaatgccgtagccattgagatgtagtgttaggttattattccgtttctgactatacctcagaaggaagaacatctgcttcaggtgatcctggattattgggctatgatatggttggctgtcaggagcagacgatgttgatgattaacaagtgggtagtatagacagcaaggacttgctggacaaaggaatgattcatgtcctgggcaagacagagctagatgacattagatttcatcatgctacagaaaacaacaagcaatttaaaacttatgaattgttacttctggaatttttcatttaatatttttggactgcaattgaccatgggtgatcgaaaccatagaaagcaacactgcagataaaggggggctactgtacaagaaaaatcactatctcagagagatgtctgcactttcatattcattgcagtattattcacaatcaacaagatagggaaacaacctaaatgtctgtcaatgtatgaatggatagggaaacctttctaaacctttattcagctttagaaatgaaggaaatcctgccatttgtgacaacatggatgaa

SEQ ID NO: 34856 - DNA, 1026 bp, Homo sapiens
gtctaaaaccttatctagaggaaaagaaggtcattatacattgataaaagagttaattcaacagtaagttataacagttataagtataaacacaccaaatatcacagcatctaaatatttagataatgttttatctaaataaagtaaatattgatagatctgaaggcagaaattgacagcaatacagtaacacttggggactttagtaccatatttacaagaataggtggaacattcaaatatgaatatcaaccataaacagatgactcaaacaacactggagagctaaagggtcctatctgatgtatacagaacttttcacgcaacagaacttttcagtacacacagaacattctctaggttagatcacatattaggtcacaaaacaaatctcaacaaatttaagaaaataaaaatcattccaaaataaaaatcactttttctgagcacagtgcaataaaagttgaaattagtaacagcaagaaagtgaaaaattcacaaatatatggaaactaagctctacactgaaaattaaaagggaatgtaaagtgtatctcgaaacaaaggaaaattaaaacaacatatcaaagcccatgggattcagcaaaagctttaataagaggaatctttgtaggtataaatgcctatattgaaaaaaaaaactttgcacctcaaagaactagaaaaacaagaataagctaagcctagtgttagcataaataaggacacaataaaaattagaaaagaaataaatcaaatagagaataaaaaaacagaaaaaaatcagcaaagctgaaagttgtttttcgaaagataaataaaagttttaaaaaacccttagtctaagaaaaagagaaagaagattcaaatatttaatatcagaaatataagaggagacattaaaacaatttttttctgaaataaaaatcataggcactattataaacaattatatcccgaaaaactagattacataaaagaaatggatcaattttcaattttgagaaactttcaaactaccaaaat

SEQ ID NO: 34857 - DNA, 1109 bp, Homo sapiens
gtacatagcccacagacccaataaagcaaccaaacagtagaaactacaaagcaaccagtcaacaacttcatgatagcatcaaaacctcacatatcaatattaaaatgtaaatgttctaaacatcccacttaaatggcagagtggcaacttggataaaaaagcaagacccatccatctgctgtcttcaagagacctatctcacacataatgacatccataatatcaaaataaagggttggagaaaaatctattatgcacaaagaacacaacaaagagcagggataagtattcttatattagatgaaacagacattaaaccaacaacagtaaaaaaggacaaagaaggatattacataatgataaagggttaaattcaacaagaagacttaacagtcttaaatatatacacatccaacattggaggacctgtattcataaagtacttctagacctgttaggaaatgtagacagtcacacaataatactgagggatttcaacaactgactgacagccttagaaagctcattgaggcagaaagctaacaaagaaattctggacttaaattcaacacttgaccaattggagctgatagacatctactgaatactttacccatcaaccatagaatgtatattctcaattgcacatggaaaatactccaagatagaccacatgcttggccataaagcagtctcaataaaataaaaacactgaagtcataccaactataatctcagaccacagtggaataaaaatagaaatcattaccaagaaaatctctcaaaaccacaaagttacatggaaattaaacaacttgcttttgaatgaattttgtgtaaacaataaaattaaggcagaaataaacaaatactgtcaaggctgggagtggtgtctcacggctataatcccagcactttgggaggctgaggtgggtggatcacaaggtcaggagttcaagaccagcctggccaagatggtgaaaccccatctctagtaaaatacaaaaaattagccaagcgtggtggtgggcacctgtaatcccagctacttgggaggctgaggcagagaatcgcttgaacctgggagggaaaggttgcagtgagctgag

SEQ ID NO: 34858 - DNA, 1045 bp, Homo sapiens
gggtacactggaagcccaaaccttaccattatgcaatatatttatgtaaaaaaactgcaggaaaaaagaaaagaatatttaagatttaagcatacagagacaggaaagagggaatgctagtgtccaaatgaaggaaaatctgaaagtaaacatatggatgtgacaagtatggggaaagaaggaagttcaaacattaatttggcttcatcatagaacatgaaaagagctttggagtgtcaataaacaagagtcttctgatcagaattttactcaagaaggttaatccgttagatggtggggagtgaaacggaagtggaaagacagtggtgggcagtagtttggaggctactgcaatagctagataatagacagtataaagaggaagtagaacagtagctgtggtcattgaaaagggaaagatggtataacattattgagtggaattcctaagatatgccaactgctgtgaatgaagagggaagaaaggagtgtgtgtaagggatcaaagatgagttggaaagttttgagctggcatgaccaagaaatatgggaaatagaataggtaaagtagaaaacataaattttatctaagacacattgcatgtgaactgtcaacaggatgtgcaggcagagatgtttagaagacaggagatgggagtcgtgggtactctccagagacagtacatggctagggacaggaatttggaagacatggaacttttaaaggaggtaactgaagctgagacaatagatagaattaaggagtgtttggagaggagagctgaagtatgatgtcttgaagatgtatttttaagagcatttttaggctgattggggatgcagaaatttcctatgtaccctctgcctccacacgtgaaaagaatacccactttttggagagcaggaggagaagccagaagagacaaaaagaagtggctgagccaaggaaacaaaacttcaagaatagcatgctcttagaaaaaatgaatgtaaattttagggtcaagcttatttttttatttatacttttaatttttgtgggtac

SEQ ID NO: 34859 - DNA, 1090 bp, Homo sapiens
cacctcatgcatggaaataattaaatgtcaaaatgagtcattttgagtgggttgcatattggtaagttcactaattttttgaattaacagaggcaatagagatgagtcatacaattatttaaaaaactatggaaaagttttaaatatagatctttgtttttaatcttaattaaaatgtaatgtaatgtaatgtatagtattgtttcacatgttatgctgggcagacaataagttttctgtgtatttctttatatttcattttaatttgagtgacatttgcatacagttatactgtttggtttaagttgttttcataacactggaaaatagaatgcccatcaaatatataggatagcagtatcctcagagttttgattttgttcttttgatgttaattgtgttaacaggaaggaactttagaaattatgcttttcagaaataaacaaagagatattactctgggtatgtaattgtaaaaattgtaaaagtttaaggaaattattggttcgaaatttactggacattgaaagtttttgttttaatgcacatgtcaaatgtagattgtacactgtgcttttcttactttttcttttttttatatttacctttggaatagtaatttattaacttggtgatatgagaaattattgggtaatatctaagactcttataaagttaaaatttaggttattaatttcagacattatttcttccatttattttgatagaagagactagtctaaaaataagtctattattttctttcttgtgggattaagattcatgttttatgtttttatgactgaaaacaatactgttaaacacttgctcgtgttaagaaactagctcactttggtactggctcagtcttagatatttctttccttttttcaaacactgtctgaagttaatgcattaacttttataaggttataacctttgaaaaatgttttaagcatttttaacactgtcaaaaatgaagattgttctttttttgttggttatgattatttctgtataaagctgttatacaaggtgtagtgattgaatagaacagaaactgtgtgtgggagactgaaatattccactt

SEQ ID NO: 34860 - DNA, 1042 bp, Homo sapiens
ggcgtagagtgtgtactcaacaaattaatattgacagactgattggtatggattttggaatggagaattaaataccactcttgagaggtgaattgagggcttttctttgatgttttcagttttcccttttgtgtaactttcataaaataaagagagtgttacgaacttgaaagtttttgaggtacctaagattttatataaataaattccatcctcctgagtagtgtttttatgcttttgtttgcataagttcttttttcctctcattttccatctcatctactttcacgtacaagctagtgaaggagaagcagcatctgttttttttttttttttttagttttcacttttaattgacaaacaacaattgcatatatttatggggtaaaagtgatattttcttatgtgtatacaccatagaatgataaaatcagagtaatcaacatattgattgcttccaatatttatcattcctttgtggtcagaacatttaaaatactctcttttaactactttgaaatcatcttgaccaaatcctcacttgagttcaacctaatagtagatatatagtgtgtctcttaaattagtttactcctgctaagcaacagaaaccaatacaaattagcatggaaactttttttttttaaagagagaattaaaaaaagagagatcataaaaatattcttggaattatttccttggacaaatacaaaatatgtgtatgtactgacttttcagtcagtgttattactacagcaacttgtagttctgtgagcactggccacatgtacattacttgtttaatgtcctgtttctcctctgaaataaagtggaaattccatgagagtggtgactgtgtctgtcatgcttacttctgtatccacaagtccaggcactacatctcatgtggtaggtgctctgatgagttactgactgaatgaagacacagaacataaatttgatgacactacactctgctccctatccccctctaggtttcaggattcttagttggatgaattcttcctctgggtagaatccc

SEQ ID NO: 34861 - DNA, 1027 bp, Homo sapiens
tcagatatatggtttgcaagtgttctcttccattctgtgtgttgcctttttactctgttaatagcgtcttttgatacacaaaaatctttttattttcatgaagtccaatttattttttcttttgtttcctgtgcctttgatgtgaaatctattgcaaaattcaatgttgtgaagcttttgccctatatatatattttttaacaagagtttttagttttatgtcttatatttaggtctttgatccattttgtattaatttttgtatatggtgttaggtaaggatccagctttatgctttgggcatgtggatatcaagttttccaagctccatttgttgaaaagactgtcttttctcaattgaatggtcttggcacccctttctgaaatcatttgaccatatatgcaacaatttatttctggactttctattctattccactgctgcatatgtttatctttaggctaatataactttattttgattactgtagctttgtagtaagttttgttatcaggaagtgtgagtcctccagctttatgcttctttttttctcaggtttgttttggtgatttgggttcccttgagataccatatgaatttaagatgggtttttcaacttctgccaaaaaaaagtctttggcatttattgcagaaggtgtagtggtaatgaactccttcagcctgtatttatctagaaatgtcttaacttctccctcaattttgaagggattttttgccataccttggtgtaccttttttttttctcttgttattctgaatatatcagtccactgcctctggaatctaaaagtttctgatgagaaatctgctgattgtcttgaggatcccttgtaatgtgatgaatcacttctctcttccttctttaaaaattctctttgtctttgtctttcagcaatttaattacaatgtattttggtatgagtctctttgaattcatgctacttgaagtttattgagcttcttagatgtttatacttatgtctttcatcaaatttggcaattttc

SEQ ID NO: 34862 - DNA, 1085 bp, Homo sapiens
cctcagcctccaagtatctgggattgcaggtgcacaccaccacgcccagctaatttttgtatttttagtagagatggggtttcaccatgttggacaggctggtctggaactgctgacctcaactaatccaccctccttggcctcccatagtgctgggattacaggcatgagccacctcacccagcattttttttttttaatttttttaatgagacagagtctctctctgtcacctaggctggagtgcagtggcacgatctcggctcactgcaacctctgcctcccgtgttcaagcaattctcctacctcagcctactgggtagctgggactacaggggtgcaccaccatgcccagctaagttttgtatttttagtagagatgggatttcaccatgttggctaggctggtcttgaactcctggcctcaagtgatctgcccaccttggcctcccaaagtgctgggattacaggcgtgagccactgtgcccagctgagatgtttcttattattttggaggtggagaggattttagacctctttgagcatctgaaaaaaggctatatatgtatggttttctcttcagaaaaatcttaagactcacaatacggggacttccttgttaccaggaagattttctggcaattcctagttaataaatcttattctaatggaacatacattgatcttgagttaatgcgtggttgaaaaaaaaagcgggggcaacttgaaatatatgcagtaaagtagtccatgcatacaagtccctaacatggtagatgatgttgcctcccggccctgctcagaaagaatacaaaaagtgtacattcctttttctataatttaagaagtctggaatacagagtgtaacactgtgtactgctagcacccaaagtggaaaatcttaagcattcagattgtttagtcaaagaagaaaaccagaagggcagttgcctattgaggtgattttaaacctgtttatttgtaaggattaagtaccctaataggcttaaactatgatagaggtttaatacagaaaaaattgacaggtattataaattgtggatccagttacttgcttatttaat

SEQ ID NO: 34863 - DNA, 1022 bp, Homo sapiens
tttttttgtaaatgactacgtatagtcatttttctcctttggaaaaggtaaatagcttattaactaatcctgtcttgttcttcacaaaaataatagtccatccgtgttttgactcaaataacctaaatacacattttgtaaaaattttgtaccctatattacttatttttaaaacagtacagtgttagactaaacaggaaaactcaaagttataaaatctcttcagatcctctagtttattaaatctattttcatgttgatgtttttcacaacacttattcccacagatctggcattacagaacatttaaagtgtaccaaaacattgttttaataacagattttaaaatcaggattatttcaaaatgattaaaatagcaaagaacaaccaagtcactgcttttaatcactataagcagaaattcagtattccattctcagtatattttacttacgtaaatgaatctatgcagatatcttacacttttaatgtttgctgtccttgacactaaattccgaatgttccttaatgtctttggaaatacatatactattgataaatgcttgcttaagtcacagcatttgattaactcaggtgactggaatttaagatgggagcattatcagtgctttaataagtcttaatgtgttgcacaccttgattgcaaaaatatcacttgaattttggataagtgtaaaagaaaatgtgctactgtggctttgacagaatacctttgtaacgtaacaaagtacaaacctaatatctgtggtgtaggaggttgcatattatacttctgcttttaaatggattcacacttctgaaaaacaaaagccaactttgcattttcaatgcttgaaaaccaataataagaaagatggcaaggggatgtctttcaataaagagaaaaaagccaattctaaattaggtagctttggttttgagaagtagtgccttaagtaagaaagaaaaactgaaatcttaatctgattctaagggatcactaacaattgctcatggaaata

SEQ ID NO: 34864 - DNA, 1053 bp, Homo sapiens
atccctcctcctgttccaccctccagaggtagtctctgttacccttttatttataacttttatggtttttttttctgtatttatacaaatcgatgcacaaagagggttctcttctctcataaaagtgattattagtcttcagtgtgcctttttttctcctaacaaatgtaaactgggagcattttcccaagtacatatttataatacttacggtgcctatctagtattctgtgaatatatactgttaatttattccttcccattgacagacttaccttgtttccatgtattgccattataatcaatttgcaaagaaaattgctgaacccttgttttttcactagagatagacattttatataataagttgttgggataagcagtttgtaatttttgttaggaagctttcaaattactttttctaaaatgtaaatattcatgcccgcagcagtacaggagagaattcagtttctcaaacttgtgctgatatctgatacctttttaaatttcgccaaattaatgatcaaaaaatggtattttgtcggttcaacttacatgtccttaatgattaaaagctatgtatctgtttattatttacccattttaaaattagtcttatattgttaatttgatcttgatattgtaaaaatattgtctctttagagtggtttgaatatgatcttgataaaacaatgaattgaactagatgactttgaattttatgatatcatggtttccttatgattaaatgattatgtgacaacttcttctccagggtaaatttcaacgttatatttctgctttattgatctttaacagttaagggaagaaagtcggaggctggctttggctgcgaaaagagaaaaaagaaaagagaagagaaggaagaaaaaggaagaacaaagaaggaaactagaagaaattgaagccaaaaataaagagaactttgaactccaagctgctcaagaaaaagaaaagcttaaagttgaaggtattttctcttaacaaccatcccatttgttttatattctagttaaaattatatttacttga

SEQ ID NO: 34865 - DNA, 1168 bp, Homo sapiens
cttttgtctggtgtatccacttagtagccctcagttatcagattgactgttgaggtatcacagtgcttgtgttcaagaaaccctaattttacttaataatggccccaaagtgcaagagtagtgttactggcatattgttataattgttctattttattgctattgttgcttatctttcattgtgcctaatttataaattaaattttatcatgggtttctttgaaaaaacatatatatacagggtccagtactatccaaggtttcaggcatctaccagggatcttggaatgtacttactcatcatggataagggggcactactgtatttttaatttagtagatacttgcagaatactttcctagtaccattagcaatacaccaatgtcatttccttgtattcttgccagcgttatttaaccttaatgtttatactttcaagagccttagttttaagagaagtcaagagaagcttcttttaaatatcgttgtatatttttccataatattaaaaccaaaagctaatgaagaattcttaatcattaatcaattctatctaaattgattcctgcacatgcattatatacttttatgtatagttttgagtgaacgtggaacatatgtaaaatttttaattatagagaagccacttttttcctgaactacagcccatatttttatttgaaagattatcacattgggatattagagtttggctcactattttttaattataatttacatctgggaaaatggacttctttagccttttgagatatattacattctggcttcatcgctggagttggtcttgactggtccaagttgagattctccatacgtaagttattcctcgtataaaagtgcttctttggtcagtctttctaatttggaaaatttggtttataaaaactgctgcagaaaactgggcatggtggtacatgcttgtagtcccagctactcgggaggctgagcccaggaattcaaatccggcctggccaatgtagtgagacccagtctctacaaaagaaaaagagatcagtggccattatgttaaggccagcagattttttaatacttattaagtaaacatttatttattgagcatttactaagtggaagagtccctgctctgaagtagttccatctggtcaagttatggaatcttct

SEQ ID NO: 34866 - DNA, 1018 bp, Homo sapiens
gtaactaacttttagttttaactaagttttagaatgaattggctaggaattttgcaggaaatgcaaattttgcaggaaattttatggaagataaaactgaatcctattagagatcctaattgagaccttctcctggagacatacattttgatttggagtttacactaacacttgaataagatcctaacacatgcctctgaaaaccaaagaggacaacaaatcttaaaaatgtcttcttatgacgtttacacagttgctattacatgatagtgaacagcttttccctataagttttaatttaaactagctaggtcactgtctttcctagctctagacttgtccatgacaattaacattcctatatatcacaggtttttaggggcagagggggagattaaaaataaattatttttaataatactaagaataagactggttcagtggcacacagctgtagtctcaggtacgcattagtctcatgtacttgggaggctgaggtgagaggattgcttgagcctaggagttaaaggatacagtatactatgattatgcctgttaatagccactgcatttaagcctgggcaacatggcaagcccctatctctaaaattaaataaataaaaattttataaaaataaggaagtagtgttttactgtcctaaagtgtgacttgagaatgaaatcactgagaaaattatgtaagtacatgtatctgattcctttgtaaatgattattgtacacaaaattggagcaacaaagcttaaatatttgaggacatttcttgaaaaattttcacatctgttttctttgttgacattatttcctttagcctgttaaccagccaacataaattattgtagttctgtttgctgtacaatttcttatatttaaattagaggataaatgactttagtttctgaagtgcctgctaaatggatattattttgaagaatagcaaaagctactctttgattcttcatttgtatatattcctaaatataccatgtcaattacgtt

SEQ ID NO: 34867 - DNA, 1047 bp, Homo sapiens
aattttccgtgcttatcttttgcaaattttatgtacatctcttcattttctatttaagctttcctaaattactctttaaaccctggaagaattttagaaaccttataaacttcatcataaaattgattcttctgctgattgcatatgcaccaacgtagagtggacataagacacatacacttaacattatattcagcacaatctgctttgccttagggcccctctgtgatatagtggggagagcaggattttgttatcaagatcttcttgggttttttaaagcacatatctaccagttgttagcttatgtggccatcggaaagttatttatcagagcctttatctccttttctctgaaatcagatataatttcttcctataaacctgaaatgaagatcaaatagtataacacagtcagagctgtcactcatttaagtttcatgtccttctccattgttgtagttggtgcatctctcccttgtggccatccctgatctctgcagtcagtagctctgctctctgccagcctcttctgcagagcagcttttgccgtctccctcttcatcactgactagtaggctttttcttttttcttaactcttactgattttgccttttgtcttttgtttttcatttcttataatggaatttggtctgtagagttatttacattctgggagaatatgcttttcctttttataattattatgtacattctacaaatacaatgtgtaaatgtaatcaatgctacatatatagtcccttgcttattatgtttattagtaacagtttttgaatctatgaccttttgcagctattgccattcattttacttaactatcatttattatttcctaagtaatttatcactacaggtagaaaatacaaacatggataagacatgttccttacctcccaggaatttatagtctctgtgggtgataaacatataaggcagattggtgataagtactataatagagatacatatgtgaaagtgagggaaatgcttagagcaacactgttcagttgaaaaatatgatgaga

SEQ ID NO: 34868 - DNA, 1048 bp, Homo sapiens
ggtttgaaatatataatggattgcatgtaaaagaaaaaaggttctaacataaaattatatttttgtatgtcatacacatgattgatatcatatatcatctttgaaaattctcatcttactgattgaaatatgtggtgagtctgtgtctgtatttgtaaaatttagctgtacgggattccaggcactttttgaagaaataacatggagtggggggaggacactgtttaagttaagctttagaaagtttgagagctattaagtataattttttattaaaaagtagttgaccatgaaatctcagggcaaggtgagattggagagaatagtgcgtgttttatcctgaagaaaagttaagaggtctagtttagaagactgctgaataaggtcaagagtacatggccatcaggactaagaaatgtttgcagtttacttagtttttgtattttgatggtacctggggtgtgtacattataaaacttttaattttatatatgattatttctttataataaagcctgaattttagcaggggtaacgtggggagaaagagagaggagtgagtgtatgtgtgtttgtgttggatggaccattaagggcatgtactcttaacctattaaaaataaagtttcctttttattaaaatgatcctcagtaacactatgaaaaaggaattttatttctgctcttacttgttggccaaatgtctgttgttttttatgtactgacttttgttgttgttgagtacttaaaattgccagggactattttaaggaattgtctcatctaatcctcagaccacatacatgatgtagctactcttaatatccatctccctgaagaagacattgtagctaagagagaggttaagcattttgtttagtcacttcatttaggctaagaagcggcagggctgggaatcattcagcatgacttcaaagacaccattctttttttcttttgtaatgggttcttgccatgctgcccaagctggtctcaaactcctgtctcagcctcctgagtagctggaattacaggtgtgccaccatcc

SEQ ID NO: 34869 - DNA, 1075 bp, Homo sapiens
aggtttttcagtagtggggttgatgtttgatttttgtttttgttttcatttttttcctttaagttcagaatactgagattgaattttggcattttgcttctgtattcacaccaataaactgggaaattgatagaagttgaagtgcaaaactagtaggacacatcaggaagcttatttatgaacagaaatactttatatcctaatggatcagacttcaaacctgatggatatttaaaaaaaaaaacacttttacaaaattaataaagttcaaaaccaaatagggtttaattatactgtatgtaagtgattttgtcccctgtgaatgttaatgtgtagtctctttctaactgtatcatgagaaggtgtggcccccctgaaagtatcataaatgatatatttttagatgtgtagccagataaattttattcgattataactagtttcattgacaagaagatacactttagaagactgtttttatgcttctagtttttggtacttattttttgtgttttgtaacaaagtaatgggatgaggttttatagggttgtgaaccataagaatgctgtactgagaaggataatttgcttcattaaaaaaagaaaatttgaaaaggaaggaaaacagaaaaatgaaaggaataaacagtggaattttggtgacttccatctgatctcttccccttttttattcattcatctgtacttagaggatgattgactttttctaatttaaaaactgtttcagtagcattaaatatgatgagcttatttttttttaagtttcatcttttaaatggataataggaaactaaactgtatagtgtttagatatttaggtaacgttcagacactaagaatccagctgagatagattttatacttaaaaatatctgtaaagtttgctagtccgcctttaatagcacctcagtagttataacatgtggaatgaaaatttctgctagtcttaagggttaaataaccacattggaaaaatgctagtaataattactagtaagaattgtacgactcttattgatgagtgcaaaatttttctatagatttgaaagtcacta

SEQ ID NO: 34870 - DNA, 1049 bp, Homo sapiens
tttatttactttagaataatccaagatgggagaggagaattaatgtaggatatttgtgaaatgagattggccttgtgtttataatcattaaagctcggtaatgggtatgtggagcctcataatactattttctctactcttcatgatttttaaatttaccataattttaagaaaaaccattctactaatatgattttccatgccttttctgttttaggagcgaatgtgaatagaaccacagctaataatgaccatactgtactgtccctggcttgtgcagggggtcatctggcagtggtggaactacttttggctcatggggcagatcctactcaccgtttgaaagtatgtaactcaaatgtttgtgcagaattgtgaattagtatttctctcttggtcattgttacaacatatcatgtacaagttccattcataatggcattctaagtgtaaattttctcctttttcacttgaagcgttctttaccaaacctatgattttaatgcgtctgggacctgttggctttatcttcctaagtgattctgtaaactaacttatttttcttcactttttttccccttccatattcactcttttaggatggctcaactatgttgatagaagcagcaaaaggtggccatacaagtgttgtttgctatctcttggattatcctaataacttgctttcagcccctccaccagatgtcactcagttaactcccccatcccacgatttaaatagggtaagattttaaaaattaaagcattttatggtatgtcttctttatcctaattctttcacttacagtttctgtttaaattagggtttttttttgttctaatatgtagttctgtttgtaaatatgtacttgatacagttaatgaacatctggtacaatattcagatcctagatgatatgattatgctttagcttttaaaggtcacaacttgaattcaaagcctactaaaaaatgtcgtggtaaacaatttggtgccaacatattttaagtaaatatgtcattgtctaagatgacatattaaaaatatt

SEQ ID NO: 34871 - DNA, 1050 bp, Homo sapiens
agataataggaagtctgtaaagagatggtaatgatgtacttactaaaattcatagagatgggatacactcataagaggaaaataacttggagtggatgaggataatgctcattatattgattgttcggagaaggccatgctagagtaccatacatgcatattcaagtaccgcaattcattgtgtagagagaaggacaaattactcagatgcgtttagatgagggcatcatgatcacgtgactataacttcaaatttaaaattatttccagtgctcactttggcagcacatatactaaaattatttccatagaacatgtttatgatttgagattttttttaaatttaaaagtatatttcttaatttgcttcaaagcattatatttaaatatttagattcagaaatcagtccaattattttccttttgatttccatgaaaaagaatacttgttcactggcaattaaatgtcaagtctttttttttttttttaaacaggaacatgaatctgaaggtggaagaactcctttaatgaaagctgcaagagctggtcatgtttgtactgttcagttcttaattagtaaaggtaggtttgtataaaacagttgtctttttttgaaaggtatctacccctgccttcatttagagatttaagggtaaaggtcttttgaaggcaagagggtatcatatgaggagggatgctactgacatttaatgattgagtggatagttgataaacatcctgccatgcacagaccagcttcaaactagaaataattgtcataccaagtagcacacttgttgtgaaacgtataaaggaaagggaaatttctctgtgtaaaaactgaggatttaggtaacaaactctgctgtgttcatgtactatagcactttcttgaaacctggaattttatgatgtttctgccactaaaaaagtttgtggcaagtaacatttctactatttccctgcttctatgtttccttttttataaaatacagggagctggttataaatatagtacaaaaaatgttcacaatagaaatgtgacaaat

SEQ ID NO: 34872 - DNA, 1048 bp, Homo sapiens
gctgtggtacatcaaatctgggtgtgattttaatagttttatttatttttagttttaactgccttaggagttaggagagaggcactttcttatttattatagtaatataaatgttcattttaaagattcagtttattaagaaacaatcatgtttttcatatctctggaataagttaatgactttctttaaataattagaatctttattttaggagcaaatatcaatgcacagacagaagaaactcaagaaactgccttgactctggcttgctgtggaggctttctggaagtggcagactttctaattaaggcaggagccgatatagaactagggtgttctacccctttaatggaagctgctcaagagggtcatttggagttagttaaatacttattagctgcaggtaggcatttttgcatttgggagaagttttttacatgatttgtttaagtaaaaatgtcataatgcaaatatttttatgatgctatgatacactgaatgtgtgagtttaaaaaaacgtgtgatatacctttgtatgtattctgaacagtttaccttactgctgtttgaagtatctgcagctttaatttcaaccagttttgtttgtaatttttttaatgcctacaatattctctgtttctggaaatgagtgaagtttgaatttgtttaacttgaggaggtatgacttatctagaagaagtttttattttcgtcatatatgtcttatggctcctttattaagtctatgtattatttgttgactactacaggagctaacgttcatgcaacaacagcaacaggggatacagcactaacatatgcctgtgaaaatggtcatactgatgtagcagatgtcttacttcaggcaggcgcagatctggtaagctatgttactttttaaatcttaatatttaacaataagaaattaattttaaattatggagagtctagacaaaaggtatttctttaccttcagttttattgttttttttatttttatttttttgccattctttctctcacttagtcacatttttttccacactg

SEQ ID NO: 34873 - DNA, 1027 bp, Homo sapiens
ttgagggtggcttctagttgactttattatgcttataaatttaatgctgtaagttaaatataacttttcaaaatattataattttaaaaaatattttggaataataaaatattttcaagtaatcttgtacacttttggtttaggacacttagagatggtgcgatttcttttggaagcaggcgcggatcaagagcataaaacagatgaaatgcacactgctctgatggaggcttgcatggtaagattggtgaaatatgtcaaatatgtttatatattaaccagggagagacagagtagtatacaatgaatgcctttccaatgggtgctatgattctgtttgtcagaaccttattgaatcagttgtacaacattaacttctattaaagttactttctgaagctttacaatgctacctgcattttcttagtctcatataactataccaaagtcactcttgtaaagattggttgaggatatgaaataggaaaatatggccaggcatggtggcttatgactgtaatctcggcattttgggagaccaaggtgggaggattggattaacaaattaaaatggatgccagcagttcaagaccagcctggccaacataccaagaccccctctctatttaaaaaaatgttaaaaaaagaaaaaaggaaatataattcagagtatgtacattattaataagcataacatacctcaaaccaataaattgactaaacaaaaatttaaaagtagggcctaatttatgttacataatttcccctctctcgaggtcttttctgagccctagattgtcttttgaagagctgcattttagagtttgtattcgggaatggctcataacagtactcttaaacctttgtatctttgtttatttatgacacagaaatgggccaaaatatcatagaaaaatttatgaggagaacaggccagcggtagaaagggcccccaaagaatctgaagtttcttgtctcatcttcccttcagagagtaattattgaaaggatgttaaattttatttac

SEQ ID NO: 34874 - DNA, 1042 bp, Homo sapiens
ctcaccctagttctggccctggtgttgttttgttctatataagagtagccaaggttgtatgatgccttttggaataatttcatttataaacatgaaaataatccttatatatttggattaattgactaaaatttaacttaaatttgaaaaatatggtttatttataaagtgcttttgattatctgatgttaatagattttcagatagggagcacagctgaggtcccttagttcccttccccaatcctgtttataattaggcagaggctgatcttcactgggaggagaggaggtaagccttggagtgggttgattgggtggctctctccccttctcacaaatacttttgaacccagtactggctgcatttcactactgagtccctgctggctagagagctttgagatggggctgcttgtaactactctgccctctcgcctttgcttgtagccccaccctgctatccaaaagggggatctgaggttggggcttgcaggctttaattagaagctggatagcaaactgagctggtggagaacatctctgctacttccaggtatccatggacccccttcccttcctctccttctggtgaggttttgtaggatatagactgacaaggaggagttagggaagagagacaagtcaggctgagactgagcactaatgtggattttggggaggggagaatgacagagaggaaaagggatggtaggtagttgacaaatataagacgcggcagatactacacttacttatggaagtaaattttgtttaattgtttacctgtgactccactatctgtccttctcccgcctcccagttgaataagaattgattgtagctcattccaaataaagctggaaaaaattaaataatttttctattgttttttgcataggatctgaagtcttttttaaattataatttgtcgtctgctttttaaccacttgtatctttaaatgaactgaagcatatggtttatttgaaactgcattaatgtgtgtacatgtttatattataattaaatatataaatataaa

SEQ ID NO: 34875 - DNA, 1032 bp, Homo sapiens
aaacattaaaattaaaaaaaagcttgtgaagcatttctctgataaacattaaaacaacttttttctcatcttaaggtaaaacttagctctggggcagagttgcccagttcttttacaactccccagtctggataagtgtatatgattttccacatgtatttgactttggttttaaatggaaaaggagaatagggagttgatttcagaaagataaaatgcagtaggaaaggaattttatatatagatatatatttacatatatgtatatgtaatttaatatttattatggttgtagtcttctgtttccattttcttaatgtaaattagcactttaatttattttggtattttatgttaatgtctttttatttttcctaattaaaataggcaatacagcacttacatatgcttgtgctggaggctatgtagatgttgtaaaggtgctcttggaatccggtgctagtattgaggaccataatgaaaatggtcatacccctcttatggaagctggaagtgctggacatgtggaagtagccagattgctgctagaaaatggggctggcattaatacgcattctaatgaatttaaagagagtgcccttaccttagcttgttacaaaggtacagtataaacctttcttaaaacaaagtttttaaatatgtgaaattataattattttatgtaatcttgtttctaagttaaaaaataaaacaatgatagtatatagtatgtaattaaaggttaaataagtgtttgcagtgttgcagtttgtttactatttaaatttttaaaatatagatttaactataaatattgtcactgaaaaatgagtattaattgatctaattgttttatcagaaacagttcttttaatatgaactgtataatagctttgcatgttgggaagattttgcttggtatgaaggggtacatggtattttaaatgatgtcaatgaacctgaaaatattgatagtacagaaaatgccctcctttggcagaccggacaattgcctagaaagatattttgtct

SEQ ID NO: 34876 - DNA, 1039 bp, Homo sapiens
ttcaaggaagcaactagaaaagaatcattaatacatgttaccattttcaaccgttggtggcttctttttgcctcctctaataaaatgaagccattttatttattttagcaattgccttaaaacaattgagaacatctgaatattctatttgggtttagagagtaaattatagcatttaagaattctttgttgtctaatggtgttttcatacaacatttttaagagcataaaagagaggttagatagtattaacaaggtcatgaatttgctgtttctcttggctctttattagtgttcattcatctagatttttgtgtttgtattaacttgctttaccattcttctcataggttgactgactcccttctttagttaacctcggtttctattccatagtaaatgttcagttttactagcctacaatatcattggtaatctccaaatattttttaatgtggtgcctactaagattggcaagagaaagaattaaaacaccttgaagggtatactaaaaccagttcaagcaggaaatagaatagaaaaataaagtcacaaatgattttgcattgaaaatactggaatttaacagcaaaaaaaatagaacatatttgtgagaattatatttattcaacaaagtttgagaaagatggtggacttaagtgcagtgagtactatgtgccacatttttatattagttaaggacagtgccatgtgccaggcttaatatgcccttcgcccacaagttcttaagttcagctgttgctagagtagatcctgtaaggttgttttcaagctggtatacacacatggaaattgaatgaaaaattcaaatgataatgtaaattagggtatatgcataaagaagtgaaagagacagagagagactactttgaaagagagaaaaggtatgctcttatacaggaaatgtcttatgggaaggatttgttctaaacatgcttaaaaatgatagcattgagtctagggactgtcagtgtcctgtgaaatgggaaatcagaagagatgtttaaaagacaaattt

SEQ ID NO: 34877 - DNA, 1050 bp, Homo sapiens
tacctattatacatgcaatgcatgtaaactgctactttattatagcataaaactgacctaatactgttcaataatgctttcagtaaacatcttgtaatacagtaaattttttttttttaatttttttttgagacggagtctcactctcccccaggctggagtacagtggtgggatcttggctcactgcaagctccgcctcccgggttcatggcattctcctgcttcagcctcctgctgtagctgggactacaggcgtctgccaccatgcctggctaattttttgtatttttagtacagacggggtttcgctgcgttagccaggatggtgtcgatctcctgacctcgtgatccacccacctcagcctcccaaagtgctgggattacagacttgagccactgtgcccaaccggtatttaaatatttgaaggattcatggttaaacttgatttccatccaaggtaaaattctagaatggattattaaaaggatcttaaccaaatagacttggaaacataatcagggcatgtgcacggtcctgtcttggagtaaagaaaactatttgtacagaagagtagagacctaatttagcattttccggcaatttgacattgctctagaagtttatgagagagaaatgcagattatgaaattatttaaaaatatacctcagaggagcagggaatgtttctcctgaagacaagaagactcaggttgaataaagtgttcttcaaatgcttaagagactgtcatatagatttgttttctgtggccccaagaggcacaagaagattcaaagatgttacacggaagtagattttacataaaagctgatttttggagataagataccttttcatacgatgcaaatagttgcttcatttttctaagttgtgtaattatttctattttttatattttctttatggtagctaacaagctagccttccccctacttccctttctttctttctccacctctctttcacttttcctctccctcactcctttatttccttccctttttaaatggaaattctcacatacaaatc

SEQ ID NO: 34878 - DNA, 1032 bp, Homo sapiens
ttacaaggctcttcccactgctgcttctacctttatatttcatgtggctccctgtattcatttttgttataggtgaggttaaatccttctcctgtgatctggattttcagattccccagtggacatgtgtgtttggagacaggttttcctgctcttgtactttgggaactcacagttatttgactgtcttgcagaatttgcagcgatgtgtcacttctttcagagaatctgtgaattattttggttttcctggtaatgttcctgcagtggttcttagagccggagtttgtggtgtgagtctccacatgctattctgcccatccaagtgggagctgcacattagccctgtctcctctcctctctgccatctttctttctaagtccaatgtttctttgttgattttctctgtggaagatctgtccaatgctgaaagtggaatgttaaagtctacagctatttttatattggggttctatctttacctttagctctagtatttatatagctttgtgctccagtgttaggtgcatatgtatttaaaattgttatatcctgttgcttaattgacccctttataattatataatgatcttgtctcatatttttgtgttgaaatctattttgtgcaatgtaagtatagctactcttgcgcttttttggtttccagtggcctggaatatctttttcaatccctttattttcactctgtgtgcatctttataggtaaagtgtgtttcttgtaggcagcaggtcattgggtcttgttttttatccattcagcctctgcatgtgttttggttgtagtcctttaagtccatttacattcagtgttgttactgataagtgaagacttactcctgtcatttggttatttgttttcaagttgttttgtattgttaacttccttctttccttcctgcctttcagtgaaagtgattttctctggtgatatgttttaatttcttgctttttattttttgtatctattgtatgttttttgatttgaggttaccatgaggcttgcaaatact

SEQ ID NO: 34879 - DNA, 1063 bp, Homo sapiens
ttcttggatgggtttttcttcttgaagtaatattttctctaaattcagaaaatgtttgtggcttttaaatttcatagtgtttacatacctaaaaaaatttcattatacagtttggaattttactttcaaactgttcatcagaacttttaattgcacagatatcttctagcatctggtgctgtatttaggaagtctgatgtcagtctgacccctaacaggtccccactgctaccatcctggaagttttctagactttatatccttagaagtttgaaatgtcaccaggcttatgactacaggttttgtggtgtgtatatatgtgtgtgtgtgtatctgtgtgtgttgtaaagccatcttataagaatatttatattctgcagctgcttttacaataattgataaatgataattcctggagcaggctaaattcataattgaattgcatcctactattgataagtaattttgggagaatttttgacaaaccatataactttaattctgttacagaaaaaccacttagaaactctagatttgagaattccatagaactttgtcttatttgaaatattcataatttgtccactttgtaaagtttatgttaaaaattttatattgaattgttagtaatgtcatactcaattgttgcaggcaaatagcagtttgaagcataagaagtcacgttttacgaaagtgctatagaacaaagctgtgttaactgttatatcactgattcctagattatagtagctgcttaatatttgtcaaattgatagacaagtatgaatgaaaaaatataagaatagatcagtggtttattctgtaaatagactttttgaaaggtaaattatctttaatgaggttcactttagttttatttactataatctcagaataccataatgaatcattgaccattctttttacaagaaagattttatttctttaagtgggtttttattttctttcaacttttcaaatttcagtcttatacttggattagtgttctgtgacattactgaagattttgtctttgtatgtatagaaaaaatatttgaattgt

SEQ ID NO: 34880 - DNA, 1028 bp, Homo sapiens
attatatatttttcaaaattcgtagatttgtaccacgaaaaaagggtgaattttactctaaagtatacttcaataaacctgattttcaaaaggaaggaaaaagaattaaaagaaaaagaattaaaagaagagaacataatatgttcctgattttacttatcttgagaaaacgagcagttgctttaactaattcttacaatattttattttgttgccaaaactttttctttcatttaaaaagaatgaggttgcatatgcatactttcagatgagttacatgtaccagcaagttaatcctatatatctcaagacaatacaaattgttatgatagctctttcagaatttattctagaaatatgtaaatggttgggtgattctttatatttttgtttgaaagtctaaagaagttgttttttctcattaattgtttgctaaaaatcacggtagaaaactgcattttttttttaaggtaagcaatatagaagggtatggagtaagtaaaaaggtacaattctctctttgatttcattctttgattaccactgttaataacttgggtttacccatcttgaaattttttgtgtacattcttgcacatgtgtatatgctttattttgctttttaagtcaacttaaataggtacataccatgtttttgtttttgtttttgttttttttgcttcaggctgcttttttccacctaacaatgtgaagatcattctgcatcaatattaatgtatccatttggtaaatattttttaagtagttaatgtttaaggcactattctagatacaggggatagagcaaggaacaaaataggttctttgtccaagtgaacttatattcaagtgagaggaagacaataaattggggggaaatgtcactattaataagttcatgaagataaataatgtaggcaaaagagatgagaggtgatgggacaaaatgagcagcacagatagttgtggtttaggcctttatgtgtaaatctgctttattcttaaggtagctattattccatatataa

SEQ ID NO: 34881 - DNA, 1050 bp, Homo sapiens
cccctcttgtagctggggagtgcacccacaagatctaacagctgtttcagagctgctcattttagagtgattggtagggagttggtggctcagaggtcctaatcagaatgtgtcctgggttctgaatgactagcagactatcattaaccaaataaattatgggattttgtcttaattatatacatatacatatacacacacatacacatacacatacatgtgtatatattccctaaaacttaataaagctcaaataataaaatcagatttcttaagtattccaattccctttaaaatgtaaatcagattttataattcttttgttcaaaactgtccattggctcccatttcacttaaatcaaaagctagtttttacaataagctaagatagcaaacattattatctatttacttatgagttacttatgtaactcagcatccaataacactgtaggtgctcaataaaatagttgctgaatggataactttcactatttggatgagatccaacagaaaagaatactcttagcttgacaaacaatggtaaacagaagtaacattagaacactagatccttgctcacttaaaatcagacataagtatatgtttgtgtgtgtgtgtaaatataaacgtatatatgtatataaacatacacatacgtgtatatatggtacatatttgaattaaatgaaatatatcagaatttgtggtacacgattaaagcttaggtcagaaaagaagaaagttttcaaatcagcgatataataatttccaacttaagaaactagaagagcaaattgaaccaaagcaggcagaatggaagaaagaataagataagaaaatcaatgaaattaaaagcaacagaaactaaggccaggtgcagtggctcatgcctgtaatcccaacacttcgggaggccgaggtgggcaggtcacgtgaggtcaggagtttgagaccagcctaaccatcatggcaaaaccatctctactaaaaatacaaaaataagctgggcatggtggcaggcaccagtaatcccagctactcgggaga

SEQ ID NO: 34882 - DNA, 1118 bp, Homo sapiens
tctggctggttagattttgatatttctccaccaatcttttggagtttctataattgtttagtttacagctcctcaatagttcttttcccaattctccctagttttctgcccccacgttttagctgcattaatttctctaaactctgatctttttctcctgaactaagtaagacttcagttctgtgcctttttttttttttttttttttttttttttaatcctgttcctgccttgggtttggtaaatactgctaggtttgacagaaagatgggaaggagtaggactgacttcatcgtttcttttcagtgggtcatactcttttatgcctgttcattgtctgaaaagaggtgggaagtctttccaagtcccaattgctctgttgtgcctataagccacatcgtactgtatttgaactactgattggtggagagaattatgctaaagtagacctactgtgctgtggcaaatttgcagtgaaaaatctttcatggctaataaagtgccacatcttagtctttgtagccctttctgtttagttgtgaagtcatttcattttgtgtaatatgtactcaatagaaatagtgtcagtgcagtgccattgtagatgcttttgccacagatgactgccagatagtgtccatgtttgtatagcagcatctaatatgtttatgtttcacagtatgtcttaaggaaacctaaacatttttagtgagaaagcctgaaaattgctccaagcagcttatgtttagaaaagtgaatacattttaaagcaatttaaaataaactgtttcaggttattcctaatggcaattactatattattagctctttaggaatgacatggaaaacttaattacaaaatctcatagaaaacttggaaaacataaaaaggttcaaagagaattataagcctgtgttagaaaaattaatggtgttatattttgatacatttcctttcagttcattctctgtgcaaatacagatatatacacatttttaatatattgggactgtattatttaaaaatatttgtttcttgctttttttcctcacgcactgtttacattttcctgtagtttttttttctattttattaatttttctgaaaatcattattt

SEQ ID NO: 34883 - DNA, 1023 bp, Homo sapiens
ctggaattacaggcacacaccaccactctgcgctaattttttttttttttgtatttttttagtagagacggggtttcacaatgttggccaggctggtctcgaactcctgatcttaggtgatccccgtgccttggcctcccaaagtgccggtattacaggcgtgagccactgtgctggcctaaattcttatatttcacaaagaaataactagttaagattttccaaaaacatgtggtgggtttaaatgttcacacatatcagaaagttttcgtttttaagattttgtatcacatctgcacaagtactttttttttttaatatctttctcagtttctctgttctattattttttagttttctccatgaaataaagtcaagggagatagctctagatagaaatatgctctcttctgaaaactttcattagacaaccagaatgttaagattaagccctacatatatcatttaaaaaataatcttggcaggtggatcgtttcgtaaatgttttatgaattatggaagaatatatcttttataaagtgttaggtaaatggaaatgctgaattatgttgacagtgattttaagtatttctagacatttaatgggtttcctttttcattgtcttgagcttttagtgttatagtctgattttctgtgaatagctttgttgttggtatcttcagtgactcaacattgtacttagaacatagtaaatgctggtttttcattttgagttattcttgtacagtgaaagaatcgccaccctctttccctctgcccaacccacaccttgggagtgtgtttagactctccttggctttggttaggtgtatatattgtataaagaagaactaaaagtaattcatattaactcagatcaatccaggtgatcagtaggttgggattttaaggataataagctttgtacatcatttgaaatactatacatttttctttattcctgtgttttttaatctctaaaatttagttgtaccatatagtttctcttaagaccccttctg

SEQ ID NO: 34884 - DNA, 1028 bp, Homo sapiens
cagcctctcaaagtgtgggattacaggcgtgagccactgcatttattgagtaccttcagtgtgaggcacttgaaattcaatgaggttagtccagctaattttgtctcacagaggtggaagtgcagaagtagaagaagatgaagaagaaatgtctgccattggtatctttttttttttttttttttttgagacagagtctcactctgtcacccaggctagagtgcagtggcatgaccttggctcactgcaacctccccctcaggggttgaagcgattctcttgtctcagcctctggagtagctgggattacaggcatgcgccaccatgcctggcaattttttgtgtttttagtagagatggggtttctccatgttggccaggctggtcactaactcctgatctcaggtgatctgcctgcctcggcctcccaaagtgctcagtaatggcttgagccactgcagccggcctctgccattggtatcttaaacagtcttgaatttaggatgcatagatacatattttaatactagtattttacttcattgattccatctgaatagtttgaaactcatgttttcagcagtggacttaaaaagcggatatcccttatgcattctgaatttttcagtaagcagatatttttctttatctggacacctttatgttgtcacttttatgcaaatctttttgttatatgtatttatgaatgtggtgctgacaagaacatccactggttctcatttttacctataaaccagcatacgcgtgtgtatacacatacctacaatacatatattcacatttatacttacatatactccacacacacacaaacatacacacacatactcatacactcatgttctgctttaggtggaatatttcttatctaaaatgtttgggaccagaagtgtttggagtttggattttttcaggttttggaatatttgcgtatatgtaaagataacttggggatgggacccacatgagatttacttatgttttatatataccttatacacatagtc

SEQ ID NO: 34885 - DNA, 1071 bp, Homo sapiens
ccataatcacatatgtattgttaaaaacaacagtaaatgtcagaaaacagaagcaccccataatcctagaatggaagagaaggggagagtgaaaggttttattaactttagtcttaggggcccccatttcttgtcagataaaggatttggaaggcctattcttggtttatggaaaaggagagtgttccagcatacgttccttgaactcaaacctatcattgcttgatagcattagaggaaaatttgaggaagggaaactttgttgacgacttgttttaagtctaaagatggagcagtttatttgaagcatagaaagaattgacctgggaggcaggaaataacaaaagccagtttgtagtttctgtttaagccaggtctcaacaatgtaaattactttgagcagcctttaaatgccaggcatacccatacctaaatgtaaacactaggtatggtatgaggtaaaacatagtgtcatttgtttgccattaattccacataccctttgcaatcagttctggatttgcatctggatttgactctgcatataactgtgtgccctgtctgatacttggttcccttattcgtaaaatgagattatcacagggaagaagtatagttgatgattctggatatggactccagtctggtgcaaactgcctgaattcagatctcaactcttcaacttaattagcttagcttgaaataattgggcaagttgcttaacctctttttgtcccatttccacatacgtaaaatggggataataataatatgttttaggattactgtgaaaattaaatgagttaatatataaaaagcatttaaaatggcatatagtaagcaaaatgtagtttaaaaatatgacatagctgggttgttatgaggataaataatatgtttatttttttaaaaaaagaaatcatatattgcttgacacagtatgggtatttcttaaataccagaaaccgtgtagtaggtactttatatcatttaatcttcatataaactgttaagaaaccataatctgtctagttgactgcacctagagcagtttctgatatttcaagttga

SEQ ID NO: 34886 - DNA, 1132 bp, Homo sapiens
cctgtattcttgtacattagatttttttaatatgatggattactttagaatttcatgctttaaaaagagtaatttgaacataaatgtagaaggcaaagaaataaatgtatccagcagtattttatttagtgagaatatacccaaatatttcccaaacaattctgggtctttaaaatactaaattctggcagaagcatcttttcacaacttactaccaggttaaaaaacccattaaatattggggggaatttgtattttatcagaaggagatttttttttaaagggtagatcattggactccccattcttctctcttctccacctgtatatcagctgtatatatatatatagactctgcattgtggttgggttttttttttttaaataatcaattgaagttcttaatttgttggagaatttatgtgttttttttgataaggattttttaaattttttttgaagttagatgagaggaggtgtaactttgatttgtgattcttgaaaagtagaaatgatgaactaagaataaatctggatacatgatttaaaactaatattgatttcagatctggatttttagtagacttgtgtcagtaacactttatatttgtagggaagcaggcagtctcactcactgtcagtataaattagttcaacttttttagaaggcagttaattgggtaacatctaaacttttattttattttattatactttaagttctagggtacatgtgcacaacgtgcaggtttgttacatatgtatacatgtgccatgttggtgtgctgcacccattaactcgtcatttacattaggtatatctcctaatgctttccctcctccctccccctaccccacaacaggccctggtgtgtgatgttccccttcctgtgtccaagtgttctcattgttcaattcccacctatgagtgagaacatgcagtgttcggttttttgttcttgcgatagtttgctgagaatgatggtttccagcttcatccgtgtccctacaaaggacatgaactcatccttttttatggctgcatagtattccatggtgtatacgtgccacattttcttaatccagtctatcattgttggacatttgggttggttccaagtctttgctgttg

SEQ ID NO: 34887 - DNA, 1894 bp, Homo sapiens
aaagattgcaaggctgggcacagaggctcatgcttataatcccagcactttgggaggccaaggcgggtggatcacttgaggttaggagttcgagaccagcctggccaacatggtgaaatcctgtctctactaaaaatacaaaaattagctgggcgtggtagctgcgcctgtaatcccagctacttgggaggccgaggcaggagaattgcttgaacctgggaggtggaggtttcagggagttgagatcatatcactgaactgtagcctgggcaagagagtgaggctctgtctcaaaaaataaaaagggggggtattgcagacatgtggtggcctctacctagttgtttaatactgctctttatgaagtaaatatgttctcgggccaagtgattttcggaaattgtctgaggtacaaatagaagacacagggattaattctaggaaattagaaagttgtgtagaatacaaatgtgactcttttaatgtaagatgcctaattctttcttgactggcttacatgctcgattttgagtgttaatttctgatccctttccatgaaatttgacaggaaactctttttaaaaaacaaatgtttattgtgaaaaattcggaagtacaaaaaattggaaaattctgaggcctacttccttccagtgcctctaaataagatgacattttatccgatggactaaggaccaagtatagaaactagtttgtccttaaggtggaagtcatgtgatcaaggagagctacaactactggaggcaaggtatgtctcctggaagagctagaagaaggaaggtggaaatagaaattgcctttttctcccccttccttctaaagacgtggctgatcttatatacttagccctctcatctttgctgaggacccattgtgtgtcccatggcctataaatcagggttctcatgatccccttcttgagtttgattaatttactgagcagctcacagaactcagggaaacacttatgtttaatacattttattgtaaaagatattacaaaggatacagctgaagagatgcatagggtaaggtatgggacaaggggcatggaaattctgccctctctgggcgtgccaccctccagtaacttccactgtgttctgttctctgaaagcccttcacgccctgtccttataggcgtttatggagactttattacataggcatgattgattaaactatcagccgttggggatcgatttcacttttattctcccctttttggagtatgggagttggggctgaaaatcccaaccatttaatcttcccctggtctttctgctaaaaccaacccttattctgaagctacctagggcctgtcagtcttcagtcaaatcttagcatataggaagccacataaccactttgaagattctaaggattataggagtgtatgccaggaaactggtctaagaccagagaccaaatgtatatttcatgatatcacaggcagtcttttggtactttaaataattgcttgcaaaagttacatctttaaataattgcttgcaggcaaaccattcaaggtttgttatgaatagattaggctggaaatagcagagcgcagagtggtaacagatatcttgagaccagactgattggagcttgtcagggaccccagaccattaaggaaccagaggagagccagtgatagcaatgagattccatggttacttgggtagtttttacttcctgattattttccatgcccttgatgctatcttgagttacttggaactgtttcttcattcccccagagtggtagaaaccggtgactcaagaaaattgtctttagatttaagctttttcttgtaatttaaatttttatccccaggtcccctagacctccattttgtgtctgtgtgtgtgt

SEQ ID NO: 34888 - DNA, 1038 bp, Homo sapiens
cctcctatacctcttaattcatgctgttaggtaagtgtgacatgtaaaaattaaatatctcagtctctcataaaaggggcctggtaatactttcttttgagggaggttaggtgacctaatgtttgtgaaaatatttgtgacctataaggattttcataaattaattgttaaaactgaagtatgaataaaaatagagagtcttatgaaaattctgactactgagatggttggttttttttttttttaatttaggagaatcccttattttaaatttctaattctattaaatttggttatcttattgaatttatagattgctagtaaatattttcagttctaattgtacattttggttaattgttttaggtggagctgatagtagataggttaaggggttgggattctgtaatgaacagttcacaaaataatggttgtattctgaatttgttaagtttttagaatttatgtagaatatgttcttaaattccttgagaacttaaaaatttgtagtactttatcatactgttaataaagagggagagataagggttatgggaaatgcacatccttttctgactcttaagtccttttctgggaatatgaaagcaaaccatatgcctatggcgtctctgctataggcttagcagataatactagggttctagataaaatgaaaagtatgaaggcaaagatttgatcatgctgttttctaaatctcaggacctttagaatgtatctctaactcactttgtggactcctttcacttgtaccttttcttccttttcttactctgcatccagatccccacctcacagtccaagatcctctctaccactcagtccagctttctggctgccacctaaacttcagtacctggcttctcttggccagatcgaaggactgtaatatgatttaagttgtgaatatgccttagtatgtgagatgtcttttcatatgagggagttcttaacctactttagcttaatcaccagatccttttgtcttttatgctaacacataaaaaacacaggcttggt

SEQ ID NO: 34889 - DNA, 1045 bp, Homo sapiens
cttacagattctagtacagaagtacttttatgaagaaaatataagcaatgccagcatctatatagtgttcttactgatttgatgatgcccttaggttgtctttgaacttgaaaatctctatacattattattgcaggacctataaactatgactgttgtgtagttctcttgcactatctttccaatgttctttgaagaactgtttcactgtttattttatctatttcaaatgaactaggagtaatttaaaacttacatagttgctgttcagaaaatgtcaaaaaagaagagcttgtataagatacaatgtagataaatttaattctattgagggggtaatatccttttaagatacaatgtagataaatttaattctattgagggggtaatatcctttaaaccaaacttgtctaaagttttcaccaaatgttaaactgtgagtaatgttttctttttatttatccatttgatttttttatattggaggaatcttaaaattgcagtatctttttccacttttattaaatcatatagtaactgtgaactgaaaatttaaacagtagaggaagatacagagtaagagttgaagattttttatatccctaggtgtaaattgtaagtgtatgtaatcctatgcctttttctgtgcattttcacacatatacagatatatctatgtaattttgttttgcataaatgagatcattataaaaatattgtttgaaactttctttttaaattaatattccatcatagattttcacgttaatacacatatagttatcttagtcctttaaatggctgtgagtattcccttgtcaggtatcaggacttaattgctttccagtttatggaaattttggttgtatccaaagttctgctgttacaaacaatactgaagtggactttttgatattgtttctgtattgtggtaagatatattccagaggtaaaactgctagaccaaaggtatgggaatctatttctgtaactgacattttattgtgtgtcagcactgtattttaaaaactagtgattttgtagt

SEQ ID NO: 34890 - DNA, 1067 bp, Homo sapiens
ttcttagaactacaaacttagtaggcatatgatgtgcccttccaattattgcaggcaagagttttactaaatgttctgcaactgtatagcacagatcattagatctccagcctgagatgtttccttgctacctgttctctaagccttaccagagattttaggagtttgttagagcagcgtgtcatttccaattaactgtattagttaaggtataggatggatcatttgaacaaagagactccagaacacatcaggcaagatagaagtttgttattcttttatgtgctactccagaggtagaccttcaggttattcacacatctaagtatctgctgtcttgcacttgatacaccatcccttaatcagtgctgtccaatactgtagccactagccacaggttgctgctgagctcttgaaatgtggctagcgcatctaaggatttgagttaaattttttttaatttttaatttaaatattacatgtagctagtggctaccatattggagagtgcatatgtagaatatttccatcacagaaagttttattggacagctctgctttggagtgttcatctacaagatctactgtggctcactagcatcatgtccatgtttcagcctgttatgggctgaactgtgtgtccccaacattaatattaatattttgaagccctaaccccaagtatttcagaatgtgattgtacttggagataagtcctttaaaaatgtaattaaggttcaatcaggtcatatgagtgggccttaatccatctgactgatgtacttataaaaagaggacatttgaacacaggacaccggagatacatgcccacagagaaaaggccatgtggggatacagcaagaaggtggtcatctgtaagccaaggagagaggcctcaggagaaacaaatctgcagacacccagatcttggacttacagtctccagaactgtgagaaaataaatatctgttgtttaaactacccagtctatggtattttgttatggtagcgctagtaaactaatactggagaaataagaaacagaaaggtcagcataggtaacttcc

SEQ ID NO: 34891 - DNA, 1059 bp, Homo sapiens
tcataaaatttaaattttgttgagataaaactagtaataatttaaaactgtgaagatgattttagccccgtataaatcctatacttttttggggcatctatgttcatttttggtgtaactgtgtgccttatgatcatagggatcattttgttttggtttttgaatactagtagggtagactttatatcttttatgagtgtctcctggaatactcagtgatttttgatattttgtttgttcttaagatgaggtctgtatgtacgatttttctagagtgtccttgacaactagattatactaaagagtcatccattctaattttaccttgaaggttttatagtaagaaaggagagtatctatattaatatacttgtgattgatgcaggtggagatatgttaaaatatgaagattgaattacaagacagtgtaggatgaaaattcttaagattttaaatatagcgttacatataattaaatgttattcattaatttatacctatttgtagaaacacatatttgcagaaaacttgacaaactcaaaaagatctaaagaatagaaaaatcacctattattctgtcttcagaattaatcattacctgaaatacgtcttttcattctttttccttgttatgttgtagtgaaattatcacaaagagcagaggtaccacttagaaattttgcttgctgaaatttttattgatgagctttcttcaaatatatcaattgaagagatgagtcttcagattatgatttttatatatttaaaaataaaaactaatgacggtatttatacttacaaaaatgtcttctagtatatagggctttttattccattcttagagtaaatgctgctaacagttggtgtatatcaaatgtttgtttctttcttgagactgagtgcgtgtgtgtgtgtgttagagtatgttaatatttgccacattattctcatttacttatgaatgttccataatataaatgttcataatttatttgatcttttattttggtagacatttagattgttttcactacattgctattagtgaagtgaacatcc

SEQ ID NO: 34892 - DNA, 1050 bp, Homo sapiens
cttcatgttttgccctttaattaatgaagcagtttacattgtgtgctgtggactgtcatatctgaaagcaaaagccttgtcttactcatctgtatatctcctgctatacagtaccatgtgtcttatgtaagtctttgtatctctgctaggttctcatgaagtcccatctctgtagtaagaataactcataaatatttctttattagccacctactgtgggaaatctttgggacttcaagtcttgaggtaacagaacttggttgcagctattatttacagtagatccctgtgggatgttttaattgaaccattatttttagtttagtcatttttaacctcaccaacttaactggagttagtattgtgaaagttttcagtgtttaataagcatcaaagtagcatattttgactctcggaaattcactagactatctgtttctgctgttacctgattatgccatctagttgattaggaaaacagtttttaggtccttgaggcagtgcagttgcatttatgacagtagtttatctgaatttttataaggataatttaatgggttaaaaaatgtggatttaatgaggaccttcataatttttccatacttgaccacagatgaaagggaatttttacttcacattggtatgcgaagtagtgcctgctggtaccacttatatttttgttaggaccagtaggaggcaccaacatccatggtgtaacctacaccaaacctaacttttttcagctttcatcttttcaaaaaaaaaaaaaagtaagtcattagggaattgaaggtggtgggtaaatacgaatacccttctagtcccttgaatcttacctatctggtacagttatgtccatccacttcttacccagaagcaaaataccctttctgacttaacagtgcttcacttcttaacatttttttgtctttagaaattattattattcattcctgaagggatgtagagttgtgggacaatataggtatcatttttataatgatttataatttggggtttcagttattgaaaagggaaatgttaactgtt

SEQ ID NO: 34893 - DNA, 1023 bp, Homo sapiens
ggaattgatgaatgcctggtaagtaccttaagcctcctaaaatttttaaagagtaaataaaaatgaatacttattcagtacctactgtttgtgaagtctaggtaaaggttaaaagtatggattttggagcttggatttaaatccttgatccatcatttactagcattgtgaccttggccgagtttttaaatctctactgcaatttcctcatgtaaatggtataaatggtaatgatagtagattctaccttataacattgttatgagagttaaatgagttaatacaattttctcgtattctcattttattcttgccataaccctatgaagtaggtgctgctatatttctttcattattcaataaatgtttggagttcctactatgtgctaggtattgtgctgtactgcgtgagcaatggtgaacaaaacttgtaagtcaccttgatttaaaaatacaccaatgaataaatattataagtttggggaggtgtgagagtgagcttaagtggttaaatgtacatcttgaataatgtgtgagtttcaaagtatacaaatgttggcagggagcattcattttacaggtaaacatactggcatagaaggattttaggcaacctcatcagggtcacatagctaataaatgtcagaatgggattgaacctgggactgttagattctacgcctcctcattcattcatttattctctcactcattcacatgctctgttatgctgtatggtgttgagtaccatatttcagatattggcacattcggcttgtataaggggagacgcttttttgcagttggacggccattgaagacaagttggtcaccccaagttttctttccagttcttctgaaaaactcactaaagaaaaagaaagcaagaaatacagaaaagtatagaaaaataatccatattcccaccacctagaattaagttgttaacaagatgaaaacttcatactgaaaaaccaccctttctagaggcgatttaccacttattccttgcctttcaaaata

SEQ ID NO: 34894 - DNA, 1025 bp, Homo sapiens
cctcacagaagcccttacaacccaaaggctcagtaaaacataccatactgacaaccaactgagagttagctttactagttattagctgttttaccactctcttgtctccttcctgaaatagaatctagaaaaatctttatttggagagggaaatctttatcagcagagggaaaacagctttaaaggctgattttaaacttagttctaagaggagaccaagtgattcatctaaaagtaccacttactatttattctcttccacaaacatggaacttattttgatgcaagtctggttttccgaaaattggaattattgaatcctggtctctgttgaaatagagaagtaccttttaaaggatttgacacatgtctatttgtagaagaccagattctcttttatctcagactggatgaagttgtataggtagagatattaagtgctgaagtatgtatgacaaaaatatgccagtccttgtttttattcccttttagcctgttggattctgagaataggtttgtattgatagacttatattggcctacttggatgtttaggatagtgtgttgctctggcggcatttgaaacaaggaagagaaagatgtaatggggtccttatccctaataaaatttgttatggtacttagaatcattcaattgtatgattcttctcaaaggtgagaaacattttacaggtaattcagccctttattttaaaaaggaggaaaacaaggtttagaggaaagtggttgtggtgggtagtagcaaaagtacaaatcaaagttttctaatgtctcagacctgtacactttttaataataatttatttccttttatcaccctcctgatatcattcagaaaaatagttactgaatagcaaggtaacacaatcatgcagctataggcaaaataccattacttaaaattttaaattctcgtgaaactattaagctctggtttagagcaaggttatgatagttgaatgcagtacttactgggatattctgctgcaaacttaacataccta

SEQ ID NO: 34895 - DNA, 1017 bp, Homo sapiens
gcctggcatggtggctcatgcctataatcccagcactttgtgaggccaaggtgggtggatcacttgaggtcaggagtttgagaccagcctggccaacatggtgaaaccctgtctctactaaaaatacaaaaattagccaggtgtggtggtgcacgcctgtaatcccaattacttgggaggctgaggcaggagaatcacttgaacttgggaggcagaggttgcagtgagccgagattgcaccactacacttcagcctgggagacggagtgagactttgtctcaaaaaaaaaaaaaaaaaaaaaaaaaaaagacaaggaggagccaccgaaagttgttgagttgagcaggagagtgtttggagtagttctttgggaagatgcattcggcaactggaggtaggataaatggagagagactgtatattggggggtgggtgtcagtgaagagttggttcttcagggacagtatgtgtgaccagtgtgaaatcagacgttgagttaaaggacagctcttgtggagctataggctgcctaaacttaacaccagcaactagccagtactccttggctgaagttgccactctgttatcaggaaggcgtggcaaagccagaagaaaagatgaaagcagatgcaagacaggcagcatccattgtccccacactcaaaagtaatcagatgtattaagtcacacgggagctttacaatcagtgctggggctttggaagtgccagttggcagaataaaagattgcgtgcagttggctgtgctgaaacagattcacctctcaggagggccttcccagggaaacgggggtggcagaatggagtggaaagatgcgaagaacgaggtggggaggcaggggccctcctgccatctgaactgcctacacatcacatcaaagctgtgggggtgaaatgtggcagctccagccacctggatctctctgacagggccacagagcagagcctcagcctcttcacctgtaaaatggcagacatcttgaggattaaattaaac

SEQ ID NO: 34896 - DNA, 1037 bp, Homo sapiens
gtagtatattttgaagttaggtagtgtgaagcctctccagttatgttttttttttttttttttgctcaggattgctttgactattcagggtcttttgtggctccatataaattttaggatttcttttctttctcttccttccttcctttctttaaatgtttgctataattcagcagtgaagccatcagattgtgggcttttctttgatgtgaaactttttgtcatggcttcagtctcattacttgttactggcttattgaggtttttttgtggttcaatctcagaaggttggatgtgtccaggaatttatctattctaggttttccaatttgtggttaaatagttgttcgtaatagtatctatctttgtatttctgtggtctgagttcttacgtcttctcttttgtttctggtttttttttttttagtctattacatttttttttgattttatcttttcaaaaacaccagcttttgttttattggtcttttgtattgtgtttttagtctcactctcatttttttctgctctgctctttattatttctttccttttaccaattttgagtttgtgaagtctgtcccgggggtaatccagtcatttttatttttctcctgtgcacgtcttcttttctttctttcaaaatagctgcttttaagattttttttctttgtctctggttttgataattagattatgacattccattgtatagttttcttcatgttgcttgtgcttagggtttgttgagctttttgaatccattggtttatagtttttttcattaatttcaggaaagttttggctattactatttcagatgttttttcggtcctcctccttcccctgcttcctaccttagggatctccaattgcatgtgttaaaagaaaaacttaagacaaattaaacttaacagagtttaaattaaacttaacagagtttaaattaaacttaacagagtttaattgagcaaagaacgatttgcaaggtgggtagctccaaaatgataataggttcagaccaaccttggctctgc

SEQ ID NO: 34897 - DNA, 1072 bp, Homo sapiens
aatatttatcaatcgttatgtgtgagacactggaaataaataagtcaatctttcttttcaaggacttcatgatctagaggatcagcaaattaaagcatagtatcatattgtatttagacagagcacaggaaggaccattattattctcagcatggcctccagaatgtttctcttttgaagttaggtgaaaccctcatcattcttctgctaaacttcctccattagcttcttatcactgaggaaaggccaaagtccttatagggtctataagtgcctgcaggattgactccaaccaaccctctatcccatctccacctactctttctccatcaatctgttctaccacactgatttccttgttattcctggaacatagtcagacatactcccacctttgggcttttgcacttgctatttcttttgctttggaacattcttcccccagataacccaatggatttgctttttctcttcttagctcacatgaaaccttactgtgaagtcttgtaactcattatgcctccctttatgttcgatgccttctccttgcttatttttttttccattgcatttacctgacatcgtctatatactcttatttatatattgtctgtctcccccagctagaacgtaagattccaaggcagagatttgtgcttttgttttcttcactgtacttttccttcctatgcaagtagaaaaaataattttttttttttttcgagtcagaatctcgctctgtcgcccaggctggagtgcagtggcatgatctcggctcactgcaacctccgcctcccagatttgagcgattctcctgcctcaacctcccgagtagctgggattacaggcacctgccaccacacccagctaatttttgtatttttagtagaggcggggtttctccatgtcggccaggctggtttcgaactcctgacctcaggtgatctgcccaccttggcctcccaaaatgctgggattacaggcgtgagccaccagggctggcctaaaatttaaaaatgagttcaaactaccagattaatatattcaaagagtgaaaataaaacacaaaata

SEQ ID NO: 34898 - DNA, 1024 bp, Homo sapiens
ggtggacattatttccccaatttcacaacaggattcacattgttaatttataaatctagacttggagaattaaggactgagaaatgaccatatcttaaactatctacgacaaagtgaacttaaaaggacatgcccactgaattcaggtcctttgagtaaaaaaaaaatcttctgctgcacattttgtttaagtgttactgtttctgcctgttaatgctgggaacacaaatagtgcaatttgtgcaattggagaatcttgccttttttcttggctccccccaaaaatacaaaccaacagaaacttgttatgcactcatcaaaatgtactaatgggtactctgaactcattaacattgacatctgcaacaggaggcaacagggaaaaaatctcatcttcttttccagtagaaaatagtttgtgaaatgatgagggcattttatctgcttgctgtgaccagcgtgtgtacacataaaccttaacaagactacaagtatattccagaaggaaatcattttagttatgaactaaataataaaaattagaacttcaaatgcgatggtcttgactattagaccagatttagtagctccatatctaagatttttctacctgcccctcttcagtacagggatggctggctgctcaacacactcctcctccccttttttcctttctttaagctgtgtacagtgaaaattgtctttactgtatttttgttctctggtaatgtaataagcatgatggtgccttctattaatacatcattccagtcttgctggtaattttgtacagtatagtgtatgaattgctgtgctgcaaagccaaacagctgcaaaatgttgaaaaatcatcgaaatgtataaaaattgcagtatctttaaaatcagtaaaatggactagcatattatttatcttgttcttcagttaacaactttgtgttctctgtgggagggagggagtcctgtgtgtttgtggggagagggaaggaggaagtcagttatttgagtaagcctctagttgact

SEQ ID NO: 34899 - DNA, 1092 bp, Homo sapiens
gagccactgtgcccggcctagtcactggttttaagagttcaaaaccaagctgccaataacctactctcttagcagtcttatctctttacagataaacaataagcccattttgattcttaggtattaagtaagttgccatgatttttgacttgtttaccttgttagctacacatgtaatacttttatttgaactctgtaagaatgtttagattgctttggggaggagatgggagagatggagatagtatatatcacatttacaatgtgaatttttaaagtgatatgttaccaaactagaagtcctaaatttgtcagtgattaaacttgggatcttgagtgaaacccttaaattctgagcttcttttatgtcaaatattacacaaattattcttgtattgcctattttcctcactgtgttccttgtgttattgggagaatcaaataagattttatgtatatctatatacatacacacttaatatgtatagactgcataaatgtgatgattgctgttaaaatttactgattgctgtaatgtcataaagccaaagaattttgaatttcaaaaaactaagcaaatatttagtaagctatacctcactatctgaaatctgcttggttcctgggtgatggcaacagtttggttaaggaggaatacctgtagtactaatatttgatttttgtataatccagtagatctagaagaagctattttagcaacctagtcattgtcctcactttacattttagtgtcatgctgttttctaacctactagtaataagtacttttgcctctttttcaagaagctcacctagtcttattaaactaaaacaggaatatcaatattaagtgatttttacattcactcctttgaagtagtttttatgatattgtaaactttagtatctgctctatttctattctcaggcagaggagatatggaacagaatgactctgacaaccgtagaataattcgctatccagatagtcatcaactttttgttggtaacttgccacatgatattgatgaaaatgagctaaaggaattcttcatgagtaagtgatttattttgctgttggagtttttaaat

SEQ ID NO: 34900 - DNA, 1021 bp, Homo sapiens
ggcatcatcagatatctacttaaagtcagattcctaaatcaatggcatgaattatttgtaagatgttggaaattattaatatttaactttatctgtttttaattttcatccttaaagaataaggaagaactttattttgctacttgtagttactcgtgttttgataatctgttttgaaaagaatttaaatcagtcaagaccagggcctcaagttctttgataacatttggattgaatgagtctaaggtttttcttaaattttgtaataaaggtgcatttagtgtttttattaattgccagtaatacactcactttattaaactttgacagagtacgtttattctctaattctgtttatattcatactgaagtatgcctttagacccccttagttgaagtttctaaataactgcctttttcagcatcacattttgcatcaaattattatatagaattaaaccccaaatacagatagcggtggtctcagggctgtcacttacgtatctttgtcagacatagaacattatcctgcatgttttgggtcagagaactaaaaatgtaatttaatttaaatgaacaaatagttactgaacatctgtgtctaatagcactgtgcttggttctttgggtgatgtaaaagtaagttaagatatgggccttgggcactggcgtgcctgtagtctcagctgcttgggaggctgaggcaggaggatcacttgagcctaggaatttgaggttacagtgagctatgattgtgccactgcactccagcctgggcaatagagtaagactgtgtctctctaaaaaaataaaagatacagactttataggagtaaatacatataaataacaacaaaacctggagagagttaaaaatattcattttataactagtagaattctagaatatggtaagcaacttcatcttgagggaaataggacattgacatagaggaaaacagaatttaggaagaggcaggcaaacttggttaaactgttagcataggagttaatattcctt

SEQ ID NO: 34901 - DNA, 1026 bp, Homo sapiens
gtgaatcagtacacataatacactaaaaacattgcttagcataaaggaagctcttacatgttttattactataggagttgtgttttcattgtgaaaaaattagcttcacatctttgagcttaatttagaaagatgttaattctaattgctttggataatgccaataaaagactaatttacacatacttaagaacagtacaaaaatattaaaaagaaattagatgctggcgtaattttggattttagacttggtctctgaattatttcagttattttaaatctaaacagtttaagcctttagagttagtaatcatttggagatctggatacagtattaaactctgattcccaaacaaatctaggtagctgagtctttgtatctgaagaaaaaaacagggtcaattactatagcatctgtatttagaatgtactaaatcatcaaaaatatccgatttttccacttaacaaaaaatagatgtgaatatctaatgattgtctacttactgtgccagataaactaagcattctatgtgcattagtcatttaatccttacaacaaccatatggagtagttcctgttcctgttttataaccaaggaagctgaacttgaagaccttaagtaacttacctgtccaagatcacgcaactaattagtgacagagcgggatccggaacctagtctatgacaccagaattctgcttcttaggcttctcttgacaattcagtgttaatcattaattatggttttgcaggttttatggcaggaattcttcctatgttcatggtggagtagatgctagtggaaagccccaggaagctgtttatggccaaaatgtaagtatcaatttcatatgtagtttagaaattttgtgttaagatggagattttaaaaaatagccttcttgtgtccatggctttttttttctttctttctttctcttttttttttgagacggagttttgctcttgttgcccaggctggagtgcagtggtgcgatctcagctcaccacaacctccgcctcc

SEQ ID NO: 34902 - DNA, 1041 bp, Homo sapiens
gtcaggagttcgaggccagcctgaccaacatggagaaaccccgtctctactaaaaatacataattagccaggtgtggtggcgtatgcctgtaatcccagctactcgggaggctgaggcaggagaatcgcttgaacccgggaggcggaggttgcagtgagctgagattgcgccattgcactccagcctgggcaaggagagtgaaactccgtctcaaaaaaaaaaaaaaaaaattatttcaggttagtctgatggtagtgggttatcagaacttattaacattagtgtcactaaaattggtatacaactccccactgctaaatttggctaaaaagaaaatttatttcatggtggttgatgacaaagatgactttttaatagttattcttgtgtttgctccctcagcatttgacattgtgcagcaaagaaatggttatggagaagcccagtccgctgcttgtagggcgggagtttgtgaggcaatattatactttgctgaataaagctccggaatatttacacaggtaaattttaaacaaataatttggtatttttatctactttttttcttgggtatgactatatatattttgcatttcctgtctcctcattatctgacagtatctttgtaaacatgtctaaactgtattcaatattttattcatttgatggcaaaaagtgtttttaactgcaactcacagtaataaaaacattttatgtcatattctggtacataacacattcatatctatatatgcacacgcttattcttatatgtactctagtattttatttttagagtcatggtctcctctgtcactcagggtggagtgcagtgatatgatcatagcccactgtggcctcaaacttttggcctcaagcgatctcccagcttgcagcttgcattcccaaagtactgggattacaggcatgagccaccaagcccgacctttatttcattaaaaaaaaaaaaaaacaaactttgggggcaggtgctggagaactatataaggtttacatgaggctggacacagtggctctct

SEQ ID NO: 34903 - DNA, 1029 bp, Homo sapiens
aggcaaatgcagaggaaacattttaagaaacaggaatgaataaaatattctgatgaagattcactgggattttaggtgcgataggcagagttggagagtaaaaagcctctaaactatactggataatgttttcggttttttgttttttgagacagagtttcgctcttgttgcccaggctgaagtgcaagggtgtgatctcagcttactgcaacctttgcctctgagttcaagcaattctgctgccttagcctcctgagtagctgggactataggcgcgtaccaccaggcctggctaattttttgtatttttagtagagacgggctttcactgtgttagccaggatggtctcgatctcctgaccttgtgatcctcctgccattgcctcccaaagtgctgggaagtaggcatgagccactgcgcctggccttggataatgttttcatttgacaagtaaaagacggatttgttcatgagagagctttgactgtgtatagagctaatgtatcagataaaattttacactgtgcattcctgtgtgagattcttcacattttcaggtgtcattggaagaagtggagtgtgatatattgtatttaactttttctaaaaaggttgttaggtgaggctaacaaccaccttattgaagatggtagttatctttgaaggtgctaatctaagaactttctaaagatttctttttgtgtataagtatcctttaatcttggctatctttttttttttttttttaaacagtgtctcactcctgttacccaggtttgagtgcggtggtgccatcttggctcgctgcagccttgacttcccgggctcaggcattcctcccacctcagcttcccgagtagctggagctacgcttgcacactaccacgccccgctaattttttgtattttttagtagagacggggttttgccatgttgcctgggctggtctcaaacacctgagctcaagcgattcacccactttggcctcccaaaatattgggattacaggtgtgagccactgcacca

SEQ ID NO: 34904 - DNA, 1029 bp, Homo sapiens
ctagtgttccgtcgtgtttgaccaacccccctctccctgccaccgcgggtttaatccgaacgtgttcggatactggaactgtaacgtgcgccttcttcgtccccctcttatgcagacgatcccttattgactcgggaatggcttttgggggatgggttcccgcttttgttgggatggggggacagaaaggaacagaagcttccctagattgtgttgattttgttagtggaatctgatagaatttttcctgcgtctctaaaagcagatttcttaagatggccctttgccgctttggggcgaatatagattttcgtctataatttcctgcatagatcagcttttttccccaagacatacttaatgttctaacggatttggggggtgggaggagagtgccttttccttcataacaacaacaaaaaaaaggcacttgcacttttagctggaatagtaaagtcctgttctccctgtatgattgttgtgggatattaacttggattaagatactgtggttttaggttcaaggctctgtaccttgttctggtctttcaaacgttagtgttgcaggtacctggatctaggaaacattaactgtcgttaagagagccccggtgtactagagtgggagatgatggcaatttttctctagctccatatttggcagttaatatagccttaggcatgtgaaccaagtttctaagtaaacttttggccctgttagcatccagtggtctttttgataatccaagattcctggtcttaggagataaacggtacgatgagtttgaacctcaggattgaattatcctttctttggcagtaacatttttcttaaatgtttaagattactcttatgggcctttatgttatgatttaatctttacaaactaattctgaaaagcagtcaaggaattgtaggaataataaggacctagaatgaatttcttactaagagctgtcatagttcagattgatattcagggtcgaaatattagtaatagtgaaaaaacatcaagagtgaaccagaat

SEQ ID NO: 34905 - DNA, 1763 bp, Homo sapiens
tcatagctcactgcagtctcaacctccctgggctcaagtgatcatcccatttcagcctgttgagtagctggaattacaggtgcacgccaccacaccctgctaatttttgtattttttgtagagacaaggtctccctgtgttacccagtttggtctcgaactcctgggctcaagtgatcctcccactttggcctcccaaagtgctgggattacaagtgtgagccactacacccagcagtcgggatcatttagatagtaactggcagaacagggctacaatctgaatttgggattcatgcttctctgttcttacaccatgctgcctaaacttgtagtgataattccaaggaaaagttctttagattatctgtgatgtgctcaggtctttaaaaagcgcactttgaagaatgcagataaggcaaaaggagtgtttttatatacttttgcattatctttttctccatgtgatcgtcaacagtttctactaagaatttctctactgaatgtctgtactgagaaagtcatgtaatacaatgtgacaaacttaaattttatttttctgcagtttctacagcagtataatcactacaaatccaatgtggagattttcaaattgcaaccaaataaacccagcaaagaactagcagagctggtgatgtttatggcacaggtaagaatataattgcttaaataaagaccagtattaacacacagtttgctgaatgttttttcactaatactcaaccttattccactctggaatgggaacttaattaaaatatttttctaactttccctttttgcaaattttattttctccctatcatgagttagagaatgtcactagatctttttgcataactaaccaggacaaaactttaagactattttttttcttcaaattcatcataaaagcaggtactaaatcatgccataaatattactaagactagagaaaccatgataaatgttggagaaattaacatgtagaaggaaaagaaggttgtttggaaccatctacttctatgaaacatagccttttactctcgttttgcagaacatcctaaatgtatgcatctgaattataggagagaaagagagcaacttcagaagagcctttgctttgttacagattagtcactgctacccagagtacctaagtaattttcctcaagaggtgaaagatcttctctcctgcaatcataccgtattggatccagatctgcgaatggtaggaccagtagttggatgaataaattgtgctgtgttcatgtgtgctgcgttcatatatatttaaatgagaacagcctctaagctaattatcttcagaaaacgtaaattataatgtattatcctttcctaaaaatccttctatggcttctcatttatacttagagtaaaacggaaacttaataacctggctcaaaagtgcctgcatgatctgcttccagcctgtgtttctgatatcatattgttttcagctacactgtgatctttctattcttccagcacactaaccctacaggatgctctttaaccttttgagatgatttcttctagtcattcaaatctcatatgcatgtagaatcctaatcacaacttgtcatttttataatgccttaaattagtaaacttacccattagacagtcagtttgagcatttcatcattgtccttttagtggttggggttgagtcctggctgacattcccttcacgaggccggtgtacctgtttgccccacttgttgtgaatgtcagctgctg

SEQ ID NO: 34906 - DNA, 1031 bp, Homo sapiens
ataccaaaagttgaccaccattaaatttagcaacatggggtcgggcacggtggctcacacctgtagtctcagcactttgggaggccaaggtgggtgaatcacctgaggtcaggagttcaagaccagcctgaccaacatggtgaaaccccatctctactaaaaatacaaaaattagccaggtgtggtggcgggcacctgtgatcccagctactccagaggctgaggcaggagaattgcttgaacctgggaggcggaggttgcagtgagccgagatcgcgccactgcaccctagcctgggcaacaagatgaaactccatctcagaaaaacaaaacaaaaaaaaattagcgacatggatgtcattggctaccctgattcattgagcagtttgggaagaggaatgggtgcaaaaatctgattacagaaggtttaaaaacaattggagtatgattctatgtatatgaaatgtatatgaatagaatatgtccagaataggtgcatctatatggatggaaagtagactagtgtttgccagagctgagggtaaggggtataggaaataactgctaatggattggggtttcttttggtgatgatgaaaaacctatggttgtacaacttggtgaatatactgaagaaccgaattgtatactttcaaagggtaaattttatggtatatgaattatatctcaatttaaaggattttttgaaaaaggagggcaattaggtaacatatggacaactctttaaaggactttttctgaagagagaaatagagtagaaggtacagagtaaagtggaatcaagaaaggatttttttttttaagacacagtcttgctctgttgcccaggccagagttcagtggtgtgatcacggctcactgcagcctcaacctcctgggctcaagcaatcctcccgcctcagcctccagggtagctgggaccacaagtgtgcaaccaccattcccagttgatttttttgtagagatgaggtcttgctagttgcccaggctggtctccaagctgaaaccat

SEQ ID NO: 34907 - DNA, 1099 bp, Homo sapiens
ttatttcaggaatgcaaggttggttttaataacaggacatctatcaacatgacttattatagcaacacattaaaggaaaatatataatagaaactgtaaccaaaaatgaatagcaaatactccaaaaggcaaaacactaaaatcgcatttagaaactagacaacggacacccaatattatcatcattatttgttgctatcttggaggttttcataaataaaacaagcaaagaaataatataaacattgggaagatgattaagtgatctatttttgctgatatgattgtatatctggaaaacccaagggaataaaccatagaattaatgtagtaagctggctagatataaaagtacaaaaatcaactttcctttttactatctggaaataggaaaatgttccattcactatggtgacaaaactgtaaaataggaatatatttctgaggaaagtataggtatttacaaatagataaactatattcttagatgagaatacttaatacccactttacaaaattaaaaatgaattacagctttttaaaaatagattaagctgggtgtgatgacatggcacctatagtcacagctactcagaaggctgaggcaggagaagcacctgagcccaggagtttgaggctctagtgagctatgattgtgcctatgaatagccactgcactctgttgcctgggcaacatagggagaccctgtctctaaaaaaattttgattaaaatttctttaagtttataaagaaggataagtgtttgagactagcttgttcaggaacaaaaaagaaatagtgaaggggacttctttaccagatttcagaacctattttaaacctcttataattgaatcaatatagtgtctgcatgggattggacagaacaatgcatggaacagagtagggaatttacaaatagatgcaagtgtgctgaaaatttaatatatgagaaaggtggtatttcaattcagtgggtttatttaataaataatgctggagtataactatccataaggaagaaaagaaaattagaccattgcattgtataaaaataaagtggactaaagactttaagaaactttcaaagctgtatgt

SEQ ID NO: 34908 - DNA, 1111 bp, Homo sapiens
atctcacttttggtgatgctaagattgatcagtaggttcagatggtgacagcgtatctttatcttactactttaacctaatggtttcattccttgatgatcattgcctcaatcagttatcttattaggagttgcaaaatggtgattttctaatttcctccctatcacactgaaatttcttctgtaaaaggaactttttcttcatcctccaagactgcttgatcaccctgatgtacagtttgtatagtaaaggcaagataattttttttctttttaatggacaatttttgtaaaaaggagttggcggtctcattatttctaatggtatccaaggagttaggatttaaaaaaaatttgatctttactttataaaattaccattttgaatgcatgggctttaataaatatgtttcagttgttgcatttggccagtgggagaccttaacttctgtgacactccagtctagttttttcctacctcattgttagtcctccttattgcttttgtccactcatcttcctctctctgtctctacagagatgttacacatactgttggcctttacctctaccccatggcttagctgactccttcctttaggccctaactgaagtgctaatggaactgtcttctcttgacccctctctcaggcttgatcagctcccttatttagtactcccagaacctctgtacttctctgaaggacttatcacaattgttaatatttgtttgatgtgttcagtttgtttaatgcaccttgtctaccttgtttaccactgtatctttagtatttggctctgagcacttagtaggtactcagtaaatatttgttgtatgaattaatggtgaatgaatgaatgaatgtgtttataaaaaaccaagagagactgtgttgtcaggaaatttaagggagaagggctttcaaggaggatgtgtattcaacagaaggtgaagattttctttgggggccaaaggaataatcaacagcatgggaggctgactgcatatgtctcggtatagagatcacagttgattcatctcatgtaaaagttgaggaagataaagcccaggaatttcttgctcaaggatagaaagcgaccttataataaac

SEQ ID NO: 34909 - DNA, 1031 bp, Homo sapiens
agagcagatgtttgtgggtagataatgagtttgaggtgtcccttgggtagttgtatatatttatgaaagccatcagaacgtaagtagtatttaaagtggtagatatggatgatgtaatttaggagacctgattccagagtaagaggagagtactagaacaaaactcttagaaacactaacacttaaatgctgccatctcctatccccaagccaagtaggattttgaccataaattagcgagcagcattgttaggaccactgcttgtcctatctcagtatagagatgcccgtccatgtattcctcatacttattagctcccttttactaatcacagctattcctatctcagttggcaatacctgtgaatcaaggggaaaagtcacatttgactttgtgacaaccgccagaagtcctttccaagccaaagcatggattatcgaggatccttcagaagactgttggatctttcgacaactgatactttctgctctgttagctctttctgtcttcactactctaactagcttagattccatggccttccatttctatatctcttgccaatatgctaaacttccttgtttttgtgtcacatttgcctgaaaaaaccccaagcctttgtaagcccaactgtctgtgtagatattgcttgagaaagatcacacattatggaagaggggataatacctctctaaattcttgatcaccaacctcaggtctcaatgttgcctggtaatcctgtgaaatttctactttcaacttattctcctgctttctatagcagtaattttaaacctttattctcttcaaatctcaaatttatctgttcttacttttagcagatggccttgactgctacttccaagacaaaaaagggctgagcgcagtggctcacatctgtaatcccagcactttgggaggctgaggtgggcggatcacctgaggtcagagaccagcctggccaacatggtgaaacccatctccactaaaaatacaaaaattagatgggcgtggtagtgcacacctgtag

SEQ ID NO: 34910 - DNA, 1215 bp, Homo sapiens
agcaggctgacatggctggccattaagctttataaaatcatgtgggctctgaaattgttcttttatgtgtctagcaagtatttaataaacccttgtatagtaattttgttgttgttgggtgctggtagctccagaattttgtgaccactattgtgggtaaaatgtctctgcatcacttgttaatgctactggtctaacttcattcagtatgcttcattcaccgaactttgtgctcaaaatgcgtatataccattttatgttgtattcctccatttcacttgcaaaacagaagtaaataagagttcgggacccagggtaaaatggtagcttcatccaatatatcattcaaatgcatctgatttctaaaacatattacattttatgctgatcttcagttcataattcttccaggaaaactcagtcttccaactgcaataaaatactgggtagaatcaaatgggaaaggggttgggtggggcaatacccatgagttgatagtgataagctcctaaggatttttaacttgtacttttgtgaacgaagagaatgcataaataatgttggtgaggataaagtacagatatttcatgtagaattaattgctagttatgatgcttgtggatagttaactgttttttttttagtcaaaatgatcatgctacgaaaagatgcttctgagagaatgtaatgagtaactgatttttcttcctgagtcgcccttgccaaatatgttactgtattaattaatctaatattgagtgattatttgtaaaattatgaatatgggaaatccatctatctacagcctaagttacacataagtttcagaaagtctgattagactaaagagatatttcttctgggacagccgccttcttggtaattttgaagttctttttacaagttccttcctcagtttcagttctttccagtgttttgtagctcactgtcactcactgaatagagaaacgtgtgccctatacttcctgtgacaatcattttgctgacagaatgatggatgtttaaaatattgcacaaagtactttaaagaaaggtctgttaggaccagaagcagagacaccacttttcaaaggacttcttggtttcagcataacctaagacagggaattgggagccatcatatgtcacagtgttcagaattcaagcatatttaagggcattttctttgattctcaaagttcagcattcattttg

SEQ ID NO: 34911 - DNA, 1027 bp, Homo sapiens
caggagtgaactcctgtaatttactaagccttgggcattattttttaaaataaaatttcaatttaattcaatgtagaaacaagaagacattggtaaacaaattgaaattcaaactaaatctgtgaaccaaactgaaaattttgaaaatacttcaggaccaaaccataacccaggagagagttcatcggctttgattcccggtcaaggtgaccctcaactattgcacctccctaatcagggaagaaaagaaggaaaacaaagtttttgagaagactctatcctaggcctcgtttccttcccacattatagcttcgatctccagctttttaaggcttagtagctgcagtctctatataatgttatattgggaatgttatattgaaaatataacttggatgctgaaagaaaggaaaagtcttgcttattaaagtggtgtctattttcaaataaaacccttttctttcttttagggaactcagaaacaaagcaaatattcaatttggagataatggaacaacaatatctgctgttagcaacaaggcctatgtttttgaacgagaccaatctgttggagaccctaaaattgacttaattagaacattaaatattcctgtattggtaagtaggcattttaataccattaagttggattttggaagaaaggaaaaagctaagttaatgctctttatgattttacatttaggagccattaagttatgttgaaatatacatatataaaaagaaaaatacttcttttcttttctttaaagtacatcttggacttttttctaagatgtatcaaataaggtcttttcaaatgatgacaaaattcagattttaggatttgttttcataatttcttcctgggtgttcaggattagcaattgtgcaaataaatatgcccctaggattttttggtagctaataattttaaaaatgtttatttgccccttgttttcattcagaaattctagcaatgaaatttgtataccatttcttacttcagatttttatgttggattttata

SEQ ID NO: 34912 - DNA, 1050 bp, Homo sapiens
tttaaggttgtgaaaatcctatgctatacttgctatgaaaaaggatgttataaaaaattcattaaaaccaaaattgctaaagacagatctaacagacttagaactaatgtttgtgtgcctttggcatattaattatgcataaaaatagaccctgctaattccaaactagtcttaaccatttatgaaaggaggccaaaatgtctccttgaaaaataatatttgcagctaagaaagttactgtctcttcttgattctgcagtactgaaattcagactttttatttattcagatcacctttcttacatattatttagaatatgcggcattttgccacattgaagattttaccaagaagaactgggtaaacagcagaagatgaatgcctggcacagcgttgtgctctacgctgcggtatcatctgtttcttcattaattatttattgtgtcccttctgtgccagaaaccatgttatgtgctggggatccatgaaaaagatacagttcttagtatcagacccaatctgacactaaagactaatgaacacattttccttataaaacttgtgaagtttcatgaaagcagagagaaaacacatagttcagaggggccttctgagagatggcacttctgaattgagccctgaagcccaagtagaagtgaaccaggtgataagggccctgcagagacttctgggtgaagggcggtgagtgactcaggccaaggcactggctgagaacttgtgtggtgggtgctaggtaacagtagatggttgcgtgttactggtgcataaagtgcctaccaggaaaagacagcgacaggtgacgcagttgcatcagatcacaacaggtcaaggactgtggactttatcctttgagcaggggtggagtatctgttcccttaggcacttttgacaggcttctctgaagcctgagatggatgaagcatttgaaaggaaaaaggctggagagagggagaccagttaggagcctacatacagtattgtcacagtccaagccaatgatgaaatgtgccttggggtagaaatgggga

SEQ ID NO: 34913 - DNA, 1050 bp, Homo sapiens
gcttcccttgagaagggagactaaagacaggcatctggaagctgtcactgtggcgcgcgggcagacaggggatcccattggagaggaagagccgtagtagtcgctgctgccttcggccgacccaacggccgcctgcttgggaggaagaaaaagaacgcccccgctgaagaattaaggcagccattggttgctctaggggtaaggaccgaggcctcccctgggtgtcactggagcagccacacgtgggggatcagccgacttcattcgatcgctggcgacagacccggcgacccgtaggaatgcgcgctggggctgcggctggagggcgtggcgacggcaacaggcgggtggctcgagtgggtgcgactctgggcgcgtgggactgagaactcctccgccgtggggaagatttttttcccagcagatgttggggtgttactgcgtgtctgaggggccggcggaatggaggggtcccggtgcgtgcagggcagcgaggtgtgtcagatgagctgtggatccctgcggccccacgtgggccggagaggggggcccacgacaacaagcgattgaggacagcgatggacagggcggggaaccagctgggtggaagcacagggagtgtggtgaggagggaagggctgtgatctgccctcggtacgacgccccaagggacagcctggcctcctgaattagggaaaagacaaccggtctctttagacgggcgcctcagagtctgacctgagtcttcaaacgcccagatcccctggggccttgagtctccctgtcccgctggccctgcctcgcctgcgcttcaggactccgacgcccccgcagccttgggctaagggtcagtcgtccccgggcgcgggtccggctgccctggaactgatgctggatttcgctggtaggtgggctaggggcttggtcaccccgtctgaattccactgtcaggacagctgtggaaccgccagagaaaagtctggccatgaaagaaaggtgaggggcgccgacgcagagcttatttattcagtctgtgggcggactcagacg

SEQ ID NO: 34914 - DNA, 1048 bp, Homo sapiens
ttattttactaggttgaaaattgcttaagcacccatgtgaatcaggaacaccatactttttaaaggcatggtaattttaattatcatttacattaaggtggaaattacaaacaattagcataccaggccctacttacagcacagggttaatcaatgggttgaaaaaaaccactgttcctctaaactttggtgtgctttgctttccatttctatggtctgtgcttttaagagctgtaattagacacggcaactccagcagcagtgtgattcaccaaaagcagttcagcaggaaatgacagcttttggaataaaaggaactctagaagaactagggaagtttttcaatgcattagctttttttctttaacagacagggtctcactgtgttccccatgctagtctcagactcctgggctcaagcaattctcctgccttggcctcctgaagcactgggattagtttttgaggcttctctctaatctttgtaagcggaatctcatctatatttttgaggacccataagacaaaaatttctttctaactgaataactaaaagcctactaggcataggttccaattcaaaccaaacaaccataacaatattttcagaaaagtcaatgactaaagtatttcaaaactccctagcagaatgcctggcacaaaggagacatttattaaaagttaattgcaggccaggcacggtggctcacgcctgtaatctcaacactctgggaggctgaggcaggcggatcacctgaggtcaggagttcgagaccatcctggccaacatggtgaaaccccgtctctactaaaaatacaaaaattagccaggtgtggtggtgggcacctgtaatcccagctacttggaaggctgaggcagaagaatccgttgaacctgggaggcggaggttgcagtcagtggagattgaaccactgcactccagcctgggcgacagagtgagagactccatctttaaaaaaaaaaaaaagttaattgaaaacaaaaatgatcatggtgatgatttatacagagatatgccactgtgat

SEQ ID NO: 34915 - DNA, 2355 bp, Homo sapiens
agcgatccacctgccttggcctcccaaagtgctaggattacaggcatgagccaccacgcctggccataaatatgttaaaaggttgatatagaaacagatgaccgtggcatttagagttttggggtgttgagggagtcaggggtaactccagaaaggattgatatctgtgaattgtcctgaagggtaagaaggaatcagcaaaactcccaaattaaaaactttaccaaaaacatttcatcttagtgctaagtctactattttctacaaaatacatatttctaaatttttcatttactattttaaaattcttagcttccctcctcatccctgattaaaaaaaattttttttttgccctttggcttcttacatttttaatgaatgtgtttatgagtactttggactccactgaaaaaaattagaagaggccaagagagtaggatgaagggccttccagacagggggaatagactgaaaaaaaaaaaaaaaaaaaaaaaaaacagacgttggatacaaaaaagtagtttctgttctcatgtaaatgttcagcatacattgcaaatacaaaactcaagttccaaagataattatattagaaatacagatttggacctaatttctaagatgatgttgatggatgggtagctggataaataaatgagttggaggtagatgtggggagagaaaagactcagcggggacggaaagcacagggaggaaaaatggccaccagagataacagagcagcctatgttaattaatgatcaactgtgtgtggctttttttttttcctggcccagatggatagctcccagttgatccattgtcgggagcttgtggcacatcacctttctactctgcagtcttccctgcctctgaattccgtttatgtctaccgtcccctcaagcacaccctggtgacctgtgacaaaggagtgttcagattacatccctcctctgtcccaggcccagacttctccaaggacaacagcaagccagaagtgccagtcagaggtacagcagccttttaccatcatctcccagctgccagtgggtgcaagcagacctctactaaacgcaaagtagaggaaatggaagtggatgacttctatgatggaatcaaacggctctataatgaagataatgtctcagaaaatgtgggttctgtgtgtggcactgatttatcaagacaagagggacatgcttccccttgtccacctttgcagcctgtttctgtcatgtagtttcaacaagtgctacctttgagtgtaaactaaggtagactactttgggaatgagaacatgcaaaatcaggaaaggctgtagaaggaaatataccttaacaggctgatttggagtgagccagaaaaaaaaaataaaactctcattatttgtgtggctaattataattcagcgttatttaagcacataaagaccaaaaaaaaaaaaaagaaatccaaaagatccaaactttttttaaacttaaaaaatctctttgtagtatgtcagttgcactttttttctgccataatgtaacgtagcttgccccgtcaaaaattcaattaaaattcatggccagcaatcctgttccccctcagcatcctgatttaattttcctgttgcttttgcttgcttctccatttaatagttactgaactttatgcatgttgatctatattgattttcactgcagttgaatgaacaaattatttcagtgtgacagccatgactcaagttccaattagtctgaaaagggtactttggaattgtcccatattaatcagagatggcaaaagaaaaagttctcatattaccaggttgattttgtgtctcatttcaaattttaatttaaaattatggttttcatttttgtttaccttaaagtgatgcttaaaagtggcatgtaattaggacacttaggtttgttgaaagcattttcgacatttgtataaaagaatttgtgataaatatatccaggtgctcaccaaagaaacatgtattaacaacttaaattagatttttctaactgatagttttcactcatttataatcagtaggagagactgtctagatgttggggcagctctatgatttaagtctgtaacatgttataactgaatttagtaccctagttttgttaagctattaggattttctaatagaacttactccccctgcctccccagccttatgtttcttttaatgacttctggatcctgagctccctttgcagtctgaaaaaggtattgcagtcagaactgtgtactgatgataaaagcctctggtagcaataaaaagttgtccttaacttttgtttttgtgacttttttctggttgtgaagaggtacaggttcctg

SEQ ID NO: 34916 - DNA, 1061 bp, Homo sapiens
ggaatttgaaaggaggacagaggagcctccgctggagctagggggctccgttacagatccttttggcagaagttgacaattgggtatcaaaacagtggaaggtgtttcgggaggtaggatggattcagactctgaaggggtttgaactaaaatgtttatgttttattctgtcagtggggagccactcgacttagagcagcagagcattacagtaatgacgttaaataacaacatttgatgaggcttattatctgccaggcattctcctaagtggcttgcaattcacttaatccccccaaggctggtagtaggagcctcattttacagatgaggaaaactgagactccacaagattaactttctccttaggtaacgcggctaaaacccagtagccagaattaagtctgattctacgctgtgtggtctctgtcctgaaaatgagtttgttgaaatagcagtgttatctgctgctagcttttccaggtcatttgtggcagatgaaatagaaaggattggacaaatagattaagaaataatggacggaatagatgtagattggctaatctgggaccagagaatctccgagagattctgagcccctctactagaaatttcttgataccgatgaagggcagactaatacagtcagcatgtgttagggaagttcagtaaaaatgatctgcagttacaggtagtttatgtggtaatgtgacatcctagtaggttagaatggagcttagcatgtgtgttggtcaagattggaagctgagtgtgtccgtgttttgttttgattgtgtaatacattaaaaatgaatattcatcttcctatgtatgtttcttcgtctttaaaatgggctttatggctgaaatgggggtgtagtaagaaaaataaaaaactagaaaaaaagggctttccacagtttcatcaaattgtgggaacattacatgagttaatatggcatagcgctttgaacaataggtagtcaaatagtaagcactcagtgcttttacttgttaagctgtttacaagtgaagctattaggcatatgctcaactctgga

SEQ ID NO: 34917 - DNA, 1025 bp, Homo sapiens
ggattacaggcgtgagccatggtgcctggccgaattgcctattattataatatgttctttctcatttaaaaaggtattatgtaatctcttagcatgtttaaaactgttaaccttatcatgcatgtcatacatatcttccgtattttacttgcttttcattttgtcttgtataatgtacaggaggtttgaatttttagataatcatataaatatgtctttttatgtttctatttttggattcctgcctgaagagatcttttcccatccaagtttttaaaaaactgttcgcttacattttaccttagtatgcaaaaaaattaaatcttgaatatattcattaaatcttggaatgtgatcgagctattttaacttactttttgccaaattgtggaatgtagatttcccactaatattggaacaaaaaagaagtttggtcaaagaaagtagattttcagatttatgatactagtattggagatcattttgagggttttcaaactttaaagacaaaggatttattgaaggcatatatctgaggcagatcaatgtagtggaattggattagaattccagttctgctgcttgccagcaagcttctaaacctctttatattacagttttctgaatgctagaattggaatagtaatacctgcttacaagattgttgggagaaattaattaagtgaaataaagttaggtaaataacttatatgtagtagctagtagttggtagttgcagtgatggtgatcattgtcatcatcatttgctgcacctaaagaatcccaaatttagaaatagatagtgtagtctcctttaagtggattctctgagtttcaaggaagagtttgagtacacattttagatttgagtcttgtgctaactgaatgaatctcttcactacactagtgattataattgtgtatgctgagaaactgggggtaagtgtaatgacattgaaacgccatgctatagtttgcttttatgatggcaagtgacaagagtattttatatttaatataagtac

SEQ ID NO: 34918 - DNA, 1047 bp, Homo sapiens
tggagtgcagtggcgcgatcttggcgcactgcagctcccacttcccgggtttgtgattttcctgcctcagcttcccgagtagctgggattacaagtgtgcaccatcatgcctggctaatttttttattttcagtatagacggtgtttcatgatgttggtcagtctggtctggaactcctgacctcaagtgatctgcccgcctcagcctcccgaagtgctgggattacaggtatgagccaccgcacctggctaacaaagattgtttttaaaaatgtgaaagttttggctgggcacagtggctcatcatgcctgtaatcccagcactttggaaagccgaggcgggtggatcacgaggtcaggagtgttcgagaccagcctggccaagatggtgaaacctcatctttactaaaaatgaaaaaaaaaaaaaaaaatcagccaggcgcagtggtgggcacctgtaattctggctacttgggaagctgaggcaggagaactctagcctgggcgacagagcaagaatccgtctcaaaattaaaaaaaaagtggggaaagttttttgcatatcttcaaatatagtcaaatgcctttttattttttaattaaaaaatcctttgtaaacaacaatgagataccagtgtaccttttagaatggccagatccaaaacactgacaacaccaaatgccaaggaggatgcggagcaatgggaattcattgctggtgagaatgcaaaataatatagctaatctggaagacagtttggcagtttcttacaaaactaataagcatactcttaccatatgatccagccatcatgctttttggtatttacccaaatgaataaaaaacttatgtctacacaaaaacctgcacatgaatgtttatagcagctttattcataattgtccaaacttggaagcaacccagatgtccttcagtaggtgagtggataaataaactgtggtacatccagacagtgatgtgttattcagtgctaaaaagaaatgagctatcaagctatgaaaagacatggaggaaacttaaaatgc

SEQ ID NO: 34919 - DNA, 1029 bp, Homo sapiens
tcatataatatgtgactgtgtctgcttttttcacttagcataatattttcaagattcatgttgtagcatataacagtatttcattcctttttttttttttttgagatggggtcttgctgcatcacccaggctggagtgcagtggcacgataccggttcaccacagcctccgcctcccaggttcaagcagttctcctgcctaagcctcctgagtagctgggattacaggagcccaccaccacgcctggctcattttttgtatttttagtagagacggtgtttcaccatgttggccaggctggtctcaaactcctgacttcaggtgatctgcccaccttggcctcccaaagtgctgggattacaggcatgaaccactgtgcccggccaatatttcattcctttttatgagtgaacaatatattattatacatacttggttattataaataattcatgtatatggttttgtgaagacgtatgttttcatttctcttgggtgtatacctaagagtggaattgctgggtcatacgtatttctgtgttttaactttttgaggaattgacaaacttttccacagtagcagcgctgttttacatttccacacctcacgcttttttcttttttttttgagacggaatttcgctcttgttgacaggctggagtgcaatagcatgatctcggctcactgcagccttggcctcccgggttcaagcgattctcctgcctcagcctcccgagtagctgggattactggcatgtgccaccacacccggctaattttgtatttttggtggagatggggtttctccatgttggtcaggctggtcttgaactgccgttctcaggttatctacctgcctcggcctctcaaagtgatgggattataggcatgagcaaccgcacctgccctacctcctgctttttaatggcttcattgtaatccattttattgatgtcctgtcattcagtcccctgttgattgacaatttatttctgtatttttgatgattatcaacactaatgcagtga

SEQ ID NO: 34920 - DNA, 1479 bp, Homo sapiens
cagtaagttgagagaagggttgagaagaggaaaagaacttctcattttctatcagataagaatcacattagaaactaagtacaagattagacaacaaattatgtggtcaaataatatagtcattagccacctaaacattttaattccagatattatttaattccatataataactgaattcttgtgagtggattacaggtttttgatcccaaaattccagagctttcaactctctgaatttgtagtcctgaatatcccagtggtgggggttcccagcattgtgggtgctacttgcaaggccatagaatctagatggccctgtcttgaccctgaaatgaaccttaagccttagaacaaagtcatgcagatgccccatttgataataatcttattcacctgtgctctggtcctcggtttctgcatgtgttagcattgcattgataactcagaatcttgataaacacttaatatttgggcctgaagcattaaactttctttttattgtatatacttaaaaaatagaactcactgccctatcatacattgtagccctcttattctttggtctttcatatgcattagttaaatcccttaaagtagacattcataaaaacttacattgtttattggagtataaaatattacccaagtttcttcatgagttgacatgagctgttttaaatactggtgtattttcagaacagtaaaattactgaatatcagaaaaaatgttaattgatgatgaagcttattcccaaaatgccttttgtgcatatgatacttggaaagtcactaatgtgcctcagttaatacatcagtaaaatgttgtgtttcttttccagtgtagtgtttttggaatataaattccccatgctagtatagtatctcagcaaagagaatttccccccaggaggctcagtaaaggaataccgtgtcttacccatcgttatgatggaaggctgctttgaaaatggctgttttaccttataaggttaaaattttgatccatatgttaagtgatagaagattttggtgcaacagtagtaggatatatttctcctagaacatcccttattggcttacatgattttattgccttttaatagatattttgtcattttggccaaacaaaagacactgagtagttacacttaagttaaaaatgaggggaaaatcattattttaggtgtggagccatttttattataaaactttctcaaaataaaaaaacattgaatcatttcaatttttgcagtccctgtattagtatatgaatacatacttgccatttgaattaataacatgaaaagagtatactgtgtttttaaatccgtgtttctttgaatttaaagggtgtacaggtctttctgtagggaaaattattccatgtaaacatttcaactctgtatgaaaatgttaaatattgtaagaaagttatcctctcattttttcactgctatgatatatttattataaaat

SEQ ID NO: 34921 - DNA, 1026 bp, Homo sapiens
cttttcccttggataccatagtttctttttttcctctttttattttctttttcacaatgaaatgagctttatgtttgtttctaattattactacaagatataatcatgtagaaatttaggcaaacagaagtttgtggaagaaaacgtcacctgaaattccacttttcagaggtaaccacattggacatttgcgttaaacaatgagtttaacccaaatgcgtatgtttgtgtatgcatagctaccttgcacctgcctacctgcctgctcccttacctgtctacctacttccaagctacagtcatctctgcttgctattttgcgacctgcccttgtgtcattcaacattgtggcaatgggatctttccccatcaatgagaaatatacacttttatgttctcctgatttatggtgcttaatctcaaggataatctgagaaaacaaataaccaaacttctttgagttacgtttaaataactaacttagaattagttactgattggttgcttagtaaccaaaaagctatagactattaaggattttagacaattgatgaagcaatgaagttgtggcaaagtacattgttattgaatactgatattgagtctatagtaactagatttgtttaatgaccagaatataaaatattaatagctagatgaccatgttactgccttagcaatagcttacaaaatgtttatcatttgtaactactttatactgtttatttgtcccattgcctccaccccactgtcactgtctcagtgtttgctctccagggctatttctgtaacctcctgtttcagcccttctagtccacacctctgttggggggcacttaaaatcttcaggagtatcttatcatacccataatattgaagttaaaacccattaatgtataggaaatgtcataatcatattataaagaatatgatgcttttccttaatccctgcccccagccataaatatgtgcacacctttttttatgtccttggtgaatgccagcccaacttttaaaatctgcctc

SEQ ID NO: 34922 - DNA, 1084 bp, Homo sapiens
attaatatccataaacatacctagaagtttgttttgcttttaatttaaaggaagcagtaaccacaaagcttccgctcagggttttttctttcttcaagtctccaagggctcttcagcgtcacaagccagcaactctctttgcattaaaatttcaaagtttaattaatataattaaaagcaacagcaagcagcagcctgtgaagattttgctcatcttttttatgccttttgacattgaatgacctattactgtatgcgcattacttggattttgaggggcactctaccttggttatgattcagtagaggaaaaagaccacctttcttcaatttacaaattaaatcttctggagggtcgctatcacaaaacattgacgatgtatgtattataattttttagaaaaaccaccatcgtgtcacgtcgacgatgccaaattatgttagcgtgagcagaaacaccgtgggggaggaaggcagcagctgaagaaaaaagctcaaatgatctagtcactttcgatactgtacttcagatgcgaaatggatattcgagtggaaacctgacaaagtgcgcctgctttgatgtgaactggtatagacaatgaccagtggctgggtcagtgggatgtctctctgtgagcacaaaggcttatcaaatgacactaaaaataagttcaacaaccatcacattggaagggagaaggcgaacatttcatgtttggcgggcatgtgagtgcacaagatggaaagagcgattggagcatcctggtataattacccccattgtgctcttaatggaaatttcaaaggacgggagtattctgttggttggtgtccaggtttgtggcactgttccaagaggccttacacacacacacaaatatataattttctatacatatatatcctctagcttgaaacttttgctcaagtttatttatgtcactggctggctggatccaaagtcatgtgtccacacattcataaataaaaattttacctatgcctgtgctaccatttctttaagcccacataaagctaatgccttcttgggttgaatatgcagttgttatgcttagtttcaggg

SEQ ID NO: 34923 - DNA, 1026 bp, Homo sapiens
ttttttttatttattaatctagttagtggtttatcaatcttgtttattttttgaaagaaccaaattttgattttgctgatcttttgtacagatttcatatctcagtttccttcagttcagctctgattttggttttcttttcttctgctagctttggggttggtttactcatgttttcctcgttcctctaggtgtgatgttagcttgttaatttgagatcttcctaacttcttgatgtaggcatttaacactataaacttttctctgaaaactgctttagccgtgtcccagagattctgtgatgttgaatctttgttttcattggtttcaaagaatttttaaatttctgccttaatttcactctttgcctgaaagtcatttaggagcaagtttgtttactttccatgtaattgtatggttttgagagctcttcttggtattgatttctatttctattgtactgtgttctgctagtgtgattggtatgattttgttgtttttaagtttgttgagaattgcttcatggccaagcatgtggtcgatcttagagtatgtgccatatgcagatgagaagaatgtatattctgttgttgttgggtattctgttgatgtctgttaggtccatttggttaagtgctgaggttaggtctcaaatatctttgttagttttctgcttcaatgatctgtccaatactgtcagtggagtgttgaagtctcccattattattgtgtggttatctaagcttcttcataggtctctaagaacttgttttatgaatctaggatctccaatttgggagtgtatgtatttaggagagttaagtcttcttgttgaatggaaacttttatcattatgcaatgctctttgtcttttttgatcattgctgatttaaagtctgtattgtctgaaataagaattgcaacccctcttatttttttgttttctgtttgcttgagtgatcgttctctattcctttactttcagcctacatatatatatatatatatatatatatatatatatat

SEQ ID NO: 34924 - DNA, 1028 bp, Homo sapiens
agctccatcatttttgttgttcaggtaaaaatcttttgagtcattattgatttctttctctctcttagacccagtctatcaacaaatcttagctctaatttcaaaatttatccaaaatccaatctctgctttctacctatactgctaccattctagaccaagttactgccatctcttgcttggattattagtctctcaactggtctttctgtttccatccttcacaagagtgatcttgttaaaacagattattttatgtcatctcttcacttaagattctctgtgatgagttctttaccccactcagagtaaagtctaattagtgtaatactgtaccaggttctacagggtctggcctctcattccctctcagacttcatcttctatttgctctttctactcagttatggtcacactggcctctttgctgttcttgaccacacctgcacactcctgcacctgcacttttatacttcttgttgcctctgcttggattgctcttcccctgatgtagaactgtatgtgaacttagtctaagtaaaacaaaacaaatcctaacttaccctatttaatcatgcaatcttcctctttgagtctgtaacctgtatacctttttcatgttttattttttctccaaagccaattgtttgtctgttattatgtttctacttcctgctaggacacgttttgtcttgtttcttgttgtattactagcacttaacacaatgtctgactcatagtagatttactaaatgtttggtggataaaaggatgaatgaatttttcttaaatatttttgtttaccagttaacataacgatctgaaagaggtcatttgattggtgggatcaggtacttgtaccaggatagaggaaaatggtcagaattttattttggggggccatactatttaaagcagaaaaaaaaaatcttggctttcaaataatagtgactagttaaagaaagtaatttactttcttctctgaagtagttataaaatgcattatgcctgttttatcccaggcactg

SEQ ID NO: 34925 - DNA, 1050 bp, Homo sapiens
catttggtgtacattatgaggaaaaatgtacaatttctcaattatacttcattttctccaaatataataattctcagttgattcagaagcatttgttgggtactgggctgtgttcaagacactttgctgtgttttgtattaccaaaatgggtatggtccccaaactcttcagagcttacaatttttaggatgtgtatttggaaaattaatagaagaattagtaagatattttttctattattgttgcatagggaaacatttcatttgccatcctggatttctgaaaaatcaaatggaataaatatagactaagactgcttggcagatatacttcatgtcttagtaaaacaagaaagtgggcaaataaggctaatacaaaataatgtttgcatcagagtgaaaattataccatgaacaagtttcttcaaattctgaaatagtctatttattattattttatctcataagttcaaggcagtttttataggaagcttatttattttctaagctagcattaaatgattattttgagtttgtggtgaccaaagacaacaacgacaacagcaaaaccaaaaagtagtggcagataaacttgtttccaatcacaaactatgcatttttggaattttttctatattgtaatgaaacagcaagactgctaatatgatttattttaaatatcagaattgtgagatgtggaagaaactaaagttttaaaaaagatttattatatgagagtatgttcatcaacaatgtaatcagaactatccatctgttttgtttggagctcagaagactaaaagacaatgagtatgatttaccttcttccacagttctcttagggtaaaagtttgtttagaaatttgtcatgtgtgcttttattccttgcttacttgcaagacagaagagaatccatatttagaaactagtcagagtggtgtgtgctgtattgagcaactgatattttgaagctctaagcatttttaaggaatgaactcaaccaaaacatgtgattataaaatagcaattgttcttagttgaagtattacc

SEQ ID NO: 34926 - DNA, 1041 bp, Homo sapiens
aaatttaaacaaaaaaatcacagccatttaaaaaaatgccatctctttttacagttgggctcaaaggctaggagtgaaagcatttctagttaaatctaccttttattcaagaaaattgggattcttggccgggcgtggtggcccacgcctgtaatcccagcactttgggaggctgaggcgggtggatcacctgaggtcaggagttcgagaccagcctgaccaatatggtgaatcttttgtatccttttaaatctcaagtttgtgtggtcagagtggcacatctctaggtacctaatagagaacaaaccaaatgtgtcttccacacagcagcccttaaatattctttaaatagctgtttgttttttttgtttctgtaggtacctgtgtctccaggtttttaaccatttctcatatgattacatggctttaaatcctcttgccattccaattctgctcctgtgaacttacttggtcctatttatcagcattcatttctaggtgtggaactggcaaaacccttatggtgcagttgctgggtctctgaattaagaatattttgaaaggaaattcgaaaatattattacctgagaagttctcctgctaaaaacatcattgacaagaccttcaggaaaatgaacttttgctttctcctactaataatgtgtacattcacttagctcatggaaatctgaagtccttataatctgattttcactatattagatttgtgtaggggctacagatctgaagggaattatccatgaataaatgagaagttgaagcctgcaaggcttctttcttgcatgcaggcataaggaacagagcagtaaaatatcctaagtaagattatttctatttctatgaaagagtgattgagatagtcaatagtggagcatcttgcaggcacccctgaatgcaaaaatcatgtaaggtaatagcctctgccatctagaatttataatccagctataggcacctggcgtgaatttatgagaagtttaaatatcaataagaaacagtaaatgatcagcactgcatgaa

SEQ ID NO: 34927 - DNA, 1038 bp, Homo sapiens
aaacatttccctatgattttcgggatgaaagaatgatgagaaacttaaaagatctggctcaccgaatagccagtggcgaagaggttggtaacctgaatttagcgcggctgctggaattcccaggcagagcctgggtgggaaatggtgccgaattatgcatcctaatctccactgcttcctctctgttttgcctttgggcaagccctccacatcacatattggtctatttagtatgtcaagtgagaatgattataccatcccacttcaaagggatatgatctagagttttatgtgattaatttggggctatgttcatgtcaactcatgcacaggatttatgttgcaagtatgttttaattttactttacttttaccttttttcctcccaaaaaggtttgacacagctagttagatgataaatggcatgttagtagacataaacactagtggatacaaagtaaataacattattctattaaccgaggataaatagtagattaataaatcataaatagaaatagacattctgggccatggcagaaagaaaataaatacgctcctgttgagaatgagtagaggaggacaggactgctgtggtatgagtttaagttccaggtaaaagggaaatacagctggtcatgtaatattcactgtcagaaaaggggaagtatagtaattattgagggacttaaatgaaaaatttagaaactttcttctgaagaactttgtatagggtcatagaatgagatcctacaaactgctctttatggtgtttacaacataccttcctggatagaagctgagttcatagattcatgtgtaaattagcaaagataattcttgggggaggagaagactgagaaaatgaggcaagtcttccagtgctcagaagttgatttaaggatagactctagtataggtagagattaaaagtaagtctcttagataggctttcataaatatcacttccctcagttgagcctttgataagcactaactactagctgtgacaaattcaaggttatcctttttgaagca

SEQ ID NO: 34928 - DNA, 1023 bp, Homo sapiens
cagagcctcactctgttgcccagactagagggcagtggcacggtcttggctccctgcaacccccacctcctgggttcaagcgattctcctgcctcagcttcccaagtagctgggactagagggatgcgccaccaggcctggctaatttttgtatttttagtagagatggggtttcaccatgttggccaggctggtctcgaactcctgaaatattatcccccccattccccagtttttttagataactcgtttttagtgtgacttcagaagagactgggcatgacacagattattttttgtagcttttttgtgtaggtgggtgattggtgtaaggtttaggagaacaaaaaaggacaggtaaatcaatattaacagggagctcggtacccctgcttctagaatttgaccaacaaagtgaaatttacaagtagtttgctggtttattatcaaattaacctgtgtttactaatgggtagtgtcatgtagctttgatctcaattctcaaaacggttttgtagactctggttggaatcccactttttctcaagtaatgagctttctaggtctgttgttctgaatcagattttgataccttttggtttagtaggtgtctgctaccaggtgagttaatttctcttccttgggtcctgggtttccttttttgtctgtttctttcctaaccttcgatgtgtatagggttgcaagtcatgtaagcataatactctttacatcctgggatagtatttgcttctttgtacttggttgtgcacagttgagaatacagtgtgggtgtggaacacctgtccaggtgccagttcatgctgacagttttgaaaggtagtctcattagaatccagttattaagcctgtctgttgtatacatgagaaactaatttagtctctgcttttactattttagtgcttgggaaagtttctttttgtaattaagactagtactttaaacgtatgtttagggcctttgaggtattaggaattttggaaactggaaagatacaatctttc

SEQ ID NO: 34929 - DNA, 1061 bp, Homo sapiens
tttgagacggagttttgcttttgttgcccaggctgtagtgcagtggcatatcggctcacggcaacctccgcctcctagattcaagcaattcttctgcctcagccgcctgagcagctgggattacaggtgtgtgccaccaggctcggctaatttttttttttttttttttagtagataatggggtttcaccatgttaggctggtcctgaactcctgacctcaggtgatccacctgacttggcctcccaaagtgctgggattacaggtgtgtgctacactgttctttgacccagaaatttattttaaatcttggtcttacatatggaatctttcttaacgctgaaatcacttggaattttaccattgttcttatggttcacaactgtatcttgggtttatttaatacattgtactggtcactcactgaatcttgtcattgtataaacttgctcttcagatacgggaaatattactgaactgattcttctttccccatctaccatctcgatctttgttctctggaattcttgtttgggtataagccctggacatgtgtttctgttaatttaatctttctcaatttttgtagataccaggtcttgctatgtttcccaggctggtcttgaactcttggcttcccaaagtgctggagttacaggcatgtgccactgcaccttgcctaattgtcaacttttaaaaacatcccaaaatttaagttgtgttagtttcttttttgggtgtgggtgtgtgtgtggggtggagttctctcgtcgcccaggctggagtgcagtggcactatctcggctcgctgcaacctctgcctcctgggttcaagcgattctcctgcctcagcctcccaggtagctgggactacaggtacacaccaccatgcccggcttatttttgtatttttagtagagacaggtttcaccatcttggccaggctggtctccacctcctgacctcaggtggtctgtccgcctcagcctcccaaagtgcagggattacaggcgggagccaccgcgcctggccaattgtgtcagtttctaagaccaccccctc

SEQ ID NO: 34930 - DNA, 2216 bp, Homo sapiens
cattctgaatgcctgccattgtatgcattcactacatatttggtaaattatttgataaatgattgctcagggtgaatttttcacacttgggaattaagctacccttaattttttgagattgtttaaaattaggtactgttctgattattagtatgtaaccactaccgttctggttctaacacttgttttattttagaccagcagagtggttatgggaaggtatccaggcgaggtggtcatcaaaatagctacaaaccatactaaattattccatttgcaacttatccccaacaggtatgttctaaaaatagtttttttttgtcatttacaatagtagtttttataatctatattgttcataaaacaatgcttaatttaagagtttcacagcacccagaagtgcttaccatattataacatagtgactttcaaagatatgtaacacaggtgctcttaagcttttgcctttttgtcctattattaacaagtcagtaaagttaacaggtaaagtactgctaatgggtacaaattaaggaattgcagcaaaaaagtattgcctactaactctgacattataccttgtttgtacccgccagcgggaacttcattgcaggccctgtgtcgcgctgacttcacgattctcacaggcccgctcaatgcggacagggtacgagatgctcacgctctcgaatgctgccgtttggtatggtctcttccaacatcctgtatcagcattataaaataaaatggatacttcaagctttgccttcacttatttctttgctttttaaaaactatttgtaatgtaattttaatgcattttttacaggcccagtaatggttaaatacgtcagcttactgaataattttaactatttattcttctaaggatacagcttgtctctggattttccagtcttaattttatattttattaatctattttaatgcttgcttttcccatttatagacgttgtagcagtaattgcaagaagttcttgagctgaattcctgttgtgacaacttcctataattacagtagataactttttcttttagtcgtatataacttttctataacttgtgatggacaagagatatgcttatccaataaaataagcttaaatattagatgctcttgggtcaaaatgtccttttaccaaattgacctttttatgagttctttgggtaaatactttaaagctttttatattttaaagaatacttgtaaaagcatatcacatcttaaaccagtggtgcacatgtggatttacagctcatggactctactgttcagctttaatttataaaacatatcacacatttaatgttatacagtatttacatatagtggaacatagggataactcagttttatgtaaatttttgttaagtgttgtagcctgcccagagtgacttctattttttcttctttgtctccaggtggtgaagcagtattttccaatttgaagattcatttgaaggtggctcctgccacctgctaatagcagttcaaactaaattttttgtatcaagtccctgaatggaagtatgacgttgggtccctctgaagtttaattctgagttctcattaaaagaaatttgctttcattgttttatttcttaattgctatgcttcagaatcaatttgtgttttatgccctttcccccagtattgtagagcaagtcttgtgttaaaagcccagtgtgacagtgtcatgatgtagtagtgtcttactggttttttaataaatccttttgtataaaaatgtattggctcttttatcatcagaataggaaaaattgtcatggattcaagttattaaaagcataagtttggaagacaggcttgccgaaattgaggacatgattaaaattgcagtgaagtttgaaatgtttttagcaaaatctaatttttgccataatgtgtcctccctgtccaaattgggaatgacttaatgtcaatttgtttgttggttgttttaataatacttccttatgtagccattaagatttatatgaatattttcccaaatgcccagtttttgcttaatatgtattgtgctttttagaacaaatctggataaatgtgcaaaagtacccctttgcacagatagttaatgttttatgcttccattaaataaaaaggacttaaaatctgttaattataatagaaatgcggctagttcagagagatttttagagctgtggtggac

SEQ ID NO: 34931 - DNA, 1316 bp, Homo sapiens
gatagtaagatcagtaacacctcagttaatcaggtatcttggaggaagtgaagaaagaccctaattcaagggacagttaattggccttttattccaagaatgggccttagtggcagtatcttaaaagcccacaagatggagatgtttcctaatgaaaggcctttaatttctttatagagctgagttagtgtcacatcccagtccccacccatgacccttccccagttaaaaagaagagaaaatgttgagcaagtctgatttgattcccatggtgacatttttagccattatgtaacaaattctgacagtttacccttaaaattaaaaacctccagtcctgtctttttaaagggtagaaagaaggttaggtataggatagctttttatttatttatttatttatttttgtacaaagggagcctatgtaaagctgccagatctgaactttctggtgttttgctgtaatgttagtaagatttcgccttaaaatattttattttgagtatatacgtttggtcttagagtgtcttggtggatttccgcttaccacccatcactttctgcattttaaaggcttaaatactttattgctggttaactgaggttctactgtaaacgaatcatctaagttaattagtggattgtacttcaatggataattttcactaaattgtttatattgcacattacttttgtcttaaggactcttagcacatcaaaaaaattggctcacaacttaattgtgagatgtagaattttccattttatgtgctaagagttttgttaatgagagaactgttaaaatagaaaaggagcttcagcatagacaccaatgctggttgctgagatcagtggggaactgcatagcattttaacaagtttaatgaacatttggaagagaaatttgaagctaagattctggtttttttgctgttaactttttaatctaaggaaaacttttatgtacagtatttttactttgggtatatgtttatcttttagcaagttgaaagacttaatttgctgcttgctcactattttgtaattatttgggagcagcagtaataagccagctttttggaataggatgttcctgatgtgtggttatgtaggaagaatgatgttttaatatactgcccagtaaactggtgcagtttggaaaaggtgtgttattgatgtggataatatttaaggcaattttttttaagcattttaatactgctttttgtctttacaggaaaatgtttataggaggccttagctgggacactacaaagaaagatctgaaggactacttttccaaatttggtgaagtt

SEQ ID NO: 34932 - DNA, 1013 bp, Homo sapiens
ctctactaaaaatgcaaaaatcaagtcaggcgtggtggtgcagcctgtaatccctcccacggaggctgaggaatgagaatcacttgaacctgggaggcagaggttgcagtgagctgagattgtgccactgcgctccagcttgggcgacagagtgagactgtctcaaaaactaagcaaccaaaaacagaaaaagatggaatggaattaatatgttccatttagtaaagatggaatagaattggtccagtttgtgttcattgtagcatattcacctatttggtcagcaaccatttttttttttttaaagcctaagcataccctgagaacaacaaccttttttgattagaacagaagaaaaagccagagtgttcttgggctgccaaaatattaatacgtttgtctcaaagacgagccacttaggtgcttgcttagagacttctactttacacagaatttgaaaagtttgacagctggctacttactctgcaaaacggaagggagactttttagaacagcaactggtgatctggcaaaaatgaaaagtagaacttgtgaagaaatgagatggacttggtgtattaatagctaattttagaagaccctgtggatattctaaatcagcataatagtgatgtctgagccatagtgttaaattatgattactgtatttgaagtataagaaggcagaaaagtgtgatgctgttagaaaaaaatctcatttcaaatgattgaaggttaaaaacaattggggaaagattagagagggcaggcggtgctttaagggaggtggaataatacttggctccttattctccaaaagtgctggatagctgaagtttttaatattctggataattgatatttgattattagtttaggagggatagcatcttcagtgaacccttgtagctctaaggtaggcatattaaacaactaccatactaaaggtggggagtacgtttggagagcactttgctgggccagctgatgatatgcttaggtgatatttaaga

SEQ ID NO: 34933 - DNA, 3465 bp, Homo sapiens
aaaagaaaaaaaaagtttatttaaaaaactgtcatgttggccgggcgcggtggcttatgcctgtcatcccagcactttgggaggctgacgcaagcgaatcacctgaggtcaggagttcgagaccaacctggccaacatgttgaaaccctgtctctactaaaaatacagaaattagccgggcatgatggtgggcatctgtagtcccatctacttgggaggctgaggcaggagaagagcttgaacccgggaagcagaggttgcagtgagccaagatcgcgccaccgcactccagcctgggcgacaaagcgagactctgtccccctcccaaaaaaactgtcatgtttcatttattagatgtttattttttcaacttcgctttttagtagtcatttagttaggttcattctaaagtgtgaagtaatgagatttaatacagagaagtctctgaaaatgtttggtccattgtatattagtcttgaataaatggaattctttttcacacttaccttgaaaatgtcatctgtagaaagctgggggagaggaatacctattctttaatgatggggaaataataccaaaatttatatttttattgactaaagtgttttttggggaagatttgttattggctaaccttaatgtctcattagttttaaatagttaaaaaaagtgggctgggtgcggtggctcacgcttgtaatatagcactttgggaggctgaggtgggcagattgaacccaggagttccagaccagcctgggcaacatgatgagatcctgtctctacaaaaaaaaaaaaaaaaaaaaaaaattagctgggcctcgtggtgtgcacccatagtctcagctacccaggagcttgagatgggaagattgcttgaacttgggaggcagaggttgaagtgagccaggatcacaccattgcaccacagcctggcaatagagcgagactctgtctcaaaaaagtggttttcatgaattttataccagatcagatctaaaaaggctggttagtatttgaactcgatgaaagcttgtcaagctctctcccaaggtagttttcatacaacttgtaaaataccctaacgtgtgatattatctagttgcattgtaacctcctcccttccccttaggtaactagtgacttagctttagtttgtcattttaggattttagaagaataattatgatggataaaatactggaaaaattcagtaaggatttaatggtgtgcttgagtaacattactttaaaagatgacagtgattggtcatttatgttttatacctgaaatgtatatcaggttgacattctgttgtattttttaaactgtcagaacttgttataaagccatgtatgtaagatcataagttgttaggaagtgtttaaaagttaaaggattggctgggtgtggtggctcatgcctgtaatcctagcactttgggaggctgatcgctatgtccaggagttctgtgactagcctgggtaacagagcaagatctcgtctctaaaaaagtaaaaataatacgaagttatagaacatagaaaaagaatactattccaaaattgggagtgagtataatggctaactttttaccttgaataaggtgtttgacaataaagacttattaggggaggtatcttggaataaaatagttaatattgactgggaatgttaaaaacctagtgacctaaatagtccagagaataagtttattgatggggaaaagccaggattattaaatcggaacattttccaccagccaggattgctccatgtatatttccttttatgttttaaattattctttactaaaattactggcataaatgtagggtagaccaagtcatcaaggtgattttggaagctacatttaaagggtcttagttgaaataccacctaatttttagtttatatatttttttacatggactatttaaaaatttctgggttatttcaagttggcagcattgaaaatattagaatatgtttatataaaactcattgtggccttttccttttaatgttggaaagtttataaagcctatgcagttttaaaaaattaagccattgagtaaataaaaagtttgctttattaaattatgtttagatagtgcttatagtgctttaccccttcaaaatagtaacttctatcaatcatttaggatgtgtgtcagactattctgtgtcctttaagtgtgttaactagttttaaccctctgcaaatatctgaggtatgctctttttacagatgggaaaacaatcttggactttaatattttttcttaatgttacacaattagtaagaggcagggggccaggtggagtggttcatgtttggaattccagcactttgggaggctgaggtgggcagcttgagcccaggagttggaagactagcctgggcgacatagtaaaacctgatctctgcaaaaatattagccgggtgtgttggtgggtgcctgtagtccgagctactggtgaggctgaggtgggaggaccaactgagcccaggaggtcaaggctgcaatgagctgtcatggagccagtgcactccagcctgggagacagagtgagaccctgtcttaaaaaaaggcagcagtagggtttaaaccccggcattttgtctttattgcctctaaacttaacttgctttaaaagatgataaaatgtcccacaaaggagcctaaattcctgaatgatactgcatatcacttggatagttatctatgctgagttgtataactttatgcttgtcatttaattttacaatttggtggaagccaatgtgaaagcaaggagacttctgttgtggagtaggtgttttaaactgaataccatattcagccttggggtgctgaatatttagttcacagctaggattaagatactcaactatgttaataaaatacagtagatgaagtcctgcattttaattgggattgattcacttagaactaaggatcaaagtttaaacttattgcagcgttaggggccatctttgttgctagttgaacaagtcttggtcgtttttaacatggctccttagggtattttctgaagttctgtctacttcattggaaagtgtttgcactacgcaggagtgacagcaatatgaaatgctttgtattcaaggcagcagaggtaatctggacagacagtacatgtgctttaaaagcaagatacagtcatagaaaatatgtagataatttagccgggcatggtggctcgcgcctctaatttgggaggccgaggcaggtggatcacgaggtcaggagttcgagaccagcctgaccaatatggtgaaaccccatctctactaaaagtgcaaaaaaaaattagcctggcatggtggcatgcacctgttatcccagctactcaggaggctgaggcaggagaattgcttgaacccgggaggtggaggttgcagtgagcctagatcatgccattgcactccagcccggg

SEQ ID NO: 34934 - DNA, 1032 bp, Homo sapiens
tttgagatacacatactttgccttaaatctggggttttttcccttaagccatgtgaccctttctacaaactcagtgtatgtttttaatatttcctgggtactctgctatcgtcctaatacataatattagggtaaggctgccctaatacgagaacattttgagtatactattgagtatacatttgagtatacatattgagtatactatttatgccaacgtgaaggatgtgattagttttagccttcaagtcataatacataccatgcttgaaagcatttaaaaaggaatagagtaattttttttcccattccacttggaagctgtgtacctcaagtgtgtgcacatttacaaatgggtgaaacataacttatgttagtccaagcttgatttgacttcagttctgcttcaacgttttagtagatagggcactgaactggatgctgaaagcgtgggatctctttctgttgcttcacttccaacagtgtggtttcaggtaatacgacatgtttgttacttggtttgctgatctatgtgttggaaacaatgctcaccacaggaggattgactacatagcctgctttcatagcttgtgtgtatttatccagtgccctaatagttgatactgccagtgatttactcctgtggagtaaaggtaagcatgttttagtttctggagtattatattgtacgttggagctaggtatttaagaatatttgggggtggggagggaagactccaatttactggtggtgcttggccagtaatcaaggtgacagtttaagtattgggtcttgcactgtaaactcctgcttatctagacttcagactaccacagagcccacacagccaggaagtctgtctccccatttagtcttatgagcaagatagatgaagccatgagaaaatatactcaaaaagcaaccaacagacaatgtcatggaatgaatctcctacagatttttccttacacttttgaaaagtaacatgattttaaaacgttggaaaattcatcaaggtacaaatcattttc

SEQ ID NO: 34935 - DNA, 1043 bp, Homo sapiens
tggttgctgtaccggttgttaattccctagccattcaaactcctccccacgacactctgaagcagcgacggcacagcgggaagaatggtaaaacttttaaattttatttctgtattataaaggtttcagtagtcataatatgtagaggctgtgtattggttagttgcccattgatccccaggaaattctagaccatagtacatacagtaggtttgtacctgggatatataccttttataggcatcatgtgtaatctttgggcaaaattgatgccgttacatggtatttggtctgtggtaatgcatgtagttgcagtttggcaatttaagctaaacaattagtaacgatatttttatatcgagcaagaaaaaatattaccgtaatcttcacatttgatttattttaagatgaaaaatatttttgttggaatttaagtttaatggctaaatatgaagactccttgatataaaatattgtgtttaaaatgtcatgcatgttatactgaaatattctggagatgtctgaagcagttctttaagcagcactgtgtattatggaaaaatgtttgtcttttacctagcatatttgtaaatagacctttaataagaagtgtgtgtgtgtgtgtgtgtgtgtatatatataccattaaaaggtgggctaatgtggctttccactacagctcttaccagattttttattttcagtgtgatttggctggaatattaataacagttggttgacatgtattcacaattgcatgacttctctttggaggctggtaggttgagtattgttctttttatccatcctttcccctcccctaaatgtcagtctttctgcttttaggattatatttgaattttcaggggtttatacaccaccactggagagtagaaggccactaacttgcaggcagttaacttatatctttacaagctacattctattttaagagcctatttagggtaacatttaaagatttgcttatcactgtattctcatccactgaaatcagtccagctttaccttggagaaaaagcaga

SEQ ID NO: 34936 - DNA, 1050 bp, Homo sapiens
gaccgggacgcgccgttcttccgtcggccattttaggtggtccgcggcggcgccattaaagcgaggaggaggcgagagcggccgccgctggtgcttattcttttttagtgcagcgggagagagcgggagtgtgcgccgcgcgagagtgggaggcgaagggggcaggccagggagaggcgcaggagcctttgcagccacgcgcgcgccttccctgtcttgtgtgcttcgcgaggtagagcgggcgcgcggcagcggcggggattactttgctgctagtttcggttcgcggcagcggcgggtgtagtctcggcggcagcggcggagacactagcactatgtcggaggagcagttcggcggggacggggcggcggcagcggcaacggcggcggtaggcggctcggcgggcgagcaggagggagccatggtggcggcgacacagggggcagcggcggcggcgggaagcggagccgggaccgggggcggaaccgcgtctggaggcaccgaagggggcagcgccgagtcggagggggcgaagattgacgccagtaagaacgaggaggatgaagggtgagtaaggggcatcccaggatagtcaggcccaactagtccccctccccctctttattcccccgccattaggcctggttcccgctctcagcccgttctccgggcccccatgcagcctccttgcactggtctccctttttctatgttgggttccccggaccttcatttccttcttcctttgcctgcttatcgcccccctcccccatcacacacgtttccacctttagccgtcaccatgctgctcctcggcccgccctcctttcctccctcgccatgggtctcctcccaccgacttagccgccaggattttttcccgcctgtcgtggggtaccttttttctttccatgctgtcccctctttttccctttttctacagtcttgggcataaaaacacagacacaaacagcttctctgtttgtattactaaggtttatttggtgcttctccaccatcctgaaacgatgcgattgtttataagcaca

SEQ ID NO: 34937 - DNA, 1034 bp, Homo sapiens
gctgcgtgctgtagatcatgcctgtaatcccaagcactttgggaggccaaggcaagtacattacttgagtccagcctgggcaacatggcaaaaccccgtctctacaaaaactacgaaaattagctcgatgtgatggtgcacacctgtagtcccagctacttgggctgaggcgggacgattgcttgaaccagggaggtgaagtgtgcagtgagtcatgtttgcgccagtgcactccaccctgggcgacaaagtgagaccctgtctcaaaaaatcacaggatgctaaacttcaccaattaaaaagttgactaagctggccgcacgcagtggctcatccctgtaatcctagtactttgggaggccgaggcaggtgaatggcttgagtccaggagttcaagaccatcctggccaatatgtcaaaaccccagctctactaaaaatagaaaaattagccgggcgtggtgctgtgcttaggtgagaggattgctggagcccaggaggtagaggttgtagtgagatttgtgctccagcctgggcaacagagtgagaacttgtcaaaaaaaaaaaagttgactaaggccaggtgtgttggctgcagttgagctatggtcgctccattgcactcttatctggcctaggcaacagagtgagaccctgtctttaatttttttaaaagttgattcaaaaacatgtaagtgtatgaataatttttagttatagatgtgtgtgtataccatttgaattgattcttgagtagttagaaagggtcattcatagaaaaccccctttccttaaactttcagcgaaatagagttgacatctaatctgtggtttcaactttaagcaaaaacaatctaaatttatatattttttatagtcactagaaaatattgtttataaatatataggctgttcttttaggattggttggggtcttacatttgtcttgaaatagattagatgtggaatttcagcaagatttagttaatagcaaaaaataaaaatacaccttagactttactactttttataaac

SEQ ID NO: 34938 - DNA, 1041 bp, Homo sapiens
gcttgctttttctttttatagctaatagtgaaatctacaaaccaaaacaagaacttttaaatctgggatataaattaaagatcatatgcacagatcaatttatgttcttgtaataaacttattagaaattggtgtttgtgatagcattttacttgggttactagagatgcttctagtagaccttaatctagcatagttgaacctctgaatatgggaaggttgtattcccagattctttcctgaatagatttgaatttaatgtcatttgggaactccagggtgagtttattgactacccaaactgtattttaccaataaatatgcatatgatctttaattattgaagaaaataaagtgaggacttaaaacaattcatgaaagtggacctttaaaagcttgtcagagttgcacaaatctaactggtattttgtttttgtttttaggaggagatgttaaagtaacccatcttgcaggacgacattgaagattggtcttctgttgatctaagatgattattttgtaaaagactttctagtgtacaagacaccattgtgtccaactgtatatagctgccaattagttttctttgtttttactttgtcctttgctatctgtgttatgactcaatgtggatttgtttatacacattttatttgtatcatttcatgttaaacctcaaataaatgcttccttatgtgattgcttttctgcgtcaggtactacatagctctgtaaaaaatgtaatttaaaataagcaataattaaggcacagttgattttgtagagtattggtccatacagagaaactgtggtcctttataaatagccagccagcgtcaccctcttctccaatttgtaggtgtattttatgctcttaaggcttcatcttctccctgtaactgagatttctaccacacctttgaacaatgttctttcccttctggttatctgaagactgtcctgaaaggaagacataagtgttgtgattagtagaagctttctagtagaccatatttcttctggattgtaataaaattgtta

SEQ ID NO: 34939 - DNA, 3126 bp, Homo sapiens
atgaattaaattgcctacacttagggggtaaatgtccctgtttttatttcacgatttaattccagaactgaaggatcatttgagttattgttaattttttttaaaaacacttttatttctagtaaaatgtttattggaggcttgagctgggatacaagcaaaaaagatctgacagagtacttgtctcgatttggggaagttgtagactgcacaattaaaacagatccagtcactgggagatcaagaggatttggatttgtgcttttcaaagatgctgctagtgttgataaggtaggaactatgttttgcattgtgctgcttttgtggtgttttgcaaatttttctgggggttatatggtgctgtcagattaaataaatctgtcttgtaggttttggaactgaaagaacacaaactggatggcaaattgatagatcccaaaagggccaaagctttaaaagggaaagaacctcccaaaaaggtttttgtgggtggattgagcccggatacttctgaagaacaaattaaagaatattttggagcctttggagaggtgtgtgattatgtttacacatgttaagcttgatgtgtttataaaatgttcaatccttgtccgatttatgcagggcagattcatgtttcctgtaagagtagaattaaatgactgctcaagtcgcttccagtgactgtaccttgatttcattgctgctctgatggaaacccaactatctaatttagctaaaacatgggcacttaaatgtggtcagtgtttggacttgttaactagtggcatctttgggtacaaaataatattaatttctctcaatgcttcaaatatacaacaaatcactgtaggctgatgttgatcataaagcagtgatgtctgtatagaagtcacccgataagaataacatgtttaagttgaagcctgaaaaggcctttggcattctgacactgtaacgttttacaattatgggatgacgttgagtgtgcatctcgatttcagattgaaaatattgaacttcccatggatacaaaaacaaatgaaagaagaggattttgttttatcacatatactgatgaagagccagtaaaaaaattgttagaaagcagataccatcaaattggttctgggaaggtaaagccatttaagcactttaaatgaaaatttaaataattgaaataatttcttgatgtggagaaaaataaaatgatttaattttagaacttcggtaaaaattatactttcatgttttttgtttatagtgtgaaatcaaagttgcacaacccaaagaggtatataggcagcaacagcaacaacaaaaaggtggaagaggtgctgcagctggtggacgaggtggtacgaggggtcgtggccgaggtgagacttaattcttgaaatatgactccgtggtttatttaagctgtatactgctgaatatgagtagtcctgtaccaaagcaaaactttaaacttaaaaccattccagcggaggggggactgttcagcttagtggaggttgtgtgtggtggttttttgttgtgagctcactggtttcaaaaaactgttaaaagtgtggccactttgacaattagtgtcatcactgataggaaaagtgtaccattacatgatacaccgtggtgtgataggttttcttgggcaggagtccttgttttaaacagaacagtgtacctgtcttcggctttaatggaaaattgaatgattttccattaagtttaggaagtttgatactggcacaattggactttctgcctccttttttataacagctggaaaaatagtttttcaagcagatagcaatatatatgtccattctgccctttaagatttgcagagtgagagacaagaacgcatcattttatgttagaattgggggtcagaagttgtttcctaacaatcattgtgcattgtttcaggtcagggccaaaactggaaccaaggatttaataactattatgatcaaggatatggaaattacaatagtgcctatggtggtgatcaaaactatagtggctatggcggatatgattatactgggtataactatgggaactatggatatggacagggatatgcagactacagtggtaagaatatttaacttaattttataaagcagtggtattaaaattcattgttaacatacaatcctgttctgaaattgtgtgtatgggctttccattaaagtgttcggagttaagtgtttgaggcatgttacaatcataggatgattatactaacatagactggtggttataaatgaactaggatgtatgatttatgagtagcatctaatgggtgctaaaatatcttaatactttttatttagcatgcaaagatttgtagatttaatagtttgtgtttgtaaagaaagttttgtagaaaactatcttaatgagaattctgtgttttcaaaataggccaacagagcacttatggcaaggcatctcgagggggtggcaatcaccaaaacaattaccagccatactaaaggagaacattggagaaaacaggtgtgtataagagtacaggaaaacagtagaaatgtctaatttaatttaaagatcaatagacaaatgaaacgtaaaaacaaaatactatgtagcctgtttttactaaattgttgattttttaattgctttatgagcctgttttgcctaaagtgtctatagatctttaactttaaagtcttatctcactttctttagtattgcagaaaaacttaagagtttttctgtttgcttttgtgtaccaggtggtctagaggaataattaaacattttagaactattaacaggtaaagtactgaaatgggtacaacttaaggaaaacaagaatgttgtcttctaactctgacattataccttgtttgtacccgccagcgggaacttcattgcaggccgtgtgtcaccctgaccacgtctatctctgggggtcgcacgttgcgggcagagcgcaaggcatacaccagaaaacgctgtcctgtggtatggtctcttccaacttcatgtaccagcgtaaagattaaagtggaaaacttcagactttggcttcatttttaatctttttggagattaagtgtctaaacttaacttaaatggtttttt

SEQ ID NO: 34940 - DNA, 1029 bp, Homo sapiens
ccaaggcaagagggactgtggccctgcgtcggctctgctcgggactgctgaccccaggaatttacgccccttcgtttttctcttctgattcttctcttctcccaagcccgcgtcccctcacgcgtggcctctctccttgccgggagggccgcgatggaggtcccgcccaggctttcccatgtgccgccgccattgttcccctccgctcccgctactttagcctcccgcagcctctcccattggcggccgcggccgccgcggcagctagccccgctcctcccttcgctcgctcccagctccgcccggcagggggcgcgccgggcccagcgccacgtcaccgcccagcagccctcccgattggcgggcggggcggctataaagggagggcgcaggcggcgcccggatctcttccgccgccattttaaatccagctccatacaacgctccgccgccgctgctgccgcgacccggactgcgcgccagcacccccctgccgacagctccgtcactatggaggatatgaacgagtacagcaatatagaggaattcgcagagggatccaagatcaacgcgagcaagaatcagcaggatgacgggtaccgcacgcttcttcccccgctccccctcccccagcgcgccgcacgcgcccttcgttcctcgtgagccgcgcgctgcccccattctttctcagagtcgattccccgcgtgccttctgggccccactagattggagggaagaggaaagtaagagatcgagggggtgactggagagacccgggaagagtgggggaagggcggaggggttggaggaggagggcggcggcgtctgtgtcccgagcgcgcaggcgccgcgtgggacccgggggggaggggccggcctcccagcgctgcacgctgcagctgccgccgcctcttcattgtgtctctgttaccactcggcgcggttttcctgggaagagttttagaggactgagttggggcacaagcaggcgactggtacccagattcacaaaacgtgttatgattgat

SEQ ID NO: 34941 - DNA, 1068 bp, Homo sapiens
tctggagacaggcagtccagggaggacatggcagcactgcagggtcagtagagaactgggattcctttatcgttctgctctaccatcctcagcaggggactttcattctcagtgtcatttcatggtgcaaactgatcactaaatctccaaccagaaggggaatcagggaggctgaagggagcacattgctgagttgagtcggtcgcctttaaggagtcttcctagaagatacaacctatccacttgtctctcattgaccatatctgtacccagggaaacagggaaatgtattctcatggttaatgcgttggacccttgaataaaatcttggttttgtttctaaggaaggaagggtgaatcgatatggggtaaacaattagcagtctctgccatagccacacagttgttctgccttaagcagagcgatttgtcatctcatattcctcagtcttattttttgtgaaccaagtgggtagcctctctgtctccattaatgaacagaaactggaatctcaaatcatctttctcagatgacaaaatgaagataaaatccagagactgtttctcctaatgctttgcttattccattgagtcccattttagggaagacattcctctagaggttacatgtaaatgctgtcatgcatttttaaagtagacagggaggatgctagtccagacacataaaaacaaggtccttgccttattgccatggtgatgagataaactgaaagaaaatggatggaatggttcaaaagagcaaatcagttctgttctggtgccttgggaagagatcaaaatgtataaatattgccattccaggaagaaaggcactcaaacatctagaatatttttgaggcctgtttcacctcaattcatcccctagtctgttatctctagtcttctctcccacctcccaagaatgagcatcacatttctcagtgataccctcttttttgttgtttttaaaggctcattattttaaagagcagttttaggttcaatttagcaaaattgagaggaaggttcagagataccccatgtacctcctgcccacacacatgcata

SEQ ID NO: 34942 - DNA, 1033 bp, Homo sapiens
gtctgggtatcatccatgatttctccatttccctagttatccctcaccaatttttaagccaatcccttcagttctatcactaaattacatcttgaatctgcacacttctcatttttaccaccttttagttcaagatcaacttttttcctaggctactgcaaaagcctcctgaactggtcttctgattcaatgcttgcccctctctatattgtagccagagagagcttattggaaattaaacgactctccagctaaataaataaataaatatttcagtggcttagcattgtatttggaatgaaatccaacctcactgttatgttctatggggccctgcgtgatcagggccttgcacaccagtcctctgtgtccaccccaagttggtgtacttcagtgtaattctgacactaaccacccggggttaacatcagatcccacaagttaaaggctgagtgctccacatggctgtccccacttcagacgcctgctgcaagggctgcagaacagtagtggggtccccaggctacctgtacttctgaatgaccagtgataagtttgggggtttccacaatctccttaggtttgataattcactagaacaacatgcagaactcaggaaagtcctatacttacgattacagttaacccttgaacagaatgggtttgaactgcgcagcttcacttaaatgcatggattttcttctgcctccaccacctctgagacagcaagatcagcccctcctcctctcagcctactcaatgcaaagaagacaaggatgaagacctttatgatgatccacttccacttaatgaatagtaaatatattttctcttcttatgattttctttttttttctggatctgcagagttattgattcaaagttgccacatggtgggggtacaaacattcgtcagtcactgtgcatgcaattggtgacattttaatttggaggcaattaccaccacagatatcttctttcattaaaaaataaaataaaattttcaaagcctcttacaggccaaaggtctaag

SEQ ID NO: 34943 - DNA, 1058 bp, Homo sapiens
cggaatatttcactaagtgctcttgtagctcagaattcatttccttattttaggcatctcttacacagtttgacttttcataaggtaaataggatataacacaataggtcaattaggaaacacaattggtggtgtgtatatatactgcttgtcattcaagcacatcaggtattagtactgaggtcctaggaaataagctattaagcataagggagcagttggcagcttcctggttccatgttcatttgttcaccactggcagtgtgaactatgctgcactttattttgacttcagccatcttatttcagtgttgtgctttcaaaataataattgacttaggtcttagatgacgttgaggacctaacttgataattttcatttcttgtgttcaagcaatcctttctttatagcctccaatgacacactcatgtagttataaaacatttctattattggactttttttcaaagataaataacttgtagctgaagcctaaaactctgattttttttctcatgaaactacttgtttataactcaaaatttgaaaacctaagttttcttaacaaaacaccacataacagaatattagactgtgattttaaatttattttagggagaaagtacactgtagatggaagtacccaggtcctagaataaattctttgctctgccatttgctagatgtgagcctttctgcaagtatcagttcctttatctgcaaggggaggataataatatttgcctcacagagttgctaggaagataaaataatgaataaaaagtaccaagcttatagtagcaatcggtgaatattgttctccccttctcttttatgagaattgatatattgtttaattggtttctgtatgctaatgtctgtcatatagaaaacaattaatgattgttaggtaaataaaaaaataaatgaacagctttaaaatgtagttttagaaaccatcaaatttgaactatgcatactttttcaaggcccacatttgtagtggatttttaaaattcattcaacgaatacttattgagcacctactatgtggcag

SEQ ID NO: 34944 - DNA, 1029 bp, Homo sapiens
tgggtgcagcacaccaacatggcacatgtatacatatgtaacaaacctgcacgttgtgcacacgtaccctagaacttaaaatataataaaaaataaaaaataaataaattgaggtgtgacaggaagtttacagaaagggtgtgggaggggaaaaacaaatgcatttcagttaggtatttttctgagcattttttttttgtttctgtaagtttttattttgatatagttttaaacttataaaaaagttgcaagaatagtacaaggaactctcttatacccgaaaagttcctttatctagattaaccatctatttacagttgacccccttcctccctctcactctgtagtacctaggtataaatacatatttttaagccattcagagtaagtcagagacattgggaccctttaccattaaatacttccagatgtatttcctgagagcaagaatgttcttttatataatcatattcagttatttctgagcatttttaaccactttgcagtattttcaagtgactctcaactacaggaaattctttaccaaaaaagaaaaaaatgcatcaatatagactgaatcagtacaattgtcaagttttccccagttcaatactgaaaggcaggttaaggcttacagactaccaaaattttattgatttttgtatcaatttattaaaaaaatctctaatcctctgtaaattggtgaaacattatggactctggaaaacactacctacttggctaatttctttttcccctaatagtctactgcaatgtgatggccccttattaatttattaaccatgagagtcctattaaaggacagagtattatagctggaggggatcttagggattcctctagccccactttatagttaagcaaactgaggatcacaaaggcattgccctcacaatctcagggcagtggctgggaatggagctcagagatcttcactctagactcagaagacccttcaaggagaaccagtctaatgtgcttgaggggagaccatgggggctcctaggg

SEQ ID NO: 34945 - DNA, 1053 bp, Homo sapiens
ttgtgaaggggacatcaaagggtcatcagagtggcaagtttgctgaccttgtcctcccctccctggggatggtctggccagctcacaggttgaggcccactggccaggaatagcccctagagcatgcggcccttgtagggaccttccaaaggacaaatccttccaaagaattgcagcccagccacacctggctcaggcttctaatctgtagaactgtaaataatacatgtttgttgctgtaagttactaactttgtgacagttcattacagtagcaataggtgtcagtgtacgagcaccctccttgggccaggtccctggggtgacatcttagcaaaatgtgactggaggcagggtgggttctggaggctgttgacctattgacttgtcctctaagttccctcccctcacccccaatcccccaacaggccctggtgtgtgttgttcccttccctgtgttcatgtgttttcattgttcaactcccacttatgagtgagaacgtgtggtgtttggttttctgttcctgtgttagtctgctgagggtaataacttccagcttcatccatgtccctgtaaaggacatgatctcattcctttttatggctgcataatattccatggtacatatataccacattttctttatccagtctattattgatgggcatttgggttggttccatgactttgctatttgtaaatagggggctagggttttgaggggggaaatgtctcaagggggcagcgtcagctttcaaagggggagtgttgctcggtgaagagactttattgcttagttgcatgaatttggggcttctgttttgttttggttttaaacactggccgagaaaacatcacttactaagactatatagaatcctggccccacaggaagccccatggttgggaatggggaatgcagggaggcgaccaagatactttcccagaagcaggaccagctacataatttatagggcccagtacaaaatgaaaatatagcacctgttcaatgattattaagaatttcaagatggtgatagcagtgcatttaac

SEQ ID NO: 34946 - DNA, 1050 bp, Homo sapiens
aaccccgtctctacgaaaaacacaaaaattagccaggcgtggtggtgcatgcctgtaatcccagctactcgggaagctgaggcaagagaaccgcttgaacccaggaggcggagattgaagtgagccgagatcgcaccactgcactccagcctgggcaacaagagcgtaactccatctcaaaaaagaaaaaaaaatacaaaaattagctggacgtggtggcgggcgcctacaatcccagctactcaggaggctgaggcaggagaatcgcttgaactccggagcagaggttgcagtgagctgagatcgtgccactgcaccccagcctgggcgaaagaccaaaactccatctcaaaaaataataattataaacaaaaattttgtcgttccgatatgtcttagataacaattttgtttaggatttagaaagtccagctgttcaatagttaatttctgacagataggagagactttcaagccttctattagtgaacaacaaaattatgtgctcagggctcagagaaactaatgttgcaatctgtaaaacattcattcggtaaattctcaatggatacctgtttggtctacaatcagaattatcccagacagagataatggaggcagaaaagaccatacatttctagtgaagagcaaattgaacatatagtttgtatttaggccaaattttggagagccttaagtaccagggcaaggagttttacttcatataatacaataagaaagaagtttctcatgaaggattttgaactgctgagtggtgcagtcaaagtggtacgcgagggagattaatctggatgtggccttgcaagataaattgtttgcagcacagcagaatcagaggtaagaaaacaggctctttcctagttctaggtaggagatggtaacagcctgagttgggatagtgcattgccgtttctgtgatggcagcacaggatagcagggagttttccctgttttactatctaggataactgcctgtcacttttgtttctgtttctaggagggagagcactttcaaatatgaagactaat

SEQ ID NO: 34947 - DNA, 1028 bp, Homo sapiens
tggtcagcttcccacatctccaggtcatatgcacacccaggtaccaccttatccacagccacagcgtaagtagtgtgaccccaaagtcctttcagagcagtatttatgatctaatttagtaactttactttgaagccccaaagtcattgtcaaatcaataagtaagaaccattgtgcataggattcctgagtccctgctacaaagagacatgtttttttaggaggtggcctgaatcactatgctaggaagtagctcctttgtcacactgttcagagtagttgactcctgttcctcagccattactaagacttgttaaagataatcaagtgtcccatgattttggtataaagaaacagaattttagaaattattttttacatattctttttcttcaggcaagatgacacaaattatttttggaaaaatggtttcaaggggcatttgttattactgtttttccattttatttatttatttaatagactttgtattttagagcagtcttaggttcagaacaaaattgagcagaaagtacagagtgcccccactattgacatcctacgccacagtggtgtatttgttacaatcgatgaacctacatcaatgtctcattatcacccaaagtccacagtttacactctcagtgttgtacattctgtggattttaacaaatgtgtaatgacatgtatctattagtggcatttttaaaagaaaataattatacctggaaagtgaaatattgccactatttgaaaatttaaatgcaaaaaaaaaaaataaaaatctcaaaggggaaaatttaatgaatgtgttctgtgctaaaatgaatgttattgttcaacataaatatgaatttgatacaacctttcactcaaatgtttaatgtgaaagctgtcttcagagtagataggaaacagatccacttttactagattcactctatcgaggttcatacctactcttggtcacaaagaatgtgaatgtgatggtatttatatttagatctccctaagccacgcatggtggt

SEQ ID NO: 34948 - DNA, 1095 bp, Homo sapiens
taaatgccttttttatatcttagaaagttggaatttttccccccaaataaccctgaagttttcttgtttaatctcatgatagtggtaatctttaaaaatagcaaacctatcaaaagcactaacccatgtgctgagcactttttttggctccctattataaaacgtatgatctcattggaacctcacagcatcccatgaggttgtcactcttttccctattttacgaatgtagaaactggggctcagggaggttaaataatgtgtccaaagtatcatagctaataagtaacagagccagtagttaaattgaggattaactccagagaccatgcttttaaccatgtgatacatcctgcctcctaatctcactttgctctaacctaacacaatttctaaaatgcatttcttcagtttcatcatgcatgctggttgctttgttattgtttcttctaaatgttaatatttcctctatgatataaaaattgaatacctgaacttgttggaagtagaaagaactctggagctaaacttgcaagttccaatcttggctctgccccttgcccccttgctagcatgtacagattgtctaactttctgtgtcttaattttttcctctataaaatctccttcaaatataaacaatttgcaggtacaagactcggagcatatgtttaaggcaatcttaaggaaaatgttagaggataaactctggagctgagtaaggaaactggcaaaaatactcttggagagcattgagtatgcattttaactgcaggactgagactggaacaaaagtgagaatgaggaagaaagaataaaatgtaaatgttaaatgtccaataatgtaagggattgattatacaactaataaaaagagaagaggaaagaaattggaggtagaataagtttgtgaattgccacatctgtaatggctatgagtcaaaggacatcatttaaagctgacagatcagttagtagaagtataaggagttcaaaggtaaacactgagaaagataatactattgactataaccatgttgtgtggatgggcagtaagattatacaagctaatttcataagtgctcatagtaggga

SEQ ID NO: 34949 - DNA, 1022 bp, Homo sapiens
catggtggcacgcacctgtaaccccagctacttgggaggccaaggcaggagaaccacttgaacccaggaggtggaggttgcagtgggccaagattggccactgcactccagcctgggtgacagagcaagactctgtctcaaaaaagaaagagttggttctgttaaacaatatttatttctcataataaccctatgaaagcagatacagacttctggctttttaggattggtatttcacttgttgaacacctacccttgtgtcagatgtatagcaggttaacaaagtcaatacagtgatacacttgacataatctttgttctgagtttttttcccaattatagtaaaattggaggtcttaactgttctacattagataaatatatgcatttgttttaaagagctaagcaatgagaatcttacaactagagctgaagttcaagaaataaatgtccaatgattaaattttttccactgctgttcacatcatgatttgttgtgattaatgtatgtggatgaggacataatagaaaaagaaaatgatgagacttgtatatattgtgtttctgcacaatgagttcctttgaatgtttttcgttttaggaataaaattgaagggtgtttttcttagagaacatcatttgtcatatttatttgatcaagaagttgaagatttatataataaggtatgggacttacacatttattttgataaaagaacacagaaaaggtcaggtatgagcagaaaattgacatttatttcagcctaatgtggatactgtactctgaattaaaaatttcttttccttactcttccagcttttaaagataagtattatttcaaaatagtatttttttaattaatagattcaattcaggaaaggcattggagggggtggagcttttaactttgacagtctcactctgttgcccaggctggagtgcagcggcgcaatctctgctcactgcaatctctgcctcctgggttcaaatagttattgtggcccagcttcccaagtggctg

SEQ ID NO: 34950 - DNA, 1918 bp, Homo sapiens
ttttccctagtggctgcaccattttacattcccaccagcagtggatgaggctgccagtttctccacatttttgtgcatgtgaagtggctgtctcatcgtggtgtttgccttttcttaaggactcaaaagtttgcagatacaggcattcacttgccattttcttaaggtagagttgaaagtactgctgccagttcatcatctgaaatgagggctgttttctttcctgtttaattggattgcaactatttgcctttcctaaagatgaaatagtgtgcttcctacattattctgacaacattcctttaattgttaatttcagatgaatttctgaaaactgcttttatcagaacagatttacttaaatgaaggcaatagccgcaaggggtcactgctctagatatttacttctgcataggaaataagtaatcctttatagatggaatttttttttcttagttgtatttttgtatctttacatttgtttataacttatctatactttttttgttgttgtgattattttactgttgacatggaagttctcaatctgatcatttggttatatcattgcttcttctagtaacttcatatccagtgattaaaccttttcactgctgttcacataatgaaccgttgtgattattgaatacttaaatgaggatatgtaagctgtattaaagatagtgttatttgcaaaggcattgactattgcacaaaaaattttaaaagaaaatatctcttttcaggaattgtactctcagagatgttgagaaaagatacatgggtcttggaagataattactcaaaatatgcagggaaggtagtatatctttctattttaaatgtattaagtattcctggaactatagcagtgagttggaaatggaggattgtccaagtaaaaaacatttattaaggctttaatgaaatctacctattttatggtatataatctcattaattgtccacttggaaagaataataacagatatttatttattggccagttactatgggccacaaattatgctgagctttttttaatttcatttcattttattttattttttgagatggggtctcactctgtcacccaggctggagtgcagtggcgcaatctcagcttattgcaacctctgtcttccaggcccaagcaatcttcccacctcagcttcctaagtagctgggaccacatgcatgtaccactacacctggctaatttttttttgtatatttggtagagacagggttttaccatgttgcccaggctgctaagctttttatatacagtatatagaaagagttggttttcttaaacaatatttatttctcataataactctatgaaagcaggtatagacttcttgctttctagggttggtatcttgcttgttgaggacctacccttttgtgttgccgaatttttcattgtttgagttctgtcttttgtttcagaaagccatggagttttgaaattattgttatatcattatttgttacataattatttctacttctagaatctcatgctaacttggaagtgtcttctcagcatcaagcctgatatggaggggcagctacaccctaatacgctccaaaactagttatgctttgttttatacgtaatgcttctgttattagacaagtggtttccaaatatcagaagcagtgctaggacttaaaggaaaagggggagtgttttttcttctaatagaacttttgagcagtgatgaaaggaaaacaagaagactcaaaagattataaatctcaggcacgaattagtgttctgccaattaggaacattctgattgcttgacaaggtctatattttgctgatgaggagtagaagcctgtgggaggtgggggtggaagcagcagaaggaaaagagtagcaagtatttagtaaaatgtattcatc

SEQ ID NO: 34951 - DNA, 1025 bp, Homo sapiens
tgaggaattcggacgatgtttgatgagtgtcatcaactctgcaggaaaggcaaaaagtgacccttgtgccatgaattgctaactcttgcacaaaagactgataaatggaactgtacagaaaatttaaggtgcagggacacttgattttctggaagaaaaacaattactgtattttaattcagtccttgttttaaaagacctgaaattataatactgaaggagaagaaattttaaatgaggaaattagtacattttaaatcttagttaaatctgcttatgccccttctaaattgaatttttctttattatatagattttttaatttgcttgggtttcttaagaattagatgttctctttctgatacctttgacaaaaaatgtttataaattcatataatttataatgtatggtgttgtatgactttgttaatagaaaagccaaagcagcagtggttagcacccattctttgggacttgatctagaatatctgcagacagaatgttacataaacaaattcttatgaaacacattcaaatgacattttgtatttagaaaaggactatcttttaaagaaaaagcagccttttagggccgattctggaataatatcctgttgtcactttgggaatgtcagaaggggaaacaatccccaggcacactaaaaattttttaaagttatttaaaaaaacatataaaatattaaaggacagtaaatctcagaggatgggcaatgtgtttctataataaggaaaggctaacagatgctctgggctgtctccattttctttcaaagaggtggtatgtatttgaagtaataaattgtcaaagtgattactgggtactattaaaatgataggtggatataaatggaagtaaacattatgtagtgataatatagaacctcacatagtaatcaagtataaaatttggcatgggtggagaaacaaagaatagggaagctgcaaaagatgaatttagagaagttttcatctatacaatcaattatttttacagactttttttt

SEQ ID NO: 34952 - DNA, 1912 bp, Homo sapiens
ggttgtgggtgcctgtagtcccaactactcgggaggctgaggcaacagaatggcgtgaacctgggaggcggagcttgcagtgagccgagatcatgccactgcactccagcctgggcaacagagcaagactccatctcaaaaaaataaataaataaaagaatggcaggaagtaaaaacatccatttgaggaaaaacgaagcaatcagaactttaaagactagatattacaactctgaaacacttaacaaaaagtaaattcaccatgaaagtactaatttgtcatttgaatacaaaatgtttatcactataaactaaggggaaatgactaaatttatatgtatgtgtgtcctctgtagatatgtcctgttctctgacacctgtgggaagtaattgtccactgtttagcagaaattctgatttgcctcattttttcatttctctcttaccaaaaataactctttttgttcctgttgttttctcctgacatttactttttagggtctagctttatccagatctgaaaatccagacaatccatttacttctgtctgtatcaggaaacagaggcctgggtctagagacagggtcttggtgagggaaggactcaaaaccatgggatacagcatgaccgggcagcaccacagctgtggaaggtgagaaagtttggcagcatatgagtcaaggcatatggatctacatagagaggaaaagtatcctgtccttgggtaggagagctgggttgggcattagttggtagttttgtgtttactgatctcatcttgttaaaaccatttcatgatggttgtagattctggggacccagagtgtgaagggcctggagaagtggtgatatggtttggctgtgtccccacccaaatctcatcttgagtttaactctcacagttcccacgtgtcatgcgaggaacccagtgggaggtgattgaattttggggacaggtctttcctgcactgttcttgtgatagtgaatgagtcccccaagatctgatggttttaaaaatgggagtttctctgcacaagtcctccctttgcctgctgccatccacataagatatgacttgccttccaccataattgtgaagcttcctgagcaacgtggaactgtgagttctccattaaacttctttctttgtaaattgcccagtctcgggtatgtctttatcagcagcttgaaaatgaactaatacagtaaattggtaccagtagagtcaggtgttgctgaaaagatacctgaaaatgtggaagcaactttggaatggggtaacaggcagaggttggaacagtttggagggctcagaagaagacaagaaaatgtgggaaattttggaacttcctagagatttgttgaatggctttgacaaaaatgccaatagtgatatgaacaataaagtccaggctgagatggtctcagatggagatgaggaacttgttgggaactggagcaaaggtgactcttcttatgttttagcaaagagactggtggcattttgcccctgccctagagatttgtggaattttgaacttgagagagatgatttagggtatctagcggaagaaatttctaagcagcaaagcattcaagaggtgacttgggtgctgttaaaggcatttagttttataagggaaacagagcataaaagtttggaaaatttgcagcctgacaatgcaatagaaaagaaaaaccctttttctgaggagaaattcaagccagctgcagaaatttgcataagtaatgaggcgtcggatgttaatacccaagacaacagggaaaatgtctccaggtcatgtcagaggttttcacggcagcccctcccatcacaggcccagaggcctaggaggaaaaagcagtttcatgggctgggcccagggtccccatgctgtgtgcagcctagg

SEQ ID NO: 34953 - DNA, 1068 bp, Homo sapiens
agctagaaaacaagaagtaatcctgaatttcttcctatcccctaatctaactcatttgcataaagcttttcttgattgcgcgtctcagagtttggactcatgtactcttgaaggctggagacattttaagaaaatggctacctgttggctgggcacagcggctcacacctgtaatcccagcacttttggaaggccgaggcgggcagatcacgaggtcaggagatcgagaccatcctggctaacacggtgaaaccccgtctctaataaaaatacaaaaaattagcggggtgtggtggcgggcgcctgtagtcccagctactcaggaggctgaggcaggagaatagcgtgaacccgggaggcggagcttgcagtgagctgagatggtgccactgtactccagcctggtgacagagtgagactcatctcaaaaaaaagaaaagaaaatgcctatctgtttactgctagaaatttatatctttttctctgagtgaaaattgggaattcctgtagaagattcttcttttctgggaaaaaagaattttgttttcagtttttcaaaaaagctgtcttgttttgaactaatcacctgatgttttaaaagcatatcttcaatctgaatgaaagtttagagttcacgggagcagataactaacttggttttattttattttattttattttatttatttattttttgagatggagtctcgctctgtcccccaggctggagtgcagcggcacggtctcaactcactgcaagctccacatcccgggttcatgccattctcctgcctcagcctcctgagtagctgggactacaggcgcccgccaccacgcccggctaattttttgtgttttttagtacagatagggtttcaccgtgttagccaggatggtctcgatctcctgacctcgtgatccgcctgcctcggcctcccaaagtgctgggattacaggcgtgagccacagcgcccggccttattttattttttgagatggagtctcacgctgttgcccaggctggagggcagtggtgcaatctcggctcactgcaacatcctctcccag

SEQ ID NO: 34954 - DNA, 1034 bp, Homo sapiens
tcagagtgcgtcagctctcagatgaatcgtcttactaagaggtcccagttcataagaggcttttgttgtctcaacctttgttgtttggtcctgtggcaacaaaggtctttcttttgaccgtccttgagagtggctctgcatcttgggagggctgcctctcttgagtaagtctctttcatccttggttaagttataaaacacttactggttttgattctataataagtcacttggtagatacctctggtttaaatggggaaaaaaaaaaagccaggaatagttgttatttgctccagctaaaatctaatgataagggacttgaaaggtttttttgtttgttttttgtttgtttgtttgtttgtttgttttggagctctgtggtcagaagtcaggttaattggaaactgatattcaggatacaatcttttaaagttatttctgttctctctattggatcttgcttaccctaggagaacatctcagttgactgataccctcttcttgaacccctgcaaaccatatgctcggtctttctgcccacttcctttcttgttggcataatttttgctaaggataatgtggaacttcattgggaaaattaagatctctccatactgacttctgaagactacttcttctatttacttctgtccctccttccttttgccaccctcaatcttctgaactttcaattcagttcttttaatccctgatatgttccccttcaagctcctgtctcctccatttgttgatcggtggatggaaaattactaaaaggaaacatcagaggtaagaagaattcaggtttctatggccaaactttagtcaggcttctgaaccttctccaaggcccatctctgtacttccttgtaaaatcctatagtaaattcctgtaagtctatgttgccttgacatccattttgaatcctcctctggtctcacctaaccgacacacccaaacctcactctcctcctggtctgggctctcataaagagtggcttttttgataggcctgtcagggcaggggtagagt

SEQ ID NO: 34955 - DNA, 1044 bp, Homo sapiens
actgcaacctctgcctcccgggttcaagtgattctcatgcttcagcctcctgagtagctgggactacaggtgtgtgccatcacgctcagctaattttttatatttttggtagagacgagtttcactatattgaccaggtttgtctcaaacttctggcctcaagagatcctcctgccttggcctcccaaagttctgggattacaggcatgagccatcacgcccagcctgttttgccttcttaattatcttgagttttctaaatatgcaaccatatcaaaagacatgtttttattttttcttttctgatatttatacttactagttaactttttttcttcttgcatttgctaaaatatctaaaataatattaaataataatgatggtgcaggtatctatctgtttcttgactaaaatgctttcagtagtgtctctatataagataatatttgctattggtttctggtagtttttgtcagtttaaattttttcatgcctacttagaatttttattaggaatggctgctgaattttatcaattatcatttgaacagctgctgatgtttttcttctgtagtttatcagtgtaatggattaggttactgggatttggatattgaaccactcttgcagttgtggaataaaccttgctgttcattgtattttactcttgatataatgaagacctatataagctaatattttatttataatttgtatttctaaatcataagtgaaattagtctataattataattgtaattaacaaatattactctatccttttttctttcttatgttttgatattaaaattgtattggcttcaaaatgtgaatttaaaagatttttatatggcttggagtagctaaacctgcattcctaatcagcatctaggtggtattaatactacagtcctcggacacactttgagtagcaagggtttaaataatttaacattgggccgggtgcagtggctcatgcctttagtcccagctacttggaaggctgagacaggaagaacagttgaggtcagagtttgagactg

SEQ ID NO: 34956 - DNA, 1031 bp, Homo sapiens
gggaaagttgtggtagaatatttatctttttctaagatcctctcattgaatgttctctttattaaatttgaaattatattctcaatataagcatttcctatctataagataatattaagaagctggtatatttactccaaacatttactgaacccctacatttacttcgtgctaggaattgcagcaggtactgggaaaataaaaatgactaaaacaccctgaccatctttaaggagttggagatggagatgacagataaacaggtcattgcagtacaacgtgtcaggcaggagtgctatgggaccacaaaggagaggcacttcatcagttaaggaggggacatgagtggaaataggtaatacaggaggagaaaaggggtttctgagaaaagatatctgggacacattgagtttaaggtacatgagcaacttgcaggcagagaagtccagcagactgttcagtatgcagtctggagcttaggagagttatcaggcttgcaagtggagatttgagagctgtcaacatgtaggtgtttgtttacagtcctcagagatgatgccattgtggaatagatcagtgttcgtatgtatattcatgtttcagtagctgataggggaggcagagtggtaacagaaagaacatgggtttttgagtcagagagatgtaagttcagatcccagcatcttctgttattggtagtgccgtgcaccatattaggtgggataaatcttctctttaaacctcctatttacttaattaggggatattattctttttattagctctgttactttagttgttaattaacctctctgagcttgttttgttttttgtaaaatggagctaataagtaccaccgagagttgaaagggtttaaggaaggaacccacagaaagcagcacacacagagtctgatacccaggagcactgaacacactccgatgccactccttccctttaggattctaaagtacatacagactttccccctttttgtgttttgctaattgtaggcttgacatttaattggg

SEQ ID NO: 34957 - DNA, 1075 bp, Homo sapiens
tagccctaaaagatattaaaatgtaaagaaactgaaacagtttagttctagagaagtagataagtgggaaggaacaaagtggggaatagaaacagacctaaatatgtttaagaatttaatgtaatagactgggcaaggtggctcatgcctgtaatcccagcaatttgggaggccgaggtgggaagattgcctgagttcagtagtttgagaccagcctgggcaacatggcaaaaccccgtctctactaaaaatacaaaaaattagcctggcgtggtggcacatgcctgtagtcccagctactcgggagactgaggcacgagaatcatttgaacccgggaggcagaggaggcagtgagccgagatggcaccactgcactccaacctgggcgacagaacaagactccatctcaaaaaaaaaatagtaataataataaacatggtttttcagtttttagtaatagaaatgcaagcatatgtagcttaagcgaaaagggacatttagtggccatgctctcaaacagtaggcagcaatagaattggccttagggcagttagaaccagagaatcctaacaccgtccatactcaccatctcttctttgtggggcagcaccagacttgcttccttatggcttcaagatgaaagcaaaaagagctctctgctgtcaactctagttagaaaaatccccaggaagggttctcattagtcccttgtgggtccatttctcacccctatgagcaggatatagggtttaggtttgggttttggttcttcagaagacagagaagtggggtaagcagagaaaacagctaatacagatgacacttcaagtcacagtggaaaagatggataactcagtgaatggaattgagacaaatggctaccacgccatttagaaaaatattaagcttagcgtggacagcatggcaagaccccgtctctacaaaaaattaaaaaattagctaggcttggtggcgcatacttgtggtcccagctccttaggaggctgtggtgggaggatcacttgagcctgggagtatgaggctagagtgagctgagatcacatgctactgcac

SEQ ID NO: 34958 - DNA, 1050 bp, Homo sapiens
tggtgaaaccccgactctactaaaaaatacaaaaattagcagggcatggtgacgcacgcctgtagtcccagctactctggaggctgaggcaggagaatcgcttgaacccagtggggcgaaggttgcagcaagccgagattgcgccactgcactccagccttgcaagagagagaaaaaaaaaattagagcatattagcactcacatatagtcccagctacttgagagggtgagatgggaggatcacttaagcccagaaggttgaggatacagtaagctgtgtttgtgccgctacaccccagcctggactacagagtgagaccctgtctcaaaaaaaaaaaaaaaaaaaaaaaaattgatgtttttacatttgaaccagataggaacattttcaagagatattttttaacttaattgccacagtagacattgttattgttattataaaatgcaatgagctgtgtttacaaactgtttttgtcgacaaataaagaaaaatagtgtggtggtatttagaattaaaactgatgaataataagacagaaagttttggctggacacggtggctcatgcatgtaatcctagcactttgagaggctgtggcaagaggatcgcttgagcccaggagttcaagaccagcctcagcaacatagaggaaccccatctctataaaaattagcctggcgtggtagcgcatgcctgtcatcccagctactcaggaggctgaggtaggaggatagcatgagccctggaggttgaggctgcagtgggctgtgatcatgctactgcactccaagcctgggtgatagagtgagaccctgtctcaaaaaaaaaaaaaaaaaaaagacaaagttttagatcttgagacataaaacagatgataccttagtaaaagttaagaacaccaagactcacactttttgtgacaaatacagaagtgtgtggtttcttttttggatatgatgtttactgaattcaaacatatttcttcaaggatattgatctctattttgattttaagggaaaaagagaccaaaacagaagaagaagaa

SEQ ID NO: 34959 - DNA, 1028 bp, Homo sapiens
ataactttgattagagacaaagtgggatttatgaactaaaaaagaaataatgtccctttactttcttaaagtatggtgcatggattagattaccaagacagatgctcagagaaactagacaagttcttttgttttttccaattcctcaaactttccaatttacattcagctcacgtaactactcttcagctctgtgccaagtgctttgtatggtctaattagtgtcaaaatacctttgcatgtagcaagaacctgtgctttcagaaagtccatgttaatactatagccaacctatagctaagctttgtacagtctcttttcagttatctaaaattctgctcacccaaactaccttttaaaattcccatatcatttgcttacaaagggctatgtaaaaaaaaaaaaaacaattcccaaatcacatatccttaaatttaagatctaggaagaaaaatatggtattatagcagctttgcttctaatctaggaattcccctacttcaaaactcagctgactacatgactacaatcaattcatcatcatttctgaactcagagtaattatcaaattgttttgtcctacggcagaactctattcaagtagctaaaataaaagatgttagagtctaataccagatctcgttttaaaaagaaaaacattttggtcatatttgcaaaggccttactaatagaaaaaaaaattcttaccaggtcctcattgctggatacctgttgtgaacaacctcttctccaaagcactgcgattaaacagaaacagcaattaaccatttctttttcttagctgaatagctaaagatttttgtttttatggagacaggatgaattaagggacacgatattaaagaaaggttttgtattatattcagaatggttaaaaacttttatatttgggacagagtaagactcaacatgggtgtgctttccagggcttagggggaaaagaacatattttcccgcccatacctgctctttctgacatttattttcccttcattccatggttagag

SEQ ID NO: 34960 - DNA, 1076 bp, Homo sapiens
ttttaatcatcttcataagataaaaaccaaccagtagctccaaagaagcatcactgttttgaacagacttgtttcctgtgggtacttatagaatgaattatgtcttcaattaactttatagcaaatacttattttataactttatctcttataacatcccccattataagctgataaaatcattctaaggcccgtttaagttaaagtatttatcatatggtggttgggggtggcaaaaggcaatactttgggatccagaaatacatacctcttattaattgacttaatccaaggataaattctgaaattcccagaagcatggaagaactgtatgtctttgcggcaattattttcttctttcacatttattgaatatctattaagttcaaagcacaatgctaagctcaagggtttttacagtaccgtcttagtaactgcctttattgatgaggacaatgacaacctcaaaaaccaaaatataattatcaaccatcaattatgatacattggctaatggaaatatttagaaagtcagcaacaattcaacgaagacaagaaattcagtaaggactgggcgcggtggctcgtgcctgtaatcctagcactttgaaagtgcccctaggaggggcaactgcttgaggccaggagtttgagaccaccctggacaacacggcgaaatcccacctctacaaaagtacaaaaattagccaggcatggtggtgtgtgcccatagtcccagctactcaggaggctgaagtgggagcatcgcttgagcctgggaggcagagggagccaagatcatgccactgcactccagcctgggtgatagagtgagaacctatctgaaaaaagaaaaaaatagtgagtaggatttatctggccatgggcggaggttatgttatcaaaggtaaaaaagagagaatgatgggagtagagaagggaggagaggggtgaggaagcagttagcagaacaaacatcacacacaaaggccctgaggtagaagcatttggtacatttgagggtgggaggggaggccacagtggctagaagttggagggaaaggggaagaggctga

SEQ ID NO: 34961 - DNA, 1117 bp, Homo sapiens
acaaaacattgtttttcgagttcgttttttccccctagtgcagccgcttgtaaccgattgtttttccccctctctcgttgtttattggttctcacagatcaaggatccattttgttggacaaagacgggaagagaaaacacacgagacccactttttccggacagcagatcttcgccctggagaagactttcgaacaaacaaaatacttggcggggcccgagagggctcgtttggcctattcgttggggatgacagagagtcaggtcaaggtgagtggaccttgcatacctggagggataggtaccgcccctgtcgcgcgcgcgtgcacacatgggcacacacacacacacacacaccccaaactaacaaacagtcgcctgggaggtgcgaatccaaggagcctggggagaagttgagagcagtgaaggagggtggggactacaaaggcgctggggtcttgcaggcgggcaaactcttgatgaacaaaaggaatcaagtccccgcctttgaaattaggttaatctatatagcagcatgtgctgggggactcaccattattagagaataaaggcattactgaaatatcagcccagagaatagatcaggccagttagacagcttctacatatcctatctgtagcgatatccaagtttttgtttgtcaattcaggctccactagttatataatttcctaatgtagatcagtattacagggctactgtattaattcgcaagtaaaaataaataaatccacaggatctaaccacttgccatagatgaacctgttttttagcttagcttaaggcaatcgctttggaatagtaattttacaaatgaattgacaagattattactgaattataggcttgaatttggtttaaaataagtttattaacagatttaggatttgcactattcatgacaacaatttataattaaaacatcactttccttataattgagttgtatagtatatttccaaggaaacaaatttcagaaattttttcctaaaaaataaagggattaaacaagctgggtaaattcaatctaatggtttcttatatttccaatagtctcttttgtccttctttttcagtttgttatgtttgtttctt

SEQ ID NO: 34962 - DNA, 1075 bp, Homo sapiens
tcttcgtctctgcttccccctcccctttctcattttatttagcacaattaattgaggcggccactggccccagcgcggaaccgcaccactcaccagctcccgcccctcctggccccgcccacaggagaaagaagtagggagcgggaggggactaggcgggcgcggccctacgcctggcccgcctcagccaatcagagggtgcggcgcccccgagtgggcgagccccaggggcgacgcaaggatcgaggcggcgagctattggacacggtggttacgcccccggcctgcgcccggctcgccggcccccgcagcctcggagtgacgtccctcaaagttctcattttggtcccccacttccccctccctttcgtcccccagctaaagaggggtagggagtgatgcaaatgttttattacctttgagagcttcatctgaactgtcaggcccggagggagagaggaaaggagagaaagagcggaggagccgcggagagggtcagtttggccagaggacaggacttagaagaccgaagcctgggaagccgcgaagaaaatgccagagaggagagtcaaaggctgagagtgagagggagagagggagcgggggtggggcgggggtcgccgggcccgtttgcagaagtggactgacgagcggcgccgaaacccagccgtcagacttttcacacttagtcttttgtttttctgtgtttttcctccccctttttcttttcaatattgcaactccagtgccccgtgggccagagggcaaggcgggtggaggtgaggacctgggagccgcggggatccgtggcactgccctttctggcgcagcagcccggggcagcgtgggcggaggaagcccgcacagaggctagatctcccgcgggctggatgcgctttctccccgggcacagtgagcgtcgaatgcgaatcagccgcgcgaccgaaagagcagagcatcccagtaagatcagaggagcgccacgggctgcacaaggcgtcctttgaacctccccaaagaaagcaagccacccccaccctccaacttcaaagtggagattcggcaactaactttg

SEQ ID NO: 34963 - DNA, 1089 bp, Homo sapiens
tcatccatgtattctaacatttctatgtagtgtgcaactctaatgtcatgcttttgaagaagagaatagctgcccatagcagccatccgtctggataatagcaaaacactctagataagttattttgcactttcttatgtataaagttggtagaaacttatttttgctttgtatcatttaaatacattttgttttggtaaatgaactgtgtataaaatatttatgccgttaaaactgtttttagaaagtatttttaatttcagcaagtttggttacttgttgcatgactcttaacacagctgactttttgtgtcagtgcaatgtatattttttgtcctgttattaacttgtaagccctagtaatggccaattatttgtacagcaacagaagtaaattgaagatactggctaagactggattgattgtggacttttatactatattgcagaaaccaatatctgtttcttggtggttatgtaaaagacctgaagaattactatctagtgtgcagtctgtgatatctgaatgttcattgtatatttgtctctgatgcaaaaaggtagagtaacacaattacaatacatgattaaatgcaatagtccaggtacttaagtaatttttttttcatttcaaataaatacctatttaccaccaaaagaaagaaaaagaaaagttgttaagtcagttattcagggaaggaaaaacagagatctaataactccctaactttatgtagttcttttctagttgtaaatactttcagaagcacctgcataagattgcagaagtattggctgttaaggttccagttccagttctagtttgactcatccttaaaaatcaggctttctgcagtctgagcttctcaattgtgctggattcccagggctaatgagtgtatgtggatggcagtaaggagaagcaagccccttctgggagacgtgaccctcaaatttgactggacctgtggaaaaagacatgtctgcatggttttggctcttttttcctgagctttattctccagccaaaaagtaagcaacagtgtgtgtatatatatatatgtgtgtgtctcttgcacccatactata

SEQ ID NO: 34964 - DNA, 1015 bp, Homo sapiens
cggagatgaacgaatgggacacgcagaacgtcatagtgacaggacactcagatggagtggttcgggtaagtgaactgagagaaaaactcattaggatatttgtcatcctagtttaccagaaacttgtagctaattacaggttaagaacacctgaacaagttgtaatgtttagtgaactctcgctccagctcagacaggccttggcctctgcgttatcagacatgaggaacactggtgtcttggcctcttttcttcctattaagtagatctggtagtgctactggccatttgacagcttgacacagtgaggtcagtcaaacatgattcccatgtcacactgggattgctcaacatgcgaactgcagaagtactgggttttcagcctgtcaaatggcttcgtagggaaaacatagtgagcagggataagtctcttccctacagagaatcacagtgctggaaaacacttcgaggatccccagctaggatcccagatgactgcacctgaagcctagatgtagtttatccttttcttaggttgctatgtgctgggactctacagaaaatagaggcaatggagtattcacttttgtagtctgttgaagtatttgagtttttctgtctcaggagatttttctttgtgcttgtttttctttaattgtgctctttgtaaaagcagagagcagctgattaccaccctctttagtcagagtcacatgttgaaagacagtgaagccatcagtccactccaataccacaccctgtacctcacacggtacacatctgtgcacacacaaaaactcacaaacacacacaccctggagtctgcttcctcgacagtggtatttcacactgctcaatctgtgaagcagcataaaatagctccctagccaggcacctggggattctgtttactgtatgccctcttggagatatataatgtgtattagcatatgcaagactctgagaggtttttgtaggaaacaaaaaagtttacttagttgaactatgtttttgt

SEQ ID NO: 34965 - DNA, 1028 bp, Homo sapiens
aaaaagagtaaaaattatgaatataaaattagtagggctttgtttccagggttttgaaagggactcaatggaagtgaaggccactaaagtttaaactaccttaacttcatagtaaatccacctctgccctgatctatattaaaaaatattgcctcccagagttagagatcaatcagttctttcctttaaacttccatgaatttattgccctccttgcatgcatgtttaatatagtcagtactttttgtgatagaataggtttgtgccaacctaaagttgcttttgaagcctcttgatatttaaaagagactttacctggtgcaagggcaaatgatttgatcttttgccttattgattaaaataattattatttctcagtaacatttcctttttttgtcctgtcccttaagctgaagaatacagtggtgattcaaaagttaatttcttgttttaaagtctttgatttgttagaaataaatcaggtgattttttttttttactcattaaagttttatttcttaaactttgataatgttacatgctgtataacaaatagcttacctagtctaagttttgaattttatttattgattttaaattggatgtttgtgtatagaatatggaacatattcagactttaaagcgttaatagtttatcaactataattattgtaataaaaatagtaataattattaatatcgagaaaaattaagtacatatggaaaattctgtattctcatataaaaatgatttgtactcttcacacagtaaccttccttggggagtaattttcataattaaaacaaatgaattatactataattctgtattttaaacaaatattatagatagtgtaagatgtaagcctgggatatgctgaaaattcaaaatctggttgttcctctgaatcctaagggaggaaaataatgtatattttgccatttaaaaaaaaattatatttaaatattaactaggctttaattctataattcccttatttttaaagaataataatctcaaacacatt

SEQ ID NO: 34966 - DNA, 1051 bp, Homo sapiens
tttacctgtatttcattgtaaaccaccatatctcttttggaagtgaggtgtgataatagtcaagtatttattatattattgtagtttatattgttataaactgttataacagtttttatataacaatattatatatagttttatatattatatatactatatattatataatataaactataacaatataataaatataatgtttagaatactatgttttaaataatggattcaaaagaagatgatgtttcacctttgctttaaattttttttaattctgtagtcagaaaatacgtgaaagaccataagcatagcatgtataccatctctcatggcatttaaaacaaatttattagtagaattttttaatctttttaatatattaggtaatgtaaatgtggttgagctcatatttttgttttagttggttctgtttctaattctaaattttcttgattaggcttcccctgaaaggtctacaagaactcagcaaaaagaatttcaaacttacattttggatagcgtgatggaccatttgcttgcagctgatgtgttattaggtaattctgtgtttttattttatagaaatacctataatcactttcctctctaagccccaagtaaaactactttttaacatcagcttttttctttccttttttgtctagcttctcatactcaacattatatttgtgagatttgtctatcttgttgcatgtagcaggagtacattatagtatttcatcatgtgaatatatgaatttgtcattttactcttgacagatatatgaaagttttcagcttgagataattattttaacagctgctatgaacattcttgttcatatggaccacataggtgtacaatacttacacataatctgttgagtatatacctatgagtggaattgttaggtcataggtatatgtatgttatctttttagtatggcttccaggacatagagtcaaaacacattgaaatgtgttttttctgtatgtctgtatctaattacaatacaaatataaaacttaatacatttacagtgaagc

SEQ ID NO: 34967 - DNA, 1048 bp, Homo sapiens
tgtattacataatgcttaagagtgaggctcagaaaggtgaagtaacttccctaccttttatcttactcctaacttagcatgatgcacgatggggcaacattaatggtaatacagccactttggtaccaccaacactcatggtaataataatgaataatcaaaaccactgattctagttagcagacctgcgattaatctaatgattagacaatgatcctatcagtttctaaggggattttttgttttagctagtttctaaatttctttgcatgtgtgtatacatgtgtgtttgctcatatgtgtggtttacagagttctggaccatcaatatatccagtttcataagaatactgagtaatggatttttaaaataatttatagcagtgtcaataactgtaacatagtgtttcctctcatgtccccataacagccttggcaatcagaagaagagggatcttggctccgagaatatcctgtgaccctgatgcagttcttcagatatttgtatcacaacgtgccagaccttgcctccatgtggatgagccctgacttcctgtgtgcattagcagccaccgtcttccccttcaatattcgcccttactcagagatggtaggaaagggggaggaaaatgtcagaactggaattagaatgtcagaactggaattagtctgtttcaatggttagcagattttttttgacagtcttttaagtttctgaccaagttacagtttcataactttatacatcacctcttgcattattgtccggtgtccccagctccccacagtttccttctgctttctcctaaaatcacagtgaactctacttccttttctcattcaccatattcttgtaagtcccttgttagtaatttcccttttcaagtagttgattcatttattttacgcgatgccagctgtgtagttgtaaaatgttcttttccattaagataactctagtctgaccaaatttatttattttttattttaggaagtaggtatttgctggatttaacttttgccaataaattatagggttgaaagcaaa

SEQ ID NO: 34968 - DNA, 1051 bp, Homo sapiens
gagggaattctggatgttaagttcagccagtggatagctgcagccacaacgggcttggatttaccatcccactgcccagcagctttccaacagattacagatcatgttgtgagtaaagattgttttacttactcatttagtcttgtctctaaattcataggtaatttaaggttaactagtttttcatgattttcaggacaatgaaatatattaactacattatagcaagttacaaaaattagctgggggtggtagctcatgtctgtagtcccagctactcaggaggctgaggtgggaggactgctttgaccctaggaggtggagattgcagtgagccaatatcatggcactgcactccagcctgggcaacaaagcaaaactgtgtctcaaaaaaataaaaatatatcataacaaggatatttttaagttatgtttttgtagcattctaaattttggctgtattttggatttcacttttttcttagggaactacaagaacactagagctcttctgaggtctttcatttaataagtagaacttacagcaccttaagaaggattttcaaactcccttgtatcttattgtctcaactgtgtttcaaaacctatatcctaatagacaggtttgctaaagtcaaacaaattgtaaagtaaaacttttaactgaagattaattcaacagttgaatacttaattgcctatagtagtatgaatgttctggatagaaatgttaacacatactgaattacttccttctttgttaatgcagcatgtttatcagttgctgattttgcacttactgttatattcctcttctcttaggattcaacgtgggcagaagtgctggtgggagatcgacggtcagggagattaaccgagatgcttgtcattttcctggttttccagtccttcagtcattccttcctaaacacactaatgtccctgccctctattttctcctcatggccttgtttctgcagcagccagttagtgagctgcctgagaacctgcaggtcagtgtgcctgtcatcagctgccggagtaagcaggg

SEQ ID NO: 34969 - DNA, 1072 bp, Homo sapiens
gctaatttttgtatttttagtagagacggggtttggggtttcaccatgttggtcagactagtctcaaactcctgaccttgtgatccacttgcttcggcctcccaaagtgctgggattacaggtgtgagccaccgtgcccagccagcctgtattgccttgtcccaaattctacctttaatgctttccctagaatttgcattatagacagaagatatttttaaaataaaacactgctaattaaaaaacttttcaagatgatgtatacagttcttgttcacatggggaatttatcttaattatttttcactatcttttaatcaggagtaagaacatttgtccctaagcctgttgccactactttgcagtacgttggtggagctgcagccatcctgggcctggtggccatggcctctgatgtggaagggttatatgcagcagtcaaggccctggtttgtgtggtcaagagtaacccactagccagcaaagaaatggaaagaatcaagggctaccaggtttgtaactgtaaaactttgccttcacttcacctggcacctaaaatactctgcttttttattatcattcatgttgtttgaaactctggaagaattatattgtccaaggaaacttaaagagacagtagttttatgaaaactaatatatgtcaaatgaaagtatgtattgtttctttattttgctttatcctttttctcctatcttatcaaatcttactaaacacttgagttaggcaacattatttcaatatagctttaatacattgaatttattttcagaacaaaggtttgctggtttgaatgttgtttttctctgtggaaatgggaaagaaatgaaatggggtcctattcccccttcctgaaaggattgccaaatccatggtagattcagggctctccctgtttccttctctctcccctccacctcacaccccaccatcttttatctctgttacttactcaggagacgtgaaagccactacataataagtgtaccattgctattcctgaaaactaaaaatacaaaaattagccaggcatggtggcatgtgcctgtaatc

SEQ ID NO: 34970 - DNA, 1069 bp, Homo sapiens
tttaaataaactaggagagcctgtgtgcctttttataagtaaagcggaacattttcctagaatccctgttaaaaagagaacggtattttttttaaaccacggcagtgccaattctttgctactaaatcagtgacgtaaagcatctgtttcccaagctgctcttgtcccagagagctaaaactgcattgctctctgtgacagagctcagcattaggcaaattatgctgagaccaactcattggaacaaagagttcccataggctgaagccacaagcatctgtttcttagtgccaagatgcaaaatgtgcaaaattcatgaattgtagatgagtagtatgaaatagaaagtagagatcattgatgagaagaaatgtgtacattcaggacatggctgggctttctaattcatagaaactttttctgtaaattgctttcaagtttttaaaagttgcaatgaatattttcagtgataatgaggatagatgcagaagatgaaagtagttccaaataagctaaaggaaaactcccacaatgccaaatatatttattcttggatagcttagactctgagacaaccctgactcagctgacccagttagttgttgattgtgttactcatgcactaaggaaaggttaaaacacatataggtaatttcaaaagataaaatctcactgagggaattaatttaatttgatctctcatcacgtattattggaactgtcatcttctagagctttgaatcactgtgattgtacttgttctttacatcttgtggtacaggtgtcattttttaatcaaacaatccatatagtaaatcagtaaaagtaaaaatcatataaaggctatgaataatggatagttacatggtctgcacacacccacccacacacatgcggacacacacacatatcaactcgagttgataatatattcctttttttctatcccaaccttaaggtgttttctaacaaggctttttggttatcagtggatgaaagtaactgaagaggaagagaatgtgattggaattcaataccaaatttactctttctttttttataggcatgc

SEQ ID NO: 34971 - DNA, 1056 bp, Homo sapiens
attgatatgtgttatcaatagaacatcattatgattattcttatttccagacacgtactccatcattctccacatatcatactcctcaaaaaatgatatagttcccaaagagaggtgtcagtgtcttgaaccgtcaagttcaagaggccatcagactcaatatttactcattccttcatgaaataagtacttaacaaaaagctgctgcatgccaagtcactgtgctaggcattgaggattcagctctacacagggctgtcttggtccttgctatcttttagctaaaatgtagacacataaataaacaattacatatagtgtgacacattctacagtgggggaatccagggttctcaggcagattgtaggagagccacttcatctagatcacttattttcagtgcttcaactgtgttttcaatgaagatgtcactttgaaaataatacttctaatttatgccccaagtgttattgcttttaacttaccatagttttactacataaaataaatgaactgccctcatcaatagaccatgtaactacattggatagagcttgtaataggttttgtgtccttttctgtggaatatctgctttgaagtatcaactgagatatttcctgcttcttaacaagatttcttagtcctcagtatttacatttaaaaatccaaacagctttgacaacaattgtaaaaaaaaaaatcattaaacttctgcttttccctatcttgaagtaaaatgcatatgtatagttaatttatcgaaaacacaggacagtgtagtgttctaggaatgagctatataaatttgtgtattcagattcaacctcttttcccttgatttctacttatcctagttagaatacatcatttttagtcactgtcaaaaatagggcttagagcaccctgtttaacagatgtgttaaatgttaacatgaatggaataagcatctgccgtgagcatgcttttctgtttcattcagtgcttgtgttgtagtcttgttccttgttcctgctgaatatggaagatgttccttattaaacttttactggcatt

SEQ ID NO: 34972 - DNA, 1065 bp, Homo sapiens
ccttataaatagtttgaaaacgcttactaacattaaaattaagcgaaaacattcttctgtggtttgttcttattttgcatatcttttctttattgctttctaaacctcttattctacatccaactgagaaataaattattccttaattttttgtgtcattttgcaagtctctaaaacatagcactgtaggggcttatagtatttcctttgctttgcttgtttaaataactaaaaatgcatataaaaattaaatgtttcatgatcaaggtaaaggaagaaaagataacatttattgaatgtaactagtgtgcttggcatgttacagaaatgatgttatttaagttttataaaaagttcatgaggaaagattttataaatgaaagaaactcaagattcaagggtgtttagagcctttctcctgaagttacctgatttattatacgggtgtgtttataaaggtttgataagtgcctattctttctgctctttcactgctgaagaatattttagacatgttacctcttcgtctgaattatgttttaaatgtaaacatttaaatgtagacaaagccatggttaccagagagcaggcctgaagtgtgagatgtccaggtccttggcgttttccacaaagaactggacaaaatgcacacgcaatgaagcacaagtaacgaaggaatgaagcagcaaaaacagggatttattaaagcgagaaagcactccacagggtgggagtgggcccaagcaagtggctcaagggcctggttacaaagttttctgggttttaagtgttccttttgaggtccctatcagctaccccttatctggatgaaggatttggtccatggctaattaaaggctgcggtgaattggtgccctatgcagatgaagggatggcctgagcttggcccacagcccatccagggcactttccccttccatctaggacgtggtggaaaggggagggttagggagatagcctttgatcctttgctactctggcctggggagatggggcatttccttttggtttagcttttggaagttccagacccaggtgttttct

SEQ ID NO: 34973 - DNA, 1035 bp, Homo sapiens
cctttaattccaactctttgggaagccaaggtgggaggatcacttgaggcctggagtttgagaccagcctgggcaacatagtgagaccccatctctataaaaaaataaaacaattagctgggagtctgaggtgggatgatggtttgagcccaggagatggaggctgcaatgagccctgatcatgtaactgcactccagcctgggcaacagaatgagaaaaacaacaacaaaggaaagctggaaagcttcttagaagagggacagttgagctcagatttaaaggatgattcataatcatctggatgtagaagagccagacggggagagcccccaggagagggctcagggtgcgtgcaggcagagcaaggaggcctgcagtagacgggtgtggttaaagtagaatagtagggcatgaagaacgtcaggcctatgcaggggctagataataaagagccttaaaatttgtacttttccttaaagttatgagaatcaatcatacatatattccttcagttctgctatgtaccagatacttagctatatgttaaaggatttggagagcgtagccttctttcaaggaatttatagtttgatgcaagatattgataatttaatagcatgaaattatctctaagcaagttggtaacttttcaatttagaacaaatgattaatgtaatttttatcaggagatacgtaagatgtcctgcaaaagctttctttaggatgagaactaggatacgtaaattgtaagcttaaacattttttcatgttgtaatatgtaagtttttgtgagaaacagtaaaatacacacccagaactcagaatatctgaacagaaaatctagtgctgtcacttaccagttacataactctatgtaagttttttttttttaacatttattattcaccaaccacttactatgaactaaggatacaaacttaaataagatttggttctctttattgagaaaattattgctaatgggaataaataaccatttactggtaaatgtacattacggtagaataacagta

SEQ ID NO: 34974 - DNA, 1034 bp, Homo sapiens
gaggagatatacagatggtatttaaagttgtagagtgaataagagcttttttagggagagaacagccctagaaactctaccttttagagtttgcttgcatgggccacattttgcttgctttgtaagacaaaccacagcacagaaagaacacctgcacaaactgcagcacagaagtttgctttgtttatattagtttatattaaaacgtgctttcttatttatttatttttaaaaatttttggcagtaatggtactgtaatagatgagaaagtattacatctctaccatgtctaccatttgttgaatgaatgactaacagagcccttccaagctgtgtgacctttgaattttacctctctgagtctcagttttcttcttcttcttttttttagatggagtcttgctctgtttcgcctaggcaggagaatcccttgaacccaggaggtggaggttgcagtgagctaagatcgcgccattgcactccagcctgggcaacaagagcgaaactccgtctcaaataaatgaatgaatgaatgaatgaatgaatgcatgacagaaatttatttctcacagttctagttcaagatcaacgcaccagcagattcagtgtctggtgagggcccacttcctggttcacagacaggaccttcttgctgtgtcctcacatgtggaagaggcaaaggagcttttataaggacactaatcagtttatgagagttccaccctcatgacctaaacaccttccaaaggccccacctcctagtaccatcatattgggagagatgggattttaacatgaatttgaggtgggggaacacaaatattcagaccatagcaggcaggcgggcaggcaggcgggcggatggatggacggagagagacagacagacagacagatagggagatagagaaatagagatacacatcacataaatatacatgtgtatagcgtagtgtcttaaatatctgaaaccgattctttaatgttcatatatttcagatattgtttttgtccagcttttctcagtttgtca

SEQ ID NO: 34975 - DNA, 1021 bp, Homo sapiens
acacgtctgtctctgagttatatttgtatacttcatgagagaagatcataaattatcttttaaatttgtagcttaaaacactttaaattgtatagaaattaaagtccttttagtctaatattcctaacttgctcattcaagaaaaatttacatgacaggcattttactaggtggtgaatataagtaaacaaaacagacatattctgtctacttggagttcataatctggtagacaactagatggtaaatgtataagtagatattttccaatgatgttaagcgcagaccatggaagaaatgcagatgaggtgatagagggtcatgggaaggcagaggtacttctacattgccagaaaaggcttgtcaagagaggtgaccttgaagctgaaaattgaaggagttatccctgccaggaatttacaggaagaagggaagaccctgcagtgtgaacagttggtgtatgaggaattgaaagcatgcctggagatgtctgggggagagtggaatgaagtttgaaaggtagaaagggatcagatatctagaattttaaagggccatggtaaggagtatggcttttattaaacacactgaaagccaccgaagggttttaaagttacatactatagtttctgttacctgtcctctagcccccaaagcactttgtctgcaaaggagagaaagcaggaaaataataagaccattatagtagttcaggtgaaagataatcgcagctcggatctaaagtgttgggagagaaaaggatagatgagatctagtctgtaggtggaaccaatgggacttaacatgaagagtgtgggggaggaggaaagcaaggaaaatactcaggttttggcttgagcagttggttggatgacagtattcttaaatgagactggaggtcagtgaaaagggaagtcaagaatttatttatttatttatttttaattgagatagagtctcactctgtcgcccaggctggagtgcagtggcatgatcttggctcactgcaacctccacctcc

SEQ ID NO: 34976 - DNA, 1025 bp, Homo sapiens
tcatatttaagaaaccattgggctaggcatggtggctcatgcctctaatcccagcactttgggaggccgaggcaggtggatcacctgaggtcaggagtttgagaccagtctggccaacgtggtgaaaccctgtctctactaaaaaaaaaaaaaaatacagaaaaaaattagccagacatggtggcacacacctgtaatcccagctacttgggaggctgaggcaggagaatcgctttaacctggaagccagggattgcaatgagccaagatcgcaccactgcactccagcctgggcgacagagtgagactccatcacaaaaacaaaccaacaaaaaacattgaggagttgcccattttttttggtaagaactttatagtttcagctcttaaatttaggtctatgacccattttatgttaatttttaaggtagattcaattttcccagcactggttttgttgacgagactgccttctcctccattgaatagtcttggctctcttgttgaaaatcagttggccatatatgtgagagttttttcctgggctctgttccattctgttggtccatattaccatccttatgctagtaccatactgttttgattacattatattatatatttgatttattatattaaatgttttatttttaattggatattttattaccattaatgtgtgcctttaaaaatgtttctaatatacaatcatcccttgtatctgtgggggactgatttcaggaccttcctcaagcaccaaaatctgtaggtgctcaagtccgtgataggaaatggcatagtttttgcacataacctgtgcgtatcctcctgtatactgtaaatcgtctttagattacttataataccgaatacaatgtcaatgttatataaatagttgttattctgtattgtttaggaataatgacaagaaaaaatatgtacatgtttagtacagatggaatttgttttttctgaatatttttgatctgcagttggctgaatccacagtgtggaacccacagatg

SEQ ID NO: 34977 - DNA, 1032 bp, Homo sapiens
tcttttcatttagccatttgagagttacattgaacatattatggccctttagtcctaaatgtttttgtgtagatttctaagaataaggatcatctcttatattagcagtctaaaaacttaagtagacttaacattcttacattactttaatcttccgttttctaattttgttatctgaataagtgccttctatggcagttttcttctcctccagtgtaggaattagtcaatgatcatatcttgcgtttatatttgatgtctttttagtacccttaatctagaataattcttcaacctttatcttttattatatgacattttaaaagtacacagtcatcctttctctcccttttcagaagttattttttgttcgttttcttattttttgttccttattttttatttgtttgatgtttctgttgataagattttaggttatacattcctggatggaatattacataaggaatatatctttctgagcatatcatatctataggtactgactgttctgccgttcatttgtgatggaaattttgaccatttcattgtctgatttttccactatatagttactatgtgtattagttcattctcacgctgcaatgaagaaatacctgagactgggtgatttataaaggaaagaagtttaattgactcacagttccacatggctgggaggcctcaggaaacttacaatcatggtggaaggggaagcaaacacacctttcttcacttggaggcaggagagagaagtgccgagcaaaagagaaaaagtcccttataaaaccattagatctctagagaactcactcactatcatgagaacaacatggaggtaaccacccctatgattcagttacctcccaccaggtccctcccatgacatgtggggattatgggaactacaattcaaaatgagatttgggtagggacacagccaaaccatattactacatgttccttgcaactaataaagggtctactgggagggagacactttaagacagttaaaatatacagctcctcata

SEQ ID NO: 34978 - DNA, 1020 bp, Homo sapiens
ttcaaagatctcacagcatgtgtcccagctgaatagaagataggccaaacacttcgatttttagctatcatttaatgctttaagcaatatacaaagagtaaattaaataactctgttgcatatgggattccttggctgggtgtggtggctcccgcttataatcccagcactttaggagactgaggcagggggatcactggcatggtggtgcacacctgtagtctcaattactcagaaggctgaggcaggaggatcccttgagtcaaagaggctgaggttgcagggagctttgatggtgccactgcactccaggctgagcagaagagcgagaccctgtctcaaaaaacagcagcaaaaacaacaaaacagactttgcctcggtaaaagcaataagattaaaaaaaaaaaatgtcttcctgtactgttggccatatttacatgcttagacctatagaaatccaacaaaagagcccagctatagactgaattgatctttgatcctttactctgcctgtcctgacacacaactactcacacttacaatttaataaattaaagtttaaagaacaagtgttatttgttataaaaagactaaattaatgtgatgattaaaacaactttttgtggggagaggaggccgtagtgtgacatgtttattgcctctgtttagtttgttttcttttccttctgtaaactggaaaagaaatataagaagcaagctttttgtcctgagaagactctttaatgtatatttggctatctgttgtattttatattctcagtgtaaaatatcaataaatgtttatatttataaaatctagttgttgttattgtgcaacttgacattcaacataaaagttacttaaaaccttatactgatagctaaaatctacaggtgtaggtgctcaagtagaatactagaatccggatacagatatatattgtgtaactttatgtatattatacatatatgctatatatgtgtatatttttatatacaataaatgtatagttatatat

SEQ ID NO: 34979 - DNA, 1033 bp, Homo sapiens
aaaatataacaattataataacaaatattgcagtgaaagttatgtgaatgtggtttctatcaaaatatcttactgtatataatatttttggattgtgggtaatgaaccgtggagggtgaaatcatggataaagggggaatattgtaatactttaaagttatatccatgttattgcattcatctgtgttacccagaattaaaaaggataaaacttctgatccttttaatgctgggtagtatttcattgtttggatagtccacagtttgtatatcctttcatcagttgatggacatttatttgactatcatgaataaaatggtacagtgcaataagatattttgagaaaggaaacttttttcatttgactttttgagaaaaaagatttgaatataggagacatactattaggtacccagctgagctgccaactgtgattttgggtaaattactttttctctgtgcacctcaatttattcagatccggcatcgccacgtactagctttgtgacctttacttctggacatcaatttctacatcttaaaaaaggagtggatgatagtggtagctcatggtattattataaagaattaatgtatgtgttcctggcacatcattattattatcatcatcaatttctgaaatgagtagattagattatatgactgcagaggtcccagctcactaaaatatctgtggtcctaagattttccggtatggactaatatcttttttcttaataaagacctttgggcatctacttgagtcctaaatggaggctaattttggtattgttgatagaagttattttgaattaagtatatgtgtgttatctattgccacatatattagtttgtgagggctgctgtaacaaagtactaagaagtgggtggcttaaatgacaggaatttatggtctcacagtctgtatgctggaagtctgacgccagtgttgcagggttggctcctgaggcctgtgagggaaggatttgttccagtcctgttttcttggcttttaggtggccatcttttccc

SEQ ID NO: 34980 - DNA, 1032 bp, Homo sapiens
tattacatatggatgttttggaaattggcaataaccatgtgacccataactctattaaccattctatttgattgataagaaagttttattaaggaatccttctattatgtaagaaaggttatgatttttattgaggtgtttaaaaagtccaatagtaaaaaacaaaaacaaaaaaacctgactcaacaagaagtgggtaccataataagcttgtatttaggtaggtatgtattcattctgctggatattaatgagatagtctctaaaatccactagtaatgtaagagtgatgacatattctagaactgcactgtctagtaggtagccactagccacatgtggttattcagcacttgaaattatagtctaaattgaaatgtgttttatgtgtaaaatgcataccagattttgaagatatttttaaaagcatgtaaaatatattactaataatcttatatagcttgtgttaaggtgatagcattatgaatatattgggttaaatatatatatctttttttattcttttgaatgtggacattaaacttaaaactacgtatatgattggcatttgtgactgtcatttttctattggacagtgctggtctagaagataagaaaaccacatggcaaccatttatttataaccaatcttaaggtcttgaatctctgtttgctccatgttcctttcctatctatagtgtgaagtatcattttcaccattagatttcatatggctacttaggaaaatttatttcactttacttatctatagtttggggattaattatatacctaatatagtttatttgaacaatattatagtgcacattcatatttaaatgtgctgactttattcaaaagtaggaattattttctttatgcttttgcctttggtatataacacattttagacaaaaaaggaacctctcaatcaatactcagagtgaagttgcacagccacatctctctcatgcacttgtcagtggaaagcaaaaagccacaggatttctcatttccatgtgacattttgtt

SEQ ID NO: 34981 - DNA, 1030 bp, Homo sapiens
tattttaattaacttaagaatttaaaaataaatttaaaacacgaattccccattatgactatgtcaaattaacctatagtaatgaaaacagcagtggtctcttgtattaatcggttctcacggtcctataaagaactgcccaaggctggataatttataaaggaaagaggtttaattgactcacagttccacatggctgaggaggcctcagtaaatttcaatcgtggcagaaggggaagcaaacacatccttcacatgatgataggaaggggaagtgctgagcaaagagggaaaagccccttataaaaccatcagatctcctgagaactcactcaccatcatgagaacagcagcatgggggtaaccgcccccatgattcaattacctcccactgggtccctcccatgacgtgtggggattatgggaaatacagtttgagatgagatttgggtgaagacacagacaaaccatatcatccatatagtttatcttagtctgtaccagggcttcccttaggagtgagagagcagagagggaaacctaatgacaaagataaaatttgtgttgaaagcctgctgcttgcatctgctttgattcacttggtaaatcctgttaggttgagaagttcataaaactagcaggcttctgaactatttatgaatttgtacttaaacacacacaaaaaaactgaaaacaagcactgtataaattagttccaatggaaagacattgattattctgaacggacacagcacaatacacctctatgtgacttctcacacatgcagattctcattttcagggatacggacacatgtgtacacacactcatatacagccgcacattcctgtgtattctctttgccggcccaccaaactgaactttcctgaattagggacataaaattctactaaattaaaagtctggagaatatatgcctctgcccatctttatcccagtaagattgaactattagtggcttcattgcttgtgatatttataacattaggtataatttcaaattagcat

SEQ ID NO: 34982 - DNA, 1049 bp, Homo sapiens
cttaataataaaaaaaaattctaaaaaaaaaaaaattaagaagtggtctgaagagaaggaactattaaagaaaactgtggggcacttagagaagtagaaggaaaataaggggtagatgacatcctggaaaacaaggtcatgttaacatcacatcactaccccaaaccctgaccaaatcctacaaattgaatgtaggcacttcccctcctcacagaactgggtagaatgggtgacttggatgtctgtactcaacagagcatccaagtttgagtccttcacctcccttaagttcccccagcatacctgaaagtgcacacgtagcttttgttcccccttggggacagggagaccctgaccccaccttcctcttttaagcagctgggataagggcaaaagcaatggtgggaggaatctggggctatgtaaggagagagtggcttcatgtcagtaagcaaagcatattttctttccagtttgagtgacccagaggctgttcatggtacaaccaaaactaattttcaaagttttcagatgatccaagccctctctcagctttgtgggctcttttatcctttctcctcccttccagaggagagtgaacaacaactaaaacaccatttagattatttatttcaatcttatctcttgctgctcagactctagacattcatgaacaggtagagcagtgggagaccctcacacttcctaaatgcccttgcctaccactactaggtatttactactaggtaaatacttccctggggagtcttctcataaattctaactcagttcttaggatcccttattctttctctttcaaaaagccatgtctgtcagcatcctatttttgttgaaaaaagttttcaagtaagctgccacggttttatggatgccggcagaagacatgaagactcctgggtcagagtaaaaagacttaattactcataggacaacaggcagcatgaacttcgtgttcataccgttcatgcccctacaagtctcatggatgtgatgtgtggaagcccgggtgaaagctgcacgtgcagtgg

SEQ ID NO: 34983 - DNA, 1093 bp, Homo sapiens
tggagtgcagtggcatgataatagctcactgcagcctcaaactcctggcctcaagtgatcctcctgcctcagtcttccaaagcactagaataacaggcccatttctctcatttacttaaaaacattatgtagtaaacatttatacatgacaaagttatcatatcacatatagtatacagtgatttgcaatttttataccttgataaagtcagctgggtcacattagccaagcattaatcccacgtgaactctttaaaagtcaaacattcgaccaatacggtgattcaggcctataatcccagctttgggaggccaagacaggagaattgtttaagcccaggagttcaagaccagcctgggcaacatagcaatacctcattgctacaaaaaactaaaaaattagccaggagaggtggcacgtgcctgtggtcccagctactcagaaggctaaggtggggattgttgagcccaggagtttgaggctgcggtgagccatgtgcactccagcttaggtgacagagtgacacattggtctcaaaaaaaaaaggtcatacatcaaatctctcattataagcaacctggtctgaaacagcacctatgtttctaagatacaaagggaggcataccgtcaggggcaatgagaatgtacaattgcgtggcataaaaacataggttcctggctcgttaccttaactattagttcaacctttgttgataaattaactgctgttgcatcccaccacgtctctccagctcggctgttagaccttattaaaagaatgacggagactcttgtgtctccaagttccactactctatcttgcatatagtgggtgcatgagatatatgagtattctgctaggtggattactatacccatgaatttcatatcatatagaaaaatattagtgtctaacagagtgagtgatagttacatttattttaaagactatacatcgctgtccttatgtccttatcttaagaaaaatactaatttatttaaagatccactcggggaggtggtttgtagaaataagtcatacacataatgcatcagaaaattagttgaaagacatcccacttcagatttatt

SEQ ID NO: 34984 - DNA, 1051 bp, Homo sapiens
ttttcaaacgtgagttatttttatgttttaagaaatttgtcctatcccagggtcatagttgctcaatgttgcttctgaaaatcaaaaaagtgtctcagttaagtttttagcctacctggaattgatttgtgtatgtgtgatatagatttaaaattttatttttttactatgtagaaaatcagttttccctgcgccgtttattgactaatgcatcctttcctcagaggctttacttacatggaaatttgccattgtagccaaatgtttatttggggacttcctgttctgttccattggtcagtttgcctaagcaagggccaagtagcacattatttaattgttataacttgattatatgtcttgatacctgacaagggtagtctcttacctttgtatttttcttaaggaatgttcttggccttctggttttgttttttgttgttgttgttctgagacagggtcttgctctgtcgcccaggctggagtgcagtggtatgatcatggctcattgtagcctcagcctccctgggctcaggtgatccaccacccccacgacccccacctgcctcccctccctccactcttccaccccacctctctgtgttgtccaggctcgtcttgaactcctgggctcaagcaattctctcgcttcagcctcccaaagtgctgggattacaggtatgagccaccatgcctggcctgctttttaaattcagtatgagaatcagtttgtaaaattccttggggataaaaagcaaatagctgtaggaaatttctttttctgtcccccccccctttttttttttgagacagtgtttcactctgtcacccaggctagagtgcagtggtacaaacatggctcactgtagtctcaaactcctgggctcaagcgatcctcccacctcagcctcccaagtagctgagaccacaggtgcacaccattaggcccagctaatttttaaattttttgtagagacagggcctcgccatgttgcacagctggtcttgaactcctggcctcaagcgatcctcctggcttcagcctcacaaa

SEQ ID NO: 34985 - DNA, 1945 bp, Homo sapiens
tgcatacttaaatacagtagaagcgtttgatccagtgctgaataggtaatttacatgttgtctccgtgctttatattatcttctggtataatagtagattacttcagagtgttaaaatgttgctagtcgtagttaatactaagctttgggatatcttatctcccactggaagcttgctgtcctacaaaaccagtctcacatagggaatttttgtctttggttagtattttgagtaaagtaaattatgctttgtaacattttttcttctccgtcttttcaggtgggagcttgttggatctgtgtctcactgcagagctggagcaggagtagctgtgtgttcctgtttaactagccaaattcgagatgtaggtcatggatccaataatgtggttgactgtatgtgatttgagttctggccaccaacaatttagtcatatctgataggtacaaaagaaaaccaagattttgatatgaccacctttcaacactttttactgcaactagagtcttatttaaatgttaactgttgtattgtgactaagtacaacttttggaatgatacctgaagaattattagtaatagagttaaatttgatacttcctgcttttgcaaataatggagtagggaagaagatagtcgaacttaaaatcatacctaccctgaaaaatgcttaaagtagtgccaaaaatcttgaaatctctctctctctctctatttggatgaatcaaaatgtaatttgttgagttttgccttttcttttgcctaaagatgttaacgtcaggcagtgggtttttcctagaggagagattagtacctattcattaacacaaggatacataagagacttgccccttttgaagatcatttctacttggtgctgatgaatttatgcctagctttttttttctaggtggtgatttttcaatttcttttatatttacggaagtagaaaaaatgttctgtctttttgaatgccacttagctgcattttcagaagcttataggctataagaagcctttaatttcagtttgaattgctaggacaccaaaagacctagctgggctaactccatccaaatgattttacagttttattttttcatcttttgcaaaaagtatttgttacataatcaaaaggtgaaccagaggaaatattgaacaaggttttagatctgatgttattctggtgcccaattgagagaccttgagaaagaatgatgcagattacatgactctaatgtgggcagtctgaaaatatctttaactgtcttctttgatcatttgattttggatccaagatttatcatctctctattttgctatttgccaccatcctggtttttctgactgtacagaatcaatctgcatttatttattatcagaaatgaatgcatttttacaaaaacctttttgtagactgtagtttattgattagttcaagcccatcacgaactaattaaacatattgttggtaaaaacagagattgaaattactgtttttatcatatttaaatccctctggtgtatttattgaaatttaattaaaaatatttctacatattgatttgaagccaggatattgatggacctacagatttaacagctcttcaaagttttaactagcattataaaatggcctattcattatatgtatatttttttataaatatttatcaagaacatgaaaatattttattttgtatttgcagtgcagtttggcacctctcttccaggccttcctaagtttttgttagttgtgtcttcgaatttattgtagttcaccgctggtcagtaatctggttcataaggaagctggggcagtgaaaaacacttcgttgatccatccagccctaaagttcattgactaatagctcatgcatcttattaaatgggattctggacttctacaatagtgtggaaagccacatcacaaaaaaagccaca

SEQ ID NO: 34986 - DNA, 1048 bp, Homo sapiens
gatgcttttgaattctttgtttttttttttttcagagggagacagtgtctttctgttgcccaggctgaagtgcggtggcacaatcgtagctcactgcagccttgaactcctgggctcacatgatcctcctgcctcaagcctctcaagtagctaggactagaggcccaggctatcacacccagccagtttttttctgttttttgtagagatgggttcttgctgtgttgcccaggctggtcatgaacaactggccttaggtgatcctcctgccttgccctcccagagtgctgggattacaggcatgggccatcatgcctagctgaattgttaaggtcacattcataatttttgtttaaatcttcatctttcatgtttaaaacatgtacagccttatttttctaagagtaacaaatttatttaaagaaggggattacatttaaataaggtatatgtttttaaatggaaggacacagattgaatgtgctttgctacaataaattttaaaaggtctcagatttgtttttctcaacctcatttcaagggaaattatgttgaatacttcaagtaagccagtaggtatttatttatttatttttgagatagagttttgctctgtcacccaggctggagtgcagtggtatgatctcagctcactgcaacctctgccacacatgttcaagcaattctcctgcctcagccttctgagtaactgggattacaggtgtgtgctaccgtgcccagctaatttttgtatttttagtaaagacagggtttcatcgtgtttgccaggctgatcttgaactcctgacctcaagtgatcttcctgccttggcctcccaaagtgctgggattacaggcatgagccaccacacctggcctaggtatttcatataaataaaggtcatgtcaatgtttatattgcttttttttttttttttactttaacaatcttttattaccaaaccccatgcaggtttaacgctttaacccacctaacagcaaaaaaaggcattgctaacaagatcaaggatgaaggtacagacccaat

SEQ ID NO: 34987 - DNA, 1074 bp, Homo sapiens
aaggtggaaagatcactaaggcatgtgaccaaatcaggattccaaagacggagtagaccacatatactctagacaaaaacctaaaaaatgttaaaattagagttataggttaaaacctgccttaggtattttaaaaactcaatcccacgagtacaacataacatggtgggaaatcaggtttttgattgtttcatatggagaaaagtacctgaaccattatgaaacacagctcttaaaaaaaaggaaaggaaaaaagtgaatataatacagttgcctacattaaaagaagtgaagccttagattaagggagttatagttgtattgttcttgacactgatctctccgtatctatagatgtattgttgaagtagggtatataacaccagttggggtatgggaataaaagattagactctctgtacatttttaaaaatttattttgggtggatgttttataatgaacataacttgttagtacagtaacatgtttataatttgaaaataagatctatagaaaatgcacaaaaatggattgtaataaatgtgagaatgataatctggaatgcatgtaagaaaaaactagcaggttagtaatacaactgaaaaccatgttatctacaaaaaatagttgaagcgttgtgatctggagacaagaaaacttacaggagttactagatattttaagagtgtatgttgatttagtaggaaggaataaatatttgtttatgattcagtatagtagcaatgaagcatactgtaattcctcctagtgattggaattgtattgtcagaaagatcacatatattttgcaccaaatgggagattaaattttattgcctattttttttcaactttattgttctgttaatagcgtgaggatttcaaagactgagcttaataatttgtataaaactagatactagaataattctgtctctgtgtcagagtgaaaatataatgcgagaagagagaagagggctatcttagtaaatattgaaaatattgctgaagagtttcttttaataaaactgcaggtgggccgggcatggtggctcatgcctgtaatcccagca

SEQ ID NO: 34988 - DNA, 1008 bp, Homo sapiens
gaaaaatataaatttaaaataaaaataaaactgtaagaatgaaggaatagtaaattattttttactttataaggggaaaggattataggcttattttattattttgagacaaggtcttgctctgtcacccaggctggagtacagtgatgcagtcatgggtcatggcaacctccacctcctggacccaaaccctactccaccccctgagtagctgagactacaggtgcacaccatcacacccagttaatttttgcactttttgtagagagggggtttggccatgttgcccaggctggtcttgaactcctggactcaagcgatctgtctgcctcagcctcccaaactgctgggattacaggcatgagccaccatgcctggcctctagtaatttaaaaaatatttccctttacatacagcttttaagaagcacaatgttattttatttgtatattatatatacactcttcactattcattttaaatacaaagcagatcttgagatatgtagaaacctaagccatctttaaagttgaggatgttcttatttataaaggttttcctttacattctgatttcactatttttgtaattataactaaactgtgatttgttataactcatgatcacaaattgagcatgtatctgtacctcattaaaattgtatttagacattaaaaagaaaaagaaaaagaggccacagatagctgctctgtgccttccaccatctgaagacacaaagaagagttggcatcagtgaacttagagcaagtccttaccagacatggatttgccagtgccttgatcttgaactttctagtctcaagaactatgagaaataaattatgttgtttatcagccacccagtgatagtttgttatagcagcctgaatagactaaacagtaagcttttttttttttttttaaagacagagtctcactctgtcacccaggctggagtgcaatggcacgatcttggctcactgcaacctctgcctcccgggttcaagc

SEQ ID NO: 34989 - DNA, 1868 bp, Homo sapiens
tgtcgagactggctctcactatgttgctcaggctggtcttgaactcctggtaggctcaagcagtcctcccagctcattggtaactggttgtttttagcttttcagttttcaaaaaaaaattactaggttgtataactcacagcctaagtcatcaagatatttcttaaaaggtggaactgttacatgagagggcacgtaaattaaaaagattttggatatcttagctaaatggagcctaggaaggcttatatgaacagcagtgtgagagtgtttatttcctgacagccctaccaattttattttttgtctttggcaatatttaatttcattgattaataaggatttttaaatattctcattgatcattttccctttcattaaatctaccttttttctatacgtaaggacagttttcagcagacagtgttgctgtactactaactgaaggccatgttattgttggtctttactcagttattgttcaagaacacatctgtctaaaagaggactctgacatcgagctgttgcaggcatctaattcacacttaagtttaactatgactttgacttcagcaccagtgacctctctaatcagtctttccagtaacctactagatctctccattgggtctcctatcagtgttgaatttcagcacgccctgacttccagttaggaaattattctttccaactcagtgatctcggctcattgcaacctccatctcccaggctcaagtagctgggaccacaggcatgtgccactatgcctggctaatttttgtattttttgtagagatggggttttgctttgttgtccaggctggtctcaaactcctgggctcaagtgatctgcctgccttggcctcccaaagtgctgggattacaggcttgagccactgtgcctggccaagaaaaacatttttttaaagtcacggcagtaatttgttggaagtcatgtatactttgagtaggaactattgaagctattatacagtttttcaaaccagcagattctcgtttaatgattggtatattttggactgtttgattcaaaattttaaatgtaaataaaaaggaaataatgagtatagcctacttttttcctgacttaaaagtaaaaatggaaattttaagaagagtattacctttgaaataaagtgattcaaaaattgaagtaaatgtcttatgcacagtgttactttagttaaaattatttaagcatacattaatttggattatagtagaaaaataatctctagtgttcataatctgttcatccattataaaaatattttaagtacttctgtttgtttattgtgttatatgtgtttactgaacatgggagtaatagcagtgaagagagacggtgcctatactttaggggcttatgtagtgttacagggaagactagtagtgaataggcacttataagtattaagtattttgaatttgaccaaaaattgaatagggtatactttgtgataagtataatgaaaaaaatatcagacttttgtgggagcacagaggaagtacactaggaataggaagatgttttgggatggccttcctgagcagatgaacctgggctgatcttagaagatgagcaagagttagcaggagagaggggtggtaaagggcatttcagaaagagcagaaagcctgaaaggaggcagagaggtgtgaaatagcctaaagtatgtggaaaattaaacacattcaggttttgctctatggaacatggggtggggtttgccattttgttatttcacaagtatgcaagaattgattttggtaaatgcacacacgtcttccatcaactttcaggggtagctctaaaattaatcacatactgctataaaatataatct

SEQ ID NO: 34990 - DNA, 1050 bp, Homo sapiens
gcctgtccccactcggggggcttgctggccgccctggaggtgccttcccgggagcggcggtgtagaccttgtggagagtgcctcctgatgtggaaccaggaaccgcagcctctttctagacgctcagccgcccggtggagttgttaccgccacgatgacagctctttacgccttccactccgtgctgggttcagttggcttgctgttttcttcagagagagcgatttggctacatagcttgaattttctacgtgtctcgtgctttactggacttgcactgtttttccctcttggcagtgtttaatcgggtgacttttcatagaaaacgttcagtattttcatctgtgttaatggcataactttcttcttgactctgccctaagctaatgttaccagtttagagggatactttgggaaaaggtccttagaacctgggttgacataagtattttatctgctggttgcacgttttttcctttgcattgtttttctcctatacaagatggtaattgttggactcttggtgttctttattctctctctagaaggaaatcctcttcgcgcatctttctcgtgttctggccctgcggtactcttgggtacgcagaggactgctgctaacagtgctggcgcctggaacgctgcttggagatggcggtggcattaagctgctgcttttcctcagacttcctcctggcacccttcttaatttgtcaaactgacccagttcaaacttcaaacttttagtcactttatttatttcgtcactttttaaaaaaattgctttcaagataccaaaattgcgtaagcctaaatataaaaagaggtgtctcaggggccgggtgcagtggctcacgcctgtaatcccagcactttgggagattgaggcggggggatcacttgaggtcaggattttcgagaccagtctggccaacatggtgaaaccccatctctactaaaaataacaaaaattagctgagcgtggtggcacatgcctgtagtctcagctactcgagaggctaagacaggagaatggcttgaacccgggag

SEQ ID NO: 34991 - DNA, 1075 bp, Homo sapiens
ccctatgccgggacagccaaaagaaaaaaaaagagagcattgatgagatgttcttaccgtgctgctactgcttcagctcattactttgattttggtgttcatgagtcatgagtctagaacacccatttttaataaatattgaaactgtattggtttatacatagtattatttacacaattgagtaattactaggggtcattatactttgaaaagtatagcttttgctctttatgttggcattcacaatcttgatcatttttcttttgatgtgtcggcctgcaacactgggggaaagagagagctgcagaaatacccattttgtgaattatacaaaattataaacatgcgtctcgctagcctttatttaagcaatgaatttaaattaatcattctactcaaaaatgccttataggtactaagtctctgcattaagcaccattaacaaatgcattactctatgtatcttgtatagcgggtgctttgattccttcttgatatatatttaagtcccagtaatttggtggtatactgtagtttacatcctgcttgtcagatacaaattcttccatgctgtaactgtagatttacctttctattcttgagacaattctgatattgctaccaaacaaatttacagtgcattttttgtaactcagtaaaggtagtgatttactgtgtttaagaccaattatttcagtgaatgtgtatatgcgtgagtgtttttgtgagtgtgttaaatgtaggtctgtgtcaccatttatgtgtcttggtacagatacttttttatatagttttttcaaccttagaaaccacaaaattaagaaagaagtgttaccctgtgatgaaaaaataggctcaactacaaaataccatcaactggaacaaactgagttttggaataattgatttggcatctcctggaatattatataatttgctagttaaattttcaccaaaataaaaaacccttcccttattttgcagctctttctctgctctcccctgtgttgcaggtttgtaatgtttgagcacaattcctgggtgaaattcgtatttgcctctgtgcgtgttatt

SEQ ID NO: 34992 - DNA, 1056 bp, Homo sapiens
tgggaaggaactctcgacctctcagggttgtggtagtgaggatcaattcttcaaggacaaggacttggactttcattgttgtgcccttaaaagcttatcacagtgcctgatactttgtggattctcaataggtattccttagccagtaggtcttcagcatttgacaggaaaatcctgaggcccgttgtgtggaatgactgctagctagagtaacagtgaggagaaaaacctattgtaaaatgattgtttaaggctctttttttcctccccacaaagggatttgcttcctaaggagaagaacttggaaactctgttgaccttggcttttctagaaatagataaagccttttcgagtcatgcccgcctgtctgctgatggtatgtaaaactatcacattccttggatcctagggagtacatggggtgggggaggagtaaaaaggaaacactttaagtcctttgggggaggggattttaatggacaattgtttgtaaggatttatgtagaaatgagtttatatgaagaatcacattaaatgctgttgggaactccaattaatgttaatacctcacttttaaatgaaatatattggagaatttttcagaaagagaagccccgaaacagttctgatgttgtactttagtttttaaaagattttaaaaatgtttaatctgtttgcttattttatggacaaaatgtccatactatgagttttgttttgggtttttggttttttttttagatggatctggtgaccaagtgctgaaatacactacagggtaatcacatctagcgaggacagtcattgtccaacaagaaaaaaattgcaaataggtcctaaatagaaaaagacaatggttaatatgcactaatttgtataactagaaggaaaatatttttctgtcacttcttaaaaagctcaatcttgcagcttttctctggtaactagtgatattttcagcataaggtcatgctagctgaatttaaaattttgtgtactgtatgtccttaaattttgaaagtgaaatgtttctggttttgactaaatttatcaaa

SEQ ID NO: 34993 - DNA, 1056 bp, Homo sapiens
gaaacagaactattttaagtattctattagcctgttattttttcctgaagagactttgttgctattgttaatatttatccctaccttttctttaaagcaatagagttaatgaagggaagtatatttatttatacctgtattctgtgttcttgctactagaagtgtaacttggggaccagcagcttctgtatcaccagggtgttggttagaaatgcagagtgactccaccccatagccactgggtcagaacatgcattttaacaagtgattgcaggttcaagtttaagagatacatgttctgtgtatgtgcacactgttaaatttttatagaatttaaatgctgtgaatgcggtaggaaaatcgattcatttttgatccactgttcttagaagcaggctactggatgcctacccaatatataacataaatatatgtattttctgtcaaatcctttatgagcttcatttttggtaatatttgatgacatatcagttatattcaaaatttctgatggtctctctctctctgtctctctccctctcctcctctgcccctctctccctctgtcccctgtgacttgcatcatttttcttgaagacattccattattgttccattgacctttccctcatcactgagtcctttggagctgagttatgtcaacagctgccttaattactttggtcagaagtggtgggaaccaggtgagaaggagagtgctgctaagctcccgcctgctgcaggacgacaggcgggtgacacccacgtgccacagctccacttcagagcctaggtgttctcggtttgacccagatggtagtgggagtccagctacctgggacaattttgggatctgggataaccgcattgatgagccaattctgctgccacccagcattaagtatggcaagccaattcccaaaatcagcttggaaaatgtggggtgcgcctcacagattggcaaacggaaagagaatgaagatcggtttgacttcgctcagctgacagatgaggtcctgtactttgcagtgtatgatggacacggtggacctgcag

SEQ ID NO: 34994 - DNA, 1061 bp, Homo sapiens
atggttgcagatgtgtgttatttctgaggcctctattctgttccattgtctataagtctgttttggtactagtaccatgctgttttggttactgtagccttgtaggatagtttgaaatcaggtaacatgatgcttccagctttgttctttctgcttaggattgccttgactatgtgggctctcttttggttccatatgaattttaaagcagttttttctaaatctgtgaagaattttaattatagtttgatgggaatagcactgaatctataaattactttgggcagtatgaccattttcatgatactgattcttcctatccatgaggatggaatgttcttccatttgtttgtgtcctctcttatttccttgaaaagtggtttgtagttctccttgaagaggtcctttatgtcccttgttagctgtattcctaggtattttattctctttgtaacaactgtgaatgggagttcattcattatttggctctctgcttttccattgctgttgtataggaacgcttgtgatttttgcacattgattttataccctgagactttgcctaagttgcttatcggctcaaggcatttttgggctgagatgatggcgttttctaaatatagtatcatgtcgtctgcaaacagagacaattcgacttcctctcttcttatttgagtaccctttatttctttctcttgattgattgccctgaccagaacttccaatactatgttaaataggagtggtgaaagatggcatccttgtcttgtgccagttttcaaagggaatgcttccagcttttgcctattcagtacgatactggctgtgggtttgtcataaataactcctattattttgagatatgttccatcaatacctagtttattgagagtctttaacatgaagggatgttgaattttatcaaaggctttttctgcatctattgagataatcatatggttttatcattggttctgtttatgtgatagattatgtttattgatttgcatatggtgaaccagccttgcatcccaggatgaagctgacttgatcgtggtaaa

SEQ ID NO: 34995 - DNA, 1051 bp, Homo sapiens
ggtgtctacccaagagaaataaaagtccatgctcatagagaaacctgtagatgaatgatcacagcattattcacaattatgaaaaactgcaaacaccacaaatgggaatactacccaataataaaaagtaaaataaaaaataataaaaaataaatttactaatatatacaacaacataaatcaatctcaaatgtactctgctagtaaaaaaaaaaagccaggctcaaatggctacattcatatgattcaatttacctgacattctggaaaaaacagaggtactgagacagagaacagcacagtgctcaccagggctggatgctggggaagggccacaacggacttttaggggactatttactgttctatatcttgattactacagtgcttacattactgtatttgcttgtgaaagcacgcccaaaaggacaaattttactgttatgtaaatgatacctcaataagccagactttttaaaaaacagtctggtttaacactaagttttaagatctgttgagacaggaaaataaaaatcttgaaagatgaacatgccctaaatattttaagcaagttaagttagtcaaatgaatttaaccaaaatgtgggattttttttttaaagtctgtcacaacatccatactataggggtcaaaaggcctgttttctgcccctgcatctgccaattaagtgatacatgcagtaagatgatttcactgtatttgcttctaagtttactatctgtaaaatgagaaacatcattcctaatctcaaggcagctgtagccatcaaaagagatgatatatgggagtgagaaagaaggcagagaagatggtgagccagtaagaagatggtgagcagggtaaagaagacggttgggggaaggtggtgaagaccgtgggggaaggtggggaagaagacagatcgtggggaagaagatggtgggcagggtggggaagaagagggtggggctgcgtgggtgggtggggaggaagagggtggggctgggtgggtgggtggggaagaagaaggcggggctgggggtgggtggga

SEQ ID NO: 34996 - DNA, 1062 bp, Homo sapiens
aaattaagtacatctcccaagccaatgaggccatcatgaataaatacattagccatttactattctgaaactagtaaggccaccagagaactgagagacttgcagaaacacacatttcagtcgtgtggagggagcacctcaccctttgcactgcctgttccttcctatccctggccaagtgtgccctcctcgctcaggcctcgaatagcctggagagttgggcagcaggagttccatgcctcacctgacagctggggacacaaagctgccatggtgggtaggcatgcagtgtccttcatgtgctgctacacattctctaagtgacagaaagtaaccattagaaatatgctaagcctgaaattaaaaaataaaaaaaggctggaataaggtcctagtgctaaaacaaggattcaaactcaaatctgtctgacttcggagtacaaagatgcaatactgctaacacagatgcaagttaatgctgtcctgccaaaactgaagctcaccctgaataattttggtaactctgggctcaagtaataaaatttgggcagaaatgacaagctatatttagtgattctcactttctttaatcttctgatgttgcctcttttgagggaccagaaagttacacaagcccaagtacaccaggttccacagcctagtacaaagcctgatgtcctctgaaccccccaacaatgtcttcacttctaatcctatcataatttgcagaactgtgaagtacctgaatggaaatttcagaatggagacccacacagggtgggggtgggctgaggagaggcatgccctcccaatggccttactacctcttccagccatggattctgaatcctgtaagacaaaagtacatcagagtcatccctgactgggtcagctcaccaaggctatatatacacagaatttcacattcagtaaaagtcaaaattcccaaatgcagtcttagaatcctggcaggcacacagacaaatggggcttggcaggtctgggattgttgacagcttggtcctcactcttcccctccagccacaaggcttagacagcaag

SEQ ID NO: 34997 - DNA, 1050 bp, Homo sapiens
ataaaatacaagtgactacctggggtgtatctggataaaacggtgattttttaaaaaatttctttttttatatgcttcagcccatgttatttgagggaacttttgagtcttgtttaaacaaccagaagttctctctctaaagggcatcgtgtggttctgtacatcacagcccatcacttaacacacgctgagcacagatgtcatctctttctttcaaagaaaaatatgacaaagtgccatgggatttcacaagggctaagaattcccaagtagcaggaacccccagaagctggatctgttgccagcatgtttggctttcaggaaatggaaaacatgcatttccgcgccccctcaatgctctcagcagtttctgcatttacttgcctcccctttctgcacagctcctgttgagttacacattcatcacatttatgacaactcaaatttaacttaatttccttgcaatgcttcctctctcttagacctgaactcctggaacacctccaggaaatgagagaagaaaagaaaaggattcgaaagaaacttcgggattttgaagacaactttttcagacagaatggaaggtagtgcctgtcttcccccaccctcccttcccccccgccgcaccacacacacccatccctcttgtttttctgtcagatctgtggaatgccttcaaaggggggactcttctgcatcctccctgtaacctggtccttgggtttgtgcccagggacacttagaggttgactgtgagatgatgggatttgtgtggacctcccagaagaaatgctctttgggtaatgcccaagactaatgcagattcagctgacatttatgaaatgaacctgtcccatcaaattcttatctacaatgagcagcaggaagctgcgtttcccgctggtggtggcaccaacgcttttttcttaagaagctagaggttagccaagcggccgtagtggcacacctgtagctctagctacttgggaggctaaggcaggaggattgcttgaacccaggagtttgaggctgcagggagctgtggtctgc

SEQ ID NO: 34998 - DNA, 1049 bp, Homo sapiens
cacaccctgtgacaatttgttatccaagttcctcttactcttccttatgtgatacgggttccagacctttcagtggtctcctagctctgctgtgtgcacacacaccagtttatcaatgttgctgttaaaactgatacccggaactggacattaacctgcatatggtttaaccaggacagtggaccaaagactagtccttacattgatctggatgactgagaccctttcatgcctccagtttcttgcctatgcaactgacaaggtattgggaattcattttggcctttctgaggatagggtgtctcagcctcagcactgctgacctttggggctgggtaactgttgtgcagcactgccctgtgctttgtgggatgcttaccagagtccctggcctccacctactagaggccagtagtgtggcaccaccaccccttcaccagtcgtgacagccaaaaatgtttccagacattgcccgatgtccccaagggaacagatcaccctgattgagaaccactgctcatggccctggcatatggccctgactcatgctttgctgtatacttgtgcattgccactgatgtatccagcttctctttttcctaattatagggccttgaatttttccaatttgttacgtctcatacttctatttcagctgtaggaaatacactaaatctagcttttttactccaacatatcagatatccctacccgctttgtattatctgtacattttgaaatatgccttttctttgtccaagtgactcagatactgagtaaggcagggtcaggcagaggggctgctgtagactgcccttcaggttcatgtcacccttcagtcattactcagcagaaatttgggaagccagctttcctttcgtagggtctgcttacctggttgtttattgaaatccaaatactacatctatcaaaaaaggaaaaatggttcattttcatgactcatttttaaggaaccagtctcatcagttgatcactgatttttcccaattgcttatatattatctatgtattaattccttctagaatct

SEQ ID NO: 34999 - DNA, 1036 bp, Homo sapiens
tttacgtgctgtagttaggaatgattatttcagtatatggggccctcttgtctactgagggaaaccaattgagaatttctccattttcttgtctgaggtaaggtaccacaagctataaagtcttcttttatgtattccttttcttgccttttgcagatcttgatacatcatatgcctaattttatggtattaggcaatgactgtgctcactgtattaagtagaacttgttttatgaaaatgctgtaaacacggtacttgaaatttgggccagtatactatattgtgtctttaaaaattagagctattttcttacaataagccttgatgttaatgaaagacaaattttgtctggctggtaatgtcacccaagaatgaaaccacagtaattggagaaatttgggtaattgtgtgtatgaaaattagcatgtttctcttagcagcatgcaatagaaccgttactagataaaaatgtgttcttgaacacatccaaaatgtagacacttaataagggtttcaccaaatgaattgaagataacctaatgatgctcttttttataaaagacatttttcccattcttatcctttagcttaattttttttcacaagtatattttggctgtggtttatctcctggcccacatcatggtcaaaatttcagataattttgcaatgactactttgcttttgtaaacagtgctgtcttttggttcactttgttcctgttggccaggcctattagaaagtatttggactgtactaattcttggcaattccagtttagaatttggtgtgtgtgcaggtaagattgtatctaagtggtttctccaaaactcacccctggttttaaatgcttttgggaacgaaccagctgtatatgaactacagccagctcagttctgaaggcctagattttccaacccaaagaaacctagagatcatctaatcagttctcctagccaacataagaatcccctctaaaacttctctggcagaatagagacattgtccctacagagagattccatcctcaagctt

SEQ ID NO: 35000 - DNA, 1030 bp, Homo sapiens
aatatttttacattctttatgctttctaagcctactgcttaagagagcttagaagcatacctttgataacaaacaagacattcataattttaaaaaaaaagactagttccatgtttcttatcctgcttcaaaaaaaaggaaaagagaagagagaaagaaggagaggagacaaggcttttcaatcaagactgagaattaatattagttatcacaagatattaagtgcaggcttttatttgccctgaaaaagtgaatttctgaaaagtatttatagaatggatgactgttattttgacttcactgttttcatggaagctttaggactttgttttaatattataaccagaaaaattaacaagctctatttacttcaaattcgcttccaaatcaatccaatagccaaagcctaatgaagctttggagttcacatggattttgaaaatttatttccactttcctttattgtcaggccaaacaaaaaatgtttatggttctctgtagttcttcggttaatattgtagtttcttcctgtgcaaactgcattatacagcatactttctgatattgtcattcctggctctgataaactattaggccacttaactatatcctgtgcagggcaatggaaggaataaaacaaaaattcaccaactatttgaagccagagaaagagcagtatcaaataaagtctggggatagaaaaaggtaggtccagctggacagggacaagtcttggcaaagattagactgatagcttcataattaatggctccttgacctgaatgtgaaatgttacctgagggcccgggagagatgagctctcttcatatttgccccctggcatcctacgtttcttttataacacacgtgatacttggcacttgtatgttcagtatctctctcctgcaccaaatcccttatcttgcttactactaaattccagtgccaaggacatatatgtgttcaatgaacgcttgccaaatgtatgaatgaatgaatgaatgaatgaatgaatgaacgaatgggaaag

SEQ ID NO: 35001 - DNA, 1080 bp, Homo sapiens
aatacatgctgtggagagaaataaggcagggtaaagaggatggaaagtggtaagaggtaaaggatcgatatcgtagaggacattcaagtcaggcctcactgaaaatgatgcttgcacagaggcctgaaggaggtgagggaatgagccatcaggatatctggagacagaaaatccaggcagagggagcagcatgctgagcctttgaggacaggcaagaggtggccatggttagaacagagttgagaggagcattgtaggagatgaggtcaaagatgtagcagaggtcctgatcacctaaagcttcatagccatttttaggactttagcagttaccttaagtaggataaggagccacagaggattgagaggggaaggaagccattttgtgatataccttatgaaaggatcactctggcagctgtgttaagtatagtgcatggggtgatgagaaatggataaggactaaagtaaaataattgacagaatctagtaaagaattcaagtaggcagttagatatattaatctggaggtcaagggagagatgaaataaataattttggaagtctttggtgcacagttggtttttaaagccttgagagtggataagctgacaccaaaggactgagtacaaagggtaaaaagaaagggtccaaggactaagccctgagacctaccagcatttagggggtaagcagatgagaagggagcaccacaagggactaagaaggagctgctgccgatctccagtgcaacatggaggcaagagcctcattagatttaggtccagagaaaattagaataaagaaattgcaatagggagtgagtgataacttcacatatatctagctaacccacagctaccttgatgggagctctattggtgggaagaggcaggaagagcctgattaagtgggttcaagaaaacctaagaggaaatgagttggatactaccagtatggaaggtctttgaacaggttttgccctacaagggggaagaaaaacgaggtagcagttggagagaatacaagatgaagacagtttttagaaggcagtgatgttacagaatatttgtgtaagac

SEQ ID NO: 35002 - DNA, 1028 bp, Homo sapiens
gctccccccaccccacaacagtctccggactgtgatgttccccttcctgtgtccatgtgttctcattgttcaatacacatttctacactactaaaatggaagatacaattcctttttagatttttctccatacactgtatgaatttataaattttaaatatatatatatttaaacatctactgtgaataataggaaatttctgtataaacttgcactgttctccctttttgaatacaaattacttttggtaaaatacaaaagctgtccattggtagaaacagcccttgccaatttgcctctaggaattatttctctttcaatgtgatttatttggcaccaagcagtcccaggagtggcactctgctcagattttgatcagagatgcatactggaatttctgggcactctttggatttcctaggtatgatatgatgtagttagagtatcattcaatgaccatttgatcttttaaaataaaattaagcttttttctcaattcaaggggacttatcaacaaagaaaatactccttctgggttcaaccaccttgatgattgtattttgaatactcaggaagtcgaaaaggtacacaaaaatacttttggttgtgctggagaaaggagcaagcctaaacgtcagaaatccagtactaaactttctgagcttcatgacaatcaggacggtcttgtggtaagtgaatacgtctataaagttttacttgttaggaaatattacatctcttttctttgctttgtaaaaaaattaaaagtaatttcagtctttcagttttgagtgctggaagagaccttagagctactaagtgtatatatatttgtatttctttttaataaatacaaaaattaaggccgagaaatattatattctacaaaggaacaagagacaccacacattctgatttccattgtttttttctcttttttttcaagcatttttaaattttgtttttgaaataaaattgcccataaagcattttttcttctttttccccattctatttgttcttgtct

SEQ ID NO: 35003 - DNA, 1052 bp, Homo sapiens
tcaatgagccgccataaaggtcttctccagtatctccaggagagtcatgaacatgtcataaattataagaagatcaagaatcattaatatagcctacagtcaagagttcgtcatagtatatgcttctatacaattgattcatttaagatttttcacaagtctttactcaaaaaataaggaaaaattaagctaggctgtaatattctattcaaaactataagctttatgaagtggttaaaaagtgtttagaaacatagaaatctatttatattattatctattattttgcctctagtaacttagagatgcaacaaattaaaaaatattcttgaagaagccaatgatgactatgtttcaagatgagtagaagggtcagtaaagtcatactaaagtcgtcatggcccatttttgaaatagcagtaccgaagatagacaaagactacaaataacttcattcataggtacaaatgatttgttatttgtctaaattcataaggaaatataatcagacctatattactatttgctacaattttgtagcaaattaatcttcattatgtaataataaaatcttcattatgtaaaaatattcagctaaattcatttagtaaaaaaatctactatctgccaagtttacagaaatgtgaaattttggtaatgggtatatggaagtctgttatgatagtgtctctacttctgtatatgtttgaaaaaaatcataagaaatattttttaaaagcaaagcatcatttaagtgaaaatgattttcaatcttctaaaaacacagtgaactggaaaattgatccaaatgtttctttgttatataaagactatattaaaatcctactgcaaagtaaaagaaaagcaggctatatttggggaataataaatagttcagcattgccaggacattaagtaagtatgtaggggtgaggagaaaatcctgaaaaaaatatggaaataaatctagataatgaaagtgagaggtccagagatctaagttcagtgaaatccaagttatgtcaaatgtgattgaaatctgacagaatatt

SEQ ID NO: 35004 - DNA, 1062 bp, Homo sapiens
gatttattcaaaaaagttgaatttacctttcttttttttttttagaaaaagaacttggattctcttattcctagtacagatagcaactattaatattttgtatttggaggaatgttttgtcatagacactgagtagtttatacactagggataaacatacatctgtcaatggaaaatgttaagagcaatgttacattcagccttctttaatttttctaaataaacgtagttcaagattgaatttctaataaatattttaaagttttcagattataataaacattttcaggtcacacaatatcttagctgatagagatacactgaaggaaattatgacaagtccatttttacacataaaaatggcagatgaactttgttttgaccaagtacacatgagtacactttaaaaattgtaaatgaatcttttgatctatgtccttttcttgcaaagagatttgtctgtatttctaaatttaaaatccctttcaaattttaaaccatcattttaagataagctctgaaataaatttgacttctgatatcaagtatagacttagaatattgttgctaaacaaataacggactccagaaccaaagtatagtacattataacccttgtgcaaattatcccaaagccagatatggaaattgattttagtttttgcatgagaaaagacatgttaatgggaaatagtggggccaggggtggtaaaaataagataggagaagcctcggaagttgctctttaaaattaaggtgcctaagtaacaaagtgaaaataatgaggtgggggggtggtttaagacatatgttttataatacctttaaagaccaagctcaggaaaacatggtatcttctcatcaaatctaagaataaaactcagggaagctgggtgcggtggcacacacctgtaatcccagtgctttggtaggcagaggcaggaggatcgctggaaaccaggagttggagaccagcctgagcaacatagtgagactctgtctctacaaaattttttttaaaaattatctgtgcatggtggcatatgcctgtagtcctaccta

SEQ ID NO: 35005 - DNA, 1087 bp, Homo sapiens
ttctgtaggttgtctgttcactctgatgatagtttcttttgctgtgcagaagctctttagtttaattagatcccatttgtcaatttttgcttttgttgcaattgcttttggtgttttcatcatgaaatcttcgcccatgcctatgtcctgaatggtattgccaagattttcttctagggattttatagttttgggttttacatttaaatatttaatccatcttgagttaattttagtataaggtataaggaaggggtccagtttcagttttctgcatatggctagccagttctcccagcaccatttattaaatagggagtcctttccccattgcttgcttttgtcaggtttattgaagatcagacggttttaggtgtgcaatgttatttctgagttctctattctgttccattggtctatttgtctgtttttgtaccagtaccatgctgttttggtcactgcagccttgtagtataaactcaggtagtgtgatacttccagctttgttctttttgcttgagatcgtcttggctatttggggtcttctttggttccatatgaatttaaaaaaaaattctaattctgtgaagaatgtcagtgttagtttaatgagaatagtattgaatctataaattattttgggcagtgtggccattttcacgatactgattcttcctatccatgaacatgagatgtttttccatttgtttgtgtcctttctgatttctttgagcagtggtttgtacttctccttgaagaggtccttcatttctcttgttagctatattcctggacttattcttgataacccaaataattattacttccccttatttttattttaaatatattttcacttatttatttacagggtcaattcaaataaaaacacttcacttggtgttaaagcaaattatttaccagccagtatattgacattaagagatttttatgcttgcgcttggtatttcatgtctcaggaatatgacgagtttattttatgttttatagacatagaatcagccagtcagttaccatatcacactaaataattttgacatgtctctaaggaagccctgctaaagcc

SEQ ID NO: 35006 - DNA, 1030 bp, Homo sapiens
tacatatttttcctttgtctattgactgtctattccatgagattgtaagctccgtaaaggcaggaacttcaattttatttgctcctctatacactctattgccttaaagagtacttgttgaatgaataaatagatgtgtgctttatttttaaaaataaggtttggcttttatttttataaatctggaatagctaacaggctattttataaataattgctgttagatctataacccataccaggtggattacatatttaaacataaaaataaaatagcaaaagtattggaagacaatatgggtatatatgttataatggagctggaaaggagtttctaagtgtagagttaaaaaaagaggtttcacagtataacatttttagaattctgaatgtcaaaaataaaacaaaagcccaggaacaaaataaataacatgatgataagagtatttgcattatatagagagaacatttaatattctttatatagagagaacacaagtaaaacaatgaaaaaaacacaaagaagggaaaaatgaaaaaatgctgtgaacaggaaattcacaatagtagaagtaagtgtaatctcactaataatcagagaaatttaatctgcaactataaggagctgcatcttccaatgtttatgagcatagaaggaaataaacactagctgcaggtaaaagtgcaagtactgcagtgaaatttgtcattatttatcaaacagctaaaaatgtgtattttctttttctttttcttttttttttttgagacggagtcttgctctgtcgcccaggctggagtgcagcggcacaatctcggctcactgcaagctccgcctcccgggttcacgccattctcctgcctcagcctcccgagtagctgggactacaggcgcccgccaccacgcccggctaatttttgtgtagtttttaatagaggcgggatttcaccgtggtctccatctcctgacctcgtgatccgcccgcctcggcatcccaaagtgctgggattacaggcatgagccaccgtg

SEQ ID NO: 35007 - DNA, 1061 bp, Homo sapiens
atggaattggtgttttggccctcttgtcaaaaatctgaacctaatttttcaaaaaactaatttaggattctcactcttctccctcccaccttcattttctgagaacattaactttcaattcaatagagatatgagcatgatttagatctacaaaatataatagcacagtccagaggtttctattttttttcaagcagcaatcaggaaagactgctcttatcctcctacctcccaaatctgccaacatattcacatctgcatccttatactctgccttctctcccattacagtggatgagctgaacccgcacctctctagagtcacgtacatgtattcttgtatgtgtactctgagtctcatcccctctcgctcaagggctatgttggaggctacctccatcctttatatcatcactttccccattttttctagatgagtcccatcagcaaagaaatatgcaataaataactctcaacatttttgtaatccctctctagaaaccatattcctcttctccgttggagcaaatctctgataaaggattgtatgtacttgctgtctttatatcctttcctctcattcttcaatccacacaccacttaatgtgttcttgttaagaacaacagcctctatcatggcaaatccaaaggtcagtctactgttctcatcttactctatctctcagcactatttgacccaactgatcactcctttttgaagcactttcttcactttgcttaatgtaacattacagtctcctggttttcctctggccttcctggatatcttttcttagtctcttttgtataagctttcttcttttcgagacttctcaaatttagagaacccaaatctcagtcctctgacgtcctctcaacctatactcattcctgggtgctttcattcagttctgtgattttaaacgctatctttactcataagcctccaaaaattatacttctagctctagcctcttcattatattccaggtagttatatccagttggcaagaccagctacttaatttgttctccccatcctccaccccccaggacaacgt

SEQ ID NO: 35008 - DNA, 1027 bp, Homo sapiens
atgggttttgagtagctgattttttgtttagtatggttgtatccatgtttctaagtgtgttttgttctacatgcttttagtataaatgttgtacagcctaataaagtgaattggagagagtccctcttctttttttcttactctttttcctttttcttgaggcaggttctctctgtctcacccaggctggagggcagtggcatgatcacagctcactgcagcctcaatctcccatgttcgtgcctcccaattcagcctcctgagtagctggaactataggcatgtgccaccacacctggttaatttttgttttttttgtagagacgtggttttgccatgttgtccaggctggtctcaaaactcctaagctcaagcgatccacctgcctcagcctctcaatgtgctgagattacaggcatgagctgccgtgcctggcccaagtcccttttttctaatctctgaaacaatttaagattgggactatcaattgctttaatatttggtagaacgtactgataaaactttctgggtctggtagtgtttattggcttatttgtttttgatgtttttgttttttatttgtttttggtaaatggcttttaataatcaatttcttttatggatataggtctattcacgtttctgttctgaatttgttttgataagtgttctaggaaattgtctattttaagcaattaaatttatcagcatattttaatgttaactcttatttttaaaatattctagctgtagttacaaacttcttttcatttgtagtattctcttttgagaccttctcttttttgctcctgattgggcatgctagaaatttgtctattttaattatactttcagagaaccagcttttatttttgttgattctctactgtatgtttgtttcctatttcattgatctctgattgttatttcctttcttttctgcatctattgtccatatagagatctttgtttttttctgtcagcttttcctccatagacatatattttaaatatggtacttatgtgt

SEQ ID NO: 35009 - DNA, 1024 bp, Homo sapiens
aaaaaccaactctgggtaaaatttgacaaaagaaaaggaaaggaaaggaatttctacaaaccagacttcccagaggacacttaccaagacagctgtaaggttctgggcagcaggcagtgtgagagctgaacagtgtcttcaacagactgccactgggagagtcggctttagctattctcagtttttgagtcttctcatttctggtcaaaattatagtgaatgggtatctgattgatatttggaagctcttggaagacatgtccagctgttcatcagagatacacctttattgaaacactgtatccaataggagaagagtggtttcttaaaaatacatcttcctccaaagaagggaaaatgagtgttggatgtggaaaaatattaattgtctacttcagcaccataaagagaaaaaagattgaaaagtcctttaagcatctgaggtcaaggatggaaaatgggataagcacataagtaattagggcaagcaacaagtgaccgcaattataatgttcatgtagggtagatatgacaagaagggtgggttgaaaggtattggatggcaggaataagaatttaaatttgatgatgggcagcagtaattaaaagtttccaggaaaggagtaacttgaattagagttggctatggtttggatgtggtttgtttgtctccacaaaatctcatgtggatacttggtcctcagcgttggaggtgggacctaatggggggtgtttgggtcatgggggtggattcctcgtgaatagattaatgccctcccttggaagtgagtgagttctccctgtattagtttctgcaagagctggttattaaaaagagcctggcacctcccccttgccatatgatctctacacaggttggctcccttttgccttccttcacgaggcactcaccatatgcagatgcccaaacttaactttccagaatgagccaaataaatcttttttctttataaattacccagcttcaggtattcctttatagcaacacaaaacagactaagag

SEQ ID NO: 35010 - DNA, 1028 bp, Homo sapiens
acttatgttttctataaaactgaatttctgatattttcttcagttgatctcctcaggatgaaagttatacttctgtgggctggaagtgcctagaaatgaacatccttccagggatggggggtaagccttacccatggctgaaaactgtgggggtgtaaatttccagctgctttactcctcgattggaattattctggggtgtgtattttacactgttgcccgagctctcccctaaatttaagcttcagaaccactgtgggagcttaagagtgacatttcttgttggctcccttcctccctctcttatcacccccattccaccgcagaaccacccgcataaactacttgctctcaatcctcgcagcaagttctgcttctggttaagttggtgcgggtccaactgagacatctcaaatactaccccctccacgaagccctccccatcctccaggtacagttaatcctcatctcctttcttgtcttgtggcactttctttctccttctgttagaacattctgccttggataagttggggttttttttcctctcacgttgcattgtaaatttttctagggtgagaacaatatctcatatttacttatacattggcatttctctttttttatttttatttattttttattttattattattatactttaagttttagggtacatgtgcacaatgtgcaggttagttacatatgtatacatgtgccatgctggtgtgctgcacccattaactcgacatttagcattaggagatatacctcccccctccccccaccccacaacagtccccagagtgtgatgttccccttcctgtgtccatgtgttctcattgttcaattcccacctatgagtgagaacacgcagtgtttggttttttgtccttgcgatagtttactgagaatgatgatttccaatttcatccatgtccctacaaaggatgtgaactcatcattttttatggctgcatagtattccgtggtgtatgtgtgccacattttcttaatccagtctatca

SEQ ID NO: 35011 - DNA, 1005 bp, Homo sapiens
atgaaggatcagttttatttctaatactctgggaaaaggagggagggatgtagctcacaagggtctaatgtttatttattttgggaaaagcaatcacccagaattaatctatattatactgtttttctaactaattagaatttaataaatagtccagtttcaaaaatcacattagtggtcaaaaactacataacatgtcttcacctcattcctccaaaaattaaaaatagaactaccacatgatccacttctgggtaaatatatccaaaagagttgaaagaagggtctcaaagagagatttgcacacctgtgttcatagctgcattacaatagccaagagatggtaataatccaagtgtccatggatggatgaatgggtaaacaaatgtagtatatacaaccaagagagtattattcagcctcaaaaaggaaatcctgtcacatactacaacatggacgaaccttgccgacgttatgctcagtgaactaagctagtcacaaaaagacaaatactgtatgactccacttatatgaagtatctaaagtagtcagattcacagaaacggtagaatggtggttagcaggggctgggggagtggaaaaaggagatatgtttaatggatatggagtttaagtttgcaagatgaaaatgttctggagatctgtcatacaacgatgtggatataaataagactactgaactctacgcttaaaaattattaagatggcaaatttcatcttgtttttttttaacttaaaaaaactacatataagatagttttgcctgttttcaggtttcttttcagtgttttaggtattcagtatttaaatcacaaaatttgtgatttgaacatttttttcttccttcatgagattttaagtggattgatacttgctttccattctgtcccgatgtctgacctttgtaatgtaaagaagaacattttgtttaattgagagaagtctgctgtgttcttgttgatagaggaccatcctagagttggg

SEQ ID NO: 35012 - DNA, 1047 bp, Homo sapiens
tgatattagtatttaatttccttacaaatatttcatacccccttagttaaagtgtatctcctttgatagaagaagctggttgtattcctttatgtgaccccaaaatccctaacagcgttataggcatttctgttgaaaaatgaataatagtttgagaatgaatgtggaggcaaaattaatgccactctgtcctttaaaaaaaattcaggcaatgatttaagctcttctgtctattttgtttaaatacctattttgctggatatggagaacagggcaggaacatgaagtaaaaaaaaaggaagaaagtggggtgggagaaaaggggattaatggaatagaaacgtccaaaacacttttggaaattattgtctatgattcccttgttattaagaaagaacagtgtatatcctctggggcatatagggcagaaaaaaagattatgaacaattgccaagtactctaaactgaaaacaaaatcattgtagagtaagtaattactgtatcccctcctgattctcggtcatagcgaagaaagaatttgaaagcttttttcagagtcaattttaccttgctactgattatatatttttgtacttgctatgttggaaaacaatggttgtttggcctctacttttatccctaattgtttagaacataagtgttgcaaagttgaaactttagaaggtgtgttctgagcaaacaggaggaaaagtatttcttaatcagatgatgacctttgtttccaagtaggtgatgtggccaagagttgaatgcagttttaataactaggatattcaagtccctgaggcgggtgctttgtatcagagataatgcaaatagttctttttatcttctcttcttggccattgtacccagaggcttaccaatcttccacatttagtcaacaaacctttctaactacttgctagactctgcaaattatggcaggtcttctgtggaaagggataaacaggaaaagtcagtatgactgtggactgtaattgtggaaagtaaacacacacacactaccaccacagcctgtctcac

SEQ ID NO: 35013 - DNA, 1050 bp, Homo sapiens
gccaggcgtggtggcacgcacctgtagtcccagctactcaggaggctgaggcaggagagttgcttgaacctgggaggtagaggttgcagtgaggcgagatcgcaccactgcaatccagcctgagcaacagagcaagactctgtctcaaaaaaaaaaaaaaaaaaaagtgaaggagaagcagaaactttttcagacaaacaaaaattgagggaatttgttgacagtagacctgctttgcaagaaatgttaaaaattcttagggagaaggaaaatggtgtaagtcagaaacttggatctacataaagaaaggaagagcatcagaaggaatgagttagggtaaaaaaaaatatttttcttatctaatggataacagtttattcaaaataataatagtaacaatatatttaattatgtatatatatgtgtttatgtatgctcacgtataaatgacatgaatgacacaaatgatacaagcagcaaagaaataggattattgttattgaaggagatgtagaaaagttttgaactgtggcagcagtctggtcttctaaatttgatatgtgtaaattaaagttttctttatattctcattatgttagggtttcaactagtttccttttccttgcagtaatttgatattaaaaatagtagaagtgttccaggagcggtggctcatgcctgtaatctcagcaactcagaaggctggtgggaggattgcttgaggccaggattgcttgagaccagattgggcaacacagtgagactctgtctcttaaaagtaaagaataaaacaaagctgggtgtggtggtgtgttcttatagtcccagctacttgggaggctaaggcaggaggttctcttgagccaaggagttcaaggctgcaatgagccatgatcatgccactgcatgctagcctgggtgacagagtgagaccccaacttgaaaaatatttaaaattcatgtatttagcaaagaaagggtcccagagccatttttaaaaagtcccagtctttcagaacagttcattattttaataattctaaaaagtaa

SEQ ID NO: 35014 - DNA, 1030 bp, Homo sapiens
gccaccacacctggctaatttttgtatttttagtagagacggggtttcaccatgttggtcaggctggtcttgaactcctgacctcatgatctgctgcctcggcctccaaaaatgctgggattacaggggtgagccaccatgcctggccaattagttttttttcttggcaataataataataggcaatatttattgagttcttactaggttcctggtaatgttatagatgctttgtatctatttcttcattttatcctcaaaaccctatgaggcaagtactattattatctcttcacgtgaggaaacttgcagcacagaaagtttaacttgcataaggtcacatgactagtaagaggttagagtcaggattctgaatccagaaggcctggctcctcagctccaagctcttaatcaccacttaataactgtttcccttataaacagcattgcaggaactattcttgaacatacatttttcacacttacttaattatttttgttggatgtacttttagaattaaacttgctggttaaagggtatgcgtatcatcaaatttgtgctctagaaaggtcacaccagttcatgctgtgagcagcaatacgtgaatgtgtctcctttcccatactttctctagtactcatattattatttttaatatttgccaatataataaatgaaattgtttcttttgacatttttgcttatttaattactgtaaggttaacatgtttaaaagcatattttcccatgtagttcttttgtacattgcttttcactctcttccttgagttttcttaagctggtgctcgtcttttttatgactgatttgtaggagttccttttcttaatacaactattaatgtattgttgtgtattggaaatatttctctgagcttatgatttatttttgaaacttgaaaatatttctctgagcttatgatttatttttgaagctttttaattgtcgccataagaagtttaaagattttgttaattctttatatcaatttgtgttgcttgggtttgatg

SEQ ID NO: 35015 - DNA, 1053 bp, Homo sapiens
tggcaataaacatacctctgcattttgcagaatctaatcagaatgataagattcgtagtttcactaataacctctaagaatagagggtaatttattaatttttattagtcactttatcagtctgccctttgagaaatttacgtgaggcctctgagaaccatatcatggtcatgaggttgtaagagatttgtaagaaacataatccctccttttgcataggaaaatgaaattctgttgcctatataagcttctcatcactccaaagaagtgattccagtcttggggaatgaaatgcggaggtaaaacccagtctgattctgtacagctggcatttcataattatttttctcattcttctgtaaatacatatttagaaagaaatataattcatgttttgtttattcttatgtagtttatattttgtgcccatgcagccttataggtttctattaaaattttatttctccacaagccctgagaatttacgaagctatagtttctcacaaattaattaagattcccacctctccactacacaacagatttgtttattgattgattaattcaggaaacatttcttaaatatttacatacatgagacatggtgttagctgctctgtaataatgataacaataatagctaactttgtaagagtatgctgatcaaattgtatgttatgaggtcctgggcacttggatttaaattgtagctcagctatttggtacctgggtgaatgtggacaggctaatcaatctctctatttcagtctagtcatctccaaatggggaactactagattcctattgctaccataacagattaccatgaacttagtgacttaatgcattgcaaatttattatctcactgtactgtgggtgagaagtgtgtgggctcaactggttcctctactctaaatctcacaaggccaaaatcaaggtgacagtctaggctcctgtatgactgttctgggtgttctagggggaatctactcccagactcattcatagtgttggcagaattcacttccatgcagttgtaaggctgaagtctc

SEQ ID NO: 35016 - DNA, 1017 bp, Homo sapiens
acactttttaagtattattttactgtcatttcagtggagccttgggaagactagataaacacatataatcggtctgtctctttaaatggaaattctcccttgccttttttttttacccccacaacccatatttgattttaaatgagacagaattttataatagcagctgtgcaaacaacatgtgagagttaagtgcctgtgaattttatcaaatgcttatgagcatttgataatttagacagtaactgtttttcttaagaaaaccaccgtaataatagggccattttaatcagcacagtggctaattgtaaataaatctaatttaataagctaatttgtacctaagccttagggctttctctttcttcattatatgaggaactcactagataccttggagtcaagcctgtcttttatctacactatcttgatgccatctgtattgtgttgagattagctgagtggtttcgacttgcaaattttacagtaccacatgaataaacgttggccagatactagttatgaattgtcatttcttggatagtatgaactccataacaagcatatgatatatttccttccctagggtaatttctttttactgggaagcttcttttcttttgaaattactcaacttacacaaatatctgtttctgcgagaaacagaatcattatattaaactacaaaatttaacctttccattttcagtgtgtatcttttgggttttctataagcaatgccaaacatatacactattctttttttctaagtaaagacttaaacccaaagcaaaattaaaggtttgatgtctacgtatttgcccaaggtaccaatcaatcagcagcacaaagcctccactggaataaattggaaatctggtggcaggaaacccaggtttccacagatgacttcatacattttggcagtgttccaattggactgctctcatccagatccatgtgacaggaagaaccttatttgtatctataaccacccatgacctctgagattgtagg

SEQ ID NO: 35017 - DNA, 1095 bp, Homo sapiens
tgtgagccaccatgcccagcccacttacataattttctataaacttgatgcagtttttttttttttccaaattgctccaacaactccactgttaacttaaaaaaaaagtaatttatccattctttatttctgtggtgattcctctttggggccctttttattttctgctcccacttgtattggttgtagatgtcatcttgaattttccctcaccagtgttttttcctggacctgctatttcctggagtcttttttctacccattatgttaaacattccatgggttccatcagattggaaagtattttcttttgatcttggaaattttcttgtgttatccttcctatattatagtttctttaaatgacttatcactgtcttttaattctgttttctgtgaaatttcctcatttattttcctgccaaacctatttttttaattttagcttttctatttttaatatccaaaataatctcacttttgattcctcttgcaaaacaccatactcttttagaacattctcgtcttacttttctgaggatactaacaatggtttgttgttacgttgtacttaagttttcttcttttctctgtattatctgtttatgggttttctttttgtctttattcaaacataaagtgattcttagctgttttgatctgaggataacattttgtaaatgggatcaggggcttgtctcttggcatacttcactttggaaggattagatagaaaaatgagaaatttagctgtgtcatttggggatgcccaaatgtcagtatgtgaagatctttttctcttcagctactgagttcatcaagagcagggcttgggggaggtgggaagtagtatgcttacttcccatcagtaaggaaataatgactccttatttcttagcagacttttcactaatctcacattttcaaatgtgtttctcgtgctagtccttaactatctcagatattcaagaatcctttgatattacccggagactaagcctcagcactcctgtctgagcacatgcctgcctggatgcaggcggtgttgaaggacttgccgagcctgacaggcttgtaaacaatctgtttccagtc

SEQ ID NO: 35018 - DNA, 1050 bp, Homo sapiens
ggtcttcaacaaagctgacaaaaacaagcaatggggaagagactccttattcaataaatgatgctgggatagctggctagccatattcagaagactgaagctggaccccttctttacaccgtatacaaaattcagctcaagatggattacagacttaaatgtaaaacccaaaactataaaaacctggaagacaacctaggcaataccatctggatgtaggaaagggcaaaggtttcatgacaaagaccaaaaacaatcacaacaaaagcaaaaattgacaactgggatctaattaaacttaagagcttctgcacagcaaaagaaactatcaacagagtaaacagacaacctatagaataggagaaaatatttgcaaactatgcatctgacaaaggtttaatatccagcctctataaggaagctaaacaaatttaggaaagaaaaacaaccccattaaaaagtgggcaaaggacatgaacagacacttctcaaaagaagacatacatgcagccaataagcatatgaaaaaagctcaacatcactgatcattagagaaatacaaattggaaccacaatgagatattatctcaccagtcaggatggctattactaagaagtcaaaaattaacagatgctgatgaggttgtaaagaaaagggaatccttatacactgttgatgggagtgtaaatttgttcaaccattgtggaaagtagtgtggcaattcctcaaagacctaaagacagaactatcattcaacccagcaaatctcattactaggtatatacccagagcaatagaaatcattttaccataaagacacatgcatgtgaattttcatttgcagcactattcacaatagcaaagacatggaatcaacctaaatgccatcaatgacagattggataaagaaaatataatacatatacaccatggaatattatgcagccataaaaaagaacaagaacatgtctttcatgggaacatggatggagctagaggctattatccttagcaaactaacatcgaaacagaaaaccaaatgctgcttg

SEQ ID NO: 35019 - DNA, 1048 bp, Homo sapiens
gattgtttaaatggtacacctgtatagggcatttaccatgaatggagcttgcaggactagaagttgctctgggtgagtcagtgagtgagtggtgagtgaatatgaaggcctaggagattactgcaccactgtaggctttataaatcttgtacacttaagctaaactaaatttatttaaaaatttgttttgtcttcagtaatagaccttagcttactgtaacttttttactttataactttttaacttttaaaaacattttgattcttttaaaataacacttagcttaaaatacaaataccttgcatagctctacaaattgttttcatcatataattttaatatttttctatttttaaaattttcttttttctttttttactttgtaaaattgtgtttttttttttttaaactaaggcataagcacagatgtgagtctaggcctacagagtcagaatcatcaatattactaccttccacctccatatcttgttccaatggaaagtcttcaggaacagtaacacttgtggaactgccatctcctacaatagcaatgccttcttatggaatacttcccgtagtacctgcctgagtctgtgttacagttaacatacacatgtgtatatgtatgtatgtatatgtgtatgagtctgtgttataattaacatacacgtatatatgtatgtatatgtatatgtgtatctaagtctgttatagttaacatacacatatatatgtatatgtatatctgagtctgtgttgcagttaacatacacgtatatatgtatatgtgtatctgagtctgtgttacagttaactttatatatatataaacttcatacatataaatagaatgagtacactctaaaatgcactttatacatatatgtataaatagaatgggtacactctaaaataataaaatgtatagtatagtaagttttcacttaatgttgttgataatttcttggaaactgcaactttaagtaaaatgatgtatcaggaaataaattttatcacaggcagattaatacaaacaaaagttaagta

SEQ ID NO: 35020 - DNA, 1112 bp, Homo sapiens
tgtaattcaatcataggttgctattttggttatgctttattattgtttcacgtaaatgcaatttaacaatttggcatgaaggtaaactattattgtaaaggaatttttaagacagaaaggcctatatcaagccctttaagcagattttggatattttcatttaaaggtatatacattataacttataaagcatacagtctttaaactctttttctcgctgacaatgttaacggcttctttctcttagtttggcatgaagatactataggttatgccgttttaacctacagtgtagagtctcaagtcaccaccaggtgtcagaatgtgcttacttattgtcatactacttccctggccaaagtgtgctgttaggcaatttgtgacttctggcatattctgtttctaatggcatattctgtttttaatattcatactattttgaaagaaatatttcagttgtacagaaaagtatctttcagtgatgtagacattagcttatataattttttcttcatttctaaaccactattaagttgctgttttgtgataattagcacatagcttaaaatcaaatataataggagctctgaaatgtatgagagtaactctgcttcatgaagtcatccaaatatcccccttttctgaatatttttgttacagtcataactttctacaattttagagtaggaaaatttaaaggttatatggtctggtaagcctcatgtgggtactggctatattctagcctcataagaggctttaaaaaactgtatggattcttcttctcagaatgtgatatattcatgcccaggattataaactttccctagttgaacatcacgaattatcataagagttgtgggtgggagataatcctgagggaaaagagttgttcagataaatgggacagagacaggaaaatattattgaggagcattaaattcagtcacttctatttgtaccttatatgactgctagtttggtccagtggaatcaggaggcttgaggaccacaagacagttcttggagctgggtatttttttctgaaattgctggaagtatatttatttgggggaaggttcaaaaaaaccttgttggaaaagaaagactaa

SEQ ID NO: 35021 - DNA, 1040 bp, Homo sapiens
tgttaggatgatttgctttcttttttcttttcagacagtctcactctgtcacccaggctggagtgcagtgatatgaactcagctcactgcaacctccgcctcccaggttcaagtgattctcctgcctcagcctcccgagtggctgggattacaggcacccaccaccacacctggctaatttttgtatttttagtagagatggggtttcgccatgttggccaggctggcctcaaactcctgacctcaggtgatccacctgccttggcctcccaaagtgctgagattacaggcatgagccaccgtgcccagctgatttattttcctttgatgtatactacccagtaataggatctctgggttaaatggtagttctatttttagttctttgagaaatctctaaactgcttttcacaggggataaactaatttacattcttaccaacagcatataaatgtacccttttctctgcaaccctgacaacatctgttgttttttgactttttaattatagccattctgactggtgtgagtgagatctcattgtggttttgatttgtgtttctctaatggtgagtgatgttgagcatcttttcatgtttgttggctgcttatatgtcttaggaagtgtctgttcttgtcctctgctcatttttaatggggttatttattttattcttgttgactggtgtaagttccttatagattctagatattagtcctttcttggatgcatagtttgcaaatatttcctcccattctgtaggctgtctgtttactctgttgatagtttcttttgctgtgcagaagctctttagtttaattaggtcccaaattgttatattttggctttgttgcatttgcttttgaagactcagtcataaattttttgcctagcctgatgttcgcaaggatatttcctagggtttcttacaggatttttatagtttgaagtcttacacttaagtctttaattcattttgagttaatttttgtatatggtgaaaggtaggggtccagtttcattattctgcatatggtt

SEQ ID NO: 35022 - DNA, 1588 bp, Homo sapiens
tatttggaattgaggactttgggaggcgattaggtcatgaatgtgatgccctcatgaatgggactattacccctataaaagagaccccagagaattatttgacccctctgccatgtaaagaaacagcaaaaagatagccatttgtggaaccagaaagccagccctcattagacactgaatctgtaggtgtcttggatcttggacttcacagcctctagaactgtgagaaataaatttctttcatttataagcacatccagtttatggtattttttgttgtagcagtctgaacagattaagacagtctgttaagctacttccttgcatattacccatatgtagttgtatctgtcctcctcattgtttctcttgttctctatttagtagaatcaaattttcttaggtagtacaacagacaaatattgcataagttcaagtttcaagaccatgatggttatctttgtagttctttttttttggagatagaagtcttgctctgttgcccaggctggagagcagtagtattatctcagctcactctaacctccgcctcctgagttcgaacaattctcctgcttcagcctcctgtgtagctgggattacaggcacccaccaccacacccagctgatttttgtatttttagtagagacagggtttcaccatgttggccaggctagtcttgaactcctgacctcaggtgatccacccgccttggcctcccaaagtgctaggattacaggtgtgagccaccatacctggctttagttctagtttgatgtttggtatcagattcatcccacgcagactacagttaggttttctaaataccaagattaatttcttgatttttgtaaaaaaaaagctgttttttatttggagttttagaaagaacatgagttttgtccaggcacagtggctcacacctgtaatcccagcactttgggatgccaatgcaggtggatcacttaaggccaggagttcaagaccaatgtggccaacatgacaaaaccccatctctactacaaatacaaaaaaaattagctgggagtggtggcacacacctgtgatcccagcttctcaggaagctgatgcatgcggatctcttgaacccaggggcagggttgcagagatcataccactgcactccagcatgggtgacagagcttgtgagactctgcctcaaaaaaagaaaaaaaaagagaagaggaaagaaaggacatgagttttgtttggagacttccatacctggcaagtcctggttttcgtcactgactacactctgatcctagtcattagtaagcagtgtggtgctgtcttgatagattttaggtaatatctgaccatctgttcaacttccctgtactatttgtctttctcagtagcagactataaagtttagacagaaaagatcgtatcttatttgtatttcttgcctcttgctctgggctagacagtagtagttgttaaattaatgttgctcaaaacagaatcccattctctagatttagaagtttcacctaagtgtattttatttttagataagtcattggaagaccaaggacatgactgtaaaacattttatcttgg

SEQ ID NO: 35023 - DNA, 1018 bp, Homo sapiens
gaggagttgaaatgcatgtgtagattcttatactctggatattatgatttctggtgaatttaggtctcaaatctatgactggtcaatttgtgaattggttctcttggtaatatcagtgcctaacagtccaccccacctgatttgtccccagttcatgctggtgctgataatttcaagaatgccccaggcctcgtagcctttctctctaacttggggacctctgcttctgtagtcttaccgcctggtaccatcaactaccttccatgtatcccatagcgcaagcaggaacgtacagtcgcgttacagaaaggtcatataccaaattaaaatatgccattcatgggatttattgaatcaacttaaatcacagcaagaagaaagaggaaaaggatgaggttaggtttatcttctttgacagggcttaagtgggaagaaaggaccacactccctgaattctgtgttatttaacgttcaaatgtcctgttgctcttgccttctgtgccacatcagcctttcctgatcatggtaattatcagttcatggaaagatgtatggcaaacaccattctgatgaggtcacagatggaaatgaggaacatgttgttggaaactggaggaaacatgattttttgttataaagtggtgaagaatttgactgaattgtgtttgtgttctagtattttgtggaaggaagaacttgtgagcaatgaaattggatatttaactgaagcaatttctaagtaaagtgctgaaatggtggcttggtttctcctcactgcttgtaactgtttaactgcttatagtttactcagaagaatagatgaaaagtcagtgtggatatggtgacaacttttagtctcttttctgatggttaatttttcacggttatttgatgagattatagtttaagcagtttcctcccccttggtttctcctgactggcatatggttctttgtacatatgtgagaagggataaatgacctaaagatggagttgttaatcagaaaggaagcagaac

SEQ ID NO: 35024 - DNA, 1050 bp, Homo sapiens
gaggttggatttcagaaccaaattcataataggagcttgctgtcttaaagtagaaagcagaagaggaaaatagcatttgtttgtattctagcatattgaggtttcactgttcctagcttatactaatgtttttcctctcatttctgggaatgcctgtcattctgagaatccctatatatagcataccaagaacagagtatgatgttactttaaaatgtgtttacagaggatatatgcaagtgtgctgttaatataaattgtttgtccttttctgcatccactttgttactgttttgctgccaaaatgtgtgaaatgtgtgtcttctcttcctcctacatattgtgccaagtgtttaaaattttgtctactcctagtaacacataattaaccacatcccttgtctacttttatgaatcagtataaagaaaaacaatacattaggataaggtttgcatatatgtatatgtgtttttattgaaaactgggcacttgtagccttgtgtagacctctacctgcctgatttactaattatctgtaatgctgccatggagatgatgctgtttactctctcctgctttgttctaagtggtgtttgagaagtgaggcctgtgaatttccctttgtggtagaacagtgaactcagcagtatcttgcataagtgagccgactaccttattcccactctgtttttgtgtacatggtgaaatcagaagtcaaacatcccctttagtgtttgttattttacatatgtatctgagcattttgttttctgttagcaatgcttcctgatgttgtgcgtggccctttttggttgattctctccaaattcgggtcagctgctgccacctggcaaataacagaggatatgctgaatctcctgtccatccttgtaacgatatccttcttaatgaaattcttcaactggctgagcaattacaaatgtcatctgtccagacacatgggcttaaggatgtctacaaaattttagacatttttgcaaatgggaaaaaaaatagtcttgtaaatactgaaacagatttccatgaac

SEQ ID NO: 35025 - DNA, 1032 bp, Homo sapiens
catggcttgtgatttgggtggattatacttcctgggaccttggccctcccgtgtctccagaagagacgtgtgtcccgagacacatgagtatcctccaaggcactggcctggatgagcagcatcgccttgagaattggggtagtgtggaaaggaagaatgaacaacggccctgggaagccttcccttcctgcagatattgttgggggagtgctggtctccattttgcgtttagaaaaccagacttagatgctggaggggcaccggttgtcttctttgaactcattccccgtaatgagctagaaaagagtacctaaccataggtattctctctagagactcatgtgtcccgtgggtacagtcaattcacagtatctgttctggcttttttcactttaattctgttctgcacattctgaacatatgcaggaaaaaaaatcattcctgaacttagcacaagctacactcgacacaacctaaattagtaaaaagcctttgatttattttgaagcaatttaactgtagacaaagcttgcatatatggaacagtattctcagagcctgagagttgttacagttgttctatttggaaattagaaggaattttttaataaggcacatttttcagtttcttacccattggtgtctattaagaatactatgtaatgttgaaatttccatcaaattaccaagcaaattactattaatgattagagatttagcctaacactctctctttgggccttaaatacccatttgtagttgtgttcgtgtcacttctgtctcagatgcctctgccaggacataatctctctaactcttgctagctggcttctccctcccacatgggcatacatgctgtgtatacacagagtacagcctgtgtacacagtagcagctgtcaacagggcctactccagatgggtggccccaggtaatcctctgctgtaaagtggctagaacaggctgtccctgcattaaaataggtgagaataaggaatttcgcctctgataataatatttattttcatgact

SEQ ID NO: 35026 - DNA, 1044 bp, Homo sapiens
attattatcctcagtttatagattaaactggggccctgagaggttgagttacttgcccaagcacacagagctaaagctaggtggtggaactgatattctaatccaaggagtctgccccagagtccatgttcttaaacacaatgtcagactgccctcagaggcctgcaaattagagtgggaagtctactgtcagtactcttagagcaaggtcttcaaacccagctgcacacacaaccccaggtaagtaatgttaacaagtgtagcaggactcctggtcacttggagagtccacgcccgtcaagggggacagttcttctcagcgccacctagtggttgccatgtggaaatgcaaaccttaacaataaatagaggcaagggagaattctggatttttatgaaagatctcttcaattcaaaagaaaaagaaggaaaagaaagggaaggaaaaagggaaagagttccatcattgtggaaaacattgtggagattcctcaaagacctaaaaacagaactaccattcaacccagcaattccattatggtgtatattccaaaggattataaatcgttctgtcgtaaagacacatgcatgtgtatgttcattgcagcactattcacgatagcaaagacatggaatcaacctaaatgcccagcaatgataaactggataaagaaaatgtgatacgcatacaccatggaatactatgcagccataaaaaaagaatgagatcatgtcttttgcagaaacatggatagagctggaggccattatccttagcaaactaatgcagcaacagaaaatcaaatacttcacttttaagtgggagctaaatgatgagaacccatggacacatacaggagaacaacagacactagggcctatcagagggtggagagtgggaggagggagaggatcagaaaaaaactaactaatgggtactaggcttaataactgggtgatgaaataatctgttcagcaaacccctgttacatgagtttacccatgtaacaaacctacacatttacctctgaacttaaaaaaaag

SEQ ID NO: 35027 - DNA, 1049 bp, Homo sapiens
tgtgcccaaatgtatacatcttattttgtaggtgaatggggaacgattaaaattttttatgcacagagaagtggcatatttgtttgttttacaaaggtaacattagcagcaagtggcgggtaagtgtttagcattgactgaatgagaccagttagtataatattgtgctttcatgagatatgataaattcagttaagcccagtactgacagaagacgtggatttgataactggcaattaaaatatgttttctaaattttgtatgttgacatttagtcaattcccaaaatatagactagagaaataaaaataaatgcatttttttcttaatcacttttattgatgttttgacttaatttcgtagttgtttgtcttaggtcatctttggatttattgtttgaggaatgtatgatttgaaaaccaactgctagagctaccaggaataggaaagtagggggatggcggagggtgggcagggcagagaaatcaactaataaacaggagtcagaaagtctgggaaaagtaacttaagtaaacttttattttgtggcctaacagacattactttaaaaagcatttctcagctgttgactttgaaaactactcacattgcccagcttggagcttttagataaccaagatggataagaaaattatggtttccttagttgcatggccaggctgacctccctgcacagcaaagagcagatggaaagggtgttgaagcgtagaccagcacgaatccatcatcactgacagaaacgtcagcgtgcatgcttgctcagttttgcctaggtgaggagcaccaggccttacattttttttattatttttgagtaggtaataagttcatatagtttaaaattccaaaaatacaaaaggatactaagcgaaaaatgttccatccattctgtcccccaagcaccatcttccttctctgatagcaattttttatttatccttgcagcaatattttatatgtctacaagcaaagatactcatttttctcttcttaatacaaatggtagcatacaaaatatgccagtatct

SEQ ID NO: 35028 - DNA, 1054 bp, Homo sapiens
gatcccactcagtgcccaacaccagcaattgccattttatgagtctgttgccttccactttccactcaattttcctgcagtctttttctagaaacccaacttttacagccttcccgctaagatacaggccccatttccaggttcttgtttcctccaccaccctccataacccgttactctgtcttagtcctttcaggctgctgtaacagaataccacagactgcatagcttacaaacaacagaaatttatttctggaggctggaaagtccaaggtcaaggttccggcagtcagtgtctcgagaaggttccctttctggttcattgacagctgtcttcttgccacaacctcacatgggaaggaggtttttggagtactccggggtctcttttacaaaagcaataatctcattcattaggtccctgacctcatgacctaatcacttcccaaaggccccacctccaaataatcatcacattgggtttgaggtttcaacatgagttgtggagaaacacaaatattcagtctgtagcagagagcaagttctgatgattctggcttcaagacgtgtattgcacccttgtctttctttctctactgcccttcttattgcttgtccagactattgttttaaccatttgtccatctcctttactccactacccccaatacagccagccctctctatccatgaatttcacatccatggattcctccaaccatggatcaaaaatattcctcaagaaaacaataaaaaatagcaatacaataataaaaaatacaagtttttaaaataccatataacaactctttacatagcatttacattgtatttggtattataagtaatctagaaaaaatgtaaaatacatggaaggatgtgtgtaggttatatgcaaatactacgttttgtttaaggggcttgagcatccgtggattttggtgtctgaagtgggggtcctggatgatggtatgtctataccatgcactgggaatgggtctttgatcctgccattcctatcatggtaccatgtcaataagcttacaaagaatgc

SEQ ID NO: 35029 - DNA, 1062 bp, Homo sapiens
ttttatttctctatctcttgatttgaataaaagctcaaaaagcagaaaaaataggaatcactgataatctaggatttgaaaaatctgtttcaaataaaggttaaaatcccccataaagccctccagtccttttccccagaagtaatgaccatcaatgtttgtgtgcatcagcttctaggttttaccttatatttcttgtaatgtgtgtgtgtgtgtgtgggtgtgtgtgtatgagggagatacagccacccacccacacacacccacacacacacacacacaccctttctctctcattctttttatttttgtctgcattttaaaaatttgtaatttttgtgggttcagagtaggtgtatacagttatggggtacgtgagatgtattgattcaggaaaacaatgcaaaataattacatcaaggtaaatggagtattccttacctcgagcattcatcctctatttgtgttacaagcaatccaattatactcttttggttatgttgaaatgtataataaatttttgttgactgtggtctccctgttctgctatcaaatactagatcttatacattttatctaactatgtttttatacccattaactctaccccctcccgccctccctctcactacccttcccagcttctggtaaccatcattctattctctttctccatgagttcgattgttttactttttagctcccacaaatatgtgtgaacctgtgaagtttgtctttctgtacctggcttgttacacttaatataatgtcctccagttccacctgtgtttttgcaaatgacagaaacagtctttttttataactaaataccattcagtcataaaaaatcttttttatagattgtagttttcattggatttctgtaatgatcaatggtgttgagcaccttttcatatacctgcttgcaggtagtttacaaatgggtactttgaaaatgtggtagatatacacaatggagtactatacagtcattaaaaaatacttttaatgactgaatagtactccattgtgtatatctaccacattgtgcatatctaccac

SEQ ID NO: 35030 - DNA, 1092 bp, Homo sapiens
acaggagtaaaggtgcaggaaaggaagcacaggaaaatgaatttcaattgctttgtattatctgtgttcatatatagttgttttaattgtgtttgagaacagatcaaaggagaagaaagaattgatgtggtgatgataaacaacagcaaccacatttttagttggacttggcacgatgtcagaagcatacacgcagtcctatgtgtgcacactcacctactcacctactcattccctttgtgcctgcccccgttccttcctgccttggctctgcctcatacataatcatcttatgcataaggaaatacaactatgaaatgttatgtcaattatagagattttatgtattgctaattagcttaggaactgaagatgcttgcctccttttttccctaaattggtttttaatcaatctgaacagcatcccaaggaaacattttgaaagagaattacaaaatggtcatcaggaagatttttcctactcactaaatgtgaaaatcactatgcaacaagtgcatgatgtcaaatactagaagtttattaataatgataataacaatataggtcaaagagctctgtgcgtgtggagacatatttaaaacaaatgattaaacttaatgcacattcaggacttacggggctaatatctgtgaaaagatttattaaatctccacctggcaaaatcatttccatgtgcagttcattttccggtgtgccattgaagctctaagtcttcatactgcagagatcccgacggcactcattttgaaatgtattaaaaatatatgtaagagcaagaaaagcatatggagttcattcagcccagttttttgttcaacaaacttggatttaaatcttgcttctcacacttaccttgggcatgttccttggcccccttttctccccagtaagagaattgtcatagaatctaccttataaggctattccaagaattaaatgagactacagacttgtcactctttaaatttctggaccagaagtgagctatcataagcattcagtagctctaatatatgcattcagtaaatctttgttgagtgtttacctggtgacaggatgggcactctgcta

SEQ ID NO: 35031 - DNA, 1041 bp, Homo sapiens
tctctagacttatgaaaatattgattattttattatgtgtccccattgacacaaatatgtctagcattctcaatgaaattgcttacacagtagactaaaccttcctggattttatattagacatgaatgtaacaacaaaaaataacaagaattagaacctaaagttactgtcttggtacttgttcaatgagctttcatcatattttggagggaataggtggataatattttccaataaaacgtttaacctgatccatcgtttttcaaacacacagtaagtgtagaataaattaacacatactaattgcttatggatgctttgttttcgcatctgattataggtattcatacttaagacatctcaagaggaaatgttgataatgtcatttctttgtaataaaaagacagaccatcaaaattgtggaagtattgtgttataagatatttttaaacataaaaagccattgtaaaaaatatccatcctgtctatttctgtaagaacatctgagctattccgagcttacattttaggagttaagttctagaggccaatgatcctttgtttggggtattgaatattatctagtatatccagtacaggtttaagagtagttgctattttataaatgttcaacatggaccagaaaagcatcagtctataaatggattccttgggcccagagctctgacagaagaaaagtttgagtgtttgggggtagtggggtggtgactgcattactatattactgcagcatttctggtttatgtacagtagcactcaataaatatatgtttactttaattgagtaggcataaatagcattcaccagaaatcctttgctggcagccagctgcatttgactgctgagagccatagcatatcctctctgaagttggagggaacacaatctcttttcagtgttcaccttttctcaaaaagccagaagatcaattatgatttctttatgttcacaggtaaaatggtttaacagaaagtaaatttcatattatcataaagaacccatgggcaaaaaggcaaat

SEQ ID NO: 35032 - DNA, 1144 bp, Homo sapiens
ggtgtcaggtcttcggaatcttaattttctcttactaattatcaccattactgctatctaaaaacctagaatgccttaaaattatatacaagtgaaattagctatatatgcagtatttttgagtggaaagaagtaagtagagtcttctactcatactttaattaaaagtcataccaatatttgaaataatcatgaaagtactgaataactggagagagcctaacatcctctctgaatggtatatgatactaaattgctgttaatgaaggttgaaaaaattggtctgttttgtttgaatttcttacatttggagagcaaaatattttttaagatgtgactaaattcatctgggttgtctcttttccacatttattcccttctctaatactagcacatagggaaacaaacagaacaaaggcagcaaacacaggtaagccacctcctactgaaaacaatctactgtctccctttctccattacgtgtacttctggctttcctatccgtgcagaacaatagcctctctgtgattttataatctctgcaggaaaaccaacaaaggtatctgagggtcgctgcattgccagagaacagcagaggcagaaccaccaatggaaagcagaagcagcaacaggtggccgattttgcacaaaatgcaggagagaaatgtctcctagtgcataagggaaaataaacagcatgattgagtaggtcagctcttagcttgtcctctcttcctgtattctctctttttttcctctccttttctaacatttcaacctctaggaaggagttggtgacagagtggtgccatgaaattagaagaaaaagactgacattcaatttcttagtgcctgtggggtcaatacacgccctgacatatgggtttacgtttcccacccaattagccagtctaaatgggaatattcattgttctaagcaaatccaaattgacatcagcatctcccaaatttatttgacctcagaacaccttttttcccaaaacaccattaacatcctgcttctagaatgcactttgggaaatgatgctttttatacaatcaaaaaagtttcaattacatattcaacttatcacattaacacggaagtatgtgacatgtttttggaaggtttccttcaaataaa

SEQ ID NO: 35033 - DNA, 1047 bp, Homo sapiens
taccaagcatgtacataaatagaattccagagataaaaacttcatcaagttgagggcttaactggtttgctgttttgagaagggccaggtaacagtggtctttctttttgttaccaggtatggatgttccctctgggtcctgccaggtctagaacaaagtagcaatatttcaagtgtcttttttgttgatataatttgttttttttttcccagtaggagcaagtttgcataatcagtatgtggggatgtgtggggagtaaggggaaggcaatggatatggggtcttacctggcgtagccttggatcaaatggccccatgacattagaagagtctacttagagtccccaaagaaaaggggcacctagaacagattaataactacttctgttttcaagttaaactggccagaaaacacatgaaaacaattttagcatccaaatacaatgaatcattaagtgatataaaatgtttatctcgaaagagagtgtatccattacttagagcttttctgtgtaaaaatgtatttcccaggtgtaatgacattagcatatactttcatgtcaaaattctgcaggcttggtagttgtaattcaatttattaaaggaacatacgtggaaaatgttattgctctgttctttctcacaccaccatatgttacacttgccaccattttctctcaactccaccctgagttaaagctgcttttcccaggatttggagacattttgcttatctttccttaactcgatccattatgtgccatcactagaatttaaaattgatttcatatccatttaaattaatttgatcctcacaataatcccaagaggtagacagagtggattgtattgttagtgaacttctttctcatatgaggaaagtaaggcccagaggggtcgtatgggttgcctctggtgatgaggttttcgcttttcaaatgttgcatgtgtggctacaaccatgcttcattgttcttcccacagaagacagtgtccacaaatcaggctttctctctctctctctctctctctctctctctctctca

SEQ ID NO: 35034 - DNA, 1108 bp, Homo sapiens
tcaagataagagtaactagaaatctttttagagcaatcaccaataaattataattctatacttcatttatttatatgttaagggataaggcttggggtaagttaaagtgatatatataaattcccatcataccatttaaaatatgggattactatgaagttcaatattctattaaataatagtaataacagcacttactcattggatcattatggggattaaaagagtaggcatatgcaaagctataggaagtactcaattacaatataattattatcattcatttattcctttacaccaaaatttcataagtacctattacctgtgtgacagagaaaatatattttaataatcaaactaccctgaaaatgagttttaatcttgaaagaccttagaagaggtctcactgaagtcttttccattcttcaattagctctggtaaggaaggctatcaatttttgtggttcaaaggaaagaaatgaaaaacaaattttaaaatttttgaaagaaaaaagagatggaaaagacaaactgaaactatatatttgtcagctccatgaaaaaagaaagagatatctaacgggaaaagcagaaaattctactgtatgtatttttcaacaatttttttacttgacagaacaatcatattcagcaaaattctattaatagatatgatacagacctcttccaaaccctgtttttatctcagttacccctattttctagtcaaaacagaagtaaaaatatcatactacaatgggacagactcactctttccaatgctgagctccattttggttcatttgaaacttctaaacgcctaaaaatattctggccctatattaataatgagcagcttggagcctcatttccttgtaaacttgcattgaaattatgtaataaaaaatttaagtgacggaggaaatgtacacacacactacacaaactgatcttagattggaaattgtggactcttttctaaggatagattctcctaggttagcaccacacaaaaagctgttcacatttctcagagttctatagaacagaatgggttagcagagttctctgtccaatctcctcaggctaaaattaagttgttagctgg

SEQ ID NO: 35035 - DNA, 1024 bp, Homo sapiens
ttacaagaagttaccctagaactaggcatttctcctgaaattttcatttttatagtcagggttaacttgactatattctgcactagagtgattttaggctgataaggtcctttatgagcagaggatggatcttatttataatttttacccgtaatatctaatatagcacctgaaacaagtttaccactcagtaagtatttcttgaatttgttagtataaattcctaatgtacattgtgctcttgtcctgtgactagtttgaatgtcccatttttttgttgtctacatttataactatttactgtatatctactttggtataatatgtgtacacatacatatgtcaaacagaagatatttagaaagagaaagggggggaaagtgagcattgaggaaatgttttgcccatgcggtaatggttaaaaaacagcaatggattttcttgaacgcggttatattttatggtatttcagcatatagccttttctctattcactcacctaaaaaaaaacccaaggctctatcaacttgattgaggaaaggattgtgggaatcactaaaaagataaaaagtcaataaatagttccaactgccaatcatataaccacaagataaaaaaagaaaatcaaaacaggcaaatacatgtttcattttatttgggtaaatttccacatatgaaagaatatcttgggttagcagggaaagcaatctgactttaccagcagctttgcaagcatggtcactatcatcgccacgcatcacctctgattgacttcctgcttgctaccaggttcggttggtgctggattagaaaacacagagtttgagcagtgcaacagcatgctgccggtgggcttgccaaattaaagccccaagcccagggttgtcattgttgttattttcatagaaaaagactaaggataatgtaacagaaacaattcaaatggccagaaaatataggaaaatgtgtctttgttaacagttaattctattaatcagcttgagatatttgtaaggtaaaattg

SEQ ID NO: 35036 - DNA, 1749 bp, Homo sapiens
tttttctccttaaatcatgtataatagagtattggttcttaagaaattacagataccaaagaactgatattaaaatacttaaaacatgttgagtgtgcctgttaaagaaccagttctcagaagctatggaagtactgctttgttttatcttaaggaaattttagttgaaaatctgctttaaaaagctacggagagctggactattgctgtcaaggaggatataaagtgtaattcgtttttcttttttcttttgcatttatatcaagtaaattcatgcaaatccttcttagaaaatatttctgtttaattgttgttatgaataatattgtcagtatattgtgtacatagcactttcagattttatgtatctacttatattcaaagaatttacataaaataaataaccttaatatcagtattcctgctattgactcaatggttattttcagaatatttccaggatagagactgtttaaaatgtcatttgggcttaccgtagtttgactgaatgggactaaattgctttgttgattggaccagtgtgttaaccaaaggaaggtgaaaggttatcactatcgttagtcctatacaaaacatccgaaaagttttgaagacaatgggatgggatttactaaaattctcttcaaccttcttgtaaacagtctacttaaattaaaaagacgagcctaaaattttgatactatagcccaggaggaaggagttaatcgataaggaatgcaaggtcataaagtatactttctatttccttataagaaactaaggctatagtttgacttgctgcttgccaacttacctatatggttaccagagtaacttcctgttctaaattatgctgtatgaaacttacgtgtattttcttaatttagaccccaaatttagattctatttataataactaggatgtggtaggagagagttctctaataacttcacatttgtagtttcttgctcaaaatgaaaaactttttggtggcacataagtatttatagtagtgtaagtcaatacacagcacatttaaccagatcataaatcaaaacagtctaaataaaatgaattaggcaaaaagcagttttattttgattgatgattttatagtatgagtattaaaaagtataccatagagttaatgtttatttcccttctgtatctcttgtggcaaaataggtgctagaaatttatgagcatattttcaactgggcataaatatttatagagccttagagaatatgctacctccatcctttaataaaacctcacattcaggtattagagataactatttatgcactcctttgtttattcaacaagcatgtactgttcattgtgagctacaaagcaatgtgctagacaccaaggatcccaaatcaaatgttctatttatcctcaaggagactagagggaaagatggtgttttagtctctgctgctataacagaataccacagaatgggtaatttatagtgaacatgaatttattgcctcatggttctggaggttgggaagtctaagatccaggggccagcatctgatgagggccttcttgctgcatcattccatgggaaaaggccaaagagtgagcgagaaagagcaagatatgaatgtgtggtctcaagcccttttataattggccttgatccattcatgagaatggagccctgatgacctaaatacctcccattaggcttcacctcccaaccattgcattggagattaagtttccagcaaatg

SEQ ID NO: 35037 - DNA, 1050 bp, Homo sapiens
taatcatgcaggcatcctggtctcggtctccagaaccataaaaaataaatgttgttttaagctgccttgattatgctcatttgttatagcagcctgaacccatttaagacaatgtttcttggaggggtactaagatagagaggggcatcattattttcccaggctacataggaacaacaggtacccaggttacaataaagaggatatactaggccgggcgcggtggctcacgcttgtaatcccagcactttgggggccgaggcgggtggatcacgaggtcaggagaccgagaccatcttggctaatgcagtgaaaccccgtctctactaaaaaaatacaaaaaattagctgggcgtggtggccggcacctgtagttccagctactcgggaggctgaggcaggagaatggcgtgaacctgggaggcagagcttgcagtgagccgagagggcaccactgcagtccagcctgggcgacagagggagactccgtctcaaaaaaaaaaaaaaaaaaaatactagatagtttttctgaaaaatggtttttaaatgtggctttcttgatggctcaagaaattgcagcttctttgttccatttcagtcatttatccaaagagataatgaatatctccttaggcgaaagtatttatatcagagttcagatacaaacttccatcatattttcaccattatgcattttggagcttgtcacaccaactaatataacctgacaagtacaatgagtcaatcggtgttaaaaaatgaaaaatgtttaagtgttgaattttactcttgacttatatttgaatcttacggtagataatccttatcttttaaaattaattgtattatcttgaaagaatgacacgacaaaatatcaatatacttacaaatatattttatattctatttttagaggtgatatgatctgtagaaagatctagagatctcttcctaggttgagtatttagagacttgataagctctgtgaccttgggaaagtcattttacctttttggagcttcaatttcttcattgatctcaaagtgtttg

SEQ ID NO: 35038 - DNA, 1058 bp, Homo sapiens
gttctggttctgcactctttcttttttaacctgatttcttaaacctatgtatggatgcttctttggtttcatttcttacttggatttgttattgcttatgtatttgtggaggagggctacatgaatatgagacctttggtattattccagtatctcttagctcaaggatgttttactcacagaaacttggtgctgttttttaatgctactttgaagtagagtaagtttgccttgagcgatattcaaacactagtgtttcccttttttctagttttaaaaaaagaaacttagtaatgggataatttatagtttctcttattttaaatatttgttattttcaaacttacagagattttaataaaaacattttataggaacacttttatgagctaacaagatcagaaatagaaaacttttttttttatcctgtctacctgtatggagccaccagaagaatttctgccttttcatgaaaacccaaaacatatatcatgttgcagatatttggactctttatgaacaatatgtttgaaaatattgagctgaaatttcagaattaaaaaaatagttttgtgttgaagttgtactgtggttttttgttttgagcattgctgctccccaaaatgttgctcatatataatgagattttgaaatacacagaagaatgtttccagattttataagtatttaaaacatacctccccttctacatggagtacatagtgttaaagttgccatgacattaattaagttgaagttacaatttagaaagtgagctatagctttgaaagtgccaaatatgcagatatttgtccttaggtcagtatagcttttattagcaatgagcagtgattcaaaagtgccttgtgtggcaaaagtgaagtataacatctgaaaatccccatgtttggtgaataccctcttttagttaaataactaaacacatcttattgccaacgtggtagtggaatgtgagcgtgaggggagccgggtgaaacttcattatatagatatgcctgttagagttcttattttaaataccagggctcacaataatc

SEQ ID NO: 35039 - DNA, 1033 bp, Homo sapiens
cagagggagtcactctcagaagaaacattaaaattacaggctgcaaccactttaggaagataatggggaaaattgtgggggttgagattgagccagtgctattgccttgaagttttagcctacatatttttttagtttgacttttatatttgtggcagttaaaaacaaacctgttcacatttcctcacaaattagaaacaatggcttctatggatagagtatggtattagaagtaaagttcttaagcaattattgtgcactcatattgcatcctaggctgaatgctatttgttagaaacggaatgtaaccaggcagtttaagccctacaggaagacagaagtagaaccatggaattataattcactttcttaagtataaaagcggacacaggtatagtactttctggattcagacatccgaagatagtaaacataggtgaagctaggattctaatgtgagtggtgggtggggggttctaaaatttctacacagaagaacgtgggagcagtgatttggctggaagttgtatgttcttgaagctaagtttgcgttgcaacagcattttacttagatttaatgcaagtttcatctggctctggggaggcacaggctaagagctgttaatggtgtatgcccattctgtcagttaacatagtgattaccaatgtttcctaatactgcttccagcacctccagctgtgtgactatgagcaagacatttaacgtttccgtgccttagtttcctcatatgtaaaaatgaggataatatatactacaggttacaattagagcagcttttagctcatagaaaataagtattattccttgactttcaattctacaaaccgttggcaaagaaatctagatgtaaaagaaactaaaggtcaataattttgaactcagagtgatgatagctgctgacactgcttccccaaaagcaagaaatggagctatctgaagagatgctgcggagtagatcattgtaaactcctggacagagtacagttctctgaacagcctgtgggaatctca

SEQ ID NO: 35040 - DNA, 1019 bp, Homo sapiens
gttagaataaaaaagacagacaataacaagtatcggcaaggatgtggagaaaacgaaaccctcatatgttgctaatggaaatgaaaatgttgcaacctctttgggaaacaatttagcagtttctcaaaagttaaatatagtgctaccatatgagtcagcaattctactcctagaggagtacccaaaagaattgagaaagtgtttacccaaaaacttgtatgctcatgttcatagcagaattattcataattgccaaaatgtgagagcaatgcaaatacacatcaactgaggagtagataaacaaaatggggcatatccatgccatggaatatcattcaaccatcaaaaggaataaattaatagcacatgtatatgaaccttgaaaatattttgctacatgaaaaagacagccacaaaagccccatattatatgattcccttgatatgaaatgtccagaagaggcaaatccacagaggcaggaagtagattagtggttgctaggtctgtagggatggtgggatgggaatgactgctcacaggtacagggtttctttttggggtaatgaaatgttctgtgattagatagtggtgatagttgcatagctttgtgaatatactaaaagcccctgaattatacacatttcaaggatgctttttaccacatatgaattacatcttaaatttcaaaaatcaatgatttaaaaaaatgggacacagtggccagggaaacaagttacaagtgtcactgtttcactcacattttcttcctttctcagatatttgggatatgcctggcccagaatttggttagcgatatcgaagctgtcagggcgagctggtagaccccctgcaaccgctgctgcaagacactggacagacccagctttcgggaccctcccgcgtgccgaactgatcttcgagctgcatggacctaatcacagatgcagcctgcagtctcgcctaatggagctgccattaggggagtgtaaaactgggaaatgctgctcactgacagaat

SEQ ID NO: 35041 - DNA, 1064 bp, Homo sapiens
cacagttattcccaacttttgttgacacatcatcatccagggacattctcattaaaaaaaaaaaaaaaaaaaaaaagcatatccaagaagtagcccaatagtcatgtaatgtgtgattctcttccccagcatttctgccacatcatcctccagcgtcttttcttaaacatccctgagaagagggtacacggtgtgccccacccagggcagcccatttctgagcagctctgtctcggagaagtttttggaggctatttaacctgaaaattagcatgacttattctaacaaggagaaccgaggggtacctggtcttacagataagttcacaagcagctggttctctcttgtggatacatgggaccacagtggctgtagctagtttcctaagactccatctgccttatctgccagatccttcctttgccacacacacacacacagtgtctctctctctctccctccctctctcatacacacacaaccaaatgcttcattcttcacctagtcagaaacctggggagcccccaggagagctctgtccctgattgccacctgccaacctgccagtcttcttggcttgaggcatctcagtgctccagtgctcagctcaccttgccagctttcctgtagcctgattgggtcctggtcatactcatctgttgccactatttcatcagtttcggcctccatgccccaaaatgtgggatccttttttttttttttttagatggagtttcactcttgttgcccaggctggagtgcaatggtgtgatctcggctcactgcaacctctgcctcctggattcaagcgattctcctgcctcagcctcccgggtagctgggattacaggagcctaccaccgtgcctggctaattttttcatttttagtagagatggggtttcaccatgttggccaggctggtctcaaactcccgacctcaggtgatccacccgcctcagcctcccaaagtgctgggattacaggcgtgagccaccatacctggctgggatcctctgaattgtattttttttttttaagtaaagatggggtttcaccatgtt

SEQ ID NO: 35042 - DNA, 1028 bp, Homo sapiens
ccttttagcataatacctgaaaacttaaggggttgggaaatatcattcatacagccaattttttttaataccttctgtattcaaggcactgtgctggggaaacacaagtggataagatggacatggtctccattctcatgatgcatacagcctactaggggagacagctgaaaaacaactacagatataattagaaggaataatttcaggaagtgtggttagtaatatgaggggggaataaattcgcaaaggtggccagaaaagactttactgagttatcatctcaaacaaacccttagggtaggagtaccctgtctttataaaggagagaagaaagagatgcaattagcaggatgattgacgtcaaaaattgcttgatatagtcaaggaatagaaagtaggcctgtgtgactggagagagtggtatgatgtgaaattggagagttggtagaaaggagagcacagagatccttagggattatgaagtatcgtatggtgcacatactgatggattttcacaaactgaagaaactctgtaaccagcacccagatcacgaagttggacatgttcagtaccattggggctgctggaagcagtaaccacccacgctgttagctctcttgtgttcacatttcagggccttgctttaggaaaacttctggtgttctcaggctatttcttctattaccatccaaggcctaacacttctagctccaagcagagtatctttctgtgggatttttatactcatgtcacttcctctccccaacccccaccttgaacatgtattatacatggaattctttggtaaatagaatgcaaatttgttttcaaagcttgtttggcacatactctctcctttagaaagcaaagggtgtcctttcagaaggttcttataatatttgtggatctggccttcaggtctaagctgaagcttttgttttcatttggactttatgcatgtattaacagtttatattttctgtggtaatggaatattttaggggttgtttcttcattatattta

SEQ ID NO: 35043 - DNA, 1030 bp, Homo sapiens
atacacacaaatgttctgctgcatgctgtgttcccactgaaatccagggggtttatttgcatttatacttaaagaagaatgaccgtatttggctgactctaagccaagatgatacaggcccaaagtttttcatggaggaatgggggagtaagggaaataggaacatttggaagaaatagttgttgtttttccctgttttattcagtgggcattttattcacagatcatttgatgcattgcatttactcgtgttattctggttccttttgtgttttttttttccttttgaaacaacttcacacttacaggaaaatggcaaaaatactaaaataagaactcctataaaccttcactgataaaatcccttcagttttctccagttatcccagtaacgtcctttatagcaaaaggatccggttcaggatcactcatacccagctgtcatatctttccagtctccttcattctagaagcattcttcattcttccttcatctttcatgacactgacacttttaattacaggccagctgatgtgtagaatgtccttccttttcttaggagatgttttctgtccttccttgaaaaccccactagtgttacctgccacgaggagagctaggcgctctgccccctaccccaagctggttgctctctcttacaatgcttcattaatcaagtacccttttttggagcattgatgatattcattcatccttttagccagtaaatattttttgatgtctattacgtgccaaatgggatacatttaagaacaaagcagaccaaaaaaaaaaaaaaaaaaaaaacctgctctcatgaagcttacattttagtggagggtaacagataaccaacaagaaaaaataagtaaaacagcaagtacattagatcattagatagtgataaacgctaaagaggatcgaatcaggcaggaaaagggatgggcaggttcttgataaagtggccagggaaggcctcccacactagtgattgtggagcaggaaccccaaggaagggaaggaacaggc

SEQ ID NO: 35044 - DNA, 1053 bp, Homo sapiens
agggtggtgctctagaaagggcatggaagcgccatgtcccttgccccatacctttacctgtgaatctcttcatctgtatccattgtaattttttaaaataataaactagtaaatgtaaaataaccaaaacaaagaaaccaaatgccggtgtattacatataagttgatacctagccagttaaatgcgttcagatgtgtcttgtttaggaggtaatcacccgggcctcccccacaaagtatggttcaaagggtcatggtgggtggctcctcagagcatctcagctcccttagacctgatgaaggcttcacaggcatttcatatctgtgcctctggccagtatatctccagggaactgagtgccaagggagaccaaggcatctttactgacattgttgtaccttaagtgaggcaacatgtaaaactgtgacacatgggagtgcttgatttttgagcgtgcggagcaacagggtccagtgttatggtggcaggggcaggagaactcatggcatcaggagcgtagacagccccactgggcacgaattataacccaggcagaggcaaggcgcaagggtggtcagacatctggccctgaaataagaagagacaggtgggaaagtccaggccaagaccgtggagcagagttaagaaggagcaggaagagccgatctcagaaacaggctggctctgttgaaattggactgaggcagataatttctttctttctttttcttttcacctttcagcactgttggacatgaaggaaagataatttctaagtttactttttgatatttatagataaaatgctttcaagcagttaaccagcctattggagagtgacacttagatcatcttgaagttggtttgggcgatttagagaaacatttataattaagttatgcagttaatgaaagccaagtggggacatttgttcagaacaattgtttttgtaccttttctttgtgatagagctgtaaaagtgtatttacttgtaaactgcaacaagtttttgctccttcccccatcaaaagaataatatatctatataataa

SEQ ID NO: 35045 - DNA, 1021 bp, Homo sapiens
tgataagtattagaaggcatagggctctttttacttgttggaaaatttttctaaattacacttggcactaaggcttgaatttctaaaaatctggagggaacagctggtgctctaataaatattcaggccagctattttaatgcattgtactcaattaagtagtcctaataaaagaggaatacttgacttaagcatttctcaaagcataatgttgtgcttccaacaaaaatttcctccaactgttgatatttccccccaagcagccttaacatttaattctgccaagtaagtaatctaatcatggatgatgcatttaatgccaaaagttagttctcttttaaggtatagttgtatcaatgtggcctagccctttaactggagactccataggtcactgaccttttagaagaattcttcgtctggttcagagtgagagagtattgaaagattcatcctaacttgggcattctggtacccttgtggtgggagggcagaaagtctgctgttaaggagtttagactttgagtgtgtctggatttttacccagctatgttcccaagcttgtgaccttagacgttacttgcccaccttgcagttaagtctccccttcatctgcaaaatggcacgtttagtagtattaatattattaatagtagtattaagataacgtctatctcggaatcctgaggatttgaggagttaatatgtgtaaactgcttggaatagtcaataggtattagcaattattatactgttttcctcataatttattttgattgttttcccttctttcagaatcattaaaataatcttacattgtaacatatattttttgttctctgtaatattctgcctacataagtgcattctcaaaataacttaaaaggaaaaaaagatctaacaaatgttcacagtgttcttttcattgtaatgagtggcacgcagttcttatcgtggataccagaccatgaattcgcttctattgtttgttgttaattttcccttttttctttacccagtt

SEQ ID NO: 35046 - DNA, 1050 bp, Homo sapiens
cagcctcccaagtagctgggaatacaggcatgcaccaccatgcctggctagttttgtatttttcctagagacggagtttctccatgttgatcaggctggtctcgaattcccaacctcaggtgatccgcccacctcagcctcccagagtgctgggattacaggcgtgaaccaccgcgcccagctctgctgtgtttttcttaaataactgtgcttgcttatctctgtcagagcacttagcacactgtagttgtctctctgcgtcatttctgtgaattccgttgagtgatgagtttcagtgtgtcttgggtctctaggtatagcagggaatctgttatgtagtagacataacatacatatcttttaaatgaaagaaatggagaactctcattatttgccactgtaataacaactagcattttgcttttttccctaaatttttgtggtaaacataaacatttacagtattaactatttttaagtgtacagttaatgttaagtactttctgcaaccaattattgtgcaactaatctccagaactcttgttcatcttccaaaactctgtaaactctataaccctaaactcccttctctttggctagtggcaatcaccattctttttgtttctatgaatttgacttcttatacctcatataagtggaatcatacagtatttgtcttttttggaggggggctggcttattcacttaatgtccttagcttcccctcatgttttatgaagtgttagaatttccttcatcagggctttttagtattccattgtgtgtatatatacatttttcattcatctgttgatggacaggtgggttgcttctaccttttgacttttgtgaataatgttgcttttaacatgggtatgcagctaccattttttgacactgattttttatttttagatgggcactctggttttttaaaaatgataaaagcaaaacttggcaagcaaacctgcggctgatctccaagtttgatactgttgaagacttttgggcgtaagtaaccatttgttttagtatgtttgttgttttatt

SEQ ID NO: 35047 - DNA, 1132 bp, Homo sapiens
cttgaatggataaggtgttgcttcttatgggtgagcagaaaaaaaggtttcttgagatggaatctattcctggtgaagatgctgtgaacattgttgaagtgacaacaaaggatttgaatattacataaaccaaattgataaagcaactgcagggtttgggaggattgactccaattttgaaagaaattctactatgtaaaatgcttacaaacagcattgcatgctacagagaaatcttttgtgaaatgaagagtcaatcagtgtgacagacttcgttgttgtcttaagaaattgccacagccaccccaatcttcagcaaccactactctgatcagtcagcagcaaacaagggaagaccctccatcagcaagattaccactctttgtaggctcagatgatcgttagcatttttagcaatagaatttttaattaaggtatgtacatttttttttagatgtaatgctatttcagacataatgtagactacagtatagtgtaaacgtaacttttacatgcaccgggaaaccaaaaaatttgtgtgactctccttaaagatagttcctttattgtgatactcactttattatgatgatctggaactggactcacaatatatccaaggtatgcctctatatataatatgttaggtatatataagctattatgtattatgtaggaataaaactattttaagagaagtatatacagatatattaaaactggtatacattatttcagaacatatctatgcagcattactcaatctttattattttcccagttaggtatttgattaaatatagaatcacatttaatagtttccccactcctggcactctcatttcttcttggctaatttgttcctctgagaaatatcagccaacctgtttctcgccttctttttttttttttttttttgagacagagtttccctctgttgccctggctggagtgctgtggcacaatctcggctcacagcaacctccaccacttggattcaagtgattctcgtgcttcagcttcccgagtagctgtaattacaggcacataccaccaggcctggctaaatttttttgtatttttagtagaaaccaggtttcaccatgttggccaggctggtctcgaactcctg

SEQ ID NO: 35048 - DNA, 1038 bp, Homo sapiens
acatcagctttctaagtagctaggtccacaggtgtgcaccaccatggctagctaaggtgttttttttttttttttttttttttgagagatgcggggtcttgctatgttgctcaggctgttctcaaactcctgacctcaagcagtcctttccccttccccttccattccctgtccctgtccccatccctgtcccattccttgacagggtcttgctctatcactcacgttggcgtgcagtggcatgatcatagctcactgcaacctcgaactctttggctcaagcaatcctcctgccttggcctccagagtggcagggactatagacacatgccatcatgcctagcttattttattttattttattttattttattggagatggagcctcgctctgtcaccaggctggagtgcagtggtgcgatctcggctcactgcaacctccgcctcccaggttcaagcgattctcctgcctcagcctcctgagtagctgggactacaggcgcgtgccaccacgcctagccaatttttgtatttttagtagagacggggtttcaccgtgttggccaggatggtctcgatctcttgacctcatgatccacccaccttggcctcccaaagtgctgggattacgggcgtgagccactgcgcccagcccatgcctggctaattttttaaatgtctagtagagatgaggtctcactttgttgtccaggctagtcttgagctcctgggctcaagtgatcctcctgcctcagcctcctaaaatgctgttattactggtatgatccacctttcctggccccatagatctttatgtgtttaaatggctgggtgcagaggtttttgttttgaaaaaagattgaattatttttaaaaatccagcatgtatacttgacctcgttggtggttttcttgccttttcttcttcttttttattgataatggggtggcagttgctgacaaattatcaagtacatgttgaaatgcatctcatttttctgtctaggtgaagttaccaagcattaattataggattat

SEQ ID NO: 35049 - DNA, 1098 bp, Homo sapiens
gttccattgaaaatattaagttgccgaacttttaggttacgatagggtaaacagtatgccatgaaggtaagacctgcgcatcattggcttgatcactttacaaagcttttttgtcatcataatgttgttttgttttgttttgtttgtttttgagacagggtcttgccgtgttgcccaggctggtctcaaactcctgggctcaagcaatcctcctattaatcctcctattaatctcccgagtagctgggattgtagagacgcaccacagtgcccagtgatacagttgttatactcttgaaactttagtttccatcctgtatccttcctgatacccccttcagtaccatatgcagtatcttaatatgatggtatgttaagaaagatagaagattttcccaactttgttgcatagtctgtgacagtcttcctgctatttaaaaaaaaaagtgcaagtggaaggataactataaatactgttatattttcaaatttgagaaaccgtttgctctttgctcttaatgaagagatatgagaatagagaatggttctttagagtttggtctgtggtctgttttatgaagcaatctgctttaattccttcttcttaaaaaatactactagtgccgggtgtggtggctcacgcctgtaatcccagcactttgggaggccaaggcaggtgaatcacaaggtcaggagttcaagaccagcctgaccaacggggtgaaaccccgtctctactaaaaatacaaaaattagccaggcatggtggcacacatctgtaatcccagctacttaggaggctgaggcaggagaactgcttgaacctgggaggaggaggaggttgcagtgagccaagatcgcacgactgcactccagcctgggcaacagagagagactctgtctcaaaaaaaaaaaattatcagcatatcagttcaggtttagttagaatattgctgtcatagatgtgttaagacatttaaaataatgttttatattattttccactaggaaaccacccctactcctaatcccccgactacagaagaggagaaaacggaatctaatcaggaggttgctaacccagaacactatattaaa

SEQ ID NO: 35050 - DNA, 1084 bp, Homo sapiens
catgtctgataggcacaagttctttattcacacaaaactaacatatagagtagaatttatgggatgatgacgtcgtttgggatagaggtatggaaaaaactgcattatgtccaaaactttactacagtggagccagtcaacatgtgtacaacttaacacctaacaaaaatggctccaaaaagtatacatagcactatttctgttcatcccatctgaatggaaaattttacttagctggtaattctcaaaatgttttgttgactcagggaaggggaaacatattttacatgcacagaatgcttcagaacttttctgctcggctaccaatctgccatgtaggttgataatcaaagtcctaaagtacagtttagttctttgggcctacagggacaccttgttgactaactggcttcagccaatttttttcagttcacacacaagatcaatttctttgtcagcaaataccttttagaaaaagtacactacaaacacacttggaaaacattttattaagtactgtataaacagctatttagataataattgcatagaactataccaaggtaattgtgtctttaaggaacaactaccaagtgaacaagatgagcaaagtcctctattatacaagatttccttcggtggaacattatggtgacaaagcagcgtaatgggctcttaagcagattgatttttatcaaactggacatatcagaattccttatgtataagagaaatatgcacatgctcctttcaagaaaagagtgataacccaccatggaattacctccagtttaaacatgtactcttgactgccaaaaatatcgagatatgttaagcaagataaagcagcagaacacgctttaaaatatgttgatctctttctgtaatctacatgttaatattaaatgttcttatccttggcattgtttcctcagaatcatccagggctcaaattcagatttaagtttaaaaaattctatctggaattgtctggtgatctctgacccaactactgaaacaaagcaaatctgcttcatagccagtcacattctgtatagaataaaacagttggtagttgtcatat

SEQ ID NO: 35051 - DNA, 1085 bp, Homo sapiens
gaaatttggtccagactcaagcagactggcctatttcagaaatagtcattacctctttaaaaatcatatttcccagctgtcatgaggaaactagaagtgagttggattccacctgttttgcacacaggcgatggttctctccatgcttgaaggcatagtgcccataaaatgaccttgtttaccttctcttgctaacgcgcgctgaaagggggactagatgttccctatttcgttgcatataaatgcaccattgcttttatgtaccactaaaaaattgctgccaattctaattgttaagatgccatggattataagcacatgctgattttagagaggttaaaatatgaaagaaatgtgtcttagagtcaatgaaatatagtattataataaaatgacttttcttgtatctgtacctctgaattgcatgcacacatacttacacattcgttgttttaatgtcctgatagatcattgccactgcggtttgccacaccgatgcctataccctgagtggagctgatcctgagggttgttttccagtgatcttgggacatgaaggtgctggaattgtggaaagtgttggtgagggagttactaagctgaaggcgggtaaggagaatacttgaaccacttgtttaataattttggcttattcctatggggaaattgtttttctgataaaactacccactatttatgaataggtatcatctaagtagattgtcaagattaagttgattcctcatctgggaagcacaaatatttggatatttttttctctctgattttgcagactactgtttttgtgaaacttttctaagtacatttccaaaaccaattttggcatattaagcaagaatttttagagatgcatcaatgaagcaggattttgaagcatataacttcattgttcttcagttattgtttaaagagtttcatttagataaaaatattgaaacatactttttgcatggtcagacagtatctgaatgatgttacctaggtaaagttctaagacttgaagtttttaactttgcaaagccacatccgttgacaggaatttgcaagggctgatgttttcattt

SEQ ID NO: 35052 - DNA, 1031 bp, Homo sapiens
actttgggaggctgaggtgggtggatcacctgaggtggggagttcaagaccagcctaaccaacatggagaaaacccatctctaccaaaaatacaaaaattagctgggcgtggtagcacatgcctataatcccagctacttgggaggctgaggcagtagaatcacttgaacctgggaggcagaagttgtggtgagccaagattgcgccattgcattccagcctgggcaacaagagcaaaactccatctcaaaaaaaaaaaaaaaaagaaagaaagaaatgcaggctttctgataactttggagattgtgacatcagaataaaagaaaaaactttcagaactctcatagagaactgaaatgttcataaccatcaaacagaagttaactacatggcctaaactgaagaagtttagtctttttaactttgcttaaaacgttgctgatcctctgttttgtttttcagagtcaaggaaacttttattttgagctatttacagcttttaaccattgattgtactcctatgaacaaaatttggagcatatttatttctctctacctgatttctccagaatttggaaactagttgtgagtattcttaacttatggcactatagttatttgcataggtgcaataagaggctgttttcctttgtaacaggacacaattggagaaattgattattttgccaaggccttgactggaatagtgtgtttccctttagggaatttaacttgacttacagagccactaaaaaccccttggggaactggcctcataccttgcctacagcaatccttgtagagggtttctaatatatggtaagtaaagaatgtaactttctcacaggtctgggagccccaagttatctcctcaaaaggagaggaatttacccaactcataggtatttggcagggctcagcttttaaaaagtcttatctgagattccttatgaaacagagttccatcaaagataattaaaaagcctatgtgaaaaataattattcttgctgcattttatacaaataatcag

SEQ ID NO: 35053 - DNA, 1067 bp, Homo sapiens
cgggggagggggaaattcctttgctgaaactgagatccgcatcttgactgacctcattaatttctatacatctttctcaccttagttctggtggacatttccttcagatctccaaagtgcttcctgagaaaatgttccctctctgtattcccaaagtaaccactgcaaaagacagccatagtacttaggcattgcgttgaaattgtcaaatgatctgtttgtgtcccagccatctgcccagaccttcaggaatttggaagcatctttgcctcccctctgcctggcacaatggatttagtctattgaactacacttaatagactggatcaaagctatcaaggtgtcccccaattcttagcaaataactatcactaataaactgcttttggatttcacagttgtgtttgaatttcagaactctttggtggatttgagactgaccagtgtttttatgtgctgataaatgtgatttgaagcatgaagcattaactaaatgaatattcagctttgagaattcaagaataaattaagccaaaggcttgtacttttagtcataagatttatatcagaataaatgatttgagtaaaggatttctggagttgtgctgtgggagaaaaacatttttatagtatgagtaatgcaaactttcattttcaagttctctgaatgtgcaaaattgcttttcttcattacatacagatctgcatagatgaagatgtgatatttcagccctcctcccccacaaaaaacatactgagaagattgtaggcaaatagtaactttagtttagataaaaaataattctcagtcataattataacaacccagctgtgaaactatatatggcgtgggaacagacatatatattgggctgttgggggaggtgaacaaacttttattcatgcagggatggaatgttcccagataaagctctcctgcctggtggagaggtagacaacaaacaagccagtaagcaatgtcagctaatgggtcacatagttgtgtggggctcctggagtaaagagcccaaagagggaggcagcccgctgcaaacaggtgatggctg

SEQ ID NO: 35054 - DNA, 1050 bp, Homo sapiens
tgttttatatacatgtggcctaacatcggaattgacacatagtaaggacttaataaatggtacttgtctattgttatcaataaatatttggttgaataagtaataccaaattttattgtattgataatatccatcataagacacatcattcttttatgtaccaccaagaaacaaaaaatatcctggcagataaactatgtcatcaattttaagatgcatactgttttcagagttaagtttgaaactctattaatttagcttttgtatttagaatttaatgtacaatgagttttgttgacatttcttttttctttactttgtacacagagagactcttcagaacacttcatttgcttaggcttttccagcctcagttttcttaatttaaggaacagttccatctataaagattgatataagaatctgctgagatgttgcatgtgaattgagtgttgtggttcttgtttttgtgaccattgttgtgaataataatgtagaccatatagtgtagtgttaggagaactgactttggaattaaactgagtaaagttgaatcctagctctgaaatttttagctgacgaattgtaacctctatgagtttcatgtgtaaaatgggtgatgatgagtgggaggaggaaataatagctatcatttatataatgcctgtttcagtcactgtcccaagcacattgtaagtattaactcatttaatcttcacaacaaccctgtgagattatacttattttacacatgaagaaactgaagcaaagagagattactaacttgcccaaggtcatagaggtcgtttgtgattgaaaaccagacaatttgtctctagaatccaggccctgtgctccaacgtcttctcagaaataaccaactttatggggtttgttgtgaaaattaaatcaggcaataaagtacttcacacatagtgaatgctcagaaaatgtcagcaattatcatcatctcccccttgctagggaaaagttgataaaatgtaacttctaagagagtccttaacctctctggtcttggttttctcctct

SEQ ID NO: 35055 - DNA, 1043 bp, Homo sapiens
atgcctatatattcctagcactttgggaggcaaaggtgggaggatcacttgagcccatgggttcaagatcaacctagccaacagtgagacccccatctctataaaaaattaaaaaattagctggatgtggtagcacgtgtctgttatcccagctacttgggaggctgaggtgggagaatcacttgagcctggggggttgaggctgcagtgacctgtgattgtgccactgcactccagctggggtaacagagcgagaccttgtttcaaaaacaaaacatgattttgctgtatgttgtctacaagaaaattatttgataacactatatccagaataaaaataagattgaaaaaatatatcatgtaaatattaatcaaaagaaaacaggagttgctatattaatattagagcaagtaggttttagagtaaaaaaaattaccagagaagtacattatgaacacatacatgataaaagggtcagtcctttaagacataaatgtatatgcaccgaaagacagctgcaaaatatgtaaagcaaaaactaatagaactggaggaagaaatagacaaagtcacaattatagttggagactctgacacctctctctcaataattgatagaacaattagacagaaaatcaacaagaatatagaagaactaaacaccaccatcactcaacaagatctaatcaacatttatacaacataccgctcaacaacagcagactacaaattcttttcaagtgcccacagaacacacaggaagagagaccatatcctgattcataagataaacctccactaatttaaaatattgaaatcatacaagtatgttcactaaccacagtggaatcaaagtggaaatcagttacacaaaggtaataggaaaacgtccagtccttggaaactgaacaacaaatttctaagtatccatgggtcaaacaggaaatatcaaaacaaatttgaaaaaacatattgatctaacttggccaggcacagtggctcacgcctgtgatcccagcactttgggaggccgaggtgggtg

SEQ ID NO: 35056 - DNA, 2138 bp, Homo sapiens
ccgcggtgggggatgggcgcgccgccttggtaattctatattctccgttcctcctccgctcgcgggcgtgtgcgcgccgcaggctggcggtaaggctggaaaggactccggaaaggccaagacaaaggcggtttcccgctcgcagagagccggcttgcaggtcagtagttgttcgtgcagtctgggagtcatgatgtttttctttgcatttccttttttgttattcatcgctctcgatgggcgttttgtgtatgcgtgggtgatgcggtgtcgcgacttgggctgcccatacgataaatatgggggggaggaatcacgtgtttcgatgtcgggacgcgttgctgcgcccgtgccccttgctttggcgcgcatataatttccccatctctagttctcatttttgtgcatttatgtttgtgtatgcttaaaatttaagttcccagtgggccgtattcatcgacacctaaaatctaggacgaccagtcatggacgtgtgggcgcgactgccgctgtgtacagcgcagccatcctggagtacctcaccgcagaggtaaatgggtgaacgcctataatccggagaaggtttggggggcggggaggcggcaagagggaaggaggaaagtgatgcaagaaaactcccaggccctgaacgcggcgagaggcctaagagaacgctagagggagctggtgttcaacaaggatcctactgagcttgagttctctgctcttggaattaaaattgcgtgccccctgtatatcttgccagtcagatagtgaggaacgattccagttggtagatctgcgtttgtgagggttttattctgttctctgaatcttggccaaaggaaagttggaaggcaactgacagattctgccttttaggtacttgaactggcaggaaatgcatcaaaagacttaaaggtaaagcgtattacccctcgtcacttgcaacttgctattcgtggagatgaagaattggattctctcatcaaggctacaattgctggtggtggtatgttaacttctaacattttaaaaaatttcttcagaggaaggaattttttgctgcttttaattagtttttccaggagaggaaatttaagtatattttcaatgatggaagtatggttgtatcatgaaatttgatttatatgtataactcaatgaatttttacttcatacttgagctgcatgtttttaaagatacctttcaagttgaacagtatacactttcttggtttcaaatactgtgattttttaaaaaatcttaagtagaattaattcctgtcactctcctaggtgtcattccacacatccacaaatctctgattgggaagaaaggacaacagaagactgtctaaaggatgcctggattccttgttatctcaggactctaaatactctaacagctgtccagtgttggtgattccagtggactgtatctctgtgaaaaacacaattttgcctttttgtaattctatttgagcaagttggaagtttaattagctttccaaccaaccaaatttctgcattcgagtcttaaccatatttaagtgttactgtggcttcaaagaagctattgattctgaagtagtgggttttgattgagttgactgtttttaaaaaactgtttggattttaattgtgatgcagaagttatagtaacaaacatttggttttgtacagacattatttccactctggtggataagttcaataaaggtcatatcccaaactagttgtgtattaaatttgcttggttgtaataggaacttgttttgagtatctcatctagcagcaataactaagcacatttctttgtgactgaactgtcaaatctgtagatcaacaaagtgagatagcccaagtatatttttttaatgttatatgagctactaaagttttaatttaaaaagttggcaggagctggagtgggattgtcagtttcttaggctaagtgtgaccatttcagtttgtacattggcttcgcttgctgtgtgacagcactgcactagtatgctgttagcatggtggacttggggagggagagaataggtaggaatgtcctgtatatccacagaatgaactccgaatttaaactttaaagataatagtgctacgtgccaggccctgctttg

SEQ ID NO: 35057 - DNA, 1030 bp, Homo sapiens
tttaacaaaatgatgtacaaactaaggactatttattgataatgttttgctactcttgtcagacaatggctataaactgaattaggcagtcttaaaaaaaaaaaaaaacagaaaaagaaaaaaaagaacgttgcaaatttgttaaaatgccaaaaaggacagtttaattttgtacagattatgcttacctcaggtttctttagtgtgcttgaatgcccttctttccatataacacttatcttcttcttaattcggcaatggaatatcttttaagttttaaaaaaactggaataattatatctatcttttttgccgtttatatttaggggtttttgttgataaaatcaagtcttggttgtggcttgctgaattaaatatttatgagtggtgcatttttaagtatagtgaacaagacaccatattaagtacagtgataaagcatctatattctgtaaaaaaaaaaaaaatctgcctatgcatgttttttaagaaaaaaaaaatggctgtatcggcctgtatgggactgtaatgcgcttagtggtctgacatatactggaaatgtatgtatactggcgtactttatattctctaaaatgcttaatgcctttgaaattttgtaatcaaaaaaaagctttgaaaaaatctaaaggggagagtattctttaaagtttttaacataagcttgtcaatgcacatgtagatggttagcatgtttagcaaaccttgtgaaattataataagtttgtagttacatgtgaaactctaaatgcatggcaactgttaatgtcataacagtttagttattttgttctgttctgtcatgtgccacaaaatatgtacttttttcacttttttccctttgtatatcagttacgggttacaactggttcattctgaaaacaacaacaacaaaagtccattcatattttttaacaattgtataagtgcccaagtaattcactacagcctaaagccttgcctttgtaatttgacttctgacatgttggcaatcaaagcatgcacttgtaac

SEQ ID NO: 35058 - DNA, 1052 bp, Homo sapiens
gattctcctgccttagcctcctgagtagctgggaatacaggcatgtgccaccacacccagctaatttttttgtatttttagtagagacggggtttcaccacgttagccaggatggtctcgatctcccaacctcgtgatccgcccacctcagtctcccaaagtgctgggattacaggcgtgagccactgcgcccggccgagaaatttgaaaaggagagtttttttttttttttaattaagaaaagtgctagagtgtgttgtgattcactatttatggggagcacaactacatatacataaagtagaatatcttttatatgctctctaatcattcattttatctgaaaatataaggaatagtatactcactgtgagaatgttcattttacatttaaaatttagtatgtatttgagcatttttctgatcatcagcttataccaagctaagaagcacagctttacataatttatttccctccttttccagcatagtttcttacttttcattgctgtagttatgatttttacaagttttttatcagaaatcttctgtgagattattcttcatatatattttttacttatttgattttatatgttcctcctctcacctcacttaaatacatgaagttttatttttagacgtcttagccactcctatgctgcttttcttgttgtgcttctaaatatagtgaccagttttggagctctcccagtttccattctttgtgttcattgaattgatttcatgatctggccatattgtttattggagagagccagaatattttcccttactcagcacatcatgacccctgagttcacaggtcagttgaggtagggaattttaaacatagagtagtaataggacaatgttagactgaaagcatcattgaatggaataactgaaatatatatatacatgtataggaagaccaccctaaggggactatttgccatcccactttaaaaaaaaaaaaaaaaaaagaaaaagtcttttcatggtctcttgttcattaatcatctaaaatccaagcacagagaattcaattt

SEQ ID NO: 35059 - DNA, 1032 bp, Homo sapiens
gaatatattaatctttaatataaaaaatagaaaaaaaacccatttagatatacaaaagaaaatatgctctgaggaacacagtggtgataagattcttgttctgtcaacattgaagcctaacctaaagttagtaagtcaaggaataacataataaaaacagtatttgagaaaaggcaaaaactttttcaagcttagataaatgcttggaaaatgaacaaaggatgagtagggatataatttaggaacttaataaagtatcttgaagttgcagtgacaagatctgaacaaaaatattgttaagaaaaacatttaaaaggaaccgttcaaaagacctttccgaggacttatgacgtagaatcaacaggtcttagacagaggggcaaaggaaacaaaagctgagtttgacggttcaaacctaggggcataggagggataataacatttatggaaaaagtcaccacctccaggagaaagatgagttctgttacaggcaggagtttgagtaaaactgacgtgtaattctagaaatgcccaagcaggatttggaaaaggagtcctagaaattgagaaagaaattggggctagtgacagaggcataggattaagtaataactgaatttattaagagtgaaataggcctccaagttgctgacttagaataaaatctcacaaaattaaggactgatttttaaaattagcctgcactgttaaagctggagatgaaagaaggagaaaataggagtgatgacagagcacaagaaccaggtttgtgtagcagttcaggcaacagctacttaaaaatatttgcacccagtgcagaaaaattaatatgagatataagtctggccagaattaggaccataactttggctatcagacatcagattgttgaaagagatgaatagcaaaatttatttgatttttacagtggcacgtaaaattgaaatcattgacaaaaggaaaacactaaaataaaattcagtgtgccctattctaatatcacattgtttttactttacatatttttatttc

SEQ ID NO: 35060 - DNA, 1066 bp, Homo sapiens
gtttgacacatgaggctttttggtacacattgtaaagccaagttgcatgccttgtacgtggtaggcagtcaatacatgcattgatttaagcatttttttttttttttggagaattaacagcaagactgtgaccagaagtatcctatcaatattgacccacagatctttatctcactttaaatcactcctataaccagtgctgataccctttctaaattggagttaaacatttgcagagcactttgcacatctggattgttgaattttctcctgtgaatctgtagacctaaaggaaaacctatttcctaattactcaaatacaccaatcaggtgaaaattacagtaatgacacatagcttcaatttttaaaaaaattatttgccccctgtaaaagtgattttaactatacccactcaccaatacaataaacctttattgagaacttactatataccaagctccatgctaggtgttggggatataaatgaaacaagacagacatggtctttaacctagtgtgcttaataatctggtagtatgatagacattaaataaataattccaccaatgattatttatatgtatttggaaaaagcaacaaagaaaagagtggtgtgatatgagagtgaaaattagtctatggggactaattggggaagtgacatttaagcaatcagtgagagtaaaatctctctggattgagaaatagagtggcagatgtgaacattggcttaaacaactcagtttggccaaaaattgcaatgaacctctgggaaaatgtattttataccttgatgtaaacacttgaattcattttctctgtagaggtacacctgtgcttcaaaagaatctaaagtaaacgacagtaggtttccatgtggtacaagttctttgtagttcagatgagttgttggatggacgggtgattagatgagtagttagatacatatgtagagaaatataaacatatataccaggggtatgtaacttagttccagtacacactactgacagtaaaattaaggaaatttgttaaatgaaaattattttggatttgagaggaaag

SEQ ID NO: 35061 - DNA, 1074 bp, Homo sapiens
tgacctcaggtgatctgcccgcctctgcctcccaaagtgctgggattacaggtgtgacccacgatgcccggccaactgtatgttatcttaatgataattttttcctgttggtcagggaatttgtacaaaatgtgtaacacagaaactatcttttcttttataataaattatttgaataacatacattactagaatgtttccctgcagtgctatttttataattgatgaatgttttcaatggtatatagtttaagttctagtgaatatttgcagtttgaatattggttttctgtaccttgatttgcattgtcaaaaatttatttttataatacacatttgtttcattaaaagttcttagagcagagacataatgactgtaaaaggtttttcaggtttaatttatgatttgaatttcatttataatgaagttatttgagtttgagactcttaaaagacaaacataattgtatattggatgttttatttagtcaagatagataagtcttaagataaagttctgctgatcatatttaaaggacaaattctaaagccttgtgaatatccataattttgtttaggttttgaatgatataatcatcttattgtacccataatgttagataaagcaataacttgatttcccaccgtatgggaggagtcttaaatctgggagattatagaaacaaaaataattaggaggcagaagagagcatatgtattctcttctgcctgcaaactcagttatctctgttgtatacacatacatgcacacatatgcacaaatggtgcaatatttgagaaaattgagacttatattttaaattcattatcttgttatagttatgctccgttcactttgtctttaaatgtagacttttaaaaatttatttttctgagagtggacactttcctaatgttttataatggcttatgttttttcccccagttcatgcacctcaacccctttctgattatgtaaaaagtacagctgtagatgctttttctgccacaaggataaacttggccttagagtcaagaggcttgtttcatgaatgatgtatgtttgattatctt

SEQ ID NO: 35062 - DNA, 1030 bp, Homo sapiens
ctttgccctttggatagaatccaaacactttaccgtcctaccacttcaccccgaatgctcagaggactgctttctgctttctgctttcttctccagccttctcttggtcctttccccttaatctccagactctagatttactagatacctaacatttaatggaatttgttaagctcccctttgacccagataaaccttactcaccctttgggtctcaaattaaatgtcactcctatgggaaatctttatcgacagaagtataccatctaatgctttcgcgttttttttccttttcttttttttagtgagactagtacacttagatttacttttaatcacacattcagtggcctatgttatctgtgatctttctagaatatatgtttatttcttgcaaggactgtttctctgcctctttcttcattgtgtcatactgtgcttgccccatggtaggttatcttaaatatttgcagattgactggttgattggttgataaggagaaagagttgtacaaggacttaatggcatgatagagaaatctgtttctagtaaaatttactcaagttatgttattgcattttatattattttctgtccaaaatctggtcttacaactgccaattttcttactttgttagtagcctatgacattacatgatcttacaaagtaaaatgtctttattcagcacctactacattagaatgtgatcatttggacagggtgtactgacagcttttagaggtaactcataaaaagaaaaatctttttcaaatatccaaaagcattatagatgtattattttacttacaaacacttctgctagttattctcaattactcttacctatttcttatcaagtttcataaggatttatgttaatacatctcaacctagatcaaagtactatatgattttccaaatattaaaagtgcatttttatgtctatctaatcattaatctatccagtcagtgctttttaactggaagaataaattaaaaacatctttaatactaaattgtggatattt

SEQ ID NO: 35063 - DNA, 1066 bp, Homo sapiens
tgagaccttatctctacaaaaaattaaaaaaattagtcaggtgtggtggcatgcacctgtggtcccagctactcaggagactgaggtgggaggattggttgagctcaggaggttgactgaggtgggaggattgcttgagctcaggaggttgaggctgcagtgagctgtgtttgcaccactgccctccagcatgggcaatagagggagaccctgtctaaaaaattaataataaatttttaaaaatcagcttttatttaaacttatcaataatgctgaaatattttgaaaccattaaaataacttttttcaaataatcttcagtgttgaatcattattacataattcattatataagccatttgcaattgtaatgaagtaaccaaaatatcaaaaattaaagtagtgttgtgatagaacttctcaagactgcatgcagaggaagttgtggactgtcactcatttctgtgtccttgaatccttagactcaagaatatgtggtggaaggagcatgagaaaatctgtacatgggaaggataaagaatagatatacataaataagtatatttaaatatatatacataaacatttaaaaactattttgaaattcagataataaaagaggctctgtcctgctcaggtacttattttctctaattaattattaataccttatagttgaagaataattttgtttgtttgtttgtttttttgagatggagtcttgctctgtcgcccaggctggagtgctgtggtgtgaactcggctcactgcagcctccgcctcccgggttcaggtggttctcctgccttagcctcctgagtagctgggactgcaggcatgtgccaccacacccagctaatttttgtattttcagtagagacagggttttaccatattggccaggatggtctcgatctcttgacctcgtgatccgcccacctcggcctcgcaaagtgttgggattaccagcgtgagccaccgcacccggctgaggaataattcatttaattagtctgatctttattaaataattgcttgtagcacatttcagatttaatctcaaaaa

SEQ ID NO: 35064 - DNA, 1045 bp, Homo sapiens
agccttggggcaagcccaactttgtaacccaagcttcttcaatgttagccccccaaaataaggactaaatctcttatttgagagtaaaagtccattgtaattaacttgagtaaacatttaaatgactgataatcttggttatctctggctggcatatgagtacagattgagaatgtcttaacgctaggtttgaaagtggggggaagatgggagcgcctacatctgtggcaaccctgtcacttgtcaaaaaccaaagattttattttctttgcttggaattcttcaatttccttcttctctaggtagattttttagagaaataacaactacttttgataatctacaatttacaggcattttcagattaatatagcgagctttagtggagagggcatgggatttggagtcaagactctcggattatgtcgtggctctgcccacaagctgtgttatttttaccatttaatgtgaactcgttttcttcactctcttaatctataaaacgaacactgtgatacctattacatagggttattctgaagactgaatgaaatcatacatatgaaaatgtgttaaaaaatgtaaagcatatgtggatagtgtcttatggttgttgggtttttttaagttgaaaacctcatattcataaaagagctctttgttccaaatgataacttttcttatgccctgtagagcagccaaattaagaccgctagatcagttttatactgaaattaaatattgggaatttacttatccatcattggtttgaagatacctaataccatttagtaatcttcaaatcatatttgacttaaaccagtattatacgactacagtcacatactattaagaaaacactgtgtgcattataggttaaaggatattaacttttattgcatggtcatacactgtttcatagtatggtgcacatatgacttaatagaaatcaggaataagaaactttttaactgttttcaaactgatgaacaagtatagtatgtcctttccttaaaaaaactatcatatttatgactttgattaa

SEQ ID NO: 35065 - DNA, 1580 bp, Homo sapiens
tttcacatacaaatgatttttggattaagtgcaccactgacctgcatgattggcatggataattaaattttaacttgtgtctttgcagctaatctagctcttgataactgtgtttcagtgtaggacatagctttcatcagatatactggagcaaaaatgaatatgtttacataggctaaagcatattcctttttaatgaaagttcgttcatatttgtatttattgattaagagtagatcctcatactatccttgtacgattggcctatctttgatgtaaatgatatttttatgaaacacattttcatcagtgcaatgaatcatccattcctggatacctgccaatagatagttatgaccttggaataaaataacaattgggaaaaataatcagatttccatatgtaatgttgggcaatttaaaaaatataaggtgtacccttcctctagtacacttaaacacacagaattgaaagaaaaatgaagttaatcttttgtgtattattgtatttatggactggaaaaaaacaatggctaaaaagaacaattatggcataccattgttattgaatgtatttttaatgtgtatttgaggtggagttgagggtggaaagttttacaaactgagatatctgattctgtggggaaatgaattgcgtccacttatattatcatgtggttctcacatatatatttgaaattaaatgactttctctcctaactaaaggaaaagaacaatgtgtttgtcataagggcaaaactgttaacttcataaaattcctaaaataatatatatgaacaaagcagtgatttttccagtggtcttaaaaagcttgataaatgattgcaatgatttaaagtatttttagaatgcatttataatctgggtttcaaatttaaatacaagttattttatatttatgagaagtaataagaaaaattcaatagatcgttaaagaaaacaaaaacaagttaaatatttgttagatatctcttactgatttgatatctcctatttttaagtgtgtttgggtaatattaagaatgcaatctataagaaagaacacgtgtgaactttcagttatctcagctaccagatagcgaataagccatacatttcttttagagggaagagtattttgtttcttgaaacagaaaagttactaaatgatgctgttatatattatttttgtacaataagtatgttttggagttgtaaatatgattatatatatgcagtcatccttaagattgacattcacgaaccatgaatatgccttacatttctgtgtgcccattgctggtgttggacttgaattttttatgtggtttttcaataaagtagtctgtttagaataatttcttcttatatattcttttttattttgttttgttttgttttttagcgaagtgaatggaattctcagaattccagttgggaattgtggttgtttttaaattcttgcatctgtgaagggaagccaactagaatgctgtttacttctcaaaatatgcgttttattttaaacaaacttttaagtgatatgacctagaatatgtcagatctgacagagttagaaa

SEQ ID NO: 35066 - DNA, 1044 bp, Homo sapiens
tttatggaacaattcttaaaaattcataaagtcacactgtatttaatctactttggggttcaaacttacaaaaaggacttttaggcaatgattttttggaatgtaaaatataccataattaaaaatgaatattatcgaattgttaagtcttatgtagggcatcaaggacttcactagcccacctgtaaattaagaaataaccattcagattaaacaaagcaagtataaaggaagttggatggaccctttttgccaatatgcagatgtatcatttctagaagatgtactttaattatgaccatttaacagaccaatactgtctaccttaaaacctcctttggtatctaatttcttgcaacatagtgcatctcaaataactggtaggaaattgtttgtgtctttaaacatatttttagtgtctttaaacatatttttgtttgtgtctttaaacatatttttaggaacgtatggcatcatgcatatgtccttttctttgaatctgggaggtggaagaaagcttagtttgaacaagcttatctagtacctgacattgaacatcgctgtatgccttgtgatagagtaatagattgagacacatatttacaacaattgataaaggttttattggttgtgaaggtggtatgcacacatatgaatgacctgtcacggatctcacagatacttcctttttatgcagtagctatagccactttaaaagatacagatgttatatagtaaaaatactacaaactcagaacctcttaaaacaattttttgcttcttgcaaattgctgtctttatgcaatattcctcaaagatcttgtttgcagtgaagcatccttcaaagcatgtgaaatgtatttttcattaccatctcacatgttatatgcccttaattccatttgtaggaactccttctaacatttaatgaaatcctcagcagccagctgtatgccacagaggttaccatgggttaaccaacattttatgaaatgttcacatgttcctggaaaaaccaatgagcagcttatagagactggtaaa

SEQ ID NO: 35067 - DNA, 1033 bp, Homo sapiens
gtaccaaaattttaatgtaacattttgaaatagtaggtgagatttggataggatggttagcaagttggtttatcaaacttagcctgtaaatgaccacacaggtttggaaatagaaaataatttacattatgtgatatagtacataagattgtcatgtggaaaaacaatacaaactagattgaatattcaccatatgagaaaaacactttcttcccttttgaatcacattagcttttaagaatcttcaaaacttttcaggaacatgctatatccacccaaccccttgttttttggttaattgttgtttgccctatcctaaggaccaaaagctatacttacttccatttagtttgtcagtcttttaaatttatttttctaaattgagaagagcctgattaaggagttctgtggcaatagaaaatctctcttcaattcattgccaaagcatagaggcttctgtatatagtatttaaaagtagagctctaaagtaattatttccttggatcctaagaggactcgtgttagtgaaagcaaagtgggacttatttcgacccacaaagaagagctgatttagaggccatgtggtgatgccatgggagaggcgcatgtactgctggtttaggacgagctcttctgataagctctcagctgttacaacagataagagaaaattgatagtttcagaaagcaatgaaagtcaactaggactacagataaacagcatctatgattcttttcaaatgtttgagtacaaaacacccatattttaatttaataaacaattactggagacttactatgtataatatgctagaaatgttagaagctctaaaagaatgataggacagagttctgcccttaaagactttagaactttttagggaagagtcaggtcccactataggggccgtgtgtgtgtgtgtgtgtgtgtgtgtgtgtgtgtgtgtgtgtgtgtgtgttcatgggctcagtgcagcctcgaactccccgggctcaggtgatcctcccacttcagtctctcgaatagctgag

SEQ ID NO: 35068 - DNA, 1033 bp, Homo sapiens
tggctggaagcctgatggataacataaagttaattaacatatactgtgtatgttatatgtattatatataccatattcttacagtaaagtaagccatagaaaagaaaatgttacgaagaaaatcattaaggaagagaaaattactatgcattaagtggaagtggaccatcataatcatccttgttgcctttacattgagtaggctgaggaggaagaggagagattcgtcttgctgtctcaagggtggcagagaaggagtaggtagaggaggtggcaggggaggcatgcatactctgtataacttaatgaaaaaaattcatgtataagtggacttgggaagttcaaacttacgttgttaaagggtcaactgtaatatatatatatatatatatatctccctgcttggtataggtattgttagttaggtgtctttacatcaagatttctttgtcttagaccaatttaaaaggaaatatgaggctttggggtcctgaatgacattgggctacatcttagggactcttgagtctatctgagggtacatctttctgtaatgctggcataaggagctatgagacccattagcttattctgaccctaggatatatataggagaaatactacagtcctaggtctttggaactgagaggaatctctggagtcacttattggaattgcctattcccactgagaaagccgcgtgagaattttccaggggacacaaatatgaggagtcagtttaagatctgattccctgattcctggtcctatttctttgcatcaataatgtgccctcactcctgatacagtggagagcaaagtaaaaacagctaaactattcaaaagaaacaataagaaaacattataaggcatgaaaacccaatcaaacagttgtatttcaacatgagagaaacagtttgcagcagattttcagtttaaatacatgtttaatttcatgtttaaatgcaagccaaatctcagatttaggacaggggatcttcattatccagatgaatattcctgcataaggaag

SEQ ID NO: 35069 - DNA, 1041 bp, Homo sapiens
ccaggctaagttttgtatttttttgtagagacggagtttccctgtgttgcccatgcgccacaatgcccgaccaggaggtctttgtagaaaactctggattcctttttctgggaagtatcttcctcttgctaatggaaaaatgtttaatcttatgtatataaaatttcacattgcagaaagtatgttttacttgaattatgaaattttttgtgactacaaaataaatgaattttggctaacactttattaaaaataattatgggccaggtgtggtggttcacacctgcactcccagtgctttgagagtgagaggacctcttgaggccaggagttagaaacatagcaagaccctgtctctgcaaaaagttaaaaagttagctgggtatggtggtgggtgcctgtaatcccagctacttgggaggctgaagctgcaagatcacttgagcccaggagttggaggctgcagagagctatgatcatgccactgcactgtagcctgggtgacagagaccttgtctgtgaaaaaaaaatctgaaatattacatgtaaggggattttgtgaacattctatatgctaggtattgtgataaaactgtaaccaagtatattgtatatagtatggaatgatagtaataccaatatctttcatagagaagtttctcctttccagttttaaaatttaggattactttgggtcaggtctattcatctttgaagaaaataattttttaaaattccattgtataacatgaagatttttgtatgtgaaaaatacattaaaatcttgataaataagttttaattttacatttcaggccagacatttgttgtatgaatctatgagagcacatacaggattccttgtcatatgtggacatgagtcattataaagtgtactgttaaattgtttggaggcacacccaatagatgaaaaggctaaaaaatgtaatatgtaattatgaaattctcccttgactgcttagtaaccattatgctttctttatcactaattatttcgggtaacagattcaataggtttac

SEQ ID NO: 35070 - DNA, 1031 bp, Homo sapiens
atacacagaaatagaatagtatactctcctgcaaaagaatgttatttactttcattttgaaggatgttgtcttaagcctgtttttctgaactccacttaatgacccacactgatgctctggtttgacaaacaaaatcttcagatttgatgattttgttaatttctagagcaggctcaggtgaaaatatcagccagtgattctgaggtgttgcattcctatttttaaagcagtcattaggtaggactgatgtaggcaatgaaataggatttcagtttgtaaattaagtctttagtactcttgacattttcagcattttaaaatcattttattttacaataattccatcttttatatgaatccatcaattatatttcatatgagaagtgaaataacaattgtgtattcctccatggttaggggttctgaataatggcttaaatcagatgggttatcaactttatgacctagcccagttgctggtatctcaaatccgttttaacaaatatgcactcgggtagtggaagctttagatattaaaaaaataaaagccctcactgacaaagtggcaataaattattaaaatgctatgtttttggaattcaggtagattctttttgagaccatcatagagaggaatagaactttgctgtcctttttgttttccttatccatgcttttgtctcacagcaaaatatactatgactctattttaaaaaatggtctacctgtctgtgaacttctgtctcttgcaactggaaattttgcttgtgtctgtctgcaaaagagggaaacaaatagatatcagggatttataaaagctatctcaatattatgacatactagtttacaatgtttgtcaatttcaggtacttttgacaactgtgaaaccggaagaatgatggttgatgttcaaagagagagttttatttatatggagctaaattaaaaaaattttcatcagctctaagattcttagacttagagtctttctgtggtgattttattgtcccagttttcctttctttgggga

SEQ ID NO: 35071 - DNA, 1035 bp, Homo sapiens
attcagattgttattaccatggcatgccatggcatttgcttacagttatatttattagtgtcatctggcttttgttgtataagaaattgctatttacaaataaagatgtgcttgtggtttgtagtaatatgatgtgactgttttcttaattgtacttttagaatgcagctttagagacgtaggttgagtctgtctcaactatgttatttttgaggtttatagaatctgctagcatgtattcagagaccctgatcggttttctaaaccttaaaaatgaaagagaatgatggcagtggagatgaaaagtatttgtttagattatcccaggagagaaagttacttcagttagcaaaactagtgctgtatcattttgactcttcttggattaaaacaatggaaagtagaaaaattcagagaaaacatcttggtaatgacctttgctggaaatcaaaataatatggtccgtttattgctttacattatatttttaaagatacatacagcaaaccgagggcaataaatagaagaataactgtcttcctccccttgacccccgtcctgatttttctcttagtgatactctacaggccttgtctcaaactttggcttttcttcatttctctctgttcctgcctagaatgctttgtctggccctagcattccctattggtcatggaactttgctatgtgatagttaaaaatacttagaggaaattaaaccctatgtgataatgagtatttggctttgttaaatctcttaacctaccttccctctgttcccatctccaagtattttgtgatgggacttctaccttaactcaaaccgatggtaatggtagaaattttagaaactatgggaggctgttgagggataaatttctgagaagagttttgtggaatctctcagaaactatagataatgcgttgttgtgctttgtgtaaggttgcttttggccatagagaatgagctgtttttcaggtgtattgccagcttacgtacttcatgtagacagagtacacataggagaattctga

SEQ ID NO: 35072 - DNA, 1125 bp, Homo sapiens
ttatttcaattaatttgttctagtgctttcaagagcaagtacatcaaaatgtagaaggtaaaatgtatgcaacactaatataaattattccaagtctttaaggagccaaagaaaaaaaagatttctcacagctttttgttctgttttgtatttcaattaggaacttgcagtattattttgaaaaccattctaaaataataggagttaggaaataaataaagttttgctagccctgctaagttcaggcttagaggcttatcgctaagtataaacttcaccagattccacgaaaagctggatagctttttttctgacttatgttgtggttgcacccctcacaaatggcagaacagtatgtaaagctggtaacacctcggtttcagtgcaccatgtgtttgctttgtgaaggtgaagaatatgttggtttagagaaagaaattggatgtaattttatgcaatttacttttaaagacaaacataactatttagcagagaatattttaataaatgcaaaacaacagctggactgctgtacatcaaggacagattaactggaaaacatatgttccttatgtgtgatcgagagccattcagaaaagacttcctttgtgttcagcctatacttttccatatggtataccttgaaaaaaattagcacaccatggttatttttctaccttttataaaagacagagcctgtttactcatttagaagatagagaaaattggtctaaaattgaacatcctagattcacactcccaagtcacttaaggtgatttgatggtgaggaaaatgattgacaaagcccaacaatgatctcaggaattacattttccaacagaccaaaaaatgttttcatgtagcagcaatgcagatttggtgaatatttaatatatattttagtatgtatttcactttatgactgacaattaaaaaatattgtttggccaaatagtaaacacccttttgaaaccatgtattgtgtcatttgttatttaatatttgtcctgttgagtgactaccatgtatctggtattatgggggagagatataaataggaaatcagtgatgtgctcaaactgtaaatctaaccccgccatggcttatttctataccagttgctt

SEQ ID NO: 35073 - DNA, 1031 bp, Homo sapiens
tgcattgtttttccaccttccctgtatatgtttactctaaacaagtgagttaagaaagaaattgtggatcactgttctggacttcattattctctaagattatttactatatgagagtctctcaattgcatttatacaatattatatagcaaaatttattcagagcatttattttacaattctttgaagatccagaatcaaataatcctttgattgattttgaaattgcaagaagatttgcaaattattaaaattgtttttattaattgtctgacttataatttatatttatatccacatcttctaaataatattaataggcacaatttcttgagcacgtatcatataccaggtaatatgcttagcacttaattatttgatctcatttactttttataacaactactcagtgtagggattatttcttatgtattagaactatattggtttcaagtgatagaaatcaaacaaaattatatatgcacaaaggacaacttactggaaagatactagatgactaatagaacagccaagctacaggaaaaacaagaacctaggaaacattagaacccctaggactctccctccttctctttcctgtctcttagtatcattcttttctttcactgtaggctatcttttccataagtgggatacatagccactagcagttcctgaggtttgtcttataatttcagctactagaaggaaattgacctgactctttcagtcctaaatccaaaatctctggcaagtgtcttcctggttcagcttgaattagatgatcacttctagactaatctaagtgcttagagggctgggcccctttaatggtatcaagggaatgtggatggagtagaggagtggttatcaaaaagggatgctgaaaagatagtatcactggtgtctacaacaattctcatttgacagatgaagaaagtggaactttagatgttaaataacccctccaggtttactcagctagtgaatggcagatccacaagctatatagttaaacatgatataaaagt

SEQ ID NO: 35074 - DNA, 1172 bp, Homo sapiens
accataattgtaaccaatttatttggtgagcttcttagacctctaactatcttagagaatacagcataatggtttacaatctggcttctggagtcaggcaagcttgcgctgaaattctaattctcttgtttaccacctgggaaatcacagccaagtgacttaccctctttttgtaatccttagttttcacatccgtaaattgagaaaaaaagagccttactcataggacagttttttggactagaaaataagaacaatattaacatttattgagcatttaacatatttcgggcacttatatattcagtatgttatacgtgccaactcaataaagatataagacttttttccattacctatattgcttccaataatacgtaatacaaaagacaatgtatgtaaaatacttagcattgggcctggctcaaattatgtgctcaatgcatagttattatcatcataatagtatgttactcgatatagctacattatccttaacaaaattgtcttccattgatgatctgaacacccaagcgtctgtcaactaaaagaagaaagcacagccatgaaaagacagcaagaattaatgaaaaaaaagatcagtgagaaataagtcagtccagtgcctttgatttcagtcttggtttccatggtgactcaccttcagagaggcttttacagtttacctccacttccctttctccaaacactggtagtaaattcttgaaaatgtaaaccttaggagtagagactaataaaataatttgagtacttcaatgtgcattgaaattattacctcccttccagaggacttctgatgctacatttagaagttggctttattttattatttttgccccagattggcatcaccactgaaatgtgaatgtttggggaaccatataatacttccagaaatggatagaattgcggttttaaattgagatctacttctaaatctgtatggacctctatatgggttttgcaagccgaagaatccaggaccctctgcatttagctgaaccctgttggatagaaaacagataagagaatgagcattattttagtctaactggaagaagtgagagatgtatctcttcagcgacagggaaacagaaagttagcccgaacttcagcgaacagtaaaatcagtacaccgattctgagcttgg

SEQ ID NO: 35075 - DNA, 1163 bp, Homo sapiens
acaataggtttttagtagatgtcctttataaggtcaaggaaggtcccttttatttctagttagctgagtgcttatatcatgaaagaatgttgcatttttcaagtgctttttcttcatctattgaaatgattatgtgattttgctccccctgcatcagttgtataaagtaaccaaaaaaagtcttttaagacaatttcaaaatctttttcaatttcgctacctgaacacaactataatttgcttatacacattgaagttatattgtacttttaactttaatgatgtcataaccttagctctacctttggttttttaaaattaaaaaattaattaacgaaaaattgtatatacttatcgtgtactacgtgatgttttgaaacatatatacattgtgaaattccataccccgttttttaattgctcccaaattgtggggctaatcttttgggaatactgttgtttcagagtgaaggaggatgaagttcagtatcctgacgcaggtaggaacaagtgttgagaatgggaaggaaggaatgaaggaagcaagaatatttactgaataattgctgtgtaccacgtactcattctttaattcgacaataatctacccactccactttgagacccagggggaaatcaaagtactgcaagaggtcacagatagatctcccaccctgcagtgctttgatttccttttgggcctcaggcaaagtggagtgggtagagtattgtctaataaaagagtgaggacctggcacacaagcaataattcagtaaatattcttgcttccttcattccttccttcccattctcgacaataagtagctgggttcagacttactctctgtctccagagctgatagattttcttttcaccacgctttagaaagattagtgttagaaattgctaaaccttttccttaaatctataataatttctactggcctccttcaaataatggaattatttttatcccatatttttgtgaaatgcctgatgatgttcagagataataaacactatattttaaaatagaaaaagttgaggataagtgctgctcattatgaatcatttgttatctcttgatttactcatctttttttaagctacactgcttagttgagaatttgaataggtgattgggaaaataaaataaaccaa

SEQ ID NO: 35076 - DNA, 1080 bp, Homo sapiens
taaaatatttgcatatctctggcctcatctggaagaacatttctgagttaaaattaataaaaggtgtttttccatcagctatgacaaataaatcaaaagagctggctataccctttgttgaacatgtatgtccaaagaagatcaattttgagaaagttgttgacagatttttagaaggtaaggctgaaaatagcaaatattattatttcttactatagcataccattatatatgttattccctttgtttataattttattaaatatattaatataatcaaaacttgaatctattaacttttccttttttgtacgctaatatttgttttacttttttaaaaaactggcgtgattatacaaagttcagggaaagaaaatttttaatgtctacattcttttctggacattatcattattcatttcatttcattacttctattgaaaataactttgtcatatggaagaggaggtcttaaaaagtgatcctatctggtgtcagatatactagatacacatctggctacaaggatgcataactgtgccgatgtcaatgttaatctgttaacttctggttgtgctgtctgcaaattgcaagggcacgacaaagaatgtctcttgtgtcatcctgcacagacctgtttgacaagagctatttgtggagacccagagcttgttttctcaatacttttacatgggggagcactttcagaacaaagacagaaatgcagtgtttggttgtctcttaaaatacatgtaaaaggattttagcaggtttgacatttgacaatgtttagaaataagtggatttctttttaagaagaaaattgcccttttgaaaatgtagtgatgctattacagctttttaagtatctgatacaaacagctgagaagcagccttgggtttgtgaatcaatgattcattacatatcatctgtttggtctgccagagaaagaaatttgaggagtaccgtatttatcagtcacgtacctcttaggccctttagttcagatatccttaattcttgtttgaaagaatgcattcaactatcctgcacttttaaagttaatccttctattttga

SEQ ID NO: 35077 - DNA, 1083 bp, Homo sapiens
gtgctcaacttttcaattatgctgaccccctcatcaattttgttattgcccaagttccttgttttccttgttatggcattgctgtctcactcatgggccttcacatgcttctctgtgcccagaatccttatcatcttcctctgtacttagctgaggcatccttctggtctcagctagataccactttctaatgaaagcattccttggccaggcatggtggctcatgcctataatcccagtgctttgggaggtagaggctggaggattgcttgaggccaggagttcaagactaacctggacaacaaagtgagacctcatctttacaaaaagtaaaaagaaaattagctaggtgagtggcacatgcctatagtgccagctgctcagaaggctgaggcaggaggattgcttgagcccaggagttcaaagctacagtgagctatgattgtgtgactcccggggcaacagagtgagaacctgtgtcaaaaaaaaaaaaaaaaaggaaaaagaaaagagagaaagccttccttcaccctctctgtattagctgtgctttctgatgtcctgtttttatttctcaggacaaccttttatttctcctgtcctgatattattatgcttttgaatttgtctatagacttttagttcatgagagtaggggccatgtttatcctggtcaccatttaattcccatcacttagcagagtatatggcacatagaaagtcctcaggaaatatttattggataaattatctacatttaaagtataactttattttttcacatttgattaattttaatacatataaatttataccttattacataactttaaaacccatttacattataaagtaaaatactattactttttactttataaagtatttttacttaattaaaaaggaacaaatgtgtattattcttggaaaatttattttatctttccatttgtcattttctgtttatgctccataaagtttttatgacttacaatcataacatttttagagtggaagtctatgtaaaatataccatttttgttattcttcttcagaatgaaggattaaactgaagattaaaag

SEQ ID NO: 35078 - DNA, 1145 bp, Homo sapiens
caataaagataatataaatgttatacatatatccatatgctattttgctccaccctctattcaatttgtggcatttaaaacatactctcaagttatctagatagaacatagccctttgtcactaacatcaggaatcagatccagttttctgctatcacaatgttttggacactaacctctgggtaggcttccagaacaattgcaagttgcatctaggtatttctgactagattgacatggtccagtgggaagacacctgagttggagaccaagtgaagagtcttgggtctgaattctggctttgtgaacatagaataacttgaggtatgcccgtcatttgtacatggagctaatccctgatatgaagatatagtgaaataacaatgtaaatgcactttgcatgttgtaaagtgctatacaaccattcaaaaagtagagtggtgatatctattttggaggcttattactataattacaggtaatgaacaagatgctcagcttaggttatatgaagttagtggggtctttactttaatctcttaatcctgttatcttcataaactgagactgtacatcacctcaggaccactattgtacaaattgattgtagaacatgtgtgtttgaacaatatgaaatctgattgtaaaatgtgtgtttgaacaatatgatcagtgcaccctgaaaaagaacagaataacggcgattttcagggaagaagggaagataaccataacatctgactgcctgtggggtcaggcagaatagagccatatttatcttcttgcagaaagcctataaacggatgtgcaagtaggagaaatatcgctgaattcttttcccagcaaggagtaaccctggggaaggaatgcattcctgggggtaggtctgtagacggccaccctgggagtgtctgtcttatgcggttgagataaggactgaaatacaccctggtctcctgcagtaccctcaggcttactaggattgggaaattccagcctggtaaattctagtcagactgattctctgctctcgaaccctgtttcctgttaagatgcttatcaagacaatgtttgcacagcgggacatagactgtcatcagtaattctaattttgccttgccttgtgatctttattgccctttgaa

SEQ ID NO: 35079 - DNA, 1049 bp, Homo sapiens
atgaataaagagcaagaggctattaaaatgatcaatcagatttgaaaaataaccaaaagcagtacttccagaatttagaaaacaaactaattaaaacttaaggataggtttaatagcctagttgacacagctaagtaaagaattagaggaatgaaagatatgagaaaatcattctgaatgtagcacgaagatgaagatgaaagtaacagcttaagaaccatggaaaaataacttggtctaacacatggctaattggagcttgaattcgaattcaatttactgcttccaggctccaaatgcgcctttcaataaagtagttcctcattatccttgggagatacattgcaagacccctagtagataattgaaaccacagatagaactaaacccactatacactatgttttttcctatatatatatatgataaagtttataagttagccacagagattaataataaaatacagcaattataacaatatactgtaataagatgaatgtgaactctcaatacatcttattgtactgtactaacccttcttgtgattatatgagataaaatgcctaaatgaagtgaatgacataagcatgatgacataaatgaataattccagaaataaacaattcatgttttaaattgcactgtgttctcagtaacatgatgaaatctcatgccatcccactccttcctgctcagatttctgttagtcacttagtagccatcttggtaatcacatggactatcacagtattacagtgctgtgttcaaataactttttttacttaataatgttcccaaagcacaagagtagagacgtaatattttcacaccatggtgaatcatgggtaagaaaaactgtagaaaatgaaaccatagataaagggatactacagatggtgtttgacttacaatggttcgacttacaattttttgacttcatgatgatgcaaaatgatacgcattcagtaaaagccatacttttgagtagccatacaatttttctgttttttccttttctttttttttttcttgtttgaaacactctg

SEQ ID NO: 35080 - DNA, 1050 bp, Homo sapiens
tgcaaagatgtgtgaagatgtttactcttgttcttacctttgcctaggatgatcttaccccacataccatacagcttccttttccctaactaggtctctattcaaataccttatcagagtggtttttcttgactattctataaatacaccaacacagcatcacctctatagagtacatcatggcatattcagtattatctatcttataggtaataattgtctcaccctcagcgccaccccagttctatgaggacagattttttttctcttatttatcaatgacgagatgactacttgcaacattttaggtgatcaaatatttaacacaaatgactgggccaaatggtagtctgtcaaaggtacatgtacttactcgtcatttgtatatcttcttagggaaaatgtttaatcttttgcttgcttcatttctaactccaaaagaacaaagaaaactaatatactattaaaaatttgttaatcagaccttctttattgtaagtaaaataatgcagttcagattctgtcagcctggatgattaccctgataaatcctttgaaaaagcaaccacttgctgggggaaaactttttttttttttttcgatgtgtcaatgttctatcaagaaaggaaggagtactctcaccaaaaccaaactgaaaccaagaacccagaagaaaacagaacatacccagaaccagcttgcattgcattttgaaaacacttgaagtacctaccccaagtgaacttttttcattttttctacaagacagggtcttgctgtatcacccaggctggagtgcagtgatacacccctcgacctcctggactcaagcaatcctcccacctcagcctcctgagtagttggggctactcgccatgttgcccagactgttcttgaactcctgggctcaagaccattcgccacggcctcccaaagtgctggggttacaggcgtgaaccatcatgcccagctgacctttaattttcatgactctggcaaagcccaggatgcacccaaaagtggtgtcaaatacgagaaacccattcctag

SEQ ID NO: 35081 - DNA, 1087 bp, Homo sapiens
cttaagttcttccagctttggacaataactgcttttagaaactgtaaagtagttacaagagaacagttgcccaagactcagaatttttaaaaaaaaaaatggagcatgtgtattatgtggccaatgtcttcactctaacttggttatgagactaaaaccattcctcactgctctaacatgctgaagaaatcatctgagggggagggagatggatgctcagttgtcacatcaaaggatacagcattattctagcagcatccattcttgtttaagccttccactgttagagatttgaggttacatgatatgctttatgctcataactgatgtggctggagaattggtattgaatttatagcatcagcagaacagaaaatgtgatgtattttatgcatgtcaataaaggaatgacctgttcttgttctacagagaatggaaattggaagtcaaacaccctttgtattccaaaatagggtctcaaacattttgtaattttcatttaaattgttaggaggcttggagctattagttaatctatcttccaatacactgtttaatatagcactgaataaatgatgcaagttgtcaatggatgagtgatcaactaatagctctgctagtaattgatttatttttcttcaataaagttgcataaaccaatgagttagctgcctggattaatcagtatgggaaacaatcttttgtaaatgcaaagctgttttttgtatatactgttgggatttgcttcattgtttgacatcaaatgatgatgtaaagttcgaaagagtgaatattttgccatgttcagttaaagtgcacagtctgttacaggttgacacattgcttgacctgatttatgcagaattaataagctatttggatagtgtagctttaatgtgctgcacatgatactggcagccctagagttcatagatggacttttgggacccagcagttttgaaatgtgtttatggagtttaagaaatttattttccaggtgcagcccctgtctaactgaaatttctcttcaccttgtacacttgacagctgaaaaaaaacaacatgggagtaataatgggtcaaaatt

SEQ ID NO: 35082 - DNA, 1060 bp, Homo sapiens
gttaaagtataatttttgttttgtcttgcacctgctttctgttagctgagtctgaggaggcatttctatcttaattatcttggtgtttttatacctaacatgcatggcaccaaaaaggcaatgttcctatgaatgaatgaatgttttgatggtgaaattaacattacattttcattttagaaatggatttaaattaacctccagtgtgaaagttaaccttgttactcctaattcaattttaagacttagcttcatttagatttcttacatgtttttcagcaaaactcaaaaactaaattgtgtttgaagtggcataaaatctacataattggtattcagatttggtctctcactactgctgtatatattttttaactccttaatataatccagattaaataagggatttattagaaggaaactgggatagttaacaatgaatggaataggtgtaggaaccagagcaagctacaacctcaggaaccaaaattgcacatctgtatggaaagtcagctctttgttattgctgctgttgaatatggtctctttagcttttgactttaccatgtaagtccatgacacgtgcctgtcaacagctatgggtcacattcttatagctcttgattatagaaggaagaatgtccctttgatttggaaactcttaggttgggatggacaatggactaatagttgggtcccagctgagggaacaaaattctgtggttagtcatgtccaaataattggttaatgatggctgacccaggactacagtcacatgatttggagtaagggaaaaggaattcatgagtaagatggtttattgagtagacaaaatgtctgctagctacaaagagcatctgctatgacttactcttttctcacttttttttcctacgatactgtcttgctcattctgtgggcatataatgttacaaaaattatttggtagctcaaaggtaagtgcttgtgcatggttttgttactattgggtactaagtggtactttaaatagtaatattagatactatttaaatggcaagaaagaaagtggtgaaataa

SEQ ID NO: 35083 - DNA, 1005 bp, Homo sapiens
cagtagttactgtctgcctgatggacagctaattgcactgcacttcgacctctattgttggttcgcacctttgtatttttctaggttggttgtaaagtcttcttgaggatgattcttaaaatttcttaaggcacttactccctttgtttcccacctcattttatcatctcttccagtccccaaagcagtgttttgtgttgctcagtataggtttttgaggcaagggctgtttttataatgctgattcacagtcatacaaatcttgtcttttgagtcatgtaaatcttgtctttagttctgaaagaaatagactctcaaatagaatacaagaaattaacctttagtaatggcataagcttttagttttccggaaagtgctgagaggaaatgtatctatactactgcgttctgtcctctgtatgacctttgtgtgatgacgtgcaaaatagatggtagagattgggataacaaatgatttgtggaacatcgtggtgataattttactgtcttaaaggtagaatccatgaacttggccttgccactatataggcttttgaattttgacaagccttggggggatgaaacctagaataagttatttatggcgttacgctttaatagggttgacacttaaaaccttgttttcataaatgctaccttttggttatgttgatctgatgaacagatactggctgtcattgaaagaaagttaaccgaatgttcagatacttattgggctcctggaacatggctgctctgtagcttcatgaatattcataatattcataaatatttgtgaataaatatttttagtatttccaatttataagctctttgaaaggagggaatttttttttttttttttgaggcggagtcttggtcagctgcccaggctagagtgcagtggcgcaactgcggcttactgcaaccaccgtctcctgggttcaagcaattctcctgtctcagcctctcgagtagctgggattacaggcacccgccatcatg

SEQ ID NO: 35084 - DNA, 1684 bp, Homo sapiens
gcttgagggaggccccggcccctctgtacgcgtgggtgtggacggctagggcagggaagggaggccggcccagtggccggccgggtaagaggggcagtgcgggacctgggcggcttgagcggccagcctattgggtgcggtgggttagggtgggaaggttggggaagccgcggcctctcctgctggaggaggagggggaatgggcgcgtcctcgcgcctaagccggagcctcagggacagcgcgggcgcgtggtggaggtggctgggcgggcgcgcgcgggagcgcgctggaaggcggagtgagtgtacggtggcgtcaggggtgacacagaatagctcgctgcgaggatagcaatacacatcaagtctcccttcctttatttccttccttttcccggccgcacctttggacagaaaccgaaagcagcccggcgtccgtccggagtcttatgcttccccctccccccttgcctttctttgccctagtgacgccggtatagcgccgactaggccccggctcctcctctgctgggctccggaccctgccccgcacccacccctttctcctacgcctcttcctctcccacccgggtctcttcctttctagaggccgggaagttaaacttgtagccaccacctccgctcttcccgtcaccctcgcccccacttcgggccgaaagcacggtacagaggctgttggtggctttgccacgccaccccacccaccccggatcgcggctgtcttaagggacctggattcatcaggggctcttcggggcctgtgcgagtgctgatctgctccgtttttgcaaaaggcgcctgtgtctggcagagctggtgtgagacgagacaatcctgccccgccgccgggataatcaagagttttggccggacctttgagcatacaccgagagagtgaggagccagacgacaagcacacactatggcgctgaaacggattaataaggtaacccgcggggacaagggcatggggtggtaggagaaaaggaaggctcgggccaagaggaaagcgtgggggtgggaaggaagcataattctgaaaatacctcttggatcacttcttccatggggggatggagaacgcagatatacttcttgaagaaatgaagtttaaagctaggaaacggagaacacttgtggcaagtgaggtgttatcctgagtgcttcagtggaatcggtgcaaattaggggtggaggagagtgacttaaggcgcctttattattttatttttttgctgcttaagaaggagtttttttgggggtccgaattgcggagagacgctccagcagatgtcatggcgcttcctattcttggtgcttgaaaacttagtttagttgtgagatcaaggttatctaggccttctaggggtaagaaagaaaactcggaggagagaaaaaaaatctggcgagtcccgaacttgactgagggtcgggtagaagaagtcttgcgtattgaaggtcagtcagtgagtctagtagaaactcttagtcgactctgggcaggttacaccgaataagtgggtttgggaggagatggaatgacacagtgttgccacttcctgtattttgtagttgcagcttttcacccgaagctatttatccgagggacaccgggaactgatgtaaaaggcattctggaagctcccttttccttttggctgga

SEQ ID NO: 35085 - DNA, 1020 bp, Homo sapiens
aagtagattaatgaatgtgaagtggttttcattacagatagttatctttttctaaaccactttggtatatgtgccaattattgccctgaattttatcttaaatatgcttattttaaaacccagtattataaaacataataaaatgttatgtgacccaagcatttataatacaggttgaatatcccttatctgaaatgcttgggactataagtgtcttggattttttttttttttaatatttgcatgcacctaatgagatatcttgcagatggaacccaagtctaaacaggaaatttatttatgtttcatatttatacaggtaatccgaaggtaattttatataatattttaaataatttgtacatgaaacaaagttgcatttgactgttacctgtcatgtgactttaggtgtggaatttttcacttgtgtgtcatgtcagtgctcaaaaagtttcagattttggagcatttcagattttagatttccagattagtgatactcaacctgtactaaaaatagtgactgtgctaaatactcctagtatcattcttgtttcaagctgattagctagtaataaagctgtgagttttttctacaaagtgttatccttgatgctagtcatagaaatttgatttgtaaggtgatgatgcagtacctataaatatgtgtaaaatatatacagttttaaggatttttaaaattactttaaacacaggaggagacagttatgaagctcaaaggtatagatgcaaatgaaccaacagaaggaagtattcttttgaaaagcagtgaaaaaaagctacaagaaacaccaactgaagcaaatcacgtacaaagactgagacaaatgctggcttgccctccacatggtttactggacagggtcataacaaatggtaaggatgaattcagaaagagatggcaaaagatgaagttgttataatggcagattactaaataatatggttgaaaggacaaaaagaagttcacttctcccaaacataaaaactagttggtga

SEQ ID NO: 35086 - DNA, 1075 bp, Homo sapiens
gctggtggcatctcctgtaagaagcagcattgtaactagaaaagcacagtgtaatatttattttacagtaagaaaggtacatcaaagattcatctatccaggagactaatttgtcaaattattgtggcaaagcatcaatagataagccactctggattatatcattgattcatttgaaaacctaatgttgtacttagagctttcttttcaagactccatgatcatggaaacttactatattattcaatttatatagatccattttgttttctgaactttgaaaatagtcaaaacaggaagcatgaggttgaaattaaaatgtaaatgtgataaaatgtacattttatgttatatatatttcatcacaatttatttttaatttttaaatataaatgtgaatacatcttaagaatcaagaagtcttacagtctctcttttcttcccccacatttaagcaataatcagcatctttccaatgaggtcaaaacttggaaggaaagaacccttaaaagagaggctcacaaacaagtaacttgtgagaattctccaaagtctcctaaagtgactggaacagcttctaaaaagaaacaaattacaccctctcaatgcaaggaacggaatttacaagatcctgtgccaaaggaatcaccaaaatcttgtttttttgatagccgatcaaagtctttaccatcacctcatccagttcgctattttgataactcaagtttaggcctttgtccaggtaagtaaatatactggttacttggaaatcagagggtaacagttggaacttatcattaatatgtgatcccaaagggcaagtttagataagagatgatttagttgagtaagctacaatgacaggcttcatttgctgactctgtaagaaagttgatttctccaaggcaccccacacagtgaagtgcaattcacttttaccccaagtgaagtctttagtctaccctttaagcctttagtttcgtccaaagagagacaagcaactttctcaaggacatgaagatactaccctaaaaagcaacttttactgaaaagtcttatcaattcaatggaccaa

SEQ ID NO: 35087 - DNA, 1055 bp, Homo sapiens
agaattgtttgtatactttgaatattggtcttttatcagatgtgtcttggaaatatattctaccaatctgtggcttgtcttctcactcccttggcattgtgtttcagagtgcagatttttaatgttaaaaaaaagtctagcttatcaattatttctttcatagattatgcctttgagtttgtatctaaaatatcaccaaacccaagatcatctagattttctcctatgctgtcttccatagtttttgttttacatttaaaccaatgatccatcttgagttaatttttctgaagttcttaaggtcttttttttttttttttcgcttgtagaagtccagattcagcacaattatattgtctttgctcctttgtcaatgatcatttgactatgtgggatctatttctgagctctctattctattccattgatctatttgttctttcatttatagcaaatctggaaactgctgatttttatagtaaatctggaagtcaagtaacatcagttctctgacgtcgttcttcagcattgtgttggttattctgggtcctttgcctctccatataaactttggaattagtttgtccctattcacagaataacttcctatggttttgttgggattgcttctaatttatagatggaaagaactgacatcttgacaatatcgtgtctttttatccatgaatatggaatatttctccatttatttgattcttttatttttttataagagtttggtagtttttctcatatagatcttgtacatatttgttagatttgcctatgtattttattttggggggtgctagtataaatggtaatgtatttttaatttcaaattacacttgtaaattgctggtatacaggaaagctattaactttcgtatattgactttttatcctgcaactttgcgatagttgcttatttagttccaggagtatttttgttgatgccttcagattttctatgtagatgatcatgtcatgtgtaaacaaagagagttttgttttatttcttctttacaaatttgtgtaccttgtattttctttac

SEQ ID NO: 35088 - DNA, 1032 bp, Homo sapiens
agctacttaagaggctcaggcaggaggatcacttgactccaggggttcaagatcagcctgggcaacatagtgagaccatctcaaaaaataaaaattaagatgcacttcaggtattgtagcaattagtcacaaatttgtcattttgacaagctttaattctaataggtacaatctgttacatcatgtatactgccaaaattatattatgcaaataactagaataaagttttaacttacaattatatttcttagtttactttaaaatattaagaaatgatattaaaaggaagaaaagcaagagtccactaggtattgccctctttttattttatatatatatatatatatatataaataaaatatttggatcaaaactttcctaatgtttaaacaatttgacgcttatttttcacacaggaaattctcaaagatttctcagaaagtgagttccctagcataaagactgaatttcaacaagtactaagtaataggaaagaaatgacacagtttttggaagagtggttaaatactcgttttgatatagaaaagcttaaaaatggcatccagaaagaaaatgataggatttgtcaagtgaataacttctttaataacagaataattgtaagtattactttttgctgtactacttttttgttgctgtttgctttaattgtcctacctcattcttaaaagggcaacttatgtatattttctttatttgtatatgctttaaaaaaattgatttgataaaacgtgttcttcctctaatgtattattcttccttatcaattcatactgatcaaggtaacgaaatcttgttgtataatatttagtttccacttgtgaaatcttgaatcctcttactattgtcctctttttcttctccttctcactgcttctgtaagaactgagccttttccacgagtagccttagagatcgtaagacatgagtctgtttcaagctatgggcagcaactgtggtaaagtcatagacaagcctggccagctactttagatgggcctcatgtgctt

SEQ ID NO: 35089 - DNA, 1061 bp, Homo sapiens
cctccacacatttgcacaactgtataaagatatttgtaggatattctttgcaacaagttgcaataatgaaataacacaaacaaaaacagggaaaattctaaccatccattggtaagggactggttaaataagtgcagcacattcacgtcatggaattctatgccacaaataaaaaatgtggtagagctatagtgctgatttgaagggtgaagtgtcctgttagggaacagggtaagttcaggaatagtgtatctagaatgtattgacatctaaaagtagcttagagggtgagaactaggaggcctcagaagagggtggaagatttttacctcctgccctatacctttctatagcatgtggatggtactactctcaatgtattatttttatttttctattgataaaggacctagaaaaacaagaggagctaaaaattgttcacatgcatctgaaggagcaccaagaaactattgataaactaagagggattgtttcagagaaaacaaatgaaatatcaaatatgcaaaaggacttagaacactcaaatgatgccttaaaagcacaggtattttatttttaagttatctcagttactgagagtttgaatcaaactttttgtgtaatgaaacaagatatgaattaccctaaaattgaaggcaagtgaagacttacttgcctactcaatttagaaactatcattgatctttttatatctactgataatcctaacttattgtatgattatctcaagatccaagaacttcaggagaaagaacatcaacttcttttttttttttttttttttttttgagacagagtctcgctctgtcgcctggagtgcaacggcatgatctcggctcactgcaatgtctgcctcccgggttcaagcgattctcctgcctcaagtctcccaagtaactaggattacagatgcatgtcatcacacccagctaatttttgtatttttagtagagaggaggtttcaccgtgttgaccagggtggtctcgatctcctgacctcatgatccacccgcctcggcctcccaaagtgctgggattac

SEQ ID NO: 35090 - DNA, 1050 bp, Homo sapiens
gaaaatgaataatgagcagtttgtgatccaaggtaggcctgagggttcaagatgactttccttgctgtgaaaagtatcctgatcttttccctttaaaaatttatgataatggccagtgggatgcggtggctcacacctgtaatcccagcactttgggaggccaaggcaggcagatcacctgaggtcaggagtttgagaccagcctggccaacatggtgaaaccccgtctctactaaaaatacaaaaattagccaggcatggtagcacacacctgtaatcccagctactcaggagactgagacaggagaatctcttgaacccaggaggcagaagttgcagtgaactgagattgcgccactgcactcccacctgggcaacagagtgagatgccgtctcaaaaaaaaaaaaattatgatcataatctcctgatagtaaccttggtattttatgaatgtcctaagatcccagtgcttcatgaggaacaagagttactgcctaatgtgaaagaagtcagtgagactcaggaaacaatgaatgaactggagttattaacagaacagtccacaaccaaggactcaacaacactggcaagaatagaaatggaaaggctcaggttgaatgaaaaatttcaagaaagtcaggaagagataaaatctctaaccaaggaaagagacaaccttaaaacgataaaagaagcccttgaagttaaacatgaccagctgaaagaacatattagagaaactttggctaaagtaagtttcgtattttcctcccattttaacaagtgtcttataagaatcaaggcttgtgtttgtgttatagttataatgtttgtattataattatgttaccagtttttttaatgtctcttaatcatgaaatgactagaaacagaacaattaaaaattgctcttgaataccaagaaggtattgaaacagagagaagatgtttcagagaaaagaactgttttcttaaatattcaaaaaataatttagaaaaaataattctaaattacaagaaagggtgaaaccaaatatgagattgtttta

SEQ ID NO: 35091 - DNA, 1050 bp, Homo sapiens
ttgtgcattttaagagccagcaactccaagaaaaacagcaacaacttcttaatgtacaagaagagatgagtgagatgcagaaaaagattaatgaaatagagaatttaaagaatgaattaaagaacaaagaattgacattggaacatatggaaacagagaggcttgagttggctcagaaacttaatgaaaattatgaggaagtgaaatctataaccaaagaaagaaaagttctaaaggaattacagaagtcatttgaaacagagagagaccaccttagaggatatataagagaaattgaagctacagtaagttatacccttttccttcatctattaagtgtttcttttaaaatctgagccacttggaaagaggggagcaatgttggaagaatattacaatattctttaaatttcactcgccaagggcctacaaaccaaagaagaactaaaaattgctcatattcacctaaaagaacaccaagaaactattgatgaactaagaagaagcgtatctgagaagacagctcaaataataaatactcaggacttagaaaaatcccataccaaattacaagaagaggtatgtcttttattcctttcatcctttgtcacttcttccttcctttctcctttgaaggaaagataagcagtaagaagtagctaggatgtggttcattaattgactgggtaagtatttgtcgagtgtttaatgtggcaggcacactcctaggttatagaaatgcaatgagaacaaggtggacaaaacccctaaaatccctctgatccatttgtagtgaaagaaagtagctgataaataagcaatcaaatgaacaagaaaacattaaatagtggtaaatgctatggagaaagtgaaacattgggattactgggccaacctgtattaaaagcctactccatgccagacattgagactgtagatataaataagacattgttctttccccccattataaactagaaagaaaatcccttaattccaatatggtaaatgcagaaatacgcaaaattacatggtaccactaatttatca

SEQ ID NO: 35092 - DNA, 1031 bp, Homo sapiens
cctaaatccagaaatagcacatacctcccaaatgaacatatttcaatgctagtattttggacaattttaacttacactgagatctaaactaacataccttatgaggattatattattccagagtctttaggtgagagagggctttgtatcatttaaacaaatcatatgatgtattcattcatcaaatatttattgagcactgtcatgggccacgcactgttttgggcacttgagatatattagtcaacaaaacaaagattctttccttgcagagatgcattagtcattttgaaatgtaagatttatcactattaccatctcttagatgtttgcagtttcctgaatcatttcttatatagaagttaggtgttattgggatatttgtgtaagagctaagacccctgtaacagctgtagttcccaagagattctaaaatgcacccatagagatctttctatataagctaagggcagtgccacttgcataatagataatatagtacggttctgttattattctgtggaatattttttcttttttctttcctccttttttttttgagacagggtctcactctgtcacccaggctggagtgcagtggcatgatcacagctcactgtagcctcaaccccccctgggttcaggctgtcctcccacttcagcctcccgagtagctgagactaaattagctgtgccacaacacccagctaattgttgtatttttggtagaaacgaggtctcactgtgttgcccaggctggtctcaaactcctgggctcaagcagtcttcctgcctcagccttccaaagtgctaggattacaggtgtgagccatcatgcccagcctgtttttttcttaatatgtgttttcttttaattctgatccctttcactatctcacctaattgagtttactaaaaccttatgtctatttcatactcctataaaaaaggtaaaatcaatagcctgtgaaggttaatgtctcagtatttgggggagccacccataagcatcttattggaagtgaaaataa

SEQ ID NO: 35093 - DNA, 1070 bp, Homo sapiens
atatttctagtatttttaaataatgaggtgctttgttgcgatagcttgaacaattgatctcagtcctttctaactgttgggtgattctgaagcagtgaaccagtgcccttttttttctttttctttttttttttttttttgctttgctttattaactattggtttgctctgttacctgttcacatgctcttacagatgcaactaattcatgaaatttcgaacttaaagaatttagttaagcatgcagaagtatataatcaagatcttgaggtgagcattcatgttggtatttctattgataagcaattagaactataaaacatgcaacatatgtaactgaacatgatgtcagaaataagggaattatgtttttaaaatattagtgactttgaattttactatgaatttaaactaatatatataagttctgttttaatcccttagacttcaaatcagattctaaattgttactctctcctttgattcttttagaatgaactcagttcaaaagtagagctgcttagagaaaaggaagaccagattaagaagctacaggaatacatagactctcaaaagctagaaaatataaaaatggacttgtcatactcattggtaaaaatcaggcgtattttgttgtgtaatcacataaatatatatagcataccatcatcttagcaaatgcttatactggacctactttgtgctgtgtattgttgtaataaatttatatatatttcattaaatctgtcaataaccctatgagatagggactgttagtatatttgccattttagagataaagtcacatttgtggaaagttgatcatgtcatcctttgagtaaatataaggaagttaaggacaggctcccattaaaaatcagtaagttttaggccagggcacagtggctcatccctgtgatgccagtactttgggaggccgaagtgggagatcacttgagcccaggagttcaagaccagcctgggcaacatagtgagacctggtctgtacaaaatatacaaaaataagcctggcaggtactgccagctacttgggtaactgaggtggcagg

SEQ ID NO: 35094 - DNA, 1027 bp, Homo sapiens
ttttttgctattgagttgttttagtttcttatatattttggatattaaccatgtgtcagatgtatattttgcaaatatttctgcaaatattgcaaatattttgcaaatatttctgcaaatattgcaaatattttgcaaatattgtctctttattgatgatttcctttgcctttagttgtaattccgtttatttgtttttggtctttttggttgtgcttttaaggtcttattcaaaaattccttgtcctgaccaatgttatgaagcatttccactatcttgttttctagtagtttcatagtttcaagtcttagaatttaagtccttaactcattctgaattgattcttgtatatgatgagagacaggagatctagtttttcttcaacatatagatattcattcagttttcccagcaccactattgaagaaagactatcctttccccaacatatgttcttggcacttttgtcaaaaatcagttgactgtatatgcatggatttatttccgcgttctctgttctattggcctgttgtctgtttctatgccagtagcatgttattttggttactatagttttgtaatatattttggaggcagatggtatgatgcctccagatttgctctttttgctcaagattgctttggctatacagggtcttttggggttccatacgaatgtgaggattgtttttaatctacttttgtgaagaatgtctttggtgttttgatagatatcgcattacatctgtggatcactttgggcaatatggacattataacaatattcttccaatccatgaacatgcatatcttcccatttgtgtcttcttcaaattctttcattaacgttttatagttttcatttgagagatctgacacctccttggatagtttgccattaacatatagagatactacttttttttatgttgattttgtatcctgcaactttactgagttttttattagttgtaacagttttggatggagtccttagggttttctgtatataggatcatatcatct

SEQ ID NO: 35095 - DNA, 1057 bp, Homo sapiens
gtatttttaaaaatctctaaagaaaaaaactaataacagtggtttcctggtagaggtataggaactggttgaatggggataaaagtggaagggagctttttcaaagtgtactttttttttaaactttttgaaccgtgtgagcatattaacaatttaaaaataagaaattagaggctaatttggttgtaagttcatagttgcctatatttagatgttggaaaaaaattgatttgaactgaagagctagagaagctctttcaggaaacaggttttttttccctgcattcttccctccctcttcatttttttctttttactatttttctcaggtaataacctttctgattcacttgaagtgggaccaatagggagagagctctttctaccactgatattaaagatgggctcatgtctaaaccagagcatagactttagcatctgccctctaatttctctcattaacttagtgataaataagtttatcatctagaaaaggagtcaagtttagttttcatatttgtttaataaattcaggtgtgcggctcaaggaaggctgtaatataaatcgaagcttatttattttgggacaagtgatcaagaaacttagtgatggacaagttgggtaagtttatcccgttgtgcacttacctactgattcttatatttttcattaggttgaacattgcaacatttcgatgacactcaaatgtactgatttcttccatatattcaaaaacttatacatatgattataatctactgaatttactttctgttttaaatattttttagtagttttaatctgcctcatataacttgtaaactaatttttgaaactctggctgatttaagagttctgcattaaaaaccaactactttattatataaacgttctcaatctttttctcctgtaaacttattccttgctaagtggtttcataaattatcgagatagcaagttaacacgaattctccagaattccttgggaggaaatgcaaagacacgtattatctgcacaattactccagtatcttttgatgaaacacttactgctct

SEQ ID NO: 35096 - DNA, 1048 bp, Homo sapiens
ttatttgcataattcagttagtggcatatttttataacaagtagattaactgactaaacatgactgcaaattatttttgtaaattaaattacagtagctaaagttgacttattttatgcatgaaaccttatgaatatttctgattgattttagaacatcacttacccctaaaattttagtttcagatttatctgccacattatgtctccatcctggtacttttatagaaatataaattacttttaaacaatgcttatgtacagcaagtgctgatattaaaagaataatacattatatttgttaaatcagaaactccctgtcagttaatataaataagtattatattcctgccttgtgagtttatagagaatgcaacctctaaagcaaggcccaactgaaatttttaaagtcctttttatcctccatggaaatatactgatgttcacacttcaaaagtaaaaaagttcaatggagagaattttatattgctgtatagtgaataaaagaccaaaaaaattctgacagcatctctaaaatcacctgagatttccttgaaattttatttcactcagatgatagtcaggaaaatgtttaggtgctgctatgtgatatttacacatgcattcacttcatttctatcagtaatccttttaaagcccttagttatttccgtagatacccattcataataagaaatagctatttttaaataaccatcccaaggcaagaggataaagtagtcacaacagaaaatactagacttttgtggcctaaaataaataatgtgctctaaatttagaaaataaggagatgaaactaaaatgcatattacacatcgtttgtctctttatgtatttacctatgaatgaaaatattcctggtaaaatatttgtcaaataactgttatcagggtagaggatttttatttatgtatttgtttaattgtctgcctaaaggtaatgaaaaatggaagaaatgtgggtggatgaatataaaaagggaagagatggcttttccaaatttgcactaatttttaagtaacaggtca

SEQ ID NO: 35097 - DNA, 1139 bp, Homo sapiens
tctgaagtcagattatctgagtccaaatctcagttctttaatttataacctgaaacaaattttaatttatttacatctttgacttcttatttataaaatggggcttataataatagtatcttatcaggctgttgtggagaattgaatgagctaatccaggtaaaaatgtccagcagataaggtattcaataaatgttgggttttattgtcattactgctataagtgtagttgagttaaatcgatcaaagagagagaaatcccttctattccagcctcttctttccaatacttctaatgatgaggatatcactcctttatgagttgacccattccattgttgggtattggaaaagtcagccttactaatttttctagacatatgagaattagtcctactttcagagactttaataggaagaaagggaggaagaagaggtggaacaagtggaggggaaaagtagttggtttaaccactcttcccatctgggaattcttttccccaaaattctcccatgtgctttgtttaagcactttcctctttgaggaaatagaacactctaggcattatgcaaagttggggaaatatgaattaaacaatgtgtgaggttctctaatacttggtactgtagtcattttactggaaaaatgatcgaactttatgaggctccacacacaaactggtggcatacagaactgaggagagagccatattcagtgctaaaggattcccagacttgcttcagacatgtgcacagcctaactccagggatttaaaactcttacaatctagaattcaggccaagaagagtaagtagctatacacttgctcagttctagggaaccagacccatgccactgtgaacctctagctcatagtagtgatggaagaagttcaaaagcttaatgacttctaaaactgagcagatagaatgcctcccagagaggtctcagcaccctcagtctgactgtttttgcctattcatcgacagatttccactaaaactagtctcggataaacctggagcacacaagactcagagatgatagtgatgatggtacataggatgctaaatggatggtgttttgaagtaaaaaagtcaagggggaattggaacttcaatataaatgtattatttct

SEQ ID NO: 35098 - DNA, 1035 bp, Homo sapiens
ggattttacccatagttcctagtttgccaacccctgatatagattatccctattatattctacttcatagatgaagaaattgaggcttagcaagcttaagtaacctgcccaaagtcacacagctgacaaataaggaagccagaatttataccaagctttgcctgactctggagctcatgctcttaacaattaactgtcatcacaagattagttttgtgttagtgtaacaatgtgactgatattaaatacgtctttttttatttgtttgtttggagctaggcttttgctcttgaagttattaaatccactcatcaatgttggaaagcattgcttatgaagaagtgtaatggaggagctataaattggtaagaatttgtcttttctatgtaagtaatgttatattaattggtattaaacagccacataataatcagatttcagatttttgcattttttttaatttaaacaatacagattatctacctattcattgggcattactaagtgttgggcactattaaactaggaattgacgtgatcttttttctcaaggaatttataatttagtgggaatactgataaataaatggacatttaattgaaatacattgtgcaaagatgaaaaacgcaatttttcagcatgtaaatctatgcggtttctttaaaatctaataactaccatataatttcttagaaagtaaaagcctccttattcatcatgatcactaattgattgattaagaggaattaagtaacagtaacataaacatttaatttaaaacatttaaatgtatattcacccatttttggatatagggctgagccccttttaatatagattccatatagattttatatacactctaacataacacaggatagaaaataaagattctgtaatccttaagctccttgtaacttaaaattcctgacagatttttagggttcttttaaaaaaatcatttaaattatgttatctacaccaaatttttgtagtgattcacctttattgaggctttttagggcctcagtatt

SEQ ID NO: 35099 - DNA, 1076 bp, Homo sapiens
ataagaaaaccgttcgttcaaggaactcaatattaattaatttttgcaaaacatccctgtttgttttgttataacaaaacagtataattttaatatgctctaataaatatattgtatacaatacaatatgctgtgacaatatactgtaataaaattaccagcaccactactctcgtgctttgtggccattctgaagcaaaataaaggttaactgaacacaagcactgccatatcaagacagtggatctgctaactgagaaggctactaagtgactaatggtgggtagtatatagaatgtggccacactgggcaaagggatgattcatgtcttggacaggatggagcaggacagtgcaagatttcatcaggctactcagaatggtatgcaatttaaaacttatgaattgtttatttctggaattttccatttaatatttctggattcagttgactgtaggtaactgaaactgcagaaaacaaaaccgtggataaagggagattgctgtgtatatgatcctcagtgactggcttttcctaggtgtctcctccctctcccctgcctcctaacagtgatgttctatccatgcagaaccatctttgtatattctaaaatatagtcccttgcttttatgtgtgctgttccttctaccttttcccctcttgtccagttagtgatgtacttctcacttttataatgctttcttttactccctcttctatgacattaccattgcttctgtttatctctgttaaaacctcattgcattttaattgcagtttatctatttgtctctttccctgagttaaaaactgagtatcttgatgaaaagaactttgttgtatccatccatttattccccatacatagcacattgtctgaagatgctttgtaaatgtttgtagagtgcaggaatagtattatacatatgaaaacacaaaagtctgaaggtgatatacatatcaatgatgatgctgctctaggtatcacaatcaattgtgcttctggttagactgggccccatgtttcctggctccctcagtccaatgctctgccactaaagggaattaattttgg

SEQ ID NO: 35100 - DNA, 1048 bp, Homo sapiens
tcttctgttagtaaaaagacctaaattatcttcaaagttagtgctgtgggaaacccagtttaaattaaaggattagatgatttcttggggacattggcacgtttttaagtgctttagggtaactgttaagtgatgaagctggaagttcaatggaggtcagtctgacctgagacctgtgcatttagccactttgttatatgcttcaaatcaaaattagattagaaatatttgaattccttccatatacaaggcagctgtatggttttcattttactggtcatgtgaaattacttgtaaactggtaatgaatgtctatattttgagaaaaatctaagtcttttctgagaggtttttctgctacagtgcatatagtctctatgtagaattaccttgtttggtaatactcactttgacatgtgttaattccattattttttcatgatgttaatacacatttttagtacaggttttgtcttggtaagagtacaatttatgaaaaggagaatggagaaggaaagggcaagaacaatgaaagatactcttcattagcccatgaatgttaaacgtagatatgcagaacagtttggaaacatgaaaatcttttagagattctgagtaagcataaattattaagaaaatcagttctctttgcagggacctctatttgtgatacagaaactacaatgaatgttattaaatgaaacttgtttcttgtgaatgtttataagtcattaaaaacacatgttcttgcttcccacagagtttctttagagggtactagttgtgcacatgtttagttctgtgggagcaacatttatagtactgggatgagagtgttgtgcaaatgaatcaacatcacttcctttagtaaagtggaaactcctttttcatttttcttttttcctcccctttggacaaaattttagcataaggctatatcctggtgtcttttttccccttttatataataagggcaaagagatagggtattacttttatgtcactggtttttatctaaaaataaaaaattctcagccgattgtatgct

SEQ ID NO: 35101 - DNA, 1033 bp, Homo sapiens
cctgtcacctctctttcactttcttcctcttcctttcactccttccttccctcctttcttctttccttacttccatgattttgatggtccaactgctgttgggaactgttttgaaagcatcctttgactaggaataaaagcatacgatactggcatttttaccctgaaatctcttttgttcatatgactaacaagaagaaactaaggaaggagtgttcatcgatgacaaaagctatttctgcacctagtttttgtctcttcttgtacaaatgaagggaaaagtaactgccctctaacgaaattttgatgtcctagaaattttaagttctggaaatagcttggcatgatttaattttgtttggagtcagacagacttcagtttaagttctggctgtgctacttcctggctgagtgactttgggtagatcattcctgaatttcagttgctcatctctaaagggagatgattatacctacttgtaaagttgttggcaatataagaaacgatttatttaaagcatctggctttcacataccagtgttgaatatatgacaactattattattctttgaccaatttttcctctatttttctttcctgttttattcttgctcaggatcctctttacttgtaaacctcgattctaaactggaagatattaccatttctaagatgactgaacctcattaacaatgtattaatcttagtttatgtacctttttttgcacttgaaacaggaagagatttcttttttgtcattcttgtatataactgagaaagggagaggtctgatagcgtgaagtgcatgtaacctcaggatcaaaagtaaaatgtgaaaactacaattaaaatatgagctcaagtctataaaccatatatattccttatctcattattttaccctgattttttctatttttatacttttcatatacatatatatgagaacagtaaataaattttatttagttaaaaacattttttagcatcttaactgctcctcaaatgagaattgataaggtaatagtccca

SEQ ID NO: 35102 - DNA, 1113 bp, Homo sapiens
catgtccctaatctagatccaaattacctcatatctatagtgttatagtcttctgatttgttagcctctatcttgtccttttatcatattagagaacctaccttgacactctgttgcctagatcagggcagtggcattggaaatgaagaaggcacagctatgagaaatgatgcacgtagtgttgatattacatgtttaaactcacatgtgttcggtcttatatgctgttcggccctggggtgtctaagtcacccaaataagattgtaaatccttgagaacaattcattctttctttaatacacagtgcctaatatagagccgagtacttaatagaggctaaacatgtgagtgtctaatataattgtgtatattcccttggaattcagatttcagtttagtttatacaatcactttagtcagttgtgttaactaattacaattccatgcagatttatgttaagattttagaatcaacttccaaatattctgacaggatttatttgactttatgacttgaaattctagtattttttccctcaaaataaataatttcaggacacagaagtgacttttttctacataccttgttttctaaatgtaaaactgcattttgaattctgagaaatttattctgaagcatgtgttcaaattccaggtttacagtgaaaatctatagccaactaaacctttaaaagtaaaaggatatatacaaagaatgcatgcatataaacttgacgttggcagcttgagggaacctcactgaaataactttcttaagcacatggaacatctgcttaagtcacgctatttctgggtttctcttaaaatatttttgaaatattttatgaaacctgttttgtcaatatcatttattattttcttaaggctttactctattatgttttacttttcactagtaaccgataaatgtggtttgttaaaaaggtactatgaagcaatgtaaaaggattctcaggtctcttttcccctcaagcagcaggaatcaagtttatattatgtaatggtacatacaggtttattttctatttagtgtgagtgtctaggcctagtagataccttaaatttcaagatatgtaaataacttcagtttc

SEQ ID NO: 35103 - DNA, 1051 bp, Homo sapiens
ttgtgattaattttttaaattgaggtacaattcacataaaattaaccattttaaagtgtacattaaaattagtggcagttaatacattcacagtgttgtacaaccatcacctgtatctatctagtcccaaacatttcatgacctcaaaaggaaaccccatccccattagcagtcactccccatttcattctctaactggcccctggcaaccactaatttactgtctctatactataggtttacctattctggatatttcatgtaaatggtctcacatgatatgtaaccttttgtgtctggcccctttcacttagtgtgcttttgagattcatccatgttgtagcatgtatcagtacttcattcctttttatggctgaataatattctgctgatggataatattaccttttacttatccattcattagttgatgggcatttggcttgtttctaccacttggctattatgaatagtgctgctatgaacattcatgtatgagtttttgtttgaatactcttatccatttttttcacctaggaatggaattgctgggtcatatggtaattctgaatttactctttgaggaaccaccaaactgttttccccagcatgttaactccaacgaacaatattcaaggattccagtttctccagatcctcaccaatactcattattttccctttttgttttttaacaatcatcctagtggttgtgaaatggtattgtgatttttttaattaaaacaagcttacgtctgattttatcttaaacaaatgtggataattattttatccaataaaataatgcatttaaaaaaatagttttagccataaatgtgaagtagatttttttctagctttgttgagttataattgacatataataaactgtacctatttaaagtgtacacaaattgatgatttttgatataattacatgcaaaattattatcaaaaataagaaaatgaacatatttatcacccccaaatgttttcttacacttctttgtaatctcttcctttgacactcccaaccctctgtcctcaggca

SEQ ID NO: 35104 - DNA, 1021 bp, Homo sapiens
agtggcattaagttctttcacattgttgtggaatcctcatcaccatccatctccagaactttttcaccatcccaagctgaaactctacacgttgagcaacttctcatttcctccctcccccgaggccctgggaagcactattctactttctgtcttatgaatttgactgttgcaggtatttcatttccacttcattttacaatgggaaaacctgagagaattagcacaggaacccagattttaataataagttaattatcttggtagatggtctaaagtaaatgtacttcattataaatgaaatatttcactttaaattataagagagaagatggtttgagaggctgttttagaacccaggaacaataatcttttgggagtagaggagaagaaaaacacttataccaaccgtatgctaaaatgaatatattctaaatatatatattctaaatgtatgctaaaatgaatatattctaaatatatatattctaaatatatctaaacaaatatatgtggctgtcaaacctttaatagttcttgacttaggaccagaacatttgattgatgtctgtcattccatctcctgctacaagtgtccttttatccctctgattctgatgccaggcagcttttcctgctgctttcctgtctccttttacctttccagcttcatttccatttattctctaccccaactgaaacttacagctccagcatttgaatctacttccaaacatacctgtgggggcctttaaattcctacaacctttgcctgctatctgtcttctatttttctaagctggtgtgattcttgaaccatctacactggaaccacttagagtgcttgttaaaaattcagattccgtgccccatctcctatttactaagtcagattctccgctggatagggcctggttaatctaggtatttcacaagtattctaggtgcatcctaaacgtgaagtttgagaaccactgccctagatgttgagtgaacaagggtttccagatccccaggggac

SEQ ID NO: 35105 - DNA, 1032 bp, Homo sapiens
agaacaatgtgtctattgctttaattctgttttgttttgtttgtttgtgtctttgcagagaatgtaactggtcactacatttccccctttcatgatattcctctgaaggtgaactctaaagaggtattgttttgacttgttttgggaatgaaaacgtgtactgccagtatcaccattagatgctttttggaagcaccttgaaaggaaaaagtgttgttggaagtcaggaggacaaacaggagttactataacagggtcataagcctcctatatgaattaaaagttgtatgagaataggattcttccatgaggaattgggagaaaggggtgttactggtacataaaacttagaattcggtaggaaataaagatttaagggtagtaatttaggaaattaccaagaggtttatttacaataatcagctaacgtttgtggattattttttatttgctagccactatgtgaacatgatgttatttaattgttatgagttgctatttttctttccaaggacactgaggctcaaggcatttttatagacttgtctaagatctggtaagtgccagagctagttttggaattagcttctgaccacaaagcttatgctctttaaccactctatgaaacaggtgttagagaaataaagcaggggtaaaaatggtggtgtttgaatagctgttctcttagaactgaaaatcacttgacagttgtcagggtgtgaaagatgccaggagaactgatgctatcaaatcaaaattgttggggtgtttcgagatctctcatgattagttggtaatatggcatatttggtagtattcatgatcatcattaagttgtaggttatttccttaaaatccaagtagtgaattaccaaatttttaagggggtacaactattaagtaaataaccaggaccacattccatgttgaaattatatgtaactcgttaatttggggttgggttttctaggatgtggggtgatcaatataggggcagaggccactgaagaactgaggaggctacttcagatg

SEQ ID NO: 35106 - DNA, 1036 bp, Homo sapiens
cccttcccccgcatcctcagccctgcagacccccgaagaaaagaccagttcttagggggtcgcggaggctgagaagccggcggcccgagcgccctctttacctggtcgcagaggcgcggccaggcagggagggtgcgtgagcgtgtcggcgacctgggccgcctgcgccttcccgcccagtccgagctggaattccaaggctgcctctgggagctgctgcccgcagaccactcgcctccacagacgccaggagaaaaacgacagccaccttatgtggaaaatactcgcgccggccgtcattcataatccggcggaccggaaaaagggaagtaacgtcacttcctactgtcgcactgccaaacgtttcccccgcccctactgtgggaacctttgttttcctgctttcggagccggccagtgcgggaaccgtttccgaagggaccaccgggaacagacggatcggcagggcggggcggaacggtgagttatgctgagcgactctgctcctggcctcctggaggctcgagacccccgcgccaggagcgaggtgggagagtagctacgtggggtattagtttcctcgctcctcaaggggaatcataatttacgggcggttgcgtgccctagactgactgctctcccctttcagtgaggactgtgcttcctccgagggagttgcgggccgggacatgcggaccgagcatatttctaggtctagggacaagggacttggaatcctgcctcggactttgtcggagggttttagtgacttctctacgtagctccctcattgtctctcatcttttggctcccctgtcaaggaccatcccccattctaggacttcgatgtgtgatgctttgatcaaaggattgacattccttttctaagtgtttgctgtcagctttcagccacttgattggtttggaatcggagccttttctcctgcgattccaggtgtccctaaggtatcagtgttatccagaaccaagaactcagtggaggaatgaaaaaggcagcatctttaaaataatgttt

SEQ ID NO: 35107 - DNA, 1035 bp, Homo sapiens
taacaatattaatcttaaatgtaaatgggctaaatgccctaattaaaagacacagactggcaaattggataaagagtcaatacccatcactgctgcattcaggagacccatgtcacgtgcagagacacacataggctcaaaataaagggaaggaggaagatctaccaagcaaatggaaagcaaaaaaaggaaggggttgcaatcctagtctctgataaaacagactttaaaccaacaaagatcaaaagagacaattaaggccattacataatagtaaagggatcaattcagcaagaagagctaactatcctaaatatatatggaccctatacaggagcacccagattcataaagcaagtcctagagacctacaaagagacttagactcccacacaataataatgggagacttcaacatcccactgtcagtatgagacagatcaacaagacagaaggttaacaaggatatccaggacttgaactcacctctgcaccaagcacacctaatagacatctacagaactcttcagcccaaatcaacagaatatacattcttcttggcaccacattgcctttattccaaaattgaccacatagttgggagtaaagcactcctcagcaaatgcaaaagaacagaaattataataaactgtctctcagaccacagtgcaatcaaactagaactcaggattaagaaattcactcaaaaccacacaactacatggaaactgaacaacctgctcctgaatgactactgggtaaataatgaaatgaaggcagaaataaaggtgttctttgaaaccaatgagaacaaagacgcaacataccaaaacctctgggacacatttaaagcagtgtgtagaaggacatttatagcactaaatgcccacaagagaaagcaggaaagatctaaaatcgacaccctaacatcacaattagaagaactagagaagcaagagcaaacaaattcaaaagctagcagaaggcaagaaataattaagattagagcagaactgaaggagatagagaaacaaa

SEQ ID NO: 35108 - DNA, 1077 bp, Homo sapiens
actgccagggcacctacctatggccccctgccatcctctacagagctattgttttatacatcttacacattagaaaacttagactcaaagttaatctcatttgcctgtgtcagagccaggattgaaacaccagtctgtatgactctataaatcacacccttaactcagtgagctccgaaggcttttgagtgtgaatgctgccacatatcctgttttctaaaacaggcttattctgactttcacagatcacagtgttctcccagtgtgtgaaagcaagacctgaaataaacttttatgctgtatgtgctaacatgcttagggctctattttcataaaacattaacaattttaaagatgatatctaataaacagaccttgtataattatctttttaagattgccaaatgttttctaatatcttactcattgtactaaaccctaggcttctgttcattttaattttaccataaaggtaaaaacatatatataagtcaataggtaactcatttctttcattaaataatcaattaaatacgtcatctatgatgtacaaggcattgtatagaacactatattgccaatcaaagtgctagtaaaaataaaagtttaaaatgtgaaggcaatctcgaagcatgactattcagattatttattgctactagtatcatatatttttattaaagagccatcacattccaaataagtcagtcaatatcatacttatcagaaaccagatgctatgataaataattctttcttcttcacgtcctccatactcaggcatacttatagacaattactgaacaaattatatgctcagctagtatgcttcaatccaacattaggaaatcgtttcaagaaactgttttaaacatttttatagcaatgtatctttaatacttttctcagcatggggcagaagagaactttacatatttacttgcatgtactttacatctttttgtctgctgtacagatctgtaggcctattgtttttccttcccactaattttgaagtgtctcagtttaaagcatatttgttggaattatattatgtatccatggttgtcctggata

SEQ ID NO: 35109 - DNA, 1037 bp, Homo sapiens
acagacacttctcaaaagaagacatttatgcagccaacagacatatgaaaaaatgctcatcatcactggtcattagagaaatgcaaatcaaaaccacaatgagaccatctcacaccagttagaatggtgatcattaaaaagtcaagaaacaacagatgctggagaggttgtggaaaaataggaatgcttttacactgttggtgggagtgtaaattagttcagccattgtggcgattcctcaaggatctagaactagaaataccatttgacccagtaatcccattactgggtatatacccaaagaattataaatcattctacaaaaaagagacatgcacacatacgtttattgtggcactattcacaatagcaaagacttggaaccaacccaaatgtccatcaatgatagactggattaagaaattgtggcacatatataccatggaatactatgcagccataaaaaagatgagttcatgtcctttgcagggacatggatgaagctggaaaccatcattctcagcgaattatcacaagatagaaaaccaaatactgcatgttccccctcgtaagtgggagttgaacaatgaggacacatggacacagagaggggaacatcacacattggggcctgtgcggggtgggggctaggggaaggataacattaggagaaatacctaatgtaggtgacgggttgatgggtgctgcagaccaccatggcacatgtatacctgtgtaacaaaactgcacattctgcacatgtaacccagaacttaaagtataataaaaagaaggaggaaaaaaaacatactactagagaaaatcacctaaccacaaaggaagactttaagagaggataaaaggaagaaagtgtctacaaaacaagcaaatagcaagtaataaaataacagtagcaaattcttacctattattaataatcttgaatataaataggtttaatttatccaattaaattaattatccaataaaaagagctagaatggctgaattgatttaaaaaaaaagacacaactata

SEQ ID NO: 35110 - DNA, 1041 bp, Homo sapiens
aaaaatattctaaaatttatatggaaccaaaaaagagcccgaatcaccaaagcaatcctaagcaaaaagaacaaagctggagacatcacactacccaatttcaaactctactacaaggatacagtaaacaaaacagcacggtactggtacaaaaacatacacatagatcaatggaatgggttagagaacgcagaattaaagccacacacctacagccatctaatcttcaacaaagttgacaaaaataagcagtgaggaaaggattccctattcagtaaatggtgctgggatagctagctagctgtatgcagaagattgaaactggagcgcttcctttcatcatatatgaagattaactcgagagggaataaaggtttaaatataagaccacaaacaataagaatcctagaagaaaacttaggaaacaccaatctggacctgggccttgggaaagtatttatgactaagtcctcaagagcaattgcaattgcaacagaaacaaaaattgacaagtgggacctaattaagctctttaagcttctgcacagcaaaagaaactatcaacagagtaaacagacaacctacaaaatgggagaaaatatttgcagactatttatttgacaaaggtctactatccagagtcttaaaaacaacttaaaccaacaaggaaaacacaaatgacccctttaaaaatgtaaaaagtacatgaacagacacttctcaaaagaagacatctgtatggccaacaagcatatgaaaaaatgttcaacatcactaatcattagagaaatgcaaatcaaaaccacaatgagatactatctaataccagtcagaatggctatgattaaaaagccaacaaataacagatgctggtgatgttgcaaggaaaagggaacccttatacactgcctgcgggaatgtaaactagttcagccactgtcaaaagcactctggagatttctgaaagaacttaaaacagagcttccattcaacccaacaatcccattactaggcatatacccaaaggattataaatcattc

SEQ ID NO: 35111 - DNA, 1102 bp, Homo sapiens
tatgcaccttttactcataaattcataattgctaggtgctgaaataatatttatttaaactaaccctgtaggtagtaaagaagtctttaatagcagcctgtattaactcataaagtgaaataaaattagtgctttttcagtaaattattgttgatttttgatacttgctattgacaaaggagatttttactctacttttataaattaaggatgatttgtcacttctaaaaccttctaaaatttgaaaatgtatatgtctatatgtgtgtatatagaacgatatatactatatatatagctatatatgtgtgtatgtatatatttctaggtagtaaacttaggagaataaatttgtcaaattattaataatggtaatattagatcttattacttttagtctgttatgaagcatcctgttaattaagtggtaacaaaaagcacatgcttcataataccttttattgagacattttgaacatttaaaaagtatctaattaattcttaaaaatacaattaagagtacctcaaaacttatgaggactgtattagggttctctagagaaacagaaccaataggagatatataaacatagatagaggagatttattatgagtaattggctcacacatttatggaggctgagatatcccacaatatgctgtttgaaagctggatacccaggaaagccagtggtataattgagagtctagaggtgtttgtaattctgattccaaaggtctgagaaccaggaagctggtgatacaaatcccagtctaaaggcaggggaagattagatgaaatgttccggctcaagcagtgaggtagaaaagaagaggcacattcctccttcctctacctttgttttgttcaggctctcagttgattacatgatacctacccacactggagaggacagtttactgagtccactgattcaaatgctgatcttatctggaaacaccatcacacacaaacacacacacacacacaaacacacacatttaaccagatacctaggtatcacctgatgcagtcaattaactaacacaaggatctttaaaatctcagaaatattctgtacaaacctgtaaagtaaaatat

SEQ ID NO: 35112 - DNA, 1044 bp, Homo sapiens
tgtcacctaggctggagtgcagtggtgtgattatggctcattgcagtctcaacctcttgggctcaagtaatcctccctcctcagcctcccaagtagctgggaccacaggcatgcgccaccagacccatctactttttaaattttttgtagacatgaggtctccctatgttacccaggctggtcttggattcttggctcaagcagtcctcccgctttggcctcccaaagtgctgagattgtgggaatgagccactgcacctggccatgaattttgaaataagtaaggtaaccaagaaaacctcacagaaaagttgacttatgaataaatgctttaagaaagcaaaggaaagagcaaaccaagcgaaagcagcagcagttgctacagccctgatgtggaagcatatcagagatgtggaggagcagccagtagaccattgtaactagagcacagtgaacaagaagataaggtcaaataggtaatagagggccatattacatagttttgttgatcatcattaggactttggcttttattgttagaggtggaaagccactgatgcttttgagcagaggagtgatgtctcatgtaaagattttaacaaggtcattctggctgctatgctgagaaaaatcgaaggatgggcaagaatggaatctaggaaactagtcatggactattgcaatagtctaggcaagagataatgttggctcgaatcaagatattagcagtggaagtagtgggaagtttttatatgctgcatatcttttgaaggtagagccagcaggactactggtgacaaatatacagtgtgtgaggaagagaggagtcaagtacctgagcaattgaaaggggatagagttgcttctaactgagatttggaaactacttggaggtatagattttgaaggaagtctcagaagctcgttttaggatatgtgtatctgttagacatgcaagtggagaaaacaggcatttggatatacagtttcagaatttgtaggagaggtttagggatggagctgaaatagggtcctcaaactaca

SEQ ID NO: 35113 - DNA, 1335 bp, Homo sapiens
ccaaaaatgcaatagtggtattgttttacctttttataatcttttacatttttataatctttttacttgtttaactatatgaagaaaatgtgacctcacacagacacgttaatagtttctcagatagcggtagtttcttaaacttctcagagcagtggttttttttgttttttttgttgttttttttttgagacagagtctcactccatcactcaggctggaagtgcagtgatctcggctcactgcaacctctgcctcccgggttcaagcgattctcctgcctcagcctcccaagtaactgggattacaggtgtttgccaccatgcctggctaatttttttttttttttttttttttttttttgtatttttagtggagagggcttcaccatgttggccaggctggtcttgaactcctgacttcaagtgatccacctgccttggcctcccaaagtgctgggattacaagcgtgatccactgtgcctggcctcattgtttcttaaagctagttgctatgtacagtctaaaaccatgtcagtgaacttctcatactctgttatactaaaatccatcactctatcttgcaatttagatggctcttttactcatacataattttgtagtgtcatgaatttgtcattgaaaaatattggttgctgagttacacagatcttccaactatgaagcatttcattatagaatatttttaaaatcacatttattaatatcacaacaggtcttctccaaaaagtgattaagtattgggaaccgaccaatttcacagtggcagatattagctttccaaaattttaatcttcgcctaaaagctctcattttttcttaaagtaactgtttcactttgtacatttaaaaaaatcattgtttgggccgggcgcggtggctcacgcgtgtaatcccagcactttgggaggccgaggcgggtggatcatgaggtcaggagatcgagaccatcctggctaacaaggtgaaaccccgtctctactaaaaatacaaaaaattagccgggcgcggtggcgggcgcctgtagtcccagctactcgggaggctgaggcaggagaatggcgtgaacccgggaagcggagcttgcagtgagccgagattgcgccactgcagtccgcagtccggcctgggcgacagagcgagactccgtctcaaaaaaaaaaaaaaaaaaaaaaaaatcattgtttgtctgtcattctttcaaataaacatagtatttcttgcagaaaccatcaatattagctcacagatgattacccaagtgctttacctctttgtacttcagtagatagcacaagtgctttacacttactt

SEQ ID NO: 35114 - DNA, 1050 bp, Homo sapiens
ccagtacgtttggtcgtctggtgagggctgcagtcttctgagagagaaacactgtccttacaaggcagaagggcaagctaggcaattgctatgtgaggtctcacctttataagcctcttaatgccattcaccaggggaagagcccttatgacctaattacttcttaaaggcctcacctcttaataccatcacattggccattaagtttcaaagttcatgaagcctaaactttggagggaacacattcaaaccatagcaatctgtgaatgaaaatttattttacacacttgggatccagttggaagctattttaaagcaatgcttatttctctttaagtatttgctttttcacagtgactaaatttgtataaagtacaaataaaaactttaaaaacatcaaaaacttctagattagcaaacatttgaataaagtatatttctaaaattgatcattttaattaattattttctctctttatttaccaggagcttcctgaaactgtgatagatcttttgaataagtgccttaccttccatccttctaagaggttgatattatttagagattgggattacattgagatcctttacgcataagcaattggtttttttcttgttttaatataatggattaaagataatgtacatatggagtagtatataattgacatcagtatcataactgtgaatgatgtaagctttcattttttgtgaattaatgaaaaagtaattaaagttaaactacggtcagaaaactgacatacactaaagaagttactagttcattttcaagcttttaaatagaatattaactaaactatggaatgtaggtattcctagacccaataataacatcagtgaaatgagaataaaagtttgttgtcaatatgtattatagcaatgaacttggatcagtggtgtgataaactaacaattgttgacaataaaaaaggatttcttagaagtttcattaattgactttgacttgatgatgtcactactagtcatacagctatccctaaattcctttactatgtaatgtttgaaaat

SEQ ID NO: 35115 - DNA, 1035 bp, Homo sapiens
cctttaacaaaatgtagtttgtcacgtttttagggttatggttttgaaaatttaccagaataccattagtattgcagaagttatacgtgaagactttgatgggaagcagactatgtctgcagctgtttactagcctgatggaaaacatgatctgacttactcaaattagtgagttttattttcccctgttaaaacattgcctactcactgaatgagatactcgaaagaatttggacacattctggaatgtggtccagagttgaataatgagctacaggttgtagtaatcagaaatagatgttagatattcttattttataatataaactgataatggatcttgaggctttcatatcttttttacttttgaggaccgtagtttcaaaatgcatttgaaattatggtagtgaagtcatgtgaattagagatttatataactgatctataattctcttcctgttttacatgttttgtttaaagaaggaaaataataccgaaagatgctctacatttagacttgttatcttgcaacaaacttttgctttctgcctctcttgtaccttatatcttactaattgccaagtgttgttaatacaaacttggcaatagttctcacatatctctgtcttatacattctttagtttaaatcttcactaacaaacagcttggctattgcattgtaacgttctaactggtcttcctggcttcagccatacttcagtcctcccactttttctgctatgttaatatttttgaagatcagtccattctctgttcagaaacacttggaggttctccatttctttttttttttcccccagaggaaaaggcatcttattagcataggatctgacttcaatctaattctctcattaaataactccaattactactactgcttctctaaatattactctctaactctcttattatttccaatgtgcctaaattgtacaattagttttaattattcctaatacacattgaggagagtgaatgccaaaattttgaaatttaccataaaaactgaaatg

SEQ ID NO: 35116 - DNA, 1034 bp, Homo sapiens
ttactgtagccttgacctcgcttactgtgatcgctgcttactgtagccttgacctcctgggctcaagcgatccttccacctcaaccaccctagtacctgggaccacaggtgtgcatcaccatacatggctatttttttattttttgtatatacaggggtctcattatgttgcctaggctggtgttgaactcctaggcccgagtgatcttcttgccttagcctcccaggtgttgggattacaggcacaggcatgagccaccatcccccaaccttttttaaaaatgtttttgaactttgaattgtattatataaggatacaatcaatattgctttgccagtatgattaaatcattagctcatgaaaagttttgcatttctgtgcttaccattttttatctttgtttgaaagacgacaaatcttgtggcaatgaacatcagtggtttcttcaatgattttgcttttgtcttcatgaggataaaatagtgtagatggaagcacattctttgaggatgtatattaacatgagtaggattaaatgcaaaatttacatgatcttttatgccagttacattttcttttttcttttaaatagaacatatagtagccttaacaggtctttccattttttccattgagatgtatttaagcatttgtgtaaataaagtactatttttaaattattctgataatagactaaaagtcagtgttttctttgtacattttggaatataacattcagtacttactgccttttagtaggaatgatccttttaggttcagttccaagttgttatctgatccatccatctaaattaattttgctgagaactatttgacttttccacatatttggattacattagtctccagtaacagagcaggtatatgtgtagagttgatgtactgcaattttaatcaattttataacctgtttatagaaagtgagaagatgttcttaaggtttataaattagttctttcctttactaccaaaagtaagcacctgcacctgcaagaagggctgatgtaaacag

SEQ ID NO: 35117 - DNA, 1018 bp, Homo sapiens
gagaaagaagggagggggaaggggagatatgcatggagcagtaaacagcaattgaagacagagcagtactcttgggctttgcccccagtgtggaattctagtgagctggaatcgactacgttgaagacattttttttaatgccaggaagccaaagtagctttgaacccaaagcaggacaaaggtcattttctctttctctaaagccctgatggggtttgaccactcttgtaaagtatcagtaccagagaaaaagtaaaaagagcaaatgagacagttcctgaatgagtattttccctaatgcatatgtagagcagtccaggtctccccatacaagtgcccttgatgtcctccagtggaagaaaaataggtcccagccatttgtgctcactctgaaaaacctgtcttccggctgggcgcggtggctcacgcctataatcccagcactttgggaggctcaggcgggtggattacgaggtcaggagatcaagaccatcctggctaacacggtgaaaccccgtctctactaaaaaaaaatacaaaaaaaaaattagccaggcgtggtggcaggcacctgtagtcccagctactcgggaggctgaggcaggagaatggcgtgaacctgggaggtggagcttgcagtgagctgatatcgtgccactgcactccagcctgggtgacagagcaagactccttctcaaaaaaaaaaaaaaaaaaaaaaaaaaaaaagataaaaaacctgtcttcctagaaagtttcttctttgtggctaactagggtgccctgattttgatgcattcttgggtgaataaggggtaaatggagtaagtgccccctaagaggtcaaccaattgaaaatatgtttgagaaaaattacgagagcatttaaaaagagaaaattaacacctatgtcaccaatactttttgtgtggtttgcttttattctctttatacattaatctaacacagttgtacgcagttgagtttataatataatagagttttgtgtcctgcttttta

SEQ ID NO: 35118 - DNA, 1029 bp, Homo sapiens
taatagataccattttatataattttatggggcttattaatctttgactataaattccagatacttcagacatgtatatgggattattaagcttaatttgctttgggtgccacaggtttctcccaccttcttcccgtctttctctctttaaattcataatcacttctttggggccctatttagaatagtgtcctttgggtttgacacttttcctacgtgtaggctctttttttttcttcagggaggaagataattttaagtttttcttgaaaaaaaaaaacttgattttgagaaaattttgcagctcttcacttattttttcactaatgtttttcctgttccaggattcagtccaggattccgcactgtattcagggttcagttggtttttaactataattctgtataatgaaaatacagattcctgtggtatttatgatgcacaggactttgcatcttgcttttattccctgatggttaaaaactgaaggtaaattgacactgtatgattttaggatcacactatcccatattcccctaactggttaccacaactccagttctgtgtgccctttagtctgtcctataatattcacaaagtaatctttctaaagtgtagtctaagcatttcctttttttcgctctaaaacacttactgatttttccattgtttatagaattgagatgatttatacctggcatatgccaggtgtggtggttcacacttgtaatcccagcactttgggaaactgaagcaggaagattgcttgaggccaggagttcaagaccagcctgggcaacatagtgagatcctgtccttgtctccaaaaattttttttaaaaagtagtcaggtgtggtggcacatcccagatactcaggaggcagaggcacgaggatctcttgagcccaggagtttgaggctgcagagagctatgattctgccactgccctccagcctggatgacagagtgagaccctgtctgaaataaaaaataaataaaataaaatgcatcaataaaaatcaaata

SEQ ID NO: 35119 - DNA, 1096 bp, Homo sapiens
attaggggactctggcaagcttccaaactcattcaagttgttagcagaatctagttgcttccaggtgcaggacgaaggtttctaatatcttgccggctctcaactggggaccactcttagctcctagaggcatctgttccagatcagtgacagtgtgtggaatgctctcacacatggaatgtttctgccttctgcttcagccacatcttcctgcctgagctggtgaacattctccacttttaagggctcatgtgattaaattgggcctacctggataatccagtatactatcactgtgttcaagcctacaatcctaattacatcttcaaagtcacttttgccatgtaatataatacattcacaggttccacagattagggtgtgctcaactttgtgggcccattctgctgaccacaaggtgacatcatcaactgagaataaggaagtagaaaaagttctaaaaacaatggaaacagtttgaagtaaccattctggaaagtaagaacaagaactttgtaaaattgacaggtggcaccaaaggctgaatcgaagtcagcactatagattactatactcttgtataatcaggtataatcttggtattaactaagtggctgtctctagtagcactcagccacctgggcataagcacagagaatggagctggtggttggaatcgatagaccaaaaaagaaaaagcctaggatggcatcaatgaaaccatggactaggaaataaaagatggtcagggagacaagcaaatagaggaggaggctaatgaataagggaaaagtgaaaggatcaatggcctagggtttccaaggacattgcaaaacatatggaccaggggtaacagatggaagaatttggaaacgtaagaggtcaggtggtgagatttctaatttttaaaaaatatttaattgacaagtgaagatattcaaagtatacaatgtgatttgatatatgtatacattgtgtaatgatgatcacaacacatttgacaccactcatgttgtacattagatacccagaacttgctcatcttacaactaaaagtatgtacactttgatcaacatctcccccatttcctcctcc

SEQ ID NO: 35120 - DNA, 1078 bp, Homo sapiens
aacgggttgtttggaccctcagccagttccttccacaaacttggtcccctcctagtttcctgtatttcttccacaataatttttcccaaataactttgatgtcactgcacagagctcattctgggctcattctgcccaaatcctgctttctgtaggcagcagttctgggggagagtcaacagtccccctagagatagggatcaaagcaggtgtctgcggggagagggacactcctctggccacttcttctgtttgtttgatcttgaagggatttggcctccttccctgcagcgaactcagagctgaactgtgtgccaagaagaggctaggtcagccttctttctgggagctgagccttctctgaggtcacagctggcatgcgggtctgtatgaaggggtgttttcctcctggttctagtttggttgctagggctgctggcaactacctgtttagctggaaggtgactttgaactgtttcatgactacagttgtcttaagtattttacacaataattttttcctctagtttggtctatggctgcaacaatatggaaactctaataaagggcttatgaacaataacaagatgtctgtgtggctgtgcttttaaagaagaagagtcatgagcgagtaatgtaccgttctgacagaaaagaggcccctaacatccgcacgatgtagtagttgttgaaaaatcgcatttaccatttctgccacagaatgtgatcttccagatgtggaagatgagaactttaagagctgccctgtgaaacctaacctctaaagatacacacacaagaaaatgtggactgctttttaatagaaactgtaaaatttgatggcaattaagtatcttaatactaatagaaggatgtgattctatacaccgtttatactgatttattgtgggaaaaaataagattggttttcttggcaataattcagtggatatcattctggaagtggctcttctaaatttcttcaactcttttctgggaaaacttttattatctttactctgcagccaggcgtgactcagggagcgtgtaccaaggtgactcagatacacctacctct

SEQ ID NO: 35121 - DNA, 1022 bp, Homo sapiens
actttggaaggctgaggcaggcagataacttgaggtcaggcattcgagaccaggctgaccaacatggtgaaatcctgtatctactaaaagtacaaaaattagctgggcatggtggtgtgcgcctgtaatcccagctactcgggaggctgaggcagaagaattgcttgaacccgagaggaagaggttgcaatgagcccagatcgcaccactgcactccagtctaggtgacaagtgcgaaactgtctccaaaaaaaaaaaaaaaggatcttctaatcctgccttaggtgtcttttgggtgtagtttgtctaaagggggagagctaatcttcctcatatgacctttgtaaacttcattgtgctgtgaattttattcagcattgcttcttgaatgcctttaaatttgtttttctaattcttaagtaatgagttttaacttttaaaaagacatgaaacaaacacctacatattctatctctttctctatctgctctctcttctccatgttgatgggtgggaagaaagtagttttaaagaaagctactgtaatgtgatttatctttaaagatttccctctgcacaacttttaaaggaaattgttttgcatattccttgaatgaagggaaagcccagcttcgttcatagtgttttcatcataatcaaaataagtcattcaattactgaggcaaacagaagctgatcaatgatagtactttatctaaagatactgttctttaaataacagtactgtacagggatagaataaaggtaaaattaaggcatttagtgccagaatggtatcctgatcctcagtgagatcgtgtgaaatatatatctcaattattcagtattaaaataccctattacatgacatagatttataatttgaacttgtttttttaactttggctaataacaggctaattaatagtgcacaaattttcttgggtgagattagccaaatatttataatgttagaacttttcaatttagtttttaatgctttccaatattatacagtccgt

SEQ ID NO: 35122 - DNA, 1045 bp, Homo sapiens
aatatcctgtgaatctgtaaatgatacctctctgttctgtttaacaggcatgtccagacatcctccagctcctgatatccctactttttatcccttgtctccgggtggtgttggacagatcaccccacctcttggctggtaagaaccttgctgcacccttcagccaggcatttgaacacatgttcctccactttccattcatggaaattagatttatgaatggtaacacttgtggagttgaagaaatttcacatcaacaagcaaggtgctaactttattcatttcaatttaaaagattaaaaaacatacagactttgaaatggattgatccgtttgctaatatgggtagaaaatgactgtagcatttgctttgaagcttatagttttatggattccctttgtggctttgggcatttgctatgcctgtacaaagttagtgctcagtgtggttcttcttttctaggttttttaatgaacaacttatatttttcaaaaatgaatttagacgcattgaatatctacctttacttgtaagtgggcaagtgaggtaaatgacaaaaataactagagagaaattcaacaatataagagcattttttggatgttaatgaagtaagcatccaatttgagttcagagtagtaaaaaactgatttgggggccttctttttttctgaatatgaacgctagtgctctttattttgttgtttatttctaaaaatatgcttactgctgcctccaaaatcttttcaattatgaaggtgaaggaaatatattttgggaagaaagaataacatggtatagcctatttttattattttatgattaacccacaacatttcctcctcccactcccatgctctctccactcttccctctccaattctccctccatagaaataattctcaactcaagcaattgtttctctcctttttccacttgactctctatgtcacagcccccatgtcattgtaccccatctccctacctggacatccttgcattatccttcttcagctaggaagggtcatcctgccatggacaat

SEQ ID NO: 35123 - DNA, 1069 bp, Homo sapiens
aggaaatctttctggaatttgtcccccctgaaccaacccgccccaaacagtgccctccctctctggttctggagtccctggggttgcctcatgtcgcctccggtctgagctctctggatggtagacagagaaagcttttgctcctgacttctcactcactttaattgatttgtttaccttccattattttccactgacctgcacaaatactactttcatcaagctgactacacttcagcttattaatcataataagttattatgcagtgattggattggtaaaatacttctctcagaataaggcagcagatattaaaaaatgtctaggttttaatcattatgggtacataataggtatgtatatttatggggtacatgtgatgttttgatataggcatacaaggtgtagtaatcatgtccaggtaattggggtatccatctcctcaagcatctatcatttcattgtgttaggaacattccaattccactcttttagttattttaaaacttacgataaattattgttgactatagtcacgctgttgtgctagctatcaaaactagatcttatcctaactatatttttgcactcattaaccatccccactcacccaacccccattccaagctgctggtaaccatcattctactctgtatctccgtgagttcaactgttttaatttttagctctcacaaatgagtgagaatgtggttatttgtttctctgtgcctggcttatttcacataacataatgtcatccagttccatccatgttgttgcaaatgcaaagatgtcactctgttttgtggctgaataatatttcattgggtatataccacattttctctatccattcatccattaatggacactgaggttgattccaaatcttagctattgtgaatagtgctgcagtaaatatgggaatgcagatagctctttaatatactgatttcctttcttttgagtataccgagcagtgggattgttagataataaggtgataatatttttagattttgaggcaactccacactgttctccatagtcatcatattaatttacatt

SEQ ID NO: 35124 - DNA, 1030 bp, Homo sapiens
acatttgtttactgtgcagctgatgctgatttatctttacattttatctagttaacaaacatacttatatatcattacgagccagaaatcattctaagaacttaactaatagcagctcacttaatccttaacaaccctatgaaataggtactgtcatcatgatccttattttccaatgaggaaaaatcaaggcacagaaagaataagtaacatgcccaaggttgtacaataagtgtcagagttgagattcagcccctggcagtctggcttcaggcgtcatcctcttactgcctcatggctgtgtgcccatgggtgggtgggactggccatcacacagtcctgaatggcattgcaagggacatttttctcattgcctggagaaaccaggatcagaacactctaccccaggcatggggcatgcagcgaaaaactgactctcaagcctaggagctatttgtattggctttggtccttggacctctgcttacagaagcagagacctcacagccttcatctgaccacacgaaaaccatcataagctcataggacagggttccagagatggaagcttctaatgccccagcagccacacagtgtgtatcaatgcctgacctcccaacatcctagcaccattgaactcccaacaggtcattaccactgttttttgcctgtttccaacagccgagctctttgcatactcagatcactagctgctgagccttgtaggggaattagggcagggtcgatttcacagatgagaagatacagtgtcaatagtccaccataagactaggacctaaatcctgctgccactttttttgtatgtcagtacttttactttttaacctgagacaggttctcagtctgtcacccaggctagagtacagtggcgcaatcacagctcactggagctcccaagcttaggtgatcgcccacctcaaccttctgagtagctggactggaagggtgcaccaccatgccctgctaatttttttgtatttttttgtagagacagagtttcgccatgttg

SEQ ID NO: 35125 - DNA, 1051 bp, Homo sapiens
cctccctaaccactgtggagcccggcctgcaccttgccctgtgatctgtgctggacatagtcacatttaacagcccttcaagtttccaggttttaagggagaaaaggatagttagcttggcattgtagatgtagatgccatgctatttaaagatgcatgttctatatataaactctagttaatcatttgactaaaaccatcataactttcctttgcatagttcagatgattcattgttttgaaaactatgtaaactcaaatggaaaacaaccacgcactgatggttgcaacttatatttcccagtatagagttaatgagcagaaaaatggcagagccgcttccacacatctaaggctgaacatttcttggaactattaatgaatgtactttactgtaaacattgaagcttagcagtatgttctataggccctgagaagaggggaatgaagattctttctagtttcttacaattataccatggcagggaatctcagtctgtatttttaggtatttgtcctccaactctccttcaggcctggttcagctagcatttccagtccagtctctaccatttcctatccgtaatccatccttgttatccttccaggctacttagaggatgttgctacgagtggcttcatgtttacatgcaaggaagggaaggcagaggaggaaaatggggcatggtggcacatgtaggtcacataggcatcatgcgtcagcaagctccgttctgtcccccatggaagcatctttgaattcctgatgttctcagccctaaattctcagctcttctattctcatataggcagtggcaacttcaaggcgtttggaggagttggggctagcccccataatctccagcaatacccttcaccaccccaaataaacacctttgctaagtaaaaatattcttcagatacagcatttacttcaatcttgcaaccagattgctgttcctaagccccctttgtgtagaaatgtatatgctaggtaagctgtcaggcatactcgtgtgtgtgtgtgtgtgtgtgtatacacacacataca

SEQ ID NO: 35126 - DNA, 1046 bp, Homo sapiens
tacaggcaaaagtctgccaaagagcattctttgcacagcaagcaattaaaatgtggtatgtgcttcatttttaggagcagttagtggtgatttttgtggtatcatgatgttggtttaaataagagaaattagtttagaattaactggaattgtgatcattcctgagaagttgcaacagtgagtttcctttaaaaagtgaagaaacttttctttctaaggagacattaggaacagtcttttcttctttttctcaaaaggaaatatctttttttttttttggttaacagtaatatataaaaacgggggaaaacccatgaaagaacagaaaaaataaataaaaagtacctatatttctgtcattctgatataatggtttcattttgatgaattgtttcatttcagacattctttctgtatctatacctgtaatacaaacgtttttgtaaatgagcttataagattattattctattataatcttttgtcattaaaaatgtattacgtgtgctcatctttatgtgaatgtaggtctgtgtcatcagttgtaatggctggatagtatccagttatatatatatatacacatgtacatatatgtacatatatatacacatgtatatatatgtacatatatacacacaaatatatacacactttaatttattggatttatcctcagttatggatgttaaagtttttttgttgttattttaaataccactacaatgaaaccgtgttaaaaatatatttataatctattttttttttttttttttgagacggagtctcgctctgtcgcccaggctggagtgcagtggcacgacctcggctcactgcaagctccgcctcccgggttcacgccattctcctgcctcagcctcccgagtagccgggaccacaggcgcccgccaccacgcccggctaattttttgtatttttagtagaggcggggtttcaccgcgttagccaggatggtctcgatctcctgacctcatgatccgcccgcctctgcctcccaaagtgctgggattacaggcgtgagccac

SEQ ID NO: 35127 - DNA, 1030 bp, Homo sapiens
cacgtagctgaagactgtgcactgaaagtataggagactgaactgtaaacagttgccaactcagagcctgagagtgtggtatagtttctatatcctttctggtactagaagtgactgaccagtgtgcaacaaacaaaacaaaaaagaaatacagactggacaagaccaggaagaagaagagaaaaagccagacaattttacaaaggacctggccccagtcccggagagtcttggtgaactgtcttatcaacaccctctggaggaggtatcagaagctgtccctgggaacaaggattccaggaagagctgggcagaaggcaccatcctgtgaggttgtgcaagctttagagtttcagttagatgaaattgatctttctatgttttccttcttccagatctccactcttcccattctggctaactggcctccattctcattatggacttgagtttatttagcccagtgtgccttattttagttatttgttctcattcttacattcacttctgagcctgtgtttatttgaactggcatgatgttcatttactacatggtactagtctcttggtttctcttgctttgctatgagaatgacctctacttgggccatttttgactcttcgttttccattcttgggcaatccccctgctactttggtcaccatctattctcctggaatatctttcccctcagaggctgctggcctcctaggtgtgactccaagccaacccagtgcctctattttccccacaactcattattgctctagatcacactggtagctaatttaaattattctctctgtgtttatgtgtgtctgtgtgtgtgtgtgtgtgtgagtgtgtgtgtgtccacattttacaaagtggtatcaaatgcatgccatagagtagggtcactcctcaactaatcctcttatttattttataaagtcctgtgttaaattaactattgcagatattgaggaagcagtatctataccagatggattcaaccaacatatggagtcactctcttagtgagcacac

SEQ ID NO: 35128 - DNA, 1023 bp, Homo sapiens
tcccaaagtgctaggattacagatgtgagccacctcgcccagtgtgaccttattttcttaaaactggatggttcattaagaattaagcaaatggcatacttttggctttttaaaaatactccctctactataagatagaaggttaaattagaaaatgctacagcctgttcatatcataaaattaattagtttagaggaattttaagccattattaaaatgaggtaagaatacctgataaagtaacagccatttcctgaaaatccttatctgaaacttattgaaaaggaaaatattattctaatgtggacatatgtaacaaatatataggcattgcttaataaaaactttttcctgcagttttataattttactgatggatatttaaatactcctttctccaaatagtttgtttaaatcacttgaaaggtttacagcaatccacagtaaccttagttaatttaagttgactagtctgtatatttagattttctacaaagtatgtgttttgtaatcctgattcatgcatgcattatgactttcttccactgataaacaattattacaagagctttgaggaatttgtttttgtaaaaataaatgcaatctaaataataatgcttagctttcctacataataatcttttatttaatcttaaataaatgatgctacaaaatccaaaatttgggtgtcatctcctcacttcatgtctcctttagattcttcaacaccttgggtctggaggagttaatggaaaacttctcctcttccctggcacttaaagtctggggcttctctttggcaaatttctctttgaagtcatatttttatttcatttaaactcatgaagcatctcacatattccactcagactttgtaatggtaatttgagttcagaatacctctttttcctacttctttcttccatgtaaccctggcagatttctccctcctcaaaggtattagcagacagaattgctattaatgaatttcctattacagagcaatccaagagctggaagga

SEQ ID NO: 35129 - DNA, 1037 bp, Homo sapiens
ttagccctttgtcagatggatagattgcaaaaattttctccctttctgtaggttgcctgttcactctgatggtagtttttttgctattcagaagctcttgagtttaattagattctgtttgtcaattttggctcttgttgccactgcttttggtgttttagtcatgaagtctttgcctatacctatgacctgaatggtattgcctaggttttcttctagggtttttatggttttaggttttacatttaaatctttaatccgttttgagttaatttttgtataaggtttaaggaaggggtccagtttcagttttctgcatatggctagccagttttcccaacaccatttattaaataggaaatcctttccacgttgcttgtttttgtcaggtttgtcaaagatcagatggttgtaggtgtgtggtgttatttctgaggcctctgttctgttccattggtctatatatttgttttggtaccagtctactataaagatacatgcacatgtgtgtttattgcagcactattcacaatagcaaagacttggaaccaacccaaatgcccatcaatgatagactggataaagaaaatgtggtacatatacaccacggaatactatgcagccataaaaaagaatgagttcatgtcatttgtagggacatggatgaagctggaaaccatcattctcagcaaactaacccaggaacagaaaaccaaacaccacatattctcactcataagtgggagttgaacaatgagaacatatgggcacagggaggggaacatcacacaccagggcctgtcagggggtggggggcaaggggagggatagcatttggagaaatacctaatgtagatgacgagttgatgggtgcagcaaaccacgatggcacatgtatacctatgtaacaaatgtgcacattctgcacatgtatcccagaacttaagtataataaatcaatcaatcaataaattttaaaaactcatttgtttttctgattaagttcacaaaaaaattggaatgccaaaaaaaaggaa

SEQ ID NO: 35130 - DNA, 1049 bp, Homo sapiens
ttaacctctccaaactttggcttcctcatctgtagaatatggataataaaacttttctcatttgtcctgaggattaaataggataatacatgtaaagtgttttgtgcagtttctgcactcatccatgctacagtcattaacagcaataattatgaaataaaccctactcatccttcaggacacgactcaagtctcacctccagggatccaatccacaataatagataccaacagggattccccttctgtcacatagggccttacattactccttaatccttaactattttggttctgcagctcttgtctgcctaactagatcactagctccttgaggacagtagccatatttatacttcatagagatatgaatatattaaaaaactgtaaaacccgaacacttttacattcataaactatgagatgagtactataactttgtccattttactgaggaaactgagatgtacaaaacctaactaacttaccctagaacacagaattggtaaatagcagagccaggagtaaaacctaagatgctagattacagagccaggaacttaaccactttgccatgcttcttgccagcagtgcttaaaaagtgactgcagaatgaaaatggatattcattcctatcttgaggtataatgatggcctttatcaattccctttaaaggtctttctatttaccaacatagctatttgacaggcatttaccaaaccatttccttatctgtaaaatggagatgataatacaaacattggataattgcatattagtcaagtttctccagagagacagaaccaataggatatatatagggagatagatagatgagtggggatttatgaggggaattggctcatacaattatagaggctgagaagtcccacaacaggctatctgcaagctggaggagaccctgggttgacggtagcatggctcggtccaagtctgaaggcctcaggtccagggaggcagatggtgtaactttcagtctgaggctgaaggcataagagcctgaggggcactggtacaagtcccaaaa

SEQ ID NO: 35131 - DNA, 1017 bp, Homo sapiens
cttatcatttgatatttagcaaaaataacttcacaaattaataggtggtttcatattatagagttaaattatggcatttcttagtaacacacacacacacaaagatggctttttacaaataatgggaagatcataaaaatttaaaaactatttatttaaagtgataagaaagtgatactcagcattaatcaaaaataaccttgtagcattataaataaaggggaaggcatttaaaaggaagggctgaagcaggttgctgcagtaagtgcttgtaggttatcggggtaccagcttctcttgcaggaacctccgtgctttgaaatctagttgtcccttctcctgaacttgaagcactttcttggagagagagagtacttgagaatgtggaattgattatctccctccaaaggcaaaaaaaaaaaaagcaattttgattatactatttatcatcttactttagtcttatatcctccatcacaaaaatatcccactggaccctcggaatttgcctagtcatctgtggactagtcagaatgttttgagctttttgaagttgggagggatgttaaacgatttgccacctctagcaaatgcttttattcctcaggtcttaggaaatggccagatggagtttgtcgaggtcaggtagctctgatattttcttttgtttttctctccttgactgctgactatagtgaaaagaagctattaattgacaaaaactcttttcatcaagagtatgtagacatactcttctacataattatcaagtactgttgggtaactatctggtatttgatttaaatcttaggctctatttttggtttaataagctttgtcttctctaatcaggatgtgggagatacactttccttataatgtagtcagtgctcactataaattagtaattttgaaaaggagacaatttaaagatacgtcacaactattagtggtcattggatatttataaatgtagagctaaaggcttaaattttatgacatagttttcttaactta

SEQ ID NO: 35132 - DNA, 1037 bp, Homo sapiens
tacacactaaatttgttaatgaactaaattttaattagaggcactatagccataccattttatggatacattagtttttgtttttttatttgtatgtcactttagcaataagttagaagacatgcagtgaatatgtttagattcatactctcatttgagtctgaaacaggaaacacatgctagcagtttatcgtctgagcatttggatatcaatgcccatacagtcagattttagaccacagatgtagctagcaagtaaatgtggattctatattaggttaaatctcttaaagatcatgactctgcctttgtctagcagtagctgatgctgtagataaacatatgaatagaaaaataaaatttacctattagcagaaaagggaagagagaataaatcccttcttgtattttggaacctgaagatgtagtaaaataaggtttccaacttcttgaagtcattgagaggataattgcttcattttaaacacttaggatggacataatttttgaggaggtctttcacattcttttaacatttctctaatttaaaaacagatttttctctcaaaactaagagtctaagcaatgactcattaggcccagttttaggtaaagttgagactctttcaaagagcctagcagaactttgcaaaatttactatttattttataatatttcctatcaattctctatttaagaaatttggaattagtgatacagagatccatggtctgctttggtttgaaaaagcaactgatcttctcagacaatctaattttaggtcccttagtctttcaaatttaaaggctaagtttttactgctctccaagtctgtgttttgctaaaaagtctgtaagacagttgtgtctctaaaaaataaaccaaaacaaacctgctataatctcgtatagtttacactgttttcagagtggaatattcaaatagattttcaattacttaataaaacattgccttatcataatgattacttataaatacagtttagattcattctggaagtttatagatttactca

SEQ ID NO: 35133 - DNA, 1080 bp, Homo sapiens
ttccttgcctagcatgctaatgatatctttaaaatgtagcactaaacacctaattggtagcattttcacagtcaagatgattgaggaatataaatcagcttcctcaaatagagattattctgtttgaggaaaaaggtctttctgaggtgagaattacctatccaattctctctttagatctcattaaaattagaacccaaactaaggagttataaaacttaaggcttttttttttgtgagcattttgaaaatacgatcaaatagaaagctggtcatgctcagagatgagtacaagaagtgacttatttacacattcaaatttcaaaatatttttaagtcctaccatgtgtgctgctaaaaggtttttaatttaaaattattttgttagataatcctgtttcaagtgacattatgatttatcgccactaatcaagattctgatccctcatagacttcttgtttgtatctgtttttgttctttgttacataaatatgaggtttatatataaaattctgactgtgtaatatagggctaatgagtcacagatggaaagatgctggcacattaccatctaataacattttaaactcatattccatagtaaaacaaaagcaaattgtatacatctgttttcaaacttgtagcatttctgaatttatgcagaatctatatttaaaggacttgtatttagagagaagaaaaagaggacataggtcacctcaaaactacgcagccacttaatagccttatcagaacggatttggcaaaagagataagattttctctgttttgcttcctgagaagttgtagtaccgaagactgagagtcaaaggcattagagctgaagaaatgtcttcagactacaaactaattttactgcctttcttaaaatgaaaaacatatctctaatatgaggaatgtgggggtgaaatattcatgaaactaataaaattaaaaatgtagaaaatgtagaaatttcctgggctttcctaaaaatatccacaagataaatttgggtgggaagagggagagcctaggccatgtattgctgtggttgttgtttattttatttatatggt

SEQ ID NO: 35134 - DNA, 1098 bp, Homo sapiens
gctgacactgaggacctgtgaccctggagttgtagtcaggttaaagtttttttaaaaagcagtcaggaagtgaaatggaaagacgctgaggtgaaaattcaagaccagtcttgaagccagttggatgtaggggatgaagttgaaaaagaagacaaagatagggctaaagtttctggcttgatgcttgataaaataggtcagaagaaagttgggaggataagtgagaagatggattttaattatgttgaattcgtgatcttgatgagatatttcattggaatagtgtaacaaacagaaacatgagactagaattctgaggcagtgccataactggaggtaactgttacacagctgaactatcacagagggagaattgaaatcctggaattagaaacatggtaggcaaaagagtaagaagagtactgccctagaatagagtctttaaaaatactcacacttacggagtgggatgaggaaggaaggagtgtcagcaaaaggagagcatttgaaggtagaagcaggacactgcattgtgtgaacaccacacacaaaactacttaaaaaaaaaaaaaagagtggccaatataatattctgaataaaaagagagcctcagggatgaggtctttcaaaagcctttggatttgctgttttggagtcatgggctattaaaggaatatcttttgttaagtagtgagagtggaagtcagattgcaagaagttaaaaggtaatggtaggaaagttgaccgtctttgaatacagttgatggcatatgatttaatgcaggagaaagtgggctaacttttcggcattaactttctttcagtatacattgaaccaatttcaggcctacagttttaggtgtaatataataaccacaaatatcatttggttttattctacgaggcactgagtgttagatttccacaaatgaatgcatcctgacataagaattgtacttcccgccttgattcctggggagatgtcattgcagatttgccactaatctttaattcattcttccaaacactgcatttcattaggcctttaggcttagggttgggatggtgctttatctgtgctgtcggtcaccacgcat

SEQ ID NO: 35135 - DNA, 1273 bp, Homo sapiens
ttatataatccattttctacacagcaggcagagagatcacttgacattgtaaattagatcatgttactcctgtgtaaaactttagaatgaaatccaacctgctgtgcttagctcttgcccatccccaccagttcatctcacactagtcttgcctccacctacaacactcagccacacactgtcctccatgtcctcttcagacacactgcactttcacccaactcgacagctttccatttgccctcttctggtcttcttgtgattgggttcttcttatcattgaaacttcatctcaaatatcacctcctctgagagaacttctctaactactcaatctgaaccagagattattctatcttgtttatgtatttacttgctcattatctataaagtatgcccccctccctccttaggtcctatattccataaaagcaaggttcttctctgtcttgttcataccccttcacatagaatagtgaagattcaataaatatttgttgaatgtatgaataaaatattgttatatcattatggccctcaagaagctgataatttcatgggtacctgagtaagaaaactgtgtggttatatgttatatccctcaaatagatataccaagaggtgctagaaaagtgaaaattctttcattttaaatgagcactgtcaactgtggaagaggtgacacttgagctagaacttgataaattggtaatctttaggaggatacactgaagagcaagacagtacatattccaggaagaggaaatagtataaacaatattatccaagtagaaaatggcaggatttagttaaggaacaataatattccatttgtgatttttaaaaatgtggtatacacaatggaatactatttaaccttaaaaaagaagggaatcttttcatttgccaacagcatggatgaacctgaaggacattatgttaagtgaaataaggcaggtacagaaagataaataactgcatgatctcacttatatgtggaatttttagaagttgaatacatagaagtagagcatttaatggtggtgacccatggctggtggggagggttttaggagatgttggtcaaaggatacaaactttcagttagataagaggaataagttcaacagatctactgtacagcaacgtgaccacagttaataacaatatattgtattcttgaaaattgctgagagtacattgtgttctcaccaaaaaagataaggatgtgaggtaatacaaatgttaattagcctgatatagccatcgcatg

SEQ ID NO: 35136 - DNA, 1036 bp, Homo sapiens
cagtgcacacctataaccctagctactagggaggctgaggcaggagaaccgcttgaacctgagatggaggttgcagtgagccaagatagctccactggactccagcctgggcaacagagtgagacccacccgccacccccccacaaaattagaagcttgttatgggtttttaagttgttgaaagctttcttttatttgatcaaatttttcttaaaatttccatgttctgtttacttggctcactgaaaatgatccttttcacatacagtatatgtctagtaacaggaacttgaaattttgattatcttctttttcttttttcctcttctttttgttgactcaaaatgatacctactttttttcttaaaatgtcaacccttttgatttctttgattttataagattttgacctaaaatgtcaaaatttgttttttgttatttatgtacaattcaacataactggcctgataattctgttcctctccagctctgggtctccctagcacatgctgttagctctgggaaaatggaagggtatggacactgcaaaacttcttctttcactccctgtcttcttttgcagctagttaaggaagacagcttgtcatctgtgcaaggtttctacaaacaaattctcccttagccaacccttaaacccacatttcccacccctgtctgagtcatgaccgtgtcattcagactcttctaatctacacttctgactttcaatggatttttcattaagacactattactaataatggtctacttctattatactatggggatatgttttaggtactttaggaataggcttttgtggattaggctgggaaaataaaccatattcatattgtgattcctacaggaagatctaattaggtttccaaacaaaatacttcccccaaaaaagggttgtaaatgtttaagttgggggattgatatggtttagatctgtgttcccactcaatctcatgtgaattgtaattcccaatgttggaggtgtggcctgatgggaggtgattggatcataggg

SEQ ID NO: 35137 - DNA, 1050 bp, Homo sapiens
cctctacacaggctggagctaagggttttgactgccaggtctaactatgccttgatttggtcaaaatgagatgtcattttctttgatggagtaaaagtaaagctttaaaatgtgggcagtacatctcgctggaactgcctgagtgctccaagtgccattgttctccctctggcatttcagcagcactcagcttacccagctgctggcatccttaaggttttgtgacctggtgggtgacgtttatttggtctcgctacagaaaatgtaggaatggtgatttgcgtaaattctttttttttaaaaaaagtattgtaacatggcctggcgcggtggctcacgcctgtaatcctagcactttgggaggccgaggcgggcggatcacgaggtcagaagatcgagaccatcctggctaacacggtgaaaccccgtctctactaaaaatacaaaaaacaaaattagccgggcgcggtggcaggcgcctgtagtcccagctactcacaaggctgaggcgagagaatggcgtggacccgggaggtggagcttgcagtgagccgagatcgcgccactgcactccagcctgggcgacaggtattgtaacactttaatatatggcatataattattgaaagttgtgtggcataagaaaacaggtctgcatagtagttatcctgaaacacacggcataaaggagttttggccaggcacagtggctcatccctataatcccaacactttgggaggctgaggtaggtggatcactttgagtccagttcaagaccagcctgggcaatatggcgaaactctgtctctacaaacaaatacaaaacgttagccaggcatgtagacccagctactcgggaggctgaggtgggaggatcgcttgagccaaggagatggaggttgcagtgagctgtgatggtgccactgcactccagcttgggtgacaaagcgagacccaaaacaacaacaacaacaacaaaatgaagttttacccttttaaaaatttttaacaggcattgcattgtggtacacctggaagcctgactttaa

SEQ ID NO: 35138 - DNA, 1054 bp, Homo sapiens
ttctgtattgagtggtttgggcttccatgtttgtagagagcactgtgttcagtggcaatctgttttaatgcttcctctgctatagtttctgtagatgtagtgccaggttaagcagaagtttggaattctggaagtggctacagtaaggggcaaagagctgcaaattgagcttaaataaggctgttaaagtaaaaaaattaaaattttaaaaaggaacaaggaagaagaaatagacatacaaaaatattgacaatttttttgcaacattatttttttcctacggtctatttctggataccatctgttttagaataactttagctgttgtaacagacggaccttaagatattagtggcttaccatagtaaaaattcatttttttgcatattgatgggcaaggctccttgcaggagcccagactgatggagactctgccatctttaacatgtgtgttccaaggctatcttgggcacggttacacagccatagataaggaaagagtggagggtcagatgggaggatttttttgaccattattggaagtttagaattctatgatttatatctcttctgaccacattcctttggcaagagtcaagtcacatgttcatacctaactgtaagagagggagagaaatgtagctgtgggctcagaaggaaaagtaaacaaatttggtgaagagccagtctccactgccctaagtctccactgtcctactggaaataattctgaagaagtaaaaagaaccagaaatcatcagagaaacatacattggtgtatcacttgggaataatgtggtctcagtcttgtaacattttagagaagaacagtcattaaaactattatcactagaaacctagaacagaacaaaaattaaaggaaggggatttttttttaaaaaagggggtgacataaatttaaagggtggtctgtaaaaagagaaaagtattaatggcaggtcatgagacccaggccttccagattacttcataatctcattgatagtgaggactttttatctttcagtatttctcaaatctttaggcacctcta

SEQ ID NO: 35139 - DNA, 1034 bp, Homo sapiens
ttttctaagttgacttaaatctcctattttccttcaggcagttgtgtgtttttgtgtcagaaaatacactgacctatagtgtgtttaataagtgaccaaattgttagtttcagcatttgtaatccaagagtcaggctgtctggatatacatccctaacccaccatttactacctatgtgctgttgagcaaatcttttaacctgtctatatcatcactttccaaaattgtattgagatcacacaactaggaaaaataagtgagaccaagcatgtacagtgcttagcccagtgcaaggtgcgtgatggcactcataaatattagtcatcatcattgtcccttgtattatttcctagtattttgtgcttttcccccacatgatacaggggctcattaggttctctggcttccacaaacagatcttactctatcattcctgcactaattgttttagtatgcctgtgccttcgtgcttatttcactgggtccagacttctgcgttaccctctctctctgaactactcctactcttactcgaatgacttcgtcttgcctttctgtttattcattttccatcactcattttcagtgttaaaccagttctgtattattattctatgagtatttttactactgggtggaaattttggcatcatgctaaatgattaatttagcacccgcttaaatatctgggccatttgcatatgtgtaatggtgtatgtggtgctgctgtgtttaattcatccatcggcaatttggcaaaagcttgtggtgtcacaaagccattaataaaaacaaatcctagtttctattagcccactttttaaattttccatgaagattatttcaatctctgataaataagaattaacataattttatttattgaatatttgaaaaactatattcaacttttgatcttattttttttctgttagtttaacatttttatctttaaaagaggtgtctaccactctcagttccattagaaacatataatctgcaaagctaatttaaaatatttttctgcaagctt

SEQ ID NO: 35140 - DNA, 1050 bp, Homo sapiens
tttttctctttacttgtttgcttggtcccaacatactcatttgctgctcatttctatgattttgttcaagcttattttctagtttgcttcactccttcccctttttactgataaaaatattcatctttgatgattcagaacgatttctatctcctggaaatcatccttgatcgctccattctatattcctatctttctagctgaattcttacgttattttttttcagtgccattctttgggacatctatttatgtgctaccttctattactatttataattctttaatgtgtatacattcacaactaaattttgagtattttgaaagtagaggctgtatatcttttgtgtgaacatttactgtctgttataatgtagagcactatataatattatgcaaataaacactagtggaagcagaaatttaaactcttctgttgatttgactttaatcatcctcatcagtatggcctattttagtctccacagtctagagggattttattaattaacatatatatatgtatgtatgtatattctgtggaaagatggatttaataaattactaattgctttgttaagccaaggaattttcatctgttatctcacctcaaaaatccacaattcttttattcttttttttttttttttaattatactttaagttttagggtacatgtgcacattgtgcaggttagtcacatatgtatacatgtgccatgctggtgcgctgcacccactaactcgtcatctagcattaggtatatctcccaattcttttaatcttaaacaactttgcaagagagagagacaacttagagactttccttcaagggcttattaaacttggccaaatctatacaatctataacttcttagtttactatgacagtccagcaggaatgaaaatatggtatgggtgccacattggttgccagaaagataacatttaacatctgtcgaaggaataggacaaattttacaaatcaaagactagcctggcccaggtttcagttttatcacaccatatagtcatcacttaattcatatt

SEQ ID NO: 35141 - DNA, 1026 bp, Homo sapiens
aattccaaaaggaatcagcagtgatggcaaattgagacgggaagccaaatttaaaatcactaacagatgaatacctttcatagcttgctgtttgaccactaagaattaaacatttttaactagctaattttgctagaatatggcatatagcttgttatgatactcctctgttttcacaaagtacaccagcaggctttgggggaaaaaaatcaagccggctttcggtatttgagttgttctcattttagtccagggaagcctgcttcaaaacctgggtctaaaaggtctttagcttttatctagaaaagacaacgtgcttgagaaagttcctttagttttttgtttcagttgacattgacacactgggtcagacttgtcccaaagcaccatgtctaaatggcttcctttatgtggttctaattgggattctttctcaggaggtcaaattagagctcctgcagttggagctacagcaccggcagttgacagcatcagctcagttctgcctcttgagacatgtaagacagccacttagagtttgttcctacagtcctttgacaaatggccctactctgactgtgtacctaatagacagtttttgtttttcttatggatctgtgccaaaaacagggtttttccttaagcaccttacttctgctttgttctctttgctttgccttttgtttgctatgattcagtttgtccaaaagcattggctaattttcttgtttatgaatcatatctggcctacttacataatggtgcctggtttaaccaaattcattctatgtgagtgaacaaaacggaactttggacatctgaattgctctgttggtccgtggatgaagataatgcatgatagattagtctgtgataatttattttgaacatcatagcaataaaaattagttgattagctatgacaggatatgatctaagattcattcattcattgattactttctatgtagcaagacctctgaagagatatgtttagtgcgttacttttaacctatctctctagca

SEQ ID NO: 35142 - DNA, 2457 bp, Homo sapiens
cctcaatctgaatgttttgtaaatattttccttattcttgtgattaaaatatttgtcaatatgtttctgggcattggtctcttaaattttgcttaaaatgtgatgagcccatctcatttgtatatccatgatttttttcagtctaggaaagttattctttgattatgtcttctattattgttttcattccaattactttggaataaataccaaaataataggctggctctgcattctttggtctacaaacatattatcttctctcatttatttttcatctgcttgattggttctgcatttttagaggacatatcatacttttctttcatatcactgattatattttcttaaacatatattttactctttattgcttctcctcatttatttctatctcggctttgttagttattttaaaacataaaattgtaaattaatatttggaaacataccacaaatgaaaggaaaggcataggacaaatatttgctggggaaaaaatcccaccaatagtaaaagtcgttaaacttaatgtaaaaaagctctttcaattaaaaagaatatcagtggcttaagaggcaaaaatggcagagacaattacaagttattcagagaagacaaaaaaatagataaatacaggaaaagtgcttgacctaattagtaaaatttttaaataaacattaatactttgaaatatggagtattaagataaaaagtagatacagtgctgaggtggactttgtgaaatggataatcacaaatattgctgatacgagcacaaacttcaacaaacgttcttgaaacccacttgttgatatgagtgaaaaatctttttttttttttttttttttttgagatggagtctctctctgtcacccagcctggagtgcagtggcgtgatctcggctcactacatgctctgcctcctgggttcatgccattctcctgcctcagcctaccgagtagctgggattacaggtgcatgccagcacacttagctaatttttgtgtttttagtagagacagggtttcaccatgttggccaggctggtctcgaactcctgacctcaagtgatcaacctgtcttgggctcccaaagtgctggaattacaggtgacagccaccatgcccacccagccagaaaaatcttaaataggagaaaattcattgacacatcaatcttatttgtgggaatatatcttaaagaaataatcaaagatgttatgaaaattgtaagcacaaaggtacccagtatgatttaaaattggaaaatataaaaacctaagtacccaacagtaagagaattatacatgatagaatacacgatgaaatattatccatctttttaaaaatcctgttttcaaagaaaatgtaatggtttgaagaaaacattcattttagtgttaattgaaaaaataatttaaaaaactgtatgatgtttattaactaaattacttcccctgccccctacccccaccgacacacacagaatcttcacatatttaacattattactatttactttatcccatggtcttttaatcatactctgttttcttcttctggattcccttttcatgaaaggcctgctgttttgcattctatggaggatttccatggcagataatgtttagatgtttcctcattcttctgattgacggtctccttactttgtttgtagtactcttttccttttacacacttgatttttctttactcaatcttgagataagagatagatctatagatgatgattgccagtggcttgccgttgtccccattcttgggacccctttggtacgattccattctcaaagctacagtttcctggaagtttgacacatgtatctcttagcccagtttttcacatctaataggcttttatccagtgtagcttagctggagtgaaatggtgtcttctcttgtgtttgattcccccaccccacgtttctctgatactctgaatatgaaatcatgaaaaaatgcaaggtggagtgcgttgctttctgaaagcttcctgggtctactctcagttacaggatccagagcaccaccacgtgttcccagccttctcttcccaaacttgttgtccagttgtttccttctagctcagtctccttggaaggagagttagtgaggaaagaactggatagggcatgaggagcatccaagagaggggtggctgaccagttgtatatttgttgtagtccctgtatgtatgaatcaaaaagagatggtaggggaggagcatcggaacatcggctctatagtcccactttagagttgacattgcaattatgatctcttattgtgtttttcgattagtttcattggccttgtaattagtgggaaattcttccatgttcttgtcacgggtttcccttactctcacttttcattattgtgacttatctccttttggagggtgccttcataggtgttttttcaagaagttggaa

SEQ ID NO: 35143 - DNA, 1026 bp, Homo sapiens
ggccgaggtgaaaggctttcagggaacgtggctggaaacagtgggctgctaagccctcaatcttttgagcagctgccaagctccctgtgtttcaccctctcttgtgggcgacaagtaccaaatctgtatggcacacaagggtatgaaaatgagtttggggttcctggcctcagctgcttgaatttgtcaccctggtcaaatagcacaaattccctcctctcttgtgcattgtccttcttgatttcccacaagaacgtatttttcctaacctgacaggcaaatacataatttatttcatcactgaatttactgcgaaactaattgttttcccaatgtgtggaaccagtgtaaacaaaaccaagaagcatggtttgtggcttatttaaaatcctgctttctgtgtactattctaggaagctgtttgcttcggaatagtgatctggtatgtattagcaaccttgcaggaaaatgctgaagcaatttgccatcttcccttaaaagtaacatgactatagaccagaagagtgataggctttatgccacagatctaaaataatttcagacctcataaagtaaagccattctcaaagtcttattttagatgatcattttccctccttatgtgaaacagcaggtgaaaagatgccactctgtacttctgaatgtcagttttgatgagtgtccccaagtttgctagttagctataaaatccacaggcctatatagagaggagatatggattatgatataataatgaaattgcaagctttagaatatttagcctcttctgtgtaactgatcagttcttattgcatccatccactgcatattttcttcaagaagaaattacatcagtgatcaggcagtttcaggcctgtaaaaacttcattacataaaatgtttccattatatccattcatactttctcttagatgctgaccaacctactgtcttattttacaacctcaatctctcacctgctcctgccaaagttgcattgtttacgttccagaaagaggcaatgat

SEQ ID NO: 35144 - DNA, 1026 bp, Homo sapiens
cattggtaagagattgaactttagtgtcagatttgtctatttcttaagttgttaggcatcccaaagatagtatttgttaggcaaacttgcattaaaaattaagaaaagagagattaagtactaaactaagaaaaataattaggtttttaaaaagagtaatgtaacctgttgctctaagaatttcctttttaaaattcctattgcatctttcatttattcattgttctacaaccagctttggttgaatattacaggaaatgttttagttaagcaaagtttgtctttctacaatcttccactgtggtttttgagacccttcccttaatataccctgcttttattgtgcccagttgtattaattttctagggctgttgtaataaagtatcatacataaactgtggcttaaaacaatagaaatttattctctctcaattcttgagactcagaaatcaagatgttggcagggccatgctccctctgaagcctctagaggagggcccttccttgcctcttacagtttatgatagtaccgggcatttcttggcttgtggcagaagagctccaatctctgcctgtcttcacatggctgtcctccttttgtgtgtgtctgagtctcttttctttttataaggatgacagccatactggattaggacctactctaatccaggatgacatcatattaatttgattatatctacaaagaccatttccaaataaggtcatatacacaggtattgtgggttagaacttgagcatatctctttgaagaaacacaattcaacccataagcatttttaccatggcagcccactgagtttcttctttaactgcccccccttccttccttccgtctttccttccttccgtccttccttccttccttccttccttcctttttttccttccttccttcctatccatccattacataaaatgaacatctgctgtgtgcccgacattttcctaggcagtaggaacaccggatagagtgacacaaagttcctgatctcatgcacttatat

SEQ ID NO: 35145 - DNA, 1034 bp, Homo sapiens
ttgtagattctgaatgtaagtttttttgtcaggtgcacactttgcaaatattttactgaaaagagttctttgtggattatttttcaaagttgtcagatatacctactgaagtgataatttaattggaaagtctaaccctcatgagagctgagtgctctgtttcttaaagtgtggttccaagcccacctctatcataatcagcttgggaattaacattgcagattccctagggacttactctaggctgattaagtcagattttctgggagtatgactcaggtatttgtatgtatgcttgtatagatgtatgtatttatttattttgagatggagtttcactcttgttgcccaggctggcgtccaatggcgcaatctcggctcacagcaacctccgcctcccgggttcaagcgattctcctgcctcagcctcccgagtagctgggattacaggcacctgccaccacacccggctaatttttgtatttttagtagagatggggtttctccatgttggtccggctgatctctaactctcgacctcagttgatccacccacttcggactcccaaagtgctgagattacaggtgtgagccactgtgcccagccaggcatttgtatttttaaggtacactgcagcttgagaatcactcttctactgagttggtagaaacaagaatttctatcatattttagtgaagtaatttacattctttgactgaaatggatttgattttttttttaaactttaaggagtacagatgtagcccaagttaagtaaacataatacaatatagacaaactcccagatgagattttaagttaagatgactgatatttaaacatatatgcccgaacttagaaggataaataatcttgttcctttcaatgcagtcacttaaaggacctccaggtgtggtttctctccaaggccttaaagggttctacccatatattagtgggcaattccaatgacctttttttgatatttcctttcagagtttttcagaacctggttgatcaaacccccatacca

SEQ ID NO: 35146 - DNA, 1040 bp, Homo sapiens
ctagatggggaagatctgccctcaacattaatggataccatccaaatggcaggggtcctagagagaacaaaataaagaaggcaaattggtctctctgagagctgagacagacttttcttctgccgctggggacatcagaactccaggcctgctgccctttggactccaggacttataccagtggtgccccaggtcctgaggcttttggccttggcttgagagttacaccattgtcttccctggttctgaggcgttcaaatgtgaactgagccaccattaccagcatcccagaatctccagcttgtagatgacctgtcttgggacttctcagccaccataattgcatgaatcaattcccctaataaatcccctctcatatatctatataagtgccctattggttctgtctctggagaaccctgagtaacacagatttgctgtcaggaagctgaatatcatttttttcttatatattccttataacacagtggaagagatctgtaaaattgtccgcttgcagaaaggctgtgataagtgtatgaggctacttaatggtgaaagataaaaatttaaaagctaattaattgatgctgccaaagcagaaaatcgctaattgcaatggctgagcaataaccagactttcaaatggacagtttatagttacaaaatttgtagactataaccactttccaaatacaagtgcagcaagtgtttagaagattatagaaaagtggcaatgccagcaaaaattacaagataccttccctgccaagttattcagtcgtgtacgactactgctccttcacacatagtaacaattcattatgctatgtatttcatcttcacatcatttttaatactggaggtgtaaattgtgtaaataattttggagagttctaatttgttttatgcatttttttttgctgcgaatttgactccattaaactgcgttatcacaatgttgactctgtggataagaattgtatttgtatataaaaacattgaagcctcctcaaaaaacgaagaaatttcctttttgt

SEQ ID NO: 35147 - DNA, 1033 bp, Homo sapiens
ggatgtaattgcagaccaattgaatggatatattttgtgttgtaaaggagaatgcagcttacattaggaaattattattggctaacattcttgatcaagtctttcttggtagctacacaaatgcatttaatcgatgacacaattattaggataattcagtctaaaatctttctgttgaagacagtgactctatatgttataaaggtgaatcaaaatttcagccacaatttataggagtgttacttaacatcatcagtattttctcattcaatatctaaagtcatcttgtaatttttattgactgaaatagtaatacgaactatcttacttctttttcagtgtgtcatgttagaaaatcaattcgtatgatgaattctaagtatattgtgccaaagacttagagggaaaaattgtcagcatgaattatgatatgttctcctgttcatggtgtggctttattgacaaagtattgatttttgtacttaggatttaaaggtacatttttctcttcccatctgcttactctgcaaattggttgtattaagaactgggtgacttctgaaatcaacgacagtcatatttggatttttggtaacatctgggctaacccaagaaattgaaatgatgacttcagaattttttgacattatccagggccaaagaactatcgtatgttgagtaattgtatataactaagttctatgttagatattctttatagtttaagctgtttagttttcaaaacactaccattttgtgtaagtatttaatttccttcttctgcacataaaaaaacaaattcagcaagtttctgacttgcctaaaatcacatatttagtaacagagtgccgaggtttagaccaggtctgcctgaattgcaaggttgcgcatttccattcttccatgttgcctctcagcaataaagaaacatcttttccaataaaccttaataaacctgtttagaaaatcccatttagtttggatggtcaggatagaatttagagtagcttaaaaacataaagcaagcagagct

SEQ ID NO: 35148 - DNA, 1109 bp, Homo sapiens
cttctatggttttgaggctactggtatttaaggttgggaagaacgggatgggaataggctaagttaaaattccacaacttgctgttcttatagagattcaactgtttttcctgaataaaaattcatcagattgttgcaggcctttggttaatttccagagttctggaaaatatgattgtgaccatttttgctggtgttcttattgccagggagaagtgaattttgggaggtccttattctgccagtctggaagtgcttctttggtggctttatactgaggcaagtttttttgttatctaagatggctgccagcagcaactttgacatgtttcctgattcttaacatgcagggggaggggagagagaaagagagcaggattagcttttttcccccagaaacccttaacaaaccaaattgacatagacctactcttttctgaaactaatattaacaattgtcaacagagaagaaattgccatagttggcttactttaaacatttaggagtagagtagatgttggagagtctatcacactgctaacaggcttacttctggagaataatgttagaaaaggggaaggcacagtcttgaaggagaaaaacagttcagaaaaaagaagagtggagatgattgagaattcttgcccaagccttatctttaacgcttggcctttatttatgcaaagagacattttgatgtgggaagaatatttactttagttttaccatggaaaaaattaatttgttcacataggcttctacccattattttttctataatgtgataatgcagtaagattgaataaggctgcttcaagaaatagtgtggggcaatagattgaccattgagaacaagtttgtatggagtaaataggtaggaaagcagaatatttgaagctgaaagtattctgttgcacttctgttgctcaagttgtggaccttgttaacagtgcagtattatgtttggaagcagtagctatgatctgaagaccatgaaattgttgagtagatggaaaagggtgacagagttgtacctatcaagcagtattaagtatggtacattatgtactttggcctctggaagcctataattacccactgcagaaca

SEQ ID NO: 35149 - DNA, 1026 bp, Homo sapiens
tgatcatagtagagtcaattttttagaataattaaattggaatacaatttaattctaaaatatttataaaattttaagatttgttgaatgcctattcagatttttttaaatttatagataaagatatagatgtactaattatcataaacttgataggaaagttgatacagtaaaatatcaaatcacttttgagaaaacaagaattccttgagaattggtggagtactcactcatcaattagaataccatttactgtctttaccctgtttgactatccaaggtcagaatttcattgatatagatgaaaatgatgtagtctctagagcttacttttactttatttgtttactgctagaactagtagttttctagctctaccagcttactgtatagatttgtcatttgcattttatatctctgcttaattttatattaagatattggcacttacatgtaataccttgaggacaatttgaatattaatcattataatcgtcattgttttaaactcttgtatctgagcagccttaggaatttgaagtatctgctatgatagtatctattttcatgcttaagtcttttttcctactttaggtacccttattgctgttaatgttttcattttgtgtattgtttatgttttttaaattttttttttttttttttttgctttttaacaaaaaagcaactagaggttcctctactgaaaaactagttttcaggcctggcctctgcatatctctcctacccatgggcaagggcccctggtcttccatcagccggcctaaccctgatcctgatccctgggacaaatccctatcatgtggtgtgaacttgcctgtctttaatcattgagttgtttttttgctgctacctttggggtatagttgtattaactgaagctctgtcctattcctgttccatgattcttgacataggacttctgtctttttctttcagatttaatccttacgttgtgctgtagtttttgtaaacaatcatctgtttgtttttagctgataccct

SEQ ID NO: 35150 - DNA, 1057 bp, Homo sapiens
aagacaagactttgggaggggggctaaggtatagtaaaacaataatagttatttgtatgagtagagatgtttatttcctgtttaagttccaaaatcgttactccttccccattgtacccaatttttaaaaaaaatttgacccagtgttttccctgttacttttctatgtagctctctccaaattaaggactcagcttattatgagaatacttcttctcttgcttgctgttgaccaatacctattgagtaaaaagatacttcaaagaacttacaatatgatatctggcaaagaaaacatcgtcaaaatattgatgtagaaaatggaggcagctttgtataaggaactgggttaaactaaggacagttttttcacctgttctactttatacctggtacagctgcaccttgactcataaatgggaattctagctctccagtaaaaatttgagaaagagtttgcatcgcctgcatcgcctgtttgtcgtaaactaaatcaccattttcaagactcttccagcaaagcatgcaatgcatggatgatagggcaacctctggctacgttgcttatgtcttttcctttctgtttttctgttgttttgaaactggtgttgctttaatgggatgccggaggaaggtatagatgccagagataggtataaaaaatggaaatagtagctatctgcctgcacacacatcaaaggttgtttatgtgaatgtaaatacttagaaatataaacatgaatatatattacatgtttaaattgatgcttttggtaattctaattataatctttggaggtagccacaagtcttggtaagactgtgctgttgaagtgtaatgtggcatttctactgcagcaaaactagggtaatgccttgtgtaattgcaattaatcaaccttgcctttgggctttatatatcaaatcaaaataaagatgtaggaaaggaaaatgccattagtcacagtgacagaattgtagttcctgtctacagacttattcttccagtcaccatggcaatgaaatcccatttttctagtgattaagaagtaccaac

SEQ ID NO: 35151 - DNA, 1031 bp, Homo sapiens
ctaatttactgatgtagttcagtgccagtttgctccttctataggactgtataagactctgcatggcacttagcaatttcaggtacattaaaatgttcaattattagcatctagtttaataaacaattggggatatattttttacacgattaattttaaataaaaaatctcattactttttattggaagatttctacttagtaatgaggacaattactataatctttgcttttttaatcaattgagaatctggtaagaatgaagtatcttagtgagcctatggctatagtggattacaaagaaagtaacactatttgtggcatcggacctcttttcatcccttttgtctttagttcatataccctccttcccctttcccatcctcccttccccagttgatttttcatggggcatatattggggtatttctaaaatgcaaatgttatataatgcttaaatacctccattccttcaccattgctttttggatgaagccaaattgaccctaactttccttttctgtctcacttgacaccgtacttaatacccagccatggaggccttcactccctcagacctgctgtattcctgttgtgtgactttgtctcccctgcctggaatgttcagcactctcattctctgcctggtaaatgcctacccatacttcatgacatgctcaaatgtcagttcagatgataacgctccctgcaaatcttccaagcatggttggaagctctattaggccttgatccattgctctttatagtaataccactttgcatctcaattatttaatttctgggcctctctaactcccacagtgccttgtccatagtacatacttaacttccatttgatggaaaaactctgctttcaaagaactttatgaacagttgggaaatgaatacaaacaccagtgaacacatattacaaaggagattatttggctaatcttagctaatactctcataattccctctgttctatacccattacatgagggaattggattaaatgatttccagcatgta

SEQ ID NO: 35152 - DNA, 1188 bp, Homo sapiens
tacaaggagaaggctaagggggaataattaatgcaatattaataacaatattgttcctggagcaaagtaaatagtagttctattacatgatgcacaatttgaatcatgcatgcagtattttgttttgtttagaaagaagtggttacaaactagagcagttccaggcgggagcaatgaatatgaaagcatctaaaatttatcttgtaggaataacagcagaagagaatggaaacatttagcttgcaaaggacaagagctagaagtggttggtggtagtgatgttaaggaaagcgtggtggttgtcttccagtgtgtggtgggctatttctactacagggcagaacttgggtcccggagtggaaatgaacagggagcacatttctgttgaaaataagagaattttttcccatctaacaaggttgtttaaaaatggctttcttttcatgtggtgggctcgccatcattgagagaattcaagaattgcagtacagagcaattcctgcctagaccacactgactaactgaaactgattaccctgaaactactctatgactgacaccagccgctaaaaccctgaatgtttccttccctaacctcttctaccctgttggagatcctgctaaggcttcttcaaggtggtgctctcttctgctcagtaagttgaataaaacccagttttgtaagatttccccccaaagaattatactataaatagttattaagcacctactatggcaagtactgtgttagatgtgtaaaaaataagacaattttttttttttttttttgagacagagtcttgctctgtctcccaggctggagtgcagtggcgcgatctcggctcactgcaacctccgcctcctgggttcaagtgattctcctgcctcagcctcctgagtagctgggattacaggcacccatcaccatgcccggctaattttttgtagttttagtagagatgaggtttcaccatgttagccaggatggtcttgatctcctgacctcaggtgatccacccgcctcagcctcccaaagtgctgggattataggcataagccactgcgcctggccaagaaataagacaatctttatccttgagggtttatcatccagtaagaacatgtaatgataattaaatgttatcagttctatgacagcagtatatatggaggagaagagtgagcagg

SEQ ID NO: 35153 - DNA, 1045 bp, Homo sapiens
tatcctaccaggattgatttcaagttaacacagtaatgttaggaagtgatatttgagtgtttattagctttgcttttagagtaatttttaaatagtaagtttataaaatttgttttaataatcactgtgtttaacaatgggcttgcaaaatcctgaaagctgaaccatcagctctctcgagtcagcattcagcttctcacaaccactggcactgataatcccttttttagattgtgtgaattgcattattcgtcataatgttgtctccaagggacaacgctgccttggctagtattttagaatctcagtgttggagagagtgtgtttgaaagttatctagacatacattacatttgatacttgaattcccttggtgacattctggctataatagttggtgacataagtcattgaatttatgattatcatttgaaatagagctttcaattttggacaatttgttagaaaacttcacctttttgttaggttgaaattcttctctttatatagcatggatcatttgattctgtataccattcttgctctacatcataaaaaacaagttgagtacctctgtactatgataactcttcaagtatttaaaatgacctattatatttcctatcgatggctttatttttagaataaattcccttaattcattcagaggttcaagctcatctatttctttcttaaatttgtgcaactgattctcaatgaagctccagatgtggcctgacaggtgtatgcaagaatgggagagaaaaaaaacttccctagttctagaaactatactgctaactaagcagactaaaattataataactttcttgctggtctcgtaattctattggctgatactgaatttagcactgatgaaaatcctgaagtttttttttttatacatgctgttaagtcctgtcttcctcactctttattgtataggttttttttttttttcctgggtggggcatggggggacaaattcaagactacctatatatttttattaaatacttacctgtgtttataaaacctaaatccg

SEQ ID NO: 35154 - DNA, 1038 bp, Homo sapiens
taagataatatatgatatgatcataagatgaaagtgatttccacaaaccacattcaaaaaccaatgcttttactttaaagtcatgccagaaatgctggccggttctagggctcctaagtgaactttggaacactaaaaatcattttttactgaaagaattagggcacaaggtcagagcagatgatgttcaaatggaaaaatgcttcttaaataactgcttttctcaggatggttatcaacttgattgggaatcaagtgggttaagtgggtcaaggatccagtgacttttgtgggcagatcctgacacatgctaactggtaagtggtctcatggtataattctgttctactaccagtgtcacttacgggctctccaaacccccatagatatacttacagtctcttcccagataagcggtctcatggtacagctgtattactaatctcacttgtgaactccttggcaggggctctggtttgtatctatgtatctctagggctcatcgtagagctctctatagaaagttctctgtaaaacagcaagatgtttatgatgaagatctgaaaatgtgggttgaggcttttaatatggtgcatctctttccatgcattactattctcatccccatgccttttaaacattttctctgagaactttgtgagccataacatattaaaactaatacaaatctcggagattaattagtacagggattttataacatttctttaaaaggctgaaccttttttaaaaatgaaattatatgagaaaccccataatatgaaattggaagcaatgttagctacactgattgacctcagagactagagcaggcagaagccaatagcctccatgctttctttctgctgcccacctctctccccgatgctggcccctgaggcatctccaaagaaccttaggactccataggacactattagaaaattaatgcaagtccaagccccagaggacttacacttgtcaacacagaagtgatctttgaaatactgtactgtaagcatgactagatgatggtag

SEQ ID NO: 35155 - DNA, 1052 bp, Homo sapiens
gtggatggggcctttattgtagaagatgccacactttgcactgtccagtgtagaagccactggccaattcatttaaattgacaataaaatcgagttcctcagttgcattagctgcatttaaatgctcagtagacacatgtggccagtggctaccttatgagacagtgcaaatacggaacaattccaccatcacagacacttccatgacatagcactgctctagagagtagagaggaattcagtggaaggctgtccagggagtagggagtccagttgagaatggagagcagagggctccccttacagggttggaaatgcagatgtgtcatgcaggagatccaaggtccaagtctttgcccttgcccttcccttcctccacccaaacttctacctcttccaggcttacaccactgctaatccagcattaaccacaaactatatttcagttttcctgtaggacttaattctttttcagaaaatgtgcaaaaacattttctgcataacaaagcaacttcatatttcaactccgtaatcacagaactgttactctaggcatattttgcagtgaatgcatttgtgtaatattttctccatttctgtttataagattgttattttgcaggtcaagttgggggtgagaaagcatagagctgttatagtttgtttattagtaagcagtttcccttcatttccttttcttcacatactttggcttttaaactaaccaaaacagaagggtcttaagagtttgggagtcagaagggggatgggagttcctactatattttactgccataagtaaaaaataattaacaaaaatcaactttttttaataggtggggaagaaaacatgacagaaacagatgccttctataaaaggtaaagctgtgctcttttctaataaaggtctcttcctttgatggtcatgatcagcctacagaaatcaaagcaagaatgggtcctgggagctaggaagtaaaactgagtaggccaagttttagcctttggggagctcatttgtagataggcaggttgtgctgcccctggttgtc

SEQ ID NO: 35156 - DNA, 1001 bp, Homo sapiens
aaaaaatttgagttgtaggaaagttttctgtgatatttcacataaagtaaattttatttggaaggagaggccacaaacactttgagtatccaaaaatcatacttacctagcccctggagaatctttaatggacttagcctcatctttctttttttaaaacttatgttttgtgttttggacaaatggaaattttgttactgacaggtaactgtgagtgttctaacgctgcagaatagggagcagtgaggcatagctgagagagtaacatgggtgggtatgggtaagtgtaatggggagatttataacacagaaaatatttgtaggcagaaatggattttggaactatctatacagcagtcattatcatttatacctatttagtctatttgaatgcagtacttcagaggagttttgcatttcattgacagtaatccatccaaatgccttttgcagcttaacattggtatcccttccctgacaaagtgttgcaaccaacacgacaggtgctatgagacctgtggcaaaagcaagaatgactgtgatgaagaattccagtattgcctctccaagatctgccgagatgtacagaaaacactaggactaactcagcatgttcagggtaaggatgatctggtggcttggggatgagtgtactttttaaagttgtatcaaatgctctatgttttagtataggatttaccaatagaaatctttcacatatattatctattgtgacacagacttcaattttctgaggtgaggagctgatgattttataatctaaaatgatttatagtcacagaagcaaaaagcattaggaaaccttgggagagtaggggtgtctaaggctgagagagagaagaattcatctaccttgtgccctaaaatatatctccagtcatcatgtaagaacctaaagtagctaaagtttgaaactctgattccagttgtcttagtccatctggactgctaccatagactgggtgacttatagacaacag

SEQ ID NO: 35157 - DNA, 1046 bp, Homo sapiens
accacgtgggcatggaggccccgcccccgtttcccgccccgcgcgcccctcccccggttccccgccccccccaaccccgcccccgccccgccccacccctgcgcgtcccgcccctcccgtgcgccgctgacgcgccgtgctccggcgcaggcgcacaggggacggttgctggcccaggtgagcgggcgcgctggtccaggtgagcgggcgcgtccccgcgacggcgctgcctgcccgaggcggttcacgtaaagacagcgagatcctgagggccagccgggaaggaggcgtggatatggagctggctgctgccaagtccggggcccgcgccgctgcctagcgcgtcctggggactctgtggggacgcgccccgcgccgcggctcggggacccgtagagcccggcgctgcgcgcatggccctgctctcgcgccccgcgctcaccctcctgctcctcctcatggccgctgttgtcaggtgccaggagcaggcccagaccaccgactggagagccaccctgaagaccatccggaacggcgttcataagatagacacgtacctgaacgccgccttggacctcctgggaggcgaggacggtctctgccagtataaatgcagtgacggtgagggggcacccgggcccagcgagggctcgtgctttcgggggattggggtgacggagatcctggaggtgtgagtgacagatgcaaggcagaccttgacggtgtccttcggctgtggaaaaacttaaccactgctagaatcttgccgttctagtgattgagcaagctgggtacaagttcgcaccactattgttagaatgtgagaggtcacattctaacggagaggtgtaccccccgtcccatttgcattgcttctgaattaccttttccccccctcaattgcaccaagttgccgaagaacttactgacgtaggaatcatgggaatagagtggaacagactggttttagctcatttttgcttctgtaaattggatgaacatgcgaagcaaactgagaatttaaaaaccatgccgtattaactttc

SEQ ID NO: 35158 - DNA, 1032 bp, Homo sapiens
ttctgattgactttgacctctgctttccaactttgccccaaagaaagttagtcacgactttgccccaaagaaagtaagtcacgatgatgaacttcttaggcggaagcagccataaagtggaagatcactaaaggcaaccagctagttacttaagtttccactcagctgggctagatttaatccaggctcagagtcagagaatcacggaattctaatgctggaaggaactaaaatttccttttttaactacaaagtctgatttaaagctttctaagtttctaatttaaagttttccaggtttctaaggaaaccaaagaaactagttttattatatttcttgacctatttgatatcagattataaaatttctgaaggtaccatttttcctgccaagctttgatatatgtttggtagtattaccatggcacccttggccttctaaccaacaaggaagaaagagagtaattctgcatttatatgagtgtcacagctctttaacagacaatcccagaagacatctagatattcctgtgataaaactttctttttgggcctctatttctccacttccacctttctcactcttcccctacttctgtgttataggatatgggtggacatagtatggttattgattagatgctaattttgttagttttgcctgaaacagcagctttacaaattaacatttgaggacctgaaacacaaaggtgataggaaactcagaaaaccatggctcaccttgcaccagttatttagaatgtaaaataatgttcactgtgatcattgggtgcagctggtataatcaggggcagctggcagatcctacagactattctgagtaaataaagaaaatcttcatagccaatgggaacactacatctcaagttgttagtttgtaaggaagtgctgattgctcctaatataggtgattgtatctgtcagtcaagtgaacatgtaatcggtcctagctttggttacaggaggacatattttctttattactacttacacatttcgagttttaaataa

SEQ ID NO: 35159 - DNA, 1028 bp, Homo sapiens
ttaagcctagtacccaaaagtgatcttttctgctcctctccctcctcccaacctcctccatcaagtagacctcattgttgtttctttgtattcataagttcttatcatttagctcccaaggtaatgctattttatcttatttcttgccagagcatctagcagtaggaccaatcagttgatcgaggaatttattattattattattattattattattattattttcctttacctgatttctagttctgcaaaaggccacctttactttgccctgttattaaacagtccatgtcacttgacctgatcaaggaattttttacagttgaggaaattttggcaaaatgcagccataggctgagtgacatggactgtttaataacagggcaaagtaaaggtggccttttgcagaactagaatatcaggtaaaggaaaccattcttatcaggtctaatacaattttagatgatagtctgaatctttcagaatgtatgagacctggatgttctaggatgagaatggctggttgtgggtatcactagtgacataaacagaacttggaacagttattgccatcctgggactagcactcagagaacacattggtctgctgggatcacatctcacctgcttcccattactgcctacttctgtgccttgacagcctgagttcatatttctctctgtttgttctcatgcttgactaagtcacacccaataatttgttctgtctgggcggagaagcaggtcataggtgctatttgaatacacagataggcagatcaagtcagtggatgaaatagtacactattatggcaataaatggcatgctttttgtctttattacacaaacctgtgggtttacttagcacaagacaaatgggaaggtgtcactggaacataagcatatgagaatccacataggcatatgcagtgtgtctctccttttgcattctttgttgtgcttaggacttgaagacaagaaggtttgggaggtccagggagtattgttggttttcctttttcccctg

SEQ ID NO: 35160 - DNA, 1060 bp, Homo sapiens
caggcatgagccactgtgactggccgatacttatgtcttgattgtatatgagcccaacagtgatttgatttttttttttagttttttaaattataaattatatttatagtataaacaaattataacatacatggaatttacacattcttagattatttggtccgtaaaattagattaagaagaagcgaaaggaatgattagttaatacataggatactaacaagtatcctatgagttaattgcactctataagaataattaggttgttcatttagtgcattatattcttgggatggttttaggtgcatctaaatctaaatatgccaactttgaagcaaaagtaaaaatgtaggtaaaggtcatgttatatagtgtgacaatttcttgtgctttacatgtattctatagttgtagaatttccatctgtgactaataggtcttatagcagaaaagcaaattcattttagtgaacgtgtgttgacattataggaatgtcaacctagcacatcaggaattctaaggtcaatagaaaacttggtaagtctagtctgattcagtagggccacaggcaaaaagagataccatttgacctttttaaaaaatgtatgttcaaaagtaaaagcattcattattatgagaatatatatttaaaatgcctgaaggccaggcgcagtggctcacacctgtaatttcagcacttggggaggccaaggcaggcagatcacttgaggccgggggttcaagaccagcctggccaacatggtgaaaccccatctctactgaaaatacaaaaatcagccgggcatatggtgggatgggcctgtaatctcaggtactcaggaggctgaggcaggagaatctcttgagttgcggaggtggaggttgcagtgagccgagattacgccactgcagtccagcctgaacaacagagtaagactctgtctcaaaaaaaaaaaaaaaaagactgtctttctttacatcctgatattttaaaatctttttctttctttttaaaaaaagtttttaaatttctaatttttgtgggttaatcttttttaaa

SEQ ID NO: 35161 - DNA, 1030 bp, Homo sapiens
gccgtgaggccaggagaattgcttgattccaggagtttgagaccaacctgggcaacatggtgagaactcatcttgctttattaaaaaaataaaaataaaaagagaaaataataattagccaggtttgatagctgcttgtagtctcaactatttgggaggctgaagcaggaggattgcttgagcccggagtttgaggcagcagttaaccatgattgtactactccactccagtagcctgggcaacaaaatgagaccctgttcctataaatacatacatacatatataagtaaataaataaagctttcttaatgatttggcttattctttttaaatccagcaaatgttaattctaaactttagttctgctgttagagtgagacgagattagcacattatatctgctatctgggcttagattgtgggtgttatttcacacagataattcaggcaaacccgagatttttagggggtgaacttgcattatatggatacaataagcacactcacaatagaaaactatgtggcatatactaaaagaaaaaactctaccgtgtttttgagaattataccatggataagtaacagaaggctcatcctcagagacctaagagtttgtcttctgactaaacattttatggctgatatttcttccccacagagcattcagtgtccagagactcctttttccccagcaatgctggagggatgaggaatagggagtgtgaagctgatgacatgttctaccttttcatgatggagtacagaaaataactaaaattaggtgctaatggttgtccttcttcaggattaaattttactcagtggaaagaatataggttcttttatgtttatagtttatcatatctagatgtgctataatagatttaaactgttttctctaggtagttacaacataacagctccgtatgtcttgtttatatgcaatatctaggacatttggaatgaagtagttttccaaagcattatataaattaagttttcattgaccttaggccagaccatcaatag

SEQ ID NO: 35162 - DNA, 1035 bp, Homo sapiens
agggggacggaggttttgaaatacttagggggatatacaataaccatctaatcaattttctttttcttttcttttttttgagcctggtcttggctcactgcaacctctgcttcctgggttcaagcctcagcctcctgagtaggtgggattacaggtgcccggccccccatctaatcagtctttagacaacaaagtaaaatgagtgtggcaccattctggcaattcaggaatttatcttggcttaagtgatctgaaatatttcaggtccaagtattttattttctgaaatgagttaaccaaacattgtcttaatgattaacttaatttttcacatatggacacaggtgagccaaactgtcctttattaataggaaccagacatcattctacaaagtttgcctcagccctccctttactctttatgtagctcacatccacccgctcccatttacttctcatttatcttttttaggagggtttagggaaagttacctgtaccacatatgtcatttctgttgataaccctaggtaatctgagtgaaactatgacttggctatattgtaatgttaaaactcataacttcattcctttatccagattctgattgtacatgtattcaggcaggtacaaatgttggcatagttattgaggtttctgagaactttaaaaaaacccagcatctctaattatatttaccctccaataatttattttagagatacatgggtccttttttaaaaagtattgtatgggtcgggtatggtggctcacacctgtaatcccagcactttgggaggccgaggcaggcggatcacttgatgtcaggagttcgagaccagcctggtcaaagtggcgaaaccctgtctctacaaaaaatacaaaaattagctggtcatggtggtacgcacctgtagtcccagctactctggatgctgagacacaagaatggcatgaacctggaggcggaggttgcagtgagctgagattatgccactgcaatgcagcttgggcaacagagcaaaactgtgtctcaa

SEQ ID NO: 35163 - DNA, 1047 bp, Homo sapiens
ttcagtagctttctcctaaatatgaacaactagatcttacatttcccaggggaaacaagcaaggtttagttttccctcatatcctccctattattgctaacagtagacactctccattcttcaaccaggaagtcactttcctaaaagtcttcacagttcttggttgcccaccaggatttaataacatgatctcacagcttttctaaagatgtgatgagtcaaaatagaatgaaattttatcttgtagctcagcagctacagagaaacaaattggcatggcaaccaaaatttaatgacggcctttagggacatcatataatgatttagccttggttgagcttcgtagcctctcaaaactggtccacttatgtacaaagttggaatttggtcatgtcttcttgatgatgcaacaacttagctagttagatgagaaacatcccccttccagttaaagaaatcagggccaccacatgggtattgcattcagatactttctctcaaattagttgaatagtagacgtcaaatgtgcagaataaaataggtaacgtttgttaaatgcttaacacatgccacacttagttccaagtgccttacatgaattaggtattttaattcttacagaacactaatagtaagatccaattatccccattatatagatggggcatctggaggaaaggaaagccctgtagatctctgaaggccatacagctagttagtgacagagcaaggactcacatctaaagagcttggctttagagtctgctctaaaccacagcactgtcctgggtgctgaataaaagaagcgacttatagtatgctcagagaagagctctcagactgccaggtctggagtcatggagccatgttactggagagtaaacagtggctggcattttaaaaaaagaatatattggagtgaacaagccccagaaggtatctaccaaaaataattgcactagaaatgaacactgatcaactttgtaagtagagaactggtttatggtcctcatattaaaaaccagctttttggtgttctcacatgg

SEQ ID NO: 35164 - DNA, 1057 bp, Homo sapiens
ggttccttctcagaaggctgaggtgagcagatcacctgagtcaggagttcaagaccagcgtggccaatatggcaaaaccctgtctctactaaaaatccgaaaaaaaaaaaaaattagttgggcatggtggtgcgtgcctgtagtcccacctactcgggatgctgaggcaggagaatcacttgaacctgggagatggtggttgcagtaagctgagattgcaccactgcactccagcctgggcaacagagtgagactccatctcaaaaaaaaaaattgatgtgtcagaaattgaactgatcttccccttctaactacttttcttgggaaagtatacatagtgccacaactgttctccatatcacaaagtccagaatctcggaaccatctttgattcaatcttcttgcttatcatctatttttaatcaattgccaagtcctattggtttcctttccaaatatcactcttagacattctttcgtagtttggtctctcatttgcaccattgtaatgactttcttacagacctccccatgtataatttctgaccccttcaatccatctttcacattgtcacagaagaaaacattgtaccagtgtactgtacagcagagaatctactagctgtatgtcactatttaaatttaaataaactataattaaatacaataaaaaattttgttcctcagttacactagccacattttaagtactcctgtggctaattagcgactatattggacagtgcaaatataggacattgctatctttccagaaagttctattctgtttagaatataggcagataatagtgcctttactgttttaataatttgttatctttctctctagcttgtatcagaaagtgcaagtttcttgatgtggaatttaaagcccaaattatttttctagcattgacttcttttttttgagacaaagtctttctctgtcacccaggctggagtgcaactgggcaaactcagctcactgcaacctctgcttcctgggtccaagtgactctcctgactcagcttcctgagtagctgggactacagatgc

SEQ ID NO: 35165 - DNA, 1031 bp, Homo sapiens
aatcacctcctaaagactgtacctcctaatcacctcctacaggctgtattatcacactgggggttaatttccaacataggaattttaagggacacccacatgcataccagagcaatgggcaaactacaatatacttttagaagaggatttaagagatacaatcaatgaacatatccattcatttacaaatatttgtcaaacaccaaatatattccaggatctgtgtaatacactgagggtaaaatgctgttctaaaagaatatgatgcctgctctctgaaaccttaaagagtaatggaaagaaaagttaataaatgaatcatgttaatgtatgtataattaaaattagaacaattctctgaagagagggaatacagttcattgcaagtgtttgacaatggaagttgatcaggcttgggcagtcaggataatttccccaaggtttgatacgtgtcctaatatccaaaagaagagttggatttaactaggtgaagagaggtagcatgagggcaaggtagggaaaataagatgtgaaatgtaagccctgtgtgtgttagagaaaccggtcaggtattgtgggatcagaaggtgtcttttcttgcattgttttaagtgaaccaagttgagcgtgcttataatgtgaaaaatggacccagtaaggggaagaggttgaacacacaggaaaggggaagagaaatagttggggaagctctcgaaggagagggaagggaaagttgtgggatgcctgagatgatgagtaaagtagataattaatggggaagagacatacctcttactctgagcatggatgacaaaaagatggttgagacttcactaagtattcagtggtatctaaggcaagaccatctgctgagaaggaggagattagggttagattgggagcttgcagtgaacggtaagtgaatacataagaaagaaggacaaagaaattgagaaattgtttattagggcctatgaaatcaaacacatgctctagagaattgaacttgttagagagaaatgatatgccaa

SEQ ID NO: 35166 - DNA, 1066 bp, Homo sapiens
ctcctgacgtcaggtgatctgcccacctcagcctcccaaagtgctgggattacaggcatgagccaccacgcctgggtcctttttaaacaggaacacattgaaatctttaaaagaacttcccattcaacaatattcctcttgtttagaacataagaagttagtataaatgttatggtgtagaaagtggcaaagagattgataatatactattgataatatacgatgctactattttttgctaagggattagctctatcttatacatagctattatttccctttttctaatttatagcatattgtaacagaaaactaaaactcaattaatagaaaatgttgatttttgcagaaccattctttccattctttctagcccacctgcatagctgactagattaaacactcttttacaccaggcactttagaaaataaaaagtaatggtggtgcaggggaagaaatggaaatggtttagtctctgtttccatgctgcccccattctcttggtttaggacggagattcccacctgggcaagaagatggagaggctttctttcactctgggtggaccttactccacagtggatatggtattaatagttttgtctctggttttaatctttaccatcctggattgggtcacagaatgtcatcccaaagagtaatgtcagctgcagcaggcctggtttatatctaggagtcagattttagtgctcttgccccagcccctgtccattagagcacagtcttcactctttcctttttcccaagacttttacaacagaaatggggtgagaagcagctctcacttttttatttccttcaaacacccagtaagggagtgggagatcgatgagctcatctactttatctttcttaaagagaataataaaacattcttctgattgggtggtgttgaccattgaggagttgtctttggctccatcatatattttgagtgaaaacatactatctgaaccctgaatattaatatggtctttatatttattttcagtaagaaaaagataacaatatttgacattaaaaaaaaaaatccccaaagcccag

SEQ ID NO: 35167 - DNA, 1031 bp, Homo sapiens
caagaccagcttggccaacatggggaaaccccgtctctacaaaaatacaaaaattagccatgcatgatggtgggtgcctgtaatcccagctactcgggaggctgaggcagaagaatcacttgaaaccaggaggtggaggttgcagtgagccgagatcatgccattgcaatccagcctgggcgacagggtgactccatctcaaaaaaaaaaaaaacaaaacaaaaaaccataatgttaggagtcaaacttactagataagtctaaggttgacgtcttttatattttctaatttttctaaattaatatgaacatatttttagtaatttaaaaaatatttttatttatagtctattctatcatggttgtaattcatctcctaagaccataatatagcgatatttttaattttaaaaatataattttctttccctagaagaacaaaaaaattatgttttatttttcttcatttaaatttcttagggtcacaagccaattctattgagaactcaataccgttgtcatcctgcaatcagtgctattgctaatgatctgttttacaaaggagccctcatgaatggtgtaacagaaatagagcggagccctttattggaatggctaccaaccctgtgtttttataatgttaaaggactagaacaggtaaatgacattaatgttgatgagagtcaacatggtttaggttcctggtttaattttgttgttgtttgtatgattttacttggtttttccatagcctttctgggaaatataatttaggatctatttcttactccagatagaaagagataacagctttcataatgtggcagaagctacgtttacactcaagctgattcaatcactgattgcaagtggaatagcaggctctatgattggtgtgataacattatacaaatcccagatgtacaaggttggtattatgtattacagtatttgccatatattaaatattacaattacatattaccatatttgatattacatttatagtagttggtttggtgcctgaaaaa

SEQ ID NO: 35168 - DNA, 1025 bp, Homo sapiens
agccaccgcgcccggaagacctgactcatttctaaagtggcatgtcttcacaataaaactaatttttaaaaatgcttcatagttaattaatacttgctaggtcagtaacaaaatcttttctgctgttagaatctcagcaacataataataaataaaaagataacataattttttaaagaaaacttaatactttaggtttttgtattagatatttctttaaatttaaaaaatgcttcttgacacataactttagagttctcattctaagattgttttgtagatatagttgccagaaattaaataaaatgaataatatttcagagtggcaccaaagcttgatcatttttaaagaactcaatatttaaatactgtggaatttctgatataaatgtggctttaagatttttgtttttgtttttaacaaaagaagaaaacctaactgatacagggctattgtgtgtggtgaatattatttattattaaaataaggcagttgtaatgttttcttattttgtaggatctgtggaggcagtatttaatttgtaaagcatattttttgttagtttgttgaaaaaaggtatggtcagttggtatgaactgcccttgctatcaagaagtgtaattttatagatcttcagattgttagaagagaataagtacagtcatatatcattctgagaaatgtattgttttacaattttgtcattgtgtgaacgtcatagtgtacttacacaaacctagatggtatagcctactacacactaggctacatagtatagcctattgctcctcagctacaaatctatacagcatgtactgaatactgtaggcatttaattgtaacatggtggtatttctgtatctaaacagaaaatgtactgtgaaaatatggtataaaatatttaaaatggtacacctgtatagggagggagggaaggagaaattggaaataataaccacaaagttttggttgtagaagtcctcagaaaactatatatactatagctttttaatagttaacttta

SEQ ID NO: 35169 - DNA, 1027 bp, Homo sapiens
gtcttgaagtttagatcaactatggacttgaggacataagagaaaactgttcagtccttgagtttgcagggatttagaccttcacagctgtaaacatgaggtctaatttggcctgagccccttagaatggcagttgatcttcaggaccaaagcctaataacccagaccagtccaaatcaaaatctgacccacttcaagtaaatctgaaagattttatgctctgtattttactgttattcttgttgattttagtaagtttattctgtcctttttggaagaagttttatagttgttgcccccaccatagctctacataatgtgctttaaatcattatttttataatatagattactagaattcattcaaactaaagaaaaaaatcagaagattttggtctgtagttttgattcttctttctgtataggtgacatcaccagaagaaaacatctctacattgagccctgtttctaccttttctttgaactcaagagatgaagacttcatggtagaattctctgagacgtccctgaaagcaagaactttacctgatgatcttcattttctcaacttggagggtagtcgttaccacattgctctaatatctgtctattcatttaagatgaagttttttatttgagagattattacactaaatatatcttagaaccagattcagtgtcatatcccttgaagcctttccataacctttcttcctttgaactttttctatcatagatagctattccaggtacaatattcccttctagctatctagttccttcttgtttctcctcccaactttgtcaacacagacccctgaaagtatcttctaccattgtcagttcttctcacagctgtaactccagcatctgacccctttacagccctttcctgttccagaggaatgactcattgcaagtgtctcatcaacaccattggttgaccttagcataaccttttagtgtctctttttgctttgggatcctgaactcttcaactgctgctaccacccttgcattcctagga

SEQ ID NO: 35170 - DNA, 1047 bp, Homo sapiens
ctcctgacctcaaatgatccactcacctcagcctccaaaagtgctgggattacaggagtgaaccactgtgcccacttctttgtaatttaaatttagcagtgccttctctctctagaattattattactattactattattattattattagagacaaggtctcactctcttccttaggctggagtgcagtggcacaattataactcactgtagcctcaaactcctgggcccaagccaacctcctgcctcagcctcctgggtagctgggattacagatgcacaccaccacacctggctaatttttaaaaactttttctagagatggggtcttcctatgttttctgggtctcaaactcctgccctcaagtgttcctgctgcctcagcctcccaaagtgctgggattataggtgtgagcacagtgcctgaccctccctctagaattttttttttttttttttttagatggagtttggctctgtcacccaggctggagtgcagtggtgtgatctcggctcactgcaacctccgcctcttgggttcaagtgattattctgcctcagcctcccaagaagctgggactacaggcgtgcaccaccacacctggctaatttttgtatttttaatggagacagggtttcactatgttgaccagaatggcctcaaacttctgaccttaagtgatccgcctgtctcagcctcccaaagtgctaggattacaggcatgaactgctgtgcccggcacagaaacttttaatgactttaaaaaaattcctggccatgcacagtggcctcccaaagtgctagataatcccagcacttggggaggtcgaggtgggcagatcacctgagctcaggagttcgagaccatcctgggcaacggggcaaaaccctgtctctacacaaaattaaaaattagccaggcgtggtggcatgtgcctgtaatcccagctacttgggaggctaaggcaggagaatcccttgagcctgggaggtagaggttgcaatgagctgagattgtgccagtgccctccagcttgggcaacaga

SEQ ID NO: 35171 - DNA, 1061 bp, Homo sapiens
aagtcttgcgattacgggtgtgagctaccacgcctagctctaatatgtgttgttgaataaacaaatcagagaaattttaaaattatattattgtccttttttgtgcttattgatagttaatgagtacataataataaataattgaagactttagttactgatttattcgttcaacacctatttattgaacacccattgtgtcttagtgctagtgagcatcctggaatacatagataatcaaataattagatgtatgtgattttgacatttattctttcaggtgaaacctggagatgacttagaaagtgatcgatacttaatcacagttgaagaggttaaagttgctggagccataggtattgttaagcagaatgtcaataaagaagcaccagagttaaattcaaggacatttatatcctctggccgatctcttggatgtcagccctctggcttaaaaaggaagtttactgtaagttttgctatggaaaataatatatcaaaatatatttataaaattgtctcgaaaagtagtgaattttgaagttattgtactctgtcattcaaagggcacttcatagtatacttaggtagaaaggaagtaaaccctactttgaaaaatcttattacaaatgaatgtactttgacaaactttaaatctgaattattactttaccttaggcaaaccagaaacaatccttctcctttttttttcttagccagttcatttcacattttcttaatgggtaatggtacacctaacagttattttaatattttcagggttttcaaggaccacgtcaggttccaaagaaaatggttattatggaaagtggtgaatcagctgcatcacatgaggctaagaaaactggccctactattttttctccattctgcagcatgcctcctttgtttcctactgttggcaagaaagatgtaaataatatactggcagaccctgagaacattgtgacttacaagaacagggagagaaatgccatggatttttcttcggttttttctccatccttccagattaacccagaagtgctgtgtgaagaaaa

SEQ ID NO: 35172 - DNA, 1107 bp, Homo sapiens
cattttccaatatccaacccacttcccatgtatagttccaaaaatataacctctccccaagcctgtcttgtcttctgactttcggtgtgttgaggttagataattgttttaatgcccttcatttctgatttattttcctctgagcaacaacaacaaatagaggactaaaaacatgctatttctttgttttatatgcaaatacttttctgagtccctaatgtacacatctcccaagatgtacatatggctcccaggattcaccacatctcccttttctgccccagctgttactgggagtggagggtgtgccaagcctccctggcagcctaatgcaggacctcagttcctgctgcctgtcctttttcagtagtacctgacagttattcttggttgaagtctctctcatgtttaatattatcttttacattatctttttaccctccaatcctagatgaatttaatacctccaaacttgtcattctgtttataatattttaactttttaataagcttgtacccattaactgcaaactgaacgaaggtagggcctagattaggtctgtaaattagagattcagatgatctctgtatcctggaaaagagtacaattaacacagaaagaatatattgtaacaggagttaagggttgaacaggaagtagtggggctatcacagagatgggcaaagcaaatactagagatacataaattaagtaggaagtcctgaccctggaggagctaaggcttttgtatctataactatttaccattcagggtggaagtatcttaacataggaatgtatgaggtgctgtgggaacacaagacaggaagtacaaaaacctgcctctggagagaggttcaataattgccttaacacttatggttgcctaaaggatgaatgggactttgctcactgtcatgcaagaagattaaggcattccagacagagggatctgcacatggaaaggctcagaggcatgaaactattttttctattacagtaaaacaagaagtttgataaagctaaagtatactcgagtgagtagtagttaatgaggcaggaaatgattttatgtttttttgaaggatttggatttcaccttagag

SEQ ID NO: 35173 - DNA, 1081 bp, Homo sapiens
cctctaatatgcacatacacgtgtgtgcacgcatgtatgtacgcatatgcatatctctattaattgctatgttacgttaaattaggggaaaatgcttctgatatgacatggtgcccataatttcatgtaaaatgacaaatacaattaacttaattatttacatatagcacgtgatcccacttttgtgggaaaagcatctatttttatgtgtgtgttttcaaggggaaaaatacatgtttaaggatgcacacatgcaaaaatagcaaaaggatacatggaaactcatactcaatagctatgatgtgtatcatctccttttgttcagaaagtgtttctaaactgtgccaaaattttgtcagatatcattaatatttgaaaaattgaaatgaaaaccattttctgcgaaagatattgcctactatatttatggcatacagaaaattgtgacctcatgtgtctaatgatagacaaataaaaaagataaaaatgtttagtgtagtatagatttgacttacgaacactgtctcatgttttaaaaagttttgattttttttaaatcatctaagaaaaacagctatatgaacacatttgcaaatctattgatgcttatttttttttgcttctttttaaaagtgattatgttttttatcttcccagagttactggaggtgaactgtttgaagacatagtggcaagagaatactacagtgaagctgatgccaggtaagtgacttgccctgggcaagatacaagactcaacattcaaataatactttttcagcatatttctttacaaatgcatgtttgtacaaacaaatgttttaaggatctccgggatgattcttagagaaaaaaaactccatgaatctggtctatatttttatctagcatctgtagttagattacatattttatcaaaaacaacaaggaaaaacaaaccaaaacaccccacctaattggaatgacttctgctaaagcaatatattttttagtgaaagtcagagatcaaagattgaaatcctctaatccctagatagattctaggttgcccagtggtagccagtagtcacatgtggctatt

SEQ ID NO: 35174 - DNA, 1086 bp, Homo sapiens
gaagaaatggttgatgattttttaaaaactttcatgtcatgttcgttcccaaaaggagagcatcagtactaaaatgctcaggaaaatcaaaacataattgtagcttctgaataagttaatttttaaaagattacctcaaacaacaaacaacccagctcttgatataaaatctggtgacttagagattgtatgtgtgtgtatgtgcatgtatgtgtgtacacacaaaacacatgttttgttgtttggagtttttctttccatttttattttaggtttgggggtacatttgaaggtttgttacatagataaacacgtgtcactgggattcgttgtacacgctattacatcactaatgtattaagtccagtcctcaatagttatttttcttctccgcttcctcctcccaccctccttcctcaagtagaccccagtatctgttgtttccttctttgtgttcataagttcatatcttttagctctcacttataagtgagaatatgtggtgttgagttttctgttcctgtgttagtttgctaaggatggtaacctccagccccatccatgttcccacaaaagacatgatcttgtccttttttatggctgcataatatttcgtggtgtatatgtaccacattttctttatccagtctgtcattgatgggcatttaggttgattccatgtatttgcttttgctgggtcgaatggtagttctgcttttagctctttgagaaaacaccatactgctttccacaatgattgaactaatttacactgccaccaacaacgcataagggtttctctttctccccaatctccccagcatctgttattttttgactttttaataatagccattctgactggtgtgagatggtatctcattgtggttttgatttgcatttctctattgatcagtgatattgagctttttttcatataattgttggctgcatgtatgtcttcttttgagaagtgtctgttcatgtcctttgtgtttggtttttttttttaaataaaaatttcattccagtgtaccaaattaaaattgccaccagtaaatactttaagcatcctttcctgtgtat

SEQ ID NO: 35175 - DNA, 1032 bp, Homo sapiens
ttgcacatttaatagaccatggtatagtgcaaacataacttcatatgcactgtgaaataaagctgtgactcattttattgtaatatttgctttattgtggtggtgtggaactgaacccacaatatctcctatactacttcatgggtagtatcggtatcttataataacaaaatgttagtcttctctcctgtcccttgtatcactgctgttatttatttcacttatacataagtacacacacacacacacacacacacacacacacacaagcatacataattgaataaattgttgctattattactttggacaaactgttacctattagatcaatttagaatatgaaaaatagtttttattgtcttcacttattccttctttgattctctttctggctgtagatctgagtttccaatctttgtaatttttcttctcctgaaaactttgttttaaacatttcttgcaagacaggtctacagtttctttttgtttgtctgagaaagtatttattttctcacatttgaaggataatctcacagaatatagaattctagggttttttggttttgttttcttcttaacactttgtttcattccacactcttcttcttgcctagtttctgagaatctttgtaaagattttttctttgttttttctttttctttgtttttctgatgtttgaatgtggtatgcctagggattgttttttagtatttatcataccttgtgttctctgagtttcctggatctgaggaaactgtcaaactgttattgctgtctcacaataattattcaggaagttatcagtcattattgcttcaaatgttgttactatttctttctctctttcttctccttccactattcccattacacaaattacacatatttacactttttgtcatcgtcccacaatctaagttgtcttggatattctttgctttcttttttatcagtctttttcttcctttgctcttcagttttagaagttttttctattgtcatatcttcaggcttagagattcttttct

SEQ ID NO: 35176 - DNA, 1032 bp, Homo sapiens
ataatgttatctgtcttaggaggcaatggggtcaatctggttacttggttgaaatttggttgaaagtaaactgcaagaaaggaagggagataaattaggaggctattgaagtgatccaggtaagacagtgctggcttggacccaggtggttgtaggggaggtggtgagaagtagttgtattctggttatattttgaaagcagaccccataggagctgctgacaaattgaaaatggggtgtgagggaatgaattgcctcaaagataaggtttatggcctgagcaatttagcaggctggaattgtcatttactgagatggggaaaactgcaggaacaataggtttggtgggaaggaacaagagctaagtttggtcatgttaaatttgatatgccttttagacattcaaatggagatagagagttgacccttggatatggtccagaattcaggggaggagtagagaggtcaaatttggagataaaaattcaggcttgtcaatatacagtatttgaatcactgagactgaataggaaattatttcaaaatttcttctgtcattccttttccccccttagtttatttttctttattttacttactcttcttacctatcttcccatcccacaaattccaaggcagaagttagtattgacagttatcatccagcttgggagatgtggaggaacattgtacttttcttttctcacttcgtgatgtaatcagagtaagtgcttattgtagtgaggtgacagcatcttcttggtgactattaggttgtgatcaaatcatgttctaaatagaaagtgcgaaacttattttcatgttccttttattagcagtatttatttttccatcaaccatatgctaataattcatgaatcaatctataaacacttaaagaacactgtgtacctgtactgagaatgaaataagagaaatattactaaaagtttctggcctcaaaaaatttgctaattagtagaaagcctggtctcacgtagtaaaccaattagagcacaatgtatgatagca

SEQ ID NO: 35177 - DNA, 1040 bp, Homo sapiens
aaagaaatacatctttaaaagtccaaacattttaacttaaaaaattttgattttaaagaatcaacagtgcattgaagaagttcttataggtttggtgaccagttaaaacctaatccctggccaggcgtggtggctcacgtcagactttgggaggccaaggctggaggattgcttgagcccaggagttcaagaccagcctgggcaacatagcaataccgcatctctacaaataaaaaagtcagttgggcatagtggctcacgcgtgtgatcccatctactcgggaggctgaggtggaaaaattgtttgagtttgggccagtcaaagcttcagtgaattgtgattgtaccactgtactccatccagcctggacatcagagcaagaccctgtcttaagacaaaagccacaaaaaacacaaaacagacctaacctatttttaaaattttactgtagcattttctctacaccactaatataccacattgttattatatcatctatctgtatcactcactgaaccctcgactacttgagggtgaaaattcaatcctattaaatctgtattctcatatttagcacaaatcaatctgtattctcaacagctagaactcagtgagtactgtttaaatgaacaaattcacatttatcaaaacatgctcccctattttctttagctgtgccgtccagtatagcagctactggctgtatgtagctagtgagcacttaaaatgaaatgtgtctagtctgaattaagatttgatgtaaatatgaaatacacactagatttccaagattttgaatgtaaaatcacttatgtatatatatatattttaagataagagtctcgttctgtcacccaggatggtattcagttgcacaatcacagctcactgtagcctctgcctcctgggttctcatgactcagcttcctgagtagctgggattacaggtgcataccaccatgcctagctaattttgtatgtttagtagagatgagatttcgccatgttggccaagctgatcttgaactcctgatctcaa

SEQ ID NO: 35178 - DNA, 1015 bp, Homo sapiens
ctagggtaataggctaaggaaagatgtaagaactgtggaactagttaggagactattgaaataatgcaggaaagagacgatgatgatgacttaggcgggaggttgtttgttaatatataatccactgttattgtggctgcaaatgcaatcctgtgtctttccattgtccatttaaaagcaattttacaaatatcacttttttaaaacagtaactacaatgccataagagcctttttttgttgtaaactactgtggcaagaaattagttttaggtagagaattgcatgtgtacttagctgtgattgtattaggactgttctttggaagacttttattaataatgaattaataatagtgaaggttttctaagcagactctcttgcactgtagtaagtgtttcctatccattatctcatttgatcttcactaaaatcctgtgacatatgtgctgttattatttccatgttgaaaataagaaaactaggggactgagaaggtaaggaacttcccagggtaacaaagataaaaaattatgcatcacaatttgaacctagttctttctgataccacagctcaaaccttaaaaaaatctaaaataccttttattgagaaactacttacttataataaaatgcacagatcttaaatgtattcagtggattttcacagttgcatacacatatgtagctacctccccaaactgaatacaaaatgtttctagcactacagaatgttccttcatgctccttctggtcagttttcccccaacatcctcccactctacagactactatctggttttgatcaccatatgttagttttgccttttcttggacttcatgtgaatggaatagaacaatcataatttttggagtctcatctgtgttgttacttattgtttgttctttcttatggctgaggagtagtagtattttattatatcaatataggtccatttcacctgttgagggacatttagattgtttccagttcttagcaattttatgaataaacc

SEQ ID NO: 35179 - DNA, 1034 bp, Homo sapiens
tcaatagaaaggcaaattaatttctgataatttcaacgttattggtatttaatttggagccatacttatacctgataacttgacttttccctttgtttgaggatatttaactcacttaactcacaggctgaaaagaagtagagaaaaaacccagatgttcagtttagcaattaaaaaaggatttgcacttgctgagtacagttttttaaattagacagcatctagttactctttgatctttcatttgtggtgttcatgcctaggcattttaaaactaactaaagtaaaaatgcttactcaggagaaaagacactgaggaccaaggctcctttaataaatggaaggcaactgttattacaggaacataggaaagtattcaaaagatttcttttgaaatcatttcagaagctgcattaaatggttctttcattcctgattctggtttgccgaatatcaccattagtcattaagcacattgctttatcatttcagtctctgtctctgcacatacaactctcacccctcaagctctccactagtctacctcacctttctcttcaaaacttctccaggggccaactttttgttaaagctgtcctatgcaaactcttttactttatatccattacttatttaaattaatttttaccctgtgtttatttgaaatcatttggaaattatgaaataactgaccttaagtctttttcatttatattgtacagtgcttctagtagagaagcactaatatatctatattcctaatatatatatattttgataggatgcgctgcatagatgaagatgagatagctattaactctaaatgaataggcatgaacttttcagggagtcagaggagctatagaaaattcacgtttagctccttttatttaaataatatgtaaaaagtcacatttctttgatgacttaaacctgctgtagttataaagtgcctaaattgtgagtgcaggactcttatcattgaattactcctagaggtcttgaattcatgcacgctgattaaaatatgtaaa

SEQ ID NO: 35180 - DNA, 1050 bp, Homo sapiens
agaaaataaaggacgggaggataattagaatttgtttttaaaaatcggctagtactttaaaaggtagttcctatagttgcaatatggattaatgactgtttaaaaaagttcataagtttctgctcaaatccaaaactaagatatctaaaaatggtactgacattattaactgcttgaatgcctattgtcaagagtagtgtttggcacccaccacaggtatttattgaaaacataaaggaataaaatgattcccaaatgatatcatcttatgattaatgaatacacatttgaggacctagaacttttagcagtaagatttgcatacgcttttcctattgaatttaaaaaaaaaaaaaagttcaaaattctgttagattaattctgtgatatagtttataatttggcataagctggtagtagggaaatagtcacttctttatgcccatgatttatataatgaaacaatcttccattcacttagaagacaacttcgatttaaatatttagcctccctagcaaggcccagccatgcaattttttccctgttagaagaattttagcaacagtaaaaaaaattaatatgtaagattttgctatttttattagttttgaggactgcttgccttgtagtttaaagggggtaaaaaggatcattgttttactcaatgtatatatatatatatattattaatggtagattttttttttttttggttgatgtaggaactttgggagtagagcagaaagcctattgacttcaaaaatagtgactcagggttggtataatcattagtaagcaggttgggaaaaatcctaattccagacctcaagtagaattttagtatcagagtcactcctgttccttaaatgtagatctcctgatttcaggccatttttcattctaatagaattagagaagaaaaataaaacctgtcaacgaggactatttacctcctatagataggattgagacctacttttctgtaacttttgaagttatttttgggaaaaatttccttgggttgactttgcccccttcacccaatgcat

SEQ ID NO: 35181 - DNA, 1112 bp, Homo sapiens
tatgagcaatagcatgaataactatattttaaagcaaataaatgtcaggtgcattttgcttatagtttaagtataaaacaacttttagaccatggaatggaaaaatataagtctcacaactgtcataattcccttttgcttttgagagggaagtaggtcatagctcagttgaatcatacatttcaattgtagttacacttgaacttaattcatcaaggtatatttaacagtaatagctttggtaagaaaatttatgattgctatattctaggaagtttagttttattttgatgtttctgtgtgcagctcagaccttggtcttcgcattaaggcttcacacagactcatgtaatgtattttacacatgtagtttataggtacagagataattcatactcgtaaaatagctgttgacataaccaaaaaacttggagggctctcactgcattctttttatttagtagaactcatgcaaaagtacttacgctgaaatgttaggcattccaattattgtgggcacgtgtctgaggtatttccatgggaatttatggtataaaaatgaaatgaaaatgaacaaaataccatagtgtacgctcatctcagtgacctggtttattttaagtaatgagagaagaaattccattaggtttagttttcctcatttaatatgtcttttcaaaagtgcttcttaccaaaatcctggcatcattgctttcggtctctgccatgattagtttttccatatttattgcaaattctacttttaacatgcattttaggtttaggttggtattttagtttatccattcacatgggttgttgttttaatttccttcatctgattttgacatgattctgagaaagatctataaagtaaccagcaccatagaatcatggtatgaaaactaatgagaagaatattatgttaattatgttctcttagtctctactccacagaaaggttttaacaatgaaaaggaattgctaaactataagtgacattttaatttaaaaaaatgaaaatgtgtagttagaatctttcagtgcttctcttattttcttctgtgtgctagatacttttggctgtggtgggggtatcatttcttttgaaa

SEQ ID NO: 35182 - DNA, 1051 bp, Homo sapiens
gtctgtttttgtaccagcaccatgccgttttggttactgtatcctcatagtatagtttgaagttgagtagcatgatgcttccaggtttattctttttacttaggattattctgggtataccagctcttttttggttccatatgaattttaaagtagtttttttctaattctctgaagaatgtaaacagtaatttaatgggaatagcattgaatctgcaaattactttcatcagtatggccattttcatattgattcttcctatccatgagcatagaatgtttttctatttgtttttgtcctctccaatttccttgagcagtggtttgtagttctccttgaagaggtccttcccttcccttattagctgtattcctagatattttattccctttttagcaattgtgaatgggagttcattcatgatttggctctctgcttctctgctgttggtgtataggaatgcctgtgatttttgcacattgattttgtatccagagactttgcttaagttacttatcagcttaagtagcttttaggctgagacgatggggttttctagatataggatcatgtcattgcaaacacagacaatttgacctcctctgtttctatacgaatacactttatttctttctcttgcctgattgccctggccagaacttccaatactatgttgaataggagtggtgagaaagggcatccttttcttgtggccgttttcaaggagaatgcttccagcttttgccaattcagtatgatattgactgtgggtttgtcataaatggctcttattattttgagttatgctccatcaatacctactttattatccatattttctactcatctggagctttcctgtggctttgatccagcaggatctaattcttcctaagggttcgtgttcttacgtgtcactacaggattattagcatgatttgaacaattattcgtggtcagaagtggtggaaaaagtataacctaaataatgtgtgagcactgagaatctctggcccttgcatagagcagatattgaaggaaatgaatctt

SEQ ID NO: 35183 - DNA, 1067 bp, Homo sapiens
tgagagatcatgggacagagggaggggtgatggaaagtgatggattctgagtatattctgcagatagagcagacaagattttttgatgaactacaaatgcaacaggaagaaaaggaggagtcaaggacaaattcaagtttattcattcaactattagaaaaaaaaaaaaaaaaggtgcctgctccagcagacatgtatcacaagttacaggaatctctttgacaattatatttcacatttcaaagcctaccaataaataatagtctttgtttctcccttctttttctgactcccttaggttttatattttgaaggattgcagttatagatttttttttcttttatcatagtaagtggtgtcagaaggtctgcatctgagttctggctcagccactcactaatatttcaaaagaaagaaaaagcagcacaggtgaatgttggggcagggtgctacattagggcaagcatgcttgtctggcctcacggctgtcccagagttgaatgaactgggtgaattcaccattctcccttacttcactacgttggacttgtagccaaaactctgcatgttattagtccatccatatggtcagatggttgatgattaaaagaaatcaacagaaagagccaatgtatgcactcaacatccctattttcatcaaaatgaaaatgttgctacttcagactattgattgcatcaaatatcaagtgtttacacacacacacacacacacacacacacacacacacacacacacagagagagagagagagacaaacacaggcacacatacatgtttttccctttctcttggattaatgtcaaggcaaaagagtctgagcagtagttggtggtcctgcacttacatttttagaattataatttttaaggatttacatctggcaagatttttgttaaaacttgaagtccacctattttgcttcttattttaaaatagctaaaaataggtcatttgctttaatttatagaacattgtcatttattacaacttttccacattggtgatctcttctttttgttctccaaaagcaaagtactcactaaa

SEQ ID NO: 35184 - DNA, 1029 bp, Homo sapiens
gggttaaaattaaaccccatgtgttttaattttaatatattttatctggcatggtgttctgcatgatattgttagttctgagatgtccaaaaaggtgactggggtgtattttttaaggtctctgcacttgcaaactgttttagttgttgttggttgtcatgtttggcagaatctattggaaccctgctaagcctgtgacaagtgagaggaaatgtgtatttaaacagtgatgttaaaagtataacactaaatgagaaattggaaatagggtaatggaaaggccagtgattaattacttcaaattccttcaatcaaaaatctcaagacatgttattgaatattattaatatatcttatccagctttgaattccaactcacccctggggctacaacttagaaggtacataatagttttgaattaatatattgttttagggttcataggtattgagacatctgtgctctattatcactatttcaataacctcctaaatgattatattgcttacaggttctgaatccacctctacaataagacctgagtaaaattcctacaatagtcgaaatcatgacacttccctgcttaaaatttttagaagtttccactacttggagactaaagcataattcctaagcattccatataagggccttcaaaatctggcctctgccaaagttctgttgcaatctcccaacaattttccatttataccttctttggattatcactgccagagtacttgtactttcccactaggcccgcatcctcattttcctgtttccttctaagcagggcttcctttggtagagtgttcttcattcatctctgggaagacatcattgcatctttctagactctctaccaccctcatctcctcaccaatgcttttctggtcattttctcaccccacctcaggcagagtcaagtgcattctgctctgttcctaccgtcttttctgcatacttctgtttcagtttttatacttacttacttctttcctcttaatccctgagtgtacaagaataca

SEQ ID NO: 35185 - DNA, 1033 bp, Homo sapiens
gcttcttcactctcctcaacagtgttttggttttttagtgtatgttttttagtggttttggtgtgtttggttttttttagcgatttttcattttttttattaacgggaggttttaattttcttgtaatccatgttataatctttttctttttatgtcctatttaagagattctccctaccccaagatcatgaccatggtcttttatccctaagagttttattgttttgtttttgtatttagattacgattcatctgaaattagtttttagtatggtgtaaatgagagttcaagattattttttccatgtgtatacccatttgacccacactgtttattaaaaagaccataccgtctccattgcactgcagcatcaccttttcataaatcagatgaatgcacatgtttgatctgtttctgcacttttccattccaattctcattgttttcgctatcgatttgttgtgtcaatgctatgttctcttaactactataggtttataataaatattaatatcttgaatgtaaaacctcctgcttgttcttcaaaattgccttggatattttttaccagttcattaattttcctaggaaagaagagagagtatagatgtacagatgcaaatagcttggaagatttggttttgggactctgaagtaattctcttctgaattatcctacaggtaattagctgagaaggaagatctgaaggtttaacgagagagggcgagagatacaaaatatctgctaggagagtaagaaagtgaattgggtaaagaaatgcagtaaaaatactgggatgtaacgagagcccacttgagatttgtggtcataaattttaacagacaccaggcattttttgtttgtttttctcccaccctgcttggtgcttgtgtgcagaagtacagttgaagaggtggaattaactagtttttgagatttgccaaataattagcatggtggatcatggaccctttgcaaagaaagggggaatactatgggggcttatgttctcttaaaaagtgctgaggtc

SEQ ID NO: 35186 - DNA, 1047 bp, Homo sapiens
ttttgtatttttagtagagacaggatttcaccatgttggccaggctgatctcaaattcctgacctcatgatccacctgccgcagcctcacaaaggctgggattacaggcattagccactgcgcctgacctagtcaacctagtcttattggaaacttctgtggtttgaatgtgtcccccaaaagttcatgtgttcaaaacctaatccacagtgcaacagtgttaagaggtgaggcctaataggaggtgattgagtcatgagggcagaacttttatggatggattaatgttgttgtctcaggagtgggggagttataaagtgattttggctcctggtgtctctttagcatgtactcacttgcccttttatccttctgccatgagataatgaagcaaggagcccttcatctgatgcagcttcccaatcttagacttctcatcttccagaactttgagctaagtaaatgtctcttctttctaaattacccagtctttggtattctgttatagcaacagaaaatggactaaggaaggttacagaagacttcaaaatccactattatttttagggcaataccctctgctttttaacataaaaaccacttgtattagttttaagaaagaagtaaggggcttgccctggcaaatcggtataagcaatattttgtgtccatgatttcacttggttatcttaaaataatgatgcttaagtagtgactttctcaggtcaggctttagctcccagatgaaactactaagtatatgtttgtttgtacatgtcagtcccaagcctgaccctcccttggtccgcaaagaaagtagtttctgtatccatgagaaaaaataagcactaaggactttgcccctagtgttcagacttattatgttacctgtgtgtattttactttatgattggaatctcattgtgagtatctccattgccttgtttctcattcattgcctcccttagtttctgtaataaaggactatggcatagtaaacaaactgtctaaaggaatattccacataaaagggcaagctaggtagaa

SEQ ID NO: 35187 - DNA, 1042 bp, Homo sapiens
cccgaatatctcctttcataacaaaaaaaaatgccgctagagaagataacatgatagaaaaattagagtgcaaacataaaactagaagggacttttatcatccaactccagatatatgattaaatctgtttcttcctaactcaagcttttctgcacaatttttctttctaaatatgactaagtctatctttcttttcaatctttctcccttgtttttttaatatagaattcctaaatgaggcaaaatatcagtctactgagaataatacttttcagcttcgtattttatagttaattatgttatgactcatagaaaaattgatcccaaggttcatcatttttctttttctaatttctcctgttctgaagctgccgttccaccacttcctcgttaatgtaaaccaatagtggtccttgtttgaaagcacttcatcagaattagcctcaagtgagtcagctgatggaagaaatagtaataaatgaacatgtgtcaaagagagggctgttgagcaaaaaaaattcagttaccttccagcacagactacagaacaatttattaaagtgtcagaaacaaacctttaaggtaaaaaacagctgatacaaaattctctgattacctaaaatgaatctttaatgaagtaaatgaaaaagaacagtattccaactgtgctgtttatcattcaaaattaattggataatggttaatttgaaaatataataatctctactgaactgactgaatagtgaataaaatgaattttaaggtttatttacacatagtaagacttcaaaatagatgttaattaattatcatttgcaagtagtttttaaaatgttgctattgaaatcagcttgacaaaaacaaagtcatgaaaagcaaataacttatatttttatatttcaaattcactagtttttataactaaatttttttaaaaacagaactctgtttttactctatatcaaataaaaccctttatctacacttaaaattgtgtggattaaaaaatcagattgtcctctctgtgtgtagcttataaat

SEQ ID NO: 35188 - DNA, 1031 bp, Homo sapiens
caaggaatatttagagttttctatataaaagagcatgttatctgcaaacagaaacaatttaacttttttcttttccaatttggatgtcttttttttctttctcttgcccagtttctctggctagaacttttaatattatattgaatagaagcagttagggtgaacatccttctcttgcttctaatcttagaagaaaagctttcaactttgcaccactaaagatgatattagctgtgagtttgtaatatatggcactaattgtgttgtgatgaatattttatacctaatttgttgagctttttatcatgaatggatgttgaattttgttacatgctttttctgcttctattgagatgatcatatgatttttgtcatttattcatcttattaatatggtttatcacacttatggatttgcatatgttgaaccatttttacatcctaggaataaatcccacatgattgtggtgtattaatgttttgatttggtattgaatttggcttgttaggatttcattgagaacttttgtctctatgtttgtcagaaatattaccctgtaattttcttttcctatagggcccttaactggctttgatatcagggtaatgctaacctcataaaatgagtttggaagtgtactctcctcttaaattttttgcaagagtttgagaaggatttgatgttaattctctaatttttttttttataaaatacatcagtgacaccattaagtcccgagcttttccttgctaagagacctttaattacaattcattctctttactcgttattggtctgttcagatttcctatttcttcatgactcaatcttggtaaattgtatctttctgggaatttatctgtttcttctaggttaacctgttaggtttatcattgttcatagtagtctgtttttatccctttttgcatttctgtggtattagttgtctatctcctctttctcattttatttgagccttctctccttttcccttagtctagctatatgcatgctaattttatttatcttt

SEQ ID NO: 35189 - DNA, 1047 bp, Homo sapiens
atgaatgaggatttagcttttaccctgaagcttctcaaatgagtctagttacatagagtaacctcttaatataattttatgtaattaagctatcagagaaagtattcaaataaacaaaaatggagattagttcttacataaaaatcatgattccactgaaaaactaaattaaaagagagataataaaagtacaaatgtagtcaatgttattgctgactattaccgtttttcggattgtttcttggggtcattttaatttttatttagagaattagaatttttcctgaagactaggaagcagcttatatagcttcacatcagcaccttgtggttctacagaacatcatgtgtgcttaaatgtgatttgtttctgcaaagtcattaattagttccaaaatcaattttaaagtttccagagaagaagagctcataattttatgatagatagaactctcattttatattgccagttggagggggcggtgggtcttgattctgctttctgtaattaggaaaaaatatgtttctgatgccctggtcttcagtaacctctagccacagtaaacattaagctttattcagaataacaaatataacagaatgttccatgggacttttccttttttgttgaagaccatggcattagatgctgacacatcccaaaaagagtaggtgttggatggcagatagactcttagcccctttcttaattctagtttataaaagggaagaaaaaaatctaaggaagctccagagtaaagattcatttttgcatataattactaggacaacttttcactctcttctgtttggagagaaaggtgatttctactttaagcttgcatactttaaactacatgagggagtttagtgagtcccagagctagcatggaacctgagtgtgggtagagaaagatttcttaggagaacttgaacagagttccctggagttcagagagaagaagactggtggcttactcttacttggaataatcccaggggatgaggttggtcaggcagtactctacaccagagtgaagagagggc

SEQ ID NO: 35190 - DNA, 1044 bp, Homo sapiens
ttttccagtctcaggtgtttttttagagcaatacaagaacaaaataatacaaatgcattctacattcattttttttgaactaaaggaagtgatagagaaatagaacatctgattcttggataaaaattgacaatgagtaagagttttaattcttattacaagagtaggcaaaattaggaaatatgctttgagactaacatgtcattgttcttttcacctaagcgttctgtcctctgtttcattagcgagatctgagaatgcctgttcctgcaagaagaaggagcagtcctatgtatctgggctgtaatgctgaagagggccaagtggctccctgtgagtccagataaaggatatattattcaagagaaaaacttgtaactactctaaacttaagacagatttatttagtcagctgggaattccagagactcaggcagatacctaagagcatgtttaattgctctaagcccctgattcctgatttcctaattttatatgtatataatggttatcagttctgtagaatagttttatggtaactgacatactttgttaaagcttactttcttacttcttttcttttttggtgggattagttagaaaatgatctcaatacatgtttctatatacatatggatgtttaggccaaaataaaattgggttctgtgttctggaggttatcaaaaaatctactatactctaggtagttaagtctagactgtaaacatcaggttgttaatattttagcatattaacactaaaattatcattgctatatatgtttcttgagcatcagcatttatatagaaataaatatttatatttctatttttatcttagttattacatctctcctctctttcagattatgcttagaggattctgcagcaattctcagtattggacatattcaaaatctcctcaacgtatatccttcccatctattgccttccagctttaactcagttgtgctcccttcaaacattttacatgatttgcgatggttacatgaactctggggaagtgatatttgcaacatctcat

SEQ ID NO: 35191 - DNA, 1034 bp, Homo sapiens
agtagctgggactacaggcgcctgccaccacgcccagctaattttttgtatttttagtagagatggggtttcaccatgttagccaggatggtctcgatctcctgacctcgtgatccaccctcctaggcctcccagagtgctgggattacaggcgtgagccaccgcgcccagcctagtttgccatctcatatggtcatgaattatggcaccccaaaacatttacaatagtaaaatcaaagatcactgattgcagatcaccataatatatataataaaaataaaaatgtttaaaatattgtgagaattaccaaaatgtgacacagagtcatgaagtaaacacgtgctgttgaaaagcgggccgttgaaaagcatgtgctgacttcagacggtggggccaagatggctgactagaagcagcgcggttgggaggctctcttcagaaaaaaggataataaacgtgtgaatccttcaccagcaaccaaggtatccagattctctcaccaaaactgactagaacgctggcgtgacccatgcagaaaaggaagagcagtgtggtgctgcggcccacttgagaaccacacagggaaggggaaccccatccccccagccaagggaggcagtgactgagcatgctatccagccggggaaactgtgctttttccatgaaactgtgcaacccatggatcagagtatccctcttacgaatccatgcgactggggcttagcgtcccaaccccagaacacacagatttttagagcctctcagctggagtctgcttaagcttactgaactcccacggggaggggcaaccagcacaggctgtggctgcctcctgtctaagccatttgagctccttgggggaggggcagcaaccagcactgagactcacaactgcctaacatgctaatcttcctgggcaggagaagggtggcacccatttccagagctccagtctgtgcttttcccctgctggagccagggaagctgggtggcttggccccaagaattgtccccacagcccaacacactggct

SEQ ID NO: 35192 - DNA, 1034 bp, Homo sapiens
aacaaaatattagcaaatttaattctacaatgtattaaaagagcaatataccaccagtaagtggagtctgttgtaggaatgtaagagtgattcaaactgagacattcaattaatgtaattcagtgtgtcacccataaatatacaataattttaataaatgattaaacaaatatcttaataatgttgaaaagttatatgataaaatcaacattccttcttaggaagctgagaacaaaattaaactgctttaattttatatcacaaataagcatcaaataggaacaaaagagtgcctgccattactgcaatgatagcattgtctggaggttgcactaaagccttaagaattgaggtatcagtattgaaaaggaagggtcagaatatttatatgaataatatgattgttcacctagaaaacccaagagaatcaactggaaagagactagaactagtgtttattaatgtaacaagataaaacataaatacttaaaaggcaatcgtctgcctgtgggataagtagaaaataaaaagaaaaacagatctgtagaagttacaaaaactaacaacaaaacaaaaactaggaatacactttgtaagaattgagacctatgtgaaaaacctaagtctttactaaagctagaagaccttatcaatgaagagatgtaccgcaatcctgaatgtgaagacaaaatagaaataaatttatacattaaatactatgctagtaaaaatctttcatttttcttggtgtgcatatggggtggggagggggatttgacttccaaattcatctgaaatccagtccatgtggtactggcacaggaatagtcaaagaggtcagtgacactgcagcagtggctttcaaccttggttttagattgaaatcattttggaacttgaaaaaacactacccattctactttaattcatgtgagatgaggttcaggttgtgctatactttaagtgttttcaaaggcaattctgatgggtagccaaggttgtgaattactgaactataaagaccaagaaatggc

SEQ ID NO: 35193 - DNA, 1029 bp, Homo sapiens
aagtgcagaaaggttgtggtgtgacttagagagaaaatgcatgcattagataagcttccctcaggcgtgagttacaataagaacatggcactaaatagaatgtgaaaaggacacttgtttacagtgtgagaggagcaaaaaagaaggcagatcatctcctgttggttagacctcagctgggtaatttaaaattttactggctctgcatatgtcatgaatgactgtgaaagcaccctaagtaatgattttgaagtaacaaaaatatggaaaatgttacaattcagagggttataaatttaagataatatgtatataaattgcctagctcagagtagattactaatagtaatttggatttaaaaatatatccttaattatatatctgtgttcattttaaatattgaacacttcatatggttattttctataaagaatacatgtttattttaaaaagcatttctgttttaataaaagttcacatgttgggggtaaacttcaaaatcaaagttgtttctggttactcgatactacttcaatttatggctcagttttggacccagttgcaattccagttgtcctacagccaattaatccttcatttgtgatataaattttcaattttcaaaatatggggcagtaaagtagggagagtctacattagatgtgaaagtgaatttggtcagtggttaattttaaacttcttttgctcactgtgtttctatcactcctttttccatttgaaaaaaaaattattcttgttcttgcattacattcccagtacatttcctcacccaaaatcagccattaaaagatattgctctttgagactggtttcttggccatattttaattttattgtcttggtggaagtgatccaggaaacctagtattacctttggaaatacaaaggggaagattggcaccaaagttgaccttcaaattgtgtgtctcagctaagtttaaggagagaaaaattttctaggcatattcatcaagcatcatcaacacacatgtagtcgtgtgttatta

SEQ ID NO: 35194 - DNA, 1958 bp, Homo sapiens
tggaaaactggtcctctgtctaatttctctataccgttatgtcctgatctgtaaaatggagataatagttgtaaaagataatgcacatcaataccaagcagaatgcttggtacctatttaagtcttaaatattagaagcagatgctagagatgtactgtcatcagatgtctgctcattgactgagtttgagagtgagacactatccgttaggacaagtgtcaggctcctttaagagccatacttaagtggcatttgagatgacaaatgagaggataaaggtgacatcacttttcatcaaatgtttgagccactgtgatatttttattttcttacaggaatttagttgaaaggtctacattttaagtgcaagatctcttactactgagcattttttaagtacacaagtgattcaactaatgggcagatctctcaaggaaattccagatgtctgatatctagagggaatttcagaaagctctctaatcacattcttcttatctaaataaatggaaaacttcatgtagaaagaattgtagtgatgtaacaaccatgtcctctgctgacctttgatgggaaaagatagcaagctcttgcctgagtatcagagtctggctgtttcctcttgaaaaatctcatgttttggagaactgactgggtgacatgtcctttgtcccctgtgctttgtcatgtgattgcaatcctgagcctcacacagacacagaataattatgaaaggggacactgatatgaaaagatgtatagtacagagtcaagccacatagtacgcctctccacagtcagcacaaccaaaagatcagaataagcatgtgctacactgaacataatattattagtatgtgtattattagtgtatggattgctctaagatgctatattgccctgctttagagtgaaaaaaaaaacactcaactattttttcctttgtttatttaaaaataattaccccaaaaacatctggagaaacgtcatcttctccaaaaaaaaaaaagaaagaaaaagaaaaagaaaacatcctgggaaaaagtcattgactgcagaatcttgctttcacacacacaccacaaagcagacttcaactttaaaaaaaaaaaaaaagttaaagcagtttcaaagatttttatttcttcctacatccctgtggtttcagtagaggaaaccaagaattttccagggatttttctttttttttctttccttgttggtaaatgagtgatacttaaagtagaattttcttagccaggagacccaggaaactatgagtaccataaatattcccatgtaaagtactatcttctaaaaaggtatactgtgtccagccctcatcagatattcaaactaatatttagagaaaatcaaaaaataaaacaatgcacagagatgaaagtaatttatcaaaaagagaaaaatggtcatgtggtggcaaaattagaaactgagattttcctcattcattcttgaacatcttttcagaaaattaccctgaaattaccttggaagaagatatttctccaatagaaagttgccccttgagtcatcatttgattatttgatgccttctttgattaggaaactaccctcgtagaggagttctacaggtatgccagtggcatatatgagagaagagttcactgctcatgcttacttctcccacttgggtgaatcaagaagagaatgagggctgggcgcggtggctcacgcctgtaatcccagcactttgggaggccgagacaggtggatcacgaggtcaggagttcgagaccaggctggccaatatggtgaaaccccatctctactaaaaatacaaaaaacattagccgggtgtggtggcgggtgcctgtagtcccagctacttggaaggctgaggcaggagaatcacttgaacccaggaggcagaggttgcagtgagctgtgatctcgccactgatgccagcctggg

SEQ ID NO: 35195 - DNA, 1072 bp, Homo sapiens
tgaaaatttattttaaaaaaagatacttagaacatctccactttaaatagcttactttttcatctccttgttaataaataaaagcataaaaataaaaattacagtgctgtaccacacattgtttgacagagaaatatgagaaagaaatatgtatttgtcaactggttactatcttaatcccttctcatgtacactgtaagaatgttctgttttttacttccacaatgaattttctaagtctcttacactttcaaacttgttctgttagcctgtttgaactggctaaacacctacatcattccaatgctccaaatggcaccttattttagttcctttctatcaataaaatttgggagacctgcatgcctgcagagtttttttgagtaggccttaatgaatttttgaatcattgattgtcactaccacgtcatcttatcttactctgttaatttattttggctttatttaataaattactcgggtggacctttaaataggtgaatacatggagagataagctgctcatctgtgtgttgcagtagaattccaaggcataaataagtattctaatgttatatcgcttaagtttgactactacttcattgtacttttcatattaaattttatcacttggcaatatcactattcatttgtttataattgtacattgtcttccatggtatacattgcttgtattacttaaagtatccaggttttttcccagttagagaattgtaaattatgcttagttataatgagcacaaggaaataagactgtagggtgtaagggcagtaataggtggaagaaaactagaaaaaaatagaattaagatattatagtttagaattatggaagtgaagatctatataataaaaacaatgtaaagattacagatttaataattgactgaagaaagacaaaaataaggaaaactttttagtagcactagaaaacagagaagtagtctttagtggatcagaaacactaaggaattcctggaacctgtgaagtatacgtcatttgtaaagacacattttatacaacatgggcaaaaattgaatagggataaca

SEQ ID NO: 35196 - DNA, 1104 bp, Homo sapiens
tctctcttgaacatacttcaccaaagctttcaccttcttcatgttcccctgtctctctccttctcctttggcctccctattccctgagagacaacagtattataattaagccagttgataaccctatagtgttctctaagtgttcaagtgttcactttaaatcaaaagctagaaatgaataagcttagtgaggaaggcatgttgaaagccaagataggccaaaaactaggattcttgggccagttagccaagttgtggacacaaaggaaaagttattgaaggagactgtaagtgccactccaatgaatacatgagtgctaagaaagtcaaatagccttattgctgatacaaagtttgaatggtctggatagatcaagccagtcacaacattctcttaagccaaagcccaatccagagtgagaccctaacttctttaatactgtgaaggctgagagaggtaaggaagcttcagaagaaaagttagaagctagcagaggttgtctcgtgaggtttacggaaagaagccatctgcataacacaaaagtgcaaggtgaagaagcaagtactgatggagaagctttagcaagttatccagatctagtgaagatcattgatgaaggtggctatgctaaacaacagattgtcaatgtagactaaacagactactattagaagaagatgccatttcagactttcatagccagagaggagaagtcaatgtctggcttcaaagcatcaaaggataggccgactctgatgttatgggctaatgcagctggtgaatttaagcagaagccagtgctcacttaccattctaaaaatcctagggcccttaagaattatgctaattcaactcagcctgtcctctgcaaatggaacaacaaagcctagatgacagcacctttgtttacagcatgatttactgaatattttaagcctactattgagacctagtgctcagggaaaatgatttctttcaaaatattactgctctgtgacagtacacctagtcacccaggagctcagatggagatgcacaaggaaatcaatgtcgttttcatgcctgctgatacaacatccattctgcagcccattggatcaagg

SEQ ID NO: 35197 - DNA, 1027 bp, Homo sapiens
gaaataatgcgtgtttccttatctttttagtggtaattttcagtagtttaccattttaccttgagcatcatcagtgccttaaatgtaatcacaaactttgataggcatttccttatcctggtagatgggaattaagttctgacagcatagtgatttcatagactttaaatgtcattttcattttttagatgaattttattaatggttcgaacagaagtttttgtgggattgtgtaaggtactggaaagggaactggaatgggagcccagacccccagattttgtttccagctttgctattagctaactttgtgactggctcaagttaatgaacctcaaactttaagacgggaggtgaaagagggtgaagactcaaggcggagagattcataagtgagcttaaaaatctctttcagctgtaagagttcttttttctcaccaggagagccgagtatcagtttctcagattgaatagtttcattcttttaagtatttttccaaatttgagtagtggatccaggtcaaattatgcaaacaacgtaactgaaactgtataaaataaggatccaagagcaggaaaagtagccaacataattttttatgtgagttattttgtgttttccctaattttagcagatttccatataagttatcaatcatactttccagtcagaaaatttagtatactctttgcaatgctggtattagtgattaattcacatgactaatgaaaaaggcattgaaaagagaaaagaggatggcattttagtagctgacttataaacacaaaaatacaccctgcaaatctcccccaaaagttactgctcaatggacttgctatatggacatttttgaggtccaaggattggtatcaccctacttttaggatttacccaagtaagtacccatggataagaactaaaacagccaatttaatccataaattacctatagcagagtgttaaagcgttgttttatcagatattaaaactgtgctccagtttagaattatgaagtattgctatggt

SEQ ID NO: 35198 - DNA, 1034 bp, Homo sapiens
tattaccctaggccactgttcagaagagtttttcctaggtcttcttttaggatttttataatttcaggtcttacaattaagtctttaatctatcttgagttaatatttatatatagagtgggacagatgtccagtttcattcttctgcatgtgagtagcgagttttctcagcactattttttgaatagggtgttcttttcacattgtttatttgtgtcaattttgttgaagatcagttggttgtaggtaaatggctttgcttctgggttcctattctgttccagtgatctatgtgtttatttttatatcagtactatgctgttttggttacagtagccttgtagtatagtttgaagtcagataatgtgatgactctagctttgtttgggttattcagggtcttttttggctccacatgaatttttgaattatttattctaattctgtgaaaagtgattttggtaatttgatagaaacagcattcagtctgtagattactatgggcagtgtagtcattttaatgatattgattcttcctatccatgagcatggaatattttttcatttgtttgtgtcatctacaatttatttcatcagtgttttttagtttttcttgtagagatctttcacatccttagttgaatgtatttgtaggtattttatttttgtgtgtggctattgtaaattggattgagcttctgatttggttctcagcttgaatgttggtgtattgaaatgcaactgatttttgagcattaattttgtatcctgaaactttactgaggtcatttatcaggtctaggaatttttttggagaaatctttagagttttctaggtataagatcatgtcatcagtgaacagaggtactttgactacctcttgtccaatttggacacctttccttctttggcctgattgctgtggccaggacttccagtactatgttgaataagagtggtgagagtaaacattctcatcttgttcgagttcttaggggaaaatgctcttaattttccccattaaacatagtgc

SEQ ID NO: 35199 - DNA, 1029 bp, Homo sapiens
tagaatgaaacgaggaatacaaaatatatgttctataagccaaaacaatcctgagaaagaacaaagctggaagcttcacacatcctgatttcaaaacgtattacaaaattactgtcatcaaaacagtatttatgccagtttttactggcataaaaacagatatgtacaggccaatggaacagaatagacagcatagaagtaaaccttcatgtatacagctaaatgatctttaacaagagagctaagactacacagtgggaaaagatagtctcttcaataaatggtattaggaaaactagatatccacatgtaaaaaaagaagttggagccttacaccatatacaaaaattaactcaaaatggattgaagatctaaatgtaaaacccaaaactttaaaactagaaagaaatatgggggaaaatgctttatggcatcatatctggcaatgatttcttggataggacaccaaaagcaaagacaacaaaagcaaaaatagacaaatggaactacatcaaacttaaaaacttctgcacaacaaatgaaataatcagagtgagaagcaacctatgcaatgggagaaaacatttgcaaaccatgtatctgttaacaagttaatatccaaaatatgttaaaaattcctacaactcaacaacaataaaaaacaacccaattgaaaaatggacaaaggacttgagtagacatttatccaaagaagataaatggccaaaaaaaaaagcatacaaaaacatgttcaacattactaatcaccagtgaaatgcaaatcaaaaccactatgaagtgtcacctcacaccaattagaatggccacttcaagaaaaagaaaatataacaaccattgatgaggatgtaaagaaatggaaagcactgtgcactataggtgggaatgtaaaatggtacagccactatgggaaacaatatggacatttctgaaaaaaataaaaagaccgtatgatccagcaaacccacttcttgttactaatctgtattagtccattttgtgctgctatat

SEQ ID NO: 35200 - DNA, 1155 bp, Homo sapiens
ggccaggagttcaaggctgcagtgagctatgactgtgccactgcacttcagcctaaatgacagggtaagaccctgtaagactcagttcaaaacagatactattacacttgggccataacacatttcagtttcaaatttgcatttaaaaataaataaatagatagataagaaaataaatagtttctgtatttctgttgaaattgcccattttttcatctgtgtggcccacctttttcactagattctttgacatattaattgtaattattttaaattctttctttggtatttccaccatcagggccatctgtgaatctcattgttttgactattctatctcttgataatgagtgggaaggttgcaggagtttgcttttcaagtgtaacataatttttgattgaatgtctgttttgtgtgcgcgtgtgtgtgtgtgtgtgtgtgtgtgtgtgtgtaaaagaaactaagtctctaagtctaggagactaaagtaaatactgcttatgcctggaaataggtatacttcttctgctaggccgttaatgtgattgagggcttgagtcagtttggtcaatggctaagctaggtttggggtttgttgttgctgtaagcttctccagggggtgggctgctgctgctgtgttcttcatgcgaggcctggacgctcagcaggcttttcttaaggatccttcctcaccatcaggttttggcagatcctgtgtacctttgccacagaacatgtttctctctctctgcctttgtcccgccactggcagtagcccgctggtgcttgttactaggcacaagacttaagtaggccagagggctttcctggggcccctgctctagcattagttgggcaggtgctctgcacttgagtctcagggttgtgggtttatcagcatttctgcctctaccctagtgttaggtggcccctgcttctgacaccactcagggtcagcggcagtgtcctaaccactagctacatgtggctatcaaaatttaaattttaattaaatccaattaaatgcaattaaaaatttactttttcagtcatattagccactttcaggtgctctataggcacatgtgtctggtgactactgtattctgtagcacagatacaggacattatggtcaccacagaaagctctgtt

SEQ ID NO: 35201 - DNA, 1042 bp, Homo sapiens
ggctgtaaatacagatgaagcttcactcacttgcccgccactcacctcctgctgtgtggcctggtttctaacaggctacgggctgatattgtggggttggataatcctgctgtagcagggttggggaccccctgctgtagtatacatctctagaacttacttatcctgtgtaactgaaactttgtatcccttgaccaacatcttcccattcctcccttcccctgcccctttacctctacccctagttcctggcaaccaccgttctaccctctgcttctgtgtgttcagcctttttagattccacatgtaagtgagatcatgcagtatttgtctttctgtgcctggtttatttcacttatcataatgtcctccatgttcattaatgttgccaaaaatgacaggatttctttcttttttaaggctgaatagtattacattgtgtctatataccacattttctttatccattcatctgtcaatggcttcttaggttgtttttatatcctggcttttacgcaatgaacctgagagtgtaggtgtctctttgacaaactgatttcactttctttgaagatgtacccggaagtgggactgctggatcatatggtagtcctatttttaactttttcagaaacttccatactgttttctacaatggatatgctaatttacatttcaaccaacagtatacaggggttccaatagttcttgctgttttagtagatatcttatgaaaataactttaaaatcgtacatgcatgtctggtagtcagttttggagctcgagttgtgaaccttcccaacagctaccttctcctgcctgtcatggtttcagtctccgcaccagtggagtgactttcttcaatatagtaaaaactgtactcattatttgtacaaattatttgttaattattaccacatgtgccaatatatatgaaggccaatgatcctaactggaggatattttgtagactgaggaaaacacaatttttatctttattataatgcctttgacatactttcggtcacagtttgtaatggg

SEQ ID NO: 35202 - DNA, 1054 bp, Homo sapiens
tttgattgcactgtgatctgatagatagtttgttataatttctgttcttttacatttgctgaggagtgctttacttccaactatgtggtcaattttggaataagtgcaatgtggtgctgagaagaatgtatgttctgttgatttggggtggagagttctgtagatgtctattaggtctgcttggtgcagagctgagttcaattcctggatatcctttttaacttctgtctcattgatctgtctaatgttgtcagttgggtgttaaagtctccaattattattgtgtgggagtctaaatctctttgtaggtctctaagaacttgctttatgaaactgggtgctcctgtattgggtgcatatatatttaggatagttagctcttcttgttgaattgatccctttatcgttatgtaatggctttctttttctcttttgatctttgttggtttaaagtctgttttatcagagactaggattgcaaccctgcctttttgttttccatttgcttggtagatcttcctccatccctttattttgagcctatttgtgactctgcacgtgagatgggtctcctgaatactgcacactgatgggtgttgactctctatccaatttgccagtctgtgtcttttaattggagcatttagcccatttacatttaaggttaatattgttatgtgtgaatttgatcctatcattatgatgttagcttgctattttgctcgttagttgatgcagtttcttcctagcatcgatggtctttacaatttggcatgtttttgcagtggctggtactggttgttcctttccatgttcagtgcttccttcaggagctcttgtagggcaggcctggtggtgacaaaatctcagcattttcttgtctgtaaagtattttatttctccttcacctatgaagcttagtttggctggatatgaaatgctgggttgaaaattcttttctttaaaatgttggatattggccctcactctcttctggcttgtggagtttctgccaagagatccactgttagtctgatgggctttcctttctggg

SEQ ID NO: 35203 - DNA, 1050 bp, Homo sapiens
agcaggtagcagccgcaccctcccagatgcggcttcagctacccaagttggcgctgtggacccaggcctccctgtgctgcttgcaggctctgaaatgcctgctcccgctccctggcttctcccagctgtcagcgcctactctgatctcagagcaatgtggggctgagcccggttgctgtcacagcctggctgggggtgcatacacctggggcagtgctgacacaccagctgcctgctgcctcagctccccgctgcctcagctcccccgctgcagacttgggcaccaatgagtgtgggggggttggaaaccgatgcagagctgagggcagctcagtgtggcctgcaggtgccccttggcacaagcacctgggctccatggagggtggcaggaggcagataggctcctgggcaaaagggggcaggtacccggtgaggccccaccttcaggctagggattgcctgaaggctgggggccaggctgacagtccggtcgaccagaatgggaacttgtggtgccttttctgggcctgcccatgactgcctgtgaaccaaagaatgcacacttcctcccctccgaggcctgtaaaagcctcaggctcagccagagcagagcagatgatggaatgaccagctgcagagaggagctaccctctctgctgagaactgaatgcttattgtgatgacttgcctagagagaggagttaccttctctgctagcagcctgaatgctcattggtataccctgcctgtggaaagaaaacctgcaggtttcctctgagctgttctgttgctcaatgaagttcctcttcatcttgcttaccttctacttgtttgtatacctcatttttcctggtcacaggacaagaatttgggacccgccgaatggcgaggctaaaagagctgtaacacagacaagactgagacctgctccttgcttgccacattgcgagtgaagagaaggagagaagagctgcagcctttcagggatcccagacctgggagctccccaagccagggctgtgactccttctttggggtgctgcagttcct

SEQ ID NO: 35204 - DNA, 1028 bp, Homo sapiens
ttgcaagtaggttttttattttttggctttaggtgagtcatattacatgagacaccacccagttaatactttccatacagttattttcaaaggttttcaagatgtacaaagaaatgtcaattcatggcctaaataaatgaacttgtggtgtagagttttaaaaaattctttatatggttagttttctcatagagaatggtgctctggctatggtaagtcaaaaaatccagacacaaaatttttaaagtgtgagactaatgtttcccatactggttaattctacttcatgacacataatgaaaatatttgcatttagttttttgaagtagactctgtgaaaaatgtcatggatttaattgttaaattcattcgtttatttgccagcgattttacttattgccaatttgtggaactattaaaaggaatagaagacaaggaatttaatggatttgtgccgtttgccaatactctatgattgagttgcagaagagttttacaaggatttatcatactgctgactctgaagattttcttgagaaataaatacttgacaaataatcaaagacaaaaaaatctttgtgtgatttgtgttttctcaccaatatcacattgcacataaatgagctaaattgaagctccagggaagggaaaaacattttataacctagctggttgttgaaactttcaatacaaatcaataattatgtttttacacataaaaaaaattcagttgattttaattatagtacagtgttatgtaaacttgatgtgaaaaaccaggagaacaatttgatgaatgctatgttgataatggtaagcttagtgttgtttttcaatttatacaatatttcgttgaacttaatttcattaatacttcattgacacccagagttgataaatttacttatcttggattgatgcaattttgaaattgatgagcgttttcatcaaagtcaaatcaattctaaaaaaagacgaaccagctttgtcaatgtagatgtaaatgtattaaaggacaatgatttttt

SEQ ID NO: 35205 - DNA, 1058 bp, Homo sapiens
agcaaaaactgagactttatcactagctgacttgcgccagaagaaatattaaagtaaagggagctcttcatggagaaggaaaaggaatcctgatggaaacatggaaatgcagaaaggagtgaagagcagtgaagggtaaccatattggtgaataacatattgttggtgttggacaataataatgttggtttaaaaatatatgcaatttatataataagaacaatttgaatggctggagggaagtaactgtaattaaagcattgcgggtttctagtaagtaaatttattaagtaaatttaactagattatctaactaaaatgatactaaaatatggttttaactaaaaagttaatacaagggaaaaataggatgataaaatcattttattaatccaaaaagaaggcaaggaatgaggagaaagacaactgtgtcatatagaaaatagtaacatggtaagtataaacccaattagatcaatcattgtgctaaatttaaatggactaagtatttcaatttaaagacttatactattaatgaattggaccaaagaacaaagcaaagctgatgcctctttagagacaattttaaaacttaaagactcagaaagcctgaaaataaaagaatgaaacaaatatattatgcaaagacaaatgaaattaggtttaaccttattaatatttgataaaatgcactttaaggaagaaacattactagaaataaagagggtcaatacattcgaaaatagatatgttccgaatgtgaatgcgaaaactaaaataattagcagtagaaataggcgaatgaataatcctaatggtagacttaagcacaactttctcaattgctgatagaataaacaggaacaaataacctggaaaggacatatagataattcaatcaatacaattaatacaaaagacctaattgacagatacagaatactgtgtccagtgacagttggtcaagtaacgcacatggaacacttaccaaattaactatatgctgagtcatagagtgcaagtcaactgcatcaaaagatgcagtcttgggggatggg

SEQ ID NO: 35206 - DNA, 1058 bp, Homo sapiens
gagagatggccttagaggtaccagggaagccaccctgctcccagggcctctcagggtaccaaaacactacctgaaaaaatatgcttttttttaacttttaaattaattttatttttaacttttacattaattaatttatatttaacttttaaattaattttatttttcagtgtcctctataaatatgaaaatatctctgcaatgggaaatgggtaaactgataccagctaacattttacaaagatattttaataactagataaagccagatcacttaagacaacattttagaaggggttattttatacatatatatgtataaaacatatgtaaaatatatgtgtgtgtgtgtgtgtgtgtgtatttcattctttacacataaaagtgaatataaatagatcttttggtatttccttcttacaccataatgggcaatttgtgccccacaatgaagcaaagaggacacccccttttagagacctctgctttacaaggttgacactatcagaagctgtccaggaattagaaaaggacatttgaaattatctttgcaaggttagacccagtgaatatttgcatttaaaagcttgtcttttaattacagtaaagtggaggatacaagatactcttttaaacaatcgaaggttgcccattgcctctaaaatcgtactgaacagatattcagcttctgttagtgtcaaccttgtaaagcagaggtctttaaaagggggtgccctccttgcctcattgtggggcaaagattgcctcattatggtgtaagaaggaaataccagaagatctatttatagtcacttttatctgtaaagaatgaaatcaagttttgtgaatattacttaatactatatcaattaacgaaagcactcttactcaggatatcagatggtcatggaacaacaaagaacggcagaggtgacagcatgtatgaagcaaaattaatgcaagataaaaataatgacattctgctaggtgcagtggcacagttataatcccagctgctaaggaggctgaggctggaggaccacttgagcccaagagtt

SEQ ID NO: 35207 - DNA, 1039 bp, Homo sapiens
attaactgtcgtcaccatgcagtgcaatagatcataaaaacttattccttttgtgtaactgagattttctatcctttgattaacattttcctttccgcatcattctccctcttcaccagcctttggtaaccccctttcgctctctgtttctatgacatcaactttttagattccacatataagtaaaatcatgcagtattaatctttctgtgcctggcttatttcactcagcataatgttctccagtcccatctctgttgttgtgaaggacaaattgtcctttttaagggttgtatagtattccattgcacatatacacaccatttttattttatccatttctctgttgatagacacttaggttgcttccatatcttgactattgtgaatataatgctgaaatgaatttggaagtgcagatgtctcatccacatactggacatattccattcccagtagtgagattgctggattatatggtagttcttttaattttcttaggaacctccatactattttccaaaatggctgtactaatttacattcccaccaacagtgtacaagggttcccttttctccacatcctcaccaatgcttttgtcttttgataatagccattctgacattctcactgtagttttcatttgcatttccctgatgattaaagatgttgagaatttttaaatatatctgctgaccatttgtatcctatcttttgaaaaatgtctgttcagattctttgaccatttttaatccagttatttgttttcttactattgagttttatccaatatatatttgtttctagcctcttatcaaatgtatggtttataaatgtattctcccaatctgtgggttgtctcttcactgttaattgtttcctttactctgcagaagcttcttagcttgatgcagtcccatttgtccatatttgcttttgctgcctgtgcttttagagtcctatccaaggaatcattgcctcttcagcagagctaagcccaggaaaaaaaaagaaaaaaagaaaaaagaaatattgccc

SEQ ID NO: 35208 - DNA, 1387 bp, Homo sapiens
agcaggtaaggttgtaatcaaagcaactctgtcatttgaaccatatgaattagagattcaataattcaggttgtagtaggagaaaagtctgttacttggatcatatgatccataaaattccatagtactaaggcatcgatattagataaagatgcaatgtggagcctctgacaggtactagtcaagaagttatagtgcttatcgctgtatttctgaagcaagcccatgctatttgcagcaaataatttatcatcaaaaggtagtgcctgaaatgctactggcccctaaagagaccaagtgagctactatgaagtgactatgtagccaaaacttcttatcgtgtgttgggtactgtcttattgtcttacccaacaagtgttaagcatgggcagtctcagaaataattaattcataatgaaatggaaatggtacatccagaatcccacagatcaggagggcacagatgaactgcacagacaggtagcacatagctccacatcactcctgcacctgtggtcccatgattgcctagattgtcagttactgagagaggtgtgttagagtcttccactatgccttatattggcttatttctccttttaaagataccagcttttgctagtgtgttaaggctatgttatcaggtacatgtacacataggattctcagatcttcctttatgattggccattttatcattatgaattgttctttcttatcttttagcaatggggaagttttcaaagagtgcattatcaaaagtcctctaaatgtattgaataaattgttgaaaactatgtgttctgttgttcataatagaaacaataattcaacaataggaaaaaattctgagtgcctgccagtagaggagtaaccaaataaatgatattacattctcatatgatctatattttcaaagaatgtttatcgccacgtgtggcaggtgaagtcatgctaataaaatgtgaaaactacacattcagaaagttacccctaatgcttaacctggcctactccatatagtctgcaaaaataaaattcctttatttatcactccataaagagttatttttacattctcagcttgccgaagtaggcttatgatgattttctgctttactgccctgaagtttaacctgaagccgtttaattcaattatctgtaagactagcatgctctttaaatacaatatttaaaaagttattgctattagtagagtaaaaaaagcagttcacctacttttcaaatgccatatttgtaggttttatggagagtacaggagtccttcacatgttaaaaaacaaacaccatacccatccattaagaagtgtaaactgacagtatgttgttctcattgacttattcaacagatattttttggagctcc

SEQ ID NO: 35209 - DNA, 1032 bp, Homo sapiens
aactaaaataacaatggttttgataaatattctcgtttttattcctattacccaaaaaagtgacttctgaatatgctttaaatatttagtttgttcttgaactagcccttaaagcactctctattatttattattgttgttaataatacttttgagcttataagatgagtctaccagaaatagtacgaataaaccagcaggtacaatctgaatatttgtatattggcaatagtttgaatcccaatttctcattcatctcaggataaaagctgccagttgcctctttaatatctttctaagcaatctgatcattgcaatatatgaagtagcagtaacaaaacgcagctttcagtacttttcaattgaaagatgtctcatgccttgtcaaaaatctgtctcaacaattgaagaagcaaaataatttaatattagactacctagcatgtattgcaaaatatttttcagtatatactttggcaaatatagtgctctttcagtcgattgaaaacttgtgactagtggaaatagaagttgagaaagacaataaatgaaagtaaacaggctatggacctgaattccatttagaatagaaaagctggtataaaactcttaagaacttaagcagtgaagtggaaaaactatgcttcacaacaaaagaacaattaaaaatgtatctcatttgaaatacgtgctggggacaaatttgaaagaacttaaaaaatgttgtgttgcaataatacttggctgatttctgttttttgatgctgactactggttcttttaatgaattattcttattatgaagatcaaatatgacttcctatatgaaaaggaacacatctgctgcttagaagagtggaccagccctgtgcaccagaagatctacaccaccttcatccttgtcatcctcttcctcctgcctcttatggtgatgcttattctgtacagtaaaattggttatgaactttggataaagaaaagagttggggatggttcagtgcttcgaactattcatggaaaagaaatgtccaa

SEQ ID NO: 35210 - DNA, 1050 bp, Homo sapiens
cacagagattacccacttgggagaagagtcttatgaataaaatttgttgccagttatttagttttaaaattttctatggcttctgtgagtcatggaggttaatggaatacatttggtttcagggagatacatctggggactataagaaagctcttctgctgctctgtggagaagatgactaacgtgtcacggggaagagctccctgctgtgtgcctgcaccaccccactgccttccttcagcacctttagctgcatttgtatgccagtgcttaacacattgccttattcatactagcatgctcatgaccaacacatacacgtcatagaagaaaatagtggtgcttctttctgatctctagtggagatctctttgactgctgtagtactaaagtgtacttaatgttactaagtttaatgcctggccattttccatttatatatattttttaagaggctagagtgcttttagccttttttaaaaactccatttatattacatttgtaaccatgatactttaatcagaagcttagccttgaaattgtgaactcttggaaatgttattagtgaagttcgcaactaaactaaacctgtaaaattatgatgattgtattcaaaagattaatgaaaaataaacatttctgtccccctgaattatgtgtacatgtgtgtttagatttattattaaatttatttaacaatgttctctctttttaagctaataattgacagtggtgttagttgagaactgaatttacagttggtcttttgggcagtaagaaatgcaaaccatagactgaatttccttcatagtacatgatttttcctaaatataggaaagatcgaaggggtctctggtttatttgcaccatgtttatttaggcatctattaaagcaatgcttgtggtgctacttgcttagtagaaaagctaattataaaacttaatgcaaaaattcagagtactacctttctctttcctctttcctattgtgaacttgcctcccatttactgtctgtcactttctttgagataaataaaaaagacaataa

SEQ ID NO: 35211 - DNA, 1049 bp, Homo sapiens
tccatggttgatttggcaggacctgagatctttctggtttttctttttgctccattatccctagtgttttggttttctttcttcattatcataagatgtctgctctagctccaaacttaaccatttcacagcaggaaggaaagaaaagggtaaactagtcctatctgtgtatcactttttgtaagtgaggagatttctcagcatcccctccagtagatttacctttaggtctcattggctataactcgtaagggggctggcaatcagtgaacaaagtatatttacaatccattgcttagggcttggcacattgaggctttgagcacaaggttctgtcagcaaggaagaaggggagatttgtgttcagtaagacactacctaatcaaagtaaataccatctttctggaaagagtgatccctacatgattagggaatcatttttattttttctagtgtttgacaagtacatgactatatcaggatttcaaattgaggaaaccattgaccgcgagacttctggcaatttagagcaactactccttgctgttggtaggtgatttacaatgtattgatatttttggtggtaagagctaaagcattttattcaattgaggctgcatctgaaaataaccacctaggtgtgaaggaagagcttgatatgatatttaggggaagcaaactcccaaatttccaattcagaaatttattttgatgttggaaatacaggattgtctggttagttcatctaaatcctatggaaatactaagataattgtttaaaaatcattttgaagctgcattaaaaatattatttattgataaacctgaaatgtcgtggacattatctcagaggcttgtaaacattatttctgatacctgtggaattttagaatttttttgaatactgttctctcagctttgaggcagactaagaaattgtcatctggtttagaaaagaagaatatctttgatgtaatagaagatgtgatgatggttgttttcaaattaaataatttagttttattttaattaaatattcagaataatct

SEQ ID NO: 35212 - DNA, 1048 bp, Homo sapiens
tcagcaaattgcattcatcttgctttaatatgtagacttagtttgaaatgaataaaaggatagtacagtcattgtaaaggttgattctttgggttttaataaattattctcacgtcaataagtggattcagagttaacgttgatgtttgtatataagcttatttttttaggcagctatacgtgcacaagaaagcatattttttccccatgtcaaaaaggaagtatgggcactcaaactattcaaccactacttattgagtgcttctatatgccaggcactgtgctatacccacaatcttttaaaaatttattgtgatctttggaaatatgaaaacattttatagctagccttggttaaatctcagttgtaaagagaaaatatgaagtgtacttttactcatgtgctattgaacagctatagaacaagcaaaacagaaaaggcagacaacttagcttccagttaaatcctttcccagtctatacatggatgtatcaacagtgaggtagtcataactttctcctgacccatactgttgcttctgaaagattggaggttatggcagacattttgggaacatgtaaccttgcaccattgccgtgctttgttgcttggacccatgaatcttctgtggcacagttcagtggcaagctccaaaggtgctccaaactcagtgagctgagtttcagagtaggacacattagaaatgaaaactattaatacaagatgatgaatcaagtgagttaaaattcagggagtaaaaaacaagtgtgtttaagaacctggaaatgagatggaggaacaatttattaattgagtttgaaatttttgcaggctttatttcaggctggagaacttaaatgggggacagatgaagaaaagtttatcaccatctttggaacacgaagtgtgtctcatttgagaaagggtgagtgaaaaaaatctgtatggggcagatacattggtaaatttggaaagtgcatgagccagtgtgacagaatacctgctacatagcagggacttagagaatgaatcagtttttgtatttct

SEQ ID NO: 35213 - DNA, 1032 bp, Homo sapiens
aagggatagaacttttcaagtgttattcatggaatgcccaatggaacaatttggtaaaagagcatactctcctctgaccttcaatgtgaactcatgggaggccaatgccacctgctcactttaactcactcaagacatcactggagttattcttgggcaacttgagcacacaatttaactttccattttattggtgtttgtcaagggaagtcattcttacactggtaaagagacacaacattaaacacagagcattaaagaaatacacaacaaaaatttaaatcattttacaaatcttcactttgttatcaaaaccttcttttctaccacgatgcaaacaacttagtctgttctccagtgatgttttttttcccttgcatttgattttaagaaacaggtcaaaggtggtaggatggatagacaaatggaaagaagcaaaaacaagtaagatggagcatgaaaaggaaaggaaattacacaaaagtaagcaataggccagttcgagtttaacgctttgaactatatcattcactttttctgagttgggattagagcaagggttaggattgggggttgagagcatgtctctgacctctgatgtgtttgtactcctcagtcttcttggaggtcctaattttttccctgataattattttgctttacagctcaaagcataatcaggtcacactgacatttccctcttttatgcccttcttatttttttcttagtacagtgataaataatttattttctcattagcgggaaccattattgcaggaaatattaacgggcctctaatacgtacataaggtagggccctagtgtatgtacatggagtggggaggcaattgtcttcccagcttactgttttttggagtggctccaaggtctttggaaacctgcctcagaagaaccacccttaaaaatcactgcatagcggcttagcagttgctcagcttgtggtttgcttcatgatttccagctcctagttaatattacgtggaatgctggaggtggggggagggtgcggt

SEQ ID NO: 35214 - DNA, 1029 bp, Homo sapiens
tgtttccatagcattttttcttacttgtctgtgatatttattgttatctgcttaaagtatataataattttttattttttattttattctttttttgagacagagtcttgctttgttgccattctggagtgcagtggcacgatcttggctcactgcaaccgccacctcctgggttcaagtgattctcctgcctcaacctcccgagtagttgggactacaggcatgtgccaccacgcccagctaatttttgtatttttagtagagactagtttcaccgtgttggccaggatggtcttgatctcttgacctcgtgatctgcctgcctcagcctcccaaagtactggtattacaggcatgagccaccaagcccggcctctaataatttttatacaaacttatttctctaagttaaactttattttcatggacagtctaattttaaatatctttgtatgtagcctgcaaggacctaaaacatagttttgcacataataggtactcaacagatgtttttcggatgcctgaataaaatatatgtgtatggaggtagtgtagaagtatgtgctttggaggcagatgtactaatgtttcaatcctggctctgtgacttaccagctgtgtgaccctagctggttgcttaactctctgaacttcagttttcttttctgaggaatgaaaataatagcacttactttattgaattgttatgatgattaaaagaagataaccatttgagtcattctatagtacctggcactatgtgtttactaaatatcatctgttaagattaaagactaatagaaatgtcatgatttctaaaacataattgagatcaaagtagtaagggtgtattatttatctttctagaaaaaaaaattatctttttttttatttgttttgagacagggtctcactcatcagcccaggctggagtgcagtgtctcaatctcagctcactgcaacctcctcctcccaggcccaagtgattctaatgccttagcctcctgagtagctggaattttaggagtg

SEQ ID NO: 35215 - DNA, 1021 bp, Homo sapiens
tgacatctttgtttcttatcaaaggattccagttccactttctatataaaatatattgtgatatatctacatatgccttattacataattgtgctgaatgctggtaatatccgcaatgcctcttgactttaatgggaaaaggcatgcagaccagtaagttccccagtcacttcagagactataaaacactcaaagcattttttaaccagctaggtttaaatctctcatagagttatgtttaacatcctgagtctgcagtcagttgctgtcaagtcgtataggaatacgaattgtgatcatagatcaaagattttcagaggtccttaaaaccaactaaatacatgctactttaaaatcattgctatcatgcagaaaagctctttagacatgaagacagaaataagtgttaaatggaactacataaagctctttaaagattatttcttaatttctactttttgggagttaaattaagaaaggaactttataaatgttttgctaccattgtagaacacttcattaacttttgtgccatgctaagagtattcgtcttaaacatttttcaaactttatgtactttatgttgtgtctcagaactgaataaaatattgaatttttccattgttatatgttaccatatgttaagatagtaaagatacaaagtttctataatagatgtttctgatagttttatagtatggtccaggattccaagtgtgaaaagtttttgcttatagctatggaactgaatattttgtaattttcttctttgcggttggaaaaaatgttgaatgaaaaagtggcagattcagctggggacattcagcctaagattcttggaatctgaagatcagagaagtatgaagataagcctcatggtatccacaccatgtggataaaaagctgacttttttttttttttttttttgtccatgcccctcacaactgtagagctcttaacaggcattttttctttatttactatgtacaaactggtatagttttaatatttcatcttttt

SEQ ID NO: 35216 - DNA, 1023 bp, Homo sapiens
actataaaaattttttaccaaagtctaggatgtagagctaaacacaggcccagagttggaaagaaatcaaccagggagaaataagttgccctaaaaatggaaactgtaccttccaacaccaatgagatgccactaaatctatctacactgataaaagaggaaaggactaaacttaataaaattgttcataggctttgaagccattacttgattaatacaaggaatgcattttaaatgtaaatcaatccaatagtgtatgtatgtagaagagaaacctgtgaatttataatcgataactagcaaaaatctaatcatggtgacctaatcaatctgtctcaggagaaaggattggaatgaggttgtagtttagaaagcagaagtctgatgagttgtaccgtaatctccatggggggtggagagggaggaacaaagtgggaagaactgtatggctaaaacggcataaaaaacaagaagcatttcccaagcccttgcacaaaaggggaaaatcaatgagaatttggagttttgaacaaagttcttactaagaaaatgtgtcatataatctcctcatttaattaatgaggaaactaaaatctgaagagtttgagtaacttgtgtttcctgaattggcagattaaatatttaatacaacacataggttgtagtctccccatgagtcggggacaaggaagaaaggatagtagaaggtgaagtagggcagggggtctcctgcggtactgaatggtgtgagaatccactccttccactgaagtctgcctcatgatttcaaataagatcagtttattccttttatattgccatatgccaaaggaagcacttttttttttttttgccacaaaagggctcctcaaatgttttgtgtgtattcctgagttagaattcttttcaaataaaaatgctctgacttttatataatagaagaatattgaaattatactttaaagcatattaaagataccaggaaatatcatcaaaggtgtgttttaaatgccattttattat

SEQ ID NO: 35217 - DNA, 1033 bp, Homo sapiens
tttaggtcaacagaactgggaaacctacaagagaagatattttaaagtcaatcaataggtttgcaggtccctcttcaaaaaaaacaaaaaacaaaaaaatgcagaaaaaagtaacaggtaaaagtcaatcaagtagaataaaaaacaaatttattctctgttaccccaaagaacagaatttggaccgatagttattttggcttcaaaacaaaggagttgttttctaacagctatagttgtccaaaaatagattaaaccagctgtctggaaaaatagcaggccctcaatcacagaagtttatacagaagctgtgtaatggtaatctttcacaaagtttcgtgagtggtataaaaacatgaaaaacaatgattcccaaggtccttttcctttctaaaattttactctgtacttctgagttttttttctatttgtctacatcagtcttattacccttcattcacactttttagattgttaaaattcatagtacaaaatctactaataagagtcaaatttggcttctctgtagaattaagtgagagaatgaatgtaaaagtacctgatagagtgcttaacaattattagttgaatttgaatcagtaaaaataccaagtgagaagaaaaactttcactcctttcaggaaggaagatatctaaccaccccgcagctacccaaccacccacatcttatttcttctcccagtcttaacggagggttgaaaaatgaacttgggtttgtttgcaggaaggactgtttgaagtaagtaccgcctggaatctttacctggttaccactcaatttcagttttggaacctctctctaggatttccataccctggacagagaaaatcaatagtctttatagagttagaatgtcttccttaaagagtgactcacaggcttgtaccaagaaagctatataatttctggaggtttgtggaatgtggaagttaatctatagacttcttttgtgttagttagttagcaatttgagcaagagggaaaaaagatgaatctgttattggtcagttt

SEQ ID NO: 35218 - DNA, 1020 bp, Homo sapiens
acatttggggacatatggtaaacacagaaatgccgaaaagcaattcatctgagaatcatttttccccttgcccttgaaatataatatgctgtgtctacagcctggcttggataggtataggtgaggaaggaggatgggaaataggcaactattgtcaaacatgcagaattgactgggtgggggacagagggaggaattaatcattttatccttccttggcactctatttttcttgtcttttttgccttgtttttggatgttagacaggaagttctggttaaatttcagtgggtacaggtagaggcatatgaaaaagaatgagtatcttatatttgaaaaatgagaatattgtgtaggtctatagaatatatgtagataaatgtgtataagttacctatttcaaaaacgtaacttagattcattgtaaaaaacctattagcaacagtcactagaatatttagcatttaaaattagtttttttttctatttttgtgacacaggatgacagtgatgtagaatggaagtttgctcgttcaaaactttggttatcctattttgatgatggaaaaacattacctccacctttcagtctagttcctagtccaaaatcatttgtttatttcatcatgcgaattgttaactttcccaaatgcagaaggagaaggcttcagaaggatatagaaatgggaatgggtaactcaaagtccagggtaggtatcgaaaacttaccaagaccttaaaataaatgttctgtcttttttttcttgtcttctgatgtttgttcaataatttttatgtgtgaacttagaagatgttaaaagtaactgtctagtccacagtctttcacagactaatactaaatattttcatgatgtttcaagaagtcactgagtcgaggccctgcttttgatcagaacatcatataaactgccagattaaaaacaaacaaaaaagcctttaacttgttaaaagtaaccagaaaagtcactgttagaaaacactttgtttttgtatgttcca

SEQ ID NO: 35219 - DNA, 1030 bp, Homo sapiens
catacaaaatcaaacagcaaattcccatttttgtaggagaaaggaatggttattgtgacttgacttcagctttctcctgtggagttcagagaattttcacttgatgataacttcagaaaagctaggcattggcaccatttaatcatcagttcctgaaaacctgaaagaataatttttctatgaaatgtcataacaaagtaatcctgctcttggagtatattatggtggcattttacatctgtacagtagttaaaccctaacttgttttttacttttcactcttagatattgaaaactgttaacttacttactttgtatcttattttttcaacagtgtagaagaaagtttcaagactttattttggtcaatatttgggttgtctgaagtgacttccgttgtgctcaaatatgatcacaaattcatagaaaatattggatacgttctttatggaatatacaatgtaactatggtggtcgttttactcaacatgctaattgctatgattaatagctcatatcaagaaattgaggtaaatcggttttctatccatagtatctatccttgtcatcctattctgatagtacacatctgcttctgtaccctgtggctgagctccagctcatgtaacaaagaggcttatatccacacagagcctgagcctttccctgtgttttctacctggatagatagctctacacattctgctgtcttctaggtgcacagcaggggtccccatgaatttactgctgctccgccttctctcagggtatatttcagaagttttgaaattagtggctagaagaagtattggccctaaggaaattactctctcttcaattagccagcccacaattctacctggtagaatgaccagatgtttggcaaacactaatggtattctttatccagtcaaaattttgagtattctagaaatcacttgattcttggttttggattgggctgggtttggtacctctcttcactgttgtatatatgttttcttatgtccttcagttcagttttcagtat

SEQ ID NO: 35220 - DNA, 1033 bp, Homo sapiens
attttcagaaatatctcggatggttgggctggttgcagcagaaggaaacctggctaaagggttgggtgggtgcaaatccagcctgtattcagctcaacaagccttgcatccaggtgggctgcagctttctacccccaaaagaagggatacctttttctaattcacccaaatactttccactgaataaaagcaaattatttgtgttaaaacactaaacctcttgttcttagaatgactatcggaagctctccatgcaatgcaaagactttgtagtgggtgtgctggatctctgccgagactcagaagaggtagaagccattctgaatggagatctggaatcagcagagcctctggaggtacacaggcacaaagcttcattaagtcgtgtcaaacttgccattaagtatgaagtcaaaaaggtgagtgggcctactttcatctagtgccatattagaataaacatgtgatacaaactatgccataatcctaggaaaattattaaaataataagactagacgctagtaggctgggcaacataatgagactgtgtctgtacaaaaaagaaacaaaattagctgggcatgatggcatgtgcctgtaatcccagcactttggggcctgtaatcccagcgctttgggaggctgaagcaggaggatcacttgaggccaggcgttcaagaccagctgggcaacatagcgagaccctgtctctactaaaaatttaaaaattagccaggcatggtggcacgtgcctgtagttccagctactcaggaggctgaggcaggaagatcacttgagcccaggagatttgaagctgcagtgagcaatgatagcaccactgcattccagcctgggcaacagagcaagcaagaccttgtctcaaaaaataaaataaaaaaatagatgctattgataaaagagttttttgtggggggtaaagttgcaagttaaatgtgtagcttctgatcctttctactttttacccatggtgggaccttgaataagtcataaatttttaaatttcagttccc

SEQ ID NO: 35221 - DNA, 1057 bp, Homo sapiens
tgtcctctctagttaattttcaactcctgactccacgaatacagttttttcaatggtaggaggtatttctggaatatatattctagaaataaagcattttcttttctagccgttcacttttaactttgacttatttgcttcaaaagtcagtaatgtggaagctttatctggtactttttggtacaattcatcccaccaaaaatcacagatttttaaaaggaagttatcttgaacattggaagtgggtaaggtaagatacagatttatacaatatttgtgcaacattttaatagccaccaaaatattgtacagattattgaaagattatagatagtcacgatgttaaaagtgtttatttagcattgtttttcagagactctgaatttccgaaaaagctttttattcatgaggaaaatctgagaacttcataaaattcgattttctacctggcgtaaggatgcacaaggaaatgaaattatttacctaacatcacagaaattaagatgtgaactcaaatcactgtacacatcaattgacataactttgataatgcagctaaataaatctcaactaatgtggttgtgttaggatttcagtgcgcattgatctggatgtacaattagtgcccagttgctttactcacaaagtaattctagtgatttttaaaccataatcaaaccttgtcgtttcagttccaagaggcaaatatataatactagtaattaaataattcttattacaaaggcacggttgttttcaataaaatcaatctaggttgatgctcaaattttataattgctaaatcttgtctgcatctttgaaaagataaatcctataacttggggatgggtgaatccccttaagagaaacgcataaggtggagggtgtgggggcaagtggcatgtgcctgtagtcctagctacttgggaggctgaggtggaggattgcttgagcctaagggttcagggctgcacctgtgatcttgccactgcactctagcttgggccacagagaccctgtctctaaaaaagtatttaaataaacaaaaattttaaaa

SEQ ID NO: 35222 - DNA, 1078 bp, Homo sapiens
atctgagggtaggaaattcctggcaaaataattttagtgttaacattactagagctaaacattctcccccattcacccacattccttccttatttttcatgctagaagagatacattgtcaaggccagctgagattatgtttatgcattgtggatgatgtgaatattgactcgttccatcagttcagattaatgaaatttatcttagtactataaggaaagttaacaaaaagacacttccatttgtgaatttatcataagatgagtgatattaagtcagctcttttattttgaaacaacagtataatttgttctaattgagatatctcacttctcagtgtcagaagtttttaaagacaaaataaaaatgacatgtgacttgttctaaaatcagacatttcagttcaaatatatagtatggaggtatagcttttgaaggaataagaagtattaaggaaaaccgtaaaatactaagaaatacaaaggaaatattgatgaaagaatgatgtcctaatgttctcaacctggtgtcttttgggagaaatagtaagatttttataagtgatttttccctgtagatagcaatcattaaattaaaagcctttccaccaagatgtgacactttaataagagtttattttcccaaaggtaacccctctgagtattgaaattctgacatatatactccacatatatttcctctcatcaatatataatattttatacaacatggaatttctagccatttgaagaatatcagttcatagattaataataaaaatattaacccaatgaagtcagtaccactaatagtcataaaacatacttattactataatatttacaagatttgtttaaaatccttgtcatagagtttggtcttgaaacaaagttctcttctatgcagttcttgtccacctaaaagtcattattataccaacacacacacacacacacacacacacacaccccacacatgtcccccaactcagacttgcacccttcccttgtctcccacacataccacacatacactctactccacactctcccctacacatcataccctactcataaca

SEQ ID NO: 35223 - DNA, 1030 bp, Homo sapiens
cggatggtggcgggcggcgcagaccggctgagccggggaggtggttctccaggatggggaccgaggttctgcagcgccccctgctgccggcgagaggcccaccgcccgaggccgagacctccgggatgacccctgcatccccaggatcgcgcgctgctccgcgcgcgcagagtctgcgcctggtcaggctggacctgccggtagaacacaggaacacaatcagtggctgggagtagatcccatagggaagagttctgattttaaatgagcgacgcatcccgatgtggttcagttattgctgaagataagcgtggaatggaaacggcccaggaaatggagggaaggtatatcctttgggatgaaagcgccaccagctcacttccccgtctccctaaggttttaaaacattgtccatttttccttttgccaaattggtttttataacgtagctgtttttttattccttttaaaattcttcttttttaaaaaccttaaatcctgactacatgaaacaccggaactcttatctgagaaagtagggcggagcagagattattcactttgccttccgaaatttgaggtcaattacacaaaaccctagggcaaattctattgtaggcttgctgtctcactgctaatagaacatcttttgtatatgtttgctaactttacgtaattcagcaagtaaatgttgtggtatacttattttgtagaggtcgagaagaagacccagtcatttttaaggagatatacattaaaaacgtttcttctagaggcagggcagcaagctcttcatgtttatttcaggcctgtcacttggtaacatcggagactagcttgatctctgtaacagagattagctgtttattccacctttgaggagaatccggccactgtttcataaacagtgtttatttattgttgtttaaaagtgaacacgacagccctaggatggactccgagaaggatacccagggtcatttcaggagacggaacagcatagctgaatttaaaattgagcaggatgctg

SEQ ID NO: 35224 - DNA, 1075 bp, Homo sapiens
tgagccaccatgctctgcctcatattaatattgatacagatggccaaatatagaaatatttataaatacatgtatatacccaggctagtatgtaccaccatttcttgctctgtcagcttaagcttagagggcttagaagcaaagatacttcagtagcaacaagcacacccagcattccagtttgtggtttctaataccattctctaataaaagaaaccaatgctctttggagaaatggctcattctagggtggagtagggaatatacaaaatgagcctggagcatcttgtaggccaaaaagtaatgaagtacttaaaataaatgcattgttgagagtatgtcaaagaggagggcacaggagccaactgaaagagctcccaatggccaaagctggaactatttgagcaacaaaataaataatgtagtattggattgtaactcaaagtataaaataaatatctgtgaatacatattgatataaatgattgaataaataaataaatggaggaaaatgaacacatttcccaggcaaaagaatgacgatttatgtagatactacccctcaaggaggtggagcataaccatcatctccatctcttaagtgtggactatgcatggtgacttccttccaaacagtatagtatggaaaggaagtgaaagagtaactttacagtggacacaaatactacctcagccaggtaagcaaggattatatcatgagttatcagtcatgaagataacatataccattatatgccacaaaaatggtactttacttctatagtcttcctctcaaacactcaaatccctatctggccatgaaaaaaacatcaggtcaggtgcaatggctcacacttgtcatcccagcactttgggaggccaaggcaggaggattcttgagcccaggagttcgagaccaatttgggcaatatagtgagacctcatctctactaaaaataaaaacaaattagtagagtatggtggcatgcatctgtagtcccacctacttgggaggccaaggtaggaggatcgcttgagcccaagaattcaagattgtggtgatctatgatcacac

SEQ ID NO: 35225 - DNA, 1102 bp, Homo sapiens
ccgtgtggctctcaggtgggccaccacactgcactgttctttcttcattctgtgggtcatgccagcctcctagtcagttctggtgagacaacttggataccttggttgccagtgaaggattcacatgcttattatgtttttttttttccaatgggagcctcctaacgctgctgtttctagtcagccttctgggccctgccacctattgtaagtttcttgaggcctcccagccatgtttcctgtacagcctgtggaactaagagtcaattaaagcttttttcataaattacccagtctcagctagttctttatagcagtgtgagaaaggactaatacagataattgctaccaaaaaagtgaggcactgttataaagatatctgaaattgtagaagcaactttggaaatgggtattgggcagagattgaaacagtttggagggatcagaggaagacaggaagatgagggaaagtttagaacttcctaaagacttgttgaatgattgtgaccaaaatgctaatagtgatatggacagtgaactccaggctgaggtagtctcacatggagatgaggaacttactggaaattgcagtaaaggccactcttgctatgctttagcagagattggtggcattgtgctcctgctctagagatctatggaaatttgaacttaatagagatgatttaggttatctggcagaagaattttctaagcatcaaagcattcaagacatagcccagctgcttctaaaagcctatgctcatttgcataaacaaaggaatgacctgaaactagaacttatatttaaaagagaagcagagaaaaaaagtttggaaaatttgcagcctgaccatgtggtagaagagaaaaatctattttctgggaggaattcaaggctgaagaaatttgcataagtaaagaaaagctgaattttaatagccaagacaatggggaaaatgtctccagagcagtttagagaccttcgtggcagctcctccaatcacaggcctggaggcctatgagggaaaaatggttttgtgggctaggcccagggtcctgatgctctgtgcagcctcaggatatggcgccctgtgtttcagcc

SEQ ID NO: 35226 - DNA, 1051 bp, Homo sapiens
ttccgtctgtgtctattccctaaatatcatgagtttataataaggaaagtgataaaaatacagtaatgaaataaaaatctgaatgtttctaagaaaggttttggaaggaaaaatgacctgaaatcagtgcgtactgcaaagtacagccaataatttttgttctttgttttcacccccaccctcactggaattctcaccaaaaatagtttgatacttaaaaaacagaagtaaatacttttctcaatattgttttggctatgcaaatatttgttttgcttaatgtcctccatttacacttctcagcaaatgtagttgcaaacaaatgctttctttttatttttcccttggtttgaggtatgtaaatagccaaaaatgtacattgaatttcacattgtaaaagttttattttatcccttgtatgatattactcaaaaaatccctgtgtatatgaaagtgcataataaatatatttgctttacagagaagatcttgttttaattttgtccttgaaccagtagaacatgcatgatatgcatatagcataaacaactgttagttgttttaagttattatcttaaataaatcctgagcaaatgaatttggaaacattttgcaaagaagaaagtgaaatataacactgtccaaaggaaggtagaaaaacaaagatttactgtttatgtcttcctaagcctttttaaagacttaatgttcttttcccccccgtgactgattatatactatatcacaccatgtcaggttttgtgcctctgagaattgcagtaatccaataacttttgtatatgtgtgctccttgatcatcagaatattatggccatcttatggcggatattttgggagtttattgcaaacatggtcattcattttctaaataaaatttgtgtgtttcttcactcagtaaacttgcgtcacttcttcatgacctctttccccaccagaacacagcatacacatgctgtatgtatacatacacacaaatggctttttgaatttgtgggttccacatccctggatgcaaccaatctcagataaa

SEQ ID NO: 35227 - DNA, 1056 bp, Homo sapiens
gattaatagatattcttagttctgttttaatgaacagataactattataaccatcattggtaaagaacatggtaatttcttctatctaaaatccatattattaagtatttagattggggggagatttattctctaaattataaattctctgtaagttttctttatgaaattctatactttcttatagaattaatcctatgtccctactccctcctcttcattcccctgtcaaacacttgagttttctttcacagctttctattcttgttcctatcttaatgaaaagagcaaacttcaaagtcaaacaaaacaatcaaaatttatcactttctagctgtgttactgtgagcaatttatttagcctttctgagctttaggttcctcattttttaaaatagaaatatttatctcccaggcttaacagacaaggaagttttataaataatgaatacttaaactactaccttagttgactctcaataaatgtagctctcctttattcctttctgtagaaccctacctgttactgtggagtttctgtcttaataatctcaagttccaatcatgacatcttagttaattaggtttaaattttagatatttattcataatgtattatctttcatgtaaatcaagtagtgtaatataaagtcttacattaaagtaatgtaaagtattacattgcttcagaaactttaaaacactatataatgtaaaataatattatttcttaagtaacttattttattagcaatgtactaggtatttcccttatctaacttaaattttaaagtgaattgataaagtcaaaagcaaatggacacacagaaaaagatttggaggcaaatcatctcacatcattggtaaatatagattgctgtaaatttctaggtatgttttaaaccctccttaggtgagcagtgactttttcacaattgaaatttatcttttgaaattatttctgttgaggatttaataatcaattgtgtgtgtatacatatatatgtaaaattagattctatttttatatagatttagggctatataaatctatat

SEQ ID NO: 35228 - DNA, 1038 bp, Homo sapiens
gttatagatgaaaaggatttcttttaaaccctattttggttattgtatttgtatcttttgaaatttacattgaaattaatttttatcaaatagaaaatcttttgaatagcattagatttatgttatttgatgagagtcatatgaggtcaccttttgcctcttttccataaatccatagtttgatctgtggaatagctgtcattctttctgagactgtcacttaaaattaatatttatttggaaaggagaaaaaacttgaattcaatctcaattgatatgttggttaaattgctgcttagagtgacacaggtcacaaagtcacaggaattcaaagggaaaaattaatggccccagaggataagaaatccttataagaaagcaatttgttggggaaataatagattgttttcatcccctgaagcatttcagtgatacgggaaagtaaacaggaaagcaaacatacatgtacctacccaatttttttttttttttatcatatctgcttctaaatctgaattttctgtcttgttttaaagaacaaacaatccacacttaaagtccctgggtatcctttctaattcagatctactctactcacacacactccatagatgacccttcttgtgaatttactttttataaaagtaaatgtagtttgaccataaggggagatatataggtatacacacgtaattgttacaaactctagttttgtacattttttattctatagcaacagttttcaaacttcttttaattcatttacagacaattgttttttacaataacacaaaacaagctgaatacttggtgataaatctaatcacagatgtgttcagtctgtacactggaaaccaaaacattaagaaaaattgaaaaaaattaagtaaatggaggagtatatcatttttatggattagaggattcaatattgtaaacaggccaattcccacaaaataacctatagattcaatacaatcctaacaaaaatcccaattggatggtttgtgcattcagtctcttacaatacctcacatc

SEQ ID NO: 35229 - DNA, 1048 bp, Homo sapiens
tgtgtactaagtattagggctaaagtattgagccaagcagaacactaagttaagtgaggtaaaatacattgaacaaatagtcacaagaatacatgtttagaacacacctttgataagtgctaagaaggaagaaacaggatgataaagcatataataggaagcttgattattatctacaagtctgggaaaactgactccttatctaggttctataattattcttagttcataggccgttttctactaaaccatgtgatcttaggatcatcaatattagcatcacctgggagcttgttagaaatgcagactctcaggtctagggaatcagaatctgccctttaaagagatccctaagtgaatcctgtgtgcattagagtactttgagaagcactgtcctaggctggattctagagttttctttgactgtcttctgtcataatattctggtctaaaatatttaatatttttcttgggatagtccttgaattcatttaccctaatctacaatttttattcacccattccagttgatttacttacttcattcatttttctcacagttgcctaattaaccatagtaaaacagtgttttctttaggacattcctctgagcctgtgataacccacataacaaattcaaatttctctgcttagctttggaaacttttaataatttggttatgcctcatctaacatgtgtttctataacctcacagagcgcattatgctcattcattctttcaagaattatttttaagtctatgagacatattaaagcttctagggaatatggacaagtgagaacattctttttcttagcatttaataaaacctttatatgaacagtagacatatgaagcttttgtttgatacatgttgagggtttgatttttttgcagtttgcttttaggtctcgtttttagaaattttgccttttttaattttaattttgtgaagtaaaatggtttgatttttatgaaataaggtaactagatactttttttttttgtttttaaaaatctctttggctgggtgtggttgctcacac

SEQ ID NO: 35230 - DNA, 1050 bp, Homo sapiens
ctgttatatttattttaaagtactaccttaagactgatgttattttgtagtctgtgtatgttaaatcctagtttctatattaaaaatattgggttggaaatgaaaagcaaaagtaagacgagtagctacttctcacccattacagtggctacaattaaaaaatataaaataataagtgttagttgaggatgtggggaaactgcaacccctcatacattgtttgcaggattgtaaaatgttgcagccattctggaaaacagttgggaagttcctcaaaatgttcaagatgacaatcttaacaaaacaatgttaacaaaaatgttaaacaattatgacccagcaattccattcctaggtatatgcccaagaaaaatgaaaatacacacccccgcaaaacttatacatgattgttcataacaatcataagagtaaaaaagtgaaaataacccaaatgtctatcaactgatagatggataaataaaatgtggtatgtattcatacaatgccgtattattcggccataaaaaggaatactgatatattctacaacctggatgaaccttgaaaacattatgtttggtgaaagccagtcacaaataagtacatactgtataactgtacgtatatgaaatgttcacaataggcaaatctattgcctgttccctgtggctggcagggagagggctgaagggaaatgggaagtcaccgctaatagataacaaggcttctctttgggatgatgaaaatattctaaaattgtgatgatggttgcacaactgaatatactaaaaactgtacaactaattggatgatttgaatgacatgtaaactatatctcaataaagctgttcaacaattaaaattttgaaaaagtcagaaaaaaagtttccaggttttaaataactttagaatctacaatttaaaactaaatctttacaatctctgagaaatgaatctatttggctaacctgcatagaatttaatctatgcaggttagaaaaatctgttgaagatgatagctttaagagttataaccacattcatctgggt

SEQ ID NO: 35231 - DNA, 1029 bp, Homo sapiens
ttctttcgggtcaaaatccttggagtaattttcagcttctttgtgatagatttacatcaaatctatcaggaaatcttaaaagcgtctaccttcaaaataaatgcaaaaatctaaccaattcttggctccccaaccctaccatctgggttcaagcctccatcatttcttgctgtattattctaataatgtcttattccatctctctgcctccagatccttaaaaaaaaaagccaaatgttattactcctgtgctcaaaaacctccaacagcttcctatctcagagtaaaacccaaacttttacaagggccaactagacccatttatgatctctcaactgctacacttacccctattttcaaccacagtgaccttgctgttcctctaacatgttctccccttggtgttttgcaactgctattctttgtctagagcatttctcttccagttatcacacatctttgagttttcacttcttcatttctctcctaacatgtgtatcaccttattagtacacctttctgacaaacctcttccaaccctggcagtcctttactttttctgcagctttttattactatctgacataacttacagtaatttattgtccacctttcactattgaagcatattaaaaacaagttcaatgttttgtttgacaatatagttcagtcatctagaaaatagcctagcacataataaaaactcaaatgtttgagcaaaagtgaagtcttgccttgtgtgggataatatcttaaatgtgcatattgaagaagatagctaaagcctggggagcactgtgacactagtaattataccagatttaaaatattcttggtgttttcattgggttgtttcttccttcttactttttcattatccttacaacattctatctgtgcctataagaacaatttgaacactgatattagcaggcatatttacaatcaatatctgaatttttcctttaggttttctgaactgcagtttttgtttcacaaaactaaaaaatctcttatttctaaaataag

SEQ ID NO: 35232 - DNA, 1048 bp, Homo sapiens
caaggccagaatacaaaaaaagaatctactccagaatgctactattaaattacacaaagaaataacatagcttatcaagtacgaatttatagccaaaaaacccttaacgggaagaataaatattaaaaaggaaacaaaaagtaataaaattaactatccaagtgattggattatcagtaaaactatttttaaagagccatgaacaaaaagatctaaaggataataaaaaataacaaatacttgagaaaaatacagtgattatttaagagtctagaattggataagaggataaagcaagataaaggaaagacaaagatcattttcatttatagtttatatgctataatgcaattaaattatttaaaacatgttgaatttcaccagtctttttacaggataggtaattttcaggtgtcaatgacatttccctaataatcatcctgtgacttagggcatgaccgtaaattagagattccaaagcaaagagcatactattaattttttttgttatggatttgtacttgcctgacagactgaaccaaatgtacattatttcaattagctttgtttctttgactggagagctccaagtcatttagtaatgtttttcagcaaacctactttttcttttaatacttactctaacaatatgttggaagtatctttagggataaggaagatgaaagagccatcacccacttaatactgatcacttccacagacatttaggtttcttcttttcttctaagtggtttcagttttttaatgttctgaaaattccaggtgcccttttattgtttagaataattacctttgaatttagaaaaaaaattgtaatgacatctggcagcattataaatccaaagctgttttgttagaaaacatgagtatataaaagaacattggccaggtgcggtggctcacgcctgtaatctcagcactctggcaggtggatgtgggtggatcatttgaagtcaggagttcaaaaccagcctggccaacatgatgaaaccccatctactaaaaatacaaaaattagctgggcgtg

SEQ ID NO: 35233 - DNA, 1046 bp, Homo sapiens
ttttggcatgattttgcagcggctggtaccggttgttcctttccatgtttagtgcttccttcgggagctcttttagggcaggcctggtggtgacaaaatctctcagcatttgcttgtctgtaaagtattttattcctccttcacttgtgaagcttagtttggctggatatgaaattctgggttgaaaattcttttctttaagaatgttgaatattggcccccaccctctcctggcttgtagagtttctgccgagagatccaccgttagtctgatgggcttccctttgtgagtaacccgacctttctctctggctgcccttaacattttttccttcatttccactttggtgaatctgacaattatgtgtcttggagttgctcttctcgaggagtatctttgtggcattctctgtattacctgaatgttgacctgccttgctagattggggaagttctcctggataatatcctgcagagtgttttccagcttggttccattctctccatcactttcaggtacaccaatcagacgtagatttggtctgttcacatagtcccatatttcttggaggctttgttcgtttccttttattcttttttctctaaacttcccttcttgcttcatttcattcatttcatcttccatcactgataccctttcttccagttgatcgcattggctcctgaggcttctgcattcttcacgtagttctcgagccttggctttgagctccaacagctcctttaagcacttctctgtattggttattctagttatacattcatctaaatttttttcaaagttttcaatttctttgcctttggtttgaatttcctcctgtagctcggagtagtttgatcgtctgaagccttcttctctcaactcgtcaaagtcattctctgtccagctttgttccgttgctggagaggaactgtgttcctttggaggaggagaggcgctctgctttttagagtttccagtttttctgctctgttttttctccatcattgtggctttatctacttttggtctttgatgatggtga

SEQ ID NO: 35234 - DNA, 1472 bp, Homo sapiens
tcaacagcactttaaggaatagtgatgtgtaattctgaggaagctgtgttaagactatctcatctcatatctttacttgaaataatgttttcctctgagatagtctgagtcaagagattattctttactaagatagtctattggctatatataggggctatgtatagatgaagggattgcagggaactttcattttctacctcccatagccttaatttttaaaatatttatattgagcatggaattttttattataaaaaattttcaggcaaaatgataggtagagagaacagtgcaataatgaatttcaaagttcaataatttttagaaatgtgtcatagggtgagtttaacttttttatgactctttgagtgagaagttccaggtggtgccatgtctgtgcagtcttaaccaactgaggaatcagaccagaatttgggctgaccacagcagctaaaagtgagtagaaaagcatacagggtgagagagggaaaccataaattctatgcaaaagctctgcccaaatatttggctgtgccctgaattacacatgtgctgtgcagattttaatgttaattgcacagattttttttagctgctgcccactccaaggaagatagtttggaatttgagtttagctcatttagatgtctataaaaacaacataatggtactttttaagacaaatataataaaatctattgtatctaacatgaagttttcaaaatgcccaggctaaaatctaaaattagtagatattaacaaaataagaaaatgtgacatgaaattaaaagagacaaaacagaatcaatagagaccaaccacaaagttgaccaagatgaaagaattagtacttaaggatttaaaagtagctattataactattatgctccagaatgcaaaggaatttatgctagtaatgaatgagcaagtaggaatttcaacacagaaataggaactagaaaaagaaccaaatggaaatcatagacctgaaaaaagggcaaatgaagactttgctgaatgggcttaatagtagagtggggatgacagatgaaggaatcaggcaacttgatgatagataaatagtacttaaaaaatcttatgagccaccgcctcaaaaaaaataatgaatacagcttcagtgatctgtagaacgatatttttaaaagaccaatatacgttattggacccccacaagaaaaaagagaaaaagatgggggcaaaaaatatttaagaaagaatagccaatgaaaaacataaatatacatattcaagaggctcagtcaatcctaagcaagataaattcaatgaaaaccacaccaaggtacataataatcaagtgacagtcataatttgaccatcaaagtcaaatgattatcaaagataatgagaaaaatcttgaaaacaaccagacaaaaatcaatatattacacacacaaaaaagtaacataaatgatgttgacttctcacaa

SEQ ID NO: 35235 - DNA, 1034 bp, Homo sapiens
gtgtgattatcttcttaccaaggtttatatgaaccaaaaatttccagtcattcttaaaaatgagcctcccaagcatttttcccttgtgtacagtctattgttagcacatttaattgtattgtcagaagtttgaatcccttactataagtaatagtgttataaaacttatacgttagaattgtttttattttttgataggaaatcttacatggtatgacaaatgtatttagttttaaacttttcttggataacaattcttaaagcactgtacctttttctgcagattgatccgacagctgatacaagttttttgggctgggttattgcttcatatagtcttggccaaatggtagcttcacctatatttggtttatggtctaattatagaccaagaaaagagcctcttattgtctccatcttgatttccgtggcagccaactgcctctatgcatatctccacatcccagcttctcataataaatactacatgctggttgctcgtggattgttgggaattggagcaggtaaggttgtatgtatatgtttggttgtgtcatattcacattcattctgacatttatggctcacttttaactggtctcatccccttttaaactcatatttcacagttcaacatacatgtttctcattgtaaacaaatatttttcttatcattttgcctttgctcatgatgttctcattacctatagtttctcttctgttctcatcattcttcatccttcaagattcagtttaaaccaggtgtggtggcacgtgcctataataccagctactcaggagactgaggtagcagaatctcttgagcccaggagttcgaggccagcctgggtaacatagggagacctccatctaaaaaaaaaaaaacccaaaacaaaaatagatccaattcaagctccacattttccacaaagccatcttgggctaccctgccccttgagagatttttttcttctctgacatgtctctggcacttgcttatagtattgtactgtttctatcctttctcactaacc

SEQ ID NO: 35236 - DNA, 1050 bp, Homo sapiens
ccctttcttatgccctcataacatcagtttttaccacttgtgtgatgctgtcccagctgtttatctgacccctgggtcccttggaacagctgttctggtttagctgggtactgagatgggtcctggacttactcatttttaaaaaagatctccaagtgattctgatgcagtatccaactaagaatcactggtacagaacaccctcttgcaaagaattcccaagccttataagttccctaatcctgttttcttttgttcaggctttacatgtgtataaagaccagccatggtgaagcaattttagaatatttagataatattctaataatcatattttatatgattctaaaacagacaaatgccttttctctgtataatggaatagtgaaacaaatttgatcaccactgattttcttttgatgtatctttcagaaaaatatgattatgtaggcagactcctaaaaccaggagaagaaccatcagaatatacagatgaagaagataccaaggatcacaataaacaggattgaactttgtaaacaaccaaagtcaggggccttcagaactgcaattcttactccctttcacagactgtccggagtctttgggtttgattcacctgctgcgaaaaacattcaacaaattgtgtacaagataaattaatctcactatgaagatttgaataactagacattatttatgctgccaaactcatttgttgcagttgtttgtaatgtctagtggggcttcatcatcctgaaaagaaggagacagggatttttttaaagagcaagaaagtcacaatattacttctttccttccttttttccttctttcctttcttctttctctttctttctttttaaaatatattgaagacaaccagatatgtatttgctactcaagtgtacagatctcctcaagaaacatcaagggactcctgtgtcacatactgtgtttttattttaacatgggtgagggaggcgacctgatcaggggaggtgggggtacacatcaatttgagttgttcaggctactgaaacattaaaa

SEQ ID NO: 35237 - DNA, 1049 bp, Homo sapiens
tgagtctttacataatacatgatgttctgttgattatttttatttttttgatgccactattaacagcaaccagtaaacattatttcccctcaagcagactggcttctaaacctaaccacttaagtttcttcttctccctcattacctcacagtcttcattttgaatattaagtttggggatatctgaagtaattgaaattgagggttttaagatctaagtgaaaagctttacttgggtcaaaaggcagatttccaacaaatttcttttcttattccatctagtatctgtacatgttttgaaattaagggtatatacaaatgtgaattatgaggggtttttttctttgttgtgtttttttttttttttttttactttttcctttgagacattctaaaatattgttaggtgatctaaataatttattttcttttttccagcgggtccatatggaatatttgctggtagggatgcctccagaggactggccacattttgcctagataaagatgcacttagagatgaatatgatgatctctcagatttgaatgcagtacaaatggagagtgttcgagaatgggaaatgcagtttaaaggtatttttattttgttggattctttggaaaattaaatatttgttcaaagaaaatatatactattttacatgctttaagagcctaaggatgtcatccgttttcattgccatcattatttgataatatttttaaagatagctaaagctgggtgaagtggcacatgcctgtggtcctagctgctgatgggaatcccttgagctcaggagttcaaggactaacctgggcaacatagtgagacttgtccaaaaaaagaaattgcaaaaaatagctaaataaaaatatgattgttacatgtgataattattttgaaaatcaatatttaaaaaaatgacttgttacaaattctaagcctcaaaaattgtgatacttacagtcagcttcttcattaaggtttagttttttaaaaatacaggcttatatttaaaactgagttgattactgatttcaatactata

SEQ ID NO: 35238 - DNA, 1022 bp, Homo sapiens
caaacctctgtgggaaaaaaatgagattttccctaccagatatcaaaatacataaaacagtattggcacaaggatagataatttgaacagaatgcagaaaaagaaaaaaaaatataaaatcagaaattttggttatgataatggtggtatttcaaatcattggtgaaaagatgatgttaaaaagatagaaaatcatttagaatattctttatttcatatataaaataaattccagacgtattaaagagctaagtgtaaaaaagagtgtattagaagaaataaaattatttttattctcttggaatagagaagactttctaatcaaaacacaaaacccagaatccaaaaaagaaaaagtgattaatcgatctaaccataaaaattaaaatttttatgaagaaagatactaaacaaagataaatgacaaatgggatactggaaaaattttaaaagggttaatgtgcaaaattcatcaagttccacattaaaaggttaacaacctaatagaaagatggacaaagtatgtgaactcagtggttcaaacaaagctcacaaaagtatcgatgcaaatctcctttaaacatagcaaagcaagttcagcctcacttttcattaaagagatgcaaatttaagcaataatttttacccagcaaattggcaaaatgtagaagatggttaacatccagcatctacaaatacatggggaaacaggagttgtcatacagtataggtgggaatgtaaactggcaaatactttttataaggtaatgtagcaaaatctaactaaatttaaactgtacagatccttttgcagttcctggtacaggagtctgtcctatagaaatacttgcatgtgtataagcatgcggtgacatacgtgtccctgcagttggtcagggccctcacatctttaactatggctcctaaagtggccgccttcactctggtttctctgccatcaaatttttccccactctattccatctttcatactgctgttacagttattttactaaaaagta

SEQ ID NO: 35239 - DNA, 1027 bp, Homo sapiens
ttttctcttgcttttccagttctttaagatatatccttaggttgtttatttgaagtttttctactttttgatggaggtatctattgctataaacttcacttttagtactgcttttgctgtatctataggttgtgatacattgtgtttctatttttatttgtctcaacaaatttttaaatttccttctaaattggttaattgacccaatggtcatttaggagcgtattgtttaatttccttgtttgtgtggttttcaagttcctcttgttactgaattttagttttattcctttgtagtcagaaaagatactttatatgatttcagcttgtttgaattttggggacttgttttatggcctaatatatgttctgtccttgagactgtttaatatactgagaagaaaaacatatatttttcacctgttggatgaaatattctgtaaatgtttattaggtcaatgtagtctatagtacaaatttaatctgatgtttctttgttggtattctatgtagattatctgtccaattctgaaagaggggtgttgaagttctcagctgttattttattggtgtctaactttatctttagttctaatatttgctttatattatctggatgttccagcattgagtacatatatatctacaattcttatatcctcttgtgggattgacccctttatcattatataataacatttttgactctctttacaatttttgtcttgaaatctattttatctggtgtaagtatagctactcttgctcttttggggtttctgtttgcatggactgtctttttccattcctgtattttcagtctttgggtgtctttatagatgaaatgagtttctcgtaggcagcatatgattaggtcttattttttatccattcagctactcttttttttattggagaatttagtccagttacatttaatgttattagtaataggaaaggactcactactgccattttgttactttttttctggggttgtattgttggtcctctcttccttcctttc

SEQ ID NO: 35240 - DNA, 1034 bp, Homo sapiens
taaattttaggattttttttctatttctgtaaagaatgtcattggtattttgattgcatttaatctatagatttgattgctttgggtactatggatattttaacaatgttgattcttctgattcatgaacatggaatatctttccattgttttgtgtcatcttcaatttctttcatcagagttttatagttttcttttagagttattttacttctttggttttttgttcctgagtattttgttttatttgtagctattgtaaatgggattactttcttgttttttttttcagactgttcagttggcatatggaaataatactgatttttgttcgttgatcttgtatgtggcaacttaatttatccaatctaatagttttgttggttgaatctttaggtttttctaaatataagatcatgtcatctgcaaacaaggataatttgacttcttcctttccaatttgggctcccttcatttctttcccttgtctgactgttttggctaggactcctcatactgtgttgaataacagtggtgaaagtaggtatccttgtcttgttccagatattagcagaaaggctttcagtttttccccattcagtatgatattacccgtgggtttgtcatacatgacttttactttgttgagatatgtttctcctatacccaggttttctttagagtttttatcacaaagagatgttgaattttatcaaatactttttcagcatcaattgaaattatcatatggtttttgtcttttgttgatacatcacatttattgattttcacatgttgaaccatccatgcatccctgggatgaatcccacttgatcatgaagaatgatctctttaatgtgttgttgaattgagtttcctaatattttgttgaggatttttgcatctgtgttcatcagagatgttggcctatagctttccttattttgttgtgtctttgtctggttttggtagcagggtgatactgacttcatagaataagtttggaagtattcctttcacaattttttggaata

SEQ ID NO: 35241 - DNA, 1872 bp, Homo sapiens
agaaatcaaagattacacaaacaaatgaaaaaatgttccatgctcatggatagaaagcatcaatattgtaaaaatggtcatactgcccagagcaatttatacatctaatgctattcctattaaactaccattgagattcttcacagaactagaaaaaactattttaaaattcatgtggaacgaaaaaagagtccagatagccaaggtaatcctaagcaaaaataagaaagctggagacatcatgctgcctgacttcaaactatactgcagggctacagtaaccaaaacagcatgctactggtacaaaaacgggcacatagaccattgcaacagaatagagaacccagaaataaagccacacacctacaactatctgattctcgacaaacctaactcaagcaatggggaaaggactcctattcaataaatggtgctgagataactggctagccatgtgcagaagattaacaaacattaacttaagatggattaaaaacttaaatgtaaaaccccaaagtataaaaaccctggaagacaacttaggcaataccattctggacataggagtgggcaaagattttattaagaagataccaaaagcaattgcaataaaagcaaacattgacaaatgggatctaattaaactaaagagctcctgcacagcaaaagaaactatcaacagagtgcacagacaacatacaaagtgggggaacatttttgcaaactgcatctgacaaaggtcaaatatccagcatctataaggaacttaaatttacaataaaaatcaaaccttattgaaaaatgggcaaagcacttgaacacctttcaaaagaagacatacatgtggccaataaccatatgaaaaaaagctcaacttaattagagaaatgcaaatcaaaaccacaatgagataccatctcacgccagtcagaatggctgttaaaacatcaaaaaataacagatgctgttatggttgcagagaaaagggaatgcttttacactgctggtagaaacagaaactagttcagccactagtggaaagcagtttggattcttttttttttttttttctttttgagacagagtctcactctgtcgcccaggctggagtgcagtggcgcgatctcagctcactgcaagctccgcctcctgggttcacaccattctcctgcctcagcctcccaagtagctgggactacaggtgcccaccaccatgcctggctaatttttttttatttatttagtagagatgggatttcaccatgttagccaggatggtctctatctgcctcatgatctgcctgccttggcctcccaaagtgctgggattataggcgtgagccaccgcgcccggcttggatctcaaagaactcaaaacagaagtgccatttaacccagcaatcccatcactggatatataacgaagtaatagaaatcattctaccataaagacacatgcactcacatgttcatcggaacagttattcacaatgacaaagacatagatcaacctagatgcccatcaacagtggactggataaagaaaatatggtacatatatacaatggaatactatgcatccataaaaaagaacaagatcacgtcctttgcaggaacatagatggagctggaggtgattatccttagcaaactaacagagaaacagaaaagcaaatacttcatgttctcacttataagtgggagctaaatgatgagaacacatggacatgtagagagaaactacacacactggggcctatcaatgggtggaggctgggaggagggagaggatcaggaaaaagaataatgagtactaggcttaatacttgggttgaaaataatctgtacaacaaacctcagtgacacaagctt

SEQ ID NO: 35242 - DNA, 1032 bp, Homo sapiens
caaagattgaaggtggataaacccacaaagatgagaaagaatcagtgcaagaatcctgacaactcaaaaagccacagtgccttttttcctctaatctaccccattgcctatacagaaagggttcagaactggactaagatggctacaaatgacagaaatagaaatcagaatatgcatgaaacgaagatcattgagctacaggagtatgttgaaacccatccaaggaagctaagaacgatgataaaacaatgcaggagctgcccagcaaaaatagccagtatagaaaaaaaccaactgacctgatagaactgaaaaagacactacaataattttataatgcaatcacaagtattaaaagcagaatagatcaagtggaggaaagaatctcagagtttgaagactggatttctgaaacaagacaatcagacaagaatagaaataaaagaatgaaaaggagtgaacaaaacctccaagaaatatgggattatgtaaagagaccaaatctatgactcataggcatccctgaaagacatggggagaagggaagcaacttggaaaacacatttcagaataccatccattagaacttacccaacctagcttgagagggtaacattcaaattcaggaaatgtagagaaccctagttagataagttagaagaagatcatccgcaagacacataatcatcagattttacaaggtcaaaatgaaacaaaaaattttaaagacatcttagagagaaagatgaggtcacctacaaagggaagatcattagactaagagcagacctctcagcagaaaccctacaagccagaagcaattgggggccaatggtcaacattctcaaaagaaattccaagccagaatttaatatccagccaaaccaaacttcataagcgaaggagaaataagatcattttcaggcaagcaaatgctgaggaatttcattactaccagacctgccttacaagagcacctgaaggtagcactaaatacagaaaggaaagatcattatcacccactacaaaaat

SEQ ID NO: 35243 - DNA, 1049 bp, Homo sapiens
ttttttgagcagtttttcatgtctctgtctccttcagttctgctctgatcttagttattcattgtcttctgctagcttttccatttgtttgctcttgcttctctagttattttaattgtaatgttagggtgttgattttagatctttcccactttctgatgtgggcatttagtgctataaatttccctcttaacactgctttagctgtgtcccagagattatggtacattgtgtctttgttctcattggtttcaaagaacttcttgatttctgtctcagttttgttatttacgcagtagtcattcaggaacaggttgtttaatttccatgtagttgtgcagttttgagtgagtttcttaatcccgagttctaatttgattgcactgtgatctgagagactgtttgttatgaactccattctttttcatttgtggaagagttttctacttccaattatgtagcctattttagaatacatggtatgtggtgctgagaataatgtatattctgttgatgtggggtgtagagttctgtagatgtctattaggtccgcttggtccagagctgagttcaagtcttgaatatccttgttaattttctgttttattgatctaatattgacagtgggatgttaaagtctcccactagtattgtatgggagcctaagtctctttgtaggtctgtaagaacttgttttatgaatctggttgctcatgtatttggtacacatatatttagggtagttagctcttcctgttgcattgatccatttaccattatgtaatgcccttctttgtctttttggggttttttttgtttgtttattattattatacttttaagttttagggtacatgtgcacaatgtgcagattggttacgtatgtatacatgtgccatgctggtgtgctgcacccattaactcgtcatttagcattaggtatatctcctaatgctatccctcccccctccctccaccccacaacaggccctggtgtgtgatggtccccttcctgtgtccatgtgttctcattgttcaattcccaccta

SEQ ID NO: 35244 - DNA, 1036 bp, Homo sapiens
tttttttttttactttaagttctgggatacatgggcagaacatgcaggtttgttacataggtatacatgtgccatggtggtttgctgcacctatcaacccgtcatccaggttttaagccccgcatgcattaggtatttgtctaatgctctcccttcccttgccccccacccccgaataggccccaatgtgtgatgttcccctccctgtgtccatgtgttctcattgttcaactcccacctatgagtgagaacatgcagtgtttggttttctgttcctgtgttagtttgttaagaatggtggcttccagcttcatccatgtccctgcaaaggacatgaactcattcttttttatggctgcatagtattctgtggtatatatgtgtatatgtgccacattttctttatccagtctctcattgatgggcatttgggttggttccaagtctttgctattgtaaatagtgcttcagtaaacatatgtgtacatgtgtcttgatggtagaataatttacaattttttgggtatatacacagtaatgggattgctggatcaaatggaatttctggttctagatccttgaggaattgccacactgtcttccacaatggttgaactaatttacactcccaccaacagtgtaaaagcattcctatttctccacagcctcaccagcatctgttgtttcctggctttttaatgattgccattctaactggtgtgaggtggtatctcattgtagttctgattcgcatttctctaatgaccagtgatcatgagctttttttcatgtttgttggctgtataaatatcttcttttgagaagtgtctgttcatatccttcacccactttttgatggggtttttttttcttgtaaatttgtttaagttccttgcagattgtggatattagacctttgtcagatggatagcttgaaaaaattttctcccattctgtaggttgcctgttcactctgatgatagtttattttgctgtgcagaagctctttcatttaattcgatcccatttgtcaatt

SEQ ID NO: 35245 - DNA, 1032 bp, Homo sapiens
gcattttctgatactaagtaaatacaaagtaaattttattgttgtcattttttattttactgttgagggtatggaagacatcatctgttgccagtacaagagctgtttttttttccttcatacatagtcacataaccctaattttgttccagtggcaatgtgctcagggaagatgagcttattccataacctgaggtaataagtcattgacctaaaccagtttttatgtctttttgccaggaattggtttggaagtggacatgtgacctagttttagccagtgagatgaaagtcccttgtggagcttctgaaaaagtttttctctctgataagaggagagagggcaaaaagaaagccttccccttttcctgctccttgtcattttagaaagtgatgtgtgaagctgctatagccatttttaaactatgattgtagatatcagcacatgagaagattagaagaagagaaacatgaggaaacctttgcaaagtccttaagtgatattattgagctactgaagcaaatctggaactatataccttccaacttaatattaggtgaagtaagaaaatagtcattcacaaccgttgagtgattactaaatgtcaggcaccatttaaggctttgagatacattagtgaataaaatagacagaaatgactattctcacttatttgttgggtgttttattacttgtagcctaagtgtactgataaagagatttaattacatctgtcaggggttcacaaactgtagcttgtgggtcaaatctggcctgccacatctttttataaataaaatttattggatcacagccatgcttagtcatttaaatcttgttgatggctttgttttatgtgactatgaagttgaatagtcgtgacagagattgaatggctcacaaaacctaaaatatttatgtactctctggccttttacataaaaagtttactaatccctaatacatggaatgttctttcactgcagaatctcttaaactggtctttaacagtcactaaaaagtttttttga

SEQ ID NO: 35246 - DNA, 1033 bp, Homo sapiens
tggggttaggaatttatggtgctaccaccatccctggtgctaccaccatccctattactaccatggcagcattatttccataaaactggagacttgatattggaaaaagggtcataggatattgactacaagagacatttttgtctatccagttttacttaccagccaccatatcaacagaaaaaatggtctcagctcacttctaccttttatatctcccttaaatgcctctcactggtaaaattttaatcttatccacaacttcagctgcaagacatctgggcaatgtagttttggactttccgcccctgggacagaggccagaatgtggaagggaacagaaataaataatgagtgccagtggttcatacaacacattagataataggtgtttcaaatgtatattcccagactgtggtgtgtttgatgaacagaatttttttttcttttttttttttaacttaaagtaaatctctcactcttctcctgtggttattgttctttgtatctcctgtaagaagtcctttctcagcctaatgtcatagagatcttctcttatatttgctactaaaaaatgtttaaagcttttccataccaagtttcttaactttaacccataaaattcatataactggactgaaatctgatacatcattttttgttgacttttaactagactaaaaatccaaaattttttgagttctaaatttattcaaaacatgggctcttttaaagtttgacattcttttatttgtatttttctatgttatgtagtaattttattttattttgattatatttatttttattttagtgtagctatatttaaattaatacatgctgttccttaaaattacatagcacacccacggaattgtcttgcctttggctatttcatgattttctctcttccttgtattttccattagttttctttccttctaatttccaaaaacttcatatatttaagctgtcagtgtttactgaagtgcaaaataaagtacatcttttaattgggcttttagtttttctc

SEQ ID NO: 35247 - DNA, 1050 bp, Homo sapiens
aggcaataatggatgctggtgaggatgtggagaaaggggaaccctcctacactgttggtagaaatgtacattagtttagccactgtggagagcagtatggaagtcctcaaaaaattaaaactagaactattttgttttcaaaatttatatgaaaagggacaagaagagctaagacaatcttgcagaacaactgcacttggaaacagatactaccaggtcttaatatttactgtaaagctatagtaatttggttagtatggtattggccaaggaagcaagccagttaaacagaataaagtttggaaatagctctacacataccagactttcatatagaataaagaaaaataaattttgatctctacccaaactactctcatatgtaatttctgcattgattgcatatctaaatgttaaggtaaagcttttagaacaaaacttgagggaagaagttatgagcttataataggcaggatggcttaaacagcacataagcactaatcataaacgaaataactgataaactgggctacttcaaagtgaaagaacttatgtttttaagacatcattaagaaagtaaaaagacaagctatggaatggagaatatatttgtaatcttgcaaaaatctagaatatatgaagaatgtcttcaaattaataactaaaacaattacccattagagaaacaggtcacttcacaaaagagggtatttaaaatgctttgtaactgtagaaaagactgttcaacttcattatttatcaggtaaatggaaattcaaaccacaatgaaatactactatatccactggctagagtgaaaagcatagttccaagtgttgacaaagatgtggaatagctctcatatactgcctgtgggagagtaaatgggtaagattacttcagaaaattgtttgacattttcttctagatctgactgatacagaccttatgagtcatcaactctacctataggtatacccatcagaaatgcctataccaataagactttttcaagaatgtttgtagcagcactgtttataatagtcaaat

SEQ ID NO: 35248 - DNA, 1050 bp, Homo sapiens
cccatctgacagaggtctaatatccacagtctacaaggaacttaaacaaatttacaagaaaaaaatgaccccatcaaaaaatgggtgaagggtaacaacagacacttctcaaaaaagacatttatgctgccaacaaacatgaagaaaaagctcctcgtcactggtcattagagaaatgcaaatcagaaccaaatgagataccatgtgacaccagttagaatggcgatcattaaaaagtcaagaaacaatagatgctggcaagtttgtgtataaataggaatgcttttacactgctggtgggagtgtaaattagttcaaccattgtggaagacagtgtggcaattcctcaaggatctagaaccagaaattccatttgacccagcaatccaattactgtgtatatacctaaagtattataaattattctataaagacacatgcacacgtatgtttattgaagcactatttacaatagcaaagacttggaaccaacccaaatgcctatcaatgatagactggataaagaaaatggggcacatatacaccacggaatactatgcagccataaaaaagaatgagttcatgtgctttgcagggacatggatgaagttggaaagcattctcctcagcaaactaacacaggaacagaaaagcaaatactgcatgttttcactcataagtgggagttgaacaatgacaacacagggacacaaggaggggaacatcacacaccagggcctgtctgtgggtggcatgtaaggggaaggagagcattaggacaaatacctaatgcatgcagggttaaaacctagatgatgggttgataggtgcagcaaaccaccatggcacatgtatacctatgtaacaaacctgaacgttctgcacatgtatcccagaacttaaaataaaaataaaaattaaaaaactgccaactgcaaataaaaaaaaaagaaatagtgctggaaaaactgtatatccatatgccaaaaataaatcaccccgtctcttttttttttttttatactttaagttttagggtacatgtgcaca

SEQ ID NO: 35249 - DNA, 1043 bp, Homo sapiens
tggccagaatgcctctctagattcatgttcatagggtatctctgaaagaaaggcagcagccccagttaggggcttatagataaaactcccatccccctgggacagagcacctgagagaaggggcgaatgtggttgtagcttcagtggaattaaacgatcttgcctgatggctctgaagagtgcagcagatcctgacaagcaggatcctcccagcacagcactagagctctgttaagggactgagtgcctcctccagtgagtccctaacccccatgcctcctgactgggaaagatctcccaacaagggttgactgactcctcatacaggagagctccagctggcattaggccagtgcccctctgggatgaagcttccagaggaaggagcaggcagccatctttgctgttctgcagcctctgctaatgatacaatacccaggaaaacaaggtctggagtggacctccagcaaactgcagcagacctgtagaagaggggactgactgttagaagaaaagctaaaaaacggaaaccagtaacatcaacatcaacaaaaaggaccccaacacaaaaaccccacccaaaggtcatcagcctcaaagatcaaatccaccacgtagataaatccatgatgatgaggaaaaaccagtgcaaaaatgttgaaaaatccaaaaaccagaattcctcttcaccacataatcacaactcctctcctttctgcaagggcagagaactggacagagtatgaatctgacaaattgacagaagtaggcttcagagggtgggtaataaactcctctgagctaaaggagcatgttctaacccactgcaaggaagctcagaaccttcataaaaaggttacaggagctgctaactataataaccagtttagagaagaacgtaaatgacctgacagagctgaaaaacacaacacaagaactttgtaaagcatacgtaactatcaatagctgaatcgatcaagcggaagaaaggatatcagagattgaaaatcaacttactgaaataaggcatagagacaagatta

SEQ ID NO: 35250 - DNA, 1090 bp, Homo sapiens
ggaagccctagccagagcgatcagacaagagaaagaaataaagggcatccagattggcaaagaggaagtgaaactgtcactgtttgctgatgatatgatcatttaccttgaaaaccctaaggactcctccagaaagcttctagaactgataaaagaattcagcaaagtttccagatacaagattaatgtgcacaaatcagtagcccttctatacagcaaccaagcagagaatcaaatcaagaacttgaccccttttacaaagctgcaaaaataaataaaatgcttaggaatatacctaacaaagtagtcaaagtacaaggaaaactatgaaacactgctgaaagaaatcatagatgacacaaacagaaacacatctcatactcatggatggtagaatcaacattgtgaaaatgaccatatttccaaaagcaatctacagattccatgcaattcccatcaaaataccattattcttcacagaattagaaaaaacaattctaaaattcatatggaactaaaagagagcctgcatagccaaagcaggactaagcaaaaagaacaaatctggaggcatcatactacctgatttcaaactatactctaaggccatagctaccaaaacagcatggtactggtataaaaataggcacatagaccaatggaacggaatagagaacccaaaaataaacccaaatacttagagccaactgatatttgacaaagcaaacaaaaacatcaagtggggaaaggactcccttttcaacaaatcgtgcagggataattggctagccacatgtaggagaatgaaactagatcctcatctcccaccttaaacaaaaatcaactcaagatggattaaggacttaaatctaagacctgaaactgtaaaaatactagaagataacattggaacaacccttctagacattggcttaggcaagaatttcatgaccaagaacccaaaagcaaatgcaattaaaaacaaagataaatagctgggatctaattaaactaaagggcttttgtactgcaaaggaacagtcagcagagtaaacagacaatccacagagtgggagaaaatcttcacaat

SEQ ID NO: 35251 - DNA, 1092 bp, Homo sapiens
tccaaaaagaaccttcaaaaccatgcaaatacatggaaattaagtaagcctgctcttgactgagcattgggtcaaaaacgaaatcaagatagaaatttaaaaattcttctaactgaatgacagtaatgacacaacctaccaaacctgtgggatacagcaaaggcagtgctaagaggggaaagttcatagctctaaacacatacatcaaaaagactgaaagagcacaaactgacattccaaggtcacacctcaagggactagagacacaagaacaaactaaacccaaacccagcagaacaaaggaaataaccaagattagagcagaattaagtgaaattgaaacaaacaagcaagcaaacaaacaaaaaacccaaaagataaataaaacaaaaagctggttccttgaagggataaataaaattgatagaccattaacaagattaaccaagaaaagaagggagaaaatccaataacctcactaagaaatgaaacgcgaggtattacaactgtcaccactgaaatacaaaagatcatttaagtctactatgaacacctttatgcacataaactagaaaacctagaagagatggataaattcctgcaaaaatacaaccctcctagattaaatcagaaagaattagattacctgaacagattgataacaagcagcgagattgaagtggtaattagaaaattaccaacaaaaaaaaaagtccaggaccagatggattcacagcagaattctaccacacattcaaagaagaattggtgccaatacttttgatactattccccaagatagagaaagaaagaaccctccctaattcattctgtgaagccagcatcacactattatcaaaaccaagaaaggacatatccaaaaaagaaaactacagaccaatgtccttgataaacatagatactaaaatccttaacaaaatactagctaactgtatccaacaacgtagcgagaagataatccactatgattaagtgggttttagagcagggctgcagggatggtttaacatatgcaagtcaatacgtgtgatactcaacataaacagaattaaaaacagaagaatcacatga

SEQ ID NO: 35252 - DNA, 1050 bp, Homo sapiens
ccattgtctcttacccactcctgtttaatttggattcttcagcctgcaatttctccttaaggtggaggtttgtcctggaagagtttcaattggttttaagaattctaaaaaatatgactatagcttatcttcccaatgcttctcaattttagtagtagtaataagatgtggagaatatattttactttcattaacccgaagagcaagccagcagagactgagatttcatgtttatgaaatcagaaatggtagttctttgcagatgttatttttttcactttggcagtaattagttggcttagatatataaaagggcctattttcaagttttaaaatggtgtattgaaactgatgattcatcttattttgagaagcagtgaagactagccgttttgcatgggatacatcaaataattactgtatttctagttttaaagaattgaccattactcaatgaactgaaatctgttttcccgcttgtttcagatcgaagactaaatgaagattttaggcggtatcaaatggaaagtttttccaaatattcatctgtacaggtatgtaaattataaattctacttgggaatattctcatgtgaagttgcctacagcactttgaaacttggcttacaactttgattcctgtaatgggaaagcttgtttttgcttaatgaaagtaaatcttttgacaatagaaattgcccttttccccccaaccagagttggagcttatatattatatatgatatataaaatgtctgagttctaaaatgggaattcattcgagttctgaaacatcctaaaattgtttctcaatatacctctagttctgtgttctaattctctgcattctcataaattatgacaggagcataaactaatgcaaattgtaaataatatatggttttttaaaaatatcttttttccttggttgtcatatcttcttatttaaatattgtgtttaaaaaattatttagccagaaaggtataattattggtggaccttgcattacagaatattaaaaggaaggtaatggctcgtagattagtggt

SEQ ID NO: 35253 - DNA, 1028 bp, Homo sapiens
cctacaaggtgggcatagaaggagcccatggatcctacagtgagaagagcctacagaggtctaaacttactactgtgtctattcaaagatccctcatatgtcagcagaaacaaaaccattcagcattttaagatattgagatactctgtgtctttagtgcacggcaaaagagaaaataatttaaatcaggactaacatattgtttatactgaaatttcatttgagcaacgatcaattttcactattttttatattttaggttatgtctttgaaagcagggatagtatgtcctgtttactgccaatctccaaatcctggaagatgtgcttgtcaaatattaaggacacaaaactgtatgttttatttatgaaaagtaaaccacaaatttatatgctctcttagataattgctaaagtcacaaaaacagcctagggattagtaggtggctttaccagtaacataattggagtatttgacaattttgtggacttactgctcaacacttaaatcaagttgcatgagaagaaaactaaaatgattagtgaatttgaagacaaaatacatgtaacaaataagaacatttttaaaactcatatctgtcatttcccagcttaaatcccttcattactactcctctttgaggtataatattttttacgttataagaaaaatctttttgggaaatgcttctcatccatcctttcttcaaacttctcagcatcttccactttttatttgcatgccccaatctcgccgtcttaacttgtgttcaatttcctgcctaagcatgctgctccccctccccactaagctttctgtctaaacatgttgccctagtcttcatctgactaatttgtatatatgttttagcccttaacgttaagccttcagacttggtgtaagtccttctccaaacatgttcccgtgccatgttcccactgtcatatcacttatgacattatattaatataccttggttactcataagtttcctaatcttgacatcaaatatgagaagtatagactcc

SEQ ID NO: 35254 - DNA, 1040 bp, Homo sapiens
tccagaaccatgataaataagtttctgttcattataaattacctagactcaggtattctgttgtagcaggacaaaatggaataagataaccactaaagcttatttttcctcagatatactgtcaaatgaagtactatttttaagatttctacatatataatgccattttccaaagacatatttaggaaaaattctactaatttctaactcttgtattaggatttaagaaacataaaatcatctcagtgtagctacaaagcagtaagtactttgatgaagttaaaacaattaataaaagaaagagaaggctgaactctcagaatgcccttcttttcctattatttcttctttaaaaccagggagctggctcttttacaggaaaaggtaatttaaaaaaatcaaaacaaaactgttattgtctcattcatatggggcttgaacttgcctagaaatggcatatcaggaacacatttatttatatattaagttaaatactcttggatagttaatgccgctttgtattctatgactactttttctgaaaatctaaatagtttactgaatctttcgtgtatgattatggtaaactgtccaaaaggtcaagatgatgaaagaattacctcttattttagatattgtggtaaagctgagattagcagttagatattagatgcacacataaataataaacgtaatgtgtaaatgaaatattgcatgtattgtctttatgagatcttacacatttgtttttaacatttagctcagtagtagttatattcactccataattcatctgagattaggttttaggtgtaagcagtacctcctcctttacttaatatgtgcacaaagttgtttggagagactgtcaggcttaattttctgccaatgaaaaacggtcaagaggttagatatattcaataataatataaaattattagttttaaaaattctataggatatactttatatatttaaggccttacttttaaaaaacatgtttaatgttatttctataagaaccttatagtctttaggat

SEQ ID NO: 35255 - DNA, 1047 bp, Homo sapiens
gagaagtcttccttgtgttgtgatagaaaggatttcactgtttaaaagtaaacttaaaataaaaatgtattcccctctttaaaagaggagcatgtgcctgcttgtcccaggtggctttctataagaatgagaaacagggtagacttatttgataacatcttcagttgtttttcaaattgtttgtatttatacacatacatacataatatttatatatacatacccatacacaaacatcaccccatatatatatacatatatatacacacatacatgtacatatatatgtgtgtgtgtgtgtgtgtagtgtgtgtgtgtgtgtgtgtgtatgtgtgtatatatatgatgtttggccttagaaacaatccccatttcaatgccaattttgaattggttacaaacattacttagacttgattttcgaccaacttggaatgcaaagaaagctttttctttttcttaaattaatgcttcttttttttgacttgtaattgtgatttatgtgtctggattttaaaattatttaaaattagctgaattttgagtcagtgaatttctcttgacattacacttagtatggttttgctctactacctgagttctttttggtaggtgggattgttacctatctaatcttctgtagcagcaaatataggatcatagttaaaaaaaaaaagtcctattgattttgccactttgatgtttccctatcacttccatcccttccattcattctgtcactgccctaattcaggtcctcagttcctcatatcaaatttttgcaagtttctatttagccattttgctttccaatttatctccattctaattcattctaaacattactttcaaaagtatcatttttcaaaaatatagtcttatcacacttttttctgctacagaaccttccgtgtcttctcattgcttttggagtagtttcaaattccttaggaactgcacggttcaatacagcagccactagccatatgcagctatttaaatttaaatataaacaattaaaagtaaataaaagaaattgagttcctc

SEQ ID NO: 35256 - DNA, 1061 bp, Homo sapiens
cagttggtttcttgagcaactgtttttattggagtttatgacttgttttatcatgtgtttaatttgcatatacctaccactccaacactccagaaacactataaatcctgtcagtacaaacacatcaggtaatctcctgggtgtttttttttttccttttttgaatgccagcttctggaacagctgatctctaggtcagctacatagctgctaaccccagacttcctatcaccgacatcccagacattccttttgcctttttcatgtgttcagtcttttgcttatcctctttctattatttcttaattttagcaaacatttcctccagaaacttatgagataggaatcatgggcattacatttttgaaattctacaattatgagaaacattattgaacatggtatttgactgaagatggaattctagtttagaaattagtatttttccaaatgacgaagttgtttcttctaaatcttaggacgttccgattctaaatccagatctgtctaatgtgaactgttgtgcttgttaatctctccagaagattttgtgattatctctttatctttggtattccaaaatttcaaaatggtacatcctgtgtgccactccccataaaaacacaaacaaaaaaatacatttcactgggttgagtactcagcaggcctttgtacattctgaaagataaatatctttcaatctttgaaaatattttgatatcatttatttgatgattttattcttttcttttgttgaattttttttccttaaaatttaaatcagtgctcgaattgtattaccttttattgtctattttccatatctttgtgatttttctgctttctaaaatgtattcttaactggaccgtccaacccttctgtggatatttttatgtctgttattacatgcagtaacttctaagagttatttcttttactctcagtttacttttttaataatctcattgtgctcttatggatacattatcttctattatgtctctggaaaaattaatattttcttttgaattattatccttctatgtttcttctttttcat

SEQ ID NO: 35257 - DNA, 1054 bp, Homo sapiens
tatttaataacctttatgtttccttaacatgctaattgtcttgaagagtgcatgaaaaataacttataattgtacacaggttaaagaaaaaaacgaatagagatcacaatggaaatttagcaaactacatatcctatttatttagctttaactctctagcttttgctatgaggtctatgtgtaacacatctgttttgtagtagaccaaattatttcttatacagaattcacagatatattggaaaccataaaaacctatactttcatttctagtttaaaatgtcatctgtctaagcagcccttgaaacaacctcctccacctttttcactaaagtcattaggtagagacttgaaaagatgaaattgcacaacactatgaactgggactcactgtcaacttattgtcagaatatgagaggaatttccattaaatacaaggccaatgggagtggattaaatatataatcagtatgatgctgctggtgtgcttgcctgctggaaagtagatagatctttatttcttcccttttcctctaatctttggaccagaaacaaaatctgaaccaagaagaacattggatagccatccttctactgactgcatgctaaattttaggcagttacatggtttcccataaccccctccctgaccttgacccctaataatatatctcattctttatccattcagatattatgatttaaacaacaacaacaaaattggattaagggaaggaagggtttatttgatattatttgaattctgataatatgattcccataactagagtactaactgaggagggtgaaatcaaggaaaactctaatagagttattttctgcattaagtaatttgtttaatattctccatctcctaagagcattagacatgtttaatgtggtttcacccacatcaacaggtgaaaacatagtagataaatggcaggaaaatactggaaatcagtctgggaattatgcatactaagatctatagctttatatatttatacatacaagttgtttggatgtgatatctccccttacaacaatggac

SEQ ID NO: 35258 - DNA, 1001 bp, Homo sapiens
tctaggttttctgtctactctgttggcagtttcgtttgctgtacagaagctctttaattagatcacaccagtttttgtttttgttgcaattgttttaggggacttattcataaaattttgccaaattcatgtccagaatcatatttcctaggtgtttctcaagtattttcatagttttagggcttacattaaaatctttagtctatattcagttaacttttctatatggaaaaatttagaggtccagttttatttttctgcatatgactagctgattatctcagcaccattttttggatctgtgtatgaatctacaattatcttaactcttgattaaaaaagaaaactcatacttacctggcaggggagataccatgatcacaaaggtggttttcccaggacgaggcttatccattgcactccagatgtgctgacccctgcgatttccccaaatgtgggaaactcaactgcataatttgtggtagtgggggactgcattcgcgctttcccctgagaaaaaataaagaaaaacgaaaactctcaaataaagttaatataacaaggattaaaatacctaagaaaaactgaatacaagtttttgaaaaaacaccacacaaaagtgtttatatgggctgggagtggtgactcatgcctgtaatcccagcactttgggaggccaaggcgggcagatcatgaggtcaagagaatgagaccatcctggccaacatggtgaaaccccatctctgctaaaatacaaaaattacctgggcctggtggtgagcacctgtattcccagcctcttgggaggctgaggcaggagaattgcttgaagcagggaggcagaggttgcagtgagtgaagattgagacagagcgagactccatctcaaaaaaaaaaatagtgtttatatgtcctggaatgagagagagatggaggagggaaaaaaagatgaaaaaatgggaggaagaaaaggaggaaaggaggaataaaggaaggaaata

SEQ ID NO: 35259 - DNA, 1023 bp, Homo sapiens
cagcaatcacgggtgtttagtctgcagccgagcagctaaagggagaaagaatcgctcaggaaagacacactgcagactccaccggcaccctgcaatagatggattccgactacacaagggagaaaacgcggaggtgacactctcctgcctggaaagaggacgaacgaccaaacaaacgcaaggactggactccatgccgaaggtatctggaagtcgtgacacggtgtgtataaaacaaaagtttgcgagctgttaattgctgtgctgtgttattaagagacgctttcaagtttcaagtaccaaatgtagctttacgttgccaaaggaagttgaggcaattgctttgctgttttaacttgctctgtgagggaaatctcataaactgaccaatgcaccaaatgaatgctaaaatgcactttaggtttgtttttgcacttctgatagtatctttcaaccacgatgtactgggcaagaatttgaaatacaggatttatgaggaacagagggttggatcagtaattgcaagactatcagaggatgtggctgatgttttattgaagcttcctaatccttctactgttcgatttcgagccatgcagaggggaaattctcctctacttgtagtaaacgaggataatggggaaatcagcataggggctacaattgaccgtgaacaactgtgccagaaaaacttgaactgttccatagagtttgatgtgatcactctacccacagagcatctgcagcttttccatattgaagttgaagtgctggatattaatgacaattctccccagttttcaagatctctcatacctattgagatatctgagagtgcagcagttgggactcgcattcccctggacagtgcatttgatccagatgttggggaaaattccctccacacatactcgctctctgccaatgatttttttaatatcgaggttcggaccaggactgatggagccaagtatgcagaactcatagtggtcagagagttagatcgggagctgaagtcaagct

SEQ ID NO: 35260 - DNA, 1023 bp, Homo sapiens
gaactgcttgctaagtccttattacctcttgttaaagcctcagaaggccgtgctgaaagccagaggggaaaaaaagagtaatgcacaggtatctcttttgcagtggtgactgtattttgagtaccttgtgtgacagggtattattacagcatcttgtgggaaaacctattaggcctttgcatgttaaagctgtataatttgttgggttgtgagtggtctgacttaaatgtgtattataaaatttagacatcaaattttcctactaactaactttattagatgcatacttggaagcacagtcatatcacactgggaggcaatgcaatgtggttacctggtcctaggtttgaactgtcttatttcaaaagatttctgaattaatttttccctagaatttctccttcattccaaagtacaaacatactttgaagaatgaaacagattgttcccatgaatgtatgctcatactcgactagaaacgatctatgttaaatgactgtgtatatgaattatttcaagtactaccccaaataactttcttattgctctgaaagaagaaaagcaatgtaaatcactatgattattgcacaaacaaccagaattctccaacaattttaagtaatctgatcctcttcttggagaaaattgttacctaatagtttttccttatgaatgttattactactggtataaatcaaatttctataaatttcctacttaagtcttaagaactgggttcttcctttgatgttattcatgttcagaaaggaaacaacactttactcttttaggacaattcctagaatctatagtagtatcaggatatattttgctttaaaatatattttggttattttgaatacagacattggctccaaattttcatctttgcacaatagtatgacttttcactagaacttctcaacatttgggaactttgcaaatatgagcatcatatgtgttaaggctgtatcatttaatgctatgagatacattgttttctccctatgccaaacaggtgaa

SEQ ID NO: 35261 - DNA, 1111 bp, Homo sapiens
gaaaatcattattttatcttgatttgcagatgaatatactgctaagaaagggagcaactctgacctttgttaaagttgatcttttgtaattgaggtataaggtatgaaaagataaaaaaccgaaggccagagaatcaggaaatgaaagatagtatggactgaaggtaacaatattttaatgttatgcaatatagtcagagaaatattaaaaattagttgtttgctgtgcataggtggatctcgcaggaagctaatgaaacctaagcttcagtgcctctcacttagacatgttccattcgaggtcctgaacctaactttgtattaggaattctgtactaattttgttgaagaagaccagcaaagttgtgtacacttctacccccacaaaatctgcattgtccatgtgagtaaagtaaaataattcctgttatttttttctgttagaaataagtatggaggatatgtttttaaaaatttatgagttaattgaaatatccatatataacaagtgactttctcacaatatatatgatgtgatatatagggagatagtttcactttcatcatattttatacgttgattctgaactatagaaaaataataaatgggattttaattatagctcttagttgggaaagaaatatagagagatgtgggatttgaatgcccatgaaagacattttattttacttgaatatattcttgcttcactttaccctccataatatgttgtacattagtgctgatcaagtttacagagttacattttgctttcctaaccattcagtcaggaattaaaatatggcattgtataacaactgggaagaagctcatagtggatataaattagagtagataatgggtcaccttgatagcctctgtttacattacttgtatatgggcaaaataattattacctatacgtgtatttaagcttaattttcatataaacagtatttttaatctatgttaaaatagataatatctaaaagtgtgatctctaggtagtccttagtttattagtactgtacttcaaaaagatttttaaataggtccggcacggtggctcatgcctgtaatcccagcactttgggaggctgaggcgggcga

SEQ ID NO: 35262 - DNA, 1025 bp, Homo sapiens
cttccttccttagcatagggttttcaaaatttgatttataattcctatttccagtaaatattgttcatttgtccacatctctccctatgatatgttgctggaggtaagaatttctttcatattcctattttttttttccccatagactaggctcatagaatttaaacaagcaaattttcctgagctttttcttgccaaatgaaagaagactggtaaattctcatagagaggtttgtgtagttcttggctcttcctggggttaatgtgcttatattcacagtggcaaattggtctcagactttaatttatttatttttgatttgaatttctctttaaaagtatcaatttaaaaggtaactagaattattctttctcattttcaaaagtgatttttgcattattaaatttccctgccattgtaatgccatttcacgcagaaaaaaagtcagccagtaattaagaaaaaaagtgatggagattaagtagtattttggcttatttttaggactcatcatgagaagacacagttcctttaatcaggaaattaatatccataattttcactcaaaattgcagtatgtaaagcagattctcaaaaactctcctgaacacttatttatatatatgtttttatataagtaaaatttttctcatatttttatacgatatgcacacacacacatacatgcacatactacttactacatgttctgtacttgtactttgtaccatgcatattcaaatgtttatatacataagtttattataacataaacagtaaaagtaatgaatactgtttaaaataactaatatagtattttttaatttttgtggggatggattctcaaatacttgtgattttaaaagattctaaagctaaaacacaacttgattttaaaaagaatgattctccttacacaattataaatatttgcagtaaatattttccttataatactgttttgaccccatttaaaaagtattagattatattcctttgatccaatgaaaactgaaccttataa

SEQ ID NO: 35263 - DNA, 1017 bp, Homo sapiens
aagacaacattctcaataacatgttacaagttagagaatgaaaattacattctgattctcctccagattcttctgaggaactgattgtaatctcataggtgcaaaaagaataaaccaattttaaactgatataaagtgtatttttaaacatttatttatatattggtcctactgtttcaaaatattttcacccttctggtccatgaataaaaatccttatttgaatgcaaaatattaatgtattcttgctgagaagccatcatgggaagttacagaagtgacaaataaattaattgagcatgatagaattctaatgaagtaaataattcttgaaagtgctctatgaagtagacagttgtgtgtttttggtattcaacccaaaataattcatattttgctatttttaatgcatttctgatttccatgcatttttaattcatttttatttctttgtagagaaaataaccagaacattacaaataatactggaagttgtaccagaagaagataagttatgaactaatggacttgagatcttggcaatctgcccaaggggagacacaaaatagggatttttacttcattttctgaaagtctagagaattacaactttggtgataaacaaaaggagtcagttatttttattcatatattttagcatattcgaactaatttctaagaaatttagttataactctatgtagttatagaaagtgaatatgcagttattctatgagtcgcacaattcttgagtctctgatacctacctattggggttaggagaaaagactagacaattactatgtggtcattctctacaacatatgttagcacggcaaagaaccttcaaattgaagactgagatttttctgtatatatgggttttgtaaagatggttttacacactatagatgtctatactgtgaaaagtgttttcaattctgaaaaaaagcatacatcatgattatggcaaagaggagagaaagaaatttattttacattgacattgcattgctt

SEQ ID NO: 35264 - DNA, 1604 bp, Homo sapiens
cacgctcatctcaaacccagcttctgttgcttgaacatgtttgaagtgacttttttgtgttctgtgttccaggtgccactgttcatcccagctttgttttccttcacatgcctcttcatggttgccctttccctctattcggacccatttagtacagggattggcttcgtcatcactctgactggagtccctgcgtattatctctttattatatgggacaagaaacccaggtggtttagaataatgtcgggtaagaattttaaatactttcaggacattgtgcaacaccatgtagaaaacccataaaggtgtgcatacataatatacttaacatttaaaaatgtaagtggcacaattgatttgagaacattatggcattttaattggaactgctttttggcaggaaggacatttagggtacagccgttgaatccttttggatattagtttgggctgctgtaatcacttcttaggagaaacagctttgttttagatgaaattttatcagtagttctctaatcgacctaatctctctttgaatcctttactaacctaattattttccttctagtttgaatgcagtttagtgattttatatcataatatgtaacttgatgagtgacacgagatttgttggggagttaggcagtggcctgcaaatgccttaaacattatgactgtacgctaccttaaaaggaagggtgactcatgaaggattataataacaagaacaatggagagaacaatagcagcttccacatgtgagtgcacatgtatgacttcatttaattttttttaaattttactttaagttctggaataaacgtgcagaacgtgcaggtttgttacataggtatacatgtgctatggtgggaatgtaaattagttcaaccattgtggaaaaacagtgtggcaattcttcaagaacctagaaccagaaatatcatttgacccagtaatcccattactgggtatatacccaaaggtttataaatcattctactataaagacacatgcacacgtatgtttattgcagcactatttacaatagcaaaaacttagaaccaacccaaatgcccatcaatgatagaatggataaggaaaatgtggcacataaatatgatagaatactatgcagccataaaaaagaatgagttaatatcctttgcagggacatagatgaagctggaagccattattctcagcaaactaacacaggaacagaaaagcaaacagcacatgtcctcactcatgagtgggagtagaacaatgaggacacatggacacagggagaggaacaagactttatttaattcatataatatcctactgaggtaggaaaattattatccccagttaataggctttgaattatagcatgagagaattcaggtcacttgttccaagtcatacagatataaagtagaatagctgaaagtcaaactcaggcagttttatattttaggagaatcaccctgggggttatgaggatggattaagataggttggggctgaagacagaatattgactttggtggttactgcagcaatcctgatgagaattgagggggattctgaagacaggcagtatcagcagggtctg

SEQ ID NO: 35265 - DNA, 1043 bp, Homo sapiens
caagagccaacagaatcacctatgagtgtctgtgtttcctgggtgtggatagccaagagctcaccggagagcatttgcagagctttctgtaaatcttccaattgggcctcttttactgttcattatcggttatttactaatcatctcaatctttgagtctttcaattttgagtcattgagtaacctttcttttactctttgaagacatactatcttctctcaaatgcaaaaggaactaaaaacacaacacaacattcatatagaattccacttgaataaagtataatggccatatcactctcatactgttactggtgtgtaaatggattatgacaacagaatatagaaaagagattagtcaaatccaagttttaactatgatgataatttatcggtataaataattatttgaaaaaggtcgtaatgcatagtgaggtttttgttgttaatcatctgtgttttcactgaattcaccaagcttgcttccctttcccccctcagcaccctttgacaatgataatgctcttctctggagacctcgacagtcttttgaatttcctcagttttgccaggtggctttttattgggctggcagttgctgggctgatttatcttcgatacaaatgcccagatatgcatcgtcctttcaaggtaacctcagcaatcttgatgggtttacataaatctctctcctaatacctagtcctccctttgtcataacttgctgatggggaggttgggctgggggcagcatctgtggaataaaaatgtttaactcttgcaggcagtgctttcctgttggatttattttaagttggaaaaaaaacagtggatccaattttttatgtgatgggcttgaactttgtatgtcaaatttttgaaaaatgactgtatgaatgaatgtttggtatgttgatttttcatgaatgtgttcaatgacctgatatactcaaagtatgggctacttctgtctgtctttatgctagagttgtggacagccatggtgaggaggagtaagggagatactttgttaatgccaattc

SEQ ID NO: 35266 - DNA, 1044 bp, Homo sapiens
gtattggtaacgtggaatcaaattattagggtcagtaacttcctggctttcccagtgcattaaatgaagacataatattgcatttgtgtcgggtacttcttgatgccacataatgtcagcactgtccggtcgtccgtacttcacagcatgtcacctctaatttcatgggattatctgcgctgttgcattattagatactcacgatcttgagcttcctttgaactcacagcagggcagtgcaaagtcattattgtgaacacttctgtgctttcttgtcttatatacaaaattatggccacatttagaaaggtagatatatcccactatcatacttccaaaagtgtgcgtttatttggtgggaatgaaagctattgatggaaaaaacattgaatgtgaaaagtgttttaaaggactagtgttagaaaggtgtcaaggcagtgaattagtattagaaatgtttataggacagtggttctcaaagtgtggcctgatcagcagcctcagaatcacctaggaacatataaggaatgcagatcctactgaattggaaactgtggggtggagctcagcagtctgtgttttaacaagccctgcaggtgattctgatgcatctcaagtatgagaaacactgctgtagcatttacggagtacatgaatgacataaatccatatgttctggggtatagcaatagacaagacagacgaagtatctgcccccatggaccttattaagttacaaaggaatatgtggttttttgccctgatgaaatgtttatacatacccaacagagcctataattattgtagataccattatattcttcatttgaattagcctgttattttcttcggtatcagagaatggctaacaaaagataatgaataagtgattcctttgtgcatttcagaaccattccccttgcaatatgtatatccatggccattgtcaccattggctatgtgctgacaaatgtggcctactttacgaccattaatgctgaggagctgctgctttcaaatgcagtggcagtggtaagtccaagt

SEQ ID NO: 35267 - DNA, 1044 bp, Homo sapiens
tctatataaagatatagtccatgtatatggctgagtcttttatagtccaaaatttatttttctgtgtactatggtttattaacttgacttatttttcttctttcagatttaaaaaatgttaactaattaaagtaacttcccaagtacctaccaatgacattaatcttcctctttttgtcttttgttctttttacccccaaatcctattaatacagcaactttttaatatgattttctacttttcagaatacttcttaacaacatagcaaatgccaaaatgttaatggaagtattaatgaaaacatgcaaaaaatatttctttatgattctgataattatcgaaattgccttagattaaacatgaataaatttaattattatatatgtattcaaatagttggatatataatcctgagaaagaatccttcactacatatgttataaaaatggtaatgaacacattacctaagaagtctgcactagaaataataagataccttttcattcttgacatctttcttctttttgaaccaagtatctgtagaaaaatatttgaatcaaattttaatgaaattcttattagaggtttgctacttttctcacaaaatggcaatattgccaggcacggtggctcacgcctgtaatcctagcactttgggaggccaaggtgggcgtatcaccagaggtcaagagcttgagaccagcctggccaacatggtgaaaccctgtctctactaaaaatacaaaaataagctgagtgtggtggcagttgcctgtaatcccagctactcgggaggctgaagcagaagaattgcctgaacccaggaggtgaaggttgcagtgagccgagattgtgccattgcactcccgcccgggtgacaagagtgaggctctgtctaaaaaataataataaaataaaataataaaaattaaattaaattaaattaaaaaaaggcaacatcaatgtaagcctatttcataacaagtctttttttccccatggtgcttcatcctcacttggtatattctaaatatgcatacaca

SEQ ID NO: 35268 - DNA, 1030 bp, Homo sapiens
caagggagaaatcttcagtttgaatacataggtgcttttcaaaccattgagtttatgatgcaagtctgtgactaggcagggcaggtatttcctgttctctaaaagatagtgctagttctgctctattgctgccatttctatagcaatacctgggtggaattccctccctgcttaaccctgcctcctccactccctgcctctgatctatgcgcacttagaaacacaggatatcctgattatcctgtttcagtatttctcataatggacacatattgtttattctatttttaaatgacgggaacacaaatctctacccagtagttgtggtcgatgatccatttagtcaaatgaagaaaggaaaatttatatgtattctgtaccttattggaagtcaaagtaaaactttatgattgtggtaagtattttcagtaacagtatatagcatttcctcctttcttttaataataatagataaacaaatttaaaatgccaaaaaaatatgatgaaattaaaaatcacctgtaatatcttaatcacatcaaataaaagtactcactgttattattttgatattttgtttcccccacagtttgtgcgtgcgtgtgcatatatgtagtgcattatattgcttgagataaatgtaaatgtgcatttttcttcctaactttggtgttatataatgtatttacttgtttgtttattgtctgattcccaaggccagggctttgtctgtatcattactgctgtatccctgacagctggaaggttcttccaagtgtgccctgccatttagatttgctgcatctcaagctcaactccagctctttctacttatgtgctatagatctgtctcaccgtcttcatttcatgtcattttattatattttcgtatatcacctagatgttagttaagaacatttttaatgctagtataatatttctttgtggggatgtgccaatattcttgtgctcattttcttgttggacattgaaaacattcctaatgtttcttaatgtattaggttggtgc

SEQ ID NO: 35269 - DNA, 1030 bp, Homo sapiens
gctcactgcaactccacctcccaggttcaagtgattctcatgcctcagcctcccaagtagctggaattacaagcatgtgccactatgcccagctaatttttgtatttttagtagaaatggggtttcaccatgttgatcaggctgttcttgaactcctgatctcaagtgatccacctgcctcagcctcccaaagtgctgggattacaggtgtgagccaccacacctagccaagaatgcatctttccatgagagacaaatattcctctttatatgcatttagttttctaacttaatagtcgctagaaaataacatataatattgtaactgtatatgtgcagattacagcaatattgtattttgtaatctttttattacaagtcaatgttatctacattcttagacaacattaaatattactttaaagaatatttccaaagtttctactacaaatactcaagttatatgtttttaagatatgtattaatttatttacaagtttataaagatattccctgtggcaaaatgaggcatctttttactaatgacaatatgacatcattagaattatcttaaaatgtgacactgcttttcttcaattgttgaaataattgatacctaaattagaatccctctgggggttttttttttttttttgcttttctttagaaaatatacataaagcttgattaatccatttttaaatatgtttcacagtagaaatagaattgtgctagttgagccactgaggcagacaaaagatcggtatttggccagatgtcacagagaagagatgattctgtgttcaaagaacaaggtcaccaaattgctcttccttgcttttgttcactctaaaaatttcgcactaatagaacatgtggttgatgtaccttgggatcaaaattcttgcatttctcggcatcacatatgcataaaaaatacattttgcccaaagatagtttgttcatataaggctgaagtgtcaaataagtggtgcagaaattataggattatattataatattttatcat

SEQ ID NO: 35270 - DNA, 1047 bp, Homo sapiens
aaatgaatcatctgctgaaaatacaacaccctttatggtcttcctccacctagacaataaaattttcctaaatttgtgacctaatagaaagatgataattaatttagattagtgaaaataccaatgtgtattaaaatatatagaattcagagtaagtttccatgatctcaattgactacactttaggtgtaatttcattttgagacatctttcaaattatctaccattactccaagaaataacttttgagctgctattataagtaggtggtataggacagttccttaagtgttgtatcgaatgagagacaaaggtgggcaaaatttctgtttgtgtgattacatttataatgttaagaaattttgccatgatctttcttacaatgttttcttctccaagaatagctttgaatttatggaagtagcaatctttcaaatacaacaattgctattgaacttttataataagagtattgcctttaccaattatctataacattatggctgactccacaaattaatatattggagtaaggattgtattttgagggacatgaatgtccaaagtttggaccatgaagatgatagaatcccaaggaataactgaattttaaaaggctttccccccaaaaatggcatatatatagtagtaataattgctactgtgtacatttgttttaaaaaatcctagtgcttgtgcaagtgtaatgaattttgccttatgacatgacttttgtggtgactatgcaatctgtcattgttcaaaaagttacacagtgcaaagaacatatcattgagatgtataatgtttgtaatcctgctcttagattgataaatcatatcttgtgttgatgaaagccaagaaatgaattgcttttctttgaccttgggggtctgagattagccactttgtctattagccttattccagtgttcttctcacttcatttattccttctgttttgaagagctggaaatagtagacttagaggaagtcagtaaaccttgatatcatcagtcatttttgaaaaacaggctatcaacacgc

SEQ ID NO: 35271 - DNA, 1047 bp, Homo sapiens
cgcaaagtgctgggattacaggcatgagccatcgcgcccgacctgtaattactttcttcaccttctgtagaagttcatgaattttcactgcttttatagattcaataagcattgaagtatgctcaatatttaaaatatttatctgttctgtattcctgaaattggaccctatataattatacacttgaatgtcagaatattataataaaaatattctccttaagatacgagatctagtcccagatccatccctaacaccatcaattgttggatgtcaatttccttgctagtttattttatctatataaaataaagatgagttaagaaccccatcctaattctcaaacttttgaaagtaattgggaggaacaagcaaaaataacatttgtgattgtattgtgaaaaaaattacccagttctgcaaacgtattactttatattctttttgaaatctatattttcctggcaccattaaattacataaaagaaaatctaggactatttctgtgttaacacttcaaatacagcatatgaagtggctctgtttaaatctttgaaatctggctatacctacttcttttctaccataagtaacttagcaacacaaccaattcttaggtaaataaacatagtattaaaatatacaagtactgcagaacaactatcacatactttaggaggatgacatgcaaaatgtggaaacaaagggtcctgtagctaacataaatgtgaacttttgcagagagaaagagccatcaagagtttaaaagaactaggtacaccaaggggatcatgtatgtcttttgaactacttcctcattgttgcctgggaactaatggtaaaagtgtgggctccagagttagattacctgggctccagacccatcttcactgttactacctatgcaaacatgcgcaagttaaacaatatcttgagtctcagctgctcatctgaaaaataaagccaataaaatgactatgtcatagagatatgaggattaaataacattattcatgtaaagtctttgtacaatgtctgccataaaa

SEQ ID NO: 35272 - DNA, 1109 bp, Homo sapiens
caccacgcccggcgtataaagccatttctacagaggcagaataaaggagtttccaggttccagctttctactaggacagttaatttaagtactaccgttaaaactagcctctgattaacaatgaaaactcatccttttaaggaagaaatactttgatcttgatggcctcttctaacctaggatttgtctttgtaatttataaaaccagtcttaaaaaaagagcaaggcttaacaaaatctacattcctttttctatatatcttaagaacctcaagactaggctgggcatggtggctcacacctgtaatcccagtactttgggaggctgaggcaggtggatcacttgaggtcaggagttcgagaccagcctggccaacatggagaaaccctgcctctaccaaaaacataaaaaattagccgggtgtggtggtgtgcgcctgtaatcccagctactcaggaggctgaggcaggcgaattgcttgaaccagggagatggtggttgcagtgagctgaggtgactctattgagctccagcctgggtgacacagcgagactcaaaaaaaaaaaaaaaaaaaagatcttaaagactagtttgtaaaaagtgaaatgttagaaagcccatgttaatgttaatcctgggtgagagattaggtaatagcaggctgcttgctacgctggtcatctcatctatacagatccctctgttggggaaagtaatggctagattctttcccatttctcctagatgttaagtgtaaatcaaggcttgggctttctgtagtagaactctgaacttcactgagtggtatactctataatcttgtatcaattgctggatttcttaaaatccagaaaaggggctgaggccagaagggcttagagtaagctgattttgttcagctaacttccatccagggcactaccttctcatgagttgcccacatttcctgggatcctagaaagacaaagaacaaggaaaaatgcaggaagcaccagttactttgtcttcccgagttaatttttagtgttttgctttttataattcattaaggagaacagagcataatcttcaactaattagcattatgtggcagttcacttgaaagcag

SEQ ID NO: 35273 - DNA, 1025 bp, Homo sapiens
tgcagcctgggtgacagagcaataccgtatctcaaaagaaaagaaaaaagcaacctattaagatttatatactactaaaaaattattagaaggctcacatatgactttaaaaaaattttctttttcagttcctgataatgcatcagtgaaggatccaatctcctgcagtgataactagaaaggataactcgagagtttcactggattttttccagtccccttaactcatagtaacataccaatcatatgttggtgtttccaaaactgatttcgtctggtggcatgcccatgcacccatatgcccaccctcaactcataccctgttaattttgttggtagacaacacttgaaactcagacattattttggccttcattcttatccagatttatttatttaaggctgccatggtttctcttccggttgaagtattttggggtaggtaaacaatgtacctgcaataatgagtattctaatcagtattgttctcaacaacatatgactagcaattagtcatgctaaaatctgaaccaattctacatttggtagatgttcccgtgcttgtcattctttccagtagccccaaaattctgtgcatactatgttacttctgaaaacctcatttgttttaaaagtggttctattaaagaatgagtgatccatttcagtggacgttgttgcagctacagatctatgtacgttcacttttacagtgaaggctccatgtgtgaatggatatatgtgggtcattatgataaaacagtattaaaggagaaaatctactcccagattctttttggactacaaagacattaaaagcactaggtttaaaagaccatttattaatcttatgtatttacaactcacaaattaaaatatctattaccaataagttattttgtttggaagaggctttacctgtaatttttacttttatttctgatggaagagaattccaggtttttttgagatggagtttcactcttgttgcccaggctagagcgcaatggtgcagtctgggttca

SEQ ID NO: 35274 - DNA, 1248 bp, Homo sapiens
tgtgaaagagtggagtgactactcatgatccttgccttacccagaggattaacatttttcctttaagttgattttccatgcatttattttccttatgtagtttaaatcatatcgaatattcagcaaattaacttcttcagtattaagctcttatcctgctttgattaattcttaacacacctcgcctcttctaaatattgaactgtccacataagaaacattgatgggggtgggaaattttaatttttcaacttttttttatagtggaagtgtttgttcctccttgtgtatcaactccagaattcatccatgctgctatgaggccagatgtcattacagaaactgtagtggaggtgtcaactgaagagtctgaacccatggatacctctcctattccaacatcaccagatagccatgaaccaatgaaaaagaaaaaaggtagagtatatttatacatttctgagaaggcaggtgaaaatttttctcttatctttttcctcatcaagggacatagaaagtagtatatgctgtagatttaagattgatgttatcttaaccagatattctcaaagaatcaacattgagattttaaatttagtattttaacgtactcatactgtttaaaggagttagtatgtaaggcttgaggataattgcctgacaatgatatttaacaggtgttcgacacacagaaggcagatcagagattccctgcaccttgtcttactccatcttctccttgttgatccttttatgggtacttggttacttaaaaaaacacacacacacacgcacaacattttattctttattttacaaagtcttgtcttcccttgctttcatggatattttttaaaaagccaggcacgcctttagtcccagctgctcaggaggtgagaggatttcgtgagcgcaggagtttgaggccaacctgggcaacatagcaagaccctatctcaaaaaacctaaataaacagtgatatatatatgatatatatcatattcatatatagtcatactaaatatatatatcatttatatcatactatatacaatattcacatttattatatatcatgctatttttaccttataccttctgctttgaaacactaagattgctgatagagacttctgattgacctaaactcaccagtgggtaaagagcatttccacttactatttgacttctgctgaaatttctgctccccccatcccactaccacattttcaacatcatgaggaaat

SEQ ID NO: 35275 - DNA, 1020 bp, Homo sapiens
tcttccatttaatgctctctgaactgtagattgagtgttctaaaatctgaaactgagcactgatgtgacactcgaagtgctcattaaagcattttggatttttagatttgggatgttccactggaaatatatagtgcagatatatatttttttaaattcgaaatctgaaacacttctggtcctaagcattttggataaggcatgcccaacctatagtagtataagcttcatgaggccagaaatctgttcacacttgtgtcaggtttatagcacagggtctgggcacatggtaaatgtcagcaacgatttgtcagttgtacgtagagtattagatcttctggctgataacttcataggtaatttatgcatattttatgttgtcatcgtaaatttaaagtatgaatgagtaaattttctaagtatgtattttactctgtaaatataaaatatttctgagatataatatgttgaattttaggggggaaggggaagttgaggtcagaaatatgtgcaagaattacaccttgaagaagtaatttccattgacataacaattttaataacacaaaatcatggttttgaaaatgtgcctcaaactatgtaagaattcagggcacgtaatatgtaactgttaggcaaatttcattttgtttataacttgaaacattaaaaaaactggtaaaattctcttgctgtattattattgaatacttgaagctctgattttaatatggtaaagttttagggtgtgtcttaatacaattacataaggaattagtttgcccaggatagtttattaatagcacctaagacaagagctaaattgcaacacaagcagactttaaagagaatgcttgctagaataaattttaaaaactggagaattgaaggttttttttttttcttagtgtatgtgagtattgtagggaggcactttgaaaacaataattgagaatgataatatgtcttatacttaataatgctaagttttcttaaagttgagctacacaggctgattga

SEQ ID NO: 35276 - DNA, 1049 bp, Homo sapiens
tgtcaccttgttattttaaatttgtaatgccagatctttttgtttattcagcaaatacttattgagcacttactctgtaggaggcactgttcctttatgtaagttttgtgtgcagacaactttagcataaccctttgtttcaaacaatttatgtattattaaattctgaaaccagggaagcattttaatgaagcgttattcgtcattatattggtttgatttcctgtgttcagtaaatttatagtcattaaattggcgatttatctcccttgtccattgtattttaatatgtatttgtaattaggttagttttcagcaagaattacttttttttgaagtaaatgacaatataaatttgtttccaagtgagccaaacagaaatgaaagggtacatgaatttcatgattagcatattgggggagtctcatctccagaggttggtgtgttctgtttactaaatacccgtttaatgtgctctttgacacttctgttaagggaaaaggacgaagttggtctcagaaagtagttggaaactccttattttccaagtaatgctttcagaatatgttctaggtatgactttgttggtgttcctgtcttaaaagtgcagatgtttcaagtgaactggttacatgttgcataaggtttgaaaaagccaaaagaagttaaatagccacctttatttacagctgcaggactaggtattagattgcttccaggaagaaaatatgattaatggctcttttccagaggggggacaattgcagacttttcttccgcagagcgtgaaatgtgcctcttcctgccgaggggctgtgtcctcgcgcggctcccggagccgtttcccagcctcaggtgtctctcgccgcaggctgcggccgctctctggagcaagcgtccgggacttcctgtttgggcgcggggcggaaggatcgcgttgccagctgcggcggccgccacagccacagccgccgccgccgccgccgccgcccctgcccctgccgcccctgcccctgccgttaggtggtggggtttctcagcccggcggc

SEQ ID NO: 35277 - DNA, 1061 bp, Homo sapiens
agaaattggttaatctaaatattccttttggaattaaatgagatttgactagtatattttcagttaaaatttttattgtaattttttttttttttttttttttagacagagtcttgttctgctcccaggctggagtgcagtggcgtgatctcagctcactgcaaccttcctctcctgggttgaaatgattctcctgcctcagtctcccaagtagctgggactacaggcatgcgccaccacacccagctaatttttgtatttttagtagagacgggctgtcaccaccttggccaggctggtctcaaattcccaacctcaggtgatccacccacctaggctccccaaagtgctgggattacaggcgtgagccactgtgaccagcctaaaatttttcataaacacgctaaacaagaattatatatgggtccttgtaaagtttcacaagaattgcaaattttttttcccagtgtattcaagatactacatattctttgatgataataaacaactcaaacccttgaaatgagttgtcataaatgtcgtttaaactatagagatcattaactattctaactcatgtacatttgggtgcttaatagatgctattttaaaaagttgtttgtggcctggcgtggtgactcacgcctgtaattccagcattttgggaggccggggagggcggatcacgaggtcaggatatcgagaccatcctggctaacacggtcaaaccccatctctactaaaaatacaaaaaattagccgggcgtggaggcgggcgcctgtagtcccagctactcgggaggctgaggcaggagaatggcatgaacccgggaggcggagcttgcagtgagccgagatcgcgccactgtactccagcctgggcaacagagcgagactctgtctcaaaacaaaaacaaaaacaaaaacaaaaaaacgtgtttgtctaacacccattagaagagactagctgcagggctgggcacagcagatcatgcctgtaatcccaacactttgggatgccaaggacggaggattgcttgaggcaaggagttgatgaccag

SEQ ID NO: 35278 - DNA, 1033 bp, Homo sapiens
gaccatcctggctaacatggtgaaaacctgtctctactagaagtacaaaaaattagccgggcatggtggcgggcatctgtagtcccagctacttgggaggctgaggcaggagaatggcgtgaacccggaaggtggagcttgcagtgagcccagattgcgccactgcactccagcctgggcgacagagtgagactccatctcaaaacaaaacaaaacaaaacaaaacaaaacaaaacaaaccatatactataagggaaaacattaatttgactacatcaaaactggatgtttttcccagcactttgggaggcaggcggatcacttgaggctgggagtttgagaccagcctggccaacgtggcaaaatcccagctccactaaaaatacaaaaattaactgggtatggtggcatgtgcttgtaatcccagctactcgggtggcagaggcacgagaatcgtttgagcctgggaggcggaggttgcattgagccaagatgataccactatactcccgcatggatgacagagccagaccctgtctcaagaataaaaaaggcaaacagcaggctggcagaagatacttgcaagataaatctgaattgttatttagaatatattaacattctatagatcaataagacaaaaaatgcctttatagaaaaatggccaaggacatgaatagtctattcacaggggaaatgttaatggccagtaagtatttgaaaaaatatttatccttaatacttaaatacatgcatattaatacaacaatgaaaaattttttgttactcaacacatggcagaaatttaaaaagtcagcttatatcttgaattgacaagcatgtgagaaaaatcgtaactctgccaaaccactggacttgcatagccactttggacagaattacatcaaattaaaattgtactgataagctgggtgtggtggtgtgtgcctatagtcttagctactcaggagacaaatgggaggatatcttgagaccaggagttcaagactaccttgggcaagatggctggacc

SEQ ID NO: 35279 - DNA, 1041 bp, Homo sapiens
aattttattttattttgagacagggtctctctttgtcacccaggctggagtgcagtggtatgatcatggctcactggagccttgactgtcccggctgtagtgctcctcccaccttagcctccctagtagctgggactacaggcaaatgccacgacactcagctaacttttttattatttgcagagacaagatctcagtatgttgcccaggctggtctcatactactgggctcaagcaattctcccaccttggcctcccacagtgctgggattataggcatgagctaccttgcctagatgaaaaggaatgattttagatgatgtttgtataccaagaaacatctgttttatgtaaaaggaaagaaaagtatatctagacgatagatcattaaaagatatttgtttgactttggaaactagtagccattcattcctttgtattcagagagacttaaaaaattttttttatttatcttttttgatacggagtcttgttccgtcactcaggctggagtgcagtggtgcaattctggctccctgaaacttccgcctcctggttcaagtgattcagagagactttttaaagaaacactagttaacttttaattttgctatacatctccgagaaacacccaagaatgatcaataaatactaaaaaaattaaaaaaaaatttttgctatacaacagtgtatctaaataatacagttttattaattcagactgaggagaaggctaactgtggattatatagaattttaaatgagtagcaaacaaggttacaagtgttgccaagtagagatagtttttaagattttcttagatgtacaaatacgaatgctttaacacatatccctaggcaaatccatacctccattcagccatctgtcagtgcttactgaggacctgcaatgtcccagcctcagagctgaatatcttgtggtaaacaagaccctctctttgccctcaccaggctttcagctatgtgtagaagatgaacaatttattaaacatgttattatgataaaatgtgatgagaatta

SEQ ID NO: 35280 - DNA, 1031 bp, Homo sapiens
tgctgagcatgctcctaaattgtgtgtgtgtgtgtgtgtgtgtgtgtgtgtgtgtgagactgaagtctcgctctgttgccaggctggagtgcagtggcgcgatctcagctcactgcaacctcccgggttcaagcgattctcctgcctcagcctcctgagtaactgagattacaggcgcgcaccaccacacctggctaatttttgtatttttagtagagatggggtttcaccatgttggccagaatggtctcgatctcctgacctcatgatctgcctgccttggcctcccaaagtgctgggattacaggcgtgagcaaccatgccccggcctctaaattctttgatgtcttttaagagaggacatttaagtaaaaaaatcatataaccatattgtttaaaattatacaaaataaccataaggtatcaaattatggagtatatagaaaaagaaaatctattttaatatgacatatttacttcaatagagtgttatcctaattgaatatcacttaattagtataactttgagatctaaaaagaaaatgaaatgaagcttctgctttttaagctgtcatttaaaaacaggatcctttaagggctcgttaaaatagcacgatttttagtgcacttgaatatatgttttacagattattaattatgtgaaggagaaaatagtggccaaaagcaaagacctactctgtcaattaataaagcagaaatgaaaaggaatgattttatttacttttaatttttttttttttttgagacatggtctttctctgttgtccaggctggagtgtagtggcgcagtcttggctcactgcaacctctgcctcccgggttcaagcgattctcctgcctcagcatcctgagtagctgggattacaggtgcccaccaccaggcctggctgatttttgtatttttagtagagacgggctttcaccatgttggccaggctggtctcaaactcctgacatcaagtgactcgatctgtcctccttggtctcccaaggtactgggattacaggca

SEQ ID NO: 35281 - DNA, 1885 bp, Homo sapiens
atcgtaaaatattatataatacaagcagactgattaatctttgctaattttaataaacattggctgtcaagtggtctggttggtagcttcctacttctgtcttctgaccactggggacaggactttgctccttaaccacgtatcaagacattaacatttagtcttattagttaattatcaagaaaacttaaaccatttttagtgatcaacaaaattgtgtttaaacattagttgaaaagatggatgatgatgagaatttttatataattcaacgagaaagcagtgctttttaaaaataaaaatgaaagtttaggtttttaaaatgcagtttaaaaaataaaaccagatttccttcatgaaaaataagataaggagccaaatttctttcttgaagaatctcaggactaatttgacttcatgatgagctgtcataacttttgtatttgttataccatcagaaatcctccctgtggcacaaaaggactcctttaattagaaaatattgttgccacagggaggtagaagatcgacatgaaaaactggggatctgaaaacgagcccctatcctaggattacctgaaggtgaaacagattgagccagaaggaagacaatgctggtaggttggtttttaatttattaagaatgtttgtaattttatatttcattaaaattatttcatctacctttaccatatttttgtttaaagggtgacaatgattcctccttaaggaaggagaagtaatacgataatatttttcctccaagatagtttgctgaattatcccttgccatattcttaatatttgtttctttttatagataaagctctggggctatttcatgcctctacttccttggaagctactattgactgaacgtctttaagtcattttttttttttgtcatttctgttggttttgcttctaatctacatcttttcctaaatttttaataagtgtttttttcccccaattatttattttcttgaggttagcctagccctaagttttctaaaatggtaaaatgtgaatcttaagttcatttagcttttactctagaattgtttgaattgtaattgtactgtgatttagatcagacagtattattagataaaagattttaatactttaataactatcagccaggtatagtggctcaagcctgtaatcccagcactttgggaagccgaggtcaggagtccaagaccagcctggccaacttggcaaaaccccatctgtactaaaaaatacaagaaattagccaggcgtggtggtggacgcctgtaatcccagcaactggggaggctgaggcaagagaatcgcttgaacccaggaggtggaggttgcagtgaactgagatggcgccactgcactccagcctggacaacagacagactccgtctcaaaaaacaaaacaaaacaaaacaaaaacaacaacaaaaaactattccatttagcctgagatgctatcaatggtaagaaacattatttttataccactaaaggaaaaaatgctgccaaatataaacttttaagagactatcaactttaagataggtactgatttcagagatgtcaaatgtgaaaaaatgtgtatcttgggattaatgaaatatgatttgcaattatgaatctttcctgaaactctcatttactgggaattaaacattaaaatatgaggcctgtgaaaaatggaggtgagttgtggtatagaaatccatgtcagggggcgcggccaggccaggcccgggggctccgcatgctgcagctgccctcgggcacccccgccgctgccctcgccgcggcgagctaaccccagccagccgggggcgtcccggaggcggtggcgcagggaggggcccgatgcgcgcacgtggccccggcg

SEQ ID NO: 35282 - DNA, 1051 bp, Homo sapiens
ggccgagtgcagtggctcatgcctgtaatcccagcactttgggaggccaaggcaggcggatcacttaaggtcagaagttcgagagcagcctgcccaatgtggtgaaaccccatctctactaaaaatacaaaaattagctgggtgtggtggtgcacgcctgtaatcccagctactcaggaggctgaggcaagagaattgcctgaaccgggaggtggaggttgcagtgagctgagatcatgccactgcactccagcctgggcaacagaaactccatctcaaaaacaaacaatcagataaacaaaaaagatgcacaaatgtgtagtcaagatcccatcacaaaagagatggcatgctaaaattaggataatttaaggaatgttttaataaagggctagttacaaacatgtaggcaaatataaggtacccgtaagagacagggcagtactgcagacctagcaataattgctgtttctgtcctttggctcatgggccaaggggaaggaagggtgaccagaatcctgaagaatagagccctgaacagggagtcaccttgggagattctgaaacctttgatcaaaggacacagctagctggagggcaatacctcttcccaataatatcctgctaaggtacgccattgaccaaactcagtctgaagccataggaatcccgttgatgaagtcagtctccagggacagagagcaaggtgaagaagggtggagaataaatctggaggggcaaatggaagatatctagtacaactaaagcttagtaaagaaaggtcagggagaaactgatttgggaatcatcctcatttaaagccgtggaaataaatttccgaggggaaacgtatttcatagatttttcccaaggaaggagatacgtaaattctatatttgtctctctgtgatggagaacaaaggacatagaattaaggaattaaccttagagaatgtttacattttaaagagtggagaagaatcaaagagtagtcaaatatgatagaaaatcctgggcgactatttctgagttttgttttgttttgtttttt

SEQ ID NO: 35283 - DNA, 1031 bp, Homo sapiens
gatgtatttcttcttatgaggtccagtagtaccccttagggctactagcctcttccagcataaaactgttcttcctctaattttattttttgtggagctaagggattgaaagttaccttgcttttcagagcactgatgattgcagtgctagcaaacctcaggtataatggaaaattcatttatcaaaataggcagccaagctgggtgtggtggtgtgcatctgtactcccagctacttgggagactggggcaggtggctcgctcaaggtcaggagctcaagttcagcctgggcaacatagcaagaccccatttctaaacaaataaacaaaaaaccaggcatccaaggacttcatatgggcttcgtgactgtagtctggagtggtatctgatttacagtatatagtgcatatctttttatgagagtttggagaattttccagtctgaagctagaagtatagtggcagagttgaattttcttcttgaggaaaaggataggtagaacagttaaaagtattttgtaggatgatgttttggattatatattgtaactgattttattacaagagcataactaaacagaacactaatagcagaagaaaaaagtatggtagcttaagttgaatggaaaaaagtagaacctgtttgaaatttctggatggtgttttggtcaaaaaataaggaaaactatgattttgatagcaagttggaaactttaaaaaagataaaaactatagcaccaaatttgcataagttagtaaattaggatgtttatcacattaaaataccagagcagattggttgaatcttattattggtataattgactgtaaatgttttattaatttagattaattcaagtaaaaccaattcagaataggaagcgaatgtaatctacttaagggattttattttcttagtcttcttgaactctgagggtaatgatatcatttgctgggcagagatattagtgattgtgaaaaggaggatatgggaagtctaggtaaaataagttacttttgtgatttgttt

SEQ ID NO: 35284 - DNA, 1052 bp, Homo sapiens
aggattttgttgttcttacctcttcttgtttgttgctctcacctcttgtccttgtgggtttaggtataaaagagtcttttactgttgttttagtcagctttcataattaagtgaaattatatgcatgtttttaatctgccaacttaatcctaaagcacagattatttaaaatgtttaatctatgtcttacctcttgagacttgaaaggattattaaagttagcccttttcatctcttgttttggcttttacattcatatttataatatttgaaactcattatgtggactgctcgagactgtattagttcaaggatttataagtgaattcagaatttgtaaatacaaaggttgattgttctttaaatttgctcttataggaaagtgaaaaggtttctgaatatccagcagtgattgtggagccagttccaagtgccagattagagcagggctatgcagcccaggttctggtttatgatgatgagacttatatgatgcaagatgtggcagaagaacaagaagttgagaccgagaatgtggaaacaggtagacatctcataaaatgttcattatttataactttctcattttgtaagcttcaacaatactattgccagatgaaaaatatactgaaaaacctttttaatgctatttagtatagcttggaaaccagtgaaacatctatgtttaagggaatttgtgtagatataaaacttctattgtataattctatgaggtgtaacagtctcatatcatggactctatgcacaaaattacagcttcacataatgataaagttattttattattttttttctgagagtataaatcctagctgttatttatacaagtcaataggctagtattatgaggacagctttttaaattaaaaaaaatggtattctatcattgtctaattgattatgagtttctttgagttaatattgatggagcaataagatttcttttcattaatatcagaagcatcattgtagtgttctatcagtttcctctttgctttttgtcgtcttagagatcttagtatttcagtcta

SEQ ID NO: 35285 - DNA, 1029 bp, Homo sapiens
aatgaagaagaacaggttgcttccttgatgtggtgctgtcccccttgccctaggagtaggagtccctgagagccagactactgtgagtactgctgctcctctgggtctagctgcccagtggggttaccacattccaggctgattctggggaatgtctgcaagggatccagtgatgttatctgtcctcaagtctcccagcaatgtgtaccagcaccagctctcataggggtaacaggggaatgacatacgttgtgagattccttggttgtaaatagccgtagtgcgttggctttcttaaatgctggttgtagtattaataaactggtcatgtggacagactcaggacatcctggttagccagggtactgcagacagtgctgataactgggtcatgcataagttttctccttcttgggtgcaatgttattttacctgtagttgctgtagtaaactgtgtctgttggcctccagccaggaggtggtgcttgcaaaagagtgccagctgtggttgaagtggtgggatatgtgcttgtcttatgttacccatgggaggtattttggtttatcagatgatgggtgaggccatagggctccccaaagtttctgtcttttgtgttaacctaccagggcaggtggagggtcaaagccaggtggggggcttggtcaggcaggcctgctctttggctctgcatgtgtggtgtaagcacagatccatgttgggcttttggagccattccctggccactggggtaatgttccaggaaaaagcttagctgcctctgcttcacagaagagttcatgcagggagtggggagtagcaggtgggagtaagtctcatccagctcctacacacttggcaaggcaagtctctcactcagagtgttcactagcagcagctagctaaattccaagctgtttacatacaggaacctcagctttcaggccacgccccttttcatccactggcaatgccagagcacccaacttctgtgtctgtggttacagcttacttcccagtcatccgcccag

SEQ ID NO: 35286 - DNA, 1026 bp, Homo sapiens
gggaggctgaggcaagagaatggcttgaagccaggggaaggaggttgccgtgagccgagatcgcgccactgctctccagcctaggcgacagagtgagacactgtcttaacaaaaaaaaatctccatactgttttgcatagaggttgcactaatttacatttccactagcagtgcataagtgttcccttttcaccaagtccatgccaatatctattgtcttttgtcttaataatggccattcttgcaggagtaagatggtgtgtcattgtggttttaatttgcatttccctgaatgattagtgatattgagcactttttcatttatgtgttggccagttgtatatcttcttttgagaaatgtttgttcatgtcattttcccactttttcatgagattattttttttcttgctgatttgtttgagctccctgtggattctggacgttggtcctttgttggatgcatagttggcgaatattttctcccattctgtgggttgtctctttactctgatgatgatgctgattattattttttgctgtacagaagccttttagtttaattaggtcccatttatttatttttgttttagttgcatttgcttttggggtcttagtcatgaattctttgcctaggccaatgtccagaagaatttttttctaggttatcttctaggacttttatggttttaggtcttatatttaaatctttgatctatcttgagttgatgtttgtataagatgagagacagggatccagtttcatttttctacttgtggctagccagttttctcagcaccatttattaaataaatagggtgtcctttccccaatttatgtttttcatgctttgttgaagagagttggttgtggatatttggttttatttctggattctttaatctgttccattggtcaatgtgtctatttttataccagtaccatgctgttttgttaactatagcctggtataatttgaagtccaataatgtgatgccttcagatttgttgtttttgtttaggattg

SEQ ID NO: 35287 - DNA, 1071 bp, Homo sapiens
gtttagatacacaaatactttccattgtgttagagttgtctatagtattcagtatagtaacatgctgtacaggtttggagactgggagcaataagccatattgtgtagcctaggtgtgtaggcaggctacaccatctatgtctgtgtaagtacgctctataaggtttgcacaatgacaaaatccttatgtccaaaattgcctaaggacctaaggatgcctttcttaggatatatttctgccattaagcaatgcatcactgtatgtgtatagtacataagaatatatgtgtaagattaaggctgggtgtggtggctcatgcctgaaatcccagcgctttgggaggctgaagagggtggatcatttgaggtcaggagttcgagaccagcctggccaacatggtgaaaccccatctctactaaaaatacaaaaattagctgggcatggtatgtgcctgtaatcccagctacttgggaagctgaggcagaattgctttaacacgtgaggtggaggttgcagtgagctgagatggcaccactgcactccagcctgggtgatggagtgagactctgtctttaacaacaacagcaacaacaacaacaacaacaacaaaacaacaaatatatatatatatatctatgaatgaacatgtatgttaattggattactcagtgtcaaggccgtgaatatttaagctgttattagtcatggtatgagaccatgtgtataccacacaagaatatatgtataagtttggccgggcatggtggctaacgcctgtaatcccagcactttgggaggccaaggtgggtggatcacgaggtcaggagattgagaccatcctggctaacacggtgaaacccagtctctactaaaaatacaaaaacaaaattagccaggcatggtggcgggtgcctgtagtcccagctactcgggaggctgaggcaggagaatggcgtgaacccgggaggcggagcttgcggtgagctgagatcgcgccactgcactccagcctgagcaacagagcgagactccgtcccccgacgactcccccgccaaaaaaaaaagaatat

SEQ ID NO: 35288 - DNA, 1074 bp, Homo sapiens
atagagacctttcccacagggtctgagaaggccaccatggtcatttcttcccttctgtcagacataattcctcggtttggccttcccacctctctgcagtccgataacggaccggcctttattagtcaaatcacccaagcagtttctcaggctcttggtattcagtgaaacttttgtacctcttacggtcctcaatcttcaggaaaggtgaaacgactaattgtcttttaaaaacacacctcaccaagctcagcctccaacttaaaaaaaaggactctgtcaagaatagagcccaaagacttgccaaccaagcaagtaattacgctaaacccccttggactcccttggaaactctctaattagatgtcctgagtcctcccaattcttagtcctttaatacctgcttttttccttctcttattccgtttagtttttcaattcatacaaaaccgtatccaggccatcaccaatagttctgtacaataaatgtttccatcaccaatcattctatatgacaaatgttccctttaacaaccccacaatatcgccccttaccacaaaatcttctttcagcttaatctctcccactctaggttcccacgtcgcccctaatcccgcttgaagcagccctgagaaacattgcccactatctctccataccacctccaaaaattttcgctgccccaacactttaccactattttgttttatgttatttttcttattaatataagaagacaggaatgtcaggcctctgagtccaagctaagccatcatatctcctgtgacctgcacgtatacatccagatggcctgaagtaactgaagaatcacaaaagaagtgaaaatggcctgttcctgccttaatcgatgacattaccttgtgaagttccttcttctggctcatcctggctcaaaagctcccccactgagcacctggtgacccccacccctgcccgccagagaactaccgcctttgactgtaattttccattacctacccaaatcctataaaacgttcccacccctatctcccttctctgactctttcttcggactcagcccgcctgcaccc

SEQ ID NO: 35289 - DNA, 1719 bp, Homo sapiens
agtcttgaactcctgggcttgagcaatcctctctctttggcctctcaaagtgctgggatttcaggcttgagccactgcacctgatcctttttaattaaaaaaattttttatagtctttttttttttttttttttgagacggagtctcgctgtgttgcccaggctggagtgcagtggcacgatctcagctcattgcaacctccgcctctcgggttcaagcgattctcttgcctcagcctcccaagtagctgggactacgggcgcgtgccaccacgcccggctaattttttgtatttttagtagagatgggatttcactgtgttagccaggatggtcttgatctcctgacctcatgatccgcctgcctcggcctcccaaagtgctgggattacaggtgtgagccactgcacccaccctgtaatcattttttttattgatgagtaatattctatttatggacatattacattttatttatctgtgcatcagttgatggacatttaagtttctatttttttgggctattatgctgctatgaatattcatgtttttgtgtagatgtgttgtcatttctttgggtatgtacactttttaataaattagcttttgacttacctgataccaaaaaaattatccattttgagtatataattcaataatttttagtaaatatatagatcgtgaaactatctatcaccttgagctagttttcgaacatttccattgcctccaaaattccctccagcctgtttgcagttaacccttattcccacccccagcctcaggcaatcactgattggttttgtcttaatccatttgcttttactggatattttgtataagtggaattgtacaatatgtagtcttttgtatctggcttctttcacttagcataatgtttttgggattcattcatattgtagcgtttatcagttttttgtccctttttactttggaatagtatttctttgtataggtatatgatagcccccccccccccccccccccccgttatctgtgtgggatacattccaagacccccagtggatgcctgaaatctcaggtagtattgaaccatatattatttttttctgtatctgtatacctaggataaagtttaacttgttaatcagacataataagagattaaaaacaatacaatagaatagttacaacaatatgctattcacaatttcatagaagatttcttactgtaggtgttagcaaacagcataaagtttttttcttgttaaattgagaactttcactttttcacttaaaataagtattttacagcttctttttggcatatccagttgtcatcctcattactcttgagtgtttgagccattgttaagtaaaataagggttactagcactaagatactagttgatctgatagctgagatggccactaagtgactaatgagcaggtagtgtagacagcgtgaatatggtggataaagggatgattcatggccgaggcagaggggcatggtatgaggtttcatcatgctgctcagaatggcactcaatttaaaacgtagattatttctgaaattttccatttatcattttcagaccatgtttgactgtgggtaactgaaactgcaaagtaaagctgtaggtaaggggagattactgtaacacactttagctgttgaccagtatatataggtgtttcgattatttccagttgttgactctttaaataatactc

SEQ ID NO: 35290 - DNA, 1083 bp, Homo sapiens
ttctgtcctaagtaaacagattggtacctgtggcctgtagggtctgctaatgttagtggctttacctgctcatgttgtataccatttttggaggagtaacagcttcacgatgatataattcacatactagtcagttcagtttaaagtgtacagtttggtgggtttattaattttttaaaaaattactccattttgcaggtgaacaattcagtggtttttactacaattgtccatcggtatctgttggggatttgttctagggccttcctcagacaccagaatctatggatgctcaggtccctaaaataaaatggcatagttgctgggtgcagtggcttgtgcctgtaatcccagttattcaggaggctgaggtgggaggatctcttgaggccagagtttggacaccaacctgggtgacagagcaaaatcctgtctcctaggaaaaatgaataaaactgacatagtatttgcatataaactctgcatattctcttgtatgctttaaatcatctccacatcactcatactacctaatacaatgtggatgctatgtaaatagttgttatactgtgtattgtttagggaataatgaccagaaaaaagtctgtacatgttcatttacagacataatttttttttgagtagtttctgtacctcattgattgaatccatgtattcagaactcatggatatggagggccgactgtatattcagagttgtgcagccatcactatactcaattttacagcattttaatcatcccccaaaagagccccatatccattaacagtcgcttttcattttccctcagcactcccagtcctatgcaaccactgatcgactttctatcattatagattagactgttgtggacattttatgtaaatgaaaccataaatgcggtcttttgtgactggcttctttcgtttagcataatgctttcaaagtatatccatgttgtaatatgtgtcagtacttcatttcttttttttttaaaatctattttctttctttcttttttttttttttttaagatggagtctcgctctgtcgcctaggctggagtgcagtggtgtgatctg

SEQ ID NO: 35291 - DNA, 1032 bp, Homo sapiens
agcggagcggggcgggggcaaccattgctcccagcgccaagctctgtgtcgccgccgtcgcctaggcggttgggggtcggtggggcggcgcgggcgggggtcgctgcgcggggcggcgagcctctgttttgtctccttctctccctgtggagcggctcgggctgctggggaggccccggctccctccggacgctcggccaacggcggcggctagtccgcggccctgctgagagggaaaaggacgccgcggtcttcccaggcgtcgcggagagcaggtaagagcgcgggcagccgaggctggtgagagggagcgcgaagggcgcggcgataaagcctggctgtcccgactgccgccgcctccctccgcgcccccgccccgcgcttgtgttgtttgcttcggggtttgcggaggggttttccggcggctgcggcggtgacaccggccgggggctgggggaagggggctgagtgtccccaggcaacggtcgcggagcgggacttggagaaaggggaaggcgcgctgcgcgcctgcccgcggggagcgcggggcgcggggcagggctgagggaagaggttacagaccccggcgggggggatgggccgagcgcagctggtctctccgtgtttacatctctgcgcgagtcacctctgccgagaagcggactgaactgacccgcctcatcccgcggggaggccagggcgggggtccggctccggaggaagcgcgtcctgggagggtttgtgtagggcgggagtctgcggccggcgccggggctgggcggcgagctcggggcgggacctgggaggctccggccgctctgggtggcgggcaggcgggggggggcgctggacaccagtttccttccctgtcgtgccttatcgccgccgcttacctttccttcccggcgctgctagcttgcacgacaggttgtactcggcagttcttttattctcgctctccacgccggcaccgtgctgccatctccccctattccccgggaggtagggaggctttgctcggatcggaatctg

SEQ ID NO: 35292 - DNA, 1031 bp, Homo sapiens
aattccatgggccgatttttttttcacgttgattaggcctctgttggtggtggtgggagggaaggacggaggtctaactaactcgctttatttttcttgtaaaatgctggtggaaggaagttatccctcaagtatcagaaataagacatcttcgttttcctagatctttattgcctttatttttctagatctttataccaaatgatatagagcttttaaatatatatatacactgatgaagtagggagaagccatttattttaaacttcggaagataacgggactgttctgttgagaacggggagaaagattagtcctctgaccgtggcctttcgttttatctgtctgcgttccccaccgacatcatgcgcgcgtgcacgcacacacaaacacacacacacacacgcgcaccttttttttgtagctgcagaaattccaaataattttcttcccaatttgcggcaaaatagaagtagtttaaaaattttaaatacgtatctagcaatgctgcttgtaaaggtactggtctttctctgattttcatctaactatttttgcagcacttaaaatgtatttaagaactattattgattggaaacaaatttgtcttcagtcgtggacattacttaaccttttgttcatactttctactttgatgaaaaataatttttttcagttttattgaaggaaaaatttttaactgtgtctcatcacattttgttctctcctttttgcttttaaaagggtaattttatttttttgagacagagtttcactcttgttgctcaggctggagtgcaatggcgtgatctcggctcaccacaacctccgcctcccggatccaagtgattctcctgcctcagcctccggagtagctgggattacaggcacgggccaccacacccagctaattttgcatttttagtagagatggggtttctccatgttggtcaggctggtcttgaactcccaacctaaggtgatccacctacctcggcctcccaaagtgctgggattacaggtgtgagcca

SEQ ID NO: 35293 - DNA, 1115 bp, Homo sapiens
ttagtattatttaattttaattaatttttttttcctggagacagagtcttgctctgtcacccaggctagagtgcagtggcgtgatctcagctcactgcaacctccatctcctgggttcaaggaattctacctcagcctcccgagtagctaggattacaggcacccaccaccatgcccagctaatttttgcatttgtaatagagagggggttccaccacgttggccaggctagtctcaaactcctgacctcaggtgatctgcctgcctcagcctcccaaagtgctgggattacaggcgtgaaccaccgtgcctggccttaattaattttaaatatatatttgttaatacatttaagaaaaaatgttttgtagagacaaggtctcactatcctgcccaggctggttctcacactcctggactcaagcagtcctcctgccacggcctctgaaagtgctgggatgaacaaacctgaaccaccgctccagcctaactttaattaatttaactagctagatggggctggtggctgctgtactgaacagcactatttagaattgtgccacatagtggcgctggtaaaaatgcttcctaaattaaataattgaaacctaactcaaactatgatttttttaaaaaaattgtgaagataggccgggcgcagtggcttacacctgtaatcccagcactttgggaaactgaagtgggtggattacctgaggtcaggagtttgaggccaacctgaccaccatgacaaaaccccgtctctactaaaaatacgaaaataagccgggcgtggtggccagcacctgtaatgccagctatttgggaggctgagacatgaaaatagcttgaacctgggaggtggaggttgcagtgagccgagatcaagccattgcactccaccctgggcgacagagcgagactacgtctcaaaaaaaaaatatatgaggatagagtgactcacagaccccaagaataggagtggacctgagcccaggaacaattgaagcctgggacccaaatgtcattaagattcttgctcttgactcagctatctgtgagtctgccttatcttcttggcacatggaccttctcttcctcaatccacattgtaa

SEQ ID NO: 35294 - DNA, 1018 bp, Homo sapiens
ttttccatattttataactctgaaactgagctctttactgttgattatccaaatcttttgccttttttctattagcaccctgcccatttcactactctaatcagccaatcaagagataaaatgagtctgggcttggtggctcatgcctgtaatctcagtactttgggaggcctaggcagcgggatagcatatgcccaggagtttgggcaacatagtgactttgtctctaccaaaaaaaaaaaaaaaaaaaagaggtaaaaatgaaataggcattgaaatacaaaccagatggcttttgctgttctttcatagttaaggcaaaatattttttgttaaaattaaataaaataaggtattggtactctttgtgggtcttttctagactttttctgatgttctaaggtgaattcagagtagtttaattttaatattatttctgctggttaatgctacagttttttttttcttcattataggtatgctccgtatagtgattgtagctgttcctctggattcaccatctgttgagttgtaaatgtgagagaaaaagttatatgtgaatatatatcaagccagcatttgtattttgcatcattaaataaaaagaaataaaaatacttctgtattcttcagataaagcatattgtgacaacttgtagaaaatgttaattctaaggtacattaatagaagtatttcaatatggaaggtaccacctgataacaaggtcagtggtaattaaggacactttggtaagaaaagttgttgtgaacatagattcaaaaatcagggctggctgggcgcggtggctcaacgcctgtaatcccagcactttgggaggccgaggcaggcagatcacctgaggttgggagttcaagaccagcctgaccaacatggagaaaccccatctctactaaaaataaaaaaattagccgggcatggtggcacatgcctgtaatcccagctactcaggaggctgaggcaggagaatcacttgaacctgggaggcagaggttgtgg

SEQ ID NO: 35295 - DNA, 1045 bp, Homo sapiens
attataggtatgagccactttgctagcctcaagaatcttttagcgtaatcatttttaatcattagtctttgactctgttcaaagaaaggtatgtttaagaatgaaaccaaaatctgccaggcgcggtggctcacgcctgtaatcccagcactttgggaggccgaggcgggtggatcacaaggtcaggagatcaagaccatcctggctaacacagtgaaacaccgtctctaccaaaaatacaaaaaaattagccaggtgttgtggcgggcgcctgtagtctcagctactcgcgaggctgaggcaggagaatggcgtgaacccgggaggcagagtttgcagtgagccaagatcgtgccactgcactccagcctgggtgacagagtgagactccttctcaaaaaaaaaaaaagaatgaacccaaaatcatattattttcttaaatctgatagtgctttacactttgctttcatagcacttatgacaaattattattcttcgtgtgtgtatttcttaatgtctgtttggtatcttgtacacttgagtgtgaattccatgagaacagaaacctattttattaattatcctttattcagcaacttgctcatctggtccatttaggagtttaatatttgtagaagtgatgaatgtataacggcaatcgattctttttattttattttattttttgagacggagccaccaggctggagtgcagtggcacaatcttggctcactgcaacctccgcctcccaggttcaagcaattctcctgcctcagcctctcgagtagctgggactacaggtgcgcgctaccacgcccagctaatttttgtatttttgatagagacgggcttttcccatgttggccaggatggtctccatctcttgacctcgtgatctgcccgcctcggcctcccaaagtgctgggattacaggcgtgagccactgcgcctggccagagcaatcaatttttaaatttttttctgcatgactatttcattatgattgtcaactcaactaatacccagttggacagttcctggtaa

SEQ ID NO: 35296 - DNA, 1050 bp, Homo sapiens
ggaaccttttataaacataatgacattgtgcagatgttgtggtaatcactttctatacagtatattacttatccttccaacagctgtatgacctataaattcttagtatcttatctaagggacctgagccaggatttaaacctagttctgtctgacctaaaagctttaactacattatactactgttgtaccaaagcaccaagtatttataccagatatttaacagctaagtcacaaggatcaaagaaaagtaactaaagcataaggcaaggcacctatgtgaagacagactaaaaaatgtagacctcccagtatgtaaaattagagaaaaccatcaatgtctataaattcaagaatggcgatcaacagtatcaacatagcctaactcattatcaaatattctttaaccagttaagaaacaaacaagattggacagatttgggagttctatccagaatgttatttcaacaaatctcataaggtaaattttagcttgacatacgattctgtagcaaataaatctcctttccaggttctaccctatcaggccaacatgttcggcttgaattctgtctgtcccagaattatggatcctttcacatgtaagatttgtaatagtaattcattcatttatggaaaatgcagtcttgtagggataacaagagaatatgtatttgggggttaggtatgtctgtattttcagagtagtatctaccgctgatccttatttaaaagcctgctgagtcgttgccttgccctaatacttaaaaactcaagcatctatttatggcaattattattattttttgagacagagtttcattcctgttgcccaggctggacagcattggcgcgatcttggctcactgcaacttccacctcccgggttcaagcaattctcctgcctcagcctccccagtagctgggattacaggcatgcgccaccacgcccggctaattttgtatttttaggagagacggggtttctccattttggtcaggctggtctcgaactcccgacctcaggtgatcagcccgcctcggcctcct

SEQ ID NO: 35297 - DNA, 1075 bp, Homo sapiens
gagattcggcgcccagagcctccaggggcctcagctcaccgcacgctgacacatgtgcggcggtgaaacccagccccaacaggccccgcggcctctccctgggtgcggccgctcgcgtggtctggctcctgacccaggctgccgacccctaaccctgttttctctccacaggacactggtcttcccacacgtgagaccgatgtcgccaggaccacggggtcggggggactcggctgtcctccgtctttcaaataaagctgtttgtctaaaaaaaaaaaaaaaaaaagaaaccacaagacaaataataaaatacttataaagacaagtgaaaatgaaaacacagcataccaaaacttatgagacacaacaaaagcagtgccaagggggaagtttctagctataaattcttacattaaaaaataagagtctggtctgaagaaagcaaaattaaaaattatttaaaaaataagaaaaatatcaaatcaccaaccggactttccaatttaaggaactgaaaaggaagagcaaactaaacccagagctagcagtagaaaggaagtagtaaagattagaatagatataaatgaaatagagactagaaaaataatatagaaaaatcaaaatgaaaccaaaagttggttattcaaaaatcaaaaaactttgcaaatctctagctagatctacttataacaaaggagacaagtcagaaatgaaaatgaagacattactaccatttctacagaaatgaaaagagttataggggaatactgtcagcaattgtctgccaagaaattggataacccaagtgaaatggagaaattcctagaaacactaaacctaccaggctaaaccatgaagaaataaaaaatatgagtagatttgtaactactaaagagattcaatcagtaatcaaacatctcctgtcaaagaaaagccctaaacctgatggcttcactgattaattctaccaagcatttaaagaagaactgtatcaatcatttcagacttcccaaaaattgaagatgagggcatacccttaacacgttctatgaggccagcattaacctaataccaa

SEQ ID NO: 35298 - DNA, 1032 bp, Homo sapiens
taaaagaagataagaaaggaagttaaaagtttcattacaaaaatcaactaaacatgaaagaagacagataagaaatgaggaaccaaaaaaagctgcaatatatatagaaaatagcaaaatgacagaattccctcatcagtaattattttaaatgtaaatgggttaaacttcagtgaaaagacagagattagaagaatgggttttaaaaaaccatgattcaagactcctgtgccacataacatttcagtcaatgatggaatgcacataggatggtaatacaatggtaagattataataacgtatttttactatatattttctatgtttagatatacaaacaccattgggttatagttacctacagtatttagtatggtaacatgccgtaacagctttgtagcctaggagcaataggctataccataccatctaggtttgtgtaagtaccttctgtgatatttacatgatgatgaaattgcataacaatgcatttctaagaacatatacccatacataaatgatacatgactgtatatgctgtctgtaagagacttaagatccaaagacaaaaacaggttaaaagtgaaagaatgggaaaggatattccatgaaactaattaccaaatattaaggatggcgatactagtatacaacaaaatacacttcaaagcaaaaaagattactaaagacaaagaaggacattatatactaaaaaacggttcaggatgagcacgttggctcaggcatgtaatcgcagcactttgggagaccaaggtatgagggtgccttgagaccaggagttggagacagcctgggcaacacagtgaaacgctgtctctacagaaaattaaaaaattagctgagcatggtagcatgtgcctgtagtctcagctactcaggaggctgaggcagaaggatagcttgagccaaagcactggaggctgcagtgagctatgatcacaccactgcacttcagcctgggcgacagagcatgatcctgtcttaaaaaaataaaaaacataaaaggttcaa

SEQ ID NO: 35299 - DNA, 1047 bp, Homo sapiens
taatttctttatggtcagtttttacacagaaaggcagagggaaagttagagtgatatttttaggttttatggctggctttggggaaaaatagttctggttggcaggatctgccttggggtctataggcagcctctgggaaggatgggactcagagacagaagggcaggagaaagtcagagaaaaatctttgctcctgaagctgcctctgaggccttcatttctggatattgtcttctgaaccccaacaatagtttgttattcacagttcccaagaggagggggcacaccatgttacaggggccacatggggaagcaccaggatcaagtaggaggtagatggagtaaagagaaaacgtagacaagaacctgtattgtggtgtctgcaggaagaaatggagaggcagtcagcaggcctgggattggctagcttgaataacttcagtagattctggggtgtaccggctgtctttagttgtctggtacctgaccctggggtaatggtggcttggagtggaagaggcctaagaaggaagtggttgtaggcacagaggctgatttggttaggttgcatgtgaaaggtgccaggcctttgctatctctaggaatcagctagccctgggtggggggcagtccctccagagcccacaaggccctagatgtcaaagagtcagcattaaaagacatgctttaatataataggaagtaaggaatcagggatgaactccgcagtttttgatctgagcaactgaaagaatgaagtaatcacttagtgcaaataacggtcaccactgatgatactgatggtcttaccgtaaatctcctgcactttcccagtttttatttctatttccaaaacaacccattaatttcttcatggtccagctccctcttgtggtgaggatttattctcatactgtttctgacatgctgtaaaacaaacacctctagggaaaggatgatttaacacattttaaaaatcccagcactttgggaggccgaggcgggtggatcacctgagctcaggagttcaagaccagcctggccaa

SEQ ID NO: 35300 - DNA, 1028 bp, Homo sapiens
aagaaggtagaggtatcattttctgttttgctttgttttaaaacagttgcctcaagcttctgtcttaagagtagtgacttagaatccagatatcttttgttttagaaaaacaagcaaaactatgttgcaagactgacagttgtaatgtttatttgccacagatcaaaggttcacaaagtatatcaaatttacatctacttggggtaccttgatagattattattgtttttcttttatctttcccttcaggaatttggaaactcgttgtcactttttttaattttaaaaatactaaattgtaatagttttcttttgccaaatgtgtgcgtacatattcaaagcaatgaaactatttcaagccatacaaccacaggggtgggaacccttttcacaaattttaatgtgtttgtatgtaaatagatgtttgtatgaaatattttcatgatagaatgaatatatttaaatgaagttgaattattccagtgctacttaaacacattacaaaaattttggtgagaattatctgagtctattgagatgtaatgcagatcaattttgatttttaaaaatcaaaagcctacaataactctgactctcagcaacttcctcggcgttgttgcacctgacgtggagagagctcgtaggcttccccagtgcctcagccgcttcctggtggaagttaggtgctaatggaggtgtgttcaccttttagtgatatcactgcaggcctttgaggggcctgagagtgaatcagaggcattagagacaccggtgcagttatctggagcacaatttctttgcagggcagcagaatcagaagccagacttggccatgtgaacctcgaaactcggtttcccggccgccatcaaccgccacccttactgcctagtcacacacgtcagggaggctgccctcagtggagttggggttgagaccccagggtgggacttcacagttttgccagcaatctctaccttctgacttctgcctcgcagagaggaaggagaggggagcatctggcaagggg

SEQ ID NO: 35301 - DNA, 1006 bp, Homo sapiens
ccttatccgctctagagcctcacacaatgcttgctactgagaaggcacactgtaaatgttgactagttgtggctgggaggccgagttgggtggatcccttgagcccaggagttcgagaccagcatacgtaacatgacaaaacctcatctctacaaaaaaaaacaaaaattaacccggtgtggtgacacatacctgtggtcccagctacttgggaggctgaggtgggaggatggcttgagccccaggaggtcgaggctgcagtgagccatgatcatgccactgcactccagcctgggcaatagagcaagatcctctctcgaaaaaaaaaattactagttgaattaatgaataaatactctctgcctatgttaaaataatcaagctgtctttgtttcaaaattttcttacattttaaattttaaaaataatttgagttggtctttccctattccaaattttagtacttaaagggaattttgggtgtttcattgcatagggcctttcagaggataacaatgaaaacatgttcctgaacttgcaaatatatattacaaggagagagatggagaagtgctggtaaaatcacgtgagcatccctgtgagctttcttctggtataggaccgtgggtctcaaactatcaggatgctaatgatatcagcagggtggagcattcagtcttccttacttgcccctactggccatgatcatggatgtatgtatatacatagatatacatacatacatacatacatacatagatatatagatatacttaaataaatccccatatgtcttccaaggagatggaagggatttcatttgactggataccaattacggctattaatgataaataatacattagtgacttgaaacaaatgtgtagacattcacacactttaagccacatttctatcattagagattactatatacaagccatctgaaagacccttgagaactaccagtgaattctggagcactcttgagggaaattagacatga

SEQ ID NO: 35302 - DNA, 1873 bp, Homo sapiens
cccttgacatcgaatgagataaatctgaataagaatttcaaatatccagataactaggaaaaatagccctgtgaaattttaaaaccaaatttgtaaatagaagcagaatattttattttatttttaaattgcaaacataacaaatgcttagtggaataaaacaaaacttcaagaaattcagaaatgtgaaagtgctcccccccgcttttttttaaccccaacccatgccatagaagtaattactattggcagagaatttgcacatcttaactaaacatattcaaggtaaaatatagaaataggcatttttaaagttttattttaattgacacataattctacatttttctggggtaaagtgtgattttgatacataaacacattgtgtaatgatcaatcagggtaattagcatatccatcacctcaaagattcatcatttctttctggtgagaacattcaaaatcccttcttctagctattttgaagtatacaatatattactgttgactgtagtcaccctgttatgtaatagaacaccagaacttattcttgctatctaactgtaactttgtacctgttgaccaacctctccccatccttccctcctgccttctactccccagcctctgttaaccactgttctgttctctacttctgtaagatcagctttttcagattccccacatacaaatgagatcatgcggtatttgtccttttgtgcttggcttatttcactttacatgatgtcctctaggatcattcatattgtcacaaatgacaggatttcgttttgtttttatgctgaatagtataccattgtgtacgtatataccacattttctttattcattcatctgttaatggaaacttgggttgatttcatatcttggctgttgtgaatagtgcaataaacatgggagtgcacatacctcttcagcatatggaagaaatagctatctatttctaaatcagtttaaatagcaaaaatgtacattgtttacctgttcacaactgtctcagattcaaaatgtttgctagttttgagatcataatatttagtcttttcttcattatatgacaaaatgtggaagagaaaagctaagttactacaaccagcttattaagtcagaaacctaaaatcagaatactcatgctttaccagatggtttgccctacaaataaggaatgaatgagaacataaccttattttaaaaattgtttttaaagtagatattgtgtccattcccgcctcctctattaaaagggaagaagaaattatcctgagattcagtaactgggacttctttacatccactcggtcccgagataaaggaattgatgcagcgtggtgacaggaatcttgaggctttgttggtgtggatctggagtctgtctggtacccgtggatttgctggagtaccatggggtgtgatgaaaacgtgtagtgttcaaaatactttgatacacacatctctaatttttatactaatcctagattctggatgtttattttcatgtatctttctttaattgttctattttgaccatgatttatgaacctaaaggcaagacttttcacaatcctagaatggtgaacaagaaggagatatttcttcagattggctttgcgggggctatggaatattagggtcatgtggtttttagcctaattatgaggtggagatgaggtcattcattcagctttatttgtttatattgttgatgcctctccttcacatgccaatttgattttaaaggatttactactccacggcttctttctcctgtgcccaagtccttttctgatgttgcttggctacatttgccaaaagggctccgtgtaatttatcactggccaaataacctgagcaa

SEQ ID NO: 35303 - DNA, 1050 bp, Homo sapiens
gcttgttgcctctcctcatgagattgatgaaaaaatgcttggcaaagttcttcaaagccacatcattgcagtcccagtaataagacataaacaggtacacacaggagggcaactctctagacttcaattttttaaatgcctgtctttgggatagttggtctttttgtgtgataatttaatactaatgtcagaactatgattttccacagtgtacctctagttacagtatttttcacaacaggatttcttttattttactctcatcccctgtctgaggacactgagagggagaggctccttactcgcttgtgatagataggaatgactataggacgtttttctttcaagaagagatggggttgcccaggcccagcttcccaacaatgacttttaggccctgtcagcttcaggagcaaagagtgaccatgtgaatttctcaagcatttagtggaattcagagccgcaaaagggctagctattttcagacccgttggttgggtaaaatggaaactgacttcaccaaagcaggttataggattctgtaggataccgcaccacttactaaactcctgacattggtaataggccagagcttcctttgggaaagaaaatgtctaagctgacaactgaagggtgatgtcagggactggtatgtgacccagaatcccttttctgcaggcaaagtgcgttgttttaaagggggtaacatttctcaggctctcaatgatctgatgcaatgaggggtgagaacagcaataaaaaccttctaaatgacttttgtaaaatttcattttaattataattccaaccttcatttccccgttgcccccaaccccacctttttgtaaagcagagttttgcttacaaactgtaaattttaaattgtcagatattttacttcctttcttttgggtggatacttgagtgccatagaggcccatttcagtatgttggtattggcctgggcatgttggctcacatctgtaatcccagcactttgggaggctgaggcaggaggattgtttgagcccgggaatttgagaactgacc

SEQ ID NO: 35304 - DNA, 1048 bp, Homo sapiens
tcatggaaagtctctgttattgttttggttgtggctgctgttttagacataaagttctactgctaggaaaactaatccgggatattaaatattcagagtggaagtctcgaatgatcacaacccttaatctctagttcctttaattgatcacaccctagggatgtaaagaaaacaaaacaagccaggaagaggctcctgctgtcgtcgaatagatttcagaattctctcacaaccagcaatctaaaagccttcagaatgatagggagtggtcacatgtccaagcacctccttaatgtgcaaggtcaccagagtaatggccatcatttggtagctctcccctgaccttgtctctcccaagagattaagatgatgatagggctcctcttcatttgcctgttgaaaggcactgaggccaggtgtggtggttcttgcctgtaatcccagcacccaaagtgggtggaccacttgagctcaggagtttgagaccagcctgggcaacacagtgagaccctatctctataaaaaaaaatttttaattagccgttttggaggctgaggtgggtagattgcctgaggtcagaagttcgagaccagcctggccaatatagtgaaacctcatctctactaaaaatacaaaaaaataagctgggcttggtggcaggtgcctgtaatcccagctactagggaggctgaggcaggacaattgcttgcacccgggaggcggaggttgcagtgagccaagatcgcaccattgcactccagtctggacaaaaagagtaaaactctgtctcaaaaaaaaatttttttttttaaattagccagttgtggtgatgtctacctatagtcccagctacattggaggctgaggcagaaggatcacttgagcctacaagttgaggttacagtgaactatggtctcatcactgcactccagcctgagtaacagggtgagaccctgtctctaaaaaataaaggaaggaggaagagaaagagggaaggagggagtgaggtaagaaaggaagaaaaggagagaaggagggagggaggc

SEQ ID NO: 35305 - DNA, 1069 bp, Homo sapiens
aaggagtggcgggctgcgaacagcgcggcgccgggccccgcggccgccactgtcccctacacgggtggccggttgcccggctcgggcgggggcccgacagccacggtcacgccgccgggagcgcgcactgcgcggcggggcgcaggccgagaatggggctccgccaggccgggggcgctggaaacgcacggccgctccatcccgcccggccacagcctgcatccaccctcggagttgcgaaacctgccccgcgctctggcctttccgcctttgggcgcggagggtgggtgcactccgcagggcagccccttgaggccggcggactccgcggagcaatcccctagcccagttttggccaccccgatcccctcccggccgccagcccttcccttctgctgcctctgcgccccgcggcggccgcggccccgtccgggtaggtcccccggcgcagcgcacggggccagaccaggcacgtggcagccgcggcccaggcggcagctcttccgaaaagatgaaatcattgtcgggcgacggacaagtctcccgacccgggactcgaacgtgcgccgtccgggaggcgggcagccctcccctcagctgcccccgagcgaactcagtcaggcctccccctcccccttcctgcttggctgggatgcagccgccacgctgtgcaggcgcgccgcgagtccgcaccgagattgctgggtgacacttaactttctgaattccatgccgttggctgtgggtgatatcaccgcctcagtgtcgtgtttctccgccccttctcttctaccgcccctcccccgacttttctcgccactttgttttgctgagtttctccacctttttttttttttttttgttagttctgaaaaaacgatgtggggacgttatacaatctcgttgtttgtatcataggatgttatgattttgtaacagcgaatactggaaaatactctttagcgtatttatttggttccactccatacagtacgtcgtgatgtttttcagtgtggtgtggtatgataccagaatgttttaaactaagcatgtgagtaaataattttta

SEQ ID NO: 35306 - DNA, 1052 bp, Homo sapiens
aatttttttcccattattcttttttttaagagggaagggcttgcattgaattgctctgaagccactgtcttctaccccaacttcctcccgtctagataggcttcattaatttgataagccgacaccaaaagagaggggtggcggtggaagggggcggggtgctgcaggaggggctgcctaggggctgccctgaggttttagaagatgaactgctaatgatgttgaagacgtaccttttcagactgcatggtccctctggaaaatcagggtccttttttacttattctgatggtactgcaagaactgaaaaatagaggcctggttgggatggagggggtatatgggctggggcgggggtggtaagtagacagatgcgtctccaaggaggaatccgaacacgtcagttacacagcttgaagggccttttctttaacagggtgtctgatattgtcatgctaaaaagtcagaaactaatgggggaaaatagattaatttgctaggtcatttattgaacagtcttgcttgatacttacaaactactgaaattagtgcaaattggcaatatgaatattttgatcaacatctgtgacccttgaatgcaaaccacagagcttttaacatgtcagaggcactaatctttgctagtcctttcccatcttctaatatgatggaagttgattatacctaagagagccatctgtataatcgtcccaagacagtcccagtttatgccagttgtcctggcttgggtgaaaaattatatagttaccctaattattacctctcagcaactgggagacgctgagagatgcccagcttgggtttgattctatttttattctctgttctcttgcacactttcaagatcattctcaaacatttactgaaaacaaatgcgtgcggcattctgaggatagaaaggcatttaaggtaggatcttttctgattgcagttagtggcaatataagcgacttgcaggtataacaaaaaccttgaatattctcgaatcatagatcagaaccataccctggcttatttccttctgaaataaa

SEQ ID NO: 35307 - DNA, 1088 bp, Homo sapiens
cagcctgggtgacagagtgagaccctgtctcacaaattaaaataaataaaataaaatacatctttaaatataaaataatatttaaactattattagtaggttgtttctttcttaaactcttcctcttacagacaaaaatatgtagtttggtgatagagtctgtctagtaaaataaaaataaagtacagtgctagcttcttataagccatagtttagtcaccaaggcttctggcaatctgtaggtaggaaaattaaggcataaaatgatctatcaagatttgcataaaaagccactcataagccgaggagaaagcatttcagctcctggattttttgtcactgtcaagctgtcacaaataactatgtctgcttggagcatttcaaactctgagttctctgtttatatagatgttgggatttcctcccactcctaaaaatatattctagatgaaggggttaaagatcaacattaccctgctaaaccttactctgactcaagatttacttaacgaactgtaattttactactgcacagattcaatctgttgagcaaataaaaatcattttgaaaatgacctatgtatttattcagtttgtatttcagaattatcataatatcaggtataaggggattgtggtaccaatgaaactattctataccattcaccatagatttataaaggagactacaaaagagaaaataagagatgacatcatatgaagtgctttagttcagataaaggaaacatccaaaaatactgagatgagtaaaattttattcaaagtaggttcctgctttgtcttgatctcaatccattctaactcctgatgtcatttaccgtgtgagatcttagtacaatcatgaaaagaatatgagcatttatcaaaactctctgacatctgtatgtttagaaatgaacttacacagcaaaatatgatttccttgcacttatttaatttttctaacttcaatttctacctatgtgtctctgccagtttgacctgattcagacacccagaacttgaataaagaagccctcttctattttcattcttaatgaatataccttttcccatgtccacattga

SEQ ID NO: 35308 - DNA, 1039 bp, Homo sapiens
ttcttttcttttctttttttttttttttcagtcagagcctcactttgtcacccaggctggagtgcagtggcacaatcttggctcactgcaacctctgcctcctgggctcaagcgattcttgagcctcatcctcctgagtagctgagattaaaggcatacaccatgatgccccactaatttttgtatttttagtagacatggggtttcaccatgttggccaggctggtctcgaactcctgacctcaagtgactcatctgcctcagcttcccagattgctggaattacaagcgtgagccactgcacccggccaccactaccattttcaaatggagaaatagtacataagataacactgcgggctgggcgcaaaacaaacaaacaaaaagcaacataacactgagactgcagttcaagcagcctgtgtttatttcattgctaaatatttgtatatgtttaaatatggcagttattgtcctgttgattctctgaataggacaaagtagtctatcctccagtggtcccttctccccagtcccaatgtggtgaagagtgggatttttcctccaagagagggtttgttattcatttttctgtctcaggatttaagggcacagtcttatagtgccaggctgctttccttaagatctatagaaagacagaccgcaaaggaatggatactacacacattaaaggcgacacaaggcttatgtagggcctctttcgggctgttctcctcagagcaagactgctctcaggcacagaggtcagccacaaccctgtgttccgtgttctgatgctcaatcacatcaaggatggcagacaagcaactttcccaggtgctcctgagcttcagggagatgttgcctcagccggatgcccaacttcattccatttccagactcttagattcccttcctttcaaggtgcattctgctacaccctaggcccctacccagtgcactcacaggtaagagagtaggcccagctttattttttcccaagaggagcctactagcctaagggttcgacacaggtgta

SEQ ID NO: 35309 - DNA, 1035 bp, Homo sapiens
cctgctgtcgaaactgaggcatagagagattaacttgctccaggatcacagcaggtagctagattctagatacactttaccactaacccctaaattaaaaggttaattaagccccataaattaaaatcagccctcctttctgctagggacatgtgggtgctttgcaaggtgtggattgagctgccctcaggtctacagttcttttaataaataggacagagtccaatccaccatgctagaaaattgtaatttttgtagcagcattgttagtgttacatgaaaccagactttcccaggttcctggtggcagagatgtgtgtatagcttctcttccatggacaagtttcatctctggaggcgatcagggcagcctgtgtagaagactaagacttaggaattgggctgtgaatagctatccatgtccatttagcaaataccacttcgctattttaagagcaagaaggaaaatgccatttaaatagtgatttagacttacaggaaggacaaggcaaggataaaatctaccgaagattttaagaaaatctccaccctaaataaaaattgaaagcagtacaattttcatgtctactgtatgtgtattttcagaaagggacttttttatgcaaaggacacactgacatcaatgactaatgttaaaaaacaacaattggaaaggttgtgcaatgtggagattcttcctctatatttagaataaaactttgtgtttttactgtcaggatgtgagcttaattatagcatgttgcaaactttgcttttctaaagagagagagagagagagagagagagagtgtgtgtgtgtgtgtgtgtgtgtgtgtgtgtgtgtggcttactctgcctggagaaatttgggtgctatttttgttttccttttgaaacatcaagggttgatataaggtagttttagaagtgtagtatttcttgaccctcaatgaactgatgacctccctgaggccaggaaggatgttttattcagctgttttagcttttatattttataatcattatttacatgaa

SEQ ID NO: 35310 - DNA, 1055 bp, Homo sapiens
agacagagtttcgctctgtcacccaggctggcgtgcagcggcgccatctcggctcactgaaacctccatctcccaggttccagtgattctcttgcctcagcctccagagtaactgggattacaggcacccgccaccatgcctggctaatttttgtatttttagtagagtcggggtttcaccatgttggttaggctggtctcaaactcctaacctcaagtgatccacccctcttggcctcccaaagtgctgggattacaggggtgagcaaccgcacccggcctgtttcctaattcacttcttgttcactctaataccaaccaggagaggggagtgctatggacccctcccccttccactccctttcttcctattggccccctcgaattaggaacaagacagaagcatatgttttggcatcttatgtgttctcataaaaaagagtcatcttactcgataaagtccacttaaatctggaaagcccttgcatggcacacgatatctcaagtggcagcctccaaacaaaagatgactatagaacccccgaaattcaaggtcaggagactgaataatgaatgtctgtttatccacctggtgctttaaaactgacctatgtttcccataagatgtcttgaggttgaattatgtcacagcagtaatgtctttaacactattgggtgagatgatttgagagagatcagatttcatctggtgagtgacaaggcttcactccctcttgcagtgtattaaaacaattaaacatcagatgcattttactgcagtctgtttgactcacgtgtgcatattagaatatttttttcaaaaacctatgaaataggagcctagctccctgtgaatgtttatggcgctcattaacaaagttcatctccaggatgtatgattttcagttttctctttctaatcttcttttgggaggatggaggatgggtagaaatcaattttcccagctagatctgcatttttccagttagaaaagatgtttcattttaatttgttgtctgatggtattgaaatatttttccaatctgttgttatt

SEQ ID NO: 35311 - DNA, 1047 bp, Homo sapiens
ttggtccttaccatgtgataggattctaaaaggtcagaaacctgtaaacaccatgcaaaaacacttttaaagattctttttttttttaattgagactgagtttcgctcttcttgcccaggctggagtgcagtggcgcgatctgggcccactgcaacctccgcctcctggctacaagcgattctcctgcctcagcttcccgagtagctgggatcacaggcatgcgccaccacgcccagctaatttttttgtatttttcgtagagacggggtttcaccacgtaggccaggctggtctcaaattcctgacctcaggtggtctgcccaccttggcctcccaaagtgctgggattacaggcgtgagccactgcgcccagcctaaaatctaactctgggactagcctagggtaaatatcacaaatattaatcctagacgtttgaaatctctttactcagcagtacaaattgacaacgctgcccaacagtgccatttcttaccgatgaaaaattctctttgatagtagagccaaataaatgactgtgagttactagattaaggtgacctacagggccgtgtccttaaaatggcaggaggtttcagtgcaagagcagagaagcagttctggtggatggaagtcagtggcttcttcaggatggtgtgggagaaggcacagggtcaagaattgcagcctggtaaggctggtcgctttccctgcctctctgttagctgtggaggaaagaatgggatcagcttggctttcccatttccaggccatccaatggctggtggctttggaatataacctgatcttaccccgaccacctcccttttgttccaaatgggtgagaaggtaaaagaaacagatacagaaacctttttttgctgtttctctttcctctttctttctagatctctgaggcattccctccccactgccctccctttactggaatataatggaatacagaaacgtctcctttcgcctcatcttccattcccttattattattttagctactaggaattagcattaggaagaatcccaggaa

SEQ ID NO: 35312 - DNA, 1032 bp, Homo sapiens
cttttgcaactgtcaaaaataaattgaacatatttgtattaggtggatctatctctgggttctctattctgtttcattgatctagtgtttgtctcttcactagtaccccacagtcttgattaccataactatatacagtagtaagtcttgaaatcaggtacactgatgccttctactttattctttttttcaaaattgcttccattatatcagtctctttgcattttcacatacattttagaatatttgtcttcatctacaaatctattgctgggattttggtaagaactgttttaaacttgtgtatcaagttaaggaaaagtcacatcttactatgttgtcttccaatccattaatgcagtatgcctctccatttatttagatcttctttggtttttttcatcagaattttttagttttcagcacataagtcctgtatttgttttgttagagttatacctaaatatttcatctttcagtaagtgtaaatggtactctattctcaactttggtgctcacatatttattgctaggacatagaaatataaattatattttgtatgctaatcttgtatcctgttatcttgctggactcactagttttaggaggtcctttttttttaaagatctcttgagattttccatttacacaatcatgtcattcataaacaggaaccaatcctttttcatctgtatacctttatttttatgtatttttttgagatggcgtcttgctctgttgcccaggctggagtgcagtggcacaatctgggctgactacaactgccgcctcttgggttaaagcgattctcatgcctcagcctcctgagtacctgggattacaagcgtgtgccaccacatgtggctaatttttgtattttagtagagacaggatttcaccatgttggctaggctggtctcgaactcctaaccccgagtgatccactcacctcggcctctcaaagtgctgggattacaggcgtaagccaccacacctggcccatctgtatacttttaattttattttcctgc

SEQ ID NO: 35313 - DNA, 1073 bp, Homo sapiens
acagattttttttaaatgaaagtaaagctccagtagaaataatgagagttgtcctagaaagcactgccttctgattctgctctgcatttaaataatctaggcaaaagtgaaatcacattgaaaaaaacaatcttcacctgaatcacagtgttgttcagcatatgcagaagaacagatgccattaccggcgttttatatagaagatgccatcttctcaggagaaaacatagccccagactcttctttcatttgtctcataccgattctctttttctttttcttcctttattctctgttctaactgtgtttggatttcttattgggccaataacatgaaggtccttgtttagacccaaaggattaattcagaagaacaggaaaaaaattataaaacaaattaaatgctcaaataggagactaatgaaacaaaatgatagtggattaaaataatgggaataccagaaagctagaacatgatgagttagacactatgttaaaacatgagaacatgaaataactgagacaggcaagatacaaatactaagaaaatatagattaacaataatgccatatatatatatatacatgtattatatctaacaatataattttattatatataatatatgtgattgttcattttatgtccaatatctatctactcagcaggaataatgaaaaaattacatcaaatgttaggttctcttttcttagcaaagaaacttaaattagtaatttttaaaaatactctaaacttggggctaggcacggtggctcatgcctgtaatcctagcacattgggaggctgaggtggaaggattgcttgagcccaggagtttgagaccagcctgggcaacatagacccactactaaaaaaaaaagtactctgagcttgaagggcttcaaagacaaagtgttccaaagggaaaacatgggtctattttactttttgaaagagtcatgcaattttttccttccttgtccattatttgttaatatttaattttgaaagggtatggtaccttttaacttcttaaatgaataaagtaaaacttcttcagtaatctacattc

SEQ ID NO: 35314 - DNA, 1013 bp, Homo sapiens
acagtataaagccaggtgttggttttagtggaatcagtgtttcaggcaaaaatagccatcattgctgccttttttcatcagtttctatactaaccaggcaggcctctgcattgggaaaacataagttggagtggaaaccgaacaacgggaagttttcatatattttcttacctccatgttgagtgcttaccaactgcaattttagagggtaggttttttagaggtgctctgcaaacttcctatggtgaaagaccagtttcttctccttctatttccaatccatttctcactgttacatttagaaaatacaataaaaatgtactactagaaaagtgatcatgtgctcgaatgttcctttaattacagattgctgtgggcctctcaccatgcacttttaaatttctgtgccctgtgggtgtggaacattaccgtttaaaggatgagaaccaagtccagacaccatgctttgagtaacaccatctttgggcacattcagacccatgagtagagctcctgtctgtgatggttaaatgagtgaaaaagcctaaagaagagacatttcagctgtttgccttttctgcaggcatttctgtgctagctccttcaagctccctctttagtctttgcctcccattctttctattgtgtacctttgggttaattacacatcttaacttcccgtttcctgcagattaaccttcacttcaaaaatgtaagtgattacatgcacttctttttcccaaaattaactgccatacactccgtattcatcattcaagggagtatcgtattttttattaatacatttgaaataaatccaaacacctgtcttgcattttgtaaacattttctcaactccatgttgagtgcttaccaactgcaattttagagagtaagtttgtatcttagagtgaattacaccttctatgagtacatacattttacaggtcagtctgagacatttacataacaattaagaaaattaatatattgctgacttcctctctttggct

SEQ ID NO: 35315 - DNA, 1030 bp, Homo sapiens
aagaaggagaatcattcaaaggataagactacatcttgatgactttttggacagccctgtcatgatggagaaattggggtttgtctgaaagaaggggataggggagagaggagggaaagggttctccctcttagaccaggtaaattttccttcctcccttcctttcttccttacttttctttctttccctccctcccgtcctccctcccttcctccctcccatcacacttttttgcccaggctggagtgcagtggtgagatcgtagctcaccataacctcgaactcctgggctcaaatgatcctccctgtgtagctgggactacaggtgtgcaccgctatgcccggctaattttttaaattttttttggagttgaggtcttgcgatgtcgcccaagctgatctcgagctcctggtctcaaacaatcctcctgcctcagcttggccaattttgttttcatgtgcttatgtgtgaacctgttaacaagtatttatgcttgattgttactcattttcagaaggctaaatataatctcattttcctgaagtagagaattctgtttttcatcgtaaagagttggttgtatagttatgattaaacaattatttttggccccttcctccacctatgacatgattcagtgcttaaaaagaggcagtgtgagtagtgaaggagacccaggatgaaatatagatgataaattatcaccctgaaaagtacacaccctcattaggagctgaaagaacatatattaagacaactttaaagtgaagttatatgcctaagacactttaaaaaaataaatgtgagttttaaacccagcgttgattaaaatgtggaaaaacatcttcacttacactttggtgatgtttctgtaaatgggtacaatatatccaggaaagaatttcacaataattaaaaagaggtaaaactttattgttcgtagcgtagaaaccacaggaaattccaaatcattgtgaagaataaagtttctcatggtagcattatttccagtgaaactgaaacagtgc

SEQ ID NO: 35316 - DNA, 1030 bp, Homo sapiens
ttccattctgcactgaacagattgatgcttatttttatattggaaaccaccaagtcaacatgttacctttaaaaatatggagcatgacttggagaaatggctacattcttgggctggggcagggaaagtacaacatgggcctgaatatctagttgagccagaaagtagggggaattgtcaaagaatcaaaaagacacaggggccagtttgatgggctcccactggactaattgggagaatttaaccatcaaaataaatatggtaatgaattataaccaattaaataaaataataatttataaatccatactgatatagaaattgatgacataaacaaatgaggggagaggtaaaagctcttgtttagagagtcaactaataagtataaaaaaggacatagcattatttctgtgttaatgtgaaaagttaccagagtctaatcatgacgaaacatcagatgaaccagaaccaagggtcagtctataaaggaatgagcctctaatattcaaaaatgtcaagatcaagaagacaaagaactactgaggagggcaagggtgagggttggggccactgacatggcaagctggaagaggagaacaaatacttccactctttccattgattgtggaagctttgggttaagaggaggtttctgagccagtttacaaagtttgctctttgaggtggtataggagaaatattccttttaaatgaagattacagaagacaagttacaagtggggtattctcccacagtaggggtgagtaacaggaaattcctttaccaatggcaacttgagttttccagctctattctatcaaatcatttatatttatctagcccttgttacctaaatgatgtctatcaaattccactataaggggaaggggacaaagctaggatgactaagtgaaatccacacacaattatatgaaaatacttcattgaagtgttataaattggcaggattgattggaatgttctagtcctggattggccatgttaaccaaagatgactgaacatccatg

SEQ ID NO: 35317 - DNA, 1025 bp, Homo sapiens
catctaaaaaaaaaaaggaagggaggaaggaagggagggagggagggagggggaaaaaattgtgtatcccaaagtgtctcaggaaggaaggaagaaaaaaaaattgtgtatcccaaaatgtctctccagaagatacgatagaagaagtctgtaatgactgtatttaggtacactaaaccagcagtgcatatctgcaaattggtcatgagatgtgagaaagaaaggtaagaaaagtatatctaggaaggtactaggttagttaaattaagttgatttctgtctaatgtaagactttaatggctgaatctgggttcctttcatgcctcctgaagtgagtgggcaaatggttacaatgccatttcaagcgcacctattaaaaattgtggactacagtaacatcttttaaagtggtctctaggaagggttatgtagtggaaactgaataggtttttctattgtgtgagattggaagtgagaataagatcttgaggttgaccttatcggggtgaattctgaaaacgcccatataccacacctgacttttgccttgaattctctggggaatgccaccataccccttgcctgttaatgtatgtattgaagctagctttgactgaagctgctgcttactaccattcccctggctaacaagcctacattaatttcccaaatcctttgtcaaaaaaatgattaggttggtttgaatgattacacttagaatgtaggatgctgcatccattctgtgtgtgccgtcagaggccttgtgtgggggaggtgaacagaatctaatcaacttgggttacttgatcagaagtggctcttacgcatgttatttttgcaatcggagagaatgttaggctctctttccctgctacagcatgatcgtttccaatgggccataatactttatgaatattgaccagaggcatgaatcgaggctttccaaaatatatatttttaaatttgagataggatctcaccatgttgcccaggctggtcttgaactcctaggctcaagcagtcct

SEQ ID NO: 35318 - DNA, 1073 bp, Homo sapiens
gctgcctttgtgtggggatagcctgtgtgggtgcacccttttttgacacacagagtgctttccaagagctccaagtccttggtgttagaaggatactcctgctgcaaagatcccattgcccatggggagctctgagctgacattccctaacagaacccaagtagtggtcagagcttggggctccttaaaggcaggggtgctgctgggtctgaaatagtactttggatattgcaggtgctccatacatatccatggacttagttgatttttagccctgcaggttgttcctcagcacatggttcttctctgagctccatactgccctcatcttcgctcatctgtgactgtatctaaactcttctcaaacctatgagtatttttggcttctgcacctcctgaggtgtgatgagttctctgtttttatgaagaagagatcttaccttgtattgttctaaagcaccatcttaattgaaggtaggaggaggagtttggagcaaaccagagaggaatatggacaaatgaggggcaaaagagagccagggcacagcagaaggggcctcaccagggagaagaggagctgcctgttctgtcacttagctctccatgatgtgctgggatgctgtctgtgaggcactggacgaaggcaatttagtgaagtcacattaaagtggctccaagatttgatgtcacaataggtcactttgaccttctatttatgatcagctcttgatgtacacataaaattttgggaagtaagtaaaatgtatatggaggtttggcttgcgttctggtgaataaggtccaggaggttaaatctctgtgcttttagtacagctacttggtatctgggcctcatttccccacctgtaaagcaggggtaacagtagttccttcctcatagtgttgatgtgaggactgagagatacagttcttgtagaattttcagtaaagttctggatccacagtgagccttctataaatatcagctgttattattagcaaaccaccaagatgcccactattgtgcctcatgatggcaggctcagtgggaagccaacatgttttctccaaaa

SEQ ID NO: 35319 - DNA, 1027 bp, Homo sapiens
ggaagttaagatactaaatcacgctcttgcatccaagactttgacaatatatattctctgtagattttcagtattattctagccagattcaagggcgtaacaattttttttttttttttttttttttttgagatggagtctcactctgccgtcaggctggagtgaagtgatgcaatctcggctcactgcaagctctgcctcctgggttcaagtgattcccctgcctcagcctcccgagtagctgagactacaggcatgtaccaccacgcctggctaattttttgtattttagtagagacaggtttcaccatgttggccaggatggtgtcgatctcctgaccttgtgatctgcccacctcagcctcccaaagtgctgggattacaggtgtgagccaccgcacccggccagatttttaaaaatcagtatagtcattggcactaacgacagcagtttcaggcttcagggtgttatatcacctttccatgatttttaaggaaaatattataatatgctttactttcctgttgtttcataccaatttgacattggtatctgccaaataagttaatttgcagatgactgctccaaaattacagtatccccccacaaattaaatttttattacaaatacagcctgctttccagacagattccaaaaattcactatttagttttgtgacttggaaatgtagcttctgaaaaatcagctgtcaccaagaactgattaatttagtttaatttttttgttgtttaaatctaagaaagtttaaagaacaaaagaaatagggttagataaaattatgcagaaaatggagttgagggcctgctgtataataaatacttaaagatcatggggttccattcagtggatcagagaaggagcacactttttttaaagtctacttggcaattccatctgttaaacagtggaggggtttttgagttcctttctccatttgggacagaagcacagcattcggcgttctctgagggccgcatgcacgcatggataggagcaggaagtta

SEQ ID NO: 35320 - DNA, 1079 bp, Homo sapiens
caggacagactgtctttcggaaagctttccattgcccaacacagcatgccttaagtttgtggaaaactttttgaaattttgttttttctgtccttcatatgtatttttttcttttaattctcaagaagcatttttttaagctccaatacatgtttaattctattatgttatttggttgtggtatattttatttagtactgggcagccagtggtcagaaaagtagaagcagagttagttaagcattaatcataatctacaaaatgctcttcaagctgagttccttcccagggaaagccaagttttcaggaagctagtatgcttgatactttctatcctgtctcattagaattataagggcaaactttagaatcttttttaggatttctgccacctgataggagaaaaatgggcagtcctgtacatagtttactgacatctctggaagaagaaggatgaggaatttaatagtaaaatagagttatatggagttattttctgaatatcgctgtgagactaatggccaactgttgttaaagaagttttcctgcccatttggttgagataggaatataaggcatttctctctctcatgcatgcacgtgcacacacacacacacacattcactcattcactcactcaccctggtgtgagtgtcatagaagggatccagtgtaagaacctgttttgcatgttaaatagtaattcttggatatatttgaagtacttgtgtgattactgttccctgtttgttaagtaacagtcctgtcttatactcttgagcttaaaaaggctaaattctgttgtctttttccacattacccatcttggagaactgtgaaatcaatcaaacagacatcagactcttataaagaggaacatatttaaaactcactgtcaagattttcatagtgtctaccttttaagtctcccaaatagctttacatttttcactctattattcaaaggctgatggttgagttttcagatcccctggctgcttgctttgtttttccttccccccacctgctgccaaccttttggtcttttcagtgatctttaacaccgttatcaaagagt

SEQ ID NO: 35321 - DNA, 1047 bp, Homo sapiens
ctgccctcaaccctcaacccagctgaatacgacatatctctggagacccagtgggcacaagctgagcgattggccataagggcctggcctaaacaggaatacctgcttcagtacaacaaccctaaccgccaagggctcatccaaaatactgccttgatttgttggacctatgcaagatcagcaagtgtctatcccaattttagacccgctcccaaaaaccctctcttgggagctctctgtggaattgggcccctcttcttctagtattatgttttcaaaactgacagggatagaaaagaaaaacttatccaggaaggaaaattgggctgaacatttaacatctcatgtcaagtctggcaatggcaatgatgaccatatgcattctttttttttttttttttaaacagggtctcagtctgtcacccaggctggagtacagtggcgcagtctctgcacctcctggttcaagaaattctcccatctcagcctccaaggtagccaggactacaggcgagtgccaccacacccggctaattttttgtatttttagtaaagacagggttttgccatgttggccaggctggtctggaattcctgacctcaagtgagccacccgcctcagcctcccaaagtgctgggattacaggcatgagccaccgcacctagccgactgtatgtattcttgcttaaataaatattctcttaatcatttaaaaaaaaaacaggactgaattctttcatgaaacgatggcttttttgcttttactcttggctttacattgcgtattagcaagagggtcttgaatttagtggctgcctccaccgggatactagcttaggctcttaggtccgagacctctatctcttaggtgcagatggaagatttgcaataaaagatatcaattttctgccattattactctccacacttgttcatatgctaagtttaaaatctatatttccgccgggcacagtcgttcatgcctgtaatcccagcactttgggaggctaaggcaggcacatcacctgaggtcaggagttcgagac

SEQ ID NO: 35322 - DNA, 1060 bp, Homo sapiens
tatttaatttacttaaattcagtcaactccagtaaggagaatgcttttgaaaatcttcaagaaggaaaaagagtcttgaagtccagcatagagaaaacactggaaaagaatatttagacttcaaaatgcagttgagttcctgggcaaagtaaactataccccagattagtgggagaactctcagatgtggttgcagagctgttgtcagttacattggtcagttatagttatggagatgggaaagtcaagcagaaatgagaaattctgtctgtgtttaaagaaactaaagaatgggccaggccccgtggctcatggctgtcatcccagcactttgggaggccgaggtgggtggatcacttgaggtcgggagttcaagaccatcctggccaacgtggtaagaccctgtctctactaaaaatacaaaaattagccaggcgtggtggcaggtccctataatcccagctactcaggaggctgagatatgagaatcacttgaacccaggaggcagagattgcagtgagcagacatcgtgccacagcactccagcctggacgacagagtaagactccatctcaaaaaaaaaaaaagaaaaactaaaaaatgaattctgaaaaacatgtatcagtaattttatatcaatccccagagagatccctctagaaattactaaacagatagatggtctttgtggaattagaaattaggggtttcaggctgaggcaggcagatcatggggtcaggagatcaagaccatcctggctaacacggtgaaacccgtctctactaaaaatacaaaaaattagccgggcgtactggtgggcgcctgtagtcccagctacttgggaggctgaggcaggagaatcgcttgaacccgggaggcagaggttgcagtgagccgagatcgtgccactgcactccagcctgggcaacagagcaagactccatctcaaacaaacaaagaaatgaggggtttctgtcagaagccataaattagctgtatctctttctccaacagtgcggctgaaacttagagtttataaacatagcataatgagttgt

SEQ ID NO: 35323 - DNA, 1956 bp, Homo sapiens
ttagaaaattaaaataattataggctccctcacctccagcacaaattctgtttgctggaacaagtattattgtgatattagtgaactagcacttctcaaggaactggaatatgtggtgcctgagagaaggtattatatccacacctgtgtctttgttttgggtaatgggaagtgttggctgcagcatttactgagccaagttttgtttgtcctatttttagcatttaattctggcagagcccctcccaaagtcgggggagggagagaccccccccaaagtcgggggagggagagacccccatgtcattctaattgttcacattcctttacaaatcctccagaaataaccaagcaggaacttggagtccacggtttacatttaggttgggaccatttgctccagagggaagggccactgtgttctgtctctggcaagttgcagagtcctggctgaggaaggggccctgcctaacaaatagcagaatccatttctagttgatattaattagatctaagacacacggggctctttgaatgtcaggcttgtgaggaaatagctcttttgcttggcaccctgcaaaagattacaaagccaatgtttaatattagttactattattggaactttatctccaacacagttttacaaggacagctttggggtctcattttatagaggaagaaacagggtcagaagattcaactgagttgcccactcacataggtaattagtcaaagaacaataatttgaatcaaattttgtctagctccaaaatttatgttcttttcaacccagagacaaggaagaacttactgcctatgatagaatggtagttggtggagttacagagctatttatctgagcctcagaccacttgcagctcagccactgtggaactctgggggacttaattaacctctccaagccttggtttgcccattcgcaaaacagaggtagcagtctagactcactaaagttattgtaaggtgcaaatgagatggcatgttaatgtccctaacaattgtaggtacaataaaactgtctttccttctgtctcacagctagtgttttttattgatcacaggcatcctatggcccagtttgaagtaataaatccagttcttcatcagtaggcatgtaatttgcaatggatgctcactgcttttctgtttggatcaaaatacttaccttccttgaaagtttttctttcctagccaaagataaaaccccatagtgaattaaatatgattgcttttcatcattaatggcagcccctactaactcttgaattccagcttttcagtgcaaataaatattgcatcttcattgttgagaagaatctgattccacctttggaaggcacttccttggagataagaagtttcttccataaatcctgcttttgtaaggttgagacccactcaccacattgctggtggaacatggactgggaagattcagagatgtcagtgtactcttttgctctgattatctgaaaggaatgcctgggtcattcctttcaattccctggattagtccttccaaaacagaaagtaaaaggtactagaaaggcatagtcttttttgctgtaaactccaacttaggaaataggatagtttagagtccactacacagactgatctatagagtggtgctatttatagggatgtcagaaaaaaatacaggattaattaatattgattgggatatacttatagtaaaaaagtattcattgttttcctgaaattcaaatttaactgggcatcctgtatttcctatgcttttattcattgaatctggcatccctagccagttattgggtgcctactgtgctgtgcagcaagtcagaaaggtaaggtgccagggagtttccccgggatggagctaagagcacgagttctcaaatcagacgacctgggtttgaacttagctttgctgcttaccagctgtgtaga

SEQ ID NO: 35324 - DNA, 1055 bp, Homo sapiens
aataaatatgactatatttcagggtaaatcagaagagaggcagtctgcagaggtagcatttagaaatcaagcttgttgtggttggaaggcgcagctttaaagaagcgctcagtgagacggcagtgccttttctttgaactgatgactctgtgatgtattaatggtagagccccaccccaactaatggaagaagcaaaagacttaatgtaatttttattacctttaggtaatgataatgtcagaagagcaatgggggcacccccaccatccatgtggggtctgagtggagggtgccctccacgtgagctgggtacctttcagaaccgagtcaggctgcttgacatccctgggaacattacatcctacacggaatgcccacttttaagattgtatagaccaagaattgttgtttcacttaatttttttaaataaataagctgaaatattgactggaggtttttaacacacattctacatattgacttaaggtagacccagtcaacagatgttaagcatttatccaggatcatgttgctatagattttgaagaaattattaagccagcaagagaaggaattttttttttttttttgatatggggtctctcacacagtcatccaagctggagtgcagtggcacagtcttggttcactgcagcctcctcttccacctcctgggatcaagtgattgtcctgcctcagccacctgagtagctagaattacaggcatgcgccaccacccacagctaatttttgtatttttagtagagatggggtttcatcatgttggccaggctggtcttgaactcctgagctcaagtgatctgaccacttaggcctcccaaagtgctgggattacaggcgtgagccacgtgcctagccttttttttcattcataaattactttccagtgtttcatattaaacaccaagacttgattaagttgcagtctcttttataactcaaattggtcatgaaaatatgtctcattatattgtagcagactctaatgtaattgttctcctttcctggtggcggggagcttatgtgatagag

SEQ ID NO: 35325 - DNA, 1047 bp, Homo sapiens
tttttcagttcaaaatggtcactaagtaataaagattcactaaaggtgtaattaattcagtagacatggattaaatctataattctgacctcagaattcacatggcccagatttacctcttaaaatgaacaagcaaaacaaatatggtattataaactcaaaggagttcagtgggatgggggagtggggttgtgagactgcaatatcttgaaagcgttttcaggaatcagatgttgacccaggcttgttccttgtgctcagcgaaactggtcatccggtgggtagacatcactcagcttgagaagaatgccaccctgcttctgcctgatgtgatcaaagtgagcacacggtccagtgagcatttcttctctgtattcctcaacatcaacgagaccttcaagttaatggagcagcttgccaacatagccatgaggcaactcttagacaatgagggatttgaacaagatcgatccctgcccaaactcaaaaggaaatctcctaaaaaagtgtctgctctaaaacggtgggtgatagagaccttgtatcttccagactttagaaatgagaaactcactcattcatttattcagtgtaaccttctctgacgatcttcaagggttctgaacactcttctgtgtatagatacaaaactaaaaaagactagctgaggtgctaccagttcagaaagtgagacagacatgacctgctccaacacaaggcagcaggcactcttctggtcctgtgaacacagtgctgtgggtgcacacatggggagtgatagcctcagcccagatggggaagagtgggtaagaaaggcctctcagtggaggctgctttgagctgggctctgaagaggtgatagaagttacctgtgcaggtacatatccatgcctggatatttcaagcagagggaagatgacgatgggggaaacacaagggaaaacacagagagaagtaactttgtcacatggctagtaggtggcagggcatgggatgaggagaggctgcagagaagcctcaaagtctgaatgtgagagcagagctaga

SEQ ID NO: 35326 - DNA, 1102 bp, Homo sapiens
ttgtagatttagaaatctgcaactctggattatacaataaagactaagatatggccccttaagatatcttttaatttggaaaaacaacaacatggattcatttagtaatattgaacatcttttaggtgctagatattggtgattaaaatgttcgagacattctttttatctttggaattcatatttagtggtagaaggacatataaacatgctattttctgccagcatgtaaattaagacaacatagacgtgagaatgcttagaacccatttggaattgggctggtttcacagggaaggtggtatttatgctggacctggaaaggttgacttgggaagattgagagcagattttatgggttaagattcagtgcagatttcttttctctttcactgagagcctgtggaagattataaggtgggaatactgtagtcagatctctgtttcagaaagtggccatgtgaagtaaattggagtgtggagagtgttgtcaggatgccatttgagaagctattatatagtaattcctggactgtgtagagggactttgggatgcttttgttagaagaataggataaagacttgtcttggggctgtgcttgcatcgtaagcccaccatttgctgttatgattattgtctacatgcttacttttaactagaataggacagtgacagagattatagaagactgaagccctttctcctgccatccactcagcagcatcacaactaccggcaacagggtgaaaggtctgcagtggaaataagactcaggaaatgatttcaatacataatgcagagagaatcaacattacttcatgtggggggaaaagaatgatagttgagaaaaggctcacaagagactttgagacttggtaggattcacgaaacagaacagtctgattccagatttcaggcatgtagaatgggagggccataggcaaaaaggtgggaaagtgcagaaatgacatgttcaggccccaagggtgcctcaggctggctggagcacagttactaacgggacatttgggtaggatgtagtccagtgagaaaaagttgcggcattggttggatccaaaaatgtacatgggtctaggctac

SEQ ID NO: 35327 - DNA, 1026 bp, Homo sapiens
ttgtgactaagattatattggataaggccataatacagatgatttattcatttggttccctttatttaattagcttcaagtgcaattcatgtgaactcagtgatccacatagcctgttctgaatctgaaaatactaggtcagttgctctttaatccttggaggcttattgggtttttgttttgttttctgctatgtgatgagtggtttttatttttgtatgcacatacaaatgtacctacacatgtgcatacatacacttatgatcaatgagaattcaccattttagttattctgcaatacaggtttttctcaagttctgcagtcccagaaacaaaatgtattattcctaggaggtaggaagaaaaaaatttattatgaatcatgcatcacaaaagaaatatctgccaaatatctatcagtggagccttaaacctttgttcttaatcctcagaggccagaagtgatagaatcattttggaggtccatcttctatttatttcaagtagacttcatgactttaagatagatttcaaactagatgaataattagactaggatgatttcgtatttttcatcattgcagacaacattaaaaagtttgcccaggtatatatttagggcctctggccattaccctaaaaaactgcttgaaatgataattgttcttattttttagaagtcaatgtctaaaccttaagcctatcaagtgttctagtttttagccacagcagagtgctttaacttgcatttcctgaaggattctcatacccaacatcagggttctttgttattccagctgattacacaatcgggtcagcttgtttttcctgctgcatctctgtaaatggggcctttccagaaaatcaacagccaagcccttcctttctcttctgagtgtcctaacacagtttgttcaagctgctgggtaaatagatcagttccttgtcagggtcatgacaaaggagcttcatattatctcactttaataagttctaagacttgaattactgcagcgcatgtactta

SEQ ID NO: 35328 - DNA, 1026 bp, Homo sapiens
gtctgtgtgttgggcacaagggtttcaattggttaattaaatctgtgaattttcttgtttattgacaattgccaaagtaggagaatagagacttgtcttttccctgaatatttctgcttttgatctaacttaattccagataaatttcaatactgattaaaaagtaacaaattacttctgaaattggagaaattgatttcccaaggtaagcagtttcagatatgagtttggtttgcattattacctcacagtctttgaaatgggatttttagctgccttctcaagtctttgtctcctttctaagattcttagacaattttaattatttaaggcagatttgctagaacttataatattggaaactatggtacaaagatgaattagttcttaaaataattctggtttctcccaatgttcatcaaattgagaattttgtggtccacattataaatattcagcataatgtgctgaacattattgtaggctttgagactcccaagataaataaggcagtgcttgtccttaaattgcccagggtctggtgggaggaaaccatactttttttttttgaagtaggaaacaatgtagtaattaccttagtgtaatataagtcaagatggttggcagaacccaaaaaagctaacagttaattgccaggagatttggggggcttgagtgttgagaacattggttgggagcgtgccggagaaaacagggacacatgcattaggtgaccttgacctggatattgagggaaatagaagtttgccaggatgagaaacacttgtacaaagccttggaggctttaaaaagtaacaagcagacaaacaaggctcattaaagaagtgtaaaagttatggtatggctagagagtttgtaggtatgtcagcagctgcttctgaatgtttccatttaattactttctgaccagtatcatgtaagtgttaagacttctagagaatgtatcacttacatctaaggagcagcagccagaagaacaggtggcagcaggtggcctacagaaac

SEQ ID NO: 35329 - DNA, 1029 bp, Homo sapiens
attttacagagcttgactcttttttgccaacaagggaagtggctcatcttttcatcctaggccacgttttagccttgtgtgtttgcactaatcaaagtccctggtgaaaggctgcacaaggttgccttattctgtatcatcttgcattcacctcttcagccccccaggctaatattatgccaagggttaccgattctgatttttgccagtgacctttacagaaagcagcaggagctgattggttaagtggcttcatcatttacaaactcttatagtaggatctttaatgtttcattgatcctatagtattaaaaactgcaattacttttgcaccaacctagtggttcattatttgattataatacatgtacattgtacaaattataaaagtacaatgttttatagtgtatagttccaatagtatagaaattactttaaaaaatatagttttttttttttaattctttttcagagatagggtctcactctgtctcccaggctgaagtgcagggtgtggtcttaactcactgcaccctctacctcctgggctcaagtgatcctcctgcctcagtctcccaagtagctggaactacaggcatgcaccactacaccttgcttaatttttaatattttttttgtagagacaaagtcttaattattgcccaggctgtctcagactcctgggctcaagtggtcttcccaccttggcctcccaaagtcctgggattacagtccactgtacctggcctaaaaatatatttcaaataataaaaaatgtttctgatttctgccatatcaatctcattcccaagaggtaaccattattaagtttaatatgcatctttcctggcatttcctttgttaatataagcacagagtggctggtctcctgggcttttttctttgtcttgcttatatgtagctgaaggcaacaccatgggtacttagagatttaatgaatactcagtggaaggcccatgaggcggctcacacctgtaatcccagtgctttgggaggccaaagtgggag

SEQ ID NO: 35330 - DNA, 1053 bp, Homo sapiens
aactgccaccagttgtaaaaagcatgcactttatatcacattttaacttagcactctccccgtaacaacctccacccagcaaccttcatttaaactaaaacaaagggcccccatcccctgtacagctcttgttccgctggacctgacaggggttcagatgttcctcatagatgaggaatgaatctccaggttggctcctcttgaattccttaacttggaactctgaacacacaatcaggtgcatagaccatacagggtcgttctcagggtatgcttaagttattgctgtcaggttcatctaccgtacaatggtatatctttctgtatcaaaacatagcatgtcatctttcttttgctttttattttttatgattgcacattccattatatggcaatgccatcattttatttactcctctgttaatggacgtttattctatttttcggcatatactataaaactgttgcaataaatagccgtgtacatatgttatttggctaattgtgaaatatatttgtggaaaaaatttcaacaagtgaaatcgtagggccattggtatatgcatttgcaattttgataggtattgccaaattccccttcctaggggttttaccaagttgcacgctcacaaaccatgtgtgaggaatgtctgttttcccagtcttgcaaaacagaatgtgttatcatattatggatttttgccattctgacaagtgaaaatgatatttcagtgtacttctaatttgcattttcttttaagtgttgttgaacattttttcatgtttacaagccatttatagatttttttcctataaattgtacttgctctttgcccactttgtttttggtggttgctccttttcttattgaccaatttaggaactttgtatattaggtacatgagccttttgtgtgtgatctgagttgcaagttttttttttttttccaatttctcttaatttaatggtgtttttgacatgtagaagtttgaatttttatgtagaagaatatatcaggtttttcatggctttgggattgtgagtcacagttag

SEQ ID NO: 35331 - DNA, 1104 bp, Homo sapiens
gcctcagtccacaggtagctgggagtacagacacatacatgatgcccggctaattttttgtgatttttagtagagatgggtctcactatgttgcccaggctagtctccaactcttgtgcttaagtgatcctcctgcctcaatgtcccaaagtattggaattacaggcgtgagctaccatgcccagctgacatatatgcttataaaagtcacttgcagatttttatttctgatgtgcctataacccatttcattaaagtttagatgaacacaggattttataaagtccttagataaatacttttctttttccactcttattcatgagccagatctttgtcttagagagcccataatggttatgcagagtgggcaatagtattttcaaaaagcttagtaaatgtaggcagtttctttagggttaatcatctttcaaagggccttaggaatgtccttcaaacagaatataaatgtcaaagagaatatctctttctgtttgaaattatttgggcaggttgaaagaatttgataaagggaaattctatatttaatctttcattgtaaattatatgtgcaatgaaagagtttaaacatttttggagtttgctgtcttaaaggcctttctggaatgtaaggaaacccagcagtggtgtctgctaaatatgcgaatgtagttcttaacttctttgagactgctttttatctgaaaatgggagtgattcctcctaccacctcacatgtttattgtgagggttaaatgagatactgaaagcaaaaaacattaattaggtttttcaaatttgtgtttattatttttattttagagacagggtcttgctctgtcacccaggctggagtgcattcagcttgatcatagctcattgcagcctcaaattccttggctcaaacgttcttcccacctcaacctccagaatagctgggactacagtacaccccaccatatcctgataactaaaaaaaatttttttgtagagatgggggtctcactatgttgcccagactggttttgaatggctggcctcaaacaatcttccaatctcagccttccaaagcactgggattataggagtgagccaccgcacctg

SEQ ID NO: 35332 - DNA, 1049 bp, Homo sapiens
ggtaatgatcagaatcatggaggcaaagctctgtccaaaaatgttcattttgttttgttttgttttgttttcttgtttttaacatttccttcatcctggtgaaatatcctggaaattcatagatctgggtttggtcatttcaaagctcaccatgcccagtggccatttcagttactgccctgacatccctgaggctaccatactctcaaaaccaaatcaatgccagtgatctaacataggattctttcttatttatgagttttgtttagatggatatttttgcagagcataaaaaattaaatgacatttagttatccattgaatgtatcaccctgacttaaaaaaaaatccttaaatcaaaacttttcaaaaaatctgggctatggagtcactccctctgtggagcgagagcccagtcttttctggtactaaggccacagaggcaatttccagtagcatttttatatcttctctaagtttcttttccttttctgtctgtatctgtttttctctgactgcctatatcttactttgtatacccatacataaattattttcccatcttctctcttcccctttttttctgatttgttttctctcttgcaagaaactctgaaataaccttcagaacacaaaaaactggaggttctatacctacagagtcattatcattattgtgattaccattgttactgttgttggtgtttttcctctttttattgtgtagcaatatccatattcacttctgatgaggcaaacctgtttactataaaccaatgtcctccctaaaggagtcagtttcattttcacttctcacatcaccagttgtatcgcaacccatcttacaaccattgccatgttttcaggcttccttgccataaatgttttctgggcaaataatggcaaagcaacaattccagaatgctgtctagatctgctttctcccaccctcagcatttgaccctcctcattcgcctgagcccccagggttaggatttcttggaaaaacttgtatactgtacctgatggaatgcccattcttcctaact

SEQ ID NO: 35333 - DNA, 1047 bp, Homo sapiens
gcattgttagtaattgtactttagaaaatggttttccttacaaaagcacttgcagtggaacctagaaacaagaagtagaggttggaaggaatggaaactagtccaattgatggtacatttgatttaaaaactggcaccagcacagcggaaagctttgctccaggcaagctctccttgggttttggcttggatatttacacaagagatgaagctaagaaaataggctcatctgtgcttcctctgttgcaggaaacagagtctgattttgacaactgtgcagtttgtattgaagggtacaagcccaatgacgttgtccggatcctgccctgccggtgagtcactaggctgcctgcttttgattgggttgtgtgtgtggagcgtgcctgcgtggcctccctggccccgacctgctgggcatagtgctgccaggtcagtctgcctcagtgtttccatgtttctattgcagacaaccctaacattcttgtttttgtataacctttgtccttgaaaacactgtatcatgaaatatttttctgatcccctatcccctttgcatcaaaggaagtatactgctatgaactaggacttcatgagacagaatttgatgatgtggccgccaagtacaagttttcttgaacaacagatctatgatgttcagaatcaattctggcttttaccagtactattttaattaaaataataaactctgaaaaatattttgtgaatgaacatgaacagtgtggtaattagaatatggtcagaagtaagtaggaagccaaggacagatcccatgccctttcatttttttttttttaaactaacagaaagagaatgtgacactcaaattcccttaaaattcttgcatctaggggaggatgccaggcatgtatagttggggaagctccccaggtgattcttatataaccctattccctctccctaattgaaattcactgagaagttgtctgaattctttttaaattgttaaaattaaataaatttaaatactttaatgaaaccaaatctttttaaagtcatgtaaaatcc

SEQ ID NO: 35334 - DNA, 1030 bp, Homo sapiens
taatttaagcaattattaggcagtagagatatggatgaaatcttaagcttgaattagttgagtaatgacttcaatcattatgttactttctgcaggtagatctagcttgcatgtttatctagacacatgcatactgtgaggtatatgaaaaacaaattgaaaggtagtggtatgaaagtggttcatggggtttaaatttttattctcctcccagtttgttaactttccttgaattgtaggatgctaccatagggtcactcagtgaattgtgatcatgttaaaagttaacactccttcctgatcaaatggacactatactttagccctttgatggatggaataacatataatttcccttagaaaaatatttctgctttaatggccagtgttccactccattcaacagaaagttatagctgtacaggtcatagctataataagcatcaggttaacttaaaccatttatttttattaaagcattattgtccttcagaaagagtgactttcaggttagatgaaggctcacagcctgaaatggaacatcaaagccatttattttacattgtcgaagtatccagccattcaggtatatgaaagagagactgaccttgaattagccagatgagcacctcagtctctgcttggctttgtgcagatcacaattaaaagaaagtcaccagcatcttacataatcatggccactttcatgtcacatgtacctggagaagatcatttcaattcagtttcccatgaagtaatatttgctaaatgttcttcacattataagcctcccagcaaggtcttttagatggtaacatggagaataagggctacaactaaaaatggagagaagatttggctggtgtgccatgtttcctaaagatttaaccaagttaaatctggtagagggtaatagctaaagataccaactttggagtcagatgggtctcgattcaaatctttgctttgataattcctagtggtgtgactttgcacaagttacttcacctttctatgcccaggcttcccc

SEQ ID NO: 35335 - DNA, 1053 bp, Homo sapiens
taatttgtttccatgtggctagtggctacattagacagaaagctttacagaatatctgatgagtttagtttacagaatatctcagtgaatgctctctctttaatacccaaaatacccaaaaaatatcattctctcataaggtcagaggtggaagagaaggatccttgactctcccttcagataggcagtttggtggttttcagtagctgtgtgtaactgcaactatttttgtgttaattgggcgtgaaaaggtattaaagaaaagattctagaactacttatgctgaatgattctcctttttaagttaaaaatgggaggggcaaaattcatgtaattcatgtttttgcattcgctgttttctttctctttgtaaacaaattattaaagagtgatatttaggaggcagtgtagtgtcactaaggcatgagccattatagctggtatttaggacatcagagaactatggagaaagaaaaaagagagaagtaatttttggcacagtcttggtttgggtttatttataagcaggactgagacaaaattcagggccaagccatttatttaaaagttgattccaggaaacacttgtttgggagtggagaaatgcaacagggaaggaaaggagccaataaatcatatgttatcaaggaagtaatgaagcttaatgccactggggagctctgggaaacagtgcagaaaatgtgcagcagagtttcactagcacagtgagggaggaaactgaggtatttatacacccacttttttagtcattagttcatggctgctcctaggtggtagcaattcctcctttcccttggcccacaccaagtgagagtgatagtcagtggtccagaaagtcacttaagcaaagaaatacaggtgctggcaattgaaaatcaagacaatgtgcactaaaatgtatgggataggggagtgtaatggacagcatctgttatagacactttttgatttacagtgtagactgtatcaaacaaaggacaggaaggtatgtttcagacctttgtagctttttcagaatacaaactcagttg

SEQ ID NO: 35336 - DNA, 1032 bp, Homo sapiens
actgaactcatggagatgagataggaggcgggacacaactccagaggcagggttcagacaccagaccaaattgaggattagctaaaacagggatggggcggaagcagctttccataagacacgtccaccattgtgccatgtcagtttaccattccctagaatggcaacacctagaatttactgccgctttctatggcaatgacctgatgacccagaagttaccacccatttcctagaaatttctgcataatctacaccttagtttgtatataactaaaagtggttataaatatgactgcagcactgcctctgagctgctactctgggcacactgcctatggggtagccctgctctgctctgagccgtacctctgctgctgctgtacattgccatttcaacaaaagctgctaacaccactggcttgcccttgaattttttcctgagcaaagccaagaacattcctgggctgagttccaaatttggggttcacctgccctttatcatagatagagagtagaatgatggttaccagaggctggaaagagtagtagggttggagtggggatggttaatgggtacaaaaaatataattagatagaatgaataagttctagtaattgatagcacaacagggttatcacagtcaataatttatcagacatttaaaaattaataaaatagtataactggaatgtttgtaacacatagaaatgttaaatgctgaagttataaatacctgtttaccctgatatgattattattaagcattgtatgcttgtatcaaaatacctcatgtacctcataaatataggtacctattatactgtgtacccataaaaattaaaaattaaaaaaagacttatagattgaacataaacttctatccagatggtccagggaacaccagaggcgtagcaacttgggtggaaaatgcttcctgccttttactctagtgagcctagcaagcaaatcatttcatccttcagtgctgcctgtgctcagggaatgtgtaaaaccttttttcattttgt

SEQ ID NO: 35337 - DNA, 1023 bp, Homo sapiens
taaatttaaccaagaagataaaatacttgttttctgaaagctataaaacactgatgaaataaattgaagaaaacacaaataaatggaaagatatcccgtgtttatagattggaagaataaatgttgaacaggtgttcatactacccaaagcaatctacagcttaaattcatatggaatcataaaagataccaaatagccaaaacagtcttgagcaaaatgaaaaagtctggaagcatcatgccccctgatttaaaaacattatgaagcaattataatcaaactgcacgatactagcataaaagcagacacatcaatcaataggagaggatagaaaacgaagaaataaacccacacctttatagtcaccttatttatgacaaaggtgaggaacacaaaatagggaaaggacaatctcttcaataaatggtgttgagaataccagatatccacacgcagaagaatgaaaattgacgcttatcttatgccatgtcaaaaaaatcagctaaaaacagattaagaacttaaatataaaacctgaaactgtaaaatactagaaaaaaaaacataggggaaaagcccatgacattggtctaggcaatgatttttggatatgatcctgaaagcacaggcaacaaaggcaaaattagaccagtgggatggcatcaaactggaaagcttctggacaggaaacaacaaagtaaaggaacaacctacagaaaatatttacaaactgtacatctgataaggggctaatatccagaagatataaggaattcaaacaactcaatagcaagaaaacaacctgattttaaagtgggcaaaggacctgaatggacatttctcaaaagaagagttgcaaatgtggccaattggtacctgaaaaatgctcagtttcactgatcattaggaaaatgcaaattaaaactgcaatgaggtattacctcacacctgttaaaattgcttttatcaaaaaggtgaaagataacgtgttggagagaatctggagaaaaagaacttttata

SEQ ID NO: 35338 - DNA, 1046 bp, Homo sapiens
acattgaatttaaattttaaaattatacttgcctgccatttttccctagacttccccccccgagcttgatattgtattaattgctggccaccttaggtcagtgtagcaattcaggaaataaatttgaagagcagtaataataagtattgtgagtagtaagtaatagcgaatgacatagtccttcctctttccagagtcctcttcgcctgtgttactatctcattttattttgcatcccccatgaaatggaagcggggagattattgccactataaaaatttaaatactgaggcacagggatctcagaaagcagataagagttgatctgtgatattttactctggggatgaggcctgtgctgaaacctttgttttggattggaaacatgggttaggaagaaagcaaaggagataatgcccggtatctgtggcttaccccttgtgtgcctatctctgggatagtcactgccattttccttgacccttcgcagaaaactgatgaaagactggctgtagccatgaagagtcctttccccttcatccaagcctatttccacttcttccattgctcctttttacttctgtcttctacttggtaccatgtccctggctcacctgatgtagctgggattaacatgatggctgatcaggccgtggtgccgtgactaaatatgatgccctgagggatcacagataatggaacttgtgtgggtacttcctctagtgatggtttacctatcaagcaaggtagatgacattgacaaactatagctgacaaatatagcatgaggtgggaatttccagtgtagaaagcatagtgattcaaaagaatataaaataattgtttttaaatatggaagccttttttgttttgagactttgattctgggaggtgatttagctaattcaagaagccagactgaatatgatgctattctgttaataaattatagtggtgcatcaagtacaaataagactgagaactgaaattacttttcatagggatggtaaattcaatgtgcacttttcacatctacctgtctatgt

SEQ ID NO: 35339 - DNA, 1049 bp, Homo sapiens
ggagcccacttcatctctcccttctctcttttaatttgcaaacaaattttttaacatttattttttatctcacatataattaaatttattttttgtacaggccgatgagttttcataagagttacatagcaccatcacaagcaagatacagaacagttccatcagccccaaaatgcttttgtgctgcccgtttgcagtcacatatgtagccttttgcatctggcttcttctacttaacataatatatttgatattcatccatgttgtatcaacagttcactccggagtagtatttttctgtatggatgtgccatagtttgtgtattcattcactcattgaaactatttgttgattccactttggggccattatatgtaaagctgctgtaaacatttgtgtagagggtcttgtgtgaacatgttttcattgctcttgggtctgctctcattttgagtgggtataacacattgatttctatcccccttttttacttcttctcccccaatatgatagaaggaggtgtagtgagtagagctgaaaagtgccacaaccctaaaccaggtgactttttcaggatcatgaccagccacttctcaagcttaacccttgaaacttacattttaggatttgggaggcaagaatagcaattccattgatatcaagtgcctggaatggggatagaatcaaagctgccctgcaaacaggatcgtctagaccatgcgagaaactgcccttcactagcataggaatatattaaatattttaaaatgaatacaatttaaatgaaaaaaactaaactatttagtatttactatttgaaacatttttgtgaataatatttgcattgtataggcaatgtgtttttattcagagacaagtaaaggtctcaaaagggctggttatgtcagtttgatagaattttcaaagatggtcaggaatgaccatcttttataagggaggtcaggaatggaggaaaatcaggatctacccacaaaggtgctgaaatttaacaggtaagtatgtgcaggaggaatactagatgaagaac

SEQ ID NO: 35340 - DNA, 1059 bp, Homo sapiens
taccacactgtccaacccaaattttgacaaagtgaatctttatttcaccatcatttcacctctttgttctccaggcttattcctaagtatacactctagttcatgtgacctctgtactagaattgtctgtgagatgcttctctgctgatcagaagcctgcgcgtcctttaggaccaattcagttctcaggcatttgagagcagacttgctgggggaaaaaagtgtttttcgttattttgaaggtccattttgtttccatggttgacataatttaatactgttagagttaaaatagttattgacattatttttgaaatattgtattcctagtatttaccttggttttgaattaatctattttctctgcagatttcctcttttaaaaagggtaaaactctttatttggttttgtttcctgagaaaaagttatatcctatatattcgtcatctttcagaatatatagcttgaacagatattttggaatatataatattgctacaaatccgggtgaattataagaaaatgttttcagttatttgggaaaatgtaatagtactcaaggtcgtggaaacggttatctgctaagctgatattgtcattaaaatgatgaacattcaagagtactgaatagtatttgtttgtcatttatttctggtttgtgcctaggaatgaaatgggtgtattctatttgaatatgcattctacttaaatttaaatatcatgattcaaattagggacagtattacccacatcacattaaactatttattaagaaatagaaattaggtgtatatgtacagacataggattgggaggcaggggtataaaatctgttaacttgattttcttttacatttccaaagagcataattttaatctttattcagtctccatttatgcatattttagtaaagctttattcagttgcctttgtagtttccatagatgcccagaaaggaatctgagtcatgtgagggatttgaaccacgtagctttgtgcatattcctatgaatcgtgtgtacacattctgccactctgaccagtgggctttacaacc

SEQ ID NO: 35341 - DNA, 1029 bp, Homo sapiens
tgtttgaggcccccagctattccagactgaggtatcagcccacatttggcctccaacaatttcttaaaattgtagctgatttcttcttacccactcttggggtgggtggcccacctttgggtgagctagtttgaacatgtcttttcttcttagaggagcctcttcctccttggaattcattctttttatttgctctatgtcctcaactctcagctctctgatagggtcaacgaaacttacaattttatagtttttttctcgttgttaagtgggaacagcactctttcctgctttccaaatcatatgcagaagcagcagctccattttctagcattttggttctatttatttgcttttcattgcatacattagatacatactttattatatagataatgtttatctggactgtcacatatgtttaccaatgcttgatgacttcttgtatctcagaccatttggtgttattttgcatctttttgaagtttactcttgaaatttctctgctgagagtctgtgggcaaatgtctttgttaaaatgtccttacttcctgacagataattttgttgtctcttttaggggctggcaaactacggccatgtgggccaaatctggcctgaggcctgtttttgtacagccccaagctaagcatggtaaagtgttatttttactattttaaaagtggtattaaaaaacaaatccactaccacggtaacaacaaaataagaatatgttacagagattggcctgcaaaaccttaaatatttactatttggccctttgcagaaaatttactaattcttggtcatattctatattaatagttactcttagcattttaaagacaatattccattgtctttcagcttccactgttgctgttgagaaatcaatatacagttactagtcactacttggtagaagtacgatttttttctctggctactttcaatatcttccctttgtgttagatgcctttcagtttcactttgaatttatgggtgtagatcccattactcaggaaatcc

SEQ ID NO: 35342 - DNA, 1027 bp, Homo sapiens
aactcttcctggaagttactgcttttcttaggaaagacttagaagcaacttagagatgttgattaaatatataaggactagaacataattaccacactaaagagctaggcaaatagcatttgggtaaagaagcaaaatctgggtatcaagtgggaactcctagtcccttgaggtctagattatgttgattttaacctagtcctataaaagtagaaatgtttctgtaaaatttttttagcattctaaggggcttatattttcatgtttatcagttatcaggagatcttttgcgatgtctctttcacactgcattgatcaaaacctaatcagctttcagagacaggtacacacacactccaaaccaaataccctactaaaacatacatagtcacaatcacagtatcatttaatgtatagaattttattgaaaatctgagggttcacatcacatactgtatggctcaatactgtattttagagttccttgttcttaaaggttttttttttatatatataacttggatgttttgaggggccatcccactctttaccatcatgtcaaatcactccctggtctaaccttgtgttcagactgacatctctaatctctcatttatccatctactcccctgaaataaatattttgcctcaaaagtcaaaataattactttcttatttagtttctcagcaggagaaactttccaggagcccaattttcctcacttttggtgaagatacacatggttggggtgaagtttccatggtggccatgcaatactttgaccattagtcaccagaagtttctttttgcccttctcctgtacagagtccaattttgtttcccccagcttctctctcctccctgtctcttctctttctttttctgctttctgagccagaaaaatgccttttgatccagatcaatctgatattgataactgatcaatatcttctgatccgggaggtaaataatttctctactgcttggttgcagagcactttctacctttttcctgaagctctagat

SEQ ID NO: 35343 - DNA, 1040 bp, Homo sapiens
ccttgaacaagtcacccagcctctctgcttctgtttccgtgtatgtaaaatgcaaataatagtaataataggaccaatatttttaataggattctagtgagatgtaaatgggttatgtatatgaagcatttacacacatatataaaaaatgctataaaagcatttgctaataaagcaaagcaataggtagcactagaattcacacttattttaatccaaagtctatgttctttataatgtgattctctataactgtgattctgcatgctaactaatagttaatatgatgtggtagagatcactttaaattgatgtcatcctttatttctaggaacattagaatgtaagataaagtgtttatttttcattgtgtttatatttatcctcaatttggacattggccttagaatcttaaccttggatatttttcaagtgaaagaatagagatttaaagattatactctaagattatactaaatatagcagtctatatttgacatagtgctttcctctacctgatttcatttgattcttagactagaacattgtaggtggaaaagaacattgtagatggaaagactagaacattgtagactagaatattgtagatggaataatatatatatattattttttttgagatggaatttcgctcttttcacccacactggagtgcaatggcacgatgtcagctcactgcaatttccgcctcccgggttcaagcaattctcctgcctcaccctcccaagcagctgggactacaggcgcccaccaccatgcccagctaattttttgtatttttagtagagatggggctttaccacatcagccaggttggtctcgaattcccaacctcaggtgatccacctgcctcggcctcccaaagtgctggtattacaggcgtgagccaccatgcctggccggaagagatattgttatgtcatcttacacatgaagaaattgaagtttgcagagtttgactcctaccttggctagcctagctaggactcaaactcacatcttcttactcttaattcaaa

SEQ ID NO: 35344 - DNA, 1038 bp, Homo sapiens
taaggtctgttttattgaagactaggattgcaacccctgcttttttttttttttttaactttccatttgctaaatattcctccctccctttattttgagcctctgtgtgtcttcgcacatgagatgggtctcctgaatacagcacaccgatgggtcttgacaaattgacagaagtaggctcagaagcggggtaataacaaactcctccaagctaaaggaacatgttctaacccaatgcaaggaagctaagaaccttgaaaaaagattagaggaattgctaactagaataaccagtttagagaagaacataaatgacttgatgaagctgaaaaatacagcacgagaacttcgtgagacatactcaagtatcaatagccaaatagatcaagcggaagaaaggttatcagaaattgaagatcaacttaatgaaataaagcgtgaaaacaagattagagaaaaaagaatgaaaacgaacgaacaaagcctccaagaaatatgggactgtatgaaaagaccaaaactacctttgattggtgtagctgaaagtgacggggagaatgaaaccaagttggaaaatacacttccggataccatccaggagaacttccccaacctagcaagacaggccaacattcaaattcgggaaatacagagaacaccacaaagatactcctcaagaagagcaaccccaagacgcataatcatcagatttaccaaggttgaaatgaaggaaaaaatgttaagggcagccagagagaagattgggttacccacaaagtgaagcccatcagacaaacaccagctctctctgcagaaaccctacaaccagaagagagtgggggccaatattcaacatgcttaaagaaaagaattttcaacccagaatttcttaccagccaaactaagcttcataaacaaaggagaaaataacatcctttacagacaagcaaatgctgagagattttgtcaccactaggcctgcattacaagaggtcctgaaagaagcactaaatatggaaaggaaaaactggtaccagc

SEQ ID NO: 35345 - DNA, 1066 bp, Homo sapiens
tcatctactcgctaacctgactttaaccccttataaggtacctcctgttaggcccttaccagctgctgagaatagagaagtaggaaaagggtggtgccctgtgccctaaatccttgggcttctgttcagggatggtgggaggtctggagcaggaagccagttgttatttttctgagatcttctattatcacgccagtgtttctaaagaggcctggatgctacctgtgagtatttacaagcaaatcctttgcttaggaggagctttcttttggatgtcagcagggggactttctatagataacagaatggatatgtcctttggagtcagctgttatcaaatacagaaagtaatctgagaaaagtagttgagcatagtgctgcctggatgatcttactgggatatgggcatgtggtagaccagatgcctcaaggggccctgactgtggctagaaggaattgtatagtttgatggtaaatcctacctgtctagatgtgttgtatgaatctgtctctttgtatatggactgcttcattccagaagaatgaagaatttaaaatcagtgggccagaaacaggttgtcagaattcctctaaatgaaggaaatagcaaacggcaaatgaccagtaaagtaggtcaggttgtgaccttttgagcaatgagagaactatgagagaaatctcaagttttctccttaaaccataatgtcattagttaaaagtagcattagccttttgttatagtaattgaagtgtgctccaaaatgaatttaatctcgtgtgtatatggctgggtgcggtgcctcatgtctgtaatccttgcactttgagaggcctagacgagtggatcacctgaggtcaggagtttgagaccagcctggccaacaaggcaaaaccctgtttctactaaaaatacaaaaattagccaggcatggtggtgggtacctgtagtcccagctacccgggaggctgaggcaggagaatcgcttgaacccaggagtcggaggttgtagtgagccgagatcgagccactgtactccagcctgggcgacagagtgagactctgtct

SEQ ID NO: 35346 - DNA, 1035 bp, Homo sapiens
actttttaccatctggctcttggcctgccgtgttcatttataattcctacctcaaccccaaggtcacagtgcatgggactccatctttatgtagccaaacttggggtagtgaggagatgttacggaaacagacttggttcagcacaggaaaaacaaattcataagaatagaagtgtttagaaatggaagaggttttcttgaaagggtaagctttctctggcattcaggttgaaactgagtgggaacattgtggaattgctgatcccaggatttaaggatggacttccagtgggtgacagctttaagggccttcccaagcattgagagtatgtgattctctatcacttagatatttaagaaacatgttttttaagagcctcagttcccacttcatttttctcacaagatacatgcagtctggctatcatttatgcttggtcttgatcttccatgccaaaataatctcaccttctcacttagtatgcatgtgtgtgtgtgtgtgtgtatgtatttattttgcactaaactgtaactcttcacctgtctactagcagaaattccaatagccaggaattctagactctgttattaaaagccataattcatcaaagtgttaaataacattcttggcagtgtagcttaagatgacccgggcaagaaactgtatgacttgtttatacattttaggtcatagaagtacatatctagaggattgggaaggaaacttaccttctgtcttctaatctttaataagaattcaatcatcatctctcctagtggctgtgtcttaaaaatctcctggcttctcaaaaaggaagtaattttataaccatgaaatctggaaaggtccagaaagaacctggagcttcttatttatagctcattcttccagttttcagaaaacagtgattgtgcctctgatatgaagttaatttgtttagaaaaccagtctcaacttttgaaaagttaaccgttattgttgcttaaccattattgttgcatttctggacattaagcatagcatataaagaattt

SEQ ID NO: 35347 - DNA, 1030 bp, Homo sapiens
acttagttttcccacctacctttgaagtgttttccctaggtaattttgtggttcacttatttccttctggtctttatgcagaaatgtcacctcctcactgaagcctttcctgcaaccctatctaagattgcagtgtctacctcagagctttctatcgcctttctctgcattatttttgtgattagtacttgtcattgttcaatgttatatatatatatatatatatatatatatatatatatatattttacgaatttatctcatttgtggtctattttcctcactaatattaaacttcatgagacaaaactatttgtctattttcgttccctcctttatccccagtgcctgaaacagtctaagtcagaaataaatgaataaattaagtcaattttactttaaagaagtaaagctaaaaattatctcatagaagacagaatatgtggctgcgtataactccataacaattggtggatcaataaataagatggcatgtagtgaagagtgtaggactgtggaagaaaaataaagaaacttacagaacaacttttgaagtagtcaaagacaatgctattagagaaaggataagtaggaaccaaataatcaaatcaggtgaaaaatgagaaaacccaataagtaacagccaaaaggattgcttgagacaggaaaagtcctcccattgagcacagcccttctttgcctgcagcagagatgatcagcttcctgtcaggattaaagcattgttaggagcatcctccagtgaggcacgggagaggcttagtttagttcagcccctgccttacctcttctattagtttaagatctgtgttgtattggaatgcagcgtagcacaagtgaccaaagggactgtgatttctacaaaaggaaagaaaatgtcttactgatgataccagcaaaaatagtgtaagtggaatacaaatacatccccttctgaaaacctgcttttctcaggccatgttgctcctgttctttgaagtactgttttcattgtagtttatcagcagtgctc

SEQ ID NO: 35348 - DNA, 1049 bp, Homo sapiens
gaggaaataccatgtgaagatacatgaagaagacagccatctataagccaaggagagaggtctcaggagaaaaccaacctgccaactccttgattttggacttctagcgtccagaactatgagaggataaatttctgttaagtcatcccatatttgatattgtgttaggcagccctagcagactaatacagcatctaacaatcagagaaaagttggacattcatagaaaaataagatagtcacgaggcaaatctcatcattacgggtttaagcatcactcaaggaagaaagaccacagcgtgtgtgtatccatcttgttgacaagattttctgtgatgaagatgagatgaattcatcagccaatctcagcctgatgccctcacatcttcaatttttgtgtcattcacaaaataaacatcattatgtatatggcagacaaacttctcagaaggctcccataatcctcagctccggtatttgcacctttgtgtggtttttccctctcctagattgtgagtagaacctgtgactttcttccaaccaacagaaattggcagaaggacaggactcacatggttacatgagtgtaacatgttaagtaatatgtgtttatgttgcatgagatgatagcatccatcttgctggcatctcttttgctagttttgagaaagtaaacagccatgttagggaacccatgtaaaaaggaactgcagatgacctctagcagctgagggcatccgctgaccaacagccaaaaattggtgatttccaatcagaataagagagaaaaagccagcatttattaagttcaaggcactattctatatgacgcacaaaagcaaactcaattctaaaaatggatacatatattatgccccttttacatatgagaaaagctagcactgaaggctaaaataacatgtacgtttttataactggtaaatgataaggctgggactttttgctgactttcatatagcaaaatgtctttcacaatacaaccagtctcaatccacgactccatgaattattttcttctttctcttccc

SEQ ID NO: 35349 - DNA, 1059 bp, Homo sapiens
cgttgtatttttaaaaagggtttatttaaactctgaaaaaattgctaaatttagaagtccacagtgtttaactattataaaagatacaatattgcaggtggagaaactctcaaacattacctactactgtgattgtaacctatttttcaaattctaccacatcttgtttatatccattttaagagcttagtatcaggaacctatttaatatatgactaaaattgtttatgctgtaattaagctcatttcttcttgtgctcttctcctgcagaatacaaacaatcggtggttatagttggcatgttgaaatttattttattactgcccatatgtttttatgttcttattgataaatgtaaacctccctggtattgtaggacttttcttagttcagctaaagactgggttcttgtccatcccaaggccacaaaaatttagcctcacagacagtttaaagggtgagcaaaatagggttttattgggtgaaaagggagaaaaacgggtgggggaaacacctgcctggcgtttgaatcccaggtccacacaggaagacgacgaggcaggctcctccctgcttcaaatcgtgtgaacttcccaaggctccaccccagtgcgcaggctgcttggagtttctccaggaatcccctcccactggctgtctcattcccccctctaaagaagtacatctaactgtggttagattaaggataaggatgaagactgatcttaaccgcttcctgctgacagggggcgctgttttggggaaatggcagaactccctcagaggctgatctaagggttcccggcagaaggggccatcttcagaggctctggttgcatgactgtttggagtttgatggcctgaaggtaagaacagacaaacccaattattagaaaacatgtatcaaagtgaaacaaggggaggggtaaggacagctcaaaaatcctgaggccctttaccagtttgcatggagagagggaggccaaaagcctgactagttaaaatctttacccttttggtggcatgttgggcttctgggtttccttcccctgggccca

SEQ ID NO: 35350 - DNA, 1026 bp, Homo sapiens
tatgaatatggtacatctatccatttgtttagtttcctttaatattttgtaaagctttatagtattttcagaaatgcattgcatatattttgttaagtgtaatcttaactactttgtggattttttttcatgctattttaaagtagcatctttattacattttctgactccttgctgctggtgttttgaaatgcaattggttttatattgttttgttttcagtaacccttctaaaatgttttattaatcctagtaacaaatagaaagtgcttagctctgcaccctattcatttattttttcttttgtttgatgtttgaaatcacagttttatatgcacaattgattaaagtgcttggtattactgccatcctttgactaggactttgaggcctctgaggaaaatccttacagatacattttcttacttgcagggcttgaaccctagctgctgcaacaagcatgtcatttgctttgttttgccgtgaattctttttgttccactgatcgttgctttggaatatgcatcctgctcatagttctgcttctctattcagcttaacactaactgagtttctattgtgggtaaatattggtccatacagtggattggatgctagggatacaagaatggacaagtcagttcttgtttcctagtaatttagagtctagtggactttctggctgacttgttccttattaattgtttattgctaagggtaatttatcttcttcacgaagttccacttctgatgggcagttactagaagcaaaacatccttgtgggtattccatatgtttttatcttggggattaaacaaataaacgtgtgtaattgatcggcccatccctgattctgtagcacttttgtcatttgctctttacttcagagggtatcttgggatagtcaaagacttagaagatgagtatttcgatggaatggatgttgggtcttctacctcctgagtttggttgccaatgtctatctagtaaagggagcatcagggccaagattggggtatagagaa

SEQ ID NO: 35351 - DNA, 1115 bp, Homo sapiens
ccaggttcaagtgattcttttgcctcagctccccgagtagctgggaatacaggcacgtgccaccacgcctggctaacttttgtatttttaatagaggcagagttttgccatgtgggctaggctcgttttgaactcctgacctcaggtgatctgcctgcctcagcctcccaaagtgctgggattacaggtgtgagctactgtgccctgccagcttctgtgtgtctttaatttccattactatgtcaagtaattctgaatatgtacatagaccaagtgtctcatggaactctagaatcacatatctgcctttttattatctccactttaataatttcatgaacgtttcaaagttaacaccatgagatctaaattgataattttcattacgtagacctctactttcaatgtttcatacctcaataaagagcaccattatttattggcaacttcttcaagccagaaaactgttgtccttgatcattctttttgcccactccatatttttaattagttaccaaatcttatactttctatctcttaactaatgaatatctctactcgctatgtaaacggataacatcttatactaagtttcaatcatccctctttgggactattgcattggcctcttaacttgtctttcagtatacacacttactcctttccaatctatcttccacattttaacgtaacagcctttaaagtgcaaacctaatcattgtctcttcctttaaagacttttagtagtttgttactgtctttatgacaaatcaaattcctcagtatggctgataggcaggtaggatccatgagggcagagaccttgtgtcttgtctgcatctccagtgcctattttagcacagtatcgggtaaaaagttggtgctaataaacatgggatgaattaataataactataggatcccatatagtttgtgctctatttgtatcaattagcttttgctatgtaacaaaccatcccaaaatttaacaatttaaaacaacaatgtatttgcttttaattctgtaggtcagctaggcatttcttgtctgggctgtcttggcagatctctgaggttacctggcagcttttctatggctggatagtccaagaaaa

SEQ ID NO: 35352 - DNA, 1061 bp, Homo sapiens
cataagcacctacatcagaaaagtagaaaaacttcaaattaacaacctaactatgcatcttaaacagcctagaaaagcaagagcacacaaaacctataattaatagaaggaaaggaataataaagatcagagcaggaataaataaaatttaaattaaaataatcacttatttggtcttctgtcgcctgtgcacctaacttggttcttgtctttattgttccatgtcctctgctccatgaggctcaagcaactctgtcaaagaccagtgattttgtcctcctgtgacctccaggtactgagagatacttgagggggtgttgtaaggacatccagaagctgggaaatgaaggctgactagatgcagccaggtgaaacagctgtcagtgaggcaccaagacgactggagtacttctaacagatcttcagagggaaggcactgagagtggatgaagggaagacacagaagctgggctgaaggggaagaaagctgggaagcctacctggggctactggacacctgaactcattcctggcccccaatggctctggggaaacggatgagttgaactgacaagcagtaaccttctcttgctatgggcctctggaatactggcaggagactgcccaaccaccttggatactcaaggtggcggggagagctacttagagaagtggtaggagcagcaaactagttgatgtggagcccagagggtttggtgtggaagcatctgtagtggagcatgactagggatggccatctccctaggctctacttgctcccacaggagactttagccctagaggaactattggtcctgaactctgcagggcagtctagcccatcagatgggccagtctgacctaaacaccacttgttctgctgtctctcttggggccccagctgggccacacctgcccataggtggaagtctccacctatggagaccatgcctaactggcagagtgcaccactggggcagcacccacggcccctcccaacactgcagcttctgcagggtccacggcaactccccacattgctttgctggtgcatgtctgca

SEQ ID NO: 35353 - DNA, 1050 bp, Homo sapiens
ctgacaacaagatccagtctatccagcgagtatgctatttccaacttgggaagtaattccagcattatctggaatagtaataggttgaatttgaatcgtattctttgctaaaaaggtccttttaagtgtttttgcaataaagttatctgctgattttatttttttgttcatgtgaattacaagtgttgttatttggtgatcttgttcacttacatcttttaatactaaaatatgaaaaaggaagaaaagattgccatttagagggacccaggtccctttgaatgtctacttaggcctgacaccctgcttgattccttgcataaactgtttctcatcctcacaacattaaaaatagttaacatttactgagcactttctttgtgccagtcacatgatattctttatgtaatatttaattcctacaacattcctacaaaataggtcttattatctctctttcagattggagaaaacagcttagatgaattcgactaagtaatagaactactaaatagaatatttatctttgagtaactctgaaataactccccctatatacgtatgcatgtatgtacgtgtatgtgttagactatctttctatcatctcttctacataatattgtctagtatcgaatacctcatagcaataatttgacatcacttgggcatcagaaagattcatgtcactgttacaatacgtaggtaggatgtagctgcttcttatttacaaacagtagctaagacaaaaatataaggaatggatgagcagtcgaaagaaagctgggtgattaggacagaggagtggttggagggcagaatgctataagaaatcagctgcctgaggctaggtggtagaatacttattgatgttgatggtatgtgtggataagttaggtatgtagcctctggttttatgttttctgccataccaaagacaaaaggacaatgttgtcctgggatcctcacctttgacctaatcaaataaaatcttctctcttcacttcacttgttagggaagaggggtgatgcaggaaggagacaaaaaattaa

SEQ ID NO: 35354 - DNA, 1068 bp, Homo sapiens
aagtaatggcagggtctgaaaggaccaactccaattttgaaagttttgccttaagtaaaatactactaaacagcattgcatgctacagatgaattttccatgaaaggaagagtcaatcattgtggcaaccatcattgttgtcttattttaagaaatttctacagccacccaaaccttcagcgacaccaccctgatcagtcagtagccatcaacattaaggcaagaccttacaccagcaaaaaggttatgactcactaaaggcccagatgattgttagcactttttagcagtaaaacattcttaaattgttttcttagatgtaatgctattgcatacttaatagactctagtatagtgtaacacagcttttatttgcactggtaaaccaaaaaatttgtgtgacttgctttattgcaaactggttgaaagtctacaggggccttccccgagagaatttgagggttcagtttgaaactgtcacaacaaatgaaatcttcatcgtgtaaatttatttctgcattactacagattatataggtaaaatatagttagtgaggcaaaggactgttcaagataaagctgaggaggtaagcagagaccaaaatcatgcaggaccgtgtcaaccattttaaggatgtgttattttataacaaaaatccttatacttcctgaaggctaacggttattctgactctaggatagattactttcactaaagttttgtttgcctgttgttatttgttggttttttttcactttgcatagatggaatcatattgtgcatactcttttgtgtctggcttcttttattcagccttatgtttgtgacagtcattggtacaattgggtagttaacaaatggttcatcctcactgctatatagtattccatgttgtaaatgtactccaatttatccacttgactattggtgtgtattttgataatctggctgttataactagcattaggagatatacctaatgtaaatgacgagttaatgggtgcagcacaccaacatggcacatgtaaacatatgtaacaaacctgcatgttgtgcacaggtaccct

SEQ ID NO: 35355 - DNA, 1011 bp, Homo sapiens
caaaattagctgggtgtggtggcacatgcctgtatcctagctactcaggaggctgaggcaggagaatcgtttgaacctgggaggcagaggtgcggtgagcccagatcgtgccattgtactccagcccgggcatcaagagcaaaactccgtctcaaaacacacacacacacacacacacacacacacacacatacacacacactaaaacaaaagcatacaatagtttgcttttctatataatctcatgaaattaagagttttcattacatctaactgtttatttctttgggttgttaaagatccaagagcatgggctttggagtcatctgctggagtttgaattcttgctctgccatttaaccatgaaccttggaatgttagcctcagatttctagtatctaaagtgaagattaaaagaatgtaccttggctgagtacagtgacttacgcctgtaattccagcactttgggaagtcatggcaggcagatcacaaggtcaagagatcgagaccatcctggccaacatggtgaaaccacgtctctactgaaaaatacaaaaattaggtgggtgtggtggtgcgtgcctgtagtcctagctactcaggaggctaaggcaggagaattgcttgaatccgggaggtggaggttgcagtgctccaagatctagccactgcactccagccaggcgacagagcgagactgtgtttcaaacaaaaaaaaaagagtatacctcatagggctattgcaaggctggaaaaaaatcaatacatctatagttcttacaactgtgcttgccaaagaaaaagtgcttccaaaatgtttattgttatttattattatctcatagaaaaggaaaaatctaaagcaagaaaacttgaatggagtcagccttaatcatgtctctttcatccactcctatataattcacactacttttcttcccaatctctttcagaattccacatttccacaaagcatatttagattatattgaagtcagaattgtgcatct

SEQ ID NO: 35356 - DNA, 1023 bp, Homo sapiens
aaaaagtaaagctgactttataatatggatgactttgaattttacttcttagcccttatactttctatgcaggatgtatttttaaaaagaaatacaatatttacaggaacaaatttatagagtagggagtataaatgggcattttaaaagttatttatatacatcttaactgccatgacttttagccaagccagtattttcaagaaagcgctgtctatcctaattgcacaaatatttttgcagacttttccattaagcagtgaatgaagccctgaaagtcactgtagccaatgtgaaggcagaggatttgagagtagtaatggatttttagaaatgcttagggtgcgctcctgtaacagggcatttgcttttagggcagtttggcccaacaattgaacaaattagttatgtttgaaaatttataaagcaaaagcatagataatcataatataatttttgctagaacatatgttaagttggcttattagatcagatcgttttttaaaattacagtatgaaaaagttattcaacttattttaaaaattcttctttgcaaagaaattgataccttgatacccatggcattaagacagctttttacttctttgtgggctggcataatggacagacagtactttagccttggaaatcaggagtattgacgtgtgacattttagatgagtatgtgtgtatgtgaacaggtacatgtggatgcaagcatgtgtgtagaagatcacgtatacattcatatatgtgagagtgcatttgggttagaagtgatatgaaaaaaagtggagtattgtatcttagtaaacttttacttcattaatctccttcaagttgttgatcattaataattggatattcttttgtagaatggctttggaacttggcagtattctgtaatccagttttacaagatgacatggggagatgaccagggaatttactcatattttttttaggccgagtgatgttgatagaccacagtttggcaaagtagacagatctggtttcagatc

SEQ ID NO: 35357 - DNA, 1039 bp, Homo sapiens
ttattttactaatttttaaatttagttttttaaattgacagaaaattgtgtatatttatggtgcttataatgatgttttgatatttttatacattgtagactgactaaatcaagctaattaacataggtaatacctcacatatatgtcattctttgtggtgtgaacgcttaaatctgtcttagcaattttcaagtatacaatatattattattaattgtactcatagtgatgcacagtagatgacttgaacttatttcttatgcctcaccgaaattttatgtccttcgaccaacatctcccaactgtcccccttactcccagccccaggtaaccatcatcctactccctgcttctgtgagttcaactttagattccgtgtataaatgagaagatgcagttcttttttcactccaattttttaaaatgttacttaaaatcatattttctttaacatacagtttttcaattttgtaggagttaacctaagtaatcagactatgtgaaatcctctgaggttgactaaaaggtactctgcgattatttaatagatagtgtccttagactaaattaaatttttcaggaaaattataatattcttcaaagtcctgttggctccttctctcatttcacttaattatggtgaatctggccaatccatatatatagtttatatagaatgtctctttacaataactgtatgcaataataactatgtggctgttggcttattcctctaactgcatgaatttttcatgaattctttgagattcatgaaaaaaaagaatagttctttaaaaattactgcatccattttcattgtatactaagtactatacaggcctacctcattttatgcttttcaccttattgcactttatagataactgcattttattacaaattgaagctttgtggcaactgtgtcaaggaagtctattggcaccattttttttaacagcttgtgctcaattcctgtttctatcacattttggtaattctcacaatatttcaaaccttttcattattattatatctttt

SEQ ID NO: 35358 - DNA, 1053 bp, Homo sapiens
ctcactacaacctctgcatcctgggttcaagtgattctcatgcctcagcctcctgagtagctgggactacaggcacacaccaccatgcccggctaacttttgtatttttagtgtagacagggtttcaccattttgggcaggctagtctcgaactcctgacctcaggtgatctggccgcctcggcctctcaaagtgctgggattacaggcctgagctacctcactggcctccttttttttaaagaccaaagaatattcagcaggtgcaaaaggtatgtatttcattttgcttatctattcatctctcagtggtcacttgggttgttcccacctcttgcctaatgtgaatagtagtgctgtgaacagtggatgtacacttatcttaagatcctttattcagctcttttgggtatatatgcagatgttggatttctggattacaagttagttctatttttaattttttttgccttagaaatttaactcagaagaaacagaagcaaagttagcatcggcaagatctgatactgagagatagtgatatggaaaagggtgggtaaggtgaagggccatgtgcaaactgaagttataaagtagaagagtacaactataagatacgggaagacacagaatggtgtagaatgaataaaatagatgcgagggtagatacataacaaggagaaagaacaataaacttgagcaagtggctggggtctcttatagtcttcatttactgacctctttcatacttgaccactttttcctgagttccatggacacatgcacacacacacatgcacacacacacaggcacacacacaggcacacacacacacatgcgctgcacgcacgcgcgcgcgcgcgcacacacacacacacacacacacacacacacacacactattcagtatgtcccctcatcctgtggtaagtttttttttttttttttgagatagagtctctctccattgcccaggctggagtgcagtggcgcgatctcgctcactgcaagctctgcctcctgggttcactccattctcctgcctcagcctcc

SEQ ID NO: 35359 - DNA, 1022 bp, Homo sapiens
accacaaacttatactgtagattatttaagagatgtagtctggcatttcatacaaaacagattcatgctttattctgtgaataatgctgtagggcctgctaagtgccaggtactgtgttagatactggggatacaataaagtcacagtttctgcctttgagcacttcatagtctcatggaagagatatgcaaaaaattctcagttgccatttagtatagtaagtacctggaggtggctatgggaacacaatattgttttgtggtttttaaagcccagtggtttaaaaagctgaagaggttgatggttcaactgactgtttaggataaatacaaagcctattcaggtgcaaaatcaagtggaggcattctagcagggtcatgatgtacataaaggtatggaagcacagtagcatggtatagtgacagaagtgcaagtaattcagtctgccatggaagctggataggtctgagggagtggtaagaaagactggagaagtatttattcattcaacacatatattgtgatgtaacatggttcccatacataagtttacattcttgtagggaaataaatatagtatataattgtttcagtgaaaatgtatagtcagattgtacgtaatggcagacattaaatgaggaaacatcaacacagcttaatcatgggaatgggggagctggagcacctagagaccaggtagatataatattagccaggtaaaaattacgaggatttaattaaggctatggcagttgggttccctatatttgaaataaattaaaaggacttgtgactgattgctacctggggtatattcagaatattgggtaggatttgaataagcagaaaggggcatctggaattctcagcttaggcaactggttgaaagttggcatttactagtaatggcatacagagaaggaacattctgagggggaggggcagagagaaagggacttagataatgagattaattttggtcactgatatctggtatctcttcaaatggagggattttcag

SEQ ID NO: 35360 - DNA, 1054 bp, Homo sapiens
cccatgtatagaaagtatatttgggccagggacggtggctcatgcctgtaatcctagcactttgggaggccgagatgggtggatcatgaggtcaggagatcaagatcatcctggccaacatagtgaaaccccatctctactgaaaatataaaaattagctggacatggcagcgcatgcctgtaaattccagctactcaagaggctgagggaggagaatcgcttgaatcagggaggcagaggttgcagtgagccactgcactccagcctggcgacagagctagacttcgtcttaaaaaaacaaaaagaaagtatatttgttccgacctctagaaaagcactaaatgtgcaaatttagtattttgcacattgtcaaactttaaatgaagattatttgttttgttgcttactgtttaaaatgtaccattgtgcacaaaggcagttcaagaaattgactagatcgtaatatgggaactttggagggattcattttaaattcattcagtactgcattgcatgtagttagtattcagtcagtgtttgtcagatggagtagcaaaatattgttggcttaccttatacagtgttattttagagcatctttgtttcagttgccgctgggctttattagagaaaaaggtagtaagtcacaccttaaactttactgtggaaaaatttaaacatatacaaattaagaatagatccccattataaccagcagcacaatttttgaatcccaatataactcaacacccatttttagcaactaacagcgtttggcaaatttttttcattttttttgagatggagtcttgccctgtcacccaggctatagtgcaatggcgcaattttggctcactgcaacctccgcttcccgggttcaagtgattctcctgcctcagcctccccagtagctgagattacaggcatgtgtcactacgcccggctaattttttctgtttttagtagagatggggtttgaccatgttggtcaggctggtcttgaacccctgaccttgtgatctgcccacctcagcctccctaagtgctgggatt

SEQ ID NO: 35361 - DNA, 1032 bp, Homo sapiens
tgcttttggttgaaacaaaaaacctgtgtgtaagtggacctgcacagttcaaacctatgttgttcaagggtcagctgtgtacactgcatggcacatagtagacaatcaagttatttattgagtatatgaatgtgtaggtgtgtatgtgacagtgaatttaaagggctaatgatggtgctttcattgtgctgaacattatttgacgtagagtattttttttttttttgagacggagtttcgctcttgctgcccaggctggagtgcagtggtgtgatcacagctcactgcaacctccgcctcccgggttcaagcgattctcctgcctcagcctcccgagtagctaggattacagccatgtgccactacgcccagctaattttgtatttttagtagagatggggtttctccatgttggtcaggctggtcttgaactctcaaactcaggtgatctgcctgcctgtgcctcccaaagtcctgggattacaggcgtgagccaccatggccggctgatgtagagtatttttaataaaagggttgtcgaatctgcctatggatacttttgttgtaaatggattgtgtttttaaacggggcctcatgtgtatattaaaaggaagtttttacattcttttgtaaattcaattattctacccacccaaatttcacagtttatgttttcttattactgagccagttagaattactgttgtctttgacttctgtcttatatacacacatttacatacatatacccttttatatatagatatacttgtaccaaaacttgtatgagctcactggaatatagctctttttggagcatagttctgactttgaagacgtttagatgaggttagaaggtaattacgtgcaaatacctttttctgccccaattatggttatctttctttgtaggagtaagactgctgctgctgctgctgatgtgaatggatttaaacctttgtcaggcaatgaggtattttttttaaaagtggttttaaatgtagttctttaatataagaaagcatgtacat

SEQ ID NO: 35362 - DNA, 1033 bp, Homo sapiens
agcatgggggacattggaagagagaatgactagcttgttacaacttattacctgtgattggggttgggggacttttagaacatgccctttggttgctgttgctgttaatggtgttagaaacaactgggtcttgtatggcagttggcaggtgaagtatagagtaggggctagtaagctggagaagtttaccagagaaggtagagcaggtgtgtaagaagatgtgttcactattgtgtttttctttttatactgcactgttgttgtccttggaatgtggattacctttctattgcattattaaaatttctttttttttttttttttttttttgagacggagttttgctcttgttgcccaggctggagtgcaatcgtgtgatcttggctcactgcaacctccgcctcgcgggttcaagcgattttcctgcctcagcctcccgagtagctaggattacaggcatgtgccaccacgcctggctaattttgtatttttagtagagatggggtttatattggtcaggctggtctcgaactcctgaactcaggcgatccacccgcctcggcctcccaaagtgttgggattacaggcgtgagcctctgcggccttttttgtaagaccatcagatcttgtgagaactcactatcatgagaacagcatgggggaaaccacccacatgattcaattatctccacctggtcttgcccttgatacttggggagtattacaattcaagatgagattttgggtggggacacaaggctaaactatatcagcctacatctcaacactcattttttgcctacttatttttttttctttatagcagttatcagcatttaacatacttattacttatttagtttttatctgttgtcaccagattgtacatttcatgtaggcggagtttttgttctcttaaatgctagaccctagcacctaataatacagtcatcccttggtgtttaccaggagatttgggactcttgagtataccacaatctgcacatattcaagtcctaccacgggccctgtg

SEQ ID NO: 35363 - DNA, 1049 bp, Homo sapiens
tacattcttctagtttgtattttggctttccattttctttttttttttttttaattttttattttatttatttattatttttttttgaggcagagttttgctctgttgcccaggctggagtgcagtggcatgatctcagctcactgaaacctctgcctcccgagttcaagtgattcccctgcctcagcctccagaatagttgggatcacaagcttggcttttcattttcttaacaatgtcttttgaggaacaagagcttaatactgatgactaagaacatttaagttatgtaattttgttatagtatggttaattagttaaaacatattttgaaggaattctttttacaagaaagatatatgtcacacatcataaaaaatgctgattaagtaaaattacagtgttagaagacagtggtagtataatatcgattttttttttaaataatttaatactgacactgcttggggaagattttaggatatccattgtttacctaaccagactacaaaagaatttattctgaaggttacgtatcaaaaagtacattattctcatgtagcattttgttgagatggatagaatttttcatttttaattttttttagagatggagtttcactcttaatacgcaggctggagtgcaatggtgtaatctcagctcactgcaacctctgcttcctgggttcaagcaattctcctgtctcagcctcctgagtagctgggattacaggcacccaccaccacgcctggccaatttttgtattttttagtagagatggggtttcaccatgttggccagggtggtcctgaactcctgacctcaggtaatccaccctccttggcctcccaaagtgctgggattacaggcgtgagccaccgtgcctggcagaatttttcattttttaaagtgatgtaatacttcttgtataaaaattagaaatgtagctcgtgtgtttgatctaaacagactcatatcagtgaacggtttcctctacaccagagggtatcacttctagcagtttgtgagaagccatgattgttaggct

SEQ ID NO: 35364 - DNA, 1023 bp, Homo sapiens
ttatgttttgcatttatttggacatttagaaagctactatgatggataagacgctgagctgtgggggatggaaagatgacctggacaaggcccttgcatactaagagtgggctttgtctgacatggtcagggaattgggggtgttgtgattaatagtggtttctgtgatgggtaactccctataaattaaaagaaaaaaaattcagtctgggcatggtggctcacacctgtaatcccagtactttgggaggtgaagagttcaagaccagcttggccaacatggcaaaactctgtgtctactaaaagtagtggcatggtggcacatgcctgagtcccagctactcttgagtctgaggcacgaggattgctcgaacccaggaggcagaggttgcagtgagccgagttgcgccgctgcaccacagcctgggtgacagagtgagactctgtctcaaaaaaaaaaaaaaaaaaattcagacttgcagtgtaaaaaatacgctgagtgtaagtaatgctgaacccttaattttatcagaaggcattcataggtttttaattttcagggttcagtgtgaactcacatgtcagaacattataattatgtaagtagtgattaatagttaataaaatgttgtataacagcttaatataattttctcagtagtatgtgaaataagatgccacagtgacctgttttcattttacattcaaagtcttacaggatttattacttactggttttaagacctagaattatgtaatctgacaactttgggtgttatttcccccagttgactggtagagaatgttgatataatactttgcaaatgataggcttgaaaccttgttttattaaaaaaacctggtaacgcagaggctagataagagagtgcagaggtgtggtagagaagggaagtggggaggtggaatggtctttaaattaattcttattaatcattggccccagagggtaaaactgtgttgataataatggacattgctaacattggttgaggtgcttactat

SEQ ID NO: 35365 - DNA, 1051 bp, Homo sapiens
gcctccctttgcatttttagtttagcccttccttttaaccctgccttgcttttctggtgatgggcactcactaatcacgtgactaaaattcctcatgtgagcagctgcatttaggggccttatatgtgtaagcggcttgaatgcccttttgaaattctcgactttattgaacttggtgattcataagagaggaagagtgtgactctttcttatttttcagtgacttgccactcatgagacaagcactgacctgagttaagaaaggagcaggtaggactataagtaagtgggacctggaggattatacgtaagtggggcctggattgcttacacacacagttgctgaaacttgcatggacagagttcttacgctagttactcattgcttattatttttactttgtttaatacttactaactcctttgagccttgtggcaacgccatagtaggtggtataagtattcccattttacagatgaggaaactgagaaatggagaggttaggagtcttgcccaggttagcacaatgaataggtggtagaactgagattcttttttttagacggagtctggctctgtcgcccaggctgaagtcagtgatgcgatctcggctcactgaaacatccgcctcccgggttcaagctattctcctgcctcagcctcccaagtagctgggactaaaggtacctgccaccatgaccagctaatttttatatttttggtagagatggggtttcaccgtattggccaggctggtcttgaactcctgacctcgtgatctggctgcctcggcctcccaaagtgctgggattacagatgtgagaaactgggatcacaggcatgagagactgggattctaatccaggcagtgtggttccaggattctcttccccaggctgtctctacccacaaattacagaaagaagcagcaaaacaggaactcggctctgttctctgcccttcttgtgcgttgtggaattagccaggatttcagcatgttctggatgttgttatgtcagacagctttagaatttgtgttaatagttttag

SEQ ID NO: 35366 - DNA, 1043 bp, Homo sapiens
cattttttcccaacatatttgatttaagtcgtggtgttgaaaaggggcatcaaggtcttagggcactttgtttttcctgtcattctcttttggaatgataaggtgtgttgcaggattgtgcagctactcattacgcttttaagagtatgattttaaattttaaaggagatgtagggggtggggaaaggtcggtggagaattggttctgtatttcagtgaagatggaagtccccacgatgatttccaaatgccatgtcagctctttggagattgacaatacccttttaaatggagaataattggtcaccaccttcctttaaatggaatgtgagtcgcatttcactaaatgtcattgccaggtgaattagaggttcagctccactctgaagtccctttgctcagggacacttcagtcgggtcttttggaatgtcccccttaccacagatctttgctcctcaggagtgggagacactagttggaagaaatgaggaaaggtaggggatggaaaatgagatgtcccagaaatgaaccaagtaggcaaagagcggggaatgtaacagtgaagcacaccaactggcaatgagagtgagggggccctatgctggaattggccaagtttctgactctggctctaaagaacactggcttctctgctcctcatcacctctctcccccgacttctccctcctctattccaatctaggggaaaatgtgatttttagagactttgagttttatatttaaaaatttttgaacatgtggggaaaatacatgttttcatgtattccatgtttgctgttctgatcctttaggatttcacctccaggggaactctagtttttccttgattgtcttccctgccaccgtgatagcaaagggggctccttttatgggcccttatagtgcaatccccagggaaggaatgcaaatgacatattcacatcacatagcttagaaagggggacatttccttacctaacagacaggggcaatccgagtgggggtgaatgactctgaataaggtgttactccctttactcca

SEQ ID NO: 35367 - DNA, 1034 bp, Homo sapiens
tactgtagaaagatttttttaaaacaaagaacaggagatggaatcactgcttcccagaagtcagtgttctgaaaggggcagtagaccaaatatgatcatgagcacttaccaagaatacagggcttgtaaacagatgaggccagtgggagtttgggcagcatcggcgggagggagtttcagttcccagggcagtccacagcatcaccatctgcagtgttttagaagtgctgcacacctcatcctgaatgatctcagtgacaagcccctccctggccagtcctggtagactgctaaatttgagccccataatactatttcataatgctacttcttataataataataacaacaacagcaacaataataatcctaatagctatcattttggggatgctcactctatgccaggtactatactaggtacttcccatacactgtctcacttgaaacctctaaccacccttcgagatagttattttaacctcatttgagtcagatgtggaaactgaggggggttagggtaagatcatctgcttatatagctggtgggtggtacagtgaggatttaaactcaggtctctaatttcaaagcccacgtcctttccatcacaccacccagccctctagatgtacctatgagtggcgtgttagctatctgatgcttgctcagcctgagtgatggagcaggaacaagaggggccaagtgcttgcatgtgtcagcttcattctagctaagctctacctgcagttgtcacctacagctcaatggcaaggagacatgaaaaatcccacatattgtacagtggcacctcacagtatattgaatccttgtcactgcgcttcctaatgacagctcttagcattagaagcttttaattccatagtttcctattaatttcaaactaaaaaataccttataatagagatggctctaaagagattaattttacccattaaaaatcaactcacatgccctcagtgctcctgaaaggggaattccaaagtaatgaggggcacactttctgttgttctgg

SEQ ID NO: 35368 - DNA, 1140 bp, Homo sapiens
ttatctagggttccaatatatgcagaaaactttctcacgatacttagcaagcaaatgtttcaggacatttgaggtccttaagttaagcatgtttgtgttagtttttaatgtttttaaatagcaaactgaaagcacataacctcagagtatgtcagctgactattagcagtcaatggcaagactccaaatttcttatttccaaaagtacttctgaattgaatgaatgctaattaaatattaaatagagtaccatcatcaatgcttattaaaagtccactgtatatcttgccatttacagacatttgtgtacaaaggcaaatcaaggaaactatttcttacattgtttatatgtacttaattatgggtctagttgcagttacacagctgaactatgacaagaacctgtgcactaagctaaaagaatatagctttctggtagacataggataaagagcacatccctgattctagtctggattcctgttccagttctctcaccaaaagctggaacaaatcacttaattgccataggcctcatttcctcatccatacaatgagaagatggacaaaatgacacttgagattccttccagtattaagtttctgtgagtctgtgactgatatttctgctctatgaaataacaagtttccctattatgtgcgcaaaggaaataagttcttgaaaggaatagttatataaataatgttaacatattacagaaaaggaaatatgtctatagcttcttcctaaagaggttaaaaaataccttcagaccctccaaactgtcttaggagaaacataatcttaaaaggatcttgttttccatttgattggaagtttcttaggaatgttaaagaattacctacaacttcggctaaaaatctcatttaataacatttgagtcattttgtcaagaggaaattgatttgaaatacaaaagtttgcatttctggtattattttccacacaaagcctattctacttggtacataaagaatcttatcttaataaaactactctacaattggtctaaaagattaaagctcttaaccctgtaatataatgttacctaaacaatcttgaatattagcaagtcagtaattgttgccttattgtgcataaaaataaatgaaagcata

SEQ ID NO: 35369 - DNA, 1003 bp, Homo sapiens
ttagctttgtgggcccactaatggcattattgtccacatcagcagtctgtacaattaagttttatgcttatagtatcatttgatatttatcaaagatgtgaaaatcaaaattgaatatgattgattgctatgagatatgttaatattgggattcctaggctatgttatggaataaagcattcgctgtaataacaaagataaggcctctaacattactcattttatgttctatcagtaatcaggccttaggagtaagcgtcatttgtctgctggagatccctcatgttaaaggaatcacaaggtgaaagttcactgaatcatcatttatgatagtaggatctaccagtcaatatcaccagtaaagaaatattcaaagggagataatccatctgttttatcagcgtgtttgcttctatttgccttgacctctgatatttaaaaatgaagatgttttatgtttacatatatttgtccaaaaagactaatgataatgttaaccaatagttcctgagtgtttactaaatgccagattctgtagaatgcaattaatatgtataaatttatttaatcctcacaataacactaacttgtggagaagctgttgttatcactgttttactgaggaagctgaggctcagagaggttagataacatgtttagggtcacacagatggttaagtggtagagcaagatttgaacccagggtgtctggctccagggtccatactccttatacctgctggaggaatatacaagagatgtagcccctgtcctcagtggcttgctttctcatttttgtgatactaatcatgaataggaagttataatagaagacagactagtaagtaactgaataagtgcccctgataggtgttgcaggtcatcaagtaaaaaggaagattaatacaggctgggtagctctcaaaataatttgtcattatttacttaaaactgagatgcctaggaaaactttaaagttcctaaacaccgaatgttaatacca

SEQ ID NO: 35370 - DNA, 1049 bp, Homo sapiens
atgattaaatatgagtctatgttggtaggtccctttggtttagggacatattgccttacttatctcactagtatctgaaggtactacaatattatatgacagaatgtaaaagcattttaatacacaattttggttataagacattaataaattacgtgaaacctatttttaaaaaacaagctaaagaagtaaataatgatgtgtgtttgaatgacacacttaaaataattggaattaaactgtcttagaatcttaaaggtatcatctttggctatctgagaaaatcagcttatttagaaaatcagcttatgtattattctacagtgatcctagataaatgaagttttcccacatatatttttccataaatatcaatttttaaaggataaatgaagtttttaaaggaatagagaagtttaggaagtcctttggaatctcttctaattcaatctggttgaaattttaaaaaatttgtttgtataagaaatacttattgagtatttactgtgtgcctggaactaagctagacattggaaatggagtggtgaacagccagatatgatccttttccaggtgaaatttacattcaaatagagagggaaacagacaacagatataataattacattataattaagtgctattcaggaaataagcagagtaagtaagaacaatagatagttcaattttgttctagttcttctcccccaactgctccccatttctcctcctgttctaagataatttttgtatcagagaattcagcctttaaatgttttgcttaaatcatccatataaaattgtgtaacacagataaagaatgtataaatccttaaaaatgtattaatcctttgcttaaatcctccatataaaaatgtgagtcattgacagattagctgaagtcaaaaattggctgatgtttatgttgatatacataaaattttaacttaggtcatggtaggcaggctaagctagaagaacatcattttaataacaaactataacaataacaagcttagtaggcatatttgtgtgctttataaatgtta

SEQ ID NO: 35371 - DNA, 1047 bp, Homo sapiens
aagtttgtgatttttgtagcctaacgtagatatgttgtcctaatccagagtcacaaagatgttctttaagtgttctgaaagttttatagatttagttcttatgtttaggtctatgatccattccaagttgctttgtgtgtgtagtgtgaataagcatcagagtttttcgttttttttttttgtgtgtggatgtccagttaccacctattgaaaagattattctttccacattgaattactctagcacctttgccaaaaatcaatttaccatctctatatagatctgtttctgaactttctcttctcttctgttgatccgtatatctgtccttaagccagtaccacattatcttgattagcataactttatcgtgaaatataaaatgtgagtcttccaacttttctaagaataattccctgaataaataaataaataaagtttatttttaaaataaattgtagtcatttgtcaatttctactaaaaatcctgtagggattttgactgagattacattgagtctataaatcaatgtggagaaatttgacaccttaatatcaaggattctaatccatatctctctatttaagtcttttagaatttatcttatcagtgttttataacctttagcatacacagtctacacgtattttgttagctttattttatatttcatgttctttaaactgtttgtgaaaaatatttttattaatttcaatttaaaattattccttccttgtatatagaaatacattgatttttcaatatagaccttgcattcttgaattttgataaactttcctattttgtagtttttttcagaagggaggttttctaggatgatgtaatttgtgaataaaggcaggtttattcctttccaatctatttgcattttctttctttttctttcagtattacatggctaacactttcaggctgttcaaaacaaaaatcagatcagataagtaaagagagttttaaagtttactgttgagtaaaatagtaaatacagattgttacacacaagccctcaaaatcaaaagtggtt

SEQ ID NO: 35372 - DNA, 1060 bp, Homo sapiens
tctgtgagccattctggcaaattattgaactcaaagaggacattgtgggaacccttgatttgttacagcctgatgggttcttcttacccactgcccagaaaagccaatacagtgagaacagcaggagttgcagtagggaaagtttaggtgggttcatgcctgtaatcccagcactttgggaggccgaggtgggtggatcacttgaggtcaggagtttgagactagcctggccaacatggtgaaaccccgtctctactaaaaatacaaaaattagctgggaatggtgatgtgtgcctgtaatcccagctgctcaggaggctgaggcagaagaatcgcctgaacttgggaggcagaggttgcagtgagctgagattgtaccactgcactccagcctgggcaacagagtgagactccgtctcaaaaaaaaaaaaaaagaaaagtgtaattatcacaaggcaggcaagtggaagaatgggacatgtttttcgaatccacctccctgagaactcagaggctagttttaaaagataatttggtggactggtggctagggaatggatactgctgattggttggggatgaaatcatagggatgtcaaaaacgatcttcctgtgctgagtcaactttctgggtgggagtcatagaagtatttgagtctgaaaaatgtctcaaagaccaatcttaggttttacaatactgatgttatctataggagcaattggggcagttatacatcttgtgacctctggcaccatgattcctgagcagtagggcattatagaaaaacaagctagggtacaatgactgggtatcatttaactgtgcctacattttagcagaattcaggctcctcccataatcctaaccttgtggcctttccttagttttacagtggctgttttggtccctgaacaaggagggggttcatttcaggaagggactattaccatccgtgctttaaagttaaactataaactaaaatttctcccacagttagcttaccctatgcctgggtccgtcagtttgtgaggttagaagcaagatggagtgagctatgtt

SEQ ID NO: 35373 - DNA, 1058 bp, Homo sapiens
tagagggccacaaagaaatgatttaggatggcgttggcttttctcatttggatgagtgggtgtgaaggcaattcagctatggaaaaacaagtttggagccagagagtaacagagacaaggatgattaattggaattatatctcccaatcaaagtcttcccaaagactctttctttggaaagagtcatctggattctgagcttcactggtccctttgccattactctaggacatcttccactgaactactagagtgaactcccaaaacacaaattagacctggactggcttcaccattgcctaagattcatgtccagactgtgtcatatggtctaacaagtcctcacggttttgctctttctcaattctacacatacaccccactgtgcaccagccacaaaactcacccatcccaaaatatatgatgccttctgacaacattttttttttagtgtgtttctctgggtaggaagactttctaattccctttccatccagaaaacagtcctcaagatgcaaatctattgttatttcttctgtgaagccttttctgatttctgaggcgaaaatagttactttctcttctgtattctcttagcacttattcatgtgccgttcttgccccagggcttaatttgcttaggagccactctcccacactggattatgagtccctaaaggacagggatctcttattcatctctcttcccagtgctgtaactggcatgtaatagccacccgataattatttgttgaattaataaaagagcaagcagacatattgaattaataatgcctaacttaacaaacagaacatatttactgtggttaaaaacatgtatcctagaaaaacctctggaaggatacagagaaattgataacagtggtttgccttgggggaaggaaactaggtggttagaggataggagagggggagagagagagccttttcaccagatgtcctatagtacatcttgaattttgaaccacatgcatatattatagcattatagacccaaaactagtctaatttaatatttgtgcatgtggcaaaacaaa

SEQ ID NO: 35374 - DNA, 1074 bp, Homo sapiens
tgggtggctgaagcaggtggatcgcttgagcccaggagtttgagaccagcctgggcaacatagcgaaaccccgtctctacaaaaattagctggaaatggtggtgtgcgcctgtcatcccagctactcaggaggcctaggcaggaggatcagttgagcctaggaggtctaggctgcagtgagccatgatcacaccactacatcccatcctgggcaacagagcgagagcctgtctcagaaaacaaacaaaaaacaacaacaacaacaaaaaagaaaaaacaactaatggagggcatttaatttttaagtggaatgttcaaaaccaaaatgtatgctctctaaaataatgagaagtataaatatatagtataaaattggagtcagatctataaatagaataaaaacctatataactgagcataattttggctaattataaaaatttcctccttaaaagaaattgcaaagagagcatttcagatatacctattcttatttctcaaaatgttcacagataacttattgattcttatttctcaaaattctgtaacagttggtgtttgtacgtaattaatgccttatagaaagttgtattcagcaaatcaaagctacctttacctgggttgtggcttctcggaaagtaaataatctaaatttctccttaaataatacacagggaataaatataatacatgttccgcataaatatataaatatactttattatacataactatacagtgcatataaaatgaaagcataaacaaaccaaaattattcagttataccacagatgaccactatattatatgtatttccttacaatcctgtgtgtgtatgtgtgtgtactaacacattgcatataagtgagaccatgtttcatattacaattattttctgctattttgcttagcatatcgtaagcattttcgatatgaaaaaaattgtattaattgaaaatcttaaatcctatgtcatgttttacaacatgtttttctacttttaaccattctagttggcattattggttttccctcatataacttctataatgtgcaaatatgcatattatagaa

SEQ ID NO: 35375 - DNA, 1047 bp, Homo sapiens
ttggataacatctactgtaaggattcacccccagatatactgaaggataatcaatcatttgattacataggtaaggggaggtatgtggttttgttgatacagtcattggggaaaaacttaccatttgctaccggctgtgtacccaacagtaaaagtagaagtctgggttttctctccctggtgaataaattatgtatgtttaaatctgttttgatcttaccctttttatgcagtaacgcacttggtagatgataatcacatgtatgaaatacctctactgtcaggagagaatactaagatttcaagcagtgttactgcacattaatgtaatgtcataacttcatgctagccttacatccatttctttctcactgacctacaacttacctagatgttgaggcaaacaacagggacaaagtactagagattaaaaaaagagagaagttaaaacacacatacacagaggctgctctgcaactttagttactttgcttatttttctcccacgttttgtaattttggtgaattgtaatatgtagtatgtaaggacatcattttgcagatgaggatacaaggccaaagatgtcttgctcaaagttatgaagctatttgatagcagaactgagagaactttgagtgatgaaaatgtgtgattatttttgtactctccccacaccacacacacacactctgtctctctctctctctcattctctctccctctctctctctctgtctctccactatgctccttgcttagttatagcaacagatctcatgatgcttgtattagagaattttcatgataaatttatggttatacgaataatccagtcatttgtagatatgcctctaatatgatattggttttctctctcatgcccatgtaatttgtaaagcaatgtttgacttttgtcacagatattttgctatgtctttaatttactggtttgtggcagtgaacaacaaaaagatttctacgatacttgttaaggcaggcaggatgattcttccccccattcccagcttttctgagatataatggat

SEQ ID NO: 35376 - DNA, 1075 bp, Homo sapiens
ggtttactatggtgactttgtaaaaatggatttgaggagatgggttaggagactattctagtagtctgaaaaaatatcatgacctgaaccagggtgtaatttggaaatgtagttaactgatttaaaacgtcttttagagatatttctaaaatgttgagatttttttctattaatgtattagtatcagttgcttgaaaaattaaaggatatctagtttgtcttttctatccaagtacttattaatcaaaagtcttacatgttatgaatagcattcccattagtttcagtcttaccacctgaaatgtcttggaaattcccatattcagcaacagaaagtcagtacacagatgacttcaaaagggccagcctgcaagggcactaacttgggagaaaacagacctccttctatactttgtaattaggtacattggcttgggcaattaatctttctcaacctcaatattctcatctataaaatggagatatgccggaattccctggcctgtagaattagtgaggataaatgaggcactgagcataaagcacctgggacaatactagctcactttctaagcaccatttgtttttatttataataaggtactttcagaaaagaaaactatattgtatttggtttactctgccacttgcataacaggacacttgttttgcatatttactgaattttatgtttatctttcttttctttttcccccaaatgttttcctgcagccttataacattaccttgggagcggtaaactgtagtgttatttgataccaacaatatagaccataaacctttcttttacacttttctggagactcaaagaaatttagcaagtaatgaaaaaattgtctaatgggaaatggaagtcatgaaattaactgtgatactgtttgtcatacattaacatcaacaacaaaacatcaaatgtgttataaacactaaggaaagtagttattatgaatttttttttccccaagccaccaccagaacctttgcagaaaggagagaattctcatttaagaaggtttgcttagtcgtcagtccaggaagtgtctttgtaggtatt

SEQ ID NO: 35377 - DNA, 1028 bp, Homo sapiens
tatgatgataaaaatcctaacttctatcaggaacatgtaagaactatgtggtctgatacattctaaaaattacatctaggttacaaaatgttcaaattattagctttcttttttttcccccctttaaaaacccatggtgagggcaaggtagaggaaataaacacatttggtcaaatgttgggtgtagttctaaggaaaccaacttataatcttttcagatgatatttaagttgaatgggtcagaaaataaaaaaaagagagaggactatatagggaagttggaccaaaatcatagattagcagaagcatttcaatgatcagttcattcaagcatgaattttttctttttacagctctctcctggtaaatgatctgaatgaacgatgcttgaaaaatgattcttgcactctgtgtgtgtgtgtgtgtgcgtgtgtgtaaattgtggtttagcttattttatgtgatccacttagtgtttttgtagatgttttctttttctaagatcaaacttggctaatggaaatactcttcttggtatgttattactgtgttttaaggaaattacaaattacaaattaacttattagccaggtactctaatggattaattataagcatagctataagtgtgttgaaaatgcaagcctttttttcttgagattctaagactactacttttaaaacctcagtgattaaacagtttcatataatttaaatttagcaaaaaagaacggagatatggcattttatttttttttttattttttatttgttattatactttaagttctagggtacatgtgcacattgtgcaggttagttacatatgtatacatgtgccatgctggtgcgctgcatccactaactcgtcatctagcattaggtatatctcccaatgctacccctcccccctccccccaccccaccacagcccccagagtgtgatattccccttcctgtgtccatgtgatctcattgttcaattcccacctatgagtgagaatatgcggtgtttggttttttgttct

SEQ ID NO: 35378 - DNA, 1066 bp, Homo sapiens
aattacaagttggattgcttcaaaaaacctggttgtgtagctgagagaggctttcctttactcttaagaagagccaagtgtaatgccttggtagatgaaagtggaaatttgagatgaaagatagccctctatgttgaacattgagttaattgaggtataacatgtgtctttacaaaattgatacatagcacaattaggtataatctggtagccaggcaaagctttctcctgtaagctagcaggctgtagggtgtcctgcaaaggcaaagtgtatgagagcatttgtccctttccaactgcttgctatggatagatgttacccaggtcccttaagtgaggttggctgatctacagaggagtagggaaagtacaccttctcctctgggtcttctgcaagccttgcgactaaagagtactttccaattgtcagccacccctactgggtcttctcacttattacccttttattagtatttgggcattccagtgactaagtgataaacaattttaagaaatagattggttaattctgaataataagtgtttaatagtctccccaacttattatatctaagcatttaaaaaattttctgtctgattttatatgttagaattgttaaatggttgatatagtttgatgtgatgatgtgttgtgatgtaaatatacctttggaagattgaaatgttcataatttataacttaggagagtgactaaggcagatgcattctctccacataggttgagcatttcgaatctgaaaataggagatctgaaatactccaaaatccaaaactttttgagcgccaatgtgacgcccaagggaaatgctcactggagtgttttggattcagatttttcaggtttaagattttcacctattaagtatgatgcaaatattccaaaattttaaaaagtgtaaaatccaaaacatttcttttccaggcattttggatgtagcatgttcagtctgtactttattgttttccctaaaatactggatttttattgacttgtctaatattcagggaaaaagtaagctaccctagcatgtaaattattttccg

SEQ ID NO: 35379 - DNA, 1031 bp, Homo sapiens
ccatctaattctccacatgcattgaagtttataagctttgaagattctcctaaatttatgcttttatttctggttattttaagtcagttaaatttgattataattttttccttcaggtaacattctcagaggcaaatattacaaataaattgtgaatgtaaattaaaaacattacatagattttcatcattgccgaaagtatgcccctaagtacatttcctccttttttattgttttcttgtgctttgatattatgttttaaaatcattttatcattttgcttccaaaaaattcatcaagatccatgtttattagtttgaattttaatttctaaatgagatggtagatcataagtgctgggaagtgattgcttgaaattaacagagcattacactagcattatacttatgcttatgaggagacctaaaatattttgtttgcatttttgtgcacagataacgtgtccctgctctagactccccccaaaaaacaaacaacacaataaagactctggaaaccttagaatggtctttgacctgtaacaaaattttgactattagtgtaccacatttaattaataaatgtatttttattcttcttttgttccacatgtcataattcaagtttattcagatgaacacttcttttaagtgaatcctgttctaacaaaaaatattatctaatataaataatcagtgaataatttcagttttgaaatgtttttcaaactggagttttcagttattttatgcaggtgtgccaggccttaagcctgatctatgaaatgaaatgaagccaacttggacatgaatttttactttacaaaatagttccaaataaaaagcatcagaagagcagacttttaaactcagatacatctgagttcaaaatatgacttgattctctgtctgagcaaaatgtgtaacttatgacatgttagattccttatccaagaaatggggataatacctatcaaaaagaaaaggcaaataacatatgtaacatttgttgtggaaggtgaaactttacat

SEQ ID NO: 35380 - DNA, 1050 bp, Homo sapiens
gatgaaatacactaaatatttctctgaatggtgatattatgggttatttcattttttcttaacacttttattttctgttttctactgtctgttttcataaatagataattaaatagttaaaatggttgcctattggtaaagatacctgttgatcatcaagaaatgtggttcagcattttttgtaaaagaaagtatctttgaattataaggttttagtggttgactagatcatttcaatgagtttaaaaacctgagtttgatgctgtggagtataaagaaacagaatgatctctgccttccaggtatataaaacttggtgggggaatcaagataaaactctactgaaaatcctacaaataaaatatctgaattttagagaacctacctctatagtcaccttaaaatagaggatggaaatctagtttatgttcctagcacatatttttgttttttatcagttacctgataactggctagcactgatcaatataattaattattttgatcattttctctaattcgttgaggcctggcttggcccctctgtgacatgtaacacccctttcctctgttttgatgaaaacttgaaacacattcacttagaggtagtggtcccctgctagttcaaatgtgatagctaataaagaacctttttattttgtagctaagggtattgattcagccacatgttgggttgcctcctgcttcagcacaatagccggaggaggcaggtgggagggagtgctcttctaagggtgtgtgtagtttctgcttttggtgtgctctgaaaatctaatctaaaaactgttgcttttttaacttccaggaaggttttactgagagcatgctaacaggttatcgggactttctttacgttaacttgctaatatatattattggaagaaaataatattagtgttcaaagtcaggattgaacatcattccagtagtaaatagtgatgggacaaggatattgatatgtgccattttacagtacttcaataagactaaaataattaaaagaactcctaactaatgtaaaaatggaat

SEQ ID NO: 35381 - DNA, 1029 bp, Homo sapiens
atgtggtaaatatttatgcaagatggctagccagacaaaaagaaaaaaaaaaaggaaaaacaaccgtgaaatagagaatgcagggtgacccatgtaaacaggctagagatacatttgaaaaagatgagggttaaagagtgtgtagatgttggcaggtaaagagatagcatcctctagggaggatattatcaggagtcagagtaatcttggtaaatgggagaatatgtaagaaatgaacatgtagaagagtggaaagccagcttttaggtcatacttccacttgctcatcatatggccttgagcaagttacctatcctctctaagaatgagtttccttccacctctgtaaaatagtgacactaacagtccttcctcctatgctattgggaaattttctgagctaatctatgtaaagtactggcatgtagagagtgctcaatacaaatcttagttcttattattgttgattgttattagtttcaattaaaattgaaatagaggaataggaacaaataggaactacaatgggtaaataattactcatatgagagtatgacctaagagattccattttgaaatgaattaacaatgtagtattaataaattcaacctctaacattattgtagagagaggaaattcttctagttctttgtgagaacttaattgagaactgtattctctgaacttcaaaaatagagattatcatgaagatatcttagtgatttttaaactctttttttagagcaatacaaatgaagattaacatttacatatatcacatgctccatggtggtttgattgaaaagcattgtgtgggtatgtgtgtgtgggcagtaaagcaaatagcacaagttttgtttttgtgatattcataaaaatcaatactcagcatagaaatatgactcagtaagaattgcttattatggactataacatagataagataggctgcacagtgatgtactgtgatggttttcatctccgcctcttttctcacttgtgaacaccatcagaatgtaaacgagagt

SEQ ID NO: 35382 - DNA, 1038 bp, Homo sapiens
aaattgagagaaaaatattagcttcttgattacatttaaatatagccattaacttggatatctttgatgacattccaacatttattaatgaaaaccgaggaaaaataaaagcatgttaaatggatagcgtcttcattttaaacattagggtctctggttttaaacttgtgaagtataggatttgtttttagttttaagagttttattttgttccttatatagtaaggtggtgatgaagttaaaatgtaattacatataagcacttgttaatttatgctctagaaacttctggatttatgattgttagtggtatggctaaggccaaaatttttatgtagaaaagtggtggaaattgtttgtattttgtgctagaaatagaaaactgtagtttaaggaaggaaacaggacaaaaaaaagtaatttgaatgcttaaaaagttaataccttagggagggagtatgagataatagctggccatctggattcataactgtggctatgacttaatttcatttctgatgaatacttcattggtatgtaacgaatattcaccttatatattaggagtttttgagataaatatatgaaaactctgatatgaaactgaaatttggctcgtaagtggcaaaattgactttagatattctggcagggagaggttatatgggcaagtcttggaaaatggggaggtgggggatgatcagagttggtatttacacttagcattgaaaatcttgcagggagtgggtagtgggtacttactggaggagggagctctgtgagcaaaatcctggagatggggagaaaacactgagtgtggttgagccgcgtggtgggctgtgatgtcggggttgggggtgagaaaacctggaagaggctagttggaactagaagggagttgaatttgaaatttacactaagaaatttgtacttaacttggtaggtagtgagttgttatggaaatattggagcaggacatggcaggagaggaagtgcacttggggaaaccttattgggcagtgtgtttgtagggtggat

SEQ ID NO: 35383 - DNA, 1020 bp, Homo sapiens
gccaatattccctgaccaattgtcatggtctctcaagtttttctattaacaccccatacatgaagctaatttattgttccgcttgagttcctcaaagcatatcaattatcaaaatttttgttttcagttcaattaacttttgaactggaggatgtctgagtagttaagtaaaccatctgggttttacagtgcataagcttgaatccaatttgtggctttcctggggaaaaaaatgccatattttatgataatattacataagtttagaattttaataactcatctgcagcaattatggagcagagtaagttataattttcctttctaaatctaataattaaaggttagtctttctaacagaaggtgacactggttctacagaacatagtttgaacacaggaattctgagcattgcctctgctttccaaaagtgtctggagatgggtcagttccttttctgaattattgcatgaaatagcatcaccatcttcaagacaactttaaaattacatacacaatagttggtgctgaagctatagatagaacctctaagcccttcagcacatatttggtaagaacatttatacttacagacagtaaatacttctctgctaaaatatatttttcagtagcttgttttacaataattcattgatattataacatggtcagaaatttggggtaattggcacagctacaagttagttgaggaaatgctggcaaggctatgaagaactttatgggtcttccaacgtttaagttgtgagctatgtgcttaacactagaagatccatgctcagggtaaccactttcttggcttaagtgtcatacaatactcagatttgaaagagtgaaatatatacacagccttaatactaaaggtttggttatacccatgataagggaagatattaattacaaaggaaaagaaattattatattggaaatttactagtttttataaatttcttctctgcctttgagttacccattttaactcaagatccaaattggtctagc

SEQ ID NO: 35384 - DNA, 1041 bp, Homo sapiens
taactgtcagaactatgaagctgaaaagataatctattctgaaccctgttttagggtttatgatttgcacaaggttgcatcaggtagttcctgattcctgatatacttcctctctaccgaaagtccttctccctttcagagggaaacagcctgcaaaacctctcttcaattataaaataagtatgcctgaatctttaaaaccattttgagaattgaacaaagtattcttaggatagattgatttttgttattcatctccttctcagagtatttttaaattgaaaccatggaaatattaaatattaataaaacttctttttaaaccctcaatccaatctttaagaaaatatttcagccaaatgcatttaactaaaacatttatctgcggatagctttctttatttttattcaaactttcaattgattgattttaagtgatggatgaaacactaaatgttccctgacttagagctttccctttctccatcataagttgacatttttgtagatcctttgtgctgtagcattcaaaactgcctttttaagaagtaacaaaaaaatagtatttgctacagtcagcagatggttgtcacattttgttttcagtgcgctttaccacttaattttgttttgttgcagcatcagaggttgccagtcaagcatctgctatagcttatggcctaggactggagccactgctgatggcacagttcagagcggcactaatctaaaataaatgtttaataagctagccataaaagcacctggatttttgttctttaaatttcacaaaactgcatgaaagatttagagattggaaacaattctacataaggtttgacttatgcatttttatgtagtttagtatataaaaaataatgccttttttctttatcttttgtgaattccagctcatcaaggtgctgtacaagaccagccataccagctgccagtggaaatcgatcctctcataggtctgtcacttccttctctctttgcgattcattaagctctgtatggtggccctgaagtgtagattac

SEQ ID NO: 35385 - DNA, 1050 bp, Homo sapiens
gaggcatttcttccttctttattttagctgtgttaagtggggaatacaccaactcccacatgaaataataatacagtacagcattttatttagtgctttgtatgtgctaggtactgtgctaagcactttatatgcattatcttatttcattttccaaacaattatgtgaactaggtattgttactatctctttgtagatgggaaacggagataagctaattgcctaaagtcaaacagcagataagtgtcacagtcaggattagcactctgagccatctgacatgataggccaagtgctgaagcaataagttctttgccacctccctccccttttaatcagggaggcatgtgggctgccgggcaggaaccacagaaggcaactgtcaaggagacaggtctggcttgtacagtgcactcttgttcaggctgtactcttgtccaggctgcactcttgtccaggctggagtgcagtggtgcaatgatagctcactgctgcctcgaactcctggcctcaagctgttctcctacttcagcctcctaagtatctgggacttgaggcacacaccagcacacccagccaattttctttattttttgtagagacagggtcttactatgtaggccgttcttgaactcctggcctcaagcgatcctcctgtcttggtttgggattacaggtgtgagccatcatgcccatccttaccagctgttcttcaaaaagatataaagttctcattcataaactaagtccataagttcatatatcataaattagcagtgttgctacctccttctttgtgactacctttagccttcaggttcccattttatgatttttttctcaagcttgttcttgatgtttaatcataaattaatttcactctatcagaaaatatttgagatgatgttctgaaaatgatcctagtccctacctcacttccttttggctccaatttttattcttattaatttgagggttttcctcatccttttagcctgggagttaagcatactgactgttacgggagtgtcgaagtagcctttatatgt

SEQ ID NO: 35386 - DNA, 1050 bp, Homo sapiens
tgtggtttggatttatcaagaaaatggatggcttaggctggaaaagtgtattctctggttctgtacttttcaagaagatagacagcttaggccaaagacctgtaactcttttttatataagagttgcagaaacatttcaactgctggagaaggaaacttcctttatttaatcggtgtgataaccaaataaattgatcttacactaatgatgtaagctaaagtattacatcatgaagaattacccattagaatgccatgtaatggaacagaacttggtgtgtttccaagtgcttaaaaagataagaagcacttttctgaataaatattgatgttagttgcagatactccgttccttctcatccactggcaaaaaaaaaaaaaaaaaaaaaaatacccagacaaaaatggaagtccagatctctgtattcacaatggattgtctcacatttgttgccgacaacactgacattatgtaccataggaatttgttggtgaatccattcattattgatcctgccactaacaaatttagtaagactgctggtgcctaagagtgagactattagacatgttcatggttagtctctggagttttgattcctttctttttttttttttttttttttgagacagagtcttgctctgtcacccaggctggagtgcagtggcgtgatcctggctcactgcagcctcagcctcccaaaaagttgggattacaagcatgtgccaccacgcctggctaatttttgtatttttagtagagatggggtttcgccatgtgttggccaggctggcctcgaactcctggcctcaagcaatctgcccacctcagcctcctgattcctctcttgattcctctcttgattcaggtcataacaaagcaaaactctgaacaatattaacctaatctcctatggagtatttatttatttatttatttatttatttagagactgagtctcactctgttgttcaggctggagtgcagtggtacaaccatggctcactgcatccccaacctcctgggctcaagcaatcctcccacctcag

SEQ ID NO: 35387 - DNA, 1033 bp, Homo sapiens
tcccatgcttatttagatctgttccattcaccatctcacatatttctattccaccaacagaatgtctgtggagaaaaactcttgccaggatctcatgatcccttattttcttctttctactttttttctgtgctagagaagatactaaaatatatatgtaattatttttgtaatgctcactgtgcaacatattttcaatagacaaaatttatatttcgctttgtttaatgggattttgttcattaaactttagatttttagaaggataataagagctgtcgtgcgttgaacacttaataatatgcaccagacattgttgtaagccatttatggattaactcatctaggtctcacaataagtttatgaggtaagtgctattattactctcaacctgtagattagaaacttgaggcatagagagtttaggtaacttgtgagtttaggtaacttgtcacagcaatcataaatattgaactgggattccagtgcaagaaacctgtgttgttatactctacattatacttcctatgataaaattatactactgcatatgttttaataagttttagttgtacaaatgagaccatacctattttaagaatacattcttaggcctggcatggtggcacatatctataatcccagtgctttgggaggccaagggaggaggattgcttgagcctgggagtttgaagctagcttggacaacatagtaagaccccatctctacaaaaagtaaaaatattagctgggcatggtgtcatgtgcctgtagtcccagctacttgggagcctgaggcagaaggatgcttgagcctgggaggctgaggctgcagcaaaccctgattgtgtcactgcactccagaccaggcaacagagcaagaccctgtcttcaaaaaagaaaaaaatgaatacctttttgtatcgtacattgtatgaaaatatgcacttaatgagaggaaaattactttcatttttcacttttcatcagaaaaaatatgaaaatttattttattttagaattcggagaaaa

SEQ ID NO: 35388 - DNA, 1034 bp, Homo sapiens
tgggtttagttcagtgcatagaattggtgactattaaaaggagaatcatacagcctggctgcaaaggttgttcatatcagtggaaattataccttaataaagaaaactaaagcatatgtgtggtcacaaccaatccttgtcattatgccatgaaagccttgggatttgtgatcaaagcaatgagcttatcctgaactgtggtgtaacctctggttgaacctttcaaatttttatcttaggagatgatacactaaatgttggccatgttacctgcctctaagacccatctacctaattaagtgatagagattaaaattattttgagcaagccagaagaaaacgtgaattgtaaatgtatctgtcttctgtcagtgttgtttacttatcattttccactgatgttttaaagaattgctgaacatgtgttttttatccagagctgactgttctgttctgatgaatataaaacatacttcactttgtaaatgtgcattaaaagtattagaaaggcataatctttgactctgttactacatttcatctgtcaaaagagataattttgaactgtaatatttggtattgtatcaagatatggttcttagaaagatgcttttagtattaaaatggaattctactgtataacttaaatgccattgtcatccacagtaagattttggctgtattatgcttatttattttgttacatattggtatatatcagttgagttcagcatgtttatttcgtattaagagagtattgcactctcatcaccgacttattcatgcagattttcttgtgatgagactgcaatatagtttaagtacagcatgtcctcaaataacgtcatttcattcaatgttttgttatatcgctggtgagaaaaaaaacatcaattcatggccggggccactttctgtgtggtgtttgcatgttcttcccatgtctgtgtgggctttttccaggtactctggtttcttcccacatcccaaagatgtgcacataaggtgaactggtgtgtctacctggtacccat

SEQ ID NO: 35389 - DNA, 1031 bp, Homo sapiens
atcttcatttcttcaaagctattcttacagtcttccccctatcgtaaatggtttcctatttgagtataagctgaaatctttgcaacgtaagaccctacactacctaactcctttccaaaatcctattacatcttgagctcttctgtttgccaccccgttcactctgttctagctaaacagggtctgcttggtgtccttcaagtacttctgacctcagcacctttgattttccttttcctttcacctgaggcatttgttttagttatctttaagaactcattcttcatgcctttcaggtttttgctcaaatgtcaccttttcagtaaggccttctctctcctccctatttaaaattgcccccatcacctcatgcacttttacttactccctgacttcatatttctttatgtcactcaccatctgacatacttatctcatgcttattgatttgtttattatgtcatatcccacttgaccattagctccatgagatcctaaatttttgactgttttcctcattggtttatccctacaatctacaaaggtgtttggagcatggtaggcactaaattaaatatgtattgaattaataatgtgatgaaatgaggaagagggttctgagcaagggaagtgacatgaacaaagctcagaaaagacgtttggcacattgcttattgatctgttaattggtcttatgtttcgggtgtgtagaaaacatagaaacagagattctgaaaggcagttgagtctaatatgaaggcctttggtaacagtctaaaaatgcttgagttaattatataagccagttcagcaagtaatagccagataatagatatgattgactttgcaatctgcctgatctgtgtcacagctattaaagatatgcaaacaaatgagcatttggttgactgtaagggacaggaggcataaagcttttctaagagttagtgaaagagcctgggaaaaatagcgaggtagtttgaggagaaaatggagagtgtatgcttattctagccagaagggcacagcca

SEQ ID NO: 35390 - DNA, 1049 bp, Homo sapiens
ccatttataagtagagagacctttagcagattacttaattttgaggatcctaggtagcaaactgtgtagctatttaatttatataaccctgaagaaaatttttcatgggtacactgacctttttaaattgaattattacgtgttcaatgtggcatgttagtttaaaatgtgtctgtgcaactctttatgtagaatttaatactaagttcaggaaagtggaagcatatatatttaaggaatatatatgtatatggatgttataaggcatttacaggatttgttgaagttttgcttttaaaacagaattagtccatttattttgtatggctgtgtttcgaaacttacatcttttaagcattagtactctgtatagcagatttggttttctgtagaagttatcttctaatagaagtttttgaatgactctaacagacgttaattctacacttaattcaagcagcctccaaagacattgttttttaacattagtcagaaaatgataaactgaagcaactgaaatggattgtggttaatattactgtcagggtgatgaataatcctgacatataccagcaacacactgccagtcagtaatccttctcaaagttaagtatttattctctaatcatgctaagttactgtgatgtggagtgactatttattattatttataaatgaattgttttatttgcatagcattattaattttatcccataatgctttgtatttgtttggtgctgggtgtacaaactgaggtaggtttagagtagggaatatctactgtgaatttacataggaactattttcaaaacacctaggaaattttttttaagtttaattagtagtagtaactatcctcctgatttggctatttttttttaattatagaaagtgaatttagtagaaggacatttaaaaaacatgtatgcatttgtagcttttaaaatatacttgcatgtatcaacttctgattcttatcttgcctatgattttaaaagttactttgtatgtgaatatgtactatgcttttttacagtggataatgtaa

SEQ ID NO: 35391 - DNA, 1026 bp, Homo sapiens
aaaggaaggaagctctgacatatgctacaacatgaataacccttgaggatgttatgctaggtgaaataagccagtcccaaaaaggcaaatactgtatgattccattcatatgaggtacttagagttgtgaaatttatagagacaaaaagtagaatactggttgccagggcctggggtgagggagagaatgaggagttagtgtttcatgtaataggtatagagtttcaggattgcaagttgaaaaaagttctcaagatggatagtggtgatgattgttcaacaatgtgaatgtatttaatactaccgaactgtacgtttatgttatgtatattttgccaccattaataaaagagaaaccagcaagaaaaaaaaagttagcaaactagaaacaatttgaaaaagtgcttgtgtgtttctgctcttgcttctctgtgatcactttgagaatatgccctaaacattcccaagttaacctgctgatgggttgtgactgacacatggaggacacttgagctgtgacagcttaggtcatccttaacaagctagtcctcagctgacctgccagctgaccacaaacgtatgaaggagtccaactaagagcaacaaagccaggcccagatcagcagaatttcccaattgacccattgaccatgaggaatgataaatggttggtttaaaaaaaattgaaaagaaaaggaaggccttacacctcggtatcatatttgttctaagaccccatagtattatggaatctgtagagctctgtagtctaataaatgaggactgtattagtttgacttgtgtaatgagccatgcagtaggtcaataataaaaactgggcagctctttaatcctcaggctattataccctactctctctctatggtttgaattttgtgtttgcaaaagtaaaaatatcatttttggggggttgattttgttagaatataaaatttgcttcacaaaatgaatgacatatatatgaatacgtgttctagggtcctagaagtattgccttgccttctg

SEQ ID NO: 35392 - DNA, 1042 bp, Homo sapiens
tgggaaaaaagagaagcacatgtagtcaaagtaagctgaagaaagaaaaaaataataaaaataaatgatagagaaaaaaatcagtgtaatgaaaagctgtctcttgacaagattaataaatgtattaatagtaaatatctagcaaagatgcagaaagagaagacacaaattaaaaatattaagaataagggagggaacatcactacagatattaaaagaaaaataaagaaatattatgaacaaatttatgctactaaattagacaacttagatgaaatagatttcttgaaaggcacaagctatcaaatatcactaatgaagaaatggttaatcttaatagttctacaaaggaaattgaattgtagtaaaagaccttacctcagagaaaacttgtagttcagatgaattctatcaaatgtttaatgaagaaataataccatttctacacaaactcttgcaaaaaatagaaaaggaggttaaattgccaaaaacattatatgagaccagcattacctgaacaccaaatgcatacaaaggcctttcaagaaataggaactgcagacatcctgattggaaaggaagaaataaaatagtcattttagcataccttcttgaatgtttatgtggaaagtcccagggaatctatgaggaaaaaaacagcaacaacaacaactgttagaactaataaatgagtttagctgttcatagcatactgggtcagtatataaaactcaattttatccctgtatgctagcaatgaacaatcagaaattgaaattaaaactagtgtttaaatactatcaaaaaataaatacatatagataaatttgaaaatgtatttataagacctactcactgaaagctataaaactgttttggagaattaaaacttaaaaatggagaattgtactatactacgctcatggattggaagactcaatattattaagatgtcagttttctccagaattgatctgaggtccaaagcagctctatccaaaatctgagcaggctttttctttctttctttcttttttaaaga

SEQ ID NO: 35393 - DNA, 1043 bp, Homo sapiens
atcttaaaagtcatttattctattttgtataattggttaaaagaaatatattcctcacaaatgaatcttcctttgtaataacactttatttctgaatctgtaaaattaatgtaaactggattttgctgaatttaccaaggtaattacaccctgtgaggattggtctcggtagccaactggtttccttctttaaataatgtttacttctttcttctaatagcaagattgaagagattagaaatttgagaggaataaaatagagcttatttgtatatggaaagagatgtatgtctgtaacggctttccttgcctacaacctagcataatatagttatataatttcattcagatggaaatagcaggggttttataagattccctagtgtaaaagagaaatcagatataagtatgtgttgcataattggtgttttgtaaaaattgtgaaatatttctatccttacgttcctggatgctggtttttcaagcctgtgccatgatactttgatgatattgtaactctctaaaaggaagactgtttctaaaacagaaacatcagctaaagtgaacctgtagttccttgtatttgttctagagatctgtggttagtttgaatgatgacctaatctgtgtcagaggcaggtaggccgtttatctagcacacagcccattttcccacacacagacactgaggctgaattatttgctatttcaataggtattatagattgaacttgagtccctgataaatggttatcaaagtaatgaatcttttgggctatgaaaaaaaagaacataatggaaaaacactgaaatcaaaatgtgttctcttagtagaaaaaaaaaagccagagcatgtcattgactgcataggaacagcataaaataatattttcttcagttttttttaaatatgcagactatacacaatgccttctgatgctcactccatagctgataatacttcatataagacataaatagaaaaatattattgtctgtaagtctgttttcagtacatatagaattgaaatctattttaacat

SEQ ID NO: 35394 - DNA, 1047 bp, Homo sapiens
atataaatacaaatggatacatagaaaaataaagaataggtgtgtatacatggattggtatatatgcatacatttattagctttgttcaccagggtgtctagaagtaatgacactccagtagcaatgagaatactcaatgcccaggtcttagtttctaataccatgctccaataaaaggaacccaggactccccagagaaatggttgaatctgttgctgaggccaacactacacaagatgagcctggagcatattatagtgccagaacatacataagtgtccgaagaatagaataatgggattaggtcaaagggacacaagagccaaatgaaagagctctcaatagtcaaagtcaaaataatttgaacaacaaaataaataacttagttttggtttataacctaaagtatgaagtaaataggagtccatactgaaataaatagctaaataaattagtaggggagagaagagttaaatctcccttatagaaggagtctaaataatttatgtagatactccccccaaaagaaatggaccattactccccacctgctaagtgtgggctctgcttagtggcttgcttccaaagagtgcaatatggggccgggcgctgtggctcatgtctgtaattctagcactttgggaggccaaggcaggtggatcatttgaggttaggagttggagaccagcctggccaatgtggcaaaaacccatctctactaaaaataacaaaaattagctggttatggtggtatgtgcctgtaattccagctactcagggtgctgagacatgagaatcacttgaacctgggaggtggaggttgcagtgagccaagattgcgccactacactccagcctgggtgacagagtgagactgtctcaaaacaaacaaaaaaacaaagggtacagtatggaacagagcagcaggaaataactaaaataactatacagtggaaacccctgagaaatgctacttcaaccaggtaattaaggctaatatcagtgacaaaacacgttgatagcatgtagctatgatatgatatgat

SEQ ID NO: 35395 - DNA, 1029 bp, Homo sapiens
tgctatgatatcttgtttaacattgtgatattgtacagaaccagagtttgtctgtagtatcatctagctgtagagtaccctgcttggccaaatgaatcactttcatttgtccagtgcaactgaaaatttctcaaaaaaaaaaaaaaaaaaaaaaaaacaactaaccagtaggttaatgcatactaaaggtatgaatgcttaagtattttcttcagtttatagtgatatttctgtgtgaatgcccctgtctttttgtttacaaaatggagaatacaaatttgaaacctagtgaaagatggcaactatcaaagtgttatcttagttttaaagaagcttgggattatgttaatatttagggaagttttatttggattccttgaattagttaccttttgaggcttatggattcttaaagcaataaagcaatattccttttaaaatcattgtttttcttctgtttattaatcattgatttaatctgtgtttttctgttggattagagaaaagatttacctgagaatcttgcaatctctatatcattagctatattataggtagagcttctttgctttatctgtaatctctcctgaacacgttgctttttcaggaatgaaaaaaaaaagaagctgcagaaaggggtacaaattaaattttcatgaaagaaaatcctaatcagcagtgacagtgtaagagaaagatgattgccacttggtcattgtggagaggcacttagatttggtgtcagtgcttctgttaatgatgactaatgtctttcttggagcaagtgcatgctcaaacatactgctacagcatatagagggagaggcctcagtaataggcatcagtaagcaaaagcattagttgtcttaaaacaaagactttttaatacagtcaatttgacactctgtattattagaaaaatacaaacataattctaaggcatttaaccacaaattttgaactattttatgttcagtactaagaggtaatattttttaattaaaaggtaacgaaaccaaggaatgttaa

SEQ ID NO: 35396 - DNA, 1025 bp, Homo sapiens
ttgagggcattttcttccattttatagttttaaaatttattagaaattggtagcaatgatttgtaacattttcctaatgccagagccctggttagctgttacttactatcagagcattttagatgtagaaggaacctaaggctaacatctagtctaactttattctttacagataaggaaactgaggaaacaaagggccagtataatttttggtagataaaggactaaagcccaggttaactgactgaaacccagattttcatatcagtgtgctgtgctgtcctctaaaattcattattaaatataacgggaattttatatttaaattaaagacatgtaaaaaatgttttaaacggtagaaagattggttttaattcaggtgctaaaacagtttagcagagaatcctattgaattcaagacatttttatttggtagagaacgtgcttgctaatagaaatatataaggagaatttaacatagttttaaaagtatcttgtaagcatatggaatgatacaagtaactcatttggttttctagggatgacagatcatgtaaagatcttaaatcgtgccattgtctcataacttcaataatgccagatactgttgcttcctttttaggatcaacatatactaggttctctatctaaaattttggttagcccatgattattacgagatgcacctggcttattctcctaattatcctttgtagtttcattaatttttacagagtcagttttcttgacttggaatgctatggacatggcataaactatagaggggaatcaattagaacaatagttgattataagatattctttatgtgtcctgttcagaatgctgttatggtgtgtgcttcagatcacataagtagatacccatttttattttatgtatgtttgaaggcactctgttattctaatagtagtcttttttaaaaatgctaattcttaaagtataaacttcttttactttaatacagactattgatgattccagttcacttgctcagtagatgtta

SEQ ID NO: 35397 - DNA, 1968 bp, Homo sapiens
aacacattgcttttgcagtgttacatgacttagggagatgagtggaatgtgagtagattacatgtatgtcctttctgggctgaggtgatatatcacctattggacctttcctatgttcttttttcatctctacacttagctttaggactttgatctctacttcaattataggtctactttttccatgtaacatttaattaactttgtacatcacatggtttggaaactattttgttgtgaacaaaatggctgtatgcttgagcttttctttcatacccttattcatttatatttattgcctaccttgtatcatagacaattttaggcaagtttcaataaaaccttgataggataaatctgaaaaatagaaatttaaaaattagtattgaaggctctcattacatgttgtttattccaataactttcttacttttttttccactttcttgtgaaagtgatatttaagatatttcttccctatagtctaattttctatttatctgcagttataatacctacttaaaactcttcaatatctccccattgctatagggtaaaacccaagctccttaacatgacatggccatggcctaagctgagctgggagagttgaactgtcaggtgtaggagtagccaattaaagtaacaagccaaaaatgaaagggtaagcctttaatcattaactatgatggtattagcaagagtctaaatccgaaggaaggggttgactccccattccatttcccgccatagaatggcatgcttttcaagggttagtgtggatctgcgcagatgtgagagtcatcttattgttgaagaaacttgaaactaaagactctggtagttttatggacacgaggtcagaggaagggctagcggggtggtcttggaacaggctgaatcagagtagggaatactgtcttcagagttttcccttcctctccaagtaaggagttctaggaagagatgcctggagaggatcttaggccaaggtttcagatacagacccaagaatcaattcatcagggctaggaatgtaaatgtgcaaagagcataactggccagagaggcctaagaccttagctgcaactcccgccagagatgcaaagcattcgctgtacatcaagtctgatgtggggagtacagcttttctctgtgaggcctgccaggtaaaggttttgtaactacccatggtaaggcctgaaaaaaatcacacataggttttaaaccaggagccagactcctaaaatgattcttcatgatctggcccctgccctctatagcctcttgtttgggcacttcttgctttatgccgctccaaaaattctggaaacatttaactttagcttatacccaattgtttcttacttgtttggctttgctaatgctgttccctcagaaagaatgattttccttttcttattctggttaacatctgttaactctttgactcaatttgtggattactcacttctaagaaggcttctattactttggataatgcccttcaactgtgtccctaaggtaccttttgcatatattgtaattatctcttcatatatctgtttctcttattggattttgaggaccttgagaataatgactttctatcaccaaatgaccgaatctcctgtctttactcattgttggtattcagtatgtgtttttgattaaatgaacaagtgagtaaatgagtgaaatataagcttattagtttttcattcctgattttttatgttatggctctaacttatctttcatatctcattttctattggaccggctaaatgagactgcttccaattttcagacctctatacttttacttaagatctcctaaaagcctaaaatgtcatcgtcttctttgtgtatcaattgaaaattggcctcttcttaagggtatttctcaaaaatctcttgctctttaaagcttcttggtccctttaaaacaaatgtgattactctttg

SEQ ID NO: 35398 - DNA, 1072 bp, Homo sapiens
ttcccttcagatagatacccagtagtgtgattgcttgattgaatggtagacctacttttaattctttaagaaatttccaaacagttttccatagaggttgtattaatttacattcccaccagcagagtatatgcattcccttttcaccacatccatgccaacatctactgttttttgactttttaataatggccattcttgcaggagtagggtggtatctcattgtggttttaatttgcatttctgtgatgattagtgatgttgagcattttttcatatgtttgttggccatttgtatatgttttgagaaatgttttttttaaaaatacactattgtagttactttaactctgatgtaatttttgatccattaacgaaacattaacgtttttaatctaggtatttaatatgtcagtatagtttagcaaatttctttttacataataggaatacaataaattttttgtagttaaattacattcatttaggaattttatacattagtagtggagcacaagttatccaatttgtgctatgttgtgtaaaactgaggctcctgtaagaactccagtctattttctaccttgattttgagagcaaactcattttaactttgaatatgttagcttcattttagatctatgaaagaatgatcagagtagggtacatatttatcattttgatgggctttatttaagtgcatactagttgcttcttcttgtgctagaagcttgggattcatacaaacagtggggaagaaccagactgccctcagttgtggagcctaatggtatgatggatgttcaactagttatttaattacagcctacttataatcttaggaataacaaaattatataggaatctgtatagtaataacaaatagactgttacaagatggttgatatctgtagaatatgaaatataaacagacttgaatatgtagatacgccttcttgctaaacttaaaaaacatcttactgttaggaaaagtgtttataacaacccttattttgagattctgaagactaactaaatgttttctaagtaatttggagttaaacaggtgtta

SEQ ID NO: 35399 - DNA, 1086 bp, Homo sapiens
ggttctcttcaaatatttgtattaatattttaatgtttttacagacattatgtttgtacaaaacccattgacacactaggttatgacactgtttctaatttgttttaattaaaatacaaatttaagagtttttataggtggttaagatagttttaggcaacaaaaatcacataatgatggaaatatttctaaacatctctttccatagtatgtttttctaaggtagttaccttagagttaaaatgctacctttatgttaaaggtatatattttatgtgtttattttcaaatagctgtttcagagcttgttgcagtgcactgccacagaaaagtttagcaaatttggaataattggctttttaagataattgagtattatcatactattcaaccattattaggtaatttctggtcactttttatcttattgcaaagtattctaaatactgtatttgtttaaaacagtgtaatctgtaaacctgtttaagtagacataaactacagtatgtgttaatatgagaaaattgcatatcacatatgacatgattactgatattcagactgaataaggatgccagaattaaactatatattaaatattaataaagctcaatttctgacttttttctctgcaattatcttccaacatccagatgaattatgttatgtatcccctttgggcatcgctgctgtaagggatgtagtgctattgaaatttgtggagtaaactattgatgtcaacacatctttttaggatagatcattctggtagttctttttgattatagatttgaagaagaaaaacactgccaatagtgaaatcataggtgttataataacagtagactaggcatgagatatggcagaactgtggtagtgggcatggattgaaaattatttaggaaaaaacaattgaaagttcattgtaagaagcttaaggagagggagggttcaaagatgatatacaggctttgtgcttgggtgattctgtggataactgtgtcaacatgatgggggtggaattacaacagaagggagctgggtttgcaatatgtttttgttgttgttgttgttttttgatactga

SEQ ID NO: 35400 - DNA, 1372 bp, Homo sapiens
gcgtggtggcttacgcctgtaatcccagcgctttggtaggctgaggcgggtggatcacgaggtcaggagttcaagaccagcctggccaacatggtgaaaacctgtctctactaaagataacattagccaggcatagcggtgcttgcctgtaatcccagcttttcgggaggctgaggcaggagaattgcttgaacccaggaggcagaggttgcaaaaaaaaaaaataattaaagaaattgtaaacaaatagaatattatgcagtataatgtaggatgctagtatgccccaaactgatctatagattcaatataatcccctatgtaagtttcagaatttttttaatagaaattggtagtcggaacccaaaagataaatggaaatacaaaggtcccagaagagctgcattagtaatctgttgctttgttacaaatcactctaaagcttaacagcttaacacgtcatgcacttattatttcatagtgcaatgggtcaagaatccaggcactatttagctgtttcctctggcccaccatctctgatatggctttagtcaaggtgtccgcaggctgggttctcatctgaaggctcaactgggaagtatccactttcaagttcacttatgaagttgtcagaatttaatcctttgagggctcttggactaaggccctgagttctttgccacagggacttctccagtatggtggcttacttgcttcatcaaagccatcaagagagaggagtcatctagcaaaatggacatcacagtcatttgtaacctaatttttggagtgacatccccttgatgttgccatatttcattggttagaagcaaattactcaaggagggattgtcaagaccatgaacactaggaggcagggagcatttacgggctatgttggagctgtctgtcacaacagccgaaacaatgttgaaaaagcacaacaaaattcagtatatacactacctaattccaaaacttaaagatacagtaattaagacaccatgctattagtataggatagctgtatagatcaatggaacagaacagataatcccaaaataaaccccagttttttgtggcaaactgatacttgccaatgtaccactgtaacacgatgtggaaagcttagattttttttttagaaggaataattcaacttcattactaatgtcagagatccatatgcttcctacaggtatttattatataattatgagaataatatatttttactgtagaaaatataaatacacgtaagatgaaaagaagaacaaaaaattacctttaatcacaccatcctttccaagccactgttaatgttttagtctagtcccttctagacatattattggcatcaaaaaataaactt

SEQ ID NO: 35401 - DNA, 1024 bp, Homo sapiens
atcattaatagctactaaaatcattaggaaagaagctgatatggattttcctaatgaatagacaaagctgacagtacctagattcacagaccaatattaacatcaccaaaaaggaaacaagcaggcgttaggtgtctaacctcaatttgatcaagtctcgattactgtgcagtctagtatggttgccacatgtggctgttgagcacttcaaatgtggttagtctcaactgagatgtgccataagttgtaaaatgctcactggatttggattaatattcaaatgatgaaagaatctaaatattttatttttatattgattgtgtgctgaaatgatattttgaatatattgttaaaaatatattattagaattaattttatctgtttctttccttttttatgtgactgttagaaaactttaaaatgtatatgtgatttgcattgtatttctaatagaaattgctgttttaaatctaataaccagtttatgggaaacaaaaggaaagggggaacatgttacaagaacaagagcataattagaaaaattcagaatgcaaaaaagctggatgcatgcagaaacagcttagtttctgcaacaaatagatgtcaaaaatataaaaataaaagaggaatgtatatgataaggcttatgaaatacctcaacaggcacattttatggaccttggatcctgatttgaacaaactagctgttaagaggtgggggaaaggggaagaggagagggagagagagaaacattgagggaaactgaatattggttgtttcctttatgtattaaggtattttcccctaacttgtataggtgtgaaaatgatattggtgccccgcgtagtggctcacacctgtaatctcagcactttgggaggccgagtcagctggattgcttgagtttgcgaccagcttgggcaacatggcaaaaccccatctctacaaaaaatacaaaaattatctgagtgtggtagtatgcacctgtggttccagctacttcggaggctgaagtgggagaa

SEQ ID NO: 35402 - DNA, 1040 bp, Homo sapiens
cacacacacacacacacacacacatcagctatgttgtgggacaaagtgaaaatctaacagcattacaaatgaacagcataattgctccaataattgtgggggagaaagataatgaatctaaaattcctttatatgtatcctaggattagagcaaataagtaaatatattttggatagtaaaagcaagatttctttcttttggagaaaggagttacaaataaggagaggaaactctagaatgaatcctgtggtgattgattggaatgaaatatcaatgtgaatttattgttatgtgtacacacatagaaagatgatataaacaattacatatacatgtgttagtatgcacaattagcatacatacttatatcacctagccctgtctcctgagaagacatagaagcagtgacaaccaatgataaaatgcaaacctagttcccaaatcttagtttctgtatgccatttgttaacttaaaaaactagatctttttggataaatggctgatttcagagctaggaaagggcaactataagattatcttgtggtgccagaaggtaaggaagtactcaaaaatgggtagcagcatgtcaaaaggacataaatcccaaagatctttaaatagctaaatctgtgacaatttgagcaacattataatattgacagtaatagattaaaaacccatagaataaatattttttagtttatcgtgaagtcaataatttataaatgggaggtaagagacagctcttctttacagtagaatgtcaatttttaaaagtaaaaagattaatagatgtagaaaaatcatcttttggcagacaccacagtactgtacaatacaatacagtttaggcaataatcagtgaatactgaaacttaaggcgatggaataatgagaaaaaagataattccattgtttcaaagtatctcccaacaagatagttattaattacaagcaggaaacatattaacttcatagttaatatgtagaaacgtggcagacatcatattcaccaaatgatcaacttaataccatcag

SEQ ID NO: 35403 - DNA, 1042 bp, Homo sapiens
tttttattcctataatatagtcatcaacatgttaatgtatctggactatcttagaacttagggaatttgtagtcattaaatctttaaggattacttacaaggcctggccctaactggatactcaaacgttgaggatggggatactaataacattaatagtagctatgatttattgcatacattttatgggtcaggtatacattgattcatttaatccttacaataaataacccatgagccaggtgggcattatttattatctctgttttacagatgaagaaaagacaaagactgattaataaattgctcagtgatttcaactcaaaactttatgttctgctcttttaatcgctacagtatactgcctgtccttgagttgcaccagaagaattgagtaaaaaatgatttctcttccttaatgataagaaatggactagatagggtgtcattatataatgatgagctcttctaaatgagtaccttcataaaccttggaaacatcagtgagtaaacttttgaattcagaagagacccattgatgatactgagcattttaaaaggtcttttattgatattattgcctctgttcctgtattttttacattgcacaaataatttttactttggcactttgtgtcccaattatcattactctggtaggagaagttacacagaaatgtgtttaaaagtaatttttacaactgctggacataagtacctttatagttattgatgggttttttaatagttatttatagttattgatggtttcttacatattctctagaaggtagtgaatcttactaaataaacttggcactttgctttgacatacctgacaatgctattttaaaaatacaactcttgaaattatattgtggttgcaaatttaacttccagctgggtgtggtggctcacacctgtaatcccagcattttgggaggctgaggtgggtggatcacttgagatcaggagttcgagaccagcctggccaacatggtgaaaccccttctctactaaaaatacaaaaaaattagctggg

SEQ ID NO: 35404 - DNA, 1033 bp, Homo sapiens
ggtgcgattttggctcactgcaaactgagcttcctggattcaagtgatcttcccacctcagcctcccgagtagctggcactacatgtgcacaccaccacacctggctaatttttgttttgttttttgtagagatcggttttgtcatattgcccaggctggtctcaagctcctgagctcaagcctcccaaagtggtgggattacatatatgagccactatgtctggcaaatatagcaatctatatattttttaggtgaagaattcaaagatttttttccaattagcaagcaaaatatttttattaaaatagtgaacatttttgtgagtacttataaatttttaaaaataaacacttctatagtaccacttgtttttctgaattcttaacaaatataaaataaattatcataacagtcctctgaggtaaatgttattatcttcagcccaattttacagataagaaaactacagcgaggctcagtggtttgttttaggtcatatagctagtatatgatgaagcttggacttgaaccagggtagtctgatacccagtataaactggtgatctctttgctatgtggcctaacgtcatctattaagtgatttagtacacattgtctcatttcagtaccacaacacatctttgatgtatgtatgcaaggtagattgagagaatgtgatttagctttgatcacagaacaattaaatccatgattctgaattagaacccaggtttcataacaataacccagtacagtctgtccccatagcctctgtcgacttcatggcagtgttttgctattgtaataatatattctattattgaacatattcttgacagttctaaaggaatgtgaaacattttaacaattacatattttagtgttatgtattttagggtactgtatataccaattttagagctaatcatgagaaattattcaattttcctcttaagtagctgcttttctcctcattgatcgatttttaaatttaaacgtgtttatttttctaattataaaaatgaagtatt

SEQ ID NO: 35405 - DNA, 1031 bp, Homo sapiens
aagtagcaactaattcttacaacaaacctctgagatagtactgatattatccctcattttataagtttgaaaatagcatgaagtagaaataacctagagttacaacttggatccagatccaggtaatctgtttcccaattactaatctatgaatttggttcaaattttattagatttctaaagaccgtgtgaataggatctaatcctcgaatacattgcagctttattctaagctatttaattttatgttttgtctaatatagtttttcattttaatcattgtgctatgagatttgcaatattgtgtagtattttaaggtgttataataaaatttctaaataaaacaagaaatatttccaaataaatattgttgttacttaaaattttagcagagaaaatatatttgttcatctcttctacatcagagtcaattttaagagagcaaacgtatattttttcttatgtctgctagtctttaccctttttcaacaaacttcaattggttgaagtatgctcatgttctaactgtattgctcttaaacaatactctgcaggatgaggcattttttttttgagacagcttatatcttagaggttatctgtattcagccttgaattcaagctgtacattcttaaataatataactgaattttatctactgctaattaccttcttctgcaaaaaaagatgttgtcatctatttaatgtacgatttgtgtgtaaagtagctgacttgtttcatttattatcagaggattgatgacagtgtagatctgcaatgtgcatctatttagttcattgcatgcttatcattggagtgggatatccttgacattttatgcttttggtttacagagaggttccatgaatgtcatgacatcattgatgagctgtacatcttaactttgtttcttaatcttatggttataaacagaatatttatgaaaaaaattatgtcatgcagaaacatcataccttgtaaacattgtgcatgtgtgaatatacaagtttcctggcaatcatttttgt

SEQ ID NO: 35406 - DNA, 1058 bp, Homo sapiens
gtattgttttcttcatttcaaattcatttatttctgctctgaacttaagtatttcttttcttctactaattttgagttcagtttactgttacttttctagttctttaagatgcattattaggttatttatttgaagattttctttttttttgacacgggcatttatagctataaattctcttcttaatagtgcttttgctgtatcctgtatgctttagtatgttgtgtttttattatcatttgtttgaagaagtttttcaattttattcttaatttcttcatcattacactggtgattcaggaacatattgtttaatttcaatatatttgtatagtttttaatattcctgttattattgatttgtagttatatttcattgtggtcagagaagatgcttgatatttcaggttttttgagtgttttaagacttgttttgtgacctaacgtatggtctgttcctgagaatgacccatgtgctgaggagaagaatgtgtattctgtagctactggatgcaatgttctgtaaatatctggctgggcgtggtgggtcacacctgtaatcccagcactttgggaggctgaggcaggtggatcacctgaggtcaggagtttgagaccagcctggccaacatggcgaaaccccgtctctactaaaaatacaaaaattagctgagtgtggtggcatgcacctgtaatcccagctgctcaggaggctgaggtaggagaattgcttgaacgtggaagatggaggttgcggtgagctgagaatcatgccactgcactccagcctgggtgacagagcaagactccatctcaaaaaaaaaaaaaaaaaaaaaaacaacgaaatgttctgtaaataactttagatccacttgttctgtagtacagatgaagtctgctgtttcttttttgatttttttttttttgtccgtgagatctgcccaatgctgaaagtgggatattttgatgtgtctagctattattgtattggagtctatctctctcattagttctcataatattttccttatatatttagttgctccagtgttgggtg

SEQ ID NO: 35407 - DNA, 1197 bp, Homo sapiens
tctgggctcagtctgcccacctcagtatcctgagtagctgtcactacaggcatgtgccactatgtccggctaatttttgtgttttttatagaggcagggttttaccatgttgcccagctggtctcgaactcctgggctcaagcagtccacctccttatcttcacaaagtgctgggattatagacatgagccatcatgtctggccactactcatttttgtatgttggtttttgtatactgcaactttactgaatttgtttatcagttcttatagttttttggtggattctaggtttttctaaaaataagatcacatcatctgcaaataaagataatttgacttactcctttccaatttaaatgctctttatctccttctcttgttggattactctagctaaggcttccagttctatgttgaataatagtggtgaaagtacatgttcttgtcatgttccagatcttagaggaaatgctttcagttttctccattcagtatgatactggttgtgggtctgtcatatatggcttattatgttaaggcatattccatttgtatcacgttttttttttttgagggtttttatcatgaacggatgttgtactttatcagatgctttttcagcatcaattgaaatgatcatttttttatccttcattctgttgatatcatgtatcacattgattgattgatttgcatacattgaaccatccttccacccctaggataaatcccacttggtcatgattaatgacctttttaatgtatttttaaattcagcttgctagtattttcttgaggatttttgcatcaatattcaccagtgagattggcctatagttttctttttttaatatgtctttgattttggtatcagggtaatattggccttgtagaattagtgtggaattcttccctcctctattttttggaatacttagagtaggattggtattagttcttaaaatgtttggtagaattcagtgaagccatctggccccaggcttttctttactgggatactttttattaaggcttcactcttgtcacttgttattggtctgttaggttttagatttcttaatggttcaatcttggtaggtttatgtatctaggaattgatccatttcttctagattttccaaatttattgacatatagttgctcatagtagccactaatgatcctttgaatttc

SEQ ID NO: 35408 - DNA, 1043 bp, Homo sapiens
agtcaggtcaggttaaaaaatattctatagctttatatattctatatctggtagtaggccatattcttaagagcatacaaatttagaatctcaaaatactaaatttctgtatctctagttcatttatccttttattaatttaacaggtttattttatttctgtttgcttctcatactaaaaaaagtttattaccttttagcttttaaaaattgttcatgttttctgaaattatacttttcaatctttgtttaaccttatattgaaattgtgtcacttacaagcatcatatgccttaaaaaattgatttgacaataattttactactaaatgtttactttctatgtatttctgatatgtttaggttaaaatttatcatcttattatttatgtcctttatatttgctccacatcttgtgtttcttttttttttccttcttctgagctaagtatttgttgcttaatttttttcccattggcttgttggttatatattattttaaataactttagtggttacccagagattgtagtatgaatattataattaacatcttacataaactgattcttttgccaattgatgtatgacacaagaaacttataacactaattcagttggtttctcttgccttgtatgctgtggttatatattttagattgcagtattttttaattctagaagttacataattattgtaaacattcagtatacttttagatttacccacgtttgtcattttcattgctccaattgttttccttgacttgtatcaatcttatattatttttcatccttgtgaagtatgttggttggctggtgacaaattctcactattttatttgtcatggaatgttcttattttgcttttgatgatgaggaaaagttttcctctaccctcttaggtttgttgtttggggacctgtgaattaaacagacaaacacagcttagcaagaaaaaagacctatttttagtcataagtctgtcagaattcggccggctgctgtgtctcacacctgaaatcccagcactttgggaggcca

SEQ ID NO: 35409 - DNA, 1042 bp, Homo sapiens
ttgatttttttgttgagatagggtctccttatgtttgtcagcctggacctctttcttttttttttttgtttgagatggagtttcgctcttgtcgcccaggctggagtgcaatggcgtggtcttggctcactgcaacctccgcctcctgggttcaagctattctcctgcctcagccacctgagtagctgggattacagatgcctgccaccatgcctggctaattttgtatttttattagagacggggtttcaccatgttggccaggctggtcttgaactcctgacctcaggtgattcgcccgcctaggcctcccaaagtgctgggattacaggcctgagccactgtgcccggcccctagcctagacctctttttttaaaaaaaacaatttagcccaggtgggaggattgcttgaggccaggagttcgataccagcctgggcaacatagcaagaccctatctctaccaaaaagaaaaacatttaactgaacttggtagcatgtgcctgtagacctagctactctggatgctgcagcaggatcgcttgagcccaaagattcgaggttacagtgagctagggtcgcactggtgcactccagtctgggtgacagaggaagaccctgtctcaaaaataaataaataaataaaaaacgtcaactttattgaggtataatttatatacagtaaatacccacacattttaagtgtactgttcagtgaattttgacatatacccaaccattttaatcctcaaatttccctgtgcctcttttcaatcaatcccctcctctgtcacctcaagttgccagtgatttgatttctattactgtggattagttttacttactgctgaacttaatataaatagaaatttatttcttttaagtggagtggttagctattcatagtgtgctgtgtttagggtacgcttcaaccttttttttttttttaactaaaacttactatccggtattaggaaaattatgtatttatttcaaagaaataattgaggtaatgaaataaaggattattttttgccaacca

SEQ ID NO: 35410 - DNA, 1021 bp, Homo sapiens
agatcaggataaaaacgaatatttttggcagaaggactgctatgcatagcagtaatgtctctttaggtgatttttaatttttttaaataattatatatatatatggaaatacatctttattttcaaaactagaaaattgatacaatctgttgaatagttcaagtaacttaatgtcttttccttagtattacagagaggcttgaacacgctttggaaaaggcagctcctctccttcgtgagatttttgtggattttgcaccttttctttctcggacacttttgggtagccatggacaagaactgcttatagaaggaacaagtaagtggtttttctttattttatttgtatgtatttatatttcaggattaaaaacttacatggataatgaaataacatggagtttcattgtttaagtgttgtcagcctttgacaaggtttctcataggctatcttttgaagactgtgtcacatgtctattatgttgtaatcttcaagatttttatcagtgatttggatggagcgtagaattatgtgttgaaccaaagaactaagacttttttttttttttgatacattaaaattaattttgagagcaaagaattggagagactagtgtcacaggattttacttgaacttagatccatatgaacaacaatgtattgccacacagataaggaatgcattgttatttgtagaattctgttttacaaatagagataacagcattttactctatactgcttacgtcattcatagattcctgggtctcttctaggtagtgtactttgagattgtcaaactagatagcatgctgaggtaggttgctgaggggattggaaaccatgctatttatggagtggatgaggaataatgggtcctttccttctccttctcctttcctttcctttcgtttcttttcctttccttctcccttcctttcctttcctttccttctccttctcctttcctttcctttcctttcttttcctttcctttcctttcctttcctttcctttcct

SEQ ID NO: 35411 - DNA, 1027 bp, Homo sapiens
acacacacacacacacagacattcgtcatatctactcccccttaagtcaataatcttcatctgatataagctgctgtgatttaagcacaccattttggattgggggctcaggtggctgttgcttctattttttagtgtatagttaacattggcagtcacccttataatgatgtgacaccagctaccctgaagtacattgaataagccatgcctagcacaagagaccttgatttaattggcaacagtgtttgccctcacatgataggcactgaggtaaaacgaaacctattttgctttgtgtgtgtgtttttaaaaataactacaaaaatgtattattaaaatattggaattacataattttcacttttgaatgcatgtatagggatcaaatacctaagttactttgtttagaagctgaatactttaaagctattaagggaatacttgaagctcgcagttatagtactgtcaacaaaagatgtgattaaataaattgaatgttgaagactttgggcttatggttaacaccaggtaattaaaagtaagcactgctgtgggagtgcattatatatcagctgtcctctttacctcattaactgagtttttgcatgtttatggagccaacttcaattaaaaatgccttttaagttatgcctaacaaggtcttttacttactgtttggtataaagtattacattttaattgaaattggtatatcataaatacctgtgtttgaataatatacaagataaagaactttgactatttgatatttttgcgtatggtttttattcctatgcattgcttttttatatattatcaaaagatatagtctttggggtttaaaaatgaaaaactgggttgtatacatgttagcaaattgcttatatctgctttttttttttaagcttataagatttctaaggttttattatttcagattagcagtgctttacaattcttgtggaaacgttgaattttctgctttaatacttttggttatattttatttgttagataattaaga

SEQ ID NO: 35412 - DNA, 1046 bp, Homo sapiens
gtagaaggggtaacaagttttccagctgcagtaaccatgtttgaggtagagctttttattttatcctaaagattgcggacttgggccaggcatggtggtgcatgcctataatcctagcactttgggaggccgaggcaggtagattgcttgagctcaggagtttgagaccagcctgggcaacatggtgaaacctcatctctacaaaaaaatagaaaaattagccagacgtggtagcacatacctgtagtctcagctacttgagaggcttaggtgggaggatcgcctgagcccaggaggtcaaggctgcagtgagcctaggtcacaccactgcacttcagcctgggcaacagactgacacacacacacacacacacacacacacacacacacacacacccccaaaaaagattatagactttttcttacaggccaatgactttcaaccttgtgttgctacccattactttagatcatttttgcaagtattttattatttattttattataccatctgtcttgataataggtgcacccactcagtacattctgtagaatacgtaattagtttttgcttttttagaacatgatgtatttcataattcaaaacagtagatagctattaaaacagaatataccttttaaaaattagttctaaacttttgtttgtttatttcttgtgtttctgggtatgatatagaaatcacaccagcagcattcagcactttaactacggcatcagtggaagaatctgaaagcacatcatctgctcgaaggagggactcaggcattggggaagaaacagccactggtttaggaagccatgtggaagtaactcctcacacagcacctcctggtgtcagtgcaggcccagatgcaatcagcgaggtgctatctactctttctttagaagtcaataagtctccggaaaccaaaaatgatagaggaaatgacttggacactaaggctacaccgtcagtttcagtttcaaaaaacgtcaatgtgaaagacattctccgaagcttggttaacataccagcagatggagt

SEQ ID NO: 35413 - DNA, 1050 bp, Homo sapiens
tattcctttagggaaatctgcagcgaaggtaagtatacagattaattaattttcaaaaagcatactcctattttacaattaagatttttatttgttcatttcaacataaagttaaataaatctggcagagattaaaatagttactttaggcctgcatataacattcaaatatttgtgtttaaatacacaataaagatttgtttatatttaaacctctctgcttttcccagtgtttactttgattgtttctgtgatgccttttccttcaaatatgtcattttttcctgcatgccatctttctccacctctctccccaacccctcaaagaagaaggaagcatacacacaaaaaaagtggggaaaggaatgctatagctttgcttttctggttctgggaatactgtgtttatttttaaagaatatctgtgtaatgtatatatgaatatatatatatacaatttttttttaatcttaaatagagcccagtggacattgtgactggcggtatatctccagtaagagatcttgacaggcttctacaggacatggatattaatcggcttagggcagttgttttcagagacatagtaagttacaatatgtctttcacatactctcttaactgatgcatatttcctcttaggcctaatgtattgagattaaaaattctttgtgatatcaaatagtggagcagagatagaaaggtctagaaacgacttcttttgacaatgattttagaaacagaatattagaaaagatagtttatataaagcgagctagcagatcagcatagtgatattaaaaggaataatgcattattacatagtaagcagtctaagtgatatacatgtattaattaagtccaacaacttattgagctgtactattgtaatttccattttatagatgaataatctaaggcacataaagcttgagtaacatctccaagctagtgttgataaacaatgataaaatcaggattcaaacccagcagtcttaattctaaaattgatgctctgaatgtaataaaatgttcaacttctgaatggca

SEQ ID NO: 35414 - DNA, 1063 bp, Homo sapiens
tatagagaaaggaaaaaaaatattttttgagacaggtgaagtgtagtggtgtgctcatagctcactgcaacttcaaactcctgggctcaagtgatcctctcacctcaacctcctgagtagctgggactacagacttgtgctaccacacctggctacttttttagtttttttgtagagacgaggtcttactgtgttgctcaggctggtcttcaactcctggactcaagtggccccccgcctgggcctctgaaagtgctgggattataagcatgagccacacacccggttagaatgtgtgtgtgtgtgtgtgtgtgtcttttttaaatgagacagagtcttgctctgtcaccctggctggaatgcagtggtgcaatcttggctcactgaaacctccacctcctgggttcaagcgattctcctgcctcagcctggcgagtagctgggacaacaggtgtgcacctccacactcagctaatttttttgtatttttagtagagacagggtttcaccacgttgcccaggctagtcttgaattccggagctcaggggatccacccacctccacctcctaaagtgttaggattacaggcgtgcgtgactgcacctggacttttttttttttttttaaattatactttaagttctagggtacatgtacacaacgtgcaggtttgttacatatgtatacctgtgccatgttggtgtgctgcacccattaacttgtcatttacattaggtatatctcctaatgctacccttccctctcccccaccccatgacaggccccagtgtgtgatgttccctttcctgtgtccaagtgttctcattgttcaattcccacctatgagtgagaacatgcagtgtttggttttctgtccttgtgatagtttgctgagaatgatggtttccagtttcatccatgtccctacaaaggacatgaactcatccttttttatggctgcatagtattccatggtgtgcatgtgccacattttcttaatccagtctatcattgttggacatttgggttggctgcaagtgtttgctattgtgaatagtgctg

SEQ ID NO: 35415 - DNA, 1056 bp, Homo sapiens
catagtgtgttctgctgtatgcgtaactcaaaactgaaacttccacgcttattttcttagctgaatacagatattcatgttctacctcttgttctttgtaccagaagtagtttattttaaaaagaaaattttgggggtagaacaagtgttggtaaactgaagtctttaggaatccagttagccacctgtaaataaagttttattggaaaacagccacaataatttatttgtgtatcatctgtggctgctttcatgatacaaggacagtgttgagttgtgacagaaatcacctggtccacaaattctaaaatatttaccccctggccatttgcagaaaagctttgctgaccccaagggtaaaattaaagtttgtgatcctttagtttctgaatttatgcttggaaggttaattttggtatatatgttttcatagtatttattttaaaaaattatattacatttcttctactttttctccacattgtttttctacttaagtatttattgtgctttagatgatcatccccaggggagactaagttagtgctggtagattgtagcaacttcgttaaataaataactgctctgaagattttggaggaggtttttgctgtgctgtagcataggcacacttgtcttttttttttttaatttttaacttcggctatgcttatatagttagcatttctctgcttaaaggttttgtggccttaaaagttctagattgaagatagttgggagagtaattgagttgggaattgtttgtaatgtgaaaaagtattttgtgtttccttcatccagcatgcatattaagtagagcacagaaaagctctacatttgatgatttctttttgtgtaattgcaggaggaaagcagaagtcatgcttggacatggattgttttcattgctagctgaaaggctcatgcttcagacaaatttaatcacaatgaccacatataatgtgctgtttgaggtaggaatgtacttaggatttactcctctaaatttcttattataaaaatgcctcttaacattgtgtaggtaaataagatcat

SEQ ID NO: 35416 - DNA, 1049 bp, Homo sapiens
tttgaagcactggaggttaagaattgaacatatgtcctcttggagaacacaattcaacctgtaatggggcatctggcaaagtgtcatagtggcacagtagtgtagagcatatatgaagctatccagtaagaatatagtcagggaataggctgttctgtggtttctcaacttaccagggcacataaccaactatcaaaagtaggtcaaaaaagacacttttggtgaactaacacctgctatggtataagaatggggaataaggatacatcatttgagatagttatagataatatatattttttaatttctgagaaaatgcagtgaatagcatctatattagtcagaatataggcttttaactgatagaacagagaggcccaaattaacagtggtttctgcaaaacagaaatgtatttgtccttcaggtgaaagtctgggtagcgggctagtgtggcagttctatgattgccaggatccatagatcgatttgctcttttatcttcaacataagacaccttcaattccaggatggctactgtagctcttgccactattctgcatcttaagcagtaggaaggagcgtagctggaaaaaggggtcaggtttctttctttaaagaataatacctagaggttgcacgtatttactgcctgttggtcagaacttggtcacatggctgatcaggaatgcttttcattcaagaaaagctggagagtgagatctttttcctgggctctgtgtgccaaactagaaactctttattattatggaagaaggaaatataacctgggagtcagtgcagtctgtgtcacagctttgtaattttccctcaacttctccttattagtaagtttccagtggctgtaaacatatacaaggtaacattcacttaggaaaggattcctggagaaaaattggatatcttgaggttgacacttttaaaacctgaatatgtttctgaaggatgcagataaataaaagaagcttactcttagttaattttataaataaataggttcagagaaaaaagcaattttgacatttttaga

SEQ ID NO: 35417 - DNA, 1094 bp, Homo sapiens
ccttttattcattaattttgtaagtaacagccatttctcttcttatcctctacaggagaccaattcgttgttattgtctttttgaaatattatgaattaaaggatttaaacatatttgatggcaattattattactttattgaacctcaaacttttatttttggccagtaggcacttcttcaggttgattcctgagtccttttggtacaaccctactagactttgatcatgtttctgctatttttatggcaagatatttcaggctcatattttcatttctagttccagaccttgaaccagctatcataatggcttggctgtgtccccaccaaaatctttcttgaattgtaggtctcatgtgggagggacccagtgggaggtaattgaatcatgggggtgggtttttcccctgctcttctcttgatagtggataagtctcacgagatctgatggttttataaaggggagttcccctgcacacactcttggctgctgccatgtaagatgtgtctttgctcctcctttgccttcagccttgactatgaggcctctccaggcatgtagaactgtgagtccgttaatcctcttgcctttgtaaattacccagtctcaggtatgtctttattagcagtgtgagaacagactcggacagtaaattggtaatggtagggtggggtgctgctgtaaagatacctgaaaatgtggaagttactttggaagtgggtaacaggaagaggttggaacagtttggagggcttagaagaagatagggaaatgtgggaaagtttgaaacttcctagagacttgttgaatggctttgaccaagatgctgatggtgaaatggacgataaagtccaggctgaggtgatctcagatggagatgaggaacttgttgggaactggagtaaagatcattcttgccatgcaaagagacttgcggcagtttacccttgccctagaggtctgtggaattttgaacttgagagaggttatttagggtatctggtggaagaaatttctaagtgctaaagcattcaagaggaagcaaagtgtaaaagtttggaaaatttgtagcctaatgatgcaatagaaaa

SEQ ID NO: 35418 - DNA, 1029 bp, Homo sapiens
ctcataagttgctgattcacttcttttctaccatcttccactgcagtctccaatatgtacttccctttctccaggggcaaaatttcacataataccatagtcaaaaacgaaaatgaagatggatcatgtacaaaacactatctttattgatattaacatattatttggggtatctcatccagtacctgtgggatggtattgtttctggtctgtcaaatatatgactttgaaacattttaacacaggtcaaaaataggaatgtatttaatgaaatctctctctatgacctcttttctccttgtttccagcatacattatcccttgctcatctctctccttcagttaatttagtcactgcttaagaaaacctaggtcaggcccagtggctcacacctgtaacatcaacactttgcaaggccgaggtggaaggactgtttaagcccaggagtttgagaccaacctggacaacttggtgaaaccccatctgtattaaaaaaaaaaaaaaaaattagccgggcatggtcgtatgtgcctatagtcccagctacttaggaggctgaggcgggaggatcccttgagcccaggaggttgtggctacagtgagctgtgttcacgccactgcagtctgccacctggacaacagagtgagaccctgtctcaaataaatagataggtagatggatgaatgattgatatatagacgatagagagaaaacctgaaaagtattattagcagctcatgtatccttctaaattttcttaggcttttataaactaatgtaaatacttgtatgtttcacttgttcattgtacagaaggtggcatgctgtaccccttgttctacatcttgctttttctttgctgataatttttcttatttgtctttctaaagcattttatacagagcttctgtatttttaaaagagctatataagtattctattgcatagatgaaccatggttgtcttgacccctgtttactgggttgtttccagtattttgttattactaataatacttcaataaata

SEQ ID NO: 35419 - DNA, 1039 bp, Homo sapiens
gttttttgagggttttttttgtcacggtgagacattgaattttgtcaaatgctttttcagcatcagttgaaatgatcttgttgtttttgttctccattctgttaatatgatgtatcatattgattgatttgcatatgttgaaccatctttgcatccctgggataaatctcacttggtcatgataaatgatctttttcatgtgttgttaaattcagcttgctattatagtattttgttgaggattttcatgtgaatattcatcagagatagtggtgtacagttttcctttttttgatatgtctttgtctcttttggtatcagggtaatactggccatgttgaatgagtttggaagtattccctcccctatttttcggaataatttgagtaggattggtattagttcttcaaatgtttgttagaatccagcagtaaagccatcaggtcctggacttttctttactgtgagacactttattatggcttcaatctcattacttgttattggtctgtttagactttggatttcttcctggttcaatattggtaggttgtatgttttctgatttgaggttaccatgaagcttgcaaatactatcttataacttattattttaaactggtgacagtttaacactgattgcttaaacaaagaagcaaaaagaaaactaataaaagctctacactttacctttatctccctgctttttaactttttgttgtttctgtttatattttattgtagtgtctgtgttcatcttttagtcattctacttaagagtaatttatatgcccaagttatggtgttattgtgtttttctgtatgcttactgttgccaattaattttgtactttcagatgatttcttttcttgttgcttactaacatctgtttctttttgattgaggaactaacttcctttagcatttcttgtaggacaggtatggtgatgaaacacctcagcttttgtttgtcttggaagtcttaatttcttcttcatgtttgaaggatattttcactggatataatattctagggta

SEQ ID NO: 35420 - DNA, 1048 bp, Homo sapiens
caggaaaaaatggaatgaccaactctttaatatttagggattgattatacctctagttgtggcttatgaatattattcttaacctgtattacttgtgttttgttcatggcttttttaggcaataccttagtctgagggtaggaatatggaagaaaagaaaaatcagagtagtactattttgctacttgttagtgtcttttgaaaatatttagaaaaagttgagaattaaaccagatagttaaaaagtttggcatatctttgggagtttcatttatgctaaattctcattgtcataggatgtaaacgttcacttgaaccgtgaaatttttgagtactctgaggatgtcctgattaccaattaatgcccaagtttgaaatgtctcctactttgaaatggtaattccatcttgactttttttttttttttttggttgttgttgatcattattatttccagaaatgtatcttctgaatcacttcatttctaccttgctcacacaagacccagatgtcttccttggcactgggacctctactgaagactctccctacttcatagaaaaggaatattttcttatttccttctgaacctacttgagatcctctgtagctctgctctggcttctatatttaatgcagaaatggtaaagaagaaattattatttctaatatccaaatttttccaatagaaattatgggataataaataatatttattgaggtattttgtgacctattaagtaccagttcttggtcgtcatttcttcccacttttcttccttgtttactcaactctggatgccatggcccttttgtacttcctaaagcaagccaagcacagtcttaccttagggcctttgaacttattttttcctttgcctagaatgatctcctctcaaatatccaattattgtatgactatcaataagcaattgtaatgtttctatccagaaacattacaattgtttgattttttcatattcatgttttttacagtttcttttcctcagtcatactttctatatctcttttatttccttaaacatta

SEQ ID NO: 35421 - DNA, 1041 bp, Homo sapiens
atgaaagctttgaacaattggatatttctatgtcagtttattgggagtttatgtataaacacctatagacacacacatgcatattttaaaaaactgcatattatggaaatgttcaaatatatgcaaaaatagaatagtataatgaactctggtatccgttgtgcagcttcaacagttgtcaacattttggggatcttgtgtgtgcgcatgtgtgtggggctttcatatgtaagtctgaggaagataaatggtaaattgattgctttacctcaaaatagacttgaaacatttcctttctgattttttgttcttttttaaaatgtcatatgccttcagtgagaaacagaaatttgtggtagtaatataatccataattacttatttgtgtgtgaagacacaacatcttttggcagaaggaggatttgaactcctgttctttagaatgtgctgtgttggagtggatgaccaaacgtgagtcatttgcatttttatcattaaagaaaatccaaattctatagcagcatttgcttatacgcttcctagaactgtagacctggtatagattttaaggtcattggttaagtccttcaaagctgcgtatttgcaggatagtaggtgcctggatagaaggagagagaagagtctgttcagttagttaccctcctcttcaatatcattcgcttgtcaggtagggcaggaaaagttgctgagaatattaggtagcagtttctccccttccattgtcccttaaaatacttttcatgctctttcatggattatctggggttttggccactctagaaaatctttggaagcagctgcgcacagtggctcatgcttgtaatcccagagctttgggaggttcacttgaggccaagagtttgagaccagcctgggcactatagtgagaccctgtctctacaaaaaaaaaaattaaataaaaaattagctgggcatggtggcatatacctgtggtcccagctacttgggaggatgaggtgggaggatcccttgagcccaggagttcgaggctacagtgag

SEQ ID NO: 35422 - DNA, 1027 bp, Homo sapiens
ttccttggcacaagaactcacttgaactatcaccttgactatcagatatgtttttgcactattttttttaactgaaaaagaaatatctaagctgtacatggtacactagaattttctgaaagcagaaaacgttcagattttgtagttaattttcattacaatagaaacatgcacatggaaacccatgagctaggattctaccgaggaaaacatctagtgggattagcaaggtgaagggaaagcatctggtggcatggcagcatggggaggctcacacacagaagttgcacgtggacatctgttttaatcagcacaagtgaattaaccatgcttcttcatttttttactttagttaaaaaagaggacatttaatattctacatgctgtaactatcaggacatggttagcaatctcaatttcatttttgatattcaaattaattcttacagcttgagcatatcagccttattaccagagcaaatccttccttcagatgggatagtttactgactagttggagcatttgtaagcacatggtgaaatcagcccctgcccaccaaaataatctttatgttaccaagtgattcccatttgtctaaggatttgaagggggtctaaattggatgtatcttacttagtctaaagaaccaaaaccatccctgaaatgccttgctaatacaactaatccttccatatatgtgccatacttatttttttcctcagtgtatactttatgttaacagggttattacaaagcacattttctgaatctgcaatcattcctttgacaattactggacccaaaggaaaattcattttctttgcattattccagtaatatataaaaactgtgtcttgttatagtagtacattatgaatcacatataaaatcttacaatacagaacaactgttaagatggaaaacagtgccaaacctccacagctcatttctttgtaatataatcagaatgaaaaataatttaagaggacagaagactggtacttttttgttttattttttctctag

SEQ ID NO: 35423 - DNA, 1030 bp, Homo sapiens
caggtatgccagtgaatgagcagggagttcaagagaagactgcaaaaactgaagcggaggtgatgtagtcccaaagagaaagtgaggaagaatgagagcatgcacgagaagctgccttgtttcccagcactgcccaaagttcagctgcacttcctgttcatacccattcccaggatacctttgtatgctcataataaaaacccctttaatttaattcaagtttaaaggggtttcagttgttttaacctcacaagtcaatgcaataccattagaggaaataatgataacaataccgtaatttagaaatgaaagtcacatacctaacatactcatgttggttttaggactaccaaaactatagccttgattctagaatttatttccatatagattagggtgccatgaatatattgagaaaatagagtagggtagtactttacagtatttatggagaaacaaaagccatgccatataatatgttgtatgaagagggaagtgtattgcttgtcttatgaacactgacatcagatctatgccagtgagtaatagaagactttattgttttgtcttctttcatcaacaaaaggcaaaacacacacagacacacacacacaaaaaaaaccttctttaatgtaggattttctgaaacaacacaaaatacagccagacctataaatatcctatcatttatttgtatatactccctgacatgttatattttgtgaataaatcccaggagtgataaaagtcttaaatcattttctgatactatttaagattctgccccctttcctccaccgttgcttctgatttaactcttccagccatgggatgttcagtgaaagaagacagttcttaaggttctttggtaattaaatcacaattctcacctaatgtgttttgtgtgtgtgtgtgtgtgttttcctctcaacagtcaactgtatgtgaactttttgtgagatagtgaagcacagtagcaaagaactctggccctgcctagagtcagactgtccaagttccagtcctgact

SEQ ID NO: 35424 - DNA, 1043 bp, Homo sapiens
cacagaactctcaaagactgaaaataccaagtacatatgagagtatgtaatttggtacaactgtaaggaagactttattcaggactatcaagataggtatagggacaactgcaatgggattttgcagtcggggagttaggtcgggctcaactcatgggcaagtgggaatttatagtaaaagagcagggcgtgggggtcagtggatagaaaattactgagaggagacatcggggataaaggggattatagctaagttgacctaataggattcttgctgaagtcagaccagggtgatcagacatcaccaagaggatggcaggggattgaacctgatcagatgttaagagtaatctgatattgaagatgaggattcttgctaaactgacttactgccaaaactggattttacaaggaagtacacagatgggactaggaaaagtttcagaatctttgtcagttcagagtagccctgtttgaattaaggatatgtagtatgtgagaacatggatacatctcagaaacataattttggatgacaaaagcaagctgtagaaggatagttacagtataatgccatttatataaagcagaagtcagcaaatgggtcaaatctggcctgccaccattttttaattaaaatattacaggaactcagccatgtccatttgcatatcatcttgggctgctttcacattacaacaggagagttgtaccaacagggaccacatggcaaaacacaaataatacattgtttgttgtatatttttatgactacgtataggtactaaaagtataaaaagatgtgcggaagtcataaatagtgaaattagggtattgattatcaaatgaatgggccaggaaaggatccacagggagcttcaagtgtatcttgactgttttatttcttaagctaagagataggatttgcaatattatctatacttttttaaactcctgggaattagctgggcatgatgactcatgcctgtagtcctagctgcttgggaggctacggtgggaggattgcttgatcccaggagttt

SEQ ID NO: 35425 - DNA, 1050 bp, Homo sapiens
ctgcctcagcctcccaagtagctgggactacaggcatgtgccaccacggctggctagttttttaatttttttttttttgtagagatcacgtttcaccaccttacccaggctggtctcaaactcctgggctaaggcaatcctcccacttcagcctcccaaagtgttgggattacacctggctggcttcttttacttaatgttttcaagagttatcatgtgtggcatggaccagtacttcgttcctttttcttgctaaattacattccattgtatggctgtaccacattttatccatcaccggttgatggattttggagttgtttcactttttggctattacaaataatgctactatgaatatttgtgtacaggattttgtgtagacatgtttgtatttctctttgatataaacctgagtagaatttctgagtcgtataataattccatgtttaaccttctgataattgctggactgttttccaaagcaactgtaccattttacattcctaccagcagcgtatgaggattctgatttctcaacatctttgccaacatttgttattaatattaatctgtctttttcattatacccatcctagtgggtgtgaagtggtatcttattgtgtattcttagtaacttcttaaaattaaatatatacaaattatattgctcatgctttggtgacatctggtcaatggtgagactgagaaattaagcctcatgtgcagtaccttctgcttatgaaacacgtagtgaagagaacttcccttgactttttttttttttaagagacatgttcttgctttgtcgctcaggctggagtgcagtagtgcaatcatagctcactgcagccttgaattcctgggtttaagggatcctcctgcctcagcctcccaagtagctgggactacaggctcgtgccactgttcctggctaatattttaatttttattttttgtaaagaccagatctcgccatcttacccaagctggtctcaaactcctggattcaaatgatccttccacctcagcctcccaagtagctgggac

SEQ ID NO: 35426 - DNA, 1010 bp, Homo sapiens
tgctagttaggaggctgtaatggcaatccagatgctactaacccaggtggggttaataagggttagcaagaattttaagtttccaaatctacccttactttttttttttttggagacggagtcttgctctgtcgcccaggctggagtgcagtggcgcaatctcggctcacagcaagctccgtctcccaggttcacgccattctcctgcctcagcctcccgagtagctgggactacaggtgcccgccaccatgcccggctaatttttttttgtatttttagtagagacggggtttcaccgtgttagccaggatggtcttgatctcctgacctcgtgatctgcccgcctcggcctcccaaagtgctgggattacaggcgtgagccaccacacccggccagtctacccttattttctattaaatgtatttccattaaatgtactttatattttattttattttattttgagacagagtctggctctctcgcccaggctggagtgcagtgatgggatcttggctcactgcaacctccaactcctgagttcaagtgattctcctgcctcagcctcctgagtagctgggattacaggcacccgccaccatgcctggctaatttttgtatttttggtagagacagggtttcaccatgttggtcaggctggtcttgaactcctgaccttaagtgatccaccctccttggcctcccaaagtgctgggattacaggtgtgagccacctgtagcttaaagcttaaagtaagccaaaatgtacttactttaagtcaactttcagaaacaaagttttttttataaaaggatccgtatcttgtaaaagacacagatgcaataaaacttaagttcatttaaatgagaaataaaggatgacttaaagaagtatgaatggaattataccagaaaatctgtggtgaagataatgattgtaattgagttcaaaagttagctctgagtttctggcagcctaggtatagaagggaataggataggttgtgt

SEQ ID NO: 35427 - DNA, 1038 bp, Homo sapiens
gtagctgggactacaggctcatgccatcatgcctggctaaattcttgtgttttagtagagacagggtttcaccatgttggccaggatggtcttgatctcctgacctcgtgatccgcccgcctcagcctcccaaagtgctgggattataggcgtaagccactgcacccggcctaaaaaccgttttctagggttcttttaatgtgttttttagatattcactgcctccttttctaatcagtgggcagaaataagtgggttgaggtatcaaaagaaaggtattccaggtgtagaggacagaggaaataaagccttgaggtggaaatggaatgaagaaatcagaacacttgtctgaataagaagaaaacaaacaggaagtgagttagctgttttggtgatgaattccgaagtcaaaggtaagaaacttgggctgtacctttctcaagtcacttggtaaatagggccttactctaaggacagtgcagataaagaataggggacggtaagacagcacatagcctcatgtggaaactcactgatattcaggatacagcagtccttgtttcactcagctctacttcagtgccttggtgtctgattctttctctctgctttttgttctgactctgctaccatctgactgccctctttgccatcctggccccctcctggcctctgcatattcccatgagcagtggtgtgggattctctactcttctgttctttcatcattcccttgctctcacttcaccagtggcttctcatgtcactgagaatgaaattcagagtccttactgaggcctagtagcttctgcaggacctggcccctgctccctttctttctggtctcagttcatacacctttccacctttgctcacagtgtcccagccacattgaccggcctgttcttcctcacacccacctaaactcagaacctttgtactcgctgtttactcgaccgcaccttctctccttttttagtccttgcttccctcctctgtttaggcctctatcaaatgtcacctcctcagagaaccttc

SEQ ID NO: 35428 - DNA, 1139 bp, Homo sapiens
gatattaaccccttatcagatatatggtttgcaaatattttttcctgttccatgggtttccttttattttttcctttgctttgcagaaactttttagtcccgccatgaattttatacatggattttagtcaactcctgtatcgttttatagtctaagtaggctccacataaagaacagtgtggtgagttatcattgaagtaactggaaagcactgtatgtgttcattatgttctttcagcttgcaagaaatgggcatgctcaccttagctgatggaggcttattggaaggatatacatgtaagttgaaagacatggaaaatatctctgggcccggtggctcacgcctgttatcccagtactttgggacaccaaggcgggtgaatcacttgaggtcaggagttcaagacgagcctggccaacatggcgaaaccccatctctactaaaaatacaaaaattagttgggcatggtggtgtgcacctgtaatcccagctactcgggagggtggagcatgagaattgttgaacccaggaggtgggggctgcagtaagccaagattgcgccaccgcactctagtcccggtgggtgacagagcaagacgtctaaaaaaataaaagaaaaaagaaagacgcaggaagcagtttcagaaggtatttgaaaatgagagtaactctaaaaaactgatagcaaatagctactctggagaacattttttaataagttggaatgactttgttgctccttatggttagtgacactacagtttattgatgtctgcttccatggcttctaaggtactaaataattggctgtcttttgtttttctcacagtcagcctccccaagaaagaggctctaagtaggttggtcagccacaattctgcacaggatggccttttgcagcagggttcttatgcccatttaccttggaggtgtatggcaaacccatagagagctgccttttcaaacccatcccaggtccctttggggcaagatggcagagtcttgtggtacccacatggctcacctagaaatgcctgcaattgcttttgtctgatgggacctagggcctgtggggggtaccttaaggtttctcagaatggaaagagggtaaagttggtaggctccaggaataaactg

SEQ ID NO: 35429 - DNA, 1046 bp, Homo sapiens
gccaccatgcccggctaattttttttttgtatttttattagagacagggtttcaccatattggccaggttggtcttgaactcctgacctcgtgacctgcccacctcagcctcccaaagtgctgggattacaggcatgagccactgcacccggcctatcttttattttctttttttttttaagaaacagcctcgctctgttgcccaggctggagtgcagtggcacaatctcagctcactacaacctccacctcccaggttcaagcgattctcctgcgtcagcctcccaagtagtctcatcctcccaagtagctgggattacaggtgcctgcgaccacgttggctgatttttgtattgttagtagagacagggttttgcagagttggcctggctggtctcgaactcctgacctcaggtgatgtgcctgcctcggcttcccatagtgctgggattataggtgtgagccactgtgcccagccaacgttcagcttttctttattgtccactgaaagctcattattgtgacataagcaattatgttcaaagtgatctcagcaaatcagaggtgagttgatcagcctatgacctatttttaaccagagtgcatcccttcgttctgttttctttccctctctcacactagtcatccagcagttctataacttcactggcatattatattctgaggacagcatattcactgttttcccttaggtcatttcagcttttcatccaatggtgcttagagactaatcctttgaacacttggttctaatcccatctgtcaattagctttgtagcatccagcaatttatagcatctttctgggccttagcttttggtgtattaattgaaaggatgaggcttccaactttacattttatgatattaggagatgagcagaaaaataacttccgacatagtttacagcagtttgcccatgtactaagttagatcttggagagtttctcccaggctccttgtgaactgctccactggtgtgggagaagccaaaggggcaaagctcaagacggtgtctccctggtg

SEQ ID NO: 35430 - DNA, 1050 bp, Homo sapiens
caatgtaagactcaaggtgaatgttctggatacatgtatttgtagaagcaaaaggaagggacacaactggttggaacctgtatatctttaacattaggtggtaaaatggaatatactatggaaataaataccattgaaatgttttatggtattgccaatttaatacatattttatgataagaaagaagagaagaagttcattgtagattccacatgggtaaatactttaaaaagtattccaaatacagctcctcatatccttaatatatctgttgtcaattattatatatttcatgtcttggatcaagttttcttgtttggacaagaaatggaatggcaaaatccagatctttttagctgaaaacctcacctattctctattcacccacttctaaagtggacacaataattcttaaaatggtacttaaatcagtatagatttgcagaaacaaaggcctgcttaagaatgttctttcatttaagtattatgaggttaattaaatgtgtgaaattgtaacattttgaattattcacatggcattttagtttttccttttaagaaccatggcttttctgtgcaggtgttcttcactgggataatgttttaagataatcccctgatgtcatttaaaggaactcttatttctgaagcatgattgtgtgtttttgtgtttttatagtgtatctctttcttatcctcttttggcctttgtttatattctcattttaccactatcagctactattttctattgttgattgtttttattgtttattctattttctattgtgtatttgttttcacataacaaatcaaagcctgtttaatttgtggaagacagttgtcaaatgtgtaatatatccagttactaatttttctctgattgatgctgctcgtctcctttcagatgagtgccttattaaaaccatctaattttatggtgcttactagaaagaatgtagagaaattgtcaaaattttctattatttactcagtaacccaaaatgatgtttctggaataaaattttggcttctcagttagtgacttg

SEQ ID NO: 35431 - DNA, 1060 bp, Homo sapiens
attgttattaaaatgttataagccactgtaattacaaagaattttttttaagttttcattttcatagtcatttgttgattaaacttaccttttccccagggattattcctacccttcctcctgagttattttgcctctggttcatgatggtttgtaaaatgttaattaatttttattttttcctatgcacaccctcagaattctaaatttttaattttgtcccatccttttaaaaggaaatttatccgtcaataagaggcgaaaataaaactcggacacttgtatagccttaaaaaaataatttaaagatttttatcatctctgattaagccaaagaggtaggaatatggttgtatgttgccatgctaacacatgcatgtagtgtgaacagcatatatcattctgatttcatatcacatgatttcactgatttcatatcatttttataagaaaataccaacatgattgaaaattacactattagcaatagttttatcatcattgtagataacctccaaaatgcttattttatatgaaaaggcttatttcttttcagaaggtagttcagagtaagatttactttttctgtggtagggctcattttttccaacgttttggaatacctgaatattctttgcttgctatctaggatatttctcaattttaaagggactctgtagtattgatctataggaagaggcatttcagctttattttagtcaggatattttagagagttcattgtacaccgtttgcttgtttagctagcttatgctttttaaataaaatgtccaaatgttaccgcatgctgtatttcatcaaatctgagacaccatagtttttttagatgcattccaatttcggaaatgttaatgtgaaaaaaaaaaaaactgtattcaataagctaaagaatgttagaatagcttttggtcctgtaaaaggagtaggtgcagtgaagaaaacatgttcttagttaacaggaatagcatgtggaattacccctgcaggtatagtattatatacatttttttcagataaatattctgtagcaaagaaatct

SEQ ID NO: 35432 - DNA, 1040 bp, Homo sapiens
acttttcagcaaggtctgctaggcttattaaacagtcgtattgcttttgtttcagaaaataacatctctaattatttattctacaataaaattttcattaatatgaagattttatacatacccaaaacaccgaccatcataagctctgttggtaaagcaaatttgggaattattaccctcccaaatttagtaatttaatatcctccaaagtctgagttcaatggctatataatgaatttttatttccctccaatatttaatatcttttacttctctttataaaactattagacatgttaaatatgtaatgtagaaaaggcacttgtctttacagtgtcctaaattattagtaatctcacgggtcagaaataaccacaataaggattttaagcatataattttttaaacaaaactgccactttaattcatttttaatatactgctagtattttcccatggctgtaggtattcaaaagtatataatctgccatataaatatatcgtaatttctcactattgttgatttagattgtgacctgctttgaacatcgttatgcataaatttaaccacatcactgtacacagatttctacaagtagttttattgggtcaaggagtgtgaacttctttagattcttgataaatattattaaattttttcagaaaaaattgtatcagttcaaaaacagcatggggtttctaatgttacaagacattatattttaaagcacatttattcttatggcaaagctttgtggactttacttagctgatactgtatcattgtacttccatgtttattattctaggttttctgtgaactgaattttcattttgagaaaataacgatatatgtttttacttaaggcctcataaggaaaatatatcaattgattaaaaaattatttgtcgctcatagtgattttattttttattcttataggagataatatttgccatagacttgtcacctatattattttcaactgtaattttcttctattcttttcatcgttttaaaactgtgatctgtgttttta

SEQ ID NO: 35433 - DNA, 1025 bp, Homo sapiens
attatttaagagacggggccttgctgtgtttcccaggctgtccttgaacccctgggcataagagatcctcctgtgtagctgggactacaggcgtggaccaccgtgcccagctcaaaaagtattttaattatgaggtttcattgtagactaaagaataatcttcacaccaaatggaccattttaaaattgttttatagcattccattgattagttctttatacagatgataaacttcactgaagtatacacaaatatcacaaatagttatcttcaaaatgcttccaaagaaaattgtttcatatgtgtattataatgatctgatccatttttaatgttgtttttgttggtggtagggaagacagtatgaagaaaaaggacataggaatagatcatgatgaatattgttttcactttggtagttaactccaaaattatttctcaagctccgatcattcaccttagccatagttttgcatttctagctgtctgttgggcatcatcatctgagtggtccactgaaaactaaaagtactgtttctttctccaaaccaagtttttatttgcctccccaggttatcttttccctctcaataggtcccatcttctggtcagtggatagaaaagtggcttgactttttcttatcatctgagtctgggcctgctgaataatttaacagacttgatcacttagtctctctttttcttacccgccaggcaattgtaagataaaaattggagggtcagtgtttaaaaacgttaagagcatttttgcttgggcttctgtttgcatcaggctataacgccacgtccttgacaatgagttggcagtatgaataattggatgagttttttaaaatgaatttttagctctgtatagataataacctcaatacagatatctggtgccccatttcccactgataaagccaaacctaaatgagaatgtttgaagtcttccaatatcttaccatagtttttacctggtttcatctcctctcctctctacttgttttgaatcatactc

SEQ ID NO: 35434 - DNA, 1029 bp, Homo sapiens
gaccgaagaatatgataggaccaaataagtagctatactagaaggaagcacatttgagaccactaccctaaacagccaatgactacagaaccagagaaaaccagaatctgccaaatttcagaaataactcagcatctttacagggagcctctacacaatcacaatgagactctgaagagtagcaagtactgattcaaatccttttagctgtggactccactctgcctcacaatcattttagaagagggttttgagctttagaataagcccaccactgtataaaactagtgagtctgttttttaaggtaggattcccatcttagtaatcataattttggcatggcaattattaaatatgaaccacaaggagaaaaaaatgtcctcttgttattactttttaaattaggcattttaatttcatttactactgcttgatactctcttctctgggttcctgggaggtttcatttggtaagtattgttcagtaaaaattatgggacaccattgttttggactgtgctcctgccctaggccccagtggaccagatcaaactaaaatgtagtcattcatgttaactgccacataatcaaatagaaacttccaggaagcagacagatcccaaagcagaccatttttttccctgagaacaggagattccagtctagctgaatcccctgtgctttaaacccttagaaaaagtaaactgaagtaacctgatattaacaaatcagcttttttttcctgttctgtttccttgttcccaccttacaaaacccactgttgtgctgttgctcagtaggacctctcattctaccttgcagaatgggggctgccctgattcatgaaatgcaaataaatgccagttagatctgtaactaaactgttgtaattttgtcttttgacagaatgcagttaaaactcaggtatatccacactgcttttatttcgtctccttcccatttcagaaactcctgtctagatttcttttcttgctctctaaggcaaacaattaccacagttagatgaa

SEQ ID NO: 35435 - DNA, 1070 bp, Homo sapiens
tgatgtctggaatttactttaaaataccttggaaaaaatgaataaaagatagataaagcaatattgctaatatttcagtacctgttaaatataggtgacagtatatatatagaggttcattatactcctttctccacgttttgaaaaatttcatttaaaaattcaaaaaaattctaaaaaatattttttcttttagaaactaacacatgctgaaaaaattcaaattttgttcactgaccacgtttttgctgccaccactctttcaacatttaaaaaatgttcttaaatctttaaaaattcgatttacattttcattaagaaaatgaggcatttgctggccatttcatccttcctcttgtattttttctccttacctgctgccaccgtttactagaaaaatatttctcttgttttttctgtaccttctccttgaaatataaaagttcagtgaaggcaggagagattttagcccgtttttgtatggctgcatcttccttatccatacctgcatagcatgtggtaggtgctgagtaaatatttgaatgactgaatgggtgactgaatagactgaatgaaccagagttgtagaagacatggggtgacgtggggtttggctaaggacagaaccaaggagaacccctttgaaaattcactctgtgggatttacaggggaaaatgtgggctactacataagaaattaagataagaaatcatctttcctgtttgactgtaaagccttaatatttcaagcatttaacatattctcagcataaataattaagtttttttcttcttttttctgaaacagtctcactctgttgcccaggctggagtgcaatggtgcgatcttggctcactgcaacctccgcctcccaggttcaagtgattctcctgcctcagcctcccgagtagctgggattacaggcatgtgccaccacgcctggctaattttttgtatttttagttgagacgggggtttcaccatgttggccaggctggtctcaaactcctgacctcaggaacccacctgcctcagcctcccagagtggtgggattacaggcgtgagcca

SEQ ID NO: 35436 - DNA, 1032 bp, Homo sapiens
tgtacatgccttagtttagaaatactttattgctaaaaattgctaataatgatcaactgagtttttagtgagttgttctaatctttttcctgctggagggtcttgactcgatgttgatgactgctcgccagtcagggtgatagttgctgaaggttggggtggctgtgacaatttttaaaaataagacagcaatgaagtttgttacatcaattattctttgatgaaatatttctctgtagaatgtgatgttgtttaatagtgttttacccacagtagaaattcttcaaaattggagggcagttctctcaaaccctgctgctgctttgtcaactaagtatgtaatattgtaaatcctttgttattatttcaatgatgttcacagcatcttcaccaaaagtggattccatctaaagaaatcactttctttgctcttttttataagaagcaacacctcagccattaaaattttattttgagatttcagcaattcaatcatgttatcaggctctgcttctagttctcttgctatttctatcacatctgcagtgatttcctccactgaagtcttgagctcctcacatccatgagggttgggatcaacttcttccagagttctgttaatgctggtgttttgatctccactcatgaataatgaatgtttttgaaggcgtccagattgatgaatccttcccagaaggctttcaatttactttgcccacatctatcagaggaattcctatctatgacagctatacctttatgaaatatatttcttaaataataagatttgaaagtcaaaagggcttctcaatccatggcctgctgaatggatgtggtggtagcaggcatgaaaacaacatgagtcttctggtatatctccatcagagctcttgggtgaccaggtgcaatgagcaatgtcagtgagcaatgagtagtattttgaacggaatcttttattctgagctacagtctcaacagtggacttaaaatattcggcaaaccatgttgttaaatagatgtgctttcatcaag

SEQ ID NO: 35437 - DNA, 1045 bp, Homo sapiens
gaaaacatgtttgcaaggctttttttaaagaatgcttatggatttagtcataataggtaacaactgaaaacattggtatggctgggtcaagttggactaattcactgtagcccagggtcatgtaagaacatggagttttcaaggtaggcatgggggtggtattgaggggagggtagtaagcataaaagacagtgctcagaagaagataagggtgccaggtttcagttccagggatgttcacagtaaggattacagtgggctaaattttaagattaattttataaattctaaacacatcctgttgactttaactgcaactcttaaaatgtatcaataacatgactttataattcctggaaactgatattttcccaatactttgaagaggtttaaaaatagttgactaatattagaaccaatatttcatgtattgatttttctctttaagtgacagttagtttagaaaatgctaaacttaagttagcagtatagagtaggtatatagttatactgagtatgaatgtcttggtaggcttggaagcctaccatttatgtcctcttgaggtacctgaattaccaaaagctttatgtattctgaagttattgaaaataagagcttttgggaattcaggtagttcaggagtgacttttctaaaaaacagaactgagcaccatacactacttcttatagccttttaattactgccaattgcctagaataaagttcaaattcgagggcaacacaaacatggccctttgtgaactgacagacatttcctaataattccttacatacatgatacccttgagccttacagaattaagaatttctgaatttaccttggtgtttgatgcatctgtgtttctatacgtgctgtttatttacctaaaatagactattctctatttagcctcaaaagtctcatggaaggttttaaaaaatcctgtctaagctctgttaattatattctttatactattatatttagtagttaatattataaactaccttacagtaatttttacagatacctggcttactccc

SEQ ID NO: 35438 - DNA, 1029 bp, Homo sapiens
ctgttgtaaaaattttggcaggaattatataagattattcatgattgttatcgacttatctttattccttcatttttttttaaagcaggaagcaataatagtttacgttcgttaacctcaatatctactctaaaacatgttgtttttcttgttattaccatgaaagtctgggttaacaggagacgagactagcttcttcacagatacatacattaatttgacattatagaaaaatgagactgtatcctgacttgccagtttggttttgattggtggtttcacctttttttttagactcaggaaaacggtggcaaaaatagtataaagggtaaattctcatatgcccttcattcaagttcccaaaatttaacatcttatgcagtgacagaaaaattatcaaaatcaggagattaacattcatgtaatactgatagtctacagactttattcagatttcacccattttctcaccaatggcctttctctggtccaggatcacaatatgaaattattcacgtgttgtattttagttatcatgttttcttagttttctttaacctgaaacaattccagtctttctttgccttttgtgactgttatactttggaagagtactggtcagtaattttgtggaatattgcacaatttgtgtttgtatgttttcctatgattcaattaattttaagcatttttgattaagaatactgcaaaaatgattttatgaatcttatttagaggcacatgatgctgatttgtccagttatcagtgatactaattttcagttcctttcgttaaggtggtatcaggtttgtccactctagttgctttttttcctttgtgattcataagtagtgttgattcagattctaggttaagaaaaggaaaaaaaaaagtatcctatgggaaggtacttaaaaataagtactttgggaccaggtaattaacatttctcaccatactctaccaatttttaacttccttgctgttttttttttcttttttttttttgcagtggcacgatcatgagt

SEQ ID NO: 35439 - DNA, 1357 bp, Homo sapiens
gacagagaaggctgcttcccttgttcacagttggtgtgtgtctttgtgtcccatacaatggaggggatatccctgtgtaggcacagtagtgctgaacatgctttttttttttttttccttttaaactttttattaaaaaaaagcaacttggcatttaaaaaaatgtagacatttttgcggcttgcatttagtattgactttaacaggattaaggattgtgaggaaggaaatatatattcacacttttttgtgttccttagttggaattctgcaccttcctagtagcttctctgacttcttaacagtgattattcaaatggcagaaactctggggaagagatgtttcaacaaggagataggtctaaggtgattctagggtgaaaatatagggattggattatatgccatatggaggccttctcttgtcatcctccactttccacaacattttttgtgcagtcgaagccatgttcagatgaattttagaaggcagccacttatagttaatgttatttactagtgaggacagtgggaagagtggtaacttcatgtactttgccttggcaacttttggattgatagggaattagagagccttgagggtatatgtttgtgtgtgtgtgtgtgttttagcacccaccagatgaccccaaaggccatgcataggctcatttcattgtactttggagatggttcttggagaagtcttctggtgcttctgacatctcattgtgtagagaaagagttggcaaactatttttgtaaagggccagttagtaaatattttaggttttacaggccacatgatctgtcacaactttcaattctgttcttatagtgtgaaagcagctgtagacaacaaggaagtgaatgaatgttgccgtgctccaattggcccataggccgaagtttttggactcctggtatagacaactgccaaatccaccaacaaacagtatgagctttattacactacaaagccaggactggctatttttggtggtctttgttttctagatgagatgtttttctctgagttcatttaaaatgattctgcataaagcacatactctactgtacaaaatacttttgccttcatggtgatgaaaactatggattgagggtcggggtgataccatctttaaagggatgcagctaaaaagtagggactacctgcatttcttatctaaagataaccacagttggcatttagtgatatactggctttgtatcatggccaaaagtatctgtaaagaagcttgtgggcatacttttgaaaccttctgaaaataaatgtaaagcatttacttcgtgtgtaaaattagaagtgtctatggttggtttgaataatatgagt

SEQ ID NO: 35440 - DNA, 1046 bp, Homo sapiens
taattttatcccaacttcctttgttatagttgctgggaaatgttgcaccaagaataacagcaaataaatagattgctatgtaaattaattcgagaatcataagctttggtgttagtagaatatccaagtagaaatgttattttagatggaaaactacaaactaaacataatgaatccatccatctgttattagacttggataatgccagaagtttatcaactcttcctaaaactgtcaaagaactaagtgtataaagccaatgaataatgttagataccttatttttgttagaaaggaagcctattagacatgaagcaaactaataatactttattttaactcacttttctatttttagacagaagaaactcatccagtcagctggaaaccagaaattatcaagagaaagagattttaatgaatgtggaattttttctctctctttttttttctttttaattaaaaaaaaaaaagcttggcgttcatgaggatatccagtcattttgtgctctggctgggaatataaaggagaaattcacttgcttcaatcattgctgcttcatattttacaataaactgtcccctgtcccctacccctgtgtttttatttctaaaacaatttgtgatactaggaagatgcagatatcaagtaaatgcaggtttattgaacataactattctagatgtaatattttgacagtcttattagaaaacccccttttttaaaaaaaatgtatgaaaccgataattaggacatttgaaggagcagtagtttttttttagtcctttaaaaaataacatctgtgactaataatttgagattaaaagatttgaagtcttaatttatgtatgtttattccaaaaacagtttttgagtgtatgttctacaaagttctgcactagatactgttcaggaaatagacaagtaagatgtgtctatcctctaagacttccagtttggtagcttagtatagaaattctgtaacagaggtgcaggtgaaatgctgggggaacagaagggataagaccatttatttttctcagg

SEQ ID NO: 35441 - DNA, 1003 bp, Homo sapiens
cacatatattttcactaacgagccaataatgagattcttgttgcctataaaatgcaagataagctcagtagccaagcatccatgcatagctttgtaggtaataatgaatactcatatgccttcattcagcaaacattcttaagtacgtataatttttcaggcaatgtgctaggaattcaaagacagtaaaactgttgcaggcctagttatttattatctggtggtttaggcagacatgtaaatatcactaagcttgtaaaaatgatggaaatgttagaagcagtatctgagaaacatgtcctctgtctgtattaaggcattggtccacagatggagtggccagtgtaacagggtagaggacaaaaggcttagtatgtaaagaaagtacagggaaattgggtgtttctagttttagtaagttacatccactcttggaaacattctgttagtatttgaggaactgcttaatactgacttgaaactaatacccaaatataatggaaattaactttactattctgggctgctttaataccatgtgggctgtgatcaaatcaaatttgagttacgtgttattaagcagtatttattgtagaaattaaaaacaaagatgagcaaaacttaatcaaatttgtataatatcactgcctggagataataaacatttggtgtatgttttccttcatcattttattttaagtgcatgtaaatgaataatacacagctactaaaagaagttgatttttcattttaataggggttgctttgacagcagatactaagatccagagaatgccaagtgaatcagctgcacagtccttagcggtggcattacctttgcagaccaagtatgaaatattataattacaaagatcttaaaagcatatttcactgttcacattttttctttttaaaatttctttataactattatatgacattttcctttatcaggactttataacaatttaaaataaagggttagttttgcagaatacatgac

SEQ ID NO: 35442 - DNA, 1022 bp, Homo sapiens
agatgacaaacaaaataaacaagttcttgagacacagggtcagaaattaaaactattcaaccactctaagcccaggaactaccatgaagagttgggcatgtgagattgtaagtgctgaatttgagagagaatattaattcagagtctttctctaaagaaaatattaatatcaaaggcacattgatgcaaccccagcatcttggcccctgtgtcagattaacaaggtttccttggagcattaacctactttttaatttaagaaaaaaataaaaggttataaaaaaggcttatcaaaactatgtctaatggtcaagatgattaaaatttaatagatttgttataaacaaagatttgagagacagatttaattggcctcctgctgtctttattaagacttgttgtttgagatattaagtctcctctctcatagaataaatgtttttttttccctttttaaagaaatcgttatcactttggctaaattatttgcttattttacaaggacctgtggttctattttgtgatatcaagtaacttttgatatttgacactttaaaatcatattcaaaatttttgatctcatttttttttatattaagtctccagaagttcagaagacacatattcagcttatttgctataataaaatcatgcaggaaggattgcaaaatatgaaatggtgtttaaccttctttggattataacatttatataaacgtgtgactagtatatgatccaaaattatatgagagttctgtgattctgatatgtatttgcatatgtcatcagtaataattatgatattacataaaattgttgtatttcatagaagtaaccaaatttccttatgaactgtttcttcattcgtggcttttctaagacttttgtcatccataattgttgtttaactttgataattttttttttttttgagatggagtcttactctgtcgcccaggctggagtgcagtggcacgatcttggctcactgcaacttctgccgcccgggttcaaatgattct

SEQ ID NO: 35443 - DNA, 1047 bp, Homo sapiens
ctataatggattattttgttcttcagcaagcaacctgatttgaaaataataatcatatatgtacataaatttatagtgttctattttctctttaggaaaataaggaaaaacaagaaagaattgaacgaaaacagaagaaacgtcattcctttcttgaaagtgaggcacttcctccgtggagccctccaagcagaactgtgttcgcaaaagtgttttgataattctagttcttacattatttggttatttatcggtttgccaatattagccatagatttaaaaccattcaattatttatagttagaggaatatattttaattaaatgccagacactcctgctgacaatgaaagaaatactttggaatgtaatcagtgaaagcatttttttgaactgtagataaactgcctcaaacaaagacctaataatcagattgtttttaccattaagatacataagattttatcatgtcctgataattcttatggtggagtgattcatgatctttttcattaagctctgtatgttatttaagtatatttaattccagtaataaaaaggaaatcatctaggtaccataatgatagaaattattccttttgtggatgattgtgaatctagattcaggtttttaaatgaagggtcgctgggaagtgcgcatatattattccttctgaaactgatgtttagctcaaagcagttgcatttgtactgtgctagttagaattttcatcagttgaggcagtagctcagtagaactctaatcatcaaggctttttatttaagaattttgccttatgttttaatatgagtgtactttatctgttccaggcttatgtgataatcataggtactttataatgagtccacctctgaaatttttctttctgaattctatctcactttattatttcagtgataccaaaagacatcaatgtcacagtagtgatatacttatgtattagttatggaaattccacaggagttcaaggtcattatcactataattattttcctgactaaagccataaaggtgatttaggcaatt

SEQ ID NO: 35444 - DNA, 1251 bp, Homo sapiens
ataatgaatatcagaggactaaagataaatgtatatgtgtatatttatatctagccatatttgtgtctatgtatatatacatatatatgtatatcactctattattttttccactgtagaaaaaagctgctaaaagagaagaagcattagcatcatttgaggcctggaaggctatgaaagaaaaggaagcaaagaaaatagctgccaaaaagaggcttgaagaaaaaaacaagaagaaaactgaagaagaaaatgctgcaagaaaaggagaagcactacaagtattcagaactttgcacatcttaattattttaaaacatttgaaatccaaattaatgattaaccatatttttatttattttcaaatattcacagtaagaaaattattctgaactttttcaggcttttgaaaaatggaaagagaaaaagatggaatatcttaaagagaaaaatagaaaggagagagaatatgaaagagcaaagaaacagaaagaggaggaaactgttgccgagaaaaagaaagataatttaactgctgttgagaaatggtaatccaaaatcataaatattttgatatattttaaattatagtaacacttcaggattttataaaatttatttacttgaaatttagtaatgcatttcaatttcattactgtcaaagatgtactagggaatctttattatgtattttcctttaactctccagtgttttatactatgctctataggaatgaaaaaaaggaagcttttttcaagcaaaaggaaaaagaaaaaataaatgagaaaagaaaggaagaactgaaaagagctgagaaaaaagataaagataaacaagctattaatgaatatgaaaaatggctggtaggtattatttgtcaatgcactttcgtctttttcatgtaccttttgtgtcttttctgtccctaattctaattctatttgctccagacctactgatcatttctacctggaatctgctttgttgaattcaagctctcctcctgcatatagcatattttctttgacttagtcatttctattaatgtttctactattccctcaaacacccaggctgaaaacttgttataatcttcttccttacctgcatccccacatttaccatttactattcatgcccattcttcctttgctgtgattctcacatctaacatagaaagaagacaagtttactattgagggtactacgtggtggaacttggtcatgacaaaaagtaacactgaacttaa

SEQ ID NO: 35445 - DNA, 1025 bp, Homo sapiens
aaagtacctggacaggtccattgccgctttgttgattatgaggtttagtaacgtgtacagggcttggtactcaaaggcttgatggatgagcctcctcattttatagtggtagaaactggggcaagattttgttttgtttttttatttttaacattttttttttaatattataagagttcacaatgttgaagagttaacttcttgtgactggttactttcaggatgacaactgtttctttactttgttttttttttgttgttgttgttgtttggttttttttttttttttagatggatttttgctcttattacccaggctggagtgcagtggtgtgatctcgatctcggctcactgcaacctcagactcctgggttcaagcaatcctcctgcctcagtctcctgagtagctgggattacaggcacgcgctactaagcccggctaatttttttgtatttttagtagagacagggtttcaccgtgttagccaggctggtctcgaactcctgacctcatgatctgcccacctcggcctcccaacgtgctgggattacaggcgtgagtcaccgctcccaacatgtcgggatcacaggcgtgagccaccgcgtccggcctgattattaaccatcatttatttgtgccttactagagctctgtatagagaagagttgtgggcttcatctggactcttcaggacagagaacaaaggggcataggcacaggagggaagtatggtagcacccagagagatagataaagccatggtcatttttttatacacacactttaagcattttatttttcagcagaaaacaacagccttgacacagatgatcactttaaaccatcacctcggccaaggagtatgttgaaaaagaaaagtcacatggaggagaaggatggactagaagataaagaaactgccctcagtgaagaattggagttacattctgcaccttcttcccttccaacgccgaatggcatacaattagaagctgagaaaaaagcattctctgaaaaccttga

SEQ ID NO: 35446 - DNA, 1031 bp, Homo sapiens
ttaatgagtatatcagtttatattaagagaattagaagttatagccaccatacaaattgagtcaatgtatatttaccctctttttctttgcctgataagctgggcagggggtggatgaactgaagagtactttaactcacaacacttcagtgaacttcatcttcctttaagttgccgcctgatttgttctatcacttctatgattttacattttaaaaaactatgtataatcagtgatacttgtttgaatatacaagtgaatcttgtttattcttgttattaaattatatacaaagattaataatatagtatagtatgtaagtattatagccacattataacccccactgtgtgtttttcttaatggtgattttgtaaatgacttatccagagttcagacggcgtactggccagcatgccctgtggaagggtgtagggtttctgtggggaggggttagaaggacacttgatgcctgaggtgctattaaggaatgcatgactgattgccaaagtggttattaattatgcaggatatggtgaacaaagcagcacagtgaatattgaagtgagagggggaaaagaggagggaggatattttttttcatcccttctgacatatgccagtaggttatttcactgttaatatcatgtcaagaaaagtcttaactgaaagccaaatttgcttttatgttcaggttaagaaaaactccaaccaactctcaaacaaggcttcaaatatattaattcactttctttcctaggaaaaaaagcagcatgcctggaataaaaatacttagagcaatataataacaccaatcctacaggaaaaacattagtggtgggatgtactcaagattttttaaaatgttaaattttcataacttattgcattgcattcccctattgttaaaccaattctaataagtcgacatttatttgaaaacttacttaaaaatagatttgtatttacctcgagaattaagagaaaatttgatgcttagaatttttttgtatttagagactggaagagg

SEQ ID NO: 35447 - DNA, 1058 bp, Homo sapiens
cttgaatgctgagttgatcatgcaattcagtcacccagcttaactaatacaggattcactgtatatgtgtgaaagttgtcagattcataagacttgtgatgaagtaagaacccaaaggttgattgaaagtgccatccatcctcttggctaagaaaagtcctgtcaccagggttgacctattatcagagatttactgtgactgagaccagacaccacatctgggagactttaggccaaatgtatgtcattggttccattattgaaattaaattgaccacatttttaaatgattgtttaatcatttaacaatgattggtaaattgtcaatatggacttcaatgggctattgtcaactctcctggactctattgagccaggctttgtgtggcaactacattgacctattctgggctgtagataatggagacatgtggggagtaaaggcataggagttcttgtaattaaactatgtttaggaaaacaataggcttttggactggaagaaacaggagagaatgaaggtagtgtcctacattgcctaataagtgtaagttggtgattttcatttttaagattgctttctggagaaattatatgaattttacaatctcacaagctttgttttttctgtgtttaaatttacgttgacaattaacctgccatttcttcagccgtcctttgtcttggttccatatatccattcatctctctacttacagccacattcattctactcttaataaactgtctgcagaagggtgagatctgatgagttagaatttgacaagtggttatgctgttaagccttgcagaatgttttgaattatcattgtgtactcctaaattacacccctccctccatgcaccccctccaccccccacactttgctaacagggtgcaatccatcaatcttatctgtgtaacagattaatgaaagcctaaagcaagaaagtgtgcctcctggacagcagacttaaaagttcttgaggcctttgctcaggggcaagggtccctccaagcccctggatcatctctgatgcttttatttttctctttt

SEQ ID NO: 35448 - DNA, 1050 bp, Homo sapiens
tgaaagaaaaagttctatccacaggtacatattacctggatacatacccatgcacaggactaagaagtttgaatattacatcacaaagaagaaatatagttcagaaagcagcattagatatttaggctaacgttatgccttgccaggtaggaattcgtcataattatcctagaagcattcatgaaccaaagtcagctggagtatttcacccacgcaaaagaccacctactgtatgtcacacaaatattactctgtaaatcccatatgaatacacttgtcaaggttgggtggtcttactgaagatttttcacttcaatgacatttgtataacatgaaaatattttacttgaacttcactggattttttattttctctttgatatacaagttaaaagagaattttcatctcatggtatattacagataaatatttcagtacaaatgaaataaactttgtacttgctgtcatcacagtttttatctttagcacttacatagttacatattcttcacatttgttctttctgtgactgtgcatttcatgttgttgtttttccttacatctataattttagactttgagaactagaagctaccctgattatctttagaagactaccagaggagtaaagcagatgccctagatctcgttcagatttggtacctaaacaaatgctaaacccatttttcctaacacctatttaggcagtttttcatcatgctgtactgcacctcttgtctttttttatatataaacataatcttgtcaaaaattgcaaggggtgtaagattttgccctacttgcaaagtagtaagtaatcctatcccttttgtggatgctaatgaagacaggagacttctgggtcagagacaaaggacttcattacaaaagtagcagtcactggagtattattagcactttcttgtgctttctcctagagttccagttcccacaggttaacaccaagagagccatgtgacaccagctacccatattccttcctgattacaccttcttgtcactgcaaatataatcattgtcctaaattt

SEQ ID NO: 35449 - DNA, 1035 bp, Homo sapiens
tttagtcaaaagattgacatagaatacaatgtaagcatttttaagaaaggccaacaatccctatcaacatgcagttgtctataattactttacaagtgttatgggtgatacatgttaaccttctataccctggatatttatatattaaggacagtaatcttaactatttcaaaatatgtttttgaaatctttcttaggttgtcttatacttagaacattaaatgtaagtttaagaataattacctaaatattgtactttttcttcacataaggtagattctgtgatgagctatatttttgttatttttactttttggcactagggagagaattgtcttaagatttttaagtcttggagaaatttgtttatcttaaaatacttcggtcagagcattctttgattagaattatgaataactacacaaaattcaaagttaggtaatgaatgccaagcttagtggactcaattttcaacttaaagaattgattttcttaacaatgtattgttttagttgcggaataatgaaatagcaggatacttaggacttgggagacttactactatagatacagtcatacttcaaatttattgcgtgtttgcatgcagacagtaataaaacaggtggtcaataaagggagtgtattagtccattttcatgctgctgataaagacatacctgaaactaggaagtaaaaagaggtttaatggacttacagtttcacatgtctggggaggcctcactatcatggcagaaggcaagcaggagtaagtcatgtcttacatggatggcagcaagcaaagagacagagagcttatgtaaggaaactcttgcttttttttttttttttttgagactgaggctcgctgtgtccctggctggagtgcagtggtgcgatcttggctcactgtaacctctgcctcctgggttcaagcgattctccttcctcagcctcccaggtagctgagattacaggcacatgccagcatgccccactaattttgtatttttagtagagacagggtttcaccatgtt

SEQ ID NO: 35450 - DNA, 1051 bp, Homo sapiens
gttacaggtgtgaaccacttagcttggccatgacctaaatcttattacacaaaatgaaatgtcagcaatttgacaaaaaaaaagcatactctaaattattgctgaagtttatattgttatagacattgatatttaaattgttagaaattaaaggcataaagccatatatgctgcttttaaagggtgcacaaatattctaagcctccttttaaagaattattatagtctacaaaattttaaaattttcattttcattgatcagtgtattaaatgtaatgccaattatttattttaggccattgatgtaatgcaatgcagttacattgatggaattcactgtatcttagtaaaatggaagagacaagatgaaataagcacacatatatcttctgttatggagtagaactgaggctaaactgtgtagtgtttggatattactaaatgcttaggtaaagtgtgtgtgtgtgtgtgtgtgtgtgtgtatgtatgcacatacatgcacaagtatatttttctccccatattctatttctgcctaggttacgacattcattctgaaatgtctaacaccagaaacattattgttatgatctctccaaatatgaaaaacaagtaaaagaagctaaagggcaaaagtagggaatttacctatgtaataattgagtttatattaagagtttattttatggaattagaaatgagtttgtgatagactggatgccatgttgtatatgtatcttgttaaaacttgtttgtaaacaggtttgaaaacttgatccatcgtgcagtagagtcacatattcattaatctttttgcatgttcaatgaaatgctttctattgaactagtttcctattatgtatatgtggtatcagtgtatttggatatagacaaattgaatttcacaatgtgttttaaatatttaaattcttctttttacttttgaaaacaattagcaaatcagtatacaaataccagtaaaatgtgttcaaagataatgtggacaaatacaaatattgaaatttttcattacttttacttctgcatcttt

SEQ ID NO: 35451 - DNA, 1055 bp, Homo sapiens
ttgttacctttttagagaaattctgtcttctgactttttaactatagagttctttcaatttcctatgcagtggaatcccaattattctgcagcctcatgctgtcaattttatcttctatttaacatatttcctgttgtgctgtctgcctctgaactagaggattaatcagtattgaatacataatttttgagtttgaaatattgctatatattttgctcggattaattgcattattgctgaatttttaaaattgtattataaactcctattgtatgcattatagtagtgatggtattaaccttgctgtaatggattattcataatgaacaatactatgatgcaatgctgaaatggtatatgacatatttatggagagagacttaaatgctagtctatagcatgaatctgggggagaactggataataaaattgcccagttaggaagttagaatgataatctagatgataaaatcctacattatgtatttagactataattaggctatttgtttctgaaaaggttttgaactgtccagtaaaaagtcaagattactaagataaaatatagttaatcaaaactctaaagggggatggttaatacacttaaattgttgctaatatacttacagtgatgaagtaataaatttaggcatggatatatttttagccatggaataatgaatgtgaatagctgatcaattagtataaccattattttgaggcacctgatacttatcagtcaccttggaagatgtcagggatgaaaggtgaatgatacatggttgtgaactacaggaaacacacagtctaaggagaggcttcaaattctagttgtgtgagagaagaaaactaataaagagaaaaaaattatgtaacctttggcatgctttttgtggatgactttaacatataatgtgtgtttatgtataatatgtctataaaattcgtattttctaagataaagttttgaatttctaaattataattattttgattgccccttcagtttcttagtgtgtgtcattgctggtcaatgaagcatactaacagacca

SEQ ID NO: 35452 - DNA, 1065 bp, Homo sapiens
tggggatggcttgctgaccagtagggaatttatccctttctttggctgtcattctatcatttacttgactaagataccaagtatctccaaactctcaggctgcagctaaagctgcattcctttcatcaaaggccagggtttgatctaacagtagcatgacatctctccaagtgagatcgaaggtttgccctagacccggtaggacatctatatacctatcaggatcatctgaaaacttccccaggtctgccttgatctgctttaaatcagagagggagaaggggacatgtacccaggttgggccaaattcccctccccctacagcttgaaggggacataactgatggtccggggggatttgtggtcctttggagatttctttgcttatttctttctgagcaggggagattagaggaggattatcattaatagtaaggggagctacagggaggctaggatatgggggtaaactgagaggtcctcctgtgggatgtaaattgcaagctttgcatagttgtgtattctccttcaatgaaaagaaagctaggacataaggtatttctctccatatttgccttcgctcttacagaaaaggtcaagctgcaggatagtattgtaatttgtacttccctcaggtggccatttttctccatcagagagagaatattggggccaggccatagtgcagaaaaaaatgagctgcctctttttcagggtttgtgggtcaaattggccccaatggcttaggatgcatttcaagggtgagcctgttgatgcctgagtgtttcccatctgaaagacaaaaccacccacagttttggtttgttttgtttctccctctgcctaagaacctgcaatggtccctggaccctgctgatcagaatagttgtgcttaccgacgcagcagcagaaacaacccctgcccaagaacctgcaaccatccctggaccctgctgattggaatagtcgcactcactgacgcagcagcagaaacactagttttcctcccaggccacaaagaggactgaggaaggttggatttagtggcccttactgacacattct

SEQ ID NO: 35453 - DNA, 1045 bp, Homo sapiens
gaataccgatgctatttttgttgcggaccagtacttgtttgtccttaaatactttatgcctctgaactttcatagaatcctttatgaaagttaacttcatcaatagacggttaatattaatagagccacagtgctaccagtagcaaactaggtagaccattatttgttttgcaacaagatgctaagcatggcagactttgaagttgcgtttcatcttaaggaccaagggaggtaactttaaggttgccagtggtggatccagctccgttaggctaagttgtctacagctaatgattgtgtctttattctatatccccagcacctaaaacagggtcacacaacattcactaaatgtttgttgaataaaagagttaacaaacataattgaaagctttttttcttcctatatttagcatgaagactgtcattgtttctctaggaaatgtatgaatctgaacttttttgacttgaagaaaaacattctttttttacagagatttggactttgatgataggttttaaaaatatatgataaatattttttgtacttgtttgattttttttttaaagactttacttcagaaagggaaagactgtttagaaagaatgcatattttttccctatttatttctgtggttactgcttttgcagtttaacagtgtttgtatttgatatttgtatatgtttgattgctatctttaaagtgccttatcagatttatggctctgtgctattactttttgagctttgcaagttgtgtacataataattctaaagaagttactttgtttgcaatgcatcaaatttaaatgatgtgattttttttgtattatttgatcttagtgacagtgttctattttgcatcctgtatcttatgttgcttttggtgttttgtgttgtgtgtcaacgattaagccaactaattctctaccatatataacttctggacatttttgatacaacatcttaattctttgtagatatggagataggtacagaactatattctaatgccccacaatggggctatgagaggggacagat

SEQ ID NO: 35454 - DNA, 1064 bp, Homo sapiens
cttctgcgccccagagcgtgcgggcgggaagcgggggggatgccagcagctaaagtgccacccctctctgagggttccccctttagatttagtggtgaggagtcttaaggggttttccttccacccgccccacccctcactggtttctttttgtctcgccttctggtttcaatcatccgcagtaacccgaagccacgcagctctgcgctgcctgttgctggctctctgcctcctcctttcccatcggagaatagttttcattgcatgggtttcggagaatagttttcactgcatgagtttgctggctttctgtgggtacttgagatcaggctgtgatttctttccatgggacttagagcctgctgttctagttggccacctgcccagggacagctgataatgccattgtctgccccaggcctgcttagcgctggacccagcttgaagggtttaggtcacgtggattggcttctttgacggtttagttcaggactcctccctttgtatgattgctagaatgcatacttaggatagtttctgttaaatctcgaatccccagaaactagcaccccacctcccaaccgtaactcacacaccactggaggggagaagacagggaaggggagttttatgttctcttgagtgggtcaagtggaatgaggtatgtagagtgtaacctgggagagttctgtggcctgacctttcctgcagattggaaactaggggatgaactagattatctcattgctccgcaagtatttttttttaaggatgactagagtgcttaaccagcttttatttttgcagaacaaactgattgcaagtaaatatgtagaatgaagtgctaatgtgttattgaggaacactgttttattttatatcattggtgaagaaaacgtttggctgaaaagtgaattttccaccaggagctgagtgttttctgcatttgtgtgtgattttttaatgttatttgtcagagctcagagtttctgttctttgatctatacattttcattgtttaaagtgttcacaggtcaatgcccatgttacccaaatagcagtaa

SEQ ID NO: 35455 - DNA, 1022 bp, Homo sapiens
aatcacagtgcaaaactatgtgcaaaatcagtgtaaaaatctagctgtggatagaggaagaagaataaacagtttgtatccattttcacagcagtctcttatttaataacatagtttttaatatccagagacagagggattctatctttctaataacactttttttgtgtgtgatactgggggtaaaagcctgaaagtttggaaagacatttttatgttatagaattgatgccactttatatagctgctctctgacaaggaaactaataactgggaatatttggataagtgctgatagacatataaattacatctttcagcaagaaagtgttccaggagaatcaacatacttttctaatatggctttaccttaaacatgtcaattcatctgggtattttattctaaaaagaaatttaaagcattaattgagggaaaagggggcatatttttggataaagtgtacttaattttgtttaagaactacttctgtcttatacatggaggtggtttgctaagttggagatggaatgagtagttctagactttgactgaaataagtgagtgatggaaaaaagtgtgttgaatattgtaacataaatcatgcaaaactttaaacttctattgattatatatttctcaaaactgcaaggtgggcatggcattggaatgattaatttagaaatatattttccagacaaacacatttaattaaatctttttgggtatgaaatgcatccttcttccaactctacatctaggtaatgtcatgactatgcacatttaacatttacataaatatgtttatgcttcagagcttttcatttgcttgtattattactcattataattttcaaatcatatcatctagcaaaccattttaaattaaaaaataatcaatggcaagtgattgtgttttctggttctcaaaataatatacaaaggagagtagttttaactataattaacttcaggttgcccaagagagtaagagataattagtttgtattgtttatattccttt

SEQ ID NO: 35456 - DNA, 1045 bp, Homo sapiens
tgtgagagcagtggctttgtctgttctgtttaacaatatatttttatctcctagaaagctactcaataaatatttgtcaaataaatgaatagcatcccacatgtccatctatgggattttgattccaaatattatataaggagccttaaagcacattttgcacatacctaatgggactgaagagttattttaatatcatcagatgaaggtgcatacattctactatatttcctgtggatctacaaatatgtattttcaatatattttgtacaatactttttatgagacatggctaagaaattgcaacaataacatatggttttccttttctatttcatttagaatatttttaatcaatgaaagaggtgaatcaatcagattctggcaggaaaaataaatggtgtatgcactttgagcaatttcatgaaagtttaaataaggaactgtttatagaagtgtgaacagagcctactaacagtaaggtcccattctcaattttaggcctgaaaaagctaaagaaagcagctgttataagaacactgagaaacagagacatgagaagagcacctttgacagaaaatgtgatgttagttcaagggatgcagccaacattcagtaatgcttccaggtgttgggggagaaatagcgctatctctatctaattcatattctgtctgtatctctatctattatctatcccatctcactctccctcctcctttgatttcttgcttatttccttgcatactgaactctaccagaagtcagacgaaaaggcagcttctcagagtcatttcattcatacgagttaataaaagatctggaaaaggccccaacttgggggataaacacatcaattgcccagttcatcctgtacagtaattttaggaatacattgaaagaaatttacaacatttggtttatcagatatcacagattaggcgggagtgagattagttgaggagaaatatcccggaagagatagagcacctaaattaaatttgagggttgcccaaacagttctcacttttattactgttcacgt

SEQ ID NO: 35457 - DNA, 1048 bp, Homo sapiens
ttgcactagagctgcacatgcatcttatccaagacatggcgaatctgaaagagaaactcctgtaggggctgaaagagctacaggctcagcagaagccccctgtcaacaaagtaagctggaagagccaaatatgacatagctcttcccggagccctgtgcggaactccagacgccttaccaagctcatgcaaattttacctgtggccaatatttgcctaaaagtgtacaaagaattgtagtatctagctctagtagttaaatggcacagtacagagctactatagacttcattcattcctacataacttgatttatcgctttaaattctctttggtctcagttataaaaagatgaagatagcagggtacgtcttcatgtgtcctctgtattttgacatcctaaccttccttactatttctacagtgccacagtttataacagtaaaattctgttctataaccataactgctgttttagattacatcctatatttaaatgaattgaatgcgctctgtcagcagttgttaccatagtacctctattaatttattttgcattttaacttcttccttgaatacatgtttcaaagaaagatcatgtggatcacttttactaagttgcatacattaaaaatatttttctgcactctttaaatgtataagacagccaggtaatcctttcttccttcctccctttctttctttctttcttcttctttctttccttctttctttctttctttctttctttctttctttctttctttctttctttctttctttctttcttctttccttctttctttcttcttctttctttcttttctttcttttctcttttttcttctttcttcttttttctttctttcaggttcttgctgcatcacagaggctagagtacagtggcactatcacagctcacttcagccttgacctccctggctcaagcgatcttcccacctcagcctctgagtagctgggactacaggaatgtgtcaccatggctgactaattttgtatttttttctagagatggggttctgccatgt

SEQ ID NO: 35458 - DNA, 1101 bp, Homo sapiens
acaacaatgcgagttatttgtaaaattggtttgactaggttaattgcaaaattacatctcacctagttcatggtgtttgttttttccaggtagcttgaactggatcattaagtatcttgggatttaattttgtaatatttgttggtgaaactttgtagtctagaattattgcctggtattgatcatagattaaaattagaaatttgtgaggtttaaacttaaaaagagaaaaaggagaaacattgcgtgatgtgaaaatagaaagcttgcataaaggaaaataagagaaattatgtgctatgaaatgttgggctgcataaaggacctaaaaattacctacggttgtatcatgttcatcttcatagccatttttaatatgccaccgtatactttatggttgaataaatgtatttaatgaatggaaatttgaattaatttgcatataagaaacatgaatttttctctgattttaggagtgatagcaaaatactaccagagtaatctctctgaaataaactattcccaattaaaatccttacttcctccctcctgctcttaagatgatgttcaattatttaaaatggcacaataaggttctttgtaagcttctccaattttattttttctggttttgccatgtaagaagcagcagctttcactttgcctttcagaaccatttttcttttttgtatatactgttctatcatgcctctgtgtgtattgttcacattttctgaaaattccctttattttcatagctaactcattcaggtatttctgttgggttatccataccaagaagtctatcttttccttttttctctttatccagcactataataacatagcattaagtcgtagcacttgttcattgtacatttaatctgttttctcagaaaaaggagtcttctatctgatctccatactttctagtgtctttcagataccagatttaacctgagttttaaaatcttatcgtattaagatcagtaataagaaattatgcattggaaggcatacaattagttcatgttttcaaattagatttcagaatctgaagtgtatggattcctggttcatggaggatttgatctagaatgt

SEQ ID NO: 35459 - DNA, 1050 bp, Homo sapiens
gttgcagtagaatatttcatgcctgtttgatctcccatcatatatgaaattgtattgcatcttggtctacacttagtaattatcaattgaatatattgttttctaggcataagttggtttataaattttgtcctgaatgcaggcctcttttaacttaggtttttattactatatgtatatttggaactattaaattctattttagaatacactttgatagcacttattaacattcttcccaaagtgcttgttatttaagcaatggtttgtatacttaagatcatttttcattaatattcactagtgttcttcaaaaataattaatactcagggttttttaaattaaagttttatatcttacagaatatttcaataaagcttacatgaggcatgaatgatttcataaacatgaaataaatactgttttattcagtagagtatccatttatgtcctgtgtatatacatatataattattattacacagaaacattcaattgtttagattcccccattcctcagtagtttctaataagtgaattctgctgattgctttagaagataaagacaaatatctgttaaagagcaatggaactagagaatgagcatatacactttagctgaaagcaaagtagcaccagagagttaatggttgaatgtcagatgaatggtgtactgcacataagaagtgataggattgagtggaaggggaggtaataaggatttctgaaaaatttaggctaatactctgtggcattttacaattatttggcagtctttttatcttagtgatataaaatcagtgtcttaaagttgatgaaatatgcactcaattaacatgaaagataggcttaaagttatattcattgttggaggtttcttattgagatggactatagttttatatttaagcaaattaaattttgaaagtattatgaactttgtttctcttaacagtaattttagagaaaaacaggataataatgtattcatttaaaaaagaaaaatatcaagacacttcaaagaaatgttgaccctcattttttaattg

SEQ ID NO: 35460 - DNA, 1032 bp, Homo sapiens
ggaggttgcagtgagccaagatcgcacagctgtactccagcctgggtgacaagagtgagaatccgtcccccccccaaaaaaaaaaaatcctcccacttcagtcagcctcctgagtagctgggattatagatgtgcaccacaccaccacacgtaacttttattatagtatattgctataattattctattttgttattaatgttgttactctctgtgcctaatttataaatttaactttattgtagttatgtgtggataggaaaaaatatagtgttcgtagggtttagtactatctgtggctccaggcatcacctgaggtcttgcaatgattcccctgcagacctgtggctccaggcatcacctgaggtcttgtaatgtttcccctgtagataaggggaaaatactgcatgtaacttacttgtttactttgtctgtgtctcctgatagaatgtaagctctatcttttgcttactactgtgtccttcatacatagaacagtgtctggcacaaagtaggcactcaatatacgttgatgaattaatgtcactaacttcagtgatttcactactggaattgtagtagaaaaactatgctcacacatgctcaaagcctgttcctgtaatccagctgtaacctgggctctgttttcactttctgtttatgatgtcctgaactgagagattatttttttaaggtcttgtttaaaagtttatgtctaggatacactaaaaaataacaacatatcagaaataaaagagataagactgctagtttttataatcactgctatttactattgtccaaaagtgcccatcaatacagttggataaaggagcaggattaatttgtgcatgggatggttatatattaatatctagaaaatttaagaattaaccattagacatctagagaatttaagaaaaaccattagaaagcaagggtggcagactgtaaaacatgaagataacaattttcttacataccaaaaagaaccagtttaaaatacaattggaaaggtaccattgccgattg

SEQ ID NO: 35461 - DNA, 1047 bp, Homo sapiens
attcccagtagatcatactttgtccactcacatttctacatggctgtccattcttcatcaaacctaagcataagaatagttttctctgggtctttcatttcttttccttttttttttttttttttttttttttgcagtagggtcttgctctgttgcccaggctggagtgcagtgacacgacctcagctcactgcagcctcaacctcccaggctcaagcaatcctcccaccttagcctcccaggtagctggaactacagatgtgtgccaccatgcctggctaattttttatatttttttatagagatggggtcttgctatgttgcctaagctggtctcgaccacctgggctcaagcaatcctcttgtcttgacttcccaaaatgctgacattacaggtgtgagccactgcacctggcctgggtcttcatttctgaaggctctgatcactcaggaaattacaagtgttttaggagctctgtgtaaggaaccagacaaagaccaactatctattggacaaagaccatatatgtatttctcatcacatgctgtgttttatgtttctcctcctcaggcaacacagtgcttctcctcatactgtgcatgcagcactccttcccagagcctggcagattgtatcttgacctcattctggccatcttggcactggaactcatctgttccctgatatgtctcctcatttacacaggtgagaattacaacgagcctgttcttataggaacttcgaactgcttcctttcctcccagtttaaagtatagcccattagcgacaaggaagttctctgtgtatctgagtggtgaccacatgcagacttctttaatttcaaaccaacaggaaggtacagccaccaccagtgagaccccattcttttaagattgtgtcattaataaatttttgttaatgcaagtgaaacttttccattaaaacaagacacaaactttttgggctgggaatggtggctcaagcctgtaatcccagctctttgggaggatgaggcagaaggatcacttgagctctggaattcaaga

SEQ ID NO: 35462 - DNA, 1049 bp, Homo sapiens
ttcctacttggaggaggcagcgagaaaaagaaaaagaaggaaaaagaaaaaaaaattttttttgaatccaggctgggcatggtggctcatgcctataatcacagagctttgggaggccaaggtaggaggattgcttgaggccaggagttcgagaccagcctgggcaacatagtgagttcccccatctctaccaaaaatgagaaatttagtgctgtaacaaatgagcaccaagttaagttttaaaaaaaaaaagaaattcctgggcgtggtggctcacgcctataatcccagcactttgggaggccgaggcgggtagattccctgaggtcaggagttcgagaccagcctggccaacatggtgaaaccctgtctctactaaaaatacaaaaattagctgaacgtggtggcgggcaactgtaatcccagctactcgggaggctgaggcaggagaattgcttgaatccgggaggcagaggttgcagtgagctgcaatcataccattgcactgcagcctgggtgacaagagcgaaactctgtctaaaaaaaaaattaaggccgggcacggtggctcatgcctgtaatgctagcatctcagcactttggtaggctgaggcgggaggatcacttgaggtcaggagtttgagaccagcctggtcaacatgatgaaaccccatctctactaaaaatacaaaaattagctgggtgtgatggcaggtggctgtaattccagctactcaggaggctgagaatcgcttgaacccgggagatcaagattgcagtaagctgagatcgtgccactccaacctgggtgacagagtgagactcgatctctaaataaataaataaatctctatttcaaaataaataaataaataagtaaaataaaataaaataaataaattagtcatgtgtggtagcctgtgcctgtagtcctagctacttgggaggctgaggtgggaggatccacttgagcccaggagtttgaggctgcagtgagctatgattatgcaccacactccagcctaggtgaaagagtgacacccccctct

SEQ ID NO: 35463 - DNA, 1058 bp, Homo sapiens
atgcctataatcccagcactttgggaggcagaggcgggcggatcacaaggtcaggagatcgagaccatcctggctaacacagtgaaaccccgtctctactaaaaatacaaaaaaaaaaaaaaaaaaattagccaggcatggtgatggacacctgtagtcccagttactcaggaggctgaggcaggagaatggcaatgaacctgggaggcgaagcttgcagtgagctgagatcgcagcactgcactccagcctggatgacagacagagcaagactccgtctcagaaaaaaaaaaaaaaagagagacagaattggtttatgatatagatagctctgaattctaaataaatagtttatttcggatcaaattccaggattttatgcctcaacccatttccagaaacttgtaaaattagtaattcttaaatacttaaaaaatttttttcccttgatttcacaaatatggccactcttcccaaggggaaaaaagatcgcttcttggccttttggctaagatcaagtgtagtatctgttcttatcagtttaatatccgatacgtcctccatccaaggggggaaaagactatcagtgcaatgattgaaaaccttacaaagaacgaatcttttgtaaaataacctttcttgcaaatctgcctcacaagggaatgtggtggtttgggctgcggattcagacataccagggttgaatcccagctctgccatatgctagcttgtacaaccttgggcagttaacgtaatttccctaagccttggtttcctcatctgtaaaatgaggataataaaaataagattgctgtgaggattaaataagctagtggtttataaagcacctagaactgtgtctgtagagagtaaggattcaataacttagctcttgttaatattataaattctaaagtaaaattttgctagaaaatctaggttaatttctaggtcgtcacaatgaaccatatttatttcaccttataaaacccttataaatagagtttataaaactgttttataaggtgaaataaaagattcatttcaaatatgtattt

SEQ ID NO: 35464 - DNA, 1027 bp, Homo sapiens
actggactaacgtaattcagaaacactttacgaaattaaaagttgaggacagggtttaggggtagcatgcaaggtgagagttagaaataaaagtggagtattttgaaaggggaggcatgaggaaagaaaagcagttataagttttgaggcaaaaatttggcaactgagtttgttttcctataaaactaatgctatgttagagtttaatgtaagatggttgtagttctgctccctgaagtggcaccttcttttgataaatgaagagtagcaactcattaggaaataaaaagagtggtgacaaagacatgatctcctttttttttttgatggtttgcacaattaaaaaaaaataaaatagtattcaaagttagtagttaccaaaaccagaactcttcacaaaaatccatactcagaggcaaaccttaaccaataaacaatttgtaacaggcctcctgcactaaatacttcattgtatacacactcagcccaactgtacaaaaaacattactgatctgtttactctggctttaacagtaagtcatttgtcatttaaaaacaatattcatgtggttgggataaaaacatctcaaacatatacacaagcatctggaaggtaaaattttccagattcaatcaccaccaaatcccaagaggtctctttttttggctactgaataatcttgaaagcatccttcccttgatatgctattgcaggtcaattctgtgagcagatttcagaaactcaaatttccagagcacaatattgattaaagagataaggtaccagaatcaaccagagaatttaactattacaagtcctcttattctactcttctcacattcagtgaaatctgatggtaactaaattccacaaaatttcagagtgagcaaactcattaacatgttggcatttaaatatcacttatattcaagaatgtaatgtattaatatataaaagagcccaagatatacaaactgagcttttgtatatcaattctgttttccttttactgaattttacggtaaa

SEQ ID NO: 35465 - DNA, 1024 bp, Homo sapiens
ctttcattttatgccactattaagctttttatttcattgagtacattgctctatgcttattttataaatttgtattttttggtactatcttgttctttcattatagtttccattctttttaaaattgtttcaatctttttaaagttattttagaggttacttaagattgttcaatattgtgcaatacttggccttctgtttttctgtttcttgtactatgactcttaatatggtttggatgtctgtcccctccaaatctcatgctgaaatgggactcccagtgttggaggtggggcctggcgggaggtgacgggatcatggggtggatccctcatgaatggtttagcaccatccccttggtggtaagtgagttcttgctcaattagttcacatgagatctggttgtttaaaagtctgggacctccaccacttctctctgttgctcctactcttgctgtgtgattcacctttttcgccttcgccttcaccatgattgtaagcttcctgaggccgcaccaggagaagattctggtactacacttctgtataccatgcagaactgtgagccagtaaagcctattttcttttcttttttttttttttgagacggagtctcactgttgttgccctgagctggagtgcaatggcgcgatcttggtcactgcaacctccacctcctgggttccagcaattctcctgcctcagcctcccaagtagctgagattacaggcgcccaccaccatgcccagctaatttttgtatttttagtagagatggggtttcaccatgttggccaggctggtctcgaactcctgagctcaggtgatccacccatctcggcctcgcaaaatgctgggattacaggcgtgagccaccatgcttggccaataaaacctattttctttataaattacccagtctcaggaatccctttatgcaaaaacggcctaacacaactctcctcatggttatttcttcacatattattacctttatataaggcaactttttgcttgcttctaag

SEQ ID NO: 35466 - DNA, 1015 bp, Homo sapiens
cttcatgtaacagcacttttacagaatttacctacacaataatcagtgaaaaagcaaatctgagtgtagtttgacaatgactatgagggtagatgacagtgttgttttaaaaaccaggtgtgtgtgtgtgtgtgtgtgtgtgtgtgtgtgtgtgtgtgtatatatatatatatataaatataaaactttatatataagcaaattctttggttcttggagtccatgctgctgttactatttctctatgtaacactaggggccactatacacacaggaggtcgaatgacccaaaagagctaataaaatctttttctctctttgccaggttagtgggagaaatgaaagatttctgtttctgttttgctaggccttataaccatgtcctcattggctattttgatgatacaatctattttttcaatactttattttccgtattggttagtaatgtagaattagtttacatttgtaagtctgatgttcattctgtcagagagcaaggattcacagatgagcctaccagcaaccacaagctccaggctgaatgagttctgtcctgctcggttggtagctatacatgtgtagatgccggcatcacgtgacgtgactggctctatgatcagagagtgcaccccgttctcacgcaccagcatcttgtgagcactgtcagggcgtacgggctttccatctagttgccagcttagatctggggttggtaacccactgacctaaatcataaaagaaatacatgtaaatttttgtattaaaacagagtgaaatcactggtagctaagaagtctgcataaattcctccttcagtagtacaagaggtggcttttttttttttttttttttggacagagtttcactcttattgcccaggctggagtgcagtggcacaatctcagctcactgcaacctctgcctcccgggttcaagcgattctcctgtctcagcctcctgagtagctgggattacagatgcctgccactatgccagcctaatttttagtatt

SEQ ID NO: 35467 - DNA, 1022 bp, Homo sapiens
ggtcttgattctttatccagtttgccagtctgtgtcttttaattggggcatttagtccatttacatttaaggttaatattattatgtgtgaatttgatcctgtcattatgatgctagctggttattttgcccgttagttgatgcagtttcttcatagtgttgatggtctttacagtttggtatgtttttgcagttgctgggaccaattgttcctttccatgtttagtgcttccttcaggagctcttgtaagtcaggcctggtgatgacaaaatctcttagcatttgcttgtgtgtaaaggattttatttctccttcgcttatgaagcttagtttggttggatatgaaattctgggttgaaaagtcttctctttaagaatgttgaatattggtccccactcttttctggcttgtagggtttctgcagagagatctgctgttagtctgatgggcttcctcttgtgggtaacctgaccttttgtgatcctccaaaggaggatctttctctctggctgccgataacattttttccttcatttcttcaaccttggtgaatttgatgattatgaatcttggggttgctcttctcgaggagtatctttgttttctctgtatttcctgaatttgaatgttggcctatcttgctaggttggggaagttctccttgataatatcctgaagagtgttttccaacttggttccattctccccgtcactttcaggtgcactagtcaaacgtaggtttggacttttcacattagttccctaattcttggaggctttgttcattccttttcattcttttttctctaatcttgtcttcatgctttatttcgttaagttgatcttcaatctctgatatcctgtcttccacttgatcgattcagctgttgatacttttgtatacttcacgaagttctcgtgctgtgtttttcagctccatcaggtcatttatgttcttctctaaactggttattctagttagcaatgcatctaaccttttttcaagcttcttagcttcct

SEQ ID NO: 35468 - DNA, 1022 bp, Homo sapiens
attattttttctttttgttaatagccattctaactaggatgagatgatatttcattatggttttgattttcatttccttgattagtgatgttgagaattttttcatatattagttggtcatttctatgtcttcttttgtgaaatatccgttcagatcccttgcctattttttaataaaaaatatttttgctgttgaaatgtttgaattctttgcatattctggatattaatcccctgtcaggtgaagagtttgcagatattttcttccattgtgtaggttgtctgttcactgtgttgattatttcctttgccgtgcgcaagcttttggtttgatttaataatatttatttatattttagtttcctgtgcttttgaggtcttactcataaaatctttttctagaccaatgtcctgaagcatcttctcaatgttttcttctagttgttttgtaattttgagtcctacatttaggcctttgatccattattttttctttttcaattaggatttgaatgtggaattttaaaatttcttttttctttgttttctttttctttttttttaaattgtactttaaattctgggattacatgtgcagaacgtgcaagtttattacataggtatacatgtgccatggtggtttgctgcacctatcaacccatcatctaggttttaagcccctcatgcattaggtatttgttctaatgctctccctccccttgctccccaccccccaacaggccctggtttgtgatgttcccctccctgtgtccatgagttcttattgttcgactcccatttgtgagtgagaacatgtggtgtttggttttctgttcctgtgttagtttgctgagaatgatggcttccagcttcatccatgtccctgcaaaggacatgaactcattcttttttatggctgcatagtattctatggtatatatgtgccacattttctttatcgagtctatcatttatgggcatttgggttggttcccaagtctttgctactgtaaatacggctg

SEQ ID NO: 35469 - DNA, 1050 bp, Homo sapiens
gaggtgggtggatcacctgaggtcaggagttcaggaccatcctggccaacctggtgaaaccccgtctctactagtaatacaaaaattagctgggcatggtggcgtgtgcctgtagtcccagctactggggagcctgaggcaggagagtcgcttgaacccaggaggcggaggttgcggtgagcctagatcgcaccactgcattccagcctggtgacagagtgagactcttgtctcaaaaaaaaaaaaaaaaggaaaatacatgtgtctaaagacagaaaactttggacagcgagaacccccatgatattgttcttaagctgattggattgcctgttgattattgtggctcttcactgtaaattaagtttcatttatagtttgttggaaattctgcagaggctagtatcaatatctgtgttagctgcttctccttttattcttgcattccttctggccttctcattcttcttaaagatgagaggatatgaaggaaatattgctgacttttaaaataaatgtggtaagatgttatggcagagaagactgtatttcactgtgtaatttcacagtgaaacatacataatacaaaattagttttgttattccaggccttcattacagactatctgaaggtagtactgtgtgcattttttcaacaactttttatctgaatacaaaaataatatatatatctgttgtagacagtttggaaagagcagaaaaatataaagaaaataaaaatcattacctgtaattctagtatctaatgataatcactgttaatattttggtatatagtacttttttcagtcattagtataagttctttgttgtgtttttaatagtggtataacttaattcatttgtaacctacattttatacacaaatgttactttcagatttaagtatccttctatagcataatttttattttttatttttatcttattcatttatttgtataaatacaaatgaatgcaggtgcagatgcagtttggttatatgcatagatttcatagtgggaagtcagggcttttagggtatctgtc

SEQ ID NO: 35470 - DNA, 1618 bp, Homo sapiens
agtttgttagctactcagagaagatattctaagtgttcttatgtgctgtttggaatgaagttgatttcccactctgcttccctctacaaatataatattaagacatagaaatttgttctagttaaaatcttggtttagctttttggtaagagccttatttcttctcccttagaaaagtgttgggttgtttttgttctttttgagtcctagaaacttacatcaaagagtggacatcttatctggcagatacatcaaatagtgccccatctcacaattgttagtactagtgataggctaaaatcctgatgcctttttaaatataaaggctctgctgtatataaaaatgttgaaaactaaaataatgacctagggatatggaaatgaggtgtttctatttatagtttatagctagtcagaaatcgataaaggatataatctttttaaaaaaattgtttaaaaatttttttgagatggggtttcattctgttgcctaggttggagtatagtggtgcagtcttggctcactgcagcctagaccttctgggttcaagcgatcctcctgcctcagtagtagctgggattacaggcataagccaccacacctggcctatatctttagagtttatcaaatataaatcctcattgggcaggagccatgcatttacctttttgagcaagagtgtccctgttcctaaagagttcctataaaaattgaactgggtttttaatcacatatatggaactaaactagaagtatctttgctctaaattggtttaatgcttgtcatttcagttatcttttcgtcgagttaagaagtgataactttgtagccaattggaaacctctgactgtccaggtgatgcagtagcatcatttgttggacagtggcatctactggtagtctgtaaattttatagcctagtttgaaaggcattgttaatatatacctagcaaaaaggggagtagagcacaatttccagaattttataaatgaagtgaaagaatgatatgggggagagtcctttggggccaaggagagagagcacagaccggaaagtaatacaagtagtaagaagggtgtgtgagttgtttaaggactattaatctctctcttcaggtctgtgatacatgatatggaacctaagagaccatttatatgtcatgtcctgggttgtgaatatatttataaatgaagatcacgtggttcataacctttaatataaaatgacatggaagttccatacagcccagagtaatttatcattagagactagctttacatttttaatttaatttctgataaattttatttaatttctgataaagtggggacagatacatgagttttaaaaagctacagacagattattagggcagtaaaactattctgtctgctactgtaatggtggacacatgatattatgcatttgtccaaacctgtagaactgtacagtctaaagagtgaacccttagcttgtgaagacaaaatggtattaataaatgaatacataaatatataaaataaagagtgaaccctaatgtaaactatggactttacttaataatgtatcaatattggtttatcagttgtaataaatgtgccacactaaggtaaga

SEQ ID NO: 35471 - DNA, 1035 bp, Homo sapiens
aaaagaaaaaacaatccagaagcagcattgttgttatcttagcactgttttctctttgtgtatgctttatgcaagctgattgatttttagcgttagcctagatgaactatctgtggaataaattatttgtggtttggaactacatgtatttgcttccttctcttttcaggattggaatactgtgggtaatgaagggttaattttagttcatgataatacaaaagctgaatggtttcggggaatggaagtgtacttagctaacaataactcatgcagcaaactttctggcatgtctcctacgtgtagggactgagctagctccccaaattacaggaatgaataagatatttctgcacaaggagctaagtatagtgaaaaagactgacatgtaaacaaataattgcagtgtcatatgacgaatataaaatagaggtacatatatggtgctatagaaatgttgaagaaggaaagaatgcttaattttgtctagtttagagtaaatagttgtcaaggcagtagactaaatagtgggaatccagtttgcatactaaggggaagttttaagattgttatggaagtgtggttgtagtctttctttcttaaagattttactttccagtgcagttttttttttttttttttgaaagtggtggttttatttatcactccccttttttgttgagcatacaacccttatagagcataatatatatttatatattatggatttccagtgcaatttatactacagataaaaacctgtagctgaaaatgtggccatttaatagagtggcctttatgtatatttagcagatttgatggtatgaatatgcatcatttgtcagaagcaaagtgcaacttgaaatagtagaattaaatcagttctgtggattacttaccaactttattttagatagtaatttcaaccagattcttcaacagatcttgtaacacagctaacaaacatcacagttaacaaatatgtgtccttttatgtcagttttcctggtcaccttcaaatggagtttccaatta

SEQ ID NO: 35472 - DNA, 1033 bp, Homo sapiens
gctgtaactcaactcaaccttccaaccgttgttctttattttgagggcccacatagaaaatgcagatctcctttctacatggtgccctgaggtatttgcaggtgtgtccccttgtgtcttttctctaatgctatacccttgaagttttcttttcctattcctcatatcacagatttcaaattttcccttattaaatctcctacctcatttagtgttccaagtccactaaagagacttctggttgatataaatttagtaattccatgattgttgtcacttaatcatgaatcttcatgactagagtgtctttagtatacatttctccatcacatctacaaggatgtcctgggagaactcaccagatgccacattgagattcacctgccttttacatcatcctcccatccacagagttctccccattgctccatcatttctgctgtgacttattgttagcgagtgtctcctggaagagttttatttccctttctaaatgttcataaatcttttgtttaatactgttttagaatttcccagatggtctgcaaagtgctttggtgtcatgtgtttgaaaattggggccgggcgcggtggcttacacctgtaatcccagcactttgggaggccaaagctggtgtatcacctgaggtcaggagttgagaccagcctggccaacatagtgaaaccctgtctctactaaaaatacaaaaattagctgggtgtggtggcacatgcctgtaatcccagctactcaggaggctgaagctggagaatcacttgaaccagggagtcggaggttgcagtgagccgagatcacaccactgcactccagcctgggcaacagagtgagactctgtctcaggggggaaaaaaaaaagaaaactgggacttgcacatgcctttccttgcctgttcagttgaccctcatcccagattcaccagattatcaaaggttattggttgcatttcttctgctatttttctctgtaccctggagtgaattcagcctgttaagagtaatcatttgatctct

SEQ ID NO: 35473 - DNA, 1071 bp, Homo sapiens
gctttaagtatccagggtaggggaaatacttgttcactgatttattagctgattacacatcactgtggaatttctgtcagtgtgtcatttcacattgacaaattttcacttagaattaatgacaattccatgttcataacctcctgagatacatgtatatttcttttatagtatccctacatctggtaatcaggttgtagaaaataaaatttgtcattggaatgatacttttggctaacagacatttctgatttatggtgtgcattcagtgaacaaatatgtaatggaaacatatatataaaacttcatgtattgtcagaaccagtaaacacagtgaagtgaactgagaccaatttaaaaattatccattggtctctctccccagcaccatgaatagactgtacatctgttgctccaaaagtaataggtatttgtacctctttatacttaattttcagggttgaacttttaaatttgtatgcacattcactgttcacagttgggaagggtttttcttcctttgcggttgctgtcttctctgcctaggcctttcatcctccaggaacttggtcacatctattatatctttactgttttgcatgtcagttattccctttcccctggctatcctttaatataggaaaatgatcagctttttacgctccccaaaagcctattccttgactacactcccctcaaattatgattctaccttttttcttacttctgctaaacttctcaagagaatcgcttacccctgctctctgcctctgctttcttactccctgcagttagtgttagcctctggtcactccagtctctgaaattttcctcctgtttgctacgaactgacttttcttagctcttgtttttgtcattttgtcctctcaataacatctaccactattcttttttaaaaatatattttttaggccgggtggtggctcacacctgtaatcccagcactttgggaggctgaggcaggtggatcacaagttcaggagttcgagaccagcctgaccaacatggtgaaaccctgtctctactaaaaatacaaaaataagctgggcg

SEQ ID NO: 35474 - DNA, 1063 bp, Homo sapiens
gagtaattagttgtattcactttctagaatcaaccatagacaaatcatgggagacatttctctggctatggatagagtgtgttatcagccttaacaatgggaaatcaaagggctcagggagcacaagtggccttaaaggtgggggtgctagcttcctcttctagggaatgagagaattggaaggtaatgtctgtgttccaaagaataagaagtagaagtgtaggtacatagtttgaagttgccaaggtgacccctggaggagctaagaataacaatgctaactttattttttaactaaaagcctttcctcttgagaataatgatagcagaagggcacaataataacctttgatctaataatcaaagagttgattgaactatataaaaagatagcatcatttatacttttggatatattttttcctttagatgtattattttcctttaaaaattaaaaagttaaatcaatgtttataaaagaaatttagggagattgtgggtaagttgggaagagggaattactgtgttgcttagcatccaaatttccctttcaaacctgaagtaaataaatttttgtaagtgaaatttaaagacattgttgagaagtcagtaagggagaattactcgttgcttagcaccatactttcatctgtaattctgactgaatacattggatctgcctttgagtagcttttttttctttaagcactgtagactatgtcccatggtgtaggttttcatatcttctgaatgctatccacttgatacaagtaattattgcttttccttctgccagaacaatagaaggaaaaggaaaaatgagcactggctcctgaagttctaaaggcaaaagcaggtctcctctgagctccaggaacggctgtttaataaatatggctaaagactcaatctaaaaaggagttgtttaggtaaggatttagggtagtttatgctccatctattattcagaggcttctttctaatttaagagtttctttttgctttccatcaggaaaacattgagagagctgagattgtaaagatcggttaatgtttatggagt

SEQ ID NO: 35475 - DNA, 1015 bp, Homo sapiens
gcaccattctcctgcctcagcctcccaagtagctgggaccacagtcacccgccaccacgccccgctaattttttttttttttgtatttttagtagagatggggtttcaccgtgttagccaggatggtctcgatctcctgacctcgtgatccgcctgcctcagcctcccaaagtgctgggattacaggcatgagccaccacgcccggatcttaatatgacttgtaatggggatggtgctataaactgaacttaaaggagagattccttattgatatgatgggaatctctcctttaagttcagtttattttcttgacttttaatagtcaaaatgtttgtatctgtagaaattttattgctaacattggtattttctaaaacaacataagtcaacttaaagggtccttttataatagtgtaattctattttttgcacctgaaggaacaggatgttttataatggaatcagaaagaaaataggggatttgatagaaataagtgttttatagttagtctctgagaaataataccagttttataaagtgggatacctatactgcccaaataaattcgttttttttttaacttttaagttcatgggtacatgtgcagtatgtgcgggttacataggtaaacatgtgtcatggggtttgttatacagattatttcattgcccccaaaatttgttaacaataagtccaggcattttccagctaccactctccttaaagctaccatactctctatttagaaaatagggcagtcatcgctcttgctggagaagttatcattcctttacttgcactaatttttctatataacctgcagatctttaaatctttcatctaggtgacactctttccttactagtcaaataaaatgactccagtccccatcacatgtattttgggaggtctactgtcctaagtgtttctgaggattcctggggaggaagcaggcggtggagagtgtatgggtgaaggtatgtgcgaataagcttatgacaggcacttttct

SEQ ID NO: 35476 - DNA, 1679 bp, Homo sapiens
acagcaatcaagccagtgtggtgttggtgaaagaaagacaaaccagattaatgaactagattagagagcccagaaatagactcacataaatatagtcaagtgaccttttgtcaaaggagcaaaaataatagaatggagaaaagacagtgttttcaacaaatggctgctggagtaactggacattcaaatgcaaacaatgaatctagaaacagacgttatactcttcacaaaaattaattcaaaatggaccacagatctaaatgtaaaacacaaaactatgaaactccaagaagagaaaatctggatgaacttagatttggtggtgacattttagatgcattctaaaggcacagtatatgaaagaaacattcgataagctgaaattcattaaagttaaaaactctgctctgcaaaagacactgtcaagagaatatgaggcaagttacagactaggagaaaatatttgtgaaagatatatctgataaaagactgttagctaaaatgtacaatgtacaaagaactgttaaaactcaatagtaagaaaatgaaccattggattgaaaaatgggcaaaagacctgaacagacacttcaccaaagtagatatacatatggcatatgaaaagatgcttcacacacatgtcattagggaatgcagattaaagtgagctaccaccaggtacctattagaatgacagaaatccagaacactgacaacactaaatgctggtgagaatgtggatcaacaggaattctcattcattgcaggtggaaatgcagaatggtacagtcactttggaagacaatttggcagtctcttacaaaacgaaacatactcttactatatgatctagtgcattgcttggtgtttgcctaagttagtcgaaaacttatgtctttacaaaaacctgcacatggatatttataacagctttactcataactgccaaaacttggaagcaaccaaaatgtcctttgaactatattacattctggaaaaagcaaaactatgagacagtaaaaagatcagtggttgccagaagttaaggggcagggagaatgagtaagttgagcacgcaggatttttttgaacactgaaattatgctgtatggttctgtaatggtggatacatgtgattaaacatttttccaaaaccatggcatagaacaccaagagggaaccctgatataaactgtggacttaggttgatgatgcttgtcaatgtaggttcactgattgtaagaaatgtacccctttggttagggatattgattgtaggagaggctgtgcttgtctgtgtttaggagtatatgggaactctctgtacttcctgctcagttttgctgtgaacctaaaactgctgtaaaagagtctttttaaaagggaaaaaaatggaaggaaattatgaaaagggaaaaaacatatagatacttgcttaaatattaaaaagtcctgggattattgtgtcattctcttgtatcaagccagaaagttttactttttctttgtaattgattaaatatttcagagaatcttttagaaattagaaaatagtccaggcgcggtggctcacgcctgtaatcctggcattttgggaggctgaggcaggcagatcacctgaggtcgggagattaagaccagcctgaccaacatggagaaaccctgtctctactaaaaat

SEQ ID NO: 35477 - DNA, 1031 bp, Homo sapiens
ttacattcagatgcttctcagagttctgtttataaacattgtcaggagcagagagtgttagggatcttccacttgaaagaaaaatgacaaaaagaataaaatcactacttgacttgcctgcggttttgtgttcagcctttcgtcttaatgctattgaggattactcttgctcactagagagcacagaatgatgttgtgtcagcaaatcgaaaacagtataaaatgctatgtgcgcctctcatttctgattaactacttgagaccttttcacattaaagtttagttgtgttcaactctttcgacacgagagttcaaagaccatgtacttttaactaaaccagaattgtttgtctgctaaacttctgccttgaaggcaaatttaacctgtgcctgatctttaatctcattaattttaacaaaaatcatgacctcttcaatgactttgtttttggaaattataaatactaacctaatacaatgtatgaatttttagatttttactccggattgcatttccatgtaatttcacattcctgtgtacattacacaccagtgaatagtaacagattgttagtatgttcaagctttgtgttgcatggtggtaactatagagtttgcgggtcagttgtttgacagaggaatccagtacagtgaaagctaatcccattggagctgggtgcccaggtgcccagactgctggaagtggggcaggattgggaattgctaaaatctctccgaaggccaggcaggggttgctctcatggaagaaagcaagtgttccccacccacaacaccttccccactccctagtccacacttgccaaaatatgcactctaaatgtactagaaaaaggaaaatttatcctgtggaggagaggatcaaacagaagttcattcggttctttcatttttgaccgaggaaagctagcgtgaatgtttaatcacagaacttgcgaaggaacatgtatttaaaatgaaatttattcttcttcaatcttcatgtgaagtgtcagctagctgtggacaccact

SEQ ID NO: 35478 - DNA, 1029 bp, Homo sapiens
tctgttttcttgtcgttggtgggtcatatcatcctgcaacttcaatctctccactggattctgctctttaagctctgcaagttaactatttttacttttaagacacacacactcacccaacctaccctcaactctgctactccttcaagctaccatcacttttatcactttccttttataaccaatccttgaaaaatagtgtaggctcatccacatttcctcagactgactcacttcctttaacattgcagtcacctttctgtcttgatgaaactgcagtcttgacagtctccagactctcttagtcactaaatccattggccttttacccagtttaccctcctttacatctgtgcttttaaccctcttgcacacagcatgattcttgaaatgacttcccttcctcatgtccctagcgttctatctaaggtgttttgtgaggtctgccttttctctggtggtgatcctctttccgtctcgtgactttaggggtcaccatcttgctgataactcccaaacaattgcctccagccctcacttgtgctggagctctggttccacaaatccagctgacttttcctacctgtgaagttggccagcattcaaacctaatatgtctgaagccgaagcaggtcatactaccttccttttcaaatcctcttctcctttcatgatgctttgctttggtcatgtccctgtcatccctctgttgcccagggttaaatctcagggtcagctggtcattaactggcactaaccttgtcttggtaataccttttgaattcatcaatgcagagctttgctctctttactcccaggcatgtggtaattggtctctctctgtctgagctggtctccctctttttagtctctcttctttcccaactgctgttggattactctgcttaaagtataaaacccttgggcaccctgttacagaatgagactcgatgtcccttaggctggctttctaggcccccagggaatctggccccaattttccattccagcctcatgtttgacttcccc

SEQ ID NO: 35479 - DNA, 1054 bp, Homo sapiens
tactcatgagtaatactctgtggagatatgctctacattagtattcacttctcactttcttgcctcagcccaggttatttatagggatgttaggaaaacgttctgaaaacagtgatgttaaacaaagttagaggacttttaacacttagtatgcattgtgaccctctaaaagagaggcatggtatacgtccttttccaaatgtatgtggccaccgaataggttttttttttgggtgggggggtggtataccaatttatgtttccaggtgttctaaggaacacaatttgggacacaaaaaaaaagacatcatgtgttgtacaataaagtattatatttagattgctgttttgaagagtcagaaaattcttcctctgattgttattaaagaaggtgacctacaaaagtattggagaattgggttaagtttgacaaaagaactgtttttaattaaattcaaatgttaattattctaggtaagtctcaataaaaaaggaattataaagatgagttcagttttccacaagccactgcactccagcctgggccgcagaacaagatcctgtctcaaaacagaaaacaaaaagcaaaacaaaactcttaagtatgattatattacgtatcaaaccctgtaaactaaaagagctctttcctggtgagactgtcatgcctttttttaaaaaaataaatcaggttaagctgttttcaggtttgcactcttggaaccatctggaatttgtttgtttgtttgtttgtttttcgaagaacagaattttttttgtttttttaaagtaaaattctaacattacaaaattataggagacacttgtggaagtattcattagaattagtctagaattatcaaattagggcagggaaatctaaaaaacttttgggtatgggtgtggtatatgtctgtgagtctgtatgaaaaataaaatagaaagtgtactgatggatgattccatgctgcagtaggcagactaatgtgtcattccctttccctcccctcaagatgtttacatcctaatccccagagccgtgtgttattacatg

SEQ ID NO: 35480 - DNA, 1118 bp, Homo sapiens
tgagttattacttctctcaggagactaagctatctgatacttacaaataagtaacactaggtctacctaacatttccttatggattaagaagaatggcagattttgagaagcaacatgctaggaaggtttggtaactttagaaatgtgccacgctgtggtttctaggtatgctatgaatgaagagctttgtgtgtaagaagtgggaattctatgtgaatatttattatgtaaattctcatgtgttactaggtttatttaagtttcttctttgcgatccaaacttttccttgagaggcaagtttatttttcacattaacctgatatgtaaatttctcagtcacccccacctcccacccctagggcttttttctccatccagtttcatggtatcaggtcagtatttgggcagagggtgtttatcattaacaactagctagagtcatatttttgtttaacttcccctttgctataatccacccatcctgcctgttactgtgggttgttgccagtttaggatttatttaacatgccttatgttcagtgatatatgttgaaatttagaatgtatgaaaaaagagcctgtgttttgcttatgaatacgtcagtccatcagcacgtatttattctctgtccctgaactgaaggtcatcgtttcttggcagcattactagacatactgggatattaagccaaaaaaatagaataggttggttaaagatagattgaggcaaaaattgattcacagtttgatacttaaaaccaactttcctggtcagttgactattatctggcaatcaggcagagttgctaattattggcacccaggtgccagatggtagggagtaattagattacaactatcttatctatcagtagctttagaatgagaatagtagcaattttcatagcccttttcaatggtcatgaaaacattttaaaagctgatcctatggaatattgtatatctgactccagaaagtaaatttttgacacattaccttggggaaaaatatgtgacaagatattttataatcttgaaagagagaagtaatattttagcaactctgtgtcctgtttgttgcatctgggttagccatgaatgaattcattctgttct

SEQ ID NO: 35481 - DNA, 1030 bp, Homo sapiens
tgtcatggaatacctttgagaagttgttcagcccctccctactccctcaactacccacattgcctggcataatttcttaaaatagacaggcatgttataaggaagttgaagtttatgtgacagtataccagatgcacagaaagttctggaggaaatgaaggaaatattgagaggggaaaactactactttcttatctctgacaaattggattgatctgtagctggagtctggagagagtgctttccaggactcagtagtacctaaggcattactcaagggataggtaatgatggacaaaccagatacagatccttacttggtgctttccagggctaagtagcaccctagtaaggcattctaggctttattccaaggaatggcattggcagaaagaattgaaggaagtagtgggagaaagttaggacaactgagttgctccaggtttggtgtggaaagcaactgccagctgtgaactgtgccgtgggacatctttgacatccatctatgaacaagcacctgtagagagctttcaggtccagttatgttcaataatctatactaggtcaaagatgacattaatgcatgtttctgttgaaaaagtttacatttgggggaggtaacacacaagaaacaacaagtaaggcagcagatagtgaagcatcagggggtgggataagatatagaataagtctctatctatgatggggttcttttttgtagttcgtggtccttggattaagtgcatggtcaaagaataccaagtgtggaccagagtggttgggacatgctcccctggcgtgtaaggttcactacaaacactgacggacaaaggagttgttgtcttcgcacagatggggatggggatgtgtattaactcataccggacccaagcaagacatttaatgtggtggtttggatgagggaaatgtttctgtgtgtttcagaatgattgaattaaaacggaaaaggtgggttttgtttgtttgtttgttttggctaaaccatgtttgttgcatgcttgacctctta

SEQ ID NO: 35482 - DNA, 1053 bp, Homo sapiens
ctgtattggtcattagatttattataaataaaaagtgaagtctgcaattacagaaagttattcaaatattaatttatatttgggaatttggtataggctattcatgaagatgaagatgaaaatattgaaatttgttcaaaaatagttcaaaatattttgggaaatgaacatcagcatctttatgccaagattcttcatttagtcatggcagatggagcctaccaagaaggtaagatttcctcacatgtctgtataattttcagtaaatgtgagaaaaacaagatgatacatgtatatgaatcagcttacatcacatccattttgtgaaatctacttgggaactatataacttttaagcaataataaaattaactttgtcatgtacttttactgatctgtcatatacttttactgacttaagtcctttaagtccatatttttaatttaatttacaagtaacctttgaatgaggtttttaaaaatcttactagatagatttttggacagctctagcaattagaataatcctagccgggtgccgtggtttatgcttgtgattccagctacttgggaggcttaagtgggaggatggcttgaggccaggagtttgagaccagcctggacaacatagtgaaaccctatctctacacacaaaaaaatttttaattagctaggcatagtggtgggcacctctagtcccagctactcaggggactgaggtgggaggattgcttgagcccaggagtttgaagctgcagtgagctgtgattgtgctactgcactcagccttggtgacaaagccagaccctgtctcaaaaaagtaaataaataaaaataaagaagattataacttagaataattcatttttttttgttttttttgagacagagtcttattgcccaggctggagtgcagtgtcgtgatctcggctcattgcaacctccaccccctgggctcaagtgattctcctgcctcagcctcccaaatagctgggattataggcgtgcgccaccacacctgactactttttgtatttttagtagagacagggt

SEQ ID NO: 35483 - DNA, 1033 bp, Homo sapiens
gacaagtgtaaagttgtcttcattctagagctagttaacttatttccaaggcatgaccctctagggcctccactgtacatcacaggtgatcttgaggaaacacctccctcccggtcagtttgatcatctcctacctgcatgagctctgagcattgttcagcttacaactccccagctgttttggcctagctttgtgaagtttcattctgcatattcatggcctgtgctcatcaaagactcaagaaaactaccttgcaaagttttgaagttttttttgttttattttaatgaatctctcttttctagttctacctccctggactttgatctttgtctcatcagtctagcaaggctgcacccaaagtccagatattttctccaggcagaaagccagtttagtggtagggtttacttcattcatttcccttctcacagggatcacagtcttgtgctgcttattgtttaatatctaaacacaatgtcatgtattttgtccagttttctagttgtttcctgtggaagttaagtctggccattattactctctcatggccagagctggaagtctccagaagataaatgtgatattttaaggctatgtcctgggccttctctgtttgcatttgcttcccaagtaatctgaccccaaggctttaaatataatttatatgctgatgatactcaactttattactctagttctttcctacagattattcatctatttcatcaatctactagtcatatcaaccaattgtttcctaacttctcttcctaattctgtggctgcctgtgtgaaatccattgtccaaatagaaaccagaagtcttttttagtattataaattatgtcaaatcacagccatgcttaagacttcagtggctttctgctgcttaactaatattcagactctttaccatggtctacaaggtttcatatggcattgactgcctctctgtctgacctcaaaacatttttctctagctcattctaacattttcctttgatacaccagtccctttcctgcagtaga

SEQ ID NO: 35484 - DNA, 1066 bp, Homo sapiens
tacatgaaacataaagacagttttagaataacacagcctattttgaattacttcatctatcaaaactttttctagttataattaagagagtatatgaattttcctctaatttctactttttcctctaatttctactttttcctctaattttctgacttaaattaccaaaaaatcaggtaccaaagaggaagaggatatagttaattatgtgagcagtaatctaaaaatatgacaaataattgagaattggcccctgtctatgttgtctaattaataatatttaaaggttagtcattgctgataatgaaggaagctttgttaacattttataggaataaaaaatttacaaggaacaaattaatgaaaaccaaaaagtaacgaggatgtaatatttttaaaggtagatttaaaaaaataaaattatctcttcctctgtatctatctgcatttaaaggacagtagtttaactgatacccgggaaacttcagaagagatgcaaaagaccaacaatgctatttcagtaagtaaaattttcaaagtttatcaatcattttacttaatgatatacatattaaaatatataatgtcgtgactttcagagtaagcgagaaatacttcgtagattaaatgaaaatcttaaagctcaagaagatgaaaaaggaaagcagaatctctctgatacttttgagataaatgttcatgaagatgccaaagagcatgaaaaagaaaaatcagtttcatctgatcgcaagaagtgggaggcaggaggtcaacttgtgattcctctggatgagttaacactagatacatccttctctacaactgaaagtatgtatagtagtatattaatatcctatttaggtctagtacatatgtaaacttatagactaaccactctgaaaaaaatgaacacttagaagaattgagagaagctgaaagaattctatatattttccttttgggcgaatagaagtgcctccctctcacagtgaaatgtgaagagcagagaaaactaatcaaactaatcagccttaatagcaaggatttttattacaaaagtgtatag

SEQ ID NO: 35485 - DNA, 1035 bp, Homo sapiens
tagcctggcctaccttaaacatgctaagatcacttacattagcccacagttgggcaaaatcatttaacacaaagtctattttgtaataaagtgttcaatatctcatataacttattgaatactgtactgaaagtggaaaacagaatggttgtatgggtacttaaggtacattttctactgaatgcttgtcactttcacaccattgtaaagttgaaaaagcataagtcaaactatcataagtgggaaactgtctgcacacgtaatggtatgttgtaaccttttgtgactggtttctttcctgcactgtaatgatattcatgcaagttgttgcatgtataaatagcttgtttcatttcgctgctgagtagtactccattgaatggatgtacaacagtttgtttatccatttgccagttgtgggacatttgagatgtttccaatttttggtaattatgaatagagctgttttgattatttatttccataggataaatacccaggagtgggtctgctgggtcatattgtaagtgtacatttaacttgattttttaaaaactcttttttccaaaagtgtttcaaacattttgcattcccatcagcattgtactcgaattccagttgctctgcatcctcatcagcatttgttgtcagtgttattttagccatctaaaccatgtataggaatatgtcactgtggctgaatttggatttctctaaatgttaatgatgttgaatgtcttttcatatttgccatccttatatccttttagagaaaggtctttgtccattttaattgtatgttttcttattctttagctttgaaagttctattatatgttctgaatacaagtcttatattggataaatgatttgccaatactttctcctagtctgaaacttagcttttcattcccttaacagaatcttttgcagaggatgaggctttaactttgatgaagtccagtttgtcaatttttttgtttggatcatgcttttcgtgttatgtctaagaactcagcttatccaacaatcatg

SEQ ID NO: 35486 - DNA, 1008 bp, Homo sapiens
atccatgaagaaaacagatgcagatataaataataacatgaatgaaccttgaaaacagtgttgagcaaaagcaagatacaaaagaatatatattgtatgagtccattaacaaccccaaagttaggtaaacagtatataaaagaagaaatgtaaatatctaatatataccattatgcatttcatccatgtaaccaaaaaccacttgtacccctaaagctattgaaattttaaaaattaaagtcattttattaacacattaatattacatgtatgtaaaaatcatagctaaaattgttgtatgtatatagttgaactgtatatataagtacaaaaataatctctgaaggacactaatgaaaatattaacagtggttaccgttactctggaggtggagagcaaaatagaccctaaatttttaatcttgtttgaattttatatactgaatatatattgtgtcactaatttttttaaaaaaattatctccatcattgggcttttcaaatgatagtctatgataatattggaaaacttaaacatccatacctgaacacaaaactgtttagttgatgattggggaaggacccttttccacagtttctttgaatctaatgtttctctttgtttaacagcatatcaaagactacgatttttttttttaagataatgtaatttggaagagagttatggaagtattgactttacctttttcttatcttaaatttctgtaaatttgggattttcaaataagtgcctcaaaatctttatttaatttgtagttttactttttgtccaggcccatcaaactccagagaagagagtgaatactggagaagaaaggaggaaaatatctgaggtataaagacatctgtctggttattttaaagctttgcaaacataattttaaaaaagaaacaaaatcttactataaagcctccaaacctttccttatttctttcaaacgaatacctataacttctttttttttttaaaaaaaaaacctcattgaa

SEQ ID NO: 35487 - DNA, 1027 bp, Homo sapiens
gtcaccacaggaagcctaggactccagctttccctcactgcctagactctcctattgctgtaagactctggtcatactctgatctgcccccacccctgcatagttttctataggttggtgcaaaagtagttggggtttttgtcattgaaagcaaaaccgccattacttttgcaccaacctgtaatctcttccagaaaactctcttatagtacattcttggcaaaatccactgtattttaaacttctaaagatgtcttcaccttttttgcttgaaaacctggtttgtccctgaacacactgttctgcagctgtcttacatgctggctgttttctctaatcccttaatattattgggtctagaggtaggatgaaggaaatgtttcccttgcttctcattgccagactctccctgctgcctgatcctgccattctcctcatctctctaccttgatgcttttgctaccagactgtatcacctactgctcttctgtgttaggatcatctgtagacacttgtcttttttttttttttttttcttttgaggtggagtctccctctgtcgcccaggctggagtgcagtggcacaatctcagctcattgcaagctccgcctcgcgggttcacgccattctcccgcctcagcctcctgagtagctgggactgtgggactacaggcgcccgccaccacacccagctaattttgtttttgtatttttattagagacggggtttcaccatgttagccaggatggtctcgatctcctgaccccatgatccgcccgccttggcctcccaaagcgctgggattacgggcatgagccaccacgccccgccaacccttgtcttttgaagagtttaacacctgactcactgtcactccttccaatattgtcataattctttacagttttagtataaaaaaagatgatacttcctatagaacatggccttttgttttcattttctttctttctcttttcttttctttttgagaaagagtcttgctctgttgcccaggctagaggaca

SEQ ID NO: 35488 - DNA, 1046 bp, Homo sapiens
ggcgggtgggtcacttggggtcaggagttccagaccagcctggccaacatggtgaaaccctttctctactaaaaatacaaaaattagccaggtgtggtggcgcacacctatagtcccagctactcaggagtctgaagtgggagaatcacttgaaccggggaggcggaggttgcagtgagccaaagagtgcgccactgcactacagcctgggtgaccatgagattctgtttcaaaaaaaaaaacaaaaaagaaatttagaaaaattataataataaaatgagagattgtaaaaaaattttttttttaaagcatgcagtaatagcagatacaggaagcagctgctattcctagtgctgaggcagagtacccaaagaagacacaaatttttaaagaaaccctaaccccatcgcgaaggctgagattcagaccttactgggtagggtatggcagtagctcactcgatggccccacagtctggggctggcaaagaggaaagtgtccactgtggagctgacgaaactccctgcgaaactgcctggagtgtcagtagaatgtactgggaagccacttgaggagccgttgaactcactgggaagcctgctggggtgccagtggaacttatctggtgctgctctagctgggatgctggctgaggcaccagcagaattctgtgggaagctcttcttgcaggtgctgctgaaactcacagggaagctggtaggggcactggccaaacactcctggaaggtgcctgtaggggtgagtgctgctgtttgtcccacttgctgcagtaacaggaagaaaggaaacacactaatcaggaagagaagcttctgcctttgcagtgaccctctcagttttactgacaaagcttaatattgtgttagcaatcaaagaagaaatgtttacaacgtccagctctagcatcacaagctggacaatgaagagtagatttggagctgaggggcaatatggtaactggcctgctggttttatctatctttaaaaagatgtattcaaacctaagtgggccaattccatcttat

SEQ ID NO: 35489 - DNA, 1023 bp, Homo sapiens
tttcgaataagtaaaaattactcttattttttgagggctgatattaatttacagataaccaagtaaactttgctctagaaaacatattctaattatttggaagaggattgtgtttctattctatattggtaggaaaagaactatttctcattaccgatattctcagtttcaatttatatatgtttcctatatgttatttattttctggaatttagtttgaagctggcagtatgaaaaacctggtactgaagataatatctggatcttttccacctgtgtctttgcattattcctatgatctccgcagtttggtgtctcagttatttaaaagaaatcctagggatagaccatcagtcaactccatattggagaaaggttttatagccaaacgcattgaaaagtttctctctcctcaggtaagttctttttcctttaaaattaaacagtagggttatgttgcttagctaagacatggcctccagtgttgaggagaacacatctggatcttggaggaatggtgtgcctttttcaaactacattagtgtcactttcctttccatggtctttctttttcttcagacagagtattgctctgttgtgcaggctggagtacaatggcaaaatcatagctcactgcagcctcaaactcctgggctcaagcagtccttctgcctcagcctcctgagtagctgagactacaggtgtgcaccaccacactcagctaatattaaaaaaaaattttttttagagacagtctcattatgttattcaggcttgtctggaactcctggcctcaggtgatcatcccaccttggccttccaaagtgctgggattataggtgtgaaccagttcgcccagcctttccattcttatataactgttttcttaatgtttgctttccagttatgcgttattcctctgttctctggatttctaactgtaaaatcattgagcatttctgtgcttcactctcctcacctgtgagcaaagggattattaaatgtatctataaggttattgtg

SEQ ID NO: 35490 - DNA, 1105 bp, Homo sapiens
ttttgctcaccttcctcttgcagaccactgattcttagatttagtcttttggggtaattttctgtatttcgtaggcactctttgttcttttttcttttttccccgactgtattttcacgtagccaatcttcaagcttacctatttttccttctgctgggtccattttgatgatgagagcctctaatgagttcctcagttcaacaattctgagttcagtatttctcagttccaaaatttctggggttttttgttatttttattatttcaatctctttgttaaatgtctctgataaatttctgaattgctgttctgagttaccttgaagatcactgagttttcttaaaactgctattttgaatttttggtcaaaaagctgacaaattgccatcttgttaggatcagtcactggatttttgctttgtcattttggggaggtcatggtttcctgttggctattgtttcttgtatgtatacatcagttttttgcattaaaggattagttatttattctagttttgtttgtttgtttgatttgtctggcttgctttgctttttattggatatatttgcttagtaaatctctattgttgggtcactgcttccttgttggcatcttccaaggtggcaccttaagtccaggtttagtaaataattcgagaacagcctgtcccaaatcagggaggtcccaaaggatttattccattggcatgagatggctagcaaaagaattatacccaggaacctctggaacattcctcctgcagtgtggtgctgctgaacagtcactctgttttggcatgcctttcgctgagttacagtgcagagtttccagggcttgggatggtagtcctgcctcccgattttgtctctgcctgtcctcagggatgtttttccctccaggcagtcatgatgcttccaaagggttaaaggcaaggacaggtctccagccagggaaccaaagatggtggggaaaactcttggccacctcaatctcactttttccagtgtagaagccgtgaattagggggagtttttccacgtgcttggtgccaggcagaattgggaggaggggtatcatagatgctgaagtatgcctttcttac

SEQ ID NO: 35491 - DNA, 1027 bp, Homo sapiens
ccattcaggctgctataacaaaataccacaaactgggtaatttatgaacaatagaattatttctcacagttctggaagctaggaagtctaagatcaaagtgccagcagcttctgtgtcaccatggtgagagcccttccttatagacagagccatcttgctgcatcctcacgtggtagaagggagaacctatgtcctcacgtggcagaagggccaagggcattccctcagccctcttttataagtgcaccaatcccattcaggagggtggatccctcctgacctaatcacctctagagaccccacctgttaaaactatcacattagtattaacttccaagtatgaatctgggggagcaccaacatttagaccatagcacactctatcactagaaatcgttaaactttatagttttattgactataatgcatgcttaactatccgcttataacaatcttcaatgaaattgtttcttctcttccatgtgtattgtagctgacatattgagcagaggaccaaaatcgatgatctccttggctggtggcttaccaaatccaaacatgtttccttttaagactgccgtaatcactgtagaaaatggaaagaccatccaatttggagaagagatgatgaagagagcacttcagtattctccgagtgctgggtaagtatcaatacttaacataattttattggcttattttcataagaaatattctaaggcccattgataaagaatattaaagaaatattctaaggtccattcataaatattctaaagccattgacccatttggtcattcaatgaccaaatactcagtcattgaatactaaccaaatgagtattcaatggttaggaaggtctggggaaaggttttcaaaggataattaagaacagaaaggatattgaatgtttaacactcctcagtgattgcttctcaatcgcaaatgaccaagaaggcttctagaaggaaataccattagagctgagtccaaaaaaatgagaagatgtccaggtgaaacaaaca

SEQ ID NO: 35492 - DNA, 1032 bp, Homo sapiens
acctcacagtttgccctaaaatttttgggtttaaaactatatcacatccatcacaaagttggagatcagaaaaagtgccttgataggccattgggaaaccatctgccgactttcaactggcttccaagaaagtgcaaagtaaaacattttattggcttgtagtgttaagaaaatgaggctgtaaggcattaagtcaaccacaacaaaccagtgattttgtttttcctctaatacctaaacctggtccaatatatctagtgaaatcttttacttctttttctttggcaatgaaagagaacatgctttcatgtaaaatgacctctgaaacaacagtgcagtaatgtggccagagcagtgtgtttagagtctgaaaatcaagagtgaccttgctatgtaatctttgacaactctcttactctctgggtgtcctgtgagttggatttctctttctgtaaaatatacacggccttttatctactacagtaggaatagaaaaaaaatttgagaactctcttagcattgcattttttgggtatgagaatttttaattttttaagagtcacagctcatttactttcagattgtatctgtgttgtggtttcattttgcagtctctgcatatccactattttagctactgatattattccaaattattttttgtcaccaaaaccaaaaatagtaggtcctgaatagccactataggtctttatgtttttctttagtgtagtacctctagagagcagtttattttaactctcttcttttctagattgttcatgttggaaggcatactttctgaactcttctcaagtgatgataaaatggactagttgataaatctttctggtacaggttttcaaaacttccatctatccactgtgctttcatgttaaagaaagaatggaaacatcatctctaaaacaagataaacagctctggggctgaggaggccagcctgctactgggtagttttgatatcagaagtatttcaaaacctctcccttgtggaggatgagttatatacccacc

SEQ ID NO: 35493 - DNA, 1084 bp, Homo sapiens
tggtatttattctcctgatcagaaattagccaaggcagcaacttgggagtccttttattcctttttaaaaagacattcaaatgatactgtagattcctttgactttatttaaaattgcatttttatttttatttttataaaggaagaaatcttgttgatattgttagaaactacatccttactgcttagaatagtgcacattataagtacctcaaaaatacatatttttttaaatgaatgaatctgcatttctgctaaaagtactcattaactgcaaggtcaatgtgaattaacagtctgatgtggctctcctaaaacccaaatgccattttaggctgcaataatggaggtgtcagatccaggataaatgaagaacataattcattctactcttagttttttggagtataacacttagttaaatatagtaccacacagcaggaaagactgatattaatacattttagtgcagtgtttctaactttctttttccatcctggtgaccccagaaaatggtaatatttgtaagatacaaatgggtaaaaaaggctttgcttatctcagggctgggggactaagacgctgtcaagaactaacaaatttctcttagttgctctttaaatgttgataatgagagaatatttttatgacaaaggagagagacttttttattctaaaaaatctgtaatactcaggaaacaacataaaatgattataatgctttctctcatgcacaccccaatgccatgacactcacagaaaataatatgttggcacacttgtaacacccagtttgagaagctgtagtctattgtgtcagtagaaaaccagctgggatgggcgagggaaacagaagccacagaattagtcattatacaggccacaattaatccagcacctctaatgtaaggcactttgcatatatgaactcattaatccatttatcaataaaatgggatggtgttattttctctgctttctcattaaggaaacagagacttagagacatttaatattgtatctaggtttgtgtaagtgctttatggtgagctggattttgaatctaggactgaccccaaatccc

SEQ ID NO: 35494 - DNA, 1024 bp, Homo sapiens
atgactttttgctccagtattcaacaacaaaatcgtcattaccattacttcatagcgtagcaacagtggtgaaaaataactttaacttctattcctagggaatgaaaaccctcatgggcattattagaatgtaccaataaacatttcccaagtgcattccttgggaatacacagttaaaaaggaattcttaagtctaatttgaacatgatagattatgattagttggcttatttacagcctaacttttcaaagccgttaatactttgatgtacatcgtgactatctaacaagggggatgttatatgcaatatatatctaattttgtttgacgtggtgttcttttttgggaggaggaaggtaaaaacattccagggaatacattttgaaataacctagtatagattatctgtaatcctactgtgtataaataaatattttagaatggttgaaataccctgttgttcacttgcagttatctgatgtaatcttctctcttatcaaagtctgtgggtctgtaattgttttctttcctttggtctgatagtacttactacaaaacaaacaaacaaacaaaccctgagagttgaattgagtcttgacagactgagagatttttccattttatattttgattaccatctgatttggaaagggaagtattactttggacagtaagggtaaggcaataaacctgaaagcaatattgaattcaaataactgcctgtacatattgataaatatatctgtgtcaaataatttgtaactaatagaccattcatcattatttacttggtatcgcattctctgtactaactcttttaaatcttagtacctcctgcaacacagaagtattcctaatgaaagctgacaggccactaagatactttttactttagaaaatatactaccttttgaggttttatccttagttctatacatctagaaatttggctttatctttctactgaaagtgaatctctcaggaataaacttacaggtagtagaatgtgaaccaagttgaca

SEQ ID NO: 35495 - DNA, 1035 bp, Homo sapiens
atagctaatatttaataatccaggcactgttctaagcatttcatatgcagtgtctaatgtcaatatatcttaacactagttaataaatattgattacagctttttaataaatatcaaatgttctttgactttacggtcacactatttagtcaagggccattgggttcaaactctacaggaaactaagagaaaacctcacacaaacatccagagaaaaaaagaattgtcatgtaacaaaatgaggtagtcttccatttcagttccaagaaagattatgaggtgggcagaagggagaatgagccaaatgatttctccatttttctagttaaaaatttatttttcccacaataagggcatttaaattcaaatttttggaaccacagactgtacatttgagtggcagtaaggaattatatttatttttcttcaaacacctttcaatatttcaatattcaataatagaattcattattaaaataaggattgagcaatgtttgaacaatggaactcttagatatgacactgaatgtggtttgtcaatttaaaaccaaccataggctttgagaatctctgttttaaatagtaccaatgtattaccaaagccagattcatttagtggtttattgtctcagagacgttattttagtttttcatcaagttaaaaaaaaaaaccattttacagtgaaaagaatgctttgaatattagtcagaataattgaacttaaagcattttaaatctctgctcaacctttcacagtagaaagttgtaattgagtcataagatctagaattcagaaaccacccactcagattgtctccatgaattttaaatatgtataagggccaggagtttttcaattgaccatcataatgagtggccaattgacttttggtttcccaatcagatgacctgtgttaaagccctggctccttttctccaccttcattttctctgtaacttaatctgtgttattcaaccatatttttttcaaaatctccattttgagaattaattttctctaccattatctttgg

SEQ ID NO: 35496 - DNA, 1068 bp, Homo sapiens
tttctctgtcaaaatataagaagatcccaactaagacatttcattctagagataatgttaattctgtgtctgaaacatttgacgtagaataaaaggcagtttctaaaccgtgttcctgcctgttagtcctatgcactgggctaggttttcatgatcttcttttccacatctcctctctgttctctgacccagggactacgaacatttttccccctcactttttatagttaatgcgatatttggaaccacaacttctttaatctgttaactctccttacttgtctatattatgaacattgtatcacaaagatgactgcattacataatagaggaatatgtcgatatttacttattgtatataataatgtgtttatccataaagacaagatgaagtgttaaaggaagctccaaattaagattaagaaaaatgaaagagaattataatggttttggattgagtgagctcacataagaaaaaagtaatatacattataaacatttcttagacagtatttgaaagggaaatctgacttgataaaaatataatcatatttttaaccacctagttaacttatatttgttttattttattttttagaggcagggtcctaccctgtggcccaggctgcagtgcggtgatgtgagcatagctcactgcagcctcaacctcccgggctcccgtgattcccctgcctcagcctccccagtagctgggactataggtgtgcaccaccatggttggataatttgtttttttaaagtgtctgtaatggccaggtgtggtggctcacgcctgtaatcccagcactttgggaggccgaggtaggcggatcacctgaggttgggagttcgagaccagcctgaccaacatggagaaaccccgtctctgctaaaaatacaaaattaactgggcatggtgacacatgcctgtaatcctcgatacttgggaggctgaggcaggagaatcgcttgaatccgggaggcagaggttctagtgagctgagatcatgccattgcactccagcctggtcaacaagagcaaaactccatctcaaaaaaaaaaaaaaa

SEQ ID NO: 35497 - DNA, 1082 bp, Homo sapiens
acaattaaaatacaatttaaaaatgaggccatggaaccatccaaagttcaagcacataacaaattcaaaatatgccccctgctaaatttttgacacaattaacaatttgaaaaactcacgtgctttcaaatatttccatgtggtttcttagcaggctgtatcttgccttctaccctgactaataactgttacaagacaattctacttggtgataaaatttgttttggcagacctgtggcatgagcaagtatagaactgacctaggaattgccaagccagatcagtccactagtttttcaaattgcatatactgacctctgagaaatcagtatatgaatatacaatgttttagggaaaaagacctatttataaatactcaggataacattattttcacaaaagcacattgcttcatcactcagaacaatatacagttgatttaaaacctgatatttcatgatctgaggcctttctcttagcttttcctagtttatgggagaataaattatttgaactgacaccacatttgaggccagaggaagaagcagactaatgtttactgagtgccaaccatgtctgtgccaaaatttgtgcggaatgcatttgatcctcactaaatccctgatgaataggtattcttttcctcatttacgaatgggaaacagaaccttaaagaggtcatggaggatgaacagggctggctgagctgccatttgaaactctgattgctccttacagaacatcatgcggaccaaaccaacagagcctagagaatggcccgaaggcttgtgcgcaatgagaaataatccagctatttgttctctaagcctgttgaataaatagctaattggtttgcaccctttccagcctgcttcatagaagcagtgttatgatgaagagcgcaggtttaagaaccagaccttctgggttctagtcccagctctgccgtttactagctgttacctggaacaagtcacttgttctgtttctgtgtttctttagctgcgaagtggggataataatactatgtacctcacagggttattttgaagattaatgaattaaagtgaggacataaatgc

SEQ ID NO: 35498 - DNA, 1051 bp, Homo sapiens
tacagatactacagacattaaaataacaataaaggactgggttccagttccacatgtaaggagtttggaaatcaccattacttcctaacaacaaataacaagctgaacagattgaaaaatcaacactctggatctagatgacacagggcaaactgttgcctccaacactggagagacagacaggtgaaagcagggagttagtcttgccagatcaaagactcatgaggataagaaaacctgaacaaattgctggaggcttgatgtggacaactctggggaccaaaagctcgagagaaaccgagtcacggggacaaggcacaatattcaccttcacaagttcaaccagatggacctggttcccacagtaaatatcagagaaaaattccattgctcttctggcagggagaggggaaaatgaaccattttgaaatacatgagagcactttgttcttaacaagatatttcctaaggagaaactatttaaccagaaccaaatgtgctgggatatgatcagaacctaactgatctgggggaagggaaataccccacttcaatcggctgtagcctttcatgtgggataaggaaaatacaaaccacaatagccaatacatcactttgaaggaaaagaataaaactgcaggactgacccctgacttcaacacttactacaatgcaacactaatcaagacaatgcaatattggctaaagaatagatcagtagatctatggaaatagaaatagatcaatggcaacaaatagtttaatggaacagaatagagagcccagaaatagccccacataaatactgtcaactatatttgaacaaaggagcaaaggcaatataatggagcaaagattttttttttcaacaaatgtgctggaacaactgtacatccctaggtaaaacaatctaggcacagatcttacattattcacaaaaacgaactcaaactggatcacagacctaaatgttaagtgcaaagctataataatcctggaaaataacatgagaagaaaaactagattaccttgggtatggtgatgacttttt

SEQ ID NO: 35499 - DNA, 1035 bp, Homo sapiens
ataattgattggtgtttataaaagttttatgtatactgtatttgataaaccatgtatttactttaattattgggtaccaggtttcatatatgtccattggataaactttttgtcttgtttttgtattctataacaatgacttttgtgtggaaatattttgttgtgatattaatttttgattagtgatattaaattagctatcaacttttccttgattagtatttacctggcatatatacttttccatttatttagtttcatttcttttaatttattttttcatttttttggtttccacacttgtatcttataagttgacatagacagatttccaaaattcaattagaagcaagtttaatcttataacacttatttagatttctgagaatttggctttatttctgttgtcttattggtgtgtgtttgtgtgtgtgtgtgtgtgtgtgtgtgtgtgtgtgtttactgagttttacctttaccattttcctctttttttttctctgttgtatttcgttgatcaaatgtttttaactctctttttgtctttttattatatgaagttcttatacctttacatttttaacatgcacaaatgatgtgacgcagtcttaatttaatcaatatctccatttgattctggaccgtagaaggaccttttggttcagtgacttcatcatacttgtgtagttatttcagtaaggttctgtgagttaggaactccttcagggttggttagtctataaatgtttcacactctttcttgaaaggcaatttagcctgctttaaggttctagcttgacagttattttctcccaacattttacagacattatgtcactttctgttggattacattgctgctttgtaagtcttctttcagtctaattataatgctcttatggatactgtgaattttttctttagttgcttttaaggtcgttttgatatctagtaatttcctataacgagtacagttgtagaaacccttttattcaccctgttactggtagactgttcttcctgcatctgagacag

SEQ ID NO: 35500 - DNA, 1031 bp, Homo sapiens
atatatgtgtgtgtatatgtatacatatgtatgtagacacatgtgtacatgtatctgtaaaatatcactcaaagtcaaatatcttttatgttagctcaagtctaagaatgcttgacactttactgaaagcagatattttaaatgaaatttgacttttgtcttctttataatttctaataatatcggttgcctgtcataaactgaaaaacacatttgctatcttaggcagaataataaatatgggttgtaaatagtgtctttcatggataattaaactttttttattaagaatgataatagagtttactgtaaatgtggctatcttcccattacttatatttttgaatgtcattggaaacattgaaaaaaatagtgtgctactccctaactttacttcttttactccatccacatagaatatagtagaaatctctttcaagttttgttttctattattttgagaaaaatattctcttcacatgtatttccccagaaggacattctctgacataactatagtacaatgatcccattttggcgtgtgatattgatactatatatcacgttatccatggtccatattcgctttggctggctgtcccaattttttccttggttcctcactcactccaggaccctccactggacttgttatcatggttctctagattacttcaatctgaaagagtttctcaaccattgtttttaatcttgagatttaaaaaaattataggacacttattttatggaatgtccctcagtgtgggtttgtttgctgattcctcaagattaaattccagttttgctttttctgcaggaataccacaggaacacatggtgctattcccagtgcatcacatcaggaggcacgttgttgtttgtcctaaaattgcaggtgttaatgttgattggttgattaaagcttctccagtgtgaagttattccttttcccctttgtaattagtaagtagtttgtggggagatactttgagatgatatataaatttttttctcatcaaatattcacctaa

SEQ ID NO: 35501 - DNA, 1050 bp, Homo sapiens
attaactaatcagtgttatttgtttaaaaattttcctgaaacactcagttgtttttggtgccttgtcttagttgatactcaatttgtaatctttgaaataatttaacttcctcattaactttacattcgaatgaagtttaatttttttaatttttataaatttatagattttttatagatttagggggtacaagtactgttttgttacgtggatatactgcatagtggtgaagtctgggcttctaatgtaactagcatccaaatagcgtacattacacatttagtcttctaagtctccagtgtctattatttcactctctatgtccattacttatatgtgggaactaagtaatatgcacccgtattacttagttataagtaatatgcacccgtattacttagttgtacgtaatatgcacccgtattactgagttgtacgtaatatgcacccgtattactgagttgtacgtaatatgcacccgtattactgagttgtacgtaatatgcacccgtattactgagttgtatgtaatatgcacccgtattactgagttgtaagtaatatgcacccgtattacttaattataagtaatataacttacaagtaatataagttatattacttataacatatattataacttatattacttataagttatattacttgcaacttatataacatgtttcttataagttatattacaactaagtaatatgggtgcgtattacttacaactaagtaatatgggtgcgtattacttacaactaagtaatatgggtgtgtattacttacaactaagtaatatgggtgtgtattatttacaactgagtaatatgggtgcgtattacttagttcccacttataagtgataccaggtggtatttatttctgtttcagatggggttttaaaaagttttacaattctttatagagaaactctactatggaaacactaaattaaatatttgtttgtactaaacaagaacatgatgcttgttcatctcctttaataaattcaattagattacacagcttatctagtgata

SEQ ID NO: 35502 - DNA, 1044 bp, Homo sapiens
ctgcagacaaacagactttgtcagggaattgcaccttttctggggtctgtatcctttactttcctaactgaggctgtattgtatttgcaactttcactgaattccccaggagcgctctgcgctgctcaagcacaggctctggcgtccatctctgtaccgcaccctgtgttcttcagttgggaaaaaaaagggtctgtcggtatcgagtgatgcctacacttggtaagagcagtggatctaacaatcggaagatttcttcttctgacagcttagtaatttagtagaagcggtgacaaagaaaaataaaatcttgcttttcttttagttgcaattccttccttttaatgtgaccttttatttcaacataagaagtttgttgtggcttcgaagatacagcttgcttcaattcccttctcccttttccttttttcactcgtgactgtgttaagcttcacaaccctgcatatgaccctttaaatctaatttgaatgaggaaagaaataagcttagaaagaatttgtcttccaaagacagcaagaactctgtccaactctttctgtgtattccttgtagccctctattttataaacgtttgtcagtaaatacatatgttataacacacacacacgaacaaaccaaacgtattacaaagtctattgttattgtttaccagtaacttttttttcatttcccctgctttttgaattttgttcttttccatggaagttcactttactgtgtctctgaaaactgtagggcatttggctgctgtgaggggttcatgtgtttgctgcaatgagagtctgaccttcaaccctcagtttccttctctgttacaaagcacaagtctggtgtgtttctgtttaaaagccaaaaaatcagatttccggtgaaaacaaacttgtttattgagaggtggcaaagtgcaagggcaaaatagttttatttccagataatttgccaaatatttttcagtaggagaagttttctttgatgaaaaatgtttttagaaaggagaaaggaaggacacagtggaatatttcg

SEQ ID NO: 35503 - DNA, 1032 bp, Homo sapiens
gaggcggagcttgcagtgagccgagtgcagcttgcagctgcactccagcctgggcgacacaggaagactccgtctcaagaaaaaaaaaaaaaaaaagacgacatatttaagccacaaatgtgttaaaaattgtgaagtaataaaacctggtaaaaacatcagtgtgaagcatggtaggtgacttattaaaactggataacacaaggccaaattagaagacagtctaaatcactgaattttcaaacacaaatagcatagtttttttttattcctagcataccaaaagccttgaaagccactattactatggttttggaaagaaaaatcttatctttttaacggtataagcagatgaaaatcatttaaaatgacctcagcaccttttacagagaaattaatttagtgttatttttgggtgctttttcttgatagataactaataaactaattttcacactgaagattctatgattacatttacagtactttatctttgattaataaatcttttctgttgaacaaagatacatttaaacctatgatagattaagttatctaatactaaatcagtgcaataagaactaataatgttttagaataaggtgtaagtgtttaaatatttctaaaaattagttaggaactggtgagaaatgcaattctagaggcattagtgcaatgctgagaagtctggattttttggttgttttgtgcccattcatttactcgctaaataaattttgattgaatgaccatcatatacctactatgttccagataaactgttagatgctgaaaatataatcatgatcaaggtaaacatggttagttatatcacagatgtttacaggctaatggggaagaaaggcaagtagacaactgcaactcaggtattggtattccacatgacccaataaatcttgttactcacccaagtttggattgtagacaaacactctggcagatggagctaaaaatgttagctgcttttactgatgaggagttttgaagaaaagaactttagttagtctttcc

SEQ ID NO: 35504 - DNA, 1056 bp, Homo sapiens
tcagattcagaaggcttgggcttgagagctggacctgcaattttaacatgtaatccgactgatgatgaggcaggaagtctggggcatgcaacgagaaaaactgactccagaatgcctttctttcaagctgacttagccactcattacagctgttattccttcacttgtatcgctaatcgctaatatacaggcgtaccctgtcttgttgcacttcactgtattgtgcttcgtagatactgtgctttttttttttttttttttttttacaaattgaaaggatcaagcagcaatttccacttccaagtcttattatttaagaactatatctcacaaggcaatagctgccatacatagtgattcctctaatggatctggacaaagtcaattgaaaaccttctggaaagaatttaccattctagatgcccttaagaacattcacgattcataggaggagatcaaatatcagtattaataggagtttggaatagattgattccagtcttcatggataaccttgaggggctcaagccttcagtggaggaagtaactgcagatgtggtagaaatagcaagagaactagaattagaagtggagcctgaagatgtgactgaattgctgcaatgtcatgatgaaacttgaatggatgagaagttgctttctatggatgaataatgaaagtggttccttaaaatggaatttacttctggtaaagatgcagtgatattgttgaaatgacaacaaaggttctagagtattacataaacttagttgataaagcagcggtaggatttactccaattttgaaagttctactatgagtaaaatgctaaccaacagcatcacatgctacagagaaatctttcatgaaaggaagagtcagttgatgcagcaattatattgccttaaaataagacaaatgcaattcattatcttattgtaagaaattgcccaaccaccttcagcaaccaccaccctgatcagtcagcagccgtcaacagggaggcaaggccctccaccagcaaaaagattatgacttgctgaaggctcagattatta

SEQ ID NO: 35505 - DNA, 1091 bp, Homo sapiens
gtttaaaaatgatgttgaatatgatttagtttgacagatattatgaaaagtttaatgggagtggtactgaacctgtcttggaggaatgtgaaacatttggaaaggaagtggttctaggtagaataaggagctccttctcatggcagtaaggaggtgtgtttggggaacagtaagacatggagctggattgacaggatgggatttgattttggagagcttttaaaagcaatgataggaggtagggtgtcatggaaggtttttgagcagggaagacataatgagattagtgaaaatgttgtttaaaacagaattagttggagaagacagatccagttgtcacagtaatcctgggataatatgatatatgcctaaaccagtttgggaataatattatatgatatatatgatatgataataatagaatatgatacatgtctaagccagtggaaccggagagcaaaagattgatgagagataggtcaagtgaaaaatctataaaattaggaaatggagcaataagagaatgaatagaagattttgtctagaaatttgaaatcttgaagactggggaagcagtgggttccttgatagaatatttaaaggataaacccaatggtttactttctgcatgttttggacaagaaattaatttcatatttgaaatgttattaagaagtgatagcaaggccgggtgcggtggctcacgcctgtaatctcagcactttgagaggcaggacgagctgggtggatcagttgaagccaggtgtttgagaccaacctgagcaacatagtgagaccgtctctactaaaattacaaacagtagccgggtgtggtggcacacgcctgtaatcccagctactcgggaagctgaagcacgagaatcgcttgaacccatgaggcagaggttgcagtgagccgagatcatgccactacactccagcctggacaacagagagagactcagtctcaaacaaaaaggaaaaaaaaaaagaggtaatagcaagacatctaaacacaaatatttagtatgttaggaacacataatgagaatttaatcagaacacaggaacaaaaaggaaaacaaagatga

SEQ ID NO: 35506 - DNA, 1067 bp, Homo sapiens
tcctctccctacctggtctgagctgccacagggaacaaatgctctgttctgcttctctataaccatgtatttgacagcagctgattctgcctgcatccaggtcccacaagcctgtgactaggagaggcttcattctacacctggagttgaatactaggaagatgcttgcccatggacataagcaccttctcaaataacaactccatcagtgacagatttgagggtttttttttttcccaactgctttgatcttttgtcttactgagaattgtttcagatctcaggagggaagggagcatgtttttgagactctttatagttcaacagagtagcttactcctaagacctgttcatgataagcggggccagctttgcattaactctgtcatctagctgcagtgatggttagtaatagcaggaagtaaaatattcataaggtctgcaactatgtgtataatttcaacctttgcttatcacagttcacactgtccataaatgcacatgctgttctcctttctccacctcccgaggtgggataagtgtctgtggagctcagttctaacgttgcctgcccatcccccgccttccatccttaggtatgtgagggccgccctcttcctttcattgtgttctccttggagacttcacaggaatccacaccatctgctcacagccccatcctcaccttggagtccccatctcccactcagcagtacacttttgcaagtttgagttaatctaaaacagaatatctcaacctccacattatggacatttggaaccagatacttctcattgtgtgagactgtccagtgcactgtcgcatgtccagcagcggccctggccttcacccaccaggtatcagcaatctgctccctcccccaagttgtcagcaccccaccctgtcccctctccctccagtcgtgacaaacaaggtgtccctagacattgtcaaatgtcccttggggccaaatttaccccactgagagccacaaatgtagagtaatctttcagtgacttcattagaacagacttaattcctttgatatgcaaacaactgaggacat

SEQ ID NO: 35507 - DNA, 1056 bp, Homo sapiens
gggattacaagcacgtgccaccacacctggctaatttgtatatttttagtagagatggggtttcgccatattggccaggcttgtctcaaactcctgacctcaggtgatctgcccatctcgacctcccaaaatgctgggattacaggcgtaagccaccgtgcccagcctaaacccatgttttaaattaatgcaatgattgtattagcctttcaaacattaagactggcaaaattgttacaactatggagttttcattgattcatcctactcaccatcttttcctttaatatctgaacaaaccccaactctgttcactgttctccctgtgagtagactaatggaacaagagcaaacagtaacacaaacagacgctaacacaagttcatgcagaatcaataaaaatcagtacaacagaagataagtctatgtgtttttgatacatacgattaagcatgtgcctttttaacaatttatataaaacctaaaatatatgtatttctgatttttacctgtagtactgaagaagttacttaataacgttgaatataaaggccacttttacttaaccaccttccattcactattaactgctgtttccaaagtgtaagcaaatcagtctctgtgtacatagtcaagtgtatacaagcgtcaggcgtaacaaactcaagatgaacatgacagttcaaagatatttgggacaaaattgttgaagcatttttacccagggctctgtagctctgacaatgaaagaatatagttgctcttccagctgctattcagacagaaagcttgggcaagaagggtctgtatctatgttcttcataatacaattacaagtttgaacttcagataacatcagcagttggcatgtggaaaaccaaaaccctattttggtatttatcaagattgttaatggagtcaggtttcccttatttgtttctttaatggggtacagaacatcctgttggataacccgctgagtgacatgacgatgctctgaaggaatgcatgagagcttgtggtacctgccttgaaacatgggtttcactaatgctg

SEQ ID NO: 35508 - DNA, 1041 bp, Homo sapiens
gctgtaccctgcaaatccacaggggtggagctgcccaagaacatgggaacctacctcttgcatcagtgtgacctggatgtgagacttggtgtcaaaggagatgattctggaactttaagattttattgccctgctggatatcaaacttacatggggcctgtagcccctttgttttggccaatgtctcccattcagaatggctgtatgtatccagtgcctgtaattccattgtatctaggaagtaactaacttgcttttgattttacaggctcataggcacaagggacttgccttgtctaagatgagactttggactatgcatttttcagttaatactgaaatgagttaagacattgggggactgttgggaaggcatgattggttttgaaatgtgatgatatgatatttgggaggggccagatgtagagtgatttggcttggctctgtgtcctcactcaaatttcatcttgtagctcccataattcccacgtgttatgagagggactcggtgggagatgattgaatcatgggggtgggtctttcctgtgctgttcttgtgatggtgaatgagtcccacaagatctgatggttttaaaaatgggagtttctctgcacaagctctctctttgcctgctgccatctacgtaagatatgacttgctcctccttactttccgccatgattgtgaggcttccccagccatgtggaactgtgagttcttcattaaacctctttcctttataaattgctcagtctcaggtatacctttataagcagtgtgaaaacagactaatacaatctcactggtcagaatttagtaacataatttcccattagtttcgtggaatgctgagaagcataatagtttagctgtgaagaagcgtgttaatctaaaaatcaagtttttgttactaaagatatggaagatagacactgaaagtcaattatcagccaggcgtggtggctcacatctgtaatcctagcactttgggaggccgaggcagtggatcacctgaggtcaggagttggagaccagcctgg

SEQ ID NO: 35509 - DNA, 1005 bp, Homo sapiens
aaatacaaaaaattagctgagcttggtggttcgtgtctgtagtcccagctactcaggaggctgaggcagggagaatcgcttgaacccaggaggcggaggttgcagtgagccaagatcaatgccattgcactccagctgggtgacagagcaagactcctgtctcaaaaaaaaaaaatctacttcgcagttttcaaatgtgcactctattgttattaaccttagtcagcatgatccgcagtaggcctctggaacttaccctcctgcctaactggaattgtgtgtcctttgacccgcatctcgccaggtccccctccccccagcctccagtaaccaccattttagtctctgtttctgtgagttcagctgttgtacactccacgtctgataacaaattcttacataattaatgcaggtttgtgaaaaccttagttaaaaaactaatgaagacctgttctgtctttgttccgatgaagaatttacttaaaacggtatcagaggctaagtggaactatcccttatttggaacagcttatgacttaatgtgttttacactcgatttcctgccgtaaattgttaataccctctcaaagccgtgtaggagactcaccaatacctggagctggagcctatgctgacgatactgcaggggcagccgcagccactgggaatggtgatatattgatgcgcttcctgccaaggtatgacttcttagtttgtgaattttagagacctttggagaagatatttttttcttttaagatagaaaataatttttgaggctgggtgcagtggctcacgactgtaatcctagcattttgggagactgaggcaggtggatcacctgaggtcaggagtttgagaccagcctggccaacatggtctcgaactcctgaccgtttctactaaaaatacaaaaaatttagctgggcatggtggcacaagtctatagtcccagctactcgggaggctgtggtaggagaatcgcttgaacctgggagacagagg

SEQ ID NO: 35510 - DNA, 1175 bp, Homo sapiens
atatgggtgctaaatatttatcaaatgaataaaggaggaaatgcagattccagttattcatggtgatgttgggaagtactgaaagtcctcttaaattcaaatatcagaaatatgctctcccatctaataaatactttttgatggtgctggtattaatattcagatatgatatatatttaatatttatttttaatattaatattcatatatatatattttttaacaagaagctttacattcttcatcttgtgattttttggttaaaagaaaggaagtctgtttataatgctgtgcattatttctataaatcgccctctgtacacagggatgtcagatgctgcccaagagaatctgtttcatatggtaattttcactaatgaatccagacctatactgttaaattttgccccaaactgcctgggatgaagtagaggaagctcatggcagtgagcgtgacagttcttagaggacgctatcatagtgtttcataacagatgcagaggctctgcagttctgaatattaataccagcaccatccaaaagtatttattagatgggagagcatatttctgatatttgaatttaagaggacttccagtacttccgaacgtcaccatcaataattggaatctgcatttcctcctttattcattcgataaatatttaacacccattatgttcatggcatcacattagactctgggggagttacaaagaacctaggctgggctctgccctcaagggggaaataaaagaaacaattacatgtaattgtttttaacaccaagcagcgtgaaacccagctctggagcagcctggtcacaagggggagaagaggtcacgggagcccctccaaggccagcgcacatgtggccataccttgtgccttcccaagcccgggccctcgcacccttctcttgtctttccttgtcctcccatgccgtcagggtttatgagacctgcaagtctcggggcatggctctggtcactctgggcagcgaagatgattctctgatgggctgtggtcagtgaagcacagcttgtttgcctcttttgattttcctgcaatgccaggagagattgctcagttttaggcaggactgagatctcctaaaacatggaatttgtagacaaaaatgaatacttcctaacatttcctgagagagcttttggtc

SEQ ID NO: 35511 - DNA, 1046 bp, Homo sapiens
ttatatttatggctttttttttttttttttttttgagacagagtctctctctctcgtcacccaggctggagtgcaatgccacgatctcggctcactgcaacctccgcctcctgggttcaagcaattctcctgcctcagcctcctgagtagctgggactataggtgcttgtcaccatgcctggctaacttttgtatttttacattttgtatttttagtagagacggggtttcgccatgttggccaggcaggtctggaactcctgaccttaggtgatccacctgcctcggcctctggaagtgttgggactgcaggcgtgagccaccacgtccggcctatggttgttctttaatgtgcttcgataaataactcagatccagtttcctcttattctttgctttcttctattacattttcctcatgttcaggccacttattcctgaggttttccctttagctttagctctattgctgtgaaattggaactttagttggtagcataaaattattttctaagaagattgctgttgattgctattagttgctgttaattaataaaaagcattgctgatttaggttctgggtttttttgtttgtttgtttgcttttgtttttgtttttgcttttgttttgagatgaagtcttgctctgtcagccaggctggagtgcagtggcataatctcagctcactgcaacctctgcctcccaggttcaagggattctcctgcctcagtctcctgagcagctgggattacaggtgcgggccaccacacctggctaattttttgtatttttagtagagacagggtttcactgtgttagccaggtggtctccatctcctgacctcatgatccgcctgccttggcctcccaaagtgctgggattacaggtgagagccaccgcacctggcctgtttttaaattaagaagattcaggcaaattgtttttgtgttccaacagtaaacaagctgatgcaaaagaaatgactattaccaaaatggataatcttttcttacatttttcctcatcctcagtagtattaaatat

SEQ ID NO: 35512 - DNA, 1016 bp, Homo sapiens
cattaaagcattttttattactttattacataagtaatacacattattgtagaaaaaatttaaatagaaataaaaagatatataaaagtcactacaaactggagataactcttctcaatatctaaatatactccaagatgtaattccattttagcagttcttttgctttaagaaaacactttggctaggattgaagtacaaagttaggccaggtgtggtggctcatgcctgtaatcccagcactttgccacgaggtgggcagatcacctgaggccaggagttcgagaccagcctgaccaatatgatgaaaccccatctctactaaaaatacaaaaattagccgggcgtggtggcatgtgcctgtaatcccagatactcagaggctgagacaggagaatcgcttgaacccggaaggcagagattgcagtgagccaagatggtgccattgcactctccagcctgggcagcaagagcaaaactctgtctcatttaaaaaaaaaaaaaaaaaaaaaaaaggacaaagttaagaaaatatcagattctgtagaaggaatattagaaatctgagcaatatcaccctgtacttggagtttatgtgttagactgcacagatttaactggtgtatacagtcaatcctactgctttagattatagtactattcagcatttaggatgactactaaaagcaaaatatgatcctaaaacgttttaacgaagggaccgtgtgaatgactgggattgtagtgaagaggaaattcggtataataagatctcatattttcataaacaagaaaaaaggcaaacgtaatatccccttagctatcccaaagagaaaaaatagcacatatggtatactttgcatattgctgaccagaaaaacattcaattttccctggttagttaccatagttacatgagccctttataacatcaagagggggaactaggtcacagttttgaaggagtttgaattatgcaattatgttttctaaaagcaggggaaagggtttttaat

SEQ ID NO: 35513 - DNA, 1080 bp, Homo sapiens
agtatttggtgaataagatgaatgtcagagtgttcattatactatttcagtttttctttaagattaaaaatgtttaaataaaaagttagcagagcggaagaaacaagggcgtctttattcagaaattgttagcagctgaagacattcctgtcccttatcctttgccttttccttttttctctcagttttaaatttcattttcttgactcttggggttgtgcctcctaggatttagcagttggataacttaaaacaaagatgaggtgtgtcgagtttgtgaattatttttgtccattctctttctgtatcccacggataagttgatgtcttattttcatcctcggaaaacactaaaaaatacctaagatgtaggcgtggtactagaaaagctggtaggctggttagggacaggacatgggcataaactgaacctatgaagctatactaggactaaattaaagtcagactgtcctgagactcccttcacccctgctcagtcctagcctgtgtcactggacttttcaaaatattacatttctgatctgagcatgagtattggaaagaattcacccttttgaagattataatttagttttctgtctttttatcaccttttacaagcctaagatttccccttctcttcagataggtgaaaatggtgatcccaaagccttcttaatagagatttcctggacagaaacatatccccaaacacctccaattctatctatgaacgctttttttaacaacaccatgtgagtagtgtcttgtttttactgcttttcatttcactctctgttatacttttctctcagcaaggtatttttgttgtgcattgtagatcatcagctgtaaagcagagtatattagccaagctacaggaagcagtagaagctaatcttggaaccgctatgacctatacattgtttgaatatgccaaagacaataaagagcagttcatggagaatcacaatcccatcaattccgcagtgagtatgtgattatttttttgccggattcttttgttgttttggttttgctgttagcaataaatttgtactacttaatatatattcaaaa

SEQ ID NO: 35514 - DNA, 1111 bp, Homo sapiens
gcattctttttaaaactgtggtaaaatttacaaaacaaaatttaccattacaatcatcttaaagtgtataatttggtgacgttaattacattcacaaggttgcctaagcatcaccaccatccatctccagaactttttcagtatctggatcagaatctctatacccattaaacaataactgcttcccgcagcccctggcagccagcattctactttctgtctgtgaatctgaccactcgagatgtctcatgtaagtggaatcatacagtctttgtctttttgtgtctggcttattttgcttagcagaatgttttccaggtccacccatgttgtagcatgcatcagagcttcattcctctgtaagactgagtaatattcctagattgtgttcgtccattcatctgttggtagatactgggattcttattaatttggctattgtgaataaggctgctgtgatcattggtataaaagtatctgtttgagtccctgctttcagttatttcaattctgtagaatggctgggtcatacggtaatcctatgtttaacatttgaagaaccaccaaattgttttccatagctgtaccattttgcatccccatcagcaatgcacaccggttccagcttctccacaccttttaccaacatttgttattattatctttttgttttgatagggccaccctaataggtatgaagtggtagctcacgatggttttgatttgcatttccctggtaattaatgatgctgagcatcacttcatgtgctcctagccatttgtatatcttcttaggaggaatgtctattcaagggctttcttcatttttgattttgttgttgttgagctgtaggtttgagtcattcattttgtggttttgaaaatgacacactagtaagtctgaaaaactaagcttctccccattacagtatatgtagcatgtggcaaaaagttctgttttagaattttgagatgctgtgaagctgatgaagcacactttgaggaattaacttaggctggagtgaagtaaatcagagcgcatgggtaagtgagaatcagatagaatctcgcaccatgctggaattgggagtttctgtagcaacgattgcct

SEQ ID NO: 35515 - DNA, 1031 bp, Homo sapiens
cctgttccatgaaggcagagccatggaccacgcaggaagggcctacagcccatttctccatacgcactggtatgtgtggatgatgctgccagggcgccatcgccaagtaagaaagtgaagcaaatcagaaacttgtgaagtggaaatgttctaaaggtggtgaggcaataaaaatcatagtactctttgtagcaaaattcttaagtatgttattttctgttgaagtttacaatcaaaggaaaatagtaatgttttatactgtttactgaaagaaaaagacctatgagcacataggactctagacggcatccagccggaggccagagctgagccctcagcccgggaggcaggctccaggcctcagcaggtgcggagccgtcactgcaccaagtctcactggctgtcagtatgacatttcacgggagatttcttgttgctcaaaaaatgagctcgcatttgtcaatgacagtttcttttttcttactagacctgtaacttttgtaaatacacatagcatgtaatggtatcttaaagtgtgtttctatgtgacaattttgtacaaatttgttattttccatttttatttcaaaatatacattcaaacttaaaattaccaatgtctttgagttttttgttgctgttgtttttgatgttgtgccactaattggaagttaaaatgtttttaatcagaagcttgatttggaagagtcaaagaggaagcaccagaaccctagcctagttttttgaggtggtggcagttagatcagggcagacagatcgcttatgcttcccaagtcctcgcagaagttcctgaccctgaaatgaccacaatgccaggaagatactttgtttgcatagatctcaggccttaaatatgaccatatgtgtgaatttgaaactttttccacaagataagtgtctaatgggaagaacaacctaagaggatatacaacaagccgttgatgtttactgatggcctcctctgggcgctgggattttgacagaggaatttgctgtctttttacttcata

SEQ ID NO: 35516 - DNA, 1033 bp, Homo sapiens
taaatttttaaagtatatcaaaataaactgataactgagaaaatatatgttgttcagatactaataatgaagttaatgaagtccactatagtatttgtccctgagaaatctttatcaaatattttaaatcctattgtaaaataatgtattttttctttcagttttagagactggcaatcctaatttaacatctccttttgaattccccaccacaggcacactttcacacattcactctttaataacaggttgtttcaaattgttaatactttatagcttaatatagaaatttcactttagaaattaatttttatttctctgccttaatgctatagatgttgtagtctgctttacttcagtattgtaatgagtagttggctaaccaccatgtaaatagggagaacattctagttttttacttgtgtaggaaaacacagcttgaaatgtctaagtatctattttagagtgaagtaaatttatactgacaatatttttttgtgtttgaagacctgactgttacagcgttggtggcaagtgttaagggatccaggaactagacaagtgattctgagacctgagttccaggtttctaagtaatatcagttggtctactgagaactttgccataaacatatgtgttcagaaatttcctttcttagcagcagcatcctgaattgaacagaattacacacacatcagcccagtaagaaacaattcatgttaagtccattgctatgccaggataaatcttttaaatcacaattatttttcctatttatattttgtcaaataagaatgttctaaaaaccaaaatttctgttttcttttttttttttttttttttttgagacggagtctcactctgtcgcccaggctggagtgcagtggcgcgatctcggctcacggcaagctccacctcccgggttcacgccattctcctgcctcagcctcctgagtagctgggactacaggcacccaccaccacgcctggctaattttttatatttttagtagagacggggtttcaccgtgt

SEQ ID NO: 35517 - DNA, 1031 bp, Homo sapiens
cttttattattattatttttagaaacagccttgctgtgtcacccaagctcaagtgcagtggtgcgatcatagctcactgcagcctccaattcctatgctcaagtaatcctcttgcctcagcctcctgagtagctgggactacaggtgtgtgccaccatgccaggctacttgtttttactttgttatagagatggggtctctctgtgttgcccagactggtcttgaacacatgatctcaaccattcctcccaccttggcctcccaaagtgctgggattacaggcgcgagccactgtgtctggcctatttcactttagaagtaaattgaatgccacatgcgaagtttgttaaatttttttaaaaaaggaaagaaaacacaaaagtaaactacctagtcgcatcagaaatgccatagtcatttttgccattttttcattcattagaattcagtgcattatgttattttgttatctctgcagtaactttctatcatgttatttattttctttgtcttatttaaagcttctgagattatggatttttgtttccttccctgaagttaagtgttatcattcctatatagtactaagctgtctacagaatagtgggagtctgccctcttgagttgggaagatcctagtttgaatcttggctgtgcgactttaaagttcattaacttctcttagcctcagtcacctgaactctgcagtggggatccttatgcctcagagtgtcattgggaggactcacgaaaatacgcttgtactttgagttcagtacctagcctgtatgagccagcattaagagggacagtcatcacgcagcgctttgcacacagctctcacgccacatcctttggctactgttttggtaaatctttactagtaaatgtttcttaaaagcatttacattcatggacatgattcagaaactaacagttgttttttaggtctcactttgagatttaaaaacccttagggcagagaccagattttatttcttacctcagagtttccctgtaggacaggaacc

SEQ ID NO: 35518 - DNA, 1050 bp, Homo sapiens
cacttcactgttataactgagaagactgttctctgcagcttcagctaattcagcatcttcagtagcttctaaaaaataagcatcatcaatgccattatcccagacagcatcagcagatgcacctgttgacagcctgctaggtgatggtttatgaggattctgggtttcattgctcctagtttcatctgcttcatctgttgtaaactcttcttcctttatttcagtggtgaagggatagagagtgggataggaaaatatttactcaggatatgtgatttaaccttatactctatgttgaagtaaggtattaagtgacagatactaaagtgaatatgcaggaggaatgctgtctccgatatctcaccgtgggaatgagtgcactgattcaaacgttgctgcactgaagctcagacacacttgaaactccaaatttgaaattacctacagttctgtgcacatacttttcaatactccccgacggaagagcaagggtggatttaattttttaacaagtggacagtccagctgaagacaaatcagaagataaatttgctatcttgacaatggacttagtacccatgctttaaattttaaagtatttagcaaatcgtaaacatggattgaaaaaagattaaaaacagttgccaaaatatgactggattgtatattacataatagtattgtatcaattattttaccatagaatgtcttcagtatagacatttagttgatccgcccaatacattatttatgtaaagaatgtccttattcagtgcagtggcacgtgcctgtaatcccagctactggggaggctgagacgggaggactgcttgaggccaggagtttgagaccagcccgggcaacatgatacccccctgtcattaaaaaagctacagaatgtcttattctttccgctacgtgcttaaatattagatgaagggttttgatgtctgcagtttaagagagtcatcaaaaataatgcgtatgtatacagtagagggagaaaaccaatgtggccaagtgttaacaaatggcagatctcaatagagg

SEQ ID NO: 35519 - DNA, 1043 bp, Homo sapiens
tgaggtcagaagttcaagaccagcctgggcaatatggcgaaaacccatttctactaataaagtacaaaaattagctggatggagtggtgcatgcctttaatcccagctactcaggaggctgaggcaggagaattgcttgagcccaggaggtagaggttgcagtgagctgagattgcgccattgcactccagcctgggtgacagagcaagactccgtcttaaaaaaaaaaaaacaaaaaaaaagctagaaggtatggaaaagaagataaaatcatctgtaattccataacccaaaataaccaccatgttttttggtctatgctgttcagtcctttcagtgagctttaattaccctaagtgagatcatatacttattattaagtattcaacaatgcataacattccattcatggatatgccatagttaatctcttactaatcaagaattgctatttaaaaaattataagtgctttgatgaattttgttgtagctaaatatttgtgcattccttagatcatttccttagaaaaaaactgctgataagaattctgggtcttaggcgggcacggtggctcatgcctgtaatcctaccactttgggaggccaaggcaggcagatcacgtgaggtcaggagttcgagaccagcctggccaacatggcaaaaccccatctctactgaaaatacaaaaattagctggatgtggtggcgcgtgcctgtaatcgcagctactcagaaggttgtagcaggagaatcaccttgaacccgggaggtggaggttggagtcagctgagaccgtgccactgtactgggcaacagagtgagactctgtctcaaaaaacaaagaattctgggtcttattggtgctaaaattcttgacatataatatcttttggtcaagttcttaatatgtgattaattcatttgggcttaattgaataaataatttatgctaatgtttgaaaactttttgaagtataataagttgtccctgccaccctgtcttcttcacctttccacctgctaaacatacacacaggtaacc

SEQ ID NO: 35520 - DNA, 1028 bp, Homo sapiens
cgcatataattctagcactctgggaggccgaggtgggcagatcgcttgaggcaaggagtttgagaccagattgcacaatctggcaaaaccccagctctaccaaaaatgcagaaattaactgggcatggtgggcatggtggcacacacccgtggtcccagatacttggaaagctgaggtgggaggagcatctgaacccgggaggcggaggttacagggagccgagattctaccactggactccagcctgggcaacagaaccagactccacctcaaaaaaagaaaagagaagaaaaaagagagagagagagagagagagaaggagaccattaaaggaaaatactgaaagctccattatttatttgcctagatcagttaaatcactacagtagaacaggaaatggtatccaagtgtttcttctgtgaagtattcagtcactagtgaaatctcttttactttattgtgtcctggaaagctaaaataaattgtacatcacttattttaaaggatcagtatatctcgaataggccaaattgctaatctgctacttaaatgtatgaaacattgattgttacaaatcatatagtttgatattataagaaaataaatatgggaactgttgaaaatcttcacatttaaaactattatagcatattttcttcataagatttagttcataataattgctgatatttactgagcttttactaaacactaggcattgttctgagtatcttccaaatattaacttattgaatcctgacaacaattctctgaagtagataactatttttatccacatctcacgatgaaaaaactgagggttagacaggttaaatatttagcacagagctactgagtatgctgctgagccaagattttaaacctgggtagtctcttaaactagaattagacccttaatgaacacgtaaactcagagctaaaataatttagaaagctattaaaattattaagaccattttcaaaattaaccctccttatgtgtcattaccagtgttttcctgtgta

SEQ ID NO: 35521 - DNA, 1067 bp, Homo sapiens
aaaacaaaaatcctttttcctttagctgggtctgcagctggggctgtaaggcagattaacaggagaaaaggcatacgtattttatgttaatttttacaatgacacagggctttcctagaaaagaagtggataggccagaaagtttctatacggtgtttaaaagatgataaactgtggagatacgacatgaagagatcataaaaccaggtggagggttagacctctagggattgaaactatgggacggtaaatacaggcataccttggagatattttggttgcttgcagaccaccacaataaattaaatcttggaataaagcgagtcacatgaattttttggtttcccagtgcatataaaagttatgtttacactataccgtggtctgttaagggtacaatggtattatgcttaagaaatgtacatacgttatctaaaaaataatttatggctaaaaaatgctgtcaatcatctgagccttcagggagttgtaatttttttttgctggtggagggtcttgcctcactgttgatggcggctgactgatcagggtgctgagtgctgaaggttgggatggctgtggcaatttcttaaaataagacaatgattaactttgctttattgattgacttcttttcacaaaagatttctgtagcttgtgatgctgcttgacagcattttatccagagtagaacttttttttttttttttttgaggcggagtcttgctctgtcgcctgggctggagtgcagtggtgtgatctgggctcactgcaacctccgcttcctgggttcaagagattctcctgcctcagcctcccaagtagctgggattacagacatgggccaccacgcccagctaatttttttttatttgtagtagagatgaggtttcaccatgttggtcagactggtcttcaacttctgacctgaagtgatccacccacctcggcctcccaaagtgttgggattacaggcgtgagccacagcaccgagcctcacagtagaacttctttaaaacatagtcagtcttctcaaaccctgccgctgctttattagctaagtatac

SEQ ID NO: 35522 - DNA, 1054 bp, Homo sapiens
ccagtctttagcctggatgtattttaacagactatgttgtaataaataattatttaaaaattagttctcttactctaacaatttatattcatttttctctgttcccttccagtttctacccagatacagacgtaaacgaaaataaatcttacttggttttagttcagttttcaccatctttgatgttagtgaattaaaccataagtgtttggaaacttttataacctatatataattttccatgtttaataacatctttatttattgactaggaatctaaatcaccaacattttttctttttctgttgattctgatttattttaggagttacatgatcttttcaatctgcctcacgacagaccctatttcaaaaggtctaatgcttatcactttccagatgagccatacaaagatggttacattagaaatccacatacttaccttaatccacctaacatggagactggtatggtgagtttaactaattatttatgggagtcactggatcagtaatgttattagttgttttttgttggtacccagtaggagacttgattcattatgtattcattcctaaaacatgatttatcacccatctctgttaacagacattgcttaagatagcagtaattaaaaatggtctagaaaagttagtaataggtagatataccacatttatcttactaaaattctcttatttctttaaaggcttgtcccattttttttcattctgaacctgagaaatcatgctaattaagggcatagtctacccaaaccacactgtaggataaatctttttttgtttttttgagacagagtctcgctctgtcactcaggctgtagtgcaatggtgtgatctcagctcactgcaacctccgcctcctgggttcaagcaattctcctgcctcagtctcctgagcagctggggttacaggcacctgccaccacacctggctaatttttgtatttttagtagagacagggtttcaccatgttggccagtagctagggttacaggcacctgccaccacacctggctagtttttgtatttt

SEQ ID NO: 35523 - DNA, 1048 bp, Homo sapiens
gaaacttttgttctactaacagttctgggtctgagaatgtttctaaatggaaaacggctatgaaatgcctcccaaaggctaagatataataatccccagttgtcttcacccagcttctattaactgttcctactgggaaatcattgtgatagctacagtgaggtgatcatagaaataaagtgagtacaataaacattttagtaatgagacagaagatccaggacacaagacaacttattattttagcaatttttatttattcagatgaacttgtatcttccttagaaccgcaattagatagctagaataagcaaataaagaaaaagcaaatgaattactgatccctaaataaagcattagaaataatctagtttcttcctggagcagtttgagatttgatagtagtatgtattgttctgctctaatagaaactcacaaacatagcaatgacaagttgacattaaaagccataatctttgggtatatagggactagttcttttttatataagctctgacaaatgctttttaattgattcttcaattattctaaatactggggtatacactgtgaagtattaaaaatatacatcatattgtacatatcctcaagagcatccagtctagttgggaagacagacaatacacgagtaaataaacaaacataaaagtacaaataactttcattaaggaaataggatgtaatggtgaaaaatgatgaggggaggactagagaagctacttcagatgtttggcgaagtctttctgagagtgcagcatttgaacctagacctaaaggttgagaaggagtgaagagtaagggaagcatttcaggcagaaataagagtgcatgagaacccccagaaagggcacaagcttggcctacatgaggaactaaaaggaaatcagaatggccacagcaccatggatgagggagagcaggaataatgtaagatgatatgagagaagtaggcaaggtaagacccatgtgaggtctagacagaggtgtatagttgggatttgcccagaaaaattgggagtaggtatac

SEQ ID NO: 35524 - DNA, 1028 bp, Homo sapiens
actggcagagaatccataggtttgctaaggatacagagccacattgaaaaggtaaactgtgaaaatcccattcatctgtcaataatctgggagggagaaaatgataagaggggccagtgagccatgataaagtggggcacaggtgaccatgtgaggccagtacaagtggctgtggggaagaatccactctgaggaaagggagagagcagtcataggtggggagcagataatcttgcacgagggagagggagacagagggggtagctgcctaattctcaagggccttttgatccttttttatctttaagataaaccttgctatgctggagattacttaggtgggccaggatttcttgaaaccaaaactttactgaatcacctcttcaccatctgtatgccgtgcatttgctgagtaagttttgacttttaaaacaaaatactaaatattactgcatcttttgcaataataaaatttacttttacttctcaaagtattcccaagatggaataatagttcatgaactctacaaccataacatgctgaaaaatcacagatttagttcattctatgccaaaatatatgggtaaacatggaaaaactcagctgatgtgtaaggatttttctactcagtatcgaacatctagctatttgagcacatgttggctgattgtcacccgcttcgtccttccatgctaagagtgggtggcaggagaacaagctggacggtctaagcccacactcacaggaaattgacccatgacctcgtgagtccagttgcaccttgtttcaattgtatgatggttataaaaaatgttagaaactggggcaggcacggtggctcacgcctgtaatctcaacactttgggaggcctaggtgggcagatcacgagatcaggagttcaagaccatcctggccaacatggtgaaaccctgtctctactaaaaatacaaaaattagccggacgtagtggtggacacctgtagtcccagctactcaggaggctgaggcaggagaatcgcttgaacc

SEQ ID NO: 35525 - DNA, 1023 bp, Homo sapiens
gtagtatagtctggtctctgacagtcatattttggggtggtataatctggtctctgacagtcgcattttggggtgatatagtctgatctctgagtcgtattttggggtggtatagtgtggtctcagacagtcatattttggggtggtatagtctggtctcagacagtcatattttaggatggcatattcagaggcctgtcagtttcctgtttccaagatgctgccatcagcggatccaatcttcactgcctgtggcagagtggaaactagcctgggcgtgagggcatgcaggcagggcagcacagaagtgaggggagggaagatccgggcggaatgcaccctccccccgccccactgcgtcctgcaccatcctcacagcacttctaaaatgaacgctttccctgccttcttcttcatcctaaatgacatactgagcactgcttcgtctttataaaacagatctttctttaagtcttgttcgtgctgcagatacaaagcaacttttatgcgtgacctaccctagtggccgcctacgcacagccctgtgcgactctggagatggcgtgcacgccccccgtgtctgctctggacccctggctcacgccactcggctcagaccccatgctctgctcagtccatccagcctaagccaattctgtggcagccagccatgaaaacggaaccctctgcagcctgtgtcttgcaggaaggctgtttactctttctgcaaaaatccacacaagtggcacattggctttctttgtggtcagacccttcattgccaaaatcttcagcatttttctggcttcccttgtattctttatttcacttgaaaagggggtgggagtggtgagacattaatacaacactgtagcctttttcttagagtttcaaattgctaaaaaaggaaagaactcctgatttcttcctttcacttaaaacctgtgagccagtccctgtgtgtgtgtgtgtgtgtgtgtgagccagtccctgtgtgtgtgtgtgtgtgtgtgtgtgtgtgag

SEQ ID NO: 35526 - DNA, 1086 bp, Homo sapiens
ggattttaaagcagcagttatgtataaaattttatttaactttattagacattgggcttgttattattgtgtcactgagcagctcttttgaattgatctctgttaattcattaatttgtcgaacgagctcagttaaaaatgacaaaggatcaagttgctgtagactgtttgatgcggtgctgactgtgttctagatggacacttcagttgtgcaagtaaataatgaaaccagatagcttttctattatagatactgcaaaacaatattcttcagtaattcattttagaatttcactgccctaatagtactgaaagtctgagagagaaaaaatgcatcacaaaactatggtttcataaactttggcagcagtttaccccaaattgttatttgagactactgtgaggtatgtcgtatcaagtgttttgctacagatgataaccatgttttcttgtattttaaaagtctgtagcaaagtgtcacatactagaataaattgctgatttgcaactatatacgtaagacaaaaagttatctggatatatttgctaatgattcttttcattaagcatatttggaaaacaccaaattatgtttgtcattgttggtgtatgtgtgtgtgtgtaaattgtctccaaaacgttacccaagtcatttatgtgtaaaagttctgagttcttatcaaaatcacatttaaatagtaaagataacatttaggccagtgttccaaatttcagataaccgaaacttaaaaaatcaaccatgctcaactgagcgctttttgcagtttattttacactcttttcttgatgcttggtatgaattactatgttgctaagtgtacacagtatgattcctttgttctttatggaattttatgtctttatttctgtattgtactatatttgaattgtatgtcagcaaacatagtgaatagaaaactgtgccctttaaaaaattgccatgagtagctcacctgaaaatcaagtatgtaactttcaaatattgaaatgattttccactaccatcagatagttagaatattgccaatgaaacagctactcataaagatcaaagtaaaataccca

SEQ ID NO: 35527 - DNA, 1004 bp, Homo sapiens
gttcaagccatttgaggatttctggaatggatggtaatttgaaacagtgataaggatagctgattcaaatataagttttggtatgcttattaaaagttttgatgatcttcagacctctcatttcagctaaattaattttgttggctttaaggatgaaatgttgggaagaagagaatggaagaaatgacaatgtgaaggcatctaggctttgaaccatcactttcctttggaaagcttggtataattgtggtgatttatgccaccttcctctcctcaagggactgtgttgacatttgacttcccagggaataaattaaaaatggctaacaatctgcatggcggggacagtggacagccacagccgacgcaggctgcagacaaccactggtatctgtggtgccaacagaatattcgctctactcttgtccacaatttgataatagaagtgaagctaccatatcatatcttctgagtaaatttgatagcataagggacgattcccgcaatggaacgctaggattagatccttgctgtgctccttctgatttcagaaatcagtgaagctaaataccaaacttcattttccacatttgttgaattgcaggtaatacccaaccgcttagcctcataagagtgttgcaatgactgtagtgaagtggcgcatatgagaatactttgaaaaggataaaacacgtaatactgtgttggcttgtttgttttctgggtacacctaacaagggcgtgctctgtttgctggaaatcattgcactatagacctatgattcgtgcatttttctatatgtacattatacttaaataaaacttattttacaaaatatcaggcaagaatacaatactatcttgcctattcaaaattcaattatctggcaatctaactgaggtagagtacagccaataaatggaaattagcaaaaatgacaggctctcacctacagcggatttgttctaacttagagtgccacaaaactgtgatactggtgtct

SEQ ID NO: 35528 - DNA, 1044 bp, Homo sapiens
taatatgcaactacaggtaattgtgtgcttgagttaacttgctttttcctccgagcaatgcattgaactggtttgttctggtgggaacctgtggacactttgttcttaggatgctggatgttcagacctctgagtgatgattagatgcttggttctctgaagaaactagttttttatttggaggcacttttgggagaaggggcggggaacgaaacgtgcacttaacatgtctgccaagatcaatattttcgttttaaccaggtggttaagaaaagctctaattttgcttagctccttttggggaggctcacccctgccctgcctcccccacccgcccccagtagtgcttttacggtttgtagtttgagaattagttagttaagcacttagtaatatgaattgagtttgagtcagtaaattgaataagctcacttcgtaggtgattgatataaactggaggaattctgccttcgagaagaggctctttccttcctagcaataaaaacgactttctctggaccaaacaggttgtgagcactgggttaattgaatcctagtgcagccttgtgctgtggcgccgtggtcaactcgccttacagaggagaaactggggctgcagattgttcccagggactgtaggtgtgagcccggttgaattcccagagctggcctccagagctcgccctgcttccttgctgtcaacacctgcagcatttgggaagtttgaatcctgcagaacctttaaaaagtgttcacggctgggcgcgatggctcaagcctgtaatcccagcactttgggaggccgaggtgggtggatcgcctgaggtcaggagttcgagaccagctggccaacatggtgaaaccccgtctctactaaaaatacaaaaaattagctggatgtggtggcccacagctgtaatcccaactacttggaagcctgaggcaggagaatcgcttgaacccgggaggcggaagttgcagtgaacagagattgtgccattgcactctagcctgggcaacaagagtgaaactccatctcaaaaa

SEQ ID NO: 35529 - DNA, 1050 bp, Homo sapiens
tgagccccggagtttgagcctagcccgggcaagatggcaaagccctatctctgcaaaaaaatacacaaattagctggggatggtgatgcatatgtgtaccctcaggtacttgggaggctgaggcaggaggatcacttgagcccaggaggttgaggctgcagtgagctgtgattacacgaccacacttcagcctgagtgacagagcaagaccctgtctcaaaaatagaaaagaaaagaaaaaaaaaaagtagaccgggcacagtggcgtacgcctgtaatcctagcactttgggaggcagaggtgggcggatcgcctgaggtcaggagttcaagaccagcctggccaacatggtgaaaccccatctctactaaaaatacgaaaattagccaggcatggtggtgggcgcctgtaatctcagctactcaggaggctgaggcaggagaatcgcttgaacccaggaggcggaggttgctgtgagctgagatcgcaccactgcattccagcctgggtgatgagaaactccgtctcaataaaaaagaaaagaaaagtaaaaataaattaatagatttactatcaatatttagagatagagaaactatataaagatagcaacaagagacagtatgaccttcacaccttcgaagtttatgattaaaagcaggtacttacagctacttgcgaggctgaggcaggagaatcgcttgagcctgggagtccgaggctgcagtgagctgtgatcccaccactgcactccagcctaggcgatagagtgagaccctgtctctaaaaaaataaaaaaattaaaagtacttaaacagtagggtagtgagattttagtaagttagcaaatatttacgattatagagttttataataagtttttaaaatgttaatcctgtctctagcaaaagctggattttatagactgcaaattctcatcctataacattgtcggaagtactggggtgaggaatgcacacctgcacgcacaagaaagtaagaacattttggccgggcgcggtggctcacgcctgtaatcccagcacttt

SEQ ID NO: 35530 - DNA, 1043 bp, Homo sapiens
acaatgtgtgagtgattaagcagccggaagagtggcgaaccacagactgtagtcttggaatgtcgagtcttgcctgtaagatgttaaaataagaatcgttttggcctggcatgatgcataattgtaattgtgaaaaaatttaaagctaaaagtttttttgtttaaattccaataaaatatgtttacgttattcctttgattaataataacaaatatatagctcgattaaaaaagtctctgagacacacagctaacagtgaggagaccacgcatcattatgtggttgtattaaagcactcatcggttggaatctgaggtagaaatggtataatacaaaactttatttcatgcactgttttctaactaactgaagatgttcctaattgactgcttttgtacctttttgcaagcttccatagtgaccgtaatgcaccttgtcaatgctgtggttgacacggtgagcacagaaggtacagttgtaagtgctcgtgcttgtgtctgtgtcttgcagcagccgtgtcgtagagctcggccgcattgctattgcaatggtaggaaaaaacagtttgtggttttgagggggttgagtccttttattttatgcaggtgtgtatatacgtaatatgagtgctttgcaaaaaatatctcaatgtatgttatgtctttgttcctttttaccattcatagtgatttacatgagatctggagagcttatctgtaggtggtgcaatcaagaaaaagttcagaagtaattttacctaaaatttttttgaaacaaaaattcttcttcgtatgtacaggaataagacttgaataatgtaaagctttcataattaacctgtaactgactcttcacttttggtttttccctgagtatgatcaaagaaaagggtgtagagcatggtaaaagaatattttcatatttggtttagtgaaaattatttaatgtgaagctttatctgctcagagttgtaagaaaggacattgagcaccttccccaaattattttaaattaaaatagccctttattagtgcactgaaat

SEQ ID NO: 35531 - DNA, 1108 bp, Homo sapiens
tcccctcttctatttgaacagcttacatttcatacaaaaacaaactttcatagaattgctgtctttgttttttgccataccttccatttttatcccgctgtgtttgaaggagctcattgttgattctgtcatagtcattgacagagctgggtttcagtgtgaattagtgaagtgctataaagaaatttgtccttttctttgatacgtttcttgtgtggagaaatgagtatctaccagttagtaattttttgggaacttgagtaatacaaatgtttttattgaagaagttataaacagtgccatagacaaaggtgattttatttttcttttcttgtaggtggcagataatggaaagcctcagttgtcatctttgacatacattgacattagggtaattgaggagagcatctatccgcctgcgattttgcccctggagattttcatcacctcttctggagaagaatactcaggtggcgtcattgggaagatccatgccacagaccaggacgtgtatgatactctaacctacagtctcgaccctcagatggacaacctgttctctgtttccagcacagggggcaagctgatagcacacaaaaagctagacatagggcaataccttctcaatgtcagcgtaacagatgggaagttcacgacggtggccgacatcacagtgcatatcagacaagtcacacaggagatgttgaaccacaccatcgcgatccgctttgccaacctcactccggaagaattcgttggtgactactggcgcaacttccagcgagctttacggaacatcctgggtgtgaggaggaacgacatacagattgttagtttgcagtcctctgaacctcacccacatctggacgtcttactttttgtagagaaaccaggtagtgctcagatctcaacaaaacaacttctgcacaagattaactcttccgtgactgacattgaggaaatcattggagttaggatactgaatgtattccagaaactctgcgcgggactggactgcccctggaagttctgcgatgaaaaggtgtctgtggatgaaagtgtgatgtcaacacacagcacagccagactgagttttgtgactccccgc

SEQ ID NO: 35532 - DNA, 1047 bp, Homo sapiens
caaagacagattttacataaatgagagaggacagatatttactttggaaaaacttgatcgagaaaccccggcggagaaagtgatctcagtccgtttaatggctaaggatgctggaggaaaagttgctttctgcaccgtgaatgtcatccttacagatgacaatgacaatgcaccacaatttcgagcaaccaaatacgaagtgaatatcgggtccagtgctgctaaagggacttcagtcgttaaagttcttgcaagtgatgccgatgagggctccaatgccgacatcacctatgccattgaagcagactctgaaagtgtaaaagagaatttggaaattaacaaactgtccggcgtaatcactacaaaggagagcctcattggcttggaaaatgaattcttcactttctttgttagagctgtggataatgggtctccatcaaaagaatctgttgttcttgtctatgttaaaatccttccaccggaaatgcagcttccaaaattttcagaacctttctatacctttacagtgtcagaggacgtgcctattggaacagagatagatctcatccgagcagaacatagtgggactgttctttacagcctggtcaaagggaatactccagaaagcaatagggatgagtcctttgtgattgacagacagagcgggagactgaagttggagaagagtcttgatcatgagacaactaagtggtatcagttttccatactggccaggtgcactcaagatgaccatgagatggtggcttctgtagatgttagtatccaagtgaaagatgcaaatgacaacagcccggtctttgaatctagtccatatgaggcattcattgttgaaaacctgccagggggaagtagagtaattcagatcagggcatctgatgctgactcaggaaccaacggccaagttatgtatagcctggatcagtcacaaagtgtggaagtcattgaatcctttgccattaacatggaaacaggctggattacaactttaaaggaacttgaccatgaaaagagagacaattaccagat

SEQ ID NO: 35533 - DNA, 1049 bp, Homo sapiens
cgtatctttgtcacaattgctgacaacgcctctccgaagtttacatcaaaagaatattctgttgaacttagtgaaactgtcagcattgggagtttcgttgggatggttacagcccatagtcaatcatcagtggtgtatgaaataaaagatggaaatacaggtgatgcttttgatattaatccacattctggaactatcatcactcagaaagccctggactttgaaactttgcccatttacacattgataatacaaggaactaacatggctggtttgtccactaatacaacggttctagttcacttgcaggatgagaatgacaacgcgccagtttttatgcaggcagaatatacaggactcattagtgaatcagcctcaattaacagcgtggtcctaacagacaggaatgtcccactggtgattcgagcagctgatgctgataaagactcaaatgctttgcttgtatatcacattgttgaaccatctgtacacacatattttgctattgattctagcactggtgctattcatacagtactaagtctggactatgaagaaacaagtatttttcactttaccgtccaagtgcatgacatgggaaccccacgtttatttgctgagtatgcagcgaatgtaacagtacatgtaattgacattaatgactgcccccctgtgtttgccaagccattatatgaagcatctcttttgttaccaacatacaaaggagtaaaagtcatcacagtaaatgctacagatgctgattcaagtgcattctcacagttgatttactccatcaccgaaggcaacatcggggagaagttttctatggactacaagactggtgctctcactgtccaaaacacaactcagttaagaagccgctacgagctaaccgttagagcttccgatggcagatttgccggccttacctctgtcaaaattaatgtgaaagaaagcaaagaaagtcacctaaagtttacccaggatgtctactctgcggtagtgaaagagaattccaccgaggccgaaacattagctgtcattactgc

SEQ ID NO: 35534 - DNA, 1044 bp, Homo sapiens
gtttgtgacctgctggccccattaggcaatgccggataacgtttgagaatcagggtgcttattgtttatgttgaatgtggtcatgaaatcattgttcttctgtcaggcattccatacacagaatacaaatgtgaaatgtttgaaattggctcagtttaagaccaaaccagtctgtgcttcattcatttctgggttgtaactcctgatttgctgtttttaatcccctctgcccaaatgttgtagattaaggcagttgacaatggtcgccctcaaaagtcatcaaccaccagactccatattgaatggatctccaagcccaaaccgtccctggagcccatttcatttgaagaatcattttttacctttactgtgatggaaagtgaccccgttgctcacatgattggagtaatatctgtggagcctcctggcatacccctttggtttgacatcactggtaagcattccccctcattttcgttgtccgtatgggttacactgaggagaacctgcatacggtttgatgagttttgggcacaagtcaggatttaaaattgggaataagatcgacaggtggagaatttgctttcaactataatattttgattgcaaaatttttcacaatatatagcatatgttaaacttgcttaaaataggtgctctattctaccaagttattgatataaaaataaaattttgtaaaagtttgtcaaagagttacagacaaaagccttgaatgttttggtccagaagcacagcttcttactgtttatttattgatgcataacctatggcacattgttatttttattgatgcataacctatggcacattgttatttttagtgaatatgattggaacatttaaagtaactatgcctgtgtgactgtcacatgtcaatatttaatagggaataagcttacaaattttgattcataccagcttatggtacaaagttatggtaccagctatgggtttttagttttatattacctcattttcaacaggtaggaggattcattagattatttcatcctccagtaaagt

SEQ ID NO: 35535 - DNA, 1062 bp, Homo sapiens
atatatatatatatatatatatatatatatgtaatgaagtatctattaaagcataataccttggctaacaaactgtcaaaattgagtggcttgaaatagctgtcataatttagtttagggttctgctgggcagttcttccgcccttgaaataactcataatttagggttctgccgggtgcttcttccactcttgtgcaggcttggctggtggccagctggtcctcggtggcctcactcacatgtcaggcaatggtggagcagcacgaatgactagaccacgtgtcttctcttccaaccaagtccacacttttctggaacacagagttgctggcaagagccttcctcctgcttcctgttttctgtgtgtagctcctgcactgtgttttctgtcagtgccctacaatctatcctgtcttactgtttctcacatgtaaagtagtctttgccaacttctagccttcatcctggtttcttgcaaacaagactgtcttatctccactttctgagtggacagtacaacacagttgactgaatgcattcatcgctccagctgtgtggaccatgtcacatgactgtcttcacctactagtcctttgatgttcacttttacgtctatctgcttcgcgaagtctactttatctcttgaattttgagaagtttggagatggttttgttactgatttataagaaatgtcaaagagcacaattttatattgaaacatagctgatctgacattctctctgttctaaatgaactcatctctaaatgtctaagtggcgttgaaaggccatgagtggtttttaatgatgttcctcaagtgccataaactttgttactgcattgtgcatacatttctggggtgaactggtaactgctcattggtgagaatatactgtgtctgctgtctcagcccacctacatttatcatagttttattatatagaatgcagtgtttttctggaccaaggaaagaaaaatttctagtttttcttcctttctatttttaattatcagtgcttggcagaagaggaagatgaaacacaaagttacaaaaagaaaa

SEQ ID NO: 35536 - DNA, 1052 bp, Homo sapiens
atgtgtggactctggagccagtcagccaggtttggggttctggcttctctgctaccaaagttggataactgaggatgacttccttaacttttcaggctaagttgttagatgtaaagctctaagatgactaactggtaaggtaatccattaattcattggttactttattacggagtaaataacttcagaccagtgacttttgagccttaagcctctgcttctgaatatggaaaatggggagagaccactgggctaattgtgaagattaaacaatatggcatattaaagcttttactaagtctgcatccagtccgtataaggggagaagagtaatcaacactgaaattgcgtatcttctgaaatttgaaacaaacttccagaagcattgccattggtaggtaaaatatattctctgtatcttaatgcttctgaaggctgtcttgtggatgtagttttatccaattaacaggtgtccagatgataagttttgatacccaagggtgatcctctttaacagtagagcttatccacaaaagccgtcattgacaatatcagtgattctgacagggaagtcagaacttggaatcattcctcaacaaagcgggacaacatggtttagcagagcttaccctgggaatgactctttgcagagctaaagaaatccctgggcttgaaacatgatgcttaaaatctgattatgtacttaattaatactacgttttagtaagtttgcaagtcagaaagcttcctcagctaattttgaagttattgcagcaattttaattaaaagaattgataggtatatgttttaattaaaatgatttaaataggcaatctaaataatgcaaacagtgacagttgtgtttttgcttttccttttgtcattgacttatgatctcattctgggcaatgtgattatagaatttcctagacctaaagctttgtgtaagtagttacctacataaatacttcagtgttagttatcgaagctgccagaatatccattgtcatatatctactcaaatgaaacagaaatacttaaaaatgaaagt

SEQ ID NO: 35537 - DNA, 1077 bp, Homo sapiens
acctggaaaagctaaattcagtttaaattacaacactggtctcatttctattttagaaccagttaaaagacagcaggcagcccattttgaacttgaagtaacaacaagtgacagaaaagcgtccaccaaggtcttggtgaaagtcttaggtgcaaatagcaatccccctgaatttacccagacagcgtacaaagctgcttttgatgagaacgtgcccattggtactactgtcatgagcctgagtgccgtagaccctgatgagggtgagaacgggtacgtgacatacagtatcgcaaatttaaatcatgtgccgtttgcgattgaccatttcactggtgccgtgagtacgtcagaaaacctggactacgaactgatgcctcgggtttatactctgaggattcgtgcatcagactggggcttgccgtaccgccgggaagtcgaagtccttgctacaattactctcaataacttgaatgacaacacacctttgtttgagaaaataaattgtgaagggacaattcccagagatctaggcgtgggagagcaaataaccactgtttctgctattgatgcagatgaacttcagttggtacagtatcagattgaagctggaaatgaactggatttctttagtttaaaccccaactcgggggtattgtcattaaagcgatcgctaatggatggcttaggtgcaaaggtgtctttccacagtctgagaatcacagctacagatggagaaaattttgccacaccattatatatcaacataacagtggctgccagtcacaagctggtaaacttgcagtgtgaagagactggtgttgccaaaatgctggcagagaagctcctgcaggcaaataaattacacaaccagggagaggtggaggatattttcttcgattctcactctgtcaatgctcacataccgcagtttagaagcactcttccgactggtattcaggtaaaggaaaaccagcctgtgggttccagtgtaattttcatgaactccactgaccttgacactggcttcaatggaaaactggtctatgctgtttctggaggaaatgaggatagttg

SEQ ID NO: 35538 - DNA, 1190 bp, Homo sapiens
cgtgaccagcctctttatatgtatttttatttctagtttgtaaatcccttgggattgggatctttgtcttttattccttaacaccatgcaaggttctgtctgataaggtcctccatacctgtaggttgaactttttatttgttttgataaaattacaagattattttataatattcaaatttccctgagtattagaactgttgactaaatggagatacttaaagagatagttttgggagaaaattgttttcttattttgtttaaatgataattgttctcctagaagccaaaaatctgtctaatttctgactttatctggagaggagaaggcatcatagctaaagaacaagttagggtggccaacttgaacgtggttcaatatcaattaagctttaattgctttaagcacatcaggtctttttttccccctaaggcaatgacttatggggcagagttggcagtagctaagttaagatactataaattaatgttgtcgtaccaatttcaactgggctgtcaaacccaccctccagtttgctcttcatttacctctggtagcattcacattttgtgaatattaatttgagagtcactttgcaagatgacagtgctgtcctttgtgaagctgtgttgatttacaagatgaatttgttggcaaaggggaacagttgatctgaaaataactgtcctgcttccctggccagacctcagcccagtggacttcgcccaccttcccatttgtcattgttaaaggcaacgttttcttcatttcttcagtttctctcttttctccgccagtcacccagggactgtcctgcagagtctgccaccatgtattaatagactgatttgacccttgacgtgtgttagcttagaagatttagcttttgtgtgtgtgtgtcatcttctcatggaggggcccagggtgacaggttgttcgatgccctgaagataggagacattctgtgaacaactggttgttgacagcagtggtgataaaacattgatatagttggtaaagtttgcttcactgacttagagaggaaaaatgctgtttgacatcaggctgctgaattctggtttttcttttgtaaattgcctttctttggggcttatgttgctgataagtattatacttgatataattattttaatacttttaagtagttacatagagcgaaatgagacaa

SEQ ID NO: 35539 - DNA, 1080 bp, Homo sapiens
ttgagctgtaacagtcaccgcaaaggtctgcagcttcactcctgaagtcagccagaccatgaacccaccagcaggaagaaactctggacccatctgaacatctgaaggaacaaactccggacacaccatcttcaggaactgtaacactcaccgcgagggtccaccgccagggtccacgggtccgcagcttcattcttgaagtcagcgagaccaagaacccaccaattccgggcacagtgcaacttccgcctcctgggttcaagcgattctcctgcctcagcctcccaagttgctgggattacaggcatgcaccaccacgcctagctaattttgttgtatttttagtagagacggggtttcaccatgttggccagggtgttcccaaactcctgacctcaggtgatccacccgcctcagcctcccaaagtgctgggattacaggcatgagccatggcacctggctgcagatttctttgtctcttggcagcgcattgttttttttctgtcttttcacatgccttgtaattttttgttggaaagtcagacatcttgttcaggacagtagagacaaagctagatagtttttgtgtgtggaagtgggtgatctgcgaggcctttagtgtgggcatttgtgttcatctagtgaggagttgggaagggtttgagatttgtagttcctataattatcctccatgatccacagtcttcagattcctctagcaatcctgtgtatttgatgtggggacagttccccaaagtgtttctcaaagtctgctccactctcagctttgggccttccctctgtgctgtgcggtggagagcgccggtctcttatagctcgctcctcagtgcccgcggcaccttgctcccagcagtgttgcaccttgctccccgcagtgctccgtggcaccttgctgctcacgctggaagcttgttagtgcagggaaccgtgctggacacatcctctgctgttctgacccagcctcggtctccacctccgtccttggttcacagaggcgtgaccttcatgagtgtttctcctcctcagctctagttgatcccggagcaatgcattttcta

SEQ ID NO: 35540 - DNA, 1080 bp, Homo sapiens; identical to SEQ ID NO: 35539

SEQ ID NO: 35541 - DNA, 1060 bp, Homo sapiens
gctcacgctgggagctgtagactggagctgttcctattcccttaccagcttccattccagcccacaaggacaaaggcatcacatacatatccactgtggctaacctgtcctcagcagggagtttccccagtactactctcccctctgttctgagcctacttgctcctttgtaatgtttctgctttctgtcccactccctaatagatgatttgtcctctctgcccagccccctagttctgatatttggattgtctgtgatctgggtagtacttagaaggtagaaccaaagccttgttgattggattgggagtttctaacttctattaaaggcactgattaagcatctattatataaagtaaagtaagattatgatccagtaagacagattccacaagtagcgcaggaagaattggtttctagtacacttcatgcttcaggacaggaaatccagaaaaaaattctgtggtacattaagtgtgaactgtaagtttcatttccatgtgaaaaactgtagttagctaaaaagtacatccatgaagaatcctgattaaacttgtttaatcctggttaaactagctaaacaataatttcacaactcaagaactctgtaaaagcatttcctctgaatattttattcagaaaaaaacacagaaagataaggcagaaacaaaaatcccagtcacttgcagtatctgtcggctttcaatttggctctcctgtttaaacaaagaaaaataaaattaatctatgtaaaacatgccatatatattcaactgctactaaatataaaaagctttaaaactgtgtgttcaattttggttattaccacaacacttttattaaaatatgtatacttttaaatttggtttctataaaaaatggattctaatcttataaaagttatttcctaatattcaataaatgttgcctaagggctttttcaatccaaatagcaattttaattattccggaatttaaggctgctctaaatttccatttaacagggtgagaatgctgtattattacaagtgataaaagttacaggacatagagcttatt

SEQ ID NO: 35542 - DNA, 1060 bp, Homo sapiens; identical to SEQ ID NO: 35541

SEQ ID NO: 35543 - DNA, 1030 bp, Homo sapiens
aattaaaatgcttagtgaatgggattaatgcagattggacacaacaaagaaaggatacatgaatttgaagacttgccaaagaaagtcatccaaatggaagcacagagagaaaggagaatgaggaaacaatgaacaaaacctcagtaactggtgtcattatcaagcagtcgaaatgtgtatagttgcattcacagaaggggaggaaagtgagaaaagggcaggacaaataaagaagtattgttagatttttttcaatttgtttaaaaccggaaacacctgaatccaggaagctcgtcatcacctgacagaggaaggaggcaaactgcatgcatcagggaacagtaagaatgaccgatgacttcctcagaagcactgggcttcagaagacaatggaaaaacatcttttaagtgttgaaagaaaaaaattctatatccagcaaaaataaatgtctacatccagcaaaaatatctttcaaacatgaaggcaaaataatgacacttttaggttaataaaagagtagaccagcagaggtgaataaaagaaatgccaaagggtggtctttaggttgaagggaaatgatactagataggtgaagggtacaagaaaggctaaatacgtgagtaaatatgaatgtctttaaaagattattaactacttagatcagtgtatcatggggtttttaatcaatgtaaaagtaaaatatatgacaacaaaagcacaaaatgttggggaaagtaaatgaaattatactactgaaaggttattacattgtttcgaattttaaaatattaattgaagttaggctgtagtgagttaaagatgcatattgtaatcttgagagcaaaaataacacaaagagatacaactaaatattcaagagataaaatggaatccaaaaaatagaggatgaaaggaagaacaaaagaacaaagaatagattgaacaaatagaaattatataacaagatgatagatttgattcaaccatatcaataattattttaaatgtaaaccaaacactccatgtaaa

SEQ ID NO: 35544 - DNA, 1034 bp, Homo sapiens
tatgttgttgaagcggcactgttttctggggtaaatacccggggttcatcatctcacaccaagaagattaaggacatggacgcacatgaggagtgagtttaggagtggaggtttaataggcaaaagaaagagaaaggagaagaactcttactctcaagacagagaggggtgcccaaaagggaaatctggcctgcggcagagagcaccagattttataggcaggcttgaggaggtggtattccatttacatggggcccacagattggttggaccaggtgtgacatttacatagtgtgcgggtcggggaagctggccaccccaccctaatcttatgcaaatgttctttccacttggccagcgccatcttgcctgctccttactatacatgtggctggcaaaagaagggaagacggagctgccattttgaacatgcctagtcccaggtagccttttcttattggcgcaactgccagcattcacctgtatgagcttccagcttgcttgtctatgtctgcagctcgattttaaaggctgctctttgttagaaaagaaaatgatttgggggctgattttcattaaaaggaaacgttactacagactttctttccctcactatctgcctaatttcttcttaactcctatatcattgtttctgcttattgttggtttttattattattattattattattattattattattattataggctgcctctgtgccaaggcccagcctgaggtgtaaccgtaaggtcatttcagttccttctgagcctggtcctttctttgagcatacatggtcattttctaattttccttgtatacatttttttaaaatgtcctagtgtttaatgtctggctcacaaaaggggaaaagacaaaaaaatgaaaggggtggcaaaagggcatcacctctttaaatcccctggaagtcacttcagtggcagtggtaggtggcggccgaacagtgagaaaggtgcaacaatattgaacttgcacctctttgtctgcacctctgtggtcaccagccaca

SEQ ID NO: 35545 - DNA, 1049 bp, Homo sapiens
gccgacatggtgggttggatgggcatgactgcagtggcaaagcctggtcggcctttcagacggctctgatcccattcccgaacctgggctgcacttctggagcggaagccagcctgacgtgctttctgtccctttccagagtcacaaatgagagggtccacagcggtgtcctcctctgaccacgccgcccccttcaagcgaccacactccaccatctcagacagcagcacctcctcttctagcagccagtcctcctccatcctggggtcgctgggcctgcttgtgtcctccagcccagcccacccgggcctatggagccctgcccacagcccctggtcatctgatatcagagcctgcgtcgaggaagatgagccagagccagaactagagacgggcacccaggctgcagtgtgtgagggggctcctgctgtgctgctgagccgcacacgccaggcctgatgactgtcagggtggcagtgcccatcatgtggctagaacaatacagagggagcagcacgccaggcctgatgactctgggggtggcggtgcccatcgcgtggctggaacgatccagagggaatagcacagcaggtgtccaggtatttcccaggattttagacattccctaacattttcaaacaaatttataattttgtcttatttaaaaaacaaaccttccacttccacccaagacaacagcataggaaacagacctaaaacaagacaaaaaaagactaaacatgaaacaaaagatgtcaagacacaagacatttggcaacaaaggaccgcgatccctgagagacaggaaaacgggaggtgagcccggtgatggcctcagacctccctccgccttgagagtttgcaggcctcagtgcagggaggggcccaggaagagcccagcagcctccgtgagttgaagagaccaagtcagcaggagttggcaggtcagagtgccagagagagatgcctgcatggggaaagactcaccagatcagcccctccagcacctagtgggttgctacccattcgcacactcaaacagggaggct

SEQ ID NO: 35546 - DNA, 1047 bp, Homo sapiens
gagatcacctaaagaggaggaatcagaatttaggttggggaagaaaagggcaagggtttcatttgtccctgtgcttctgtcttctgggactctctgaggggtaagacagtggtgggcacacacagccaaaggaagctggggtacaggggagtgcgactctgagtgtggagtttattacttggcaggaagcacttctagtctttaacacatgcccgtaaatgccattgggaagatttgttaataaaattatctggaaagatttgttgagtaccttttctgtgccagataggttaggttataagcatattacaggtagcctttcactcactgctccagtcagcccttcctggagttccctgtgtctccaccacgcagatgaggagactgaggctaaggatggaatcactgggcgagtcggggaggggttgtgatctggaatctgtcgggtctcgctgctcctctgctgaggtcagccctcactgggagtcactgtgtgagtagttggctttctctgaatccccccagcgggtggatttgggcctggaagacaaagttggcgctcctgtttgtggcttgtaaggagtggttggtgtttccagggaggaatcaatgctgctctggggaacatggaggaggacaactggaggtggcatttctacgacaccgtgaagggctccgactggctgggggaccaggatgccatccactacatgacggagcaggcccccgccgccgtggtcgaggtgatgggcgggaggctctgggtgttctcgtggtctgtttctagtacaaaagaatcctggaaaaaaatgtaagcaattgaggcggatgtggcagccaaaagaatggtgatgagcaaagttcacaagaagagtctttttccgttatgaactatgcattatatgtaacaagaaaacttctctttgatgaagtgttgacattttcataaaataggttactttgggtttgcagatttgtgttaaacttgtttagtgtagattagctgcgaatatcttgactcctttaaggtgttaaggtttttgtttg

SEQ ID NO: 35547 - DNA, 1024 bp, Homo sapiens
ttctggcaaaatctctcttgttttagtgggtactgtattgatactgattcctcgggtgggtaagtccttcttctccacatgatgaaaataagtaactttaattttatacactgtcagttactttaaccattttaaaagttaaaaagtgtcagtacagccaaacaaaaaatcagcaaaactacaggttgggaagaaatattttccaaaccatatgtgtaataatatcttactatctaaaatagcaaaaaaaaaaccctactaaaaacaacctactaaaccctactaaaaaacaaccctactaaaaatgggcaaaggacttgaatagatatttttctagagaagacatacaaatggccaattgatgtatgaaaaaatgctcaacgtcactaagcaccagagaaatgcaaattaaaaccccaatgagatatcatctcatctcgctccagttagaatgactgttaccaagaggacaaaagagcaagtgttggtgaggatgtggagaaaagggaaccctgtgtgctgttggtgggaatgtaaattagtacaactattacggaaaactctggaggttcctcaaaattcataggactactatgtgctccagcaaccccatttctgggtgtatatccaaagggcatgaaatcagaagctcaaagagacacctggaccctatgttcattgcagcattattcacaatacccgagatatggaaacaacctaaatatgtgttggtgtttaatgacaatgtggtgtgtatacacaactgaatattattcggctatgaaaatgaaggaaatcctgtcatgtgtgacaacgtggatgaacccaaagtcattatgttaagtgaaacgagccaggcacagaaagacagatactgcatgtcactcatgtggaatctaaaacagtcacaactcacagaaacagagtaggacagtggttgccaggggctgggggaatgcagactgtggcgatgctgattaaaggtgtaacttcccgttacaaggtgaagttctgaaggtctaat

SEQ ID NO: 35548 - DNA, 1031 bp, Homo sapiens
cagctactcgggaggctgaggcaggagaatggcgtgaacctgggaggcggagcttgcagtgagctgagatcacaccactgcactccagcctgggcgacagagcaacactctgtctcaaaaaaaaaaaaaaaaaaaaaaaaaacagagaagtcaaatggttttttggaatatggtggccctccgtacccattggttccacatgtgtggtttcagccaactatgtattgaaaataaaattgcatccttacaaatatgcagactttttttccttgtcattgttcccttaacaatacagtgtaacagctatttacgtagcatttacattgtattaggtactatgagtcatcctggagttgctgtaaaacttaaacgtaaaacttgaaatgaggatgatttaaagtatagaggaggatgtgcataggttatatgcaaatactctcccattttatattagggacttgagcatccacggattttggtatccgtgggggtcctggacccaacctgccacggatacgcagggacgactgtatttggcatagaggcctttctaatgcacttaccaaggacacctgcagcaggctgtgatccctgagacgagcgtgagtttagtgagggcagagtttttgttctggttctcagctgtgtcccagcacctgggattgtccctggcacacagtagctgcttagaaaagatttgatgagagggtgaccatacatgaggggaaattttcctcagtatcaaaacatgttgaaactcacacacttccaagatgacgtattctcaggtctcctgccgttgccgttctctgccgtatgtgatggtgttctgtcttaccagaggctgtggccctgagaaagatcacgtctacctgcagctgcaccacctacctccagagcagctggccacgcgcctgcctggcatttcagagacagccatgatcttcgctggcgtggacgtcacgaaggagccgatccctgtcctccccaccgtgcattataacatgggcggcattcccaccaactacaag

SEQ ID NO: 35549 - DNA, 1747 bp, Homo sapiens
agtggcctgaccctccagatctttcttttccagaggacagtgggcgaaaagtagttgctccagtgactgtccgagcagcaccttgagcgacccctctcagttctattcaggcaggaattcagcaagctagatgagagggtgatttagaggcttggcagttccctgttagaatacaccctgcagatcaacagggaaatattacagctacatttgagccttttccctttaaattacttaaggagtttaaacacgctatcaatcagtatggaccaggttctccttttgtaacaggactgttaaagaatgttgttgtttccagtcggatgattcctactgacttggacgctcttacttgagcttgtctaactcctgctcagttcttacaatttaaaacttggtgggcagttgtagcttccattcagcctacttgcagcgcccaggcccaacctcaaattaatataactgcagaccagcttttgggggtcggcagctgggctggtttagatgcacaagtggtcgtgcaggatgatgccgtagaacagcttagaggagtgtgcattagagcttgggaaaaaatcacttcaggtagagaacaatacccttcctttagtgcagtaaaacagggaccaaaagaaccgtacgctgattttatagctcggttacaggagtctcttaaaaaggtgatcgcagattcggctgctcaggatatagtgctgcagttatcagctttcgacaatgctaatcccgattgccaggctgctctgtgacctatcagagggaaagcacacttagttgattatatcaaggcctgtgatggtatcagaggtactctgcataaagcgactttgttggcacaagctatggcaggactgaaagtgagtaaaggaaatactccgtttcctggaggttgttttaactgtgggaagcatggtcatactaaaaaagaatgtagaaaaaaatcagtgagtgagggtgccagatgggggaagaaagaaaactgctaagcctgaaatatgtccaaaatgtaaaaaaggaaaactttgggctaatcagtgtcactctaagtttgataaagatgggaaccccattttgggaaatgccatgaggggcccgtcctgggtcccgttccaaaccggggcatttccggctcaggccactccctcacccctgtacaatgtctgttccccgccacagccggtagtgccacagtagatttatgctgcacagtagctgtgagtcttctgcttggggaacccccaccaaaggtcccagcaggagtctgtggacccttgcaagcagggacgataggattactcctaggcaggtctagtttaagtttaaaagggtacaaatacatagaggagtcattgattcagattacaatgaggaaattcaaattgttacatctacttctgttccctggaaagcagagccaggagagtgcatagcacagctcctgattgtgccatatgtggaaatggggaaaagtgaaattaaatgaacaaaaggatatggaagcacagataaacaaggcaaagcagcctattgggtgaatcaaattactgataaacgtcctacctgtgaaataactattcagggaaagaaatttaaaggtttggtagatgcaggagcggacatttcaatcatttctctacagcactggccgtctgtgtggccaattcaacctgctcaatttaacatagttggagttggtaaagcccctgaagtatatcaaagtagttatatt

SEQ ID NO: 35550 - DNA, 1043 bp, Homo sapiens
gcaagaaggttgtgggaaaatcagcaagctctatggagacctaaagcacctgaagacgttcgaccggggtgagcagacagtgggctctgtgcacactgttgggcccttccttctgcagggtgggctggtgtctgtcccgtcagtgctgacttagttccgtgcttgctgtctggatgggtcctggcccacagctataaagccacaaccagtgactccatggactagcaggcccaggctgacagctcggagggcccatgtgactgggtcccgcctgcccctgatggaactttttgtgtccccaggaatggtctggaacacggacctggtggagaccctggagctgcagaacctgatgctgtgtgcgctgcagaccatctacggagcagaggcacggaaggagtcacggggcgcgcatgccagggaagactacaaggtgggccttctcaccacgcccacctgcacctgccttttcctgccacctggtgggactcagccccacccctgcattttctctgcattttctttcgttgccccaaaagtaaatccaaaaaatgcctttttcccccctggtaactttgatccctgggttctcgccatcttctggatcactgtgaccttttccttgctttgggtcggcatccactgatgccagcagtggcatctccaagccaatgtgctttgctgttagaaggccaaggttagaagtgcagctagagtggcaagaccaggaaataaatgccagtttattaaataacgagtaagccatcatttcaagcctgccctgtggaggaaatgccagtttattaaataacgagtaagccaccgtttcaaacctgccctgtggaggaaatgccagtttattaaataacgagtaagccaccgtttcaaacctgccctgtggaggaaatgccagtttattaaataacgagtaagccaccgtttcaagcctgccctgtggaggaaatgccagtttattaaataacgagtaagccaccgtttcagacctgccctgtggtggaaatgccagtttattaaataacgag

SEQ ID NO: 35551 - DNA, 2160 bp, Homo sapiens
gtgcatatttaatacacagcttgagtattccttctctgaaatccttgggaccagaagcgttgtggatttcaggcttgttcagactttggaatatttgcattatacttactgtctgagcatccctaatcggaagatctgactccatagcacatttcttttgaatgtcatgctggtgctcagaaagtttcagattttagagaatttcagatttttggattagggatgttcaacctatataaatatttactttgaagtagaaaaactggaagtagatggtttaaacataaagtgtcttggtatagacaagggttctcccactttacatgatgggagcatttttgtaaagcactgagaatcttaaagttcacatgccataaatctacttttatagttaaaatttttcaaaaggaacacaagagatggctttttgtacatttttgtgcttaacttaccactgactcttcttttcaaggtcactctggaatatagacccgtgatcgacaaaactttgaacgaggctgactgtgccaccgtcccgccagccattcgctcctactgatgagacaagatgtggtgatgacagaatcagcttttgtaattatgtataatagctcatgcatgtgtccatgtcataactgtcttcatacgcttctgcactctggggaagaaggagtacattgaagggagattggcacctagtggctgggagcttgccaggaacccagtggccagggagcgtggcacttacctttgtcccttgcttcattcttgtgagatgataaaactgggcacagctcttaaataaaatataaatgaacaaactttcttttatttccaaatccatttgaaatattttactgttgtgactttagtcatatttgttgacctaaaaatcaaatgtaatctttgtattgtgttacatcaaaatccagatattttgtatagtttcttttttctttttcttttcttttttttttttgagacaggatcggtgcagtagtacaatcacagctcactgcagcctcaaactcctgggcagctcaggtgatcttcctgactcagccttctgagtagttggggctacaggtgtgcaccaccatgcccagctcatttattttgtaattgtagggacagggtctcactgtgttgcctaggctggtctcaagtgatcctccctccttggcctcccaaggtgctggaattataggtgtgaacaaaccaccatgcctggccttgtagtttatttctaagttcaaattaatgttggtgcctgagaacgaatggagaaaactaacatttcctcctttttcttggcagacggtttactaggtgagtgtgtccttgattattcaaatcaggggtccccaatccccaggccacagattgttaccagtccatggcctgttaggaaccaggccgcacagtaggaggtgagcagtgggccggtgagctactgtgtgagctccaccccctgccagagcattactgtgaactccgccacctgtcagagcattactgtgtgagctccgccccctgccagagcattactctgtgaacaccacctgtcagagcattaccgtgtgagctccgcctgctgccagagcattactctgtgagctccgcctcctgtcagagcgttaccgtgagctccgccccctgttggagcattactgtgtgagctccgcgccctgccagagcattactgtgtgagctccgcccctgccagagcattaccttgtgagctccaccccctgccagagcattactgggtgagctccaccccctgccagagcattactgggtgagctccaccccctgccagagcattactgtgagctccgcctcccgacagcattaccgtgtgagctccgcgccctgccagagcattactgtgtgagctccgcccctgccagagcattaccttgtgagctccaccccctgccagagcattactgggtgagctccaccccctgccagagcattactgtgtgagctccgcctcctgccatagcattactgtgagctccgcctcccgacagcattaccgtgtgagctccgcccccgttagagcattactgtgtgagctccaccccctgccagagcattactgggtgagctccgcccctgccagagcattaccttgtgagctccaccccctgc

SEQ ID NO: 35552 - DNA, 1049 bp, Homo sapiens
tgtgcaggtttgacatcatgctttgtttatgaagctgtgggatacaaggactctcatacgtcactgtggaatgcagaacattgcaacctcatggaagaggatttggcagcatctaacaaaagtatgtggcatttgccctttgactcagcaattctagactgcctcaaaaaaaactctggcaaaaaaatgaaaggactttactcacagagttcttttcacgcctaaatatgtttgcaaccaagttcttcactgtggcatttgtaaaactggaaacaatcaaaatgtccatcagtaggggattaggaacattaattcgtacagtggggaactcagtaccagaaggagggatgaggaagacctattgataaggggcagagtacatatcatataatgcaaatatatatttgctttttcttaaaacagtacaaagataaaaaactaaagtggttgctgtggaggacaggggtcaatggtggaagtgagactgaaatagactctgaagtaatatctggactttgaaattataagtgttttacatattaccaaactaagttttaagatagtccctaaaattgaaagaatagtatctgaaatgaatgaatctaaattccttggattgtcttctgcaggtgccaaccctgagaccaaaatttggaaggtggccctgagcagcagctgaagggaagcgggaggtaagacaggaaagaggtgagggcacagggtgtctgggagccggatcccacgtgggcagctgggcccgtgctcattgtgggagctggtgcattccttcaccagcccacgctccacagggtcaggatggtcaattccgggcaccccggcctaatccaggacatgctcctgccaccagagaaagcccctaggcagcatcccgggtgctggtggtgtcagaatcaagtttgagtctgaggagtgacctggggctggctgggctaggcagcatcacagggttctgcagcccaactgcacatcaggctggtgacagtcacacagcctattacttcgtgtgtcatcagagcatcgccagaacg

SEQ ID NO: 35553 - DNA, 1040 bp, Homo sapiens
gacttctctgaatagaccttcgagggcactggggggtgattgttggagggcttggggagctcaggcagcccttgtatgggaatgtggctgttacaggaactgcagaaactgggactgggttcctggggaaaggattgggggtgttggaggcgctggccaggggattatggggaggtgttcttatcagtgtgcgaatactgggcgttcaggcagcgggaaatccgggtccttgcgtgttgtgagctccctggaattacgttcttgccagtttcagctcagttgatccccctcccctccgctatcattggacacattttacttcattgaaacctgactgccactttttctgtaatccctcaggggcagtcatcttttctgattctgtgtatagtttgcttttccagatccgtgccatttaagctagaaaaggggtcagttttgagatgttgtgaaaatgttgaaaggcttcttgttattagtgggaagtatctgaagttgccagagactgaactggggcgcggggagcactacggctgctagacactgcctcactgcgctgtgggtgggggggtgctggattcagccttactgcctaatgatttgtgaggatttgtgttttcagagtaacatttttaccttatattacgacatcagttcctaatatgtggcgtgtgggccacagatgctggtgtattatttcacatgcatttctatagattgttttcagggaattcagaaatgctgttatctctacactagtgattgtgctttcttggtttttctcttttcattattcttaaatcctcgttttttttttttttatttgcatctcagttcgtttttactcgggaagtgcaagacgtggctactagaaagagatgtcaagagaacccggaatccagtaggctacaatttggcaaatctcagcttaaaacttcctaaatgttgaccacagtggatgcaaatggctctgtgcatcacctgttaaatatggtcagatgaccatccaggttcaagtggtttgtcaccagggtgataca

SEQ ID NO: 35554 - DNA, 1076 bp, Homo sapiens
tcttgatttcagctgctactaaatatctaccaggagactgcttgagagaattgcctgatgggtgctgagtccaccattcctgagatactttgaaatcagtggcttaacccaagctgtgtatcgggaccctctcaccgtggtcccaatggagtcacttttcttaggcgcccccctttaccttgggctctgagcttcctctgcctttcatctctgtgggatgaagccccaccgcccttcaggatgcaaagccctcttctctaatgtgagtgcagggccaggtgcagtggctcacgcctgacctcccaacactttgggaggccgaggcagggggatcccttgagcccaggagtttgagaccagcctgggcgacactgtgagaccctgttgcctgaattgccctgggagatttcctcagcttgtgctgggggcatgtggccccatgaagcccgtagtcactgttcaccctgagagacgctggctttcgggctcacacacctgctgcggggcagccccaggaaatggccaccccatttctcctggagctgcgcgtgttctcagaaactgtggtggccgttctgttttgtttgcatcttataaacgtttacctgatgacattttcctcttcaatttagctgctagaaaatttaaagtcaggttggtggctcaccagtaatgagagtttagagtagaagtaaactttatgacatagtcttagactcttcactttcttctcaaccaatatgattcacatttactttattttgctgtaccgtgagtgtctctgtgtttcctgaattccttctggaataaggcaggttgttagtaagcacaggtttctggtccatctcacagcctcaggcagtgggcattgctgtcggtgctccctttccgggttacctgtggtagctctcaagttgcagggctgcgatttgaagcctgatttagtacaccgtgtttctgttgtgttctgtggtggtttgctcctcacatgtgagcattcaccgtggccctgtgtttttccaccacacctctgcctggtggcatcctactggatgtctcagccgagccactctgtt

SEQ ID NO: 35555 - DNA, 1502 bp, Homo sapiens
gagctgaatttccagtttgagagatgtgcagatggagacccagtgggggagctgatgttccagtttgagggcccagaagctgatgttccagtttgagggcccaggagctgatgttccagtttaaggctgtgcagctggagacccaggggtgagctgatgttctactttgagggctgtgcagcttgagacccggcgggtagctgatgttccagtttgagggccgtgcagctggagacccaggtgggagctgttgttctagttttagggccatgcagctggagacccggggagtggggggagctgatggtgcagtttgagggccatgcagctgaggacccaggggggagctgatgttctcctttgagtgctgtgcagctggagacccggggggagttgatgttccgtttgagggccgtgcagctggagacccaggtgggagctgatgttccggtttgagggtggtgcagctggcgacctgggcgggagctgatgttctagtttgaggactgtgcagctggagacccagcggggagctgatgttgcagtttgagggccatgcagctggagacccatgggggagctgatgttgttttgagagccgtgcagctggagatccgggggtgagctgatgttcccgtttgagggctgtgcagctggaggcctagcgaggagctaatgttcctgtttgaggtccttgcagctggagacctggggaggagctgatgttcttgtttgagggccttccagccggagacccggggatgtgctgatgttcccatttgagagctgtgcagctggagacccgtgggggagctgatgttccctttagaggaccgtgccactggagagcctgcggggatctgatgttccagtttcagggccatgcatcttgagactcggggaggtactgatgttcccgttggagagccgtgcagctggagacctggggaggagctgatgttcccgtttgagggccgtgcaggtggagacctggggaggagctgatgttgttctagtttgtgtgttgtgcagctgcagatccagggatgagatggtcctgcggttcaaatatgagggtcccggagctggagtctatgtgaggagccaatgctgcctctgatgtcttaggttgtggagctggaaactcgcggaggagtcggtattagtgtttctagttgagggttgtggatctggagatacagtggggagcagtgttctagtttgtgggtcgtggagctggagacccagggaggagctggtgtgtttctagttgagggtcatggagctggagacccacggaggagctggtatgttctagttgagggtcgtggagctggagatctggggaagagctggtgctgcggttcaagtctgagggtctcagagctggagcgcccgggaggagtaggtactgccactgatgtcttaggttttggagctggagacctgtggacaagccaggctggtgttctagtttgaggttcctggagctggaatcctgg

SEQ ID NO: 35556 - DNA, 1044 bp, Homo sapiens
cgcaatgttcagaaaagcaagcaaaagttcaaggaacctgcttggttctgagatggcctcatatcagcttcataaacattcattctacaaaatagtaagctaacatttgaacacaatttccaaaaataaagaatattttctcataaataatgaagtctgtttctcaggcacctcagaagtatacaaaagaatttgagtttgaacagatctcttggaatgtgtttaacctggtatttcaacagacttaagatttctagggtttcacaaaggccagattttatttcagttactcagaagagaaagaaaatgtcttctgaaagaggtgaactcaatcactaccaatagaaaaagtatccactgtattcatctcttatggaaacagaaaaatataacatttccccccttaaaataatatatatattatatatatatatatatatacacatatgtatatataacttaaagttccattgtacgtagccggacaataaaatctggaaaccagcatgaaaccctgttattcacatgttaaaatgttgaaactatgaccaaaatgtgaaaactgctagagctatcagaaagagacaagacaaaaaccttctttcatatgtataaactaaatgtgataatctcaaaaaacttttcaaaattatgattaccttccagtttaaaaactttaatcctaaattaaaaaaaaaaaatctatacacaaaccactgatttgcccagaccaaaagaaagaaagaaagaaagatcagcggtaaggtaaacaggacccagaggagctgatattcacagttcttacgtgtacaactcttccaggaattatccataaagtactttattgttttacaacctgcttttcttgtaaaactaaacgtggacttttttacataaaagttttatacggcgttaaaaccagaactgtatgtaaaatactgcatctaaatgtttctaaatagtcttgttccattggttcatcggtgacttctgtggcttcgtcatcattttccatggatgattctgaaagaatctctccagttt

SEQ ID NO: 35557 - DNA, 1080 bp, Homo sapiens
gtgagtgcttcccggaggtgagtagttaattcacaggagtgactaatggcagcgtcccactcactcctccttccggggtcatggtctcaaggggtcactccatgcactggggatgtcagctcattacagaatgatatattcgggaagtgtctcagttctgagtgcctttgagggaatttgcacttccgttcccacacagccttgcattgtgtgtgttagaggctgtgggccttgggcaggaggggtgagtgttggcacatacctcccgtctctcccagccttctctgactctgactttccctcttgaaggctaccggctctctgaccagttccacgacatcctcattcgaaagtttgacaggcagggacgggggcagattgccttcgacgacttcatccagggctgcatcgtcctgcaggtgacggaatggcttcacgtgggtttgtggtggtggtgggaggggcttgcttgccagcgtgatgcacctgaccttcaatctaaggagctgggcatgtgtagaattagtttttggagcttataaaagtgagtctcatctttggagaagtagccggttagtgaagtgtggacaaacatgttttcctccccttggaaatggcacagagcagcccatctgcaagacgtggtttttcagtatccggtgggttatttacatgtatgttctggtgttgtggttttttttgttttttgttttgttttgttttgttttgagaccgagtctcgctctgtcacccagacgggagtgcagtggcacgatcccggctcactcccacctctgcgtcccgggtttaagcaattctcctgcctcagcctccccagtagctgggattacaggtgacacccagctaatttttgtatttttagtagagacgggattttgccatgttggccaggctgatctcaaactcctgacctcaagtaatccgcccaccttagcctcccaaagtgctaggattacagacatgagccaccatgcctggccaactatggtgtatttttacaaaaacttttattctgagaaaatgggcacgttttctgttgtggtcatcactgtgtcctgc

SEQ ID NO: 35558 - DNA, 1046 bp, Homo sapiens
aagatgatatctcattgttgttttattttgcatttctctgatgattagtgatgtggggtattttttcatatacctgttggccatttgtatctcttcttttaaaaactgtctattcatgtcctttgcttactttttaatgggatcacttgggtttttttgttgttgccatcgttcaattgtttgagttcctcgtatattctggttactactcccctgttggatgaatagtttgcaaatattttctcccgtttaacaggttatattgtcactctgtttattatttcttttgctgtgcagaaggtttttagtttaagacccatactatagtctgtggtgtaatttgaaatcatgtagtgatatggttaggttttgtgtccccacccaaatctcatcctgaattataatcctcaggtgtttagggagagacctggtgggaagtgattggattatgggggcagtttcctccatgctgttctcatgacagtgagtgaattctcataagatctgatggtttgataaatggtagtttttcctgcgctgacacacacacctctgtcttttttggtccttatgaattttaggattatttttctttttctcttttcttctcctcctccttcttctctcttttttgcttcgagatgggatcttgctttgtcacccaggctagagtgcattggcgcatagctcactgcaacctcgaattcctgggcccaagagattgtctggcctctgcctcctgagtaactggactatgggtgtgtgccaccatgcctgactaattttaaattaaaatatgtttttgtagagatgaggtctcactgtgttgttcaggctggtctcaaactcctggcctcaagcagtcttcttgctttggcctcccaaagtgctaggattacaagtgtgagctaccatgcccagcctgagattgttttttctaattctgtgaaaaattactttggtattttgatagggattatactgaatctatagattgccttgggcagtgtggtcattttaacaatgtgaattcttctgatctatga

SEQ ID NO: 35559 - DNA, 1041 bp, Homo sapiens
aaactcctgggctcaagtgattctcccaccttggcctcccaaagtgctgggattataggtgtgagccacttcactcagcctttttggaattttctacatgtacaatcatgtctgcgaacagatagagttttcttttatttttatttcccagttttatgacttttatttatttcccagttttgagacttttacttactttactgacttattgccctggctagtacacaaataattttagtgggaatgggggtacaccacagctttgccttgttcatggtcttggggggaagcatttagtctttcaccattagctgtgatgttagctataggcttttgtagatgttctttatcacgttaattaagtttccttctgttcctagtttgatgagaggtttttttggaaaaattgttatgaatggatttggattttgtcaaatgcttttctgaaagattgagatgatgatgtgcattttctttttagtttattattatagtgaattacagtgattggtgtttggatgttgaagctgccctgaattccttggataaatcccacttagctgtgatgtatcatcctttttatatattggtagattctatttgccaatacctatatttaagtgaggatttttgtgtctatgttcatgtgggatgctggtctttagttttcttttcgtgcaatgcctttggtgtggcatcagagtaatgctgaattcgtaaataagtcgacaattttaaattttttctttgatattttttgccaagagagaattggtattatttctttacattggtagatataccagtgaaaccatttagacctgggttttttgatgttgttggaatagatatagagctatccagattatctgttttttcttgagttttgatagattgtgcctttctaggaattcctctatttcatctaaatcgttgaatttttgggatagtatttgtcttactctgcttgggctgccataacaaactaccatagactggatagcttaaacaacagaaatttatttcacactgttctggagg

SEQ ID NO: 35560 - DNA, 1020 bp, Homo sapiens
gcgcggggggagctgtgtgtgtgtgggtgtgtgtgtgtgaggctgtggggggctgtgtgtggggtgtgtgtgtgtgaggctgtgtgtgcgcggggggagctgtgtgtgtgtgggtgtgtgtgtgtgaggctgtggggggctgtgtgtggggtgtgtgtgtgtgaggctgtgtgtgcgcggggggagctgtgtgtgtgtgggtgtgtgtgtgtgaggctgtggggggctgtgtgtggggtgtgtgtgtgaggctgtgtgtgtgcggggggagctgtgtgtgtgtgggtgtgtgtgtgactgtgcgggtgtgcgaggctgtgtgagactgtgtgtgcgggtgtgtgtgggggactgtagggagctgtgtgtgtggggtgtgtgagactgtgcaggtgtgcaggtgtgcgaagctgtgtgagactgcgtgtgcaggtgtgtgtggagggctgtggggagctgtgtgtggggggggtgtgtgtgtgaggttgggggctgtgtggggtgtgtgtgaggctgtgtgtggggagtgtgaggctgtgtgtgtgcgagggggactatgtgtgtcggatgatgtccctggctgtgtgtggggatgtgtgtgtgtgtgtgtgtgtgtgtgtcagatgatgtccctggctgtgtgtggggatgtgtgtgtgtgtgtgtgtgtgtgtgtcggatgatgtccctggctgtgtgtggggatgtgtgtgtgtgtgtgtgtgtgtgtgtgtgtgtgtcggatgatgtccctggctgtgtgtggggatgtgtgtgtggggagaggggtgggtgggtgtgtgtgtcggatgatgtccctggctgtgtgtggggatgtgtgtgtgtgtgtgtgtggggatgtgtgtgtgtgtgtgtcggatgatgtccctggctgtgtgtggggatgtgtgtgtgtgtcggatgatgtccctggctgtgtgtgtgtgtgggtgtgcgtgtgtgggtgtgtgtgtgtgtgtgtcggatgatgtccctggctgtgtgtggggatgtgtgtat

SEQ ID NO: 35561 - DNA, 1028 bp, Homo sapiens
tggtaaacagtaaagagatcccatgtcccgcagggagaccttaccttgtccctcaaggctgcagtttgcggccaaggcctcgcactctctgtgcatcgaacaccagcatgcagtaggctcagtgcccaggctgacgctggcccagcggtgagcacatgcgcaaaaccatgcctggggccaggcacacagccgaggccgggaccaagggctgcagaagaaacagcacagccctgcgctgcttgcgaacaagctctagcgggggacggcagtagatacggatgctgcaattcatatataaagggaggaaacataaatacggtgcatgcacattttctagtttattcgtaaaatgtctcccgacggaatcacagaaaacttaaaatcagctgcctccaggcagggagccagcctgaagacactttcctctgagttttgaaataggtgagcacactagctattcaaaacaccaatacataaaacgcaaaggcccagaaactcctttctcaggtctttgcagtggaataaaaacacaataaaagcaggaaatttcgttctgattcttccccagacggccccaccacagggactgcatttgcagctgtgtgacaaagctatttcctctccttatttaatgtgacaaatacgtctgctacccaaatctctcaagtgcacaggctcaggagcacattccgtcgcccacccccgggggacccagctatggaagtgtctcaacccttcctggccccctacgtgcacccggcttcatccttggcccccagggacggcggcccttcacctgcagacctcagcctcaccctgtataaagctctgtcttcctctgctgctacaagaacccactgcagatgcagcatcagccaggatgcttccacatccccccgcgggacctggggacctgggtgaatgatgaacacgcggaagctcacgtagcttgctgtgccgtgagtagtaagccctttgtctccgcctccggggtctcatgtcttcttccagggtccacgaaacaggaa

SEQ ID NO: 35562 - DNA, 1052 bp, Homo sapiens
gtgttagttgtaaattcatggttacataacataataaatttacctacgaattcattatttataaacaaatggagactctgacagctgagctggcactcctcgttgatgtgaaagttgacaagcgaggcagcatccatacctgtgggtagagggcagaggactcagtgagggctcggtgccctcttccgcagtaggagaggccagtggggctgctcaggaagactccctgggcgtgcaccgcgcactgtatcctgcctgagggtgtgggccagggcgctccctggctgtggccgcgtggggttagtggcctgcagtgttgaccgctcactcatctgtacacctgtgcaccgcacgctgattcactgaatatttggttgttaaacagcaccagcacagtgttttgggttttgttttacaaaatgtttcttgaacccttggcttgtccctgctgtgcttttctttgatacgttgaaatgtaacaagaatgcccaaatagtttgcttataccagatgtttcacatcatgaagagaatatggatttgcaatgtgtgcaagtattctttttttccccaaagagctatttttggttgcatcttccacgataacgtggggttccaaggccagggtgtgtttcctctgcaggacgagcgtgtgactctggtgaccgcagagcccccctgaggcccccgggttctgtgatctcagaaagtggttagaggcgcattctcttgaccagagaaacgcgtgggcactgccagctgcagccaccccagtcttcgctggctcagaggaagtgcatttctttgcggttcattttgcactgtgaggaagtgtgaaatctctgaagctctctggtgctttttgaaaaatcgggaaattcttgccataggaaattcagcaacttgatgcagtatgtgtcttggggtgccccccgttttgtaaatatcgtgtctgtgaaatgagtgtgtttatttatactcctgatgctttttctagcttaggggaatttgggactttgaaggacatttttaaacccctctgccccacaagct

SEQ ID NO: 35563 - DNA, 1043 bp, Homo sapiens
ttgctgggttcttaaggaaagaggccaccgtgaaagacaggagtgagacccaacctgagaagacgagctggagggaacagagatgcacagaatgaagaaaagacagaggcaggaaaggaaagggtggggggaggggaagggagggagggggagggggaggggaagggagggagggggaggggagacaggacagaggctggaaaggacagtgatgcgcagaatgcagacaggacaggacaggaaaggaaaggaaagacagaggccagaaaggacaaagatgcgcgggacgaagaaaagacagaggccggaaaggacagaaacacacggaatgaagaaaagacagaggcccggcatctgtggcacaacgcggggactgcagtcaacggtaacttaatcgtacatttaaaaataacgaagagtgtgattggattgcttgtaacacaaagggtaagtgctgagggatggacaccccatcctccatgtgaccgttatgcatcacacgcctgcatcaaaacatctcagacacgccataaatatatacacctactgtgtacccacaagcattaaaataaaaaaatttcttaaaagaaagacaaaggcagctgtcatcaggatcctcggagaccagtgaaagcaccgcaccgaccaaatgaaaatcagtcgctgcagaaagaaaattcagacatgaaaacggctcaacaattaaaagcatgagagcaaaagccctaacgatcccggagaagcatttgacgttaacgctgaagaggtctttccatgagtaaaggaaaaagaggtggaaataataaagtcaggaaaatgagcagagcctgagagacgccgggggtcagagctccaggaagatcggagggcagggagtcttcaaggggaggttgagctggcttcccagagcccagggcatgagtttccgggttggaagttcctgctgggatctctgtgagattccacaccctcgtggacaaggagaagatcctaaatgctcccagagaggaggggcgggtttcatggaaatgatccagagacag

SEQ ID NO: 35564 - DNA, 1050 bp, Homo sapiens
gacatggctgccaaggggtgtccaggccactgccctgttgggaacgcagtgcagggtggagacacagctctgctgtcccagcagcgaccttgatggctctgagcctcatttcctgtgcccacacaatggccagcagcggtgtttgcctgccaggctgtggccagaccacggggccactgagcaggggagtgctgggaaaagccctggtgcccggcacggcgtctcctaccacagagtgacatcgctctaggcggctgctgttgacaccacgtgaccacaggctttgctgagtgtgccctggtatctgtggttggggcactgtcatctcctgatgcgccctgtgagaggggacctgaagtgacgcctggtgggtccctcgttcccacagatggcatcagcgtctgggtggccacccggcatcctcttcatctccatcttctgtgctcagatcccatggagctgccgtgggatgcttcctttacacgtgtggagagtagtggagtgggtccgttgggtccgtaggcgtttgctggggtttggtgcatccttcactgtggggtgccgtgaacgggggagcactcacagtacaggacatgggcggacatgacggtgtggctcgatgactttgtcaacttaaacagagcagcttcggcttggtctttttgtgcagggcccatgtctagagaaggtggcttggtccatatgtgcaggtcccgagtctagagaaggcggcttggtctttatgtgcagggcccgagtctagagaaggccgcttggtctgtatgtgcagggcccgagtctagagaaggcggcttggtctttatgtgcagggcccatgtctagagaaggtggcttggtctgtatgtgcagggcccgagtctagagaaggccgcttggtccgtatgtgcagggcccgagtttagagaaggcggggtctgtatgtgcagggcctgagtctggagaaggccgcttggtgtgtatgtgcagggcccatgtctagagaaggtggcttggtctgtatgtgcagggcccgagtctagagaaggcggc

SEQ ID NO: 35565 - DNA, 1094 bp, Homo sapiens
ttgcagattatataatcaaatttttacctgagtgcgcattgctgttgtaattagaaaagcagtgtgacgtagcaaagatgcacggaagtgcctccctcccacacgcactcagtgctcgtgggacgttgaggtgaggaagtgcctccctcccacgctgcacgcagctctcgtggggcgttgaggtgaggaagtgcctccctcccacactgcacgcagctctcgtggggcgttgaggtgaggaagtgcctccctcccacatgcactcggctctcgtgggacgttgaggtgatgatttctatgatctgtttctgcttttcagcaacatctgaatgaattgatgacgaagaagtggctattagggtcaaacgctgtagacattatctgtgtcaccgtggaagactatttcaacgattttgccaaaattaaaaagccgtataagaaggtaagaaggtgggacctagttccctcatcaccttgacgctagggctcacctctcaccctgctcagaattcagcatccagcgagtccctccgtgagtgaacgttcacttgttgtcctatcagcccaagggaggcaataggctctgcggacgccacctccctgggacggggctctggtgagaatggccggggccctgtggcatggccctcgaggtggagggagccatggttcccggagaggcccgcgtgccccgtcttagctccttgccttccactcactccctgaggccccagggatttctttccgcttcagaccctccttcctgcaggacccaggttcctctttcctccaaagtgcctgccgcgttttccagatgctgcggtcgttatcaaaggacagcagcagccactgacacgggcctgtctgtggaccgagtgctcatgcgcggcactgcctcgcccgcgtctgtcctgctgggggccggagctggcctggtgcgggggtccaggtcaccgtcactgttcccccactgagcccccgctcctcctctgcggtgagatgccagagccgtggcggagcgaggaggagtgggctcagagcctccggggagccaccgggagccccagcctgggtttcaatgagggtgctcctgg

SEQ ID NO: 35566 - DNA, 1960 bp, Homo sapiens
caggagaccccacccccccaggtcccagtgcccctggtccaatgaccgagctccctcctggggcggcaggagccacccctcccttagccacgacgcctgtgccccgtccccacctgcaggggagtcggacgctgtgtccttggtgacactagccaggaactcgatccccccactcatctcctcatcatagttggggggctcctcggtgtctgaaagttccaagtctggggaagacaggttggggtgaggactggggtcactggggggctgtcctcacagcccagtcagcagtgtccatcagctctgtgcacagaggtgcaggcagtcgggacccacagagaggagggctaaaccgcagggctggaggagggaccccacttagagggcagtgtccctggaaccccatcctgggtgggtctgcagctggggccctgaccatgcctcccctgcctgggtggctggagggtccccagaggggaaggtcctgagaggggaggttcccgagccgggagggctggggctgggaggtggtggctcccagtcccagcgttcctgcagggcccccagcgcacctttctccttgatggtgaaattctgcgcagggctctccatgggcagcttcccattggggatgctgctgtttctctgcggagcaaacgtgaagctgctcacaccccgacacagccacacccagccctgactgcccccgctccaggccccagccccgccaagcctcctggtgacccagccttacccgcttctgggcacgctcccgcttgtacagcttggccgccttcttgttctggttgagccccagcttggtcgacttgaaggactccaggcgcttccgcatggtcctgtggaagatttcccggtcctgtttctcgtcctccgtgggcgtgagctcgtgtcggctgtacagatgcttgtactgcgggatcaggcacggaggtcacagctgtgcccaccgccggacattctcgccctcctgccgcaggagctgagcacggatcccccgtggtcccaggaggggacgaggaagccgccccacggggtccctgcggggtcctccagcccccagcccgcagtgcccacctcctgccgcggcttgtacaggtactgctgtagcgtgtggtgcgtgaccatgtcctccgcgtcccggatgctccgccgtcgctgctccagagactgcatgtccaggcagacagcgctgacattttctctcctgcgtggggaccagcgctgagccatacaggctccctcagggtggggtctcttgcgcgcccctcgccttcccacggcgggcatctggccctggctgcctcctgcgtgcccctcgccttcccatggtgggcacccggctggggcacggggacatctgccatctggccagccccttctcccctcggggcttaggctgactccccacgaggccttcctggcctcctgtctgaagtgggtccctttccttactggtccctctccaaagccctggctgtaagactcggggaccccagcatctgcacatctggcagagtggacctcctatgagaactggctgtgagctgtggagcccagggccggaggagcagtaagggtggcatggggaccaggacaggctgctgcgggccaggggcaaacacgtcaggcctggcccccagtccgctgctgcccctccctttcaccttccatccagcactaagggagtctggccacggcctaatataggagggcttgtggaaggagacacccaccccctctttctgcacctctcccctcttccatgccacccccaggccaggagccaccacagccctgtctgtgactctcagctcccgaggctgggctcttccccagggaagctgcatgaccatggccacatacaggaggtaggagacagaggcctccacggtggacgatcgtggcgtgaagtccacgttgaccacgttgtcggtgctgg

SEQ ID NO: 35567 - DNA, 2682 bp, Homo sapiens
atactgcagaatcattgaagtggtctctgtccctgcaggagaccctaaaactccattggcctcatgtccagaactgaatcaggtagagaacggagcagagcccgatggggcacagaagccacacagctgagtgccagaggatggaagtggggccgcctatgtgtcctcagaccccacccgcctgatggcagggcctggagagcatgaggttgtgcaggagcacagggcagagtgggcttatggctggagtcagggtccccagggccggcaggggcacgggtgtggagggaacgtcagctcactgcactcagacctcgccaggtgggcacccgtgccgccttcagtgtgcaggatgctcccagggaagcccccggggtcaggtgggtgccgctgttcccactgaagatgcggcccccagttcactgcccactcgggggggatttgagggtcattggttctgagggccctccgcctgctcttttgcttctaaatccagcatcttctgtatgacctttgtcccgctcctgccaccccacgaagacagacgtgagggtcaggggagccacggtgctaactgccactctgggcgggcacaggcgagggctgtgcagcacccgggcacgtggggtcttcggaggggctgctccccacaccacttcccctgcccctgccgagccctgccgtggggtgggggggcgcagggagagaaagcagccgccctgggtgagagccaggagggacactgggcaggcagatgccaccccaggtgtggggacccccgctactgagtggccgggaggagcccacaggctccccacatgcagctgagcccagggttgtggtcgtgggtcgtgggtcaaggatggtggctggtgtggttgggggagaggctcaaggcccgcctgccaaccttgtcacctatgtgggggtgaggggagcccgccagaggccagagcccccactgtcccttcccaccctccagccaggctccaggcctcctagggccagagtatctgagctttctctcgcttgccgggcctgtggtttgggggtttgtgtggagcctggtccaggagccctccttcctgatctgcactggctggccctcctgacagccccaggcccccgtgccctctgccaggaggtgccttgccacttggcatggccccagtcacgggtggcacatctggggtgaatgcacgtcagtggaggcagaatcattctgtctgaatgaatggagtttccaggcccccactggccctctgtgtgagggtctgcagggtttggcaggacaggtctttctctccggcgagagcacccaccctgaccggctgctggatgagggcaccaaagctcgctagggagggctctgtccttagggaggagctgcggaatccctgcagctgtgcccccaggccctgccttgcacacttcctgcagccagggcgcccctggggaggtcagggcaggccggggaggctgaggcccacctgccatagtgggcaggtgcgggagccagggcggcagtggcctcggggctgggtggggcgcctggcctctggtctctggagcagtcaggggctctgcagacgctgagaggcctgctcatagtggactgggagatgctggagcagcctcagagccatggccggcccacagcgggagacggccctgctgctgcccctctgcctgtgcgtgtgcacctgtgggcacctgcgtgtgctggggcaggcagggctgtattgggaccaggtcccgtaacagcctgcctgcttaccgtctgctcccatccctggggaaagcaagggagctcggggtcctaggacctgacctcagcgctcacccccaccagcaccacagtcaccaggactctgtgactcagtttaccccacgagagcccctgggattcccagggcatcagaaggcccatcagcctcccgtgaactgctggggtgggcctggccttgggacgcgggtgcaggggcctctcctcactgccccatggcacccacagccagtgccagagcctgctgcagccccgacccggcagagcaagcggctctgctacctcagccacgtagctgatggcatccttcaggttcagctcgtggaagacattcaggatccggtctcgagacttctgggccgaccgtctcatgaggaccctgctgaggaacttcctgtcgaagtgggaccacctgtagggacagaccttgggtgtgagcctcaggtgacaggcgccctagagcccgccggacgcgtggcccggccccttctctcctgaattttgtttgctatagtgaccctgtaggcgcgtttaaaatgagggaagcagcccctgccacacgcccaggccgtccgccgttctcccgcctgtcctgttggatggaggccgttagacgcatatgaaactgcatgccgcctcctccagagggtggctcaggacacggtgggtgtcaggcctggtcaggcaagggggctttggccacatggggggcaccttcaggtgcacaggaggaagggcaggggcggacagacaccctgagcccttagacttgtgggagccaagctgaccagagtgaggttttttttagcctaacggaattagagtattcgctggttatccagatcagaagggacggtggcctggccggacttagaggaaactctggggcacaagga

SEQ ID NO: 35568 - DNA, 1078 bp, Homo sapiens
tttgtatttttagtagagacggggtttcaccatgttggctaggctggtctcaaactcctgacctcaagtgagctgaccacctcagtctcccaaagtgctgggattacaggcttgagccctgccagacaaaatcattttaaatgttgactgatactaaccctgtttatgacgtggaggaaataatctatttgccttattttcaattcctacataacaatttggaattaattgggccacatgagagggcatctctattccctggaaggagcacagagaattcagctcctgtcccctcactcggtggccccaactgctgccgccaactcctttccgcagcacctgcgtgtctcggggcacacctggcacctggcctcatggggcaccggagccctgaccaagcctggactcaaacagttgttatgcatgtggcttctggttcttccgagtggaggatgtttccagaagccgggctgtgcgacaccgccggggccgtcccagccacttacttgtctctgagataattgtgcccgatctgtccggatatgtcctcgatggccgagaggatgtggtcgaaagcctttcaagggaagaaagacatgagcgtctcggggcggccaaccggggaacatgaggtgcccctccactcctggcccagccccgaggaacccaccagcccccctcaccacgcccctggcctggacgcagcctcctctcccctcctggcccagccccaaggaacacacggtgccctccgccaccccccaagccccagaccaacgcagcctcctctcccctctcagcccagccccgaggaacacgcagtgcccccccccgccccccagccccgcacgtatggcggcctcctctcccctcctggcccagccccaaggaacacacggtgccctccgccaccccccaagccccagaccaacgcagcctcctctcccctctcagcccagccccgaggaacacgcagtgccccccccccgccccccagccccgcacttacgcgcccgtgcagcttctcgttgagccgaggttcccggtgctcgctcctcttcaccttcagccactgcac

SEQ ID NO: 35569 - DNA, 1082 bp, Homo sapiens
taaacttaatcagaacatattctggttgggtgtggtggctcatgcctgtagtcttgggaggccgaggtggatggatcacctgaggtcaggagttcgagaccagcctggccaacatggtcaggaaaccacaagactgtcacggaaacccttttctttcagtaacatgagccaaaggtcactgcaccttgtcccctcctgaccctgtcccggtggcagggtgtgggggacaatgaactgcttgtctgtgtgcctccaagtggggcaaaaccaggcagcatcctgctgtttagctgcacctgagacgatgcctgagggctacctgaggaaacagggaaacgtggggttttagccggatgtggtggcgtgtccctgtaatcccagctactcaggagactgaggcgggagaatcacttgaacctaggaggtggaggttgcagtgagccgagatcgcaccacggtactccagcatgggcaacagagtaagactccatctgaaaacaaaaacaaaaaaaccaaaacatattctaaaacataaatgttcccaggaaagtattgatgtattcggatctaaactgcctttttgattacggaaactttcatcttgtaattaatgttgatgtagtgactgcttatggggtgcgtggagcttgcacagcccgaccacagttgtaacaggaggacagcagacaggttacccgacgagtgggtttcagatggtgatggctgcaaggggtgacagaattgagcagccagaagtggaggcgggagatgaagtagaggggtgttcctggggagagacggttttggagggagaggcagtaaaggtgggaagaagcgtgtgggcttggaggtattgtagagataaacataagccgaaacttcaggtacgttccttgctcgtcagtgctgatattccaactccaaaggagttgcactgagttctaggtgcctctttcagattacgaggatacatatctctctgagaaaagctgaaaatacagaaatgtgtaagagggaaaataaagggatttattccacaataggacacatgtgttaaagtttgtctttcaatctttttacat

SEQ ID NO: 35570 - DNA, 1050 bp, Homo sapiens
cacacccaggcagaagccgccctccgggagtcctggtgtgagggcagagccacgtgaggatgtgcacatccagaggggccttgtcagcatctttaaattgcgagtgaagtcggcccgggacggcttcgaaaactgcctctgaacttgtctgacaagtacatactgtccgtttcatgggaaccaacatctcagagatcccacacaacgcttcctctttagagaagaaaaacacagcaaaacaacacaggcagcctctgtttaaacgcacgtggcccccccaccccgcctggaagcctctgcacgtggccttcatctggaagcctctgtatttaaacacatgtgggcctcctccatctggaagcctctgtatttaaacacacgtgggtccccatcccccgtccagaagtctctgcatttaaacacacatggccccccatcccccatccagaagcctgtgcatttaagcacacgtggtcccccgtctagaagcctgtgcatttaagcacacgtggtccccggtccagaagcctctgcatttaagcacacgtggtcccccgtccagaagcctgtgcatttaaacacacgtggtcccccgtccagaagcctgtgcatttaaacacacgtggtcccccgtccagaagcctctgcatttgaacacacgtggtcccccgtctagaagcctgtgcatttaagcacacgtggtcccccgtctagaagcctgtgcatttaaacacacgtggtcccccgtctagaagcctctgcatttaagcacacgtggtcccccgtccagaagcctgtgcatttaaacacacgtggtcccccgtccagaagcctctgcatttgaacacacgtggtcccccgtctagaagcctctgcatttaaacacacgtggtcccccatctagaagcctctgcatttaagcacacgtggtcccccgtccagaagcctctgcttttaaaccaacgtggcccctcctctggaagcctctgtatttaaacacacatggcccctcatctggtggaagcctctggatttaagcacacatggccc

SEQ ID NO: 35571 - DNA, 1191 bp, Homo sapiens
tgtattaatttgtatccggcagtctagtaattttaatcatttgcctgtagctgtttcctcatttttaggcacacagtcatgttttctatgagtaatgggttttctttcccattcctgttgttctggatttttactttatgtttttatttttgttttgttttttgcttttctacactggtcggaacccctagtgcagtgctgattagaggtggtaacagagtgggcatcgttgtcttcttcctgatattcaaaggggtgataaattctcaccatttatccactcacttgtaatggattttttttgcttgttttaaagcttcttctatcaataattcgcctcaagaatggatgacttttatcactttttctgcagtgatggagatgaccatgatttttatcatttaatatattgatgtgtttaacgaccataatttgcttttgttaaaaataaaccttgaatttctgagataagtccaacttaataattatggattttcttttacatacatattgttatatttggtttgttaatattttgtttagcattttgtggcccagctatactacctagcacctgtgtttgggccctgatttcctcgtctgtacaatggggaaatagtggcttcctcacaggattgttgtgaaggtgaaatgagttagtatgaataagactctcgggcagcatctggtgcgtcctgagcactgggtagctgcgtgctctagtacagtggttagtatctctcttcacgggtgacagccacttacgattttcctttgtaatgctgttcttgaaaggattcgcatctttacaccaccgtaaaatgagctaggttgtgtattctttctccattctctaggagaatttacttaagattataattatttcttccatggatgtttgatggaacttgctggtgaagtcacttgtgcctggaactttctttgtcaggaggtttgactactgatccagtataactcagtgttccaggatgtggcagaaccgttcacacagaccatccttatgtcccccctgcctttacgctgcatatccctgagttgggctggggccgtgtgactactgagcaacagcctgtgtgtgggactgaggtgagtcatttcagggccagagcagcgggagctggtgcgtcactgtgatagcttccctgccagtgacctgggcagctgcatcac

SEQ ID NO: 35572 - DNA, 1077 bp, Homo sapiens
ctggcatcgccatcctgcacgtcgctccgagttctcactgctccaggagggtccagtggtcccgttccagcaggacccagccttggggttccccatgcctgttggccgcccctgcctcccgcaagccccagcaagatacagaggacctagagcaacgtttcccggggccgacagaggtcggtggcaagccctccaggccctgcctattctcccctcataagtgactccaccagcagctgagcacctgggggcaggtgaggtgatgtctggccacctgagagggcttctcccctcatctcaggaaaccggagcccttcctgcaccctacttggctcagaggatggatggcaacgtccactgggccacggcagctcaggccccagggcgggctgagggccagggccctcccattgctgcaccagctctaaccccaggcacacccaccatgaagcccccacacagccggtcggggggctgcctgagctccggaggtctggctaccgaaggctcccccctgcctgaggggccgcctgggatcagcgcactgtctccctctgggcgcacaccctgcgcttgctgctaattaattttgcgttgctgccggccttttcgttttcctggggaggggcgggggtggggcgtgtgtagtcaccgccctgtggacatcactaggaagaggtggcccttggtgggacgtggacttggggcccagagggaccccgggcagatctgaggggcccgaccttctctagggggccccaggggctcggctgcctccatccaccccagtctcggcctgggcagggctttggtctgtgcacctgaagtcagtttctggctgtttgtttggagatcaccttctcaaatgacctgtgttgcctggtcaggctcatggggcaaagtggacagccaaggccacgcccaccactggccaagcgcaggagacgggtgcctgtcgccgcacagtgctctggggattgctggtgctgcccggcctgcagggtacaggagccacaggccttgactgtgaggccacaagctcctgaaccctcagccacagacgtccatggccaaggg

SEQ ID NO: 35573 - DNA, 1033 bp, Homo sapiens
caggatgctcttcccaggagccctgggcctggccccggccaggggaggggactgccagtgtgcagggctgaggcagtggtgggggcaccggtgtcagggcgcagggacgccctctggactttgcaaggcgcccgcccccagagtaggcggctgggccatggggttgagaagactgaggggtgccacccaggcagggcttggggacgcagggctacgccacagggcagggctgccgaggccacctccctaccatgcatgggcttcggtaagacccagtcaggccctgaaggactcaaggctgaggtgctggactcagggcatgaaagctgcttcccaaaggggcctggacaccaggtgggccgtcagcactgcactgagagctgaacatggcctctgcccacagacacaagagccggtgggagggtccgtgccgaggacacaggtaggtgtcccaaccctgggactcacgaagccctctcagatctggagttctcagcgccagtcatggccaaagtgtggctctgtaatcgtggggtcctgagtgtggccgctgctgaccctgagatcccacaaattcccccaaaacagccagaaaaaaatccaggggcactccctccactgaggaccttaagggcctcaggccccacccactcacccctttccctggaaggcaccaaaaatgcagatgccaacccagcggaggatgcaggggcaggatcctggtgggggctgggccgcgtgggggcaggatcctgggggtggaagggccgcctgggggcaggatcctgggggtggaagggccaggtcaggtgtcgagctgggaacagtttccagttttatcgctgacaccatttctttgtctgaaacaggagcttctcacaggcctggtctgtgtttcccctgggcctctgcagcaggggtcgctggacaggaggagcagctgagaaattaccagaagcaatggtgggttttgtgagcacccagaacagtggtgggtgtgcgggtcagagagaaagaaccttctgggatgctt

SEQ ID NO: 35574 - DNA, 1053 bp, Homo sapiens
catggacatatggagtggaataagatgacactggaaactccaaaagatgggagggtggaagggggtgagagttgaaaaattacttcttcagtacaatgttcactattcaggcgatgggtacactaaaagcccagatgtcaccactatgcaatatatgcgtggaagaaatctgcacttctaccccttacatctataaacattttaaaactctgttcttaaataactgcatctcagaataagattttatcttatctgcctccctgaataaggtttacccaggtgtggatttcttctttttatttatgcagctcgtcataaatcaactcttcatatacctgtggattcatgtcttttgtcagttctgtgaaatcctcaggaatatttataggactacagaaatatccaacaccagagaagacaacaatttttgacaaccaatcagaaatattaggcacacaaacaagtgggaaaataggagccataaggaggcaaatgagtctattaaaactgatccagaacggacacaagggcattaaacaatatcaaaactacattccacgtattgtaaaagctaatttgaggcacagaagatataacaacactctggatcactgttctagaggtgaaagctagaacgtataaaatgagaactgcactgcatgggattaatggcagattagatgttaaagaagaaaagattattcattgtgaaaccatggcaatataaactatccaaaatgaaaccaaaagcaaagaggatttaaaaaaatttaagccaaattatctgtgatctgtgggacaacttcaagtggcttaatatatgtttaattgaagtccccaaaggacagaagaaaacatgaggaatgagggtagtgcattaaaaaagatgtttggaaaaataatgacaacatttttttccaaattcgatgtaaactagtaacctacagatgcaagaagttcaatgtacctcaagcacaagtaccattgaagaaaattacatcatgtctcattataatcaaatcgctcaatcccagtgataaatagaaattttaa

SEQ ID NO: 35575 - DNA, 1047 bp, Homo sapiens
gcacggtggcgggcgcctgtagtcccggctacttgggaggctgaggcaggagaatggtgtgaaccggcgaggcggagcttgcagtgagccgagatagcaccactgcactccagcctgggcgaaagagcgagactctgtctcaaaaaaaaaaaaaaaggaaagtgagatccttgccaaggttgaaggcagtgagggaatgagcgaagtggggctgtagaattcccagaaggccaaggagcagcgagagcaaaggctggggggtctgcgtggcctgtgttggcacaaggccactttccttcctgttggcagcctgctggccatcgtcctgccaacctccttgccagatagggcaggatagaattgggtcaccgacagccgtgatgactgtggtgcttgcttctcggccacaacaggcattccaatgttgtgattctgaccacttctaacatcaccgagaagatcgacgtggccttcgtggacagggctgacatcaagcagtacattgggccaccctctgcagcagccatcttcaaaatctacctctcttgtttggaagaactgatgaaggtacctttattttttttttcctcttgatacaaatggatttcttatatgttcttaattaattaagatagcttaaaataagctcgttccagtacggaggatttcaacatatgcattaactcccttcttaaattgaaaactagttttgtatgtgacaggttgagctgatagttgaaactagggccactgactcaatatttttgttcttttggcacaatacagtcatcattgttcattatttgaggtaccagtcagtgtaggggacgtcagtgaccggctgtgtttacctggctggctgcacaaaccttagttctcagcttaccccgggcttttccaatgccctgcctctcgggggcctgtatccttacctgaaagaggaaacatcacgggcgtagtatgggcctggttttggtcacggggtccacatgacgtcacgttcttgagtcgcctgttgtgatgataggcaggaacactgttgccgtg

SEQ ID NO: 35576 - DNA, 1065 bp, Homo sapiens
accaaacgttacttagactgcaagctagaaagccaccaaggccaggctttgttaaaagaagtgtattctatttatgttgttttaaaatgcatactgagagacaaacatcttgtcattttcactgtttgtaaaagataattcagattgtttgtctccttgtgaagaaccatcgaaacctgtttgttcccagcccacccccagtggatgggatgcataatgccagcaagttttgtttaacagcaaaaaaggaagattaatgcaggtgttatagaagccagaagagaaactgtgtcaccctaaagaagcatataatcatagcattaaaaatgcacacattactccaggtggaaggtggcaattgctttctgatatcagctcgtttgatttagtgcaaaaatgttttcaagactatttaatggatgtaaaaaagcctatttctacattataccaactgagaaaaaaatggtcggtaaagtgttctttcataataaataatcagacatggtcccatttgcaggaaaagtgcagactctgagtgttccagggaaacacatgctggacatcccttgtaacccggtatgggcgcccctgcattgctgggatgtttctgcccacggttttgtttgtgcaataacgttatcacatttctaatgaggattcacattaatataatataaaataaataggtcagttactggtctctttctccgaatgttatgttttgcttttatctcacagtaaaataaatataattaatggtttgcatgtgaaattcacttttgaaagaacatgttaccttaccttttgttttagaagttttcaagtattaaaatattttttagaattttcttgttttgattctaagtatctcttccaagtgcttttaattttactaaaaattactcacatgattacttaactttaagcctgatttatggtgtggggaccttatggtgtaactgcatcatccagaagaaattgggaaggtgccagtggcccaggtgcagattcaggaggtagatcaccaaggccaaggcatatgcaggttctggtcaccgtgtcgtc

SEQ ID NO: 35577 - DNA, 1742 bp, Homo sapiens
gcgtctgggcctcagcgtcctggggtcctcagagggaccccatgtccctctgcccaccatcaccgcctgctctcttggctgcccaggtgcacccagctcaactgtcccgagggcgtgccaggccagtggccaggtccgtgtgccctgcacccttcagggcagccactcatgtctgagaccagccagccccagacagagctggagcaggggccatttcagtggccctgattttgctcctgagggctgtggtgtaacacgaaagaacgttgctgtaggcttccagccgtgggattccagggctgtctttgccttgtgctgctggacagagcaggacctgcacctctgtttgtcacaggcttgtcctgggcaccgcctcaaaaggaggaaacaaaaacagaagggctgagtcccggagccaggaccccaaaccagaagtccctcccagagcccacagccccccaccacggggccgccctgcagccccagggcctgagctgctttctggatgctgggagaaccggacagtggctgctggaaggcaggcctggagggctctgggtgctggggtgcgggtgaggccgggcatgggtgcaggcctgtggtgctggggtgtgagagatgctgggctggagtgtgggagaggccaggcaggggtacagggcccgtggtgctggggtgtgagagaggccgagctggggtgcagggcctgtggtgctggggtgtgggacaggccaggcaggggcgggggctgccacttgatgtgggtgtcaggacagtgtgtggtgaggaggcatggaggaagcgtggccccccagaggcttccaggctgggcagccactgcaaaggccctgaggcaggagtaggcctggaggacgggacggtagcaggcaggggctgcgagagacacagcggaggaagaagaatggcggcccccacccatctccctctgccagaaggagccacgggcacagcctacagatgtgcactggtctctgtgctgtgggaggccagacctggtgtctgtgaggagcaccacagctgcagacctgccggatgaccctcgggtgacactttggggtggaagaccccacccaccctgcaagccatgttcctcgggctccgagccccatcctcacatctgtggagcaggtgggaccactagcaggggcttctggcccttcctctcctcccattgatttgttgaaagcgatttaggttttctgtaaaacaaagcggacatgggcctggggaaggtgcttgcgggtatttcatgagcttttctaggcctgagacatgttttaggtggcagcgggctcacgtgtgttggggggagagactggtcacagtcagggcgactcaggggcttgtgctcagatggtgacgcccagcccccttgtccccagggtgacagggagaggtggcaagaactggcagctgcccacaggctgagccgagcccagcagaaaggcccaaggccggagcacagaggtggcctggatgcttctggccggtggtcaggaccctgccaggccttgcttggaggcatcttgtgtatgaggggagccctgcccatgccaaccacctagctgtgcccaggggaagccgccccagaggcccattctcggggtctgtttgcctgtcgtggggagagagtgtcacaagctgggcccacagggaggaacatccttggcctccgaaagggcagagagcaccatccctgctttggggcatctaggggagca

SEQ ID NO: 35578 - DNA, 1043 bp, Homo sapiens
gtccctgctcttcccaccctctgtgggcgtcccagcccattgtccctgctcttcccacccgctgtgggcgtctcagcccattgtccctgctcttcccaccctctgtgggtgccccagcccattgtccctgctcttcccacccgctgtgggcgtcccagccctttgtccctgctcttcccaccctctgtgggcgtctcagcccattgtccctgctcttcccacctgctagtgggcgtctcagcccattgtccctgctcttcccacccgctgtgggcgtcccagccctttgtccctgctcttcccacccgctgtgggcgtctcggtccattgtccctgctcttcccaccctctgtgggcgtctcggcccattgtccctgctcttcccacccgctgtgggcgtcccagccctttttccctgctcttcccaccctctgtgggcgtctcagcccattgtccctgctcttcccatctgctgtgggcgtctcagcccattgtccctgctcttcccacccgctgtgggtgtcccagcccattgtccctgctcttcccaccctctgtgggtgtcccagcccattgtccctgctcttcccacccactgtgggtgtcccagccctttgggttccttgggatccagacatcaccctcagccttttcctgagaggcccagctccagcccgtgtgccatatcccaaagctcccctccctgagccacctgccaggcactcacttcattctaccacgtccagcatcctcccagcccccgaggcaggaggtcactgctggcctggacgtggccttggtcctgcccagccgcatcccaggtgcctcccgagtgccctgaggtggcggtggctgcagcctaagcttggcaggcgcctaccttgctcctcaccacttggcatcctgcctgagccccacaaactggccctcgatgccacgacagccccgtaattctggcagccttgggcctggcagcccagtttgtaggattagccctgcagaacagggtggccacaggggtggtgacaatgaccacaggacat

SEQ ID NO: 35579 - DNA, 1064 bp, Homo sapiens
tgagtgtgtgaatgaatgggttagtgtgtgaatgagtaggtgagttagtgtgtgaatgagagggtgtgtgaacgagtgggtgagttggtgtgtaaatgagtgggtgtgtgaacgagtgggttagtgtgtgaatgagtgggtgagttagtgtgaatgaatgggtgtgtgtgtgaatgagtgggttagtgtgtgaatgagtcgggttagtgtgtgaatgagtgtgaatgagttagtgtgtgaatgagtgggtgagttagtgtgtgaacgtgtgggcaagttagtgtgtgagtgggcgagttagtgtgttaatgaataggtgagtttgtgaatgagtgggtgtgtgaacgagtgggtgagttagtgtgtgaatgaatgggttagtgtgtgagtgggtgggttagtgtgtgaatgggtgggttagtgtgtgaatggatgagttagtgtgtgaatgagtgggttagtgtgtgaatgagtcgggttagtgtgtgaatgactgggtgggttagtgtatgaatgagtgtgtgaatgggtgagttagtgtgtgaacgagtgggcgagttagtgtgtgaatgggtgagttagtgtgtgaatgagtggctgaacgactgtgaatgggtgtgtgaacgagtgggttagtgtgtgaatgaatgggtgagttcgtgtgtgaatgagtgggtaagtgtgtgaatgagtcgggttagtgtgtgaatgtatgaatgagtgggtgggtcaatgtgtgaatgagttagtgtgaatgagtgggtgagttagtgtgtgaacgagtgggtgagtttgtgtgaatgagtgggcgagttagtgtgtgaatgggtcagtgttttggtgtgtgaacgagtgggtgagttagtgtgtgaatgagtgggttagtgtgtgaatgagggagttagtgtgtgagtgggtttgtgaacgagtgggttagtatgtgaatgagtgggtgagttagtgcatgactgagtgggtgagttggtgtgtgaatgagtgggttagtgcatgaatgggtgggttattgtgtggatgagtgtgaatgggtgtgtgaacgagtgggt

SEQ ID NO: 35580 - DNA, 1032 bp, Homo sapiens
gccggtgggttagtgtgtgaatgagttagtgtgtgaatgagtgggtgggttagtgtgtgaatgagttaatgtgtgaatgagtgggtgagttactttgtgaacgagtgggcgagttagtgtgtgaatgggttagtgtgtgaatgagtgggtgtgtgaaggagtgggtgagttactatgtgaatgaatgggtgagttagcgtgtgaatgggtgggttagtttgtgaatgaatgggtgagttagtgtgtgagttggttagtgtgtgaatgagtcggtgggttagtgtgtgaatgagttcgtgtgtgaatgggtgagttagtgtgaatgaatgggcgagttagtgtgtgaatgagtgggttagtgtgtgaatgagcgggtatgtgaacgagtgggttagtgtgtaaatgagtgggtgtgtgaatgagtgggtgtttgtgtgaatgaatgggagagttagtgtgtgaatgggtgagttagtgtgtgaatgagcgggtgtgtgaacaagtgggttagtgtgtaaatgagtgggtgtgtgaatgagtgggttagtgtgtgaatgagtgggttagtgtgtgaatgagtgggttagtgtgtgaatgagtgggttagtgtgcaaatgaatgggtgagtttgtgaatgggttagtgtatgaatgagtcggtttagtgtgtgaatgagtgtgtgaatgagtaggtaagttagtgcgtgaacgagtgggtgagttagtgtgtgaatgagtcggtgagttagtgtgtgaatgaatgggttagtgtgtgaatgagtgggtgggttagtgtgtgaatggatgagttagtgtgtgaatgagtgggttagtgtgtgaatgagtcggtgggttagtgtgtgaatgagtgggtgggttagtgtatgaatgtgtgaatgggtgagtgtgtgaatgggcaagttagtgtgtgaatgggttagtgtgtgaatggtcgaacgagtgtgtgtgtgaatggttgtgtgaacgagtgggttagtgtgtgaatgggtgagttcgtgtgtgaatgtgggtg

SEQ ID NO: 35581 - DNA, 1077 bp, Homo sapiens
ggcaaattccaactccagctgtcaaacataaggggactggtaggctctccagggtggattgtctcacggcatccagaggcagggaccgaggcagggacctagccaggcctcgggaaggagctgcaaacccaggagctctggggtgtggcttcatctccctccctccctaccaccctacccccatctctccgtgttcttcagatgcctcattttcctgtcaggcacctggccagctctaggagctggaatcaggttggtgcctccttggtcagtgtccacccctagtgtcatccacagtgaccaacggaaggggtggccggtggtacaggacattggccatcttgggaaagatcacagagacaggaagggcctctccagctgagcagatgagaggttcttcagtggtctggacacatttgcccactcatggccgtccccctgccctgttgagagaaccgatgaggaaagggagccctgcatctgtcgccttccgactccgaccgcctgaggctgggctgccggcaagccgcggcagcatatgacagcacttgaaagaaagtccctggaaagaatgtggatcattgcagaactccctcaagaaagcgccagaggaggaccccattcagcaccccgcagaactcctcaaactcctgcgtccacactcccccagcgtggtggctgcttctatctccccaggcttagctggcctgggtcttgaaggcctctcctcctgctgtccccacgcagcatcctctctgccactgcacagctggatgcagtgaaggccaggcggctgtggctgcttgggcaacaggagctgcttgaccctgttctgctggccttgttggcctcactcccgtagagagccaaggttacccacgtctctgaagctaaggctttctttctaggcctgggggagtcacatcttgcattcgtactcactgagctccacgtctatggttagagaatttatcaacattttataatgcttttatcaattccatcatttgagggccctctggcaaggaacctgttagtacatggagtgcctggaatgttccagaaagctaacatgaa

SEQ ID NO: 35582 - DNA, 1051 bp, Homo sapiens
tcaatgagctcctgaattcgtaattagatcaggcatgcctccatgattcctgaatttgcttcctgaaggatgctgtgaagtgtccttcacagccaccttattcattctttttcccactttggttagcctggtgttcttcttgttaacaccgtagctatccctaaatcatgtattttcccttctccttcaatcttggttacgttatccattcccagtgtgtagtttttgtacgtctattccagagctacagggcattccagaaaagctcacatgatcatgaattgactataaattcacattctcaaaattcagctggttcactgttgtgtggtttgatgggtgggtgtcagaaaagtttgttttatagtggttgattatttggcaatgccacttgagtgttgggttgagaaagatcctgaggcctgatgcacattcagtggaagagtgtgccatgattgattagtgatgtctaccaggatcatggtggtggagaggggcttgtgtctggtgggtttgcctctcggagtagaagctgtgtggacttgcagtctaaaaattgtgaggttgaatcacagcatgggttcagttttctcatttgtgaaatggaaccatgtgaatatttttaattgaatcataagtctccagtgatatcacactgtcagttgtcgagtaagtggtgtatagggtaagtgctctttctctccatcctcagaaacccttttctgtttgttgtttgaattgttagtgtattcccagtagaagcatctgttccatgtgccacattctccaatgctgtatcccagtgattcacacaaaggagctcatggcattgcgaatgggacatttcttccgtgtgcaggctgtcctgggcattcttgttaggtatatgaacttgacatttggaaggtggaaaccgatggatgttgaaaggatttgcaggccctttggtttcttttggcagtgatcgtggagaaggggaggtttctcttagtgtggatgcggtatggtttcttttagtggtgaccgtggagaaggggagaaaccgatggat

SEQ ID NO: 35583 - DNA, 1049 bp, Homo sapiens
tttggggaatgatgggaaggaactctccagaaatccgagtcctcaggtgacagccaatggcccaccttgcaagcaggtcttgctaaggatcgtgttctcaggcctgctgggttaattgtttgctgcacacacaccttggagcttggggagtgctacagccagctggtagaggccagggattctgccgaacatcccgtcttccttctagcccaagatgtcagtagtgctgaagttaagaaactgtcttctcttacatatttactgatttgtttgagcagactacatatcccattatcatctgtatttatttgtttgctatattatctatatacttactaccttagcataaccattttcctggctacactggccatgtcttctgtcatgtcctctcagctggtatgcctgctagcttgctccttgccctgtgtgctcagccaggtgtgattctacttccccaagaaaggaaggaagcatgggcatcagcattcacagtgacaattcaggagggtattgtatggataaagttaaaattgtctggtagaggggagaagtaaatgggaaacaaaaagtcttgagtaagagagtgggctgctctgggaattgtgttagtgaattagtatagcttaagaaatcacccagaaggcaaagaaaagatggtagttatgagagaaaagaggagagaattgaaaataagcctgaactttccaatagactatataatagaagctctagaagaggagagcagggctgctaagagaaagcgataatcgaggaaacaacccttagtatctcctggagaggaagaacaccttgaacctcacttcttccatagcagctggacctgtgcaggaatgaatgtgggtcagaggagcctgatcgcccttcacccaggcacaccctgctcactttcacaattgcgaggttcattatttagaggccttggtttcagccaacataaatgacatctgaatctgattggaggaaaaaaaaatgttttatcagagtattacaatatctgaccacagataatacagtatctgaccaga

SEQ ID NO: 35584 - DNA, 1047 bp, Homo sapiens
cactttttggctagtttgaaatagtgctgctataaatatcagtgtgtaagtttgccgtggactctattttcagttcatacctaggaatgggactgttggatcgttgggtaactatttaacattttgaggaactgcaaaactagtttgctcagcagctgccccattttatattcccaccagcaatgtatgaggaatgtattcagtttctccacatcatcatcaacacttgctattgtctgtcttttaattttagttattctagagtgttcatttttaatttttaagttttttcaattttaagagctctgaatattcctttcaaaaataacttgtttcgcaaatataatattatttatctcatcctattaataaacattttttaagttttcttttcagtttttgtttacttcaggttgcttttgcttgttttagcctctttcacactgcaggtctgtctcatgtttggaagtccttgcaaagagcgagtagcagatacactgaggatgtggggcttctggaccctgagtgtcaaggcaggacagtctggttgggccatttattgattgaagaatgtctagtgtcattacctttagatattatctgtaagaaggtatttcccttcttcttcctggaagacagaaggactacactgtttggaagcctaatgaagagagacaggcagccagtcttagaccactgtgcttaggtttatttaatctttatgcttttgacatagtacacctgccccaagggtccctggtgttacagagaccttcaaaaagcaaacctctttctgctggatgggggaggagtgatttctctgaggcatggtggatggttggggattgggattaaatgcttatgagaaagtttgcaactagtgcttgttttagttccattccccttcaccttctcaaaagaatccatgttactgattctcaagcttgttgaagttttgcagtataaatggagctggttctcacttttccccactgctggctttcttgggtgctaaatcagtactcttgagtctgctttccagtttcc

SEQ ID NO: 35585 - DNA, 1035 bp, Homo sapiens
tttcagctttgtaatagtctcatgaatgtatgagccaagatactactcagatctaaaggtttctaaataaaaggcttgtatatcaacgtgatgcttttgagaaatttaaggtgatatagtcattaatttagcatgcatttgtttcaggaaatctaggaagtctagagggtgccttgcatggattgaaacataattttaacatagtatattttctaaattaaaaagtaacctaatttttcttttcttttttgcagtaatttgttaacagaatatcagaagaaatgtgatgatatccttttactggctttttctgttgagttttggaactaacttatgtttaattcctgaaagagatgtgagaattgttcctcataggccttctggaagatagtacttaacaggcttcagtagggagcatgtctcacaagcacagtaaacagacagtccttttattcttaatccatgtttaatgatgagttttaaaaatgagattacttttcttgttgattgtgattttcttaacgtctcataagctttttagtgggtgggtttctcttaatttgtactgaggatgtggcatgttttttaggtttacgaataatgtgaaactgaatgtgatacttgctgaatgttatttttgaatctgcaagaagtacagtatgggaaattcaaaatgttgggcaattgactttcattaattatttttgtgatttacagggaaatgtgtgtgtatatatatatctccaaaatcatagaaatagcgttgctgtatattcatgaacgctgtgggcagtcagaagacaattcttggccttacagtcaccacttgttcggtagccatttaatgagctcggttgtggagttagtgtctggtcagctatttttttagcagtgggaaaaagatgtgtataattgatccttccatgtcttgctgtggtaataccttgatttaaatctctcctgtaaaaacttaaagtttctctcataaaagtaaacatacgtatactcctttagggagtccctgaaatttagctt

SEQ ID NO: 35586 - DNA, 1032 bp, Homo sapiens
agcgttaaggaagacctgagtacataaacatgttcctggatgagaagattcaaagcataaagatgtaaaatttccccaaatgtatttataaatatacagaaatattcaaagtcccatagatgttttctatggaagagcacaagcagatggtttatagggaaaagtgtatgttcagaataatacaatttttcaacaggagaaaactgaataatgattacgctctaacagatattcagtaacctaccctgattaaagaagtgtggtatggatacagaaaatgacaaagcaatgaagtagaaaataaattaaataaataaatatgtaagtccttaaatattcatacatgccttagagtttgataaaggcagaattttaaaggatcagggaaagttgtgcaattcacttgaaggaggtgttgtcttcacaactaagtgtgaagttaacgctgaagatgtttttctgctttgttgggaatagagtgcttttatttatttattttttgggtcagattagcagtaatgaatgctcagttacaaaggcatagctctggatgatagcctccataagaatggaaaagtaactttttttctttttttttaaggttccttgtttgctgctttgggtatacgtaataagcagggatcctggtcaggtcatttaagcaaaggggattacagtatttggaagcaggcttttgggtaggttatatcacaatgtagataagctactcgatcacagaattttggaactgaaaaatggatatggctcacacacagtggcaatcagaaggttgttttggctcaggagagttggcagtgtccagcctttcacacttacccgtgaactgtcctccacagttgtcctgcccctttctgtggacttcattttttgaagtgatgcagtctgccagcttaagtagagctaatctcttacaaaatctgtgattccctgagacatttgggtttttaaagtttggtcttttaagcttctcttgaactggagtaaagatttcactaatatcagtaaatgctt

SEQ ID NO: 35587 - DNA, 1024 bp, Homo sapiens
ttggcagtaatccccagtcttcttctgggttagactgtggtaatgatacagatattactactaaagtattctctactgaaccgcatcattcagaacataaattgcaaactaaaactttaaacacattacatctgcagtctgagccaccggagtgttctataggaggaaacaacttggagaatagcttgtgtgccttgagccctgaattgggagcatctaattttaatgatcagaagagcagtgggatagaatatacaaaagtagtaaaaggcttgaccaaaatacattcacttcctcggtcagtatttatgaaagctacaaaagatgggcaatgtgaaagtcaagatccaagaattgagctcacactaaataagccagatttcacatcattaataggttctcaggctgccttgatcaagagtggtttgggttttgttaaaagtacttcatggcaccatagtgatttattaaggaaaggtggcgaagaaagtctgagagccaaatcagaacatgaacagaagactagccatcagttacaaaaggcaatgccattcctacaaaatagaggaccaacacccaagcctgatcttcttagagaaaataacaatcctgtagaattcaagaccactgcatcggtgttgcctaatcaagtatcagttatcacaaaacagacaagacctgaaaaggttcagagtgccaaattggaacacttgaggccacatagggttgagcctaccttagtaacagaaaatagtggcaacaaaaccggtatgtcaactgtagcaaaatgtgatggggaaagagatgatacaacacaaaacatcacggaggtggctgctgtgaaaagcatttcaccagaagtttctgcctctaggagaaaattagattttaattctccaggtggttcttcaccagtagaaaattctgattgttccacaaatagcagattatctttctctcctgaaaatatcctcatccaaaaccaagacattgtgagagaagctgcagtgcagggagatgggca

SEQ ID NO: 35588 - DNA, 1076 bp, Homo sapiens
gtattttaaatttaaacagtatatagagtaaattagagtttagaaaacaagaatgagagtagaattacatactgtatttcatatactcacacagattacataaggcaaaacccaagaaattatgattatttgactagtggtagtgacagtatgcagctaggtcttttgagacttgcattctggcatctgcagcatttaccagccataggaaacagacaggcgtggggatttcttcagtacccccgacctcgattctcatgatttaccatgctaggtaagttcttaccagttactatgctctaccttctgatgtagcgcaagttttattttttcaatagatacttaagttttgtaacttttagataatctttggtaggctgaagataagtatgagtgtacattgcctttttaatttttttttcaatccagcatttagcagagtgcttgcttcactctattctctcagaactaaaaattcagaagatatctatggaccacaattacattcacgccctctgcagggtgtatgtgggtatttgtcggcaactcggagacttggaaagagctcgtttgttttgctacagcctacttaaagaaggtatgcttagattgtgacaattttgtattgaaaatatacgattgcctttttcccttatactggagtctatattttcagctctgattactgtgtgtcttttaaaataatgttatgttttgtccattgaatagctttagctatacccagctgcacctggtctttagtagggcttacttatatcagcactatatttccacttgtaaataaatgagtatctctcattactgtgtatttgttctatgctctgtgcagctgctttagaattagatatagttgccttaaagtatgggatactttaaagtaagtgacaagccaaactgctgtaccactaggtggaaagggcagcaactttaagatggaattgtaagctgatgaaaagaagtagatgagagaaagctgaaaggagacggtgacatgagggttgtcctttgattctcttttctctttactatttcttccatccctactagtggatcag

SEQ ID NO: 35589 - DNA, 1029 bp, Homo sapiens
tagctgggcgtggtggtgggcgcctgtagtcccagttactcgggaggctgaggcaggagaatggtgtgagcccgggaggcagagcttgcagtgagcggagattgtgccactgcactccagcctgggtgacagagtaagacttcatctcaaaaaaaaaaaaaagaaaaaaaatgctaccttcatccctatcacattttcttgctttatttttctttagtacctgtcactagtttttgttcaattctgctattgtcatctctctccccagtagaaatgactctggaggggcggagggtggccttggttggcttgtggcgtatccctagcatgcggaacagtgcccacacaaggggagcacctggcgaatgtatgttgaatgaaattaattatcattatcgtaacatacagatactcacaaaacctaaagggaagagaaatattcaaaattataaattagcagcttctgtcacctgggagaaaattaagctctctgacattcattgtatgtagtaaattaacttttctctgtgcatctataattctggcactagctttgtaccatctctgagagaatggagaaaattgtcactcaaataatttttctgtaggtcttaattttcttgtggaaccctggctgagaaaggctggtttaagggagttggtgacattaaaaaggatgcatcaaaggtttgataatccatatccttgagatacttgaagctgtggaaattaccttgtccatggatccatgtgtgtccaaggatgtctgttactcttgttcatcatcttgacactaagggaagattagacatctgaatgtcaaacagtaaggaatcaaatcatggcactcctgtatgagatgatagctatattaaaacacatagctatgaatggattactatgtattgacatggaaaagtatttcccagtctgttactaaataagaaaatgacagaacagtctgtccagtgccagtctgtataatgatgtgtcagggcctgctgtgggcctcagctttctgaatcctca

SEQ ID NO: 35590 - DNA, 1073 bp, Homo sapiens
taaaatgtgccttatgtgagatccactataaaaagaacttgatcactaatatactgcatacaaagtcaatttgagatgaattatggacccaaatgtaaaagctaaaacaatcataaaacttctagaagaaaacacagaagattacgtctgtgatcttggggcaagcaaagattttttaggagacaaaaaacatgctgataaaattaaaaaacgattaattatacttcatcaagataaaacaatccggccaggcacagcggctcatgcctgtaatcttagcactttgggaggccggggtgggtggattgcttgagctcaacaaatacgaaaattagccaggcatgtggatcgctcctgtactctcagctgcttgggggattgagctgggaggatctcttgagcccagaaagcagaggttgcagtaagccaagatcataccactgcactccagcatgggtgacagaatgagaccctgtctcaaaaaaaataaaatcttcatcacaaaacattatcaacaaaataaacagttaagtcacagactgtgagaatgtattcataagaaagaggatttgtatccaaattacatgaagaacttctaaaactcaatgataataagacaaagaacacaatttaaaggagaaaaaaagcaaagaggctgttcacaaaagaagacataaaaatggcaaataagcacatgaaaacctgctcaacttcatcaaccatcaagaaaatacaaactagacaccccaggagctcctaccgcatgctgccctagaagacctgcaatgcccaaggctgactgcagcaggtgctgggaggaatgcggagccctgggatgcttatctgctgctggcaggggtggaaaatggtacagccactttggcaaactgtctgtcttctcctaaaataatatacttccatcctatgacccagtgatgtcattcccaggtatttgtcaaaaataaatgcaatatattcataaaagttcctttacaaaaaagacttttataatagtcaaacctggattgtttaatcaacacgtgggtaaattatgctttgctcatgcacttgga

SEQ ID NO: 35591 - DNA, 1014 bp, Homo sapiens
tggctccagctgcagccagccaccctcagtgtgtcagaccatggggttgaatgaagagaaccacatccagaatgggacaagctacaggttctggaacagaagggacatcagagtgggagttgagggggaagagggcaggaggagcagctctctcattcttctgagggacgttcaattgtcctgctgtggactgtgatgaacccaccttcatctgtcctccatcactttgcccctgctttttccactccccttgtctcttcttccctccttttcaaagtcacagagaggtgaggagtctgggtggcgccaggaaggctcatccatttcctaacacccctcactgtcagcgctgacaccacgaaagcctgcagcctcatactagccgtgaatccatgtcctctgctgatctgatccggagtgcgtttatgtcactgtctctacaaagcacatgaccacctggattttacccgttgctctgggttgcctgttcgtcagggcccttggggaagacaccccccactctcccactctgcctgtgaataccccccactgggtccagcgcctctgggcgcacccttgctgttccacccctaggactttgcagaattccagagccagggatttccttctctttctcttggataagcactgagctttccccacacagcctaggacccgcccctcttttcagctttcctctcgccctttcttagggaggctcgctgtctaccttccccctccaccctggcaggtgctgcgcccctcagttctgcgtgaagaccctacacacttccttcattgacttctgctccttccggtcggctatcacctggaccctcctggactgggcttttgcctaagaactttccaaaaaccacacaaaatagtgaatggcagtttctccaataacaattccaaattatctgaaaatagcaaaccatggctaatttctaatgaacaataatactcttctctatgactgaaagggaagtgccaagcacagatgtgtgagag

SEQ ID NO: 35592 - DNA, 1048 bp, Homo sapiens
aaaattatgtttacatttaaaacgccaatattctatcacgattgtaaacacagatggagagcaagggaagccactgtttattcaccacttgcctgtgctctctctgttcttgtgacctgatggattgtgcagggtcgtagtaaggaaagggaggttgtcctggggccaggtcgctgagtatgcagtgggccaggtcccactctgcagcccctaagggcctcacccataatttgaccttgaagagaaacctcttcaagtctctctgcctcactcttctcttctgtgaaacaaggaggacaacagaaccgccctcacaggtaaacgaagaattggagatattgaacgtaaaagtgcacagcacgatatcaaggatacaggaaatgggcaataaatgctggcttctctatgcttgattctcacaagcccatgagatagagctgagtgcttgaaacccatcctgcactccccagaaggcaaagcctgggcaaggctgcccagctccaagtgggggccctggaattaaaccctactttgctgttctgtcctctgcttgaactgcccccttcgctacacaggtcccatccttaagggcaaacatctgcggagctgcagagtgggacccactacttagatcccttgtggggtcagcccaggacgcttgcaccaggcaaacaccttctgtggttccagccaaatggtattaaaagccaccatggtgttttcagttgttttcaaaggccctcagcagaaaccagggctttccaaatggggagtgtttgtctctgtggaaggaaagcatgttggaaaacaccagcaatcttttcaaagggcacctggacatgagaggtcactttctgttcctttgtagtctcgatgtaaacaagagaattcttcagaaaatggtgtggaaagttgtccccagatcccctgagatcttacaaaatgttatatttttcacgtgactgagttagatttactacgagaactgaaggtggaagaattcacacaggggcacatgatagttacaaggaagcgatggccccgggtc

SEQ ID NO: 35593 - DNA, 1067 bp, Homo sapiens
acttgttttcattaatctttcttaaacgtatgcgtagctcacatttatgccagtgcttaacgttagacatgttttgggtctttagttagcagtttggtagtttttttgtgatcagaagtatgccatctcaactcttgtttacatcaattacttattgtaaaattgattttgttatatgtcattttgcttaaagtcccaatttccaataacctatggacgaggttaagtgagaacttactgtagatttacgttttttttttctcttttccatttctaataccttactatgcaataatggatgggacatcatctttggggtcagacagacccatgcacaaattctgagttttctctggcctctatatgtctctgttttacttgacttttatatatctgtgtcctggtctctaacatgatggtcaagcacatagcttttagagttgtgaggatgcaggaaggggccccaggaagggcctcctggagtgtctggctctgggggccttggacacgctcatgttgcgcctggggatctccttcatgcctttctctcctcaccctgcccctattggtcctgcttcatgtcagcccacaccgtgtaagaagccatccctgcgatgatatctaccctgcgtgttgcacccgcatcacagctttctgagtccaaacatcttcaggggttcaaagccaccctggctggtccccatgatcatgtcctgtctcatctgctatctcccgaacatcccaggccctgctccttcctatctgccttaatcccagtgctctctgggccgcctcctcacagcccaacttcacattccttggaagccacaacaactcctccctctgccagtggagcctcggctgccctccagggcctgctgtggccctgctctccccggtctctgtggctcctggggaccctggcactctctgcacccccagcctggagggcagatggccagcatgcaggaggagtgtgcaaaccaacatcatcccaagaggtggacagtgagccaggctctgctttctgtgtggacccatgactgtggaaaaatcacactgtcctt

SEQ ID NO: 35594 - DNA, 1034 bp, Homo sapiens
gtttgctctcactttaaaccaggaacctcagccctgacagtccagtttactggttcaacagactccttgattttctctcacaggcagatgagagcatttcaatttacccctctcttttggctgggccggagcttcttaggcagagatctggagagctgagccttttccattcagttcccaccaatgcacttaggtggatgtagttaaacatttatggaacaccatgtatgtgcaatgtcacactcttggacttgcttacagttgttctctgcccttacaccatggcaggcaaccgtcttaccaccgtcattactgttaattgagagaggaacactaatgccgtatattccctagattttacagtttacgaattgctttcctgactgctttctttgatataaaactcttccttagactctgatctggaatcactctttatgaggattggcaattttggtctaaaaataaacaatctgcaagtaaaaactagacacagttttagagttgggggtagaacttgaaaatgtaaatgtttttgattgcttgtgattgataaataggatttatagtactgaattttggaaaatggtatttaccaaattattatcttcaccttagagaattgggctttttttttttctttcacaccaaaacgtactgaaagaacagaccttgagaatagaatgaatcagcagaggaagcacctaaagcagaaagaagcttttacagcgaagactattttgggaatttggttggttccctttgtgaggataattcatcatttttcttctttttttttttttctaatgtgcgcagcattttgttaaatagcattttggtaaattgctggcctccaatgtgattacaaaatgaattttctgaattataacccaccaaacatttttattattcaagaggcaggtgcattatgaagagctagaagttttttttgaccactaacttgctaacatttgttggtagtcctaattagttggcattagttggctcttggctaacgtccatccaggaggtgg

SEQ ID NO: 35595 - DNA, 1050 bp, Homo sapiens
gttttttaataaaggaaacttgtctaagtgtaaggaaacagtaaagggctctgcagctcagctttgtgaaatgatatgcagtgatgtcactaaaatccaccttaggtctgagagggggccacaccatggtgtcactgggaagcacaagtgcacacacatgtgcacacacacacacacacacacacagagacatacataaagcccatcttccaaaatactaggcctagaaatagcactttacttatgactgtaaaaccagcagtctcatcagaaagagtgacaaagatgaacagcctgttgggctcctaaaatctgtgggcttctaaccggctataacacagagattttttttgagacagggtcccctctatcacccaggctggagtgcagtggcatgatcattgttcactgtaatctttaattcctgggctcaagcaatcctcccatctcagcctcccaagtagttgggactacaggtgcacaccactttgcccagctaattttgtttattttttgtagagataggggtctcactatgttgcccagctggtctcaaattcctgggctcaagcagtcctcccacctcggcctcccagagtattgggattacaggtgtgagccacctcacccagccatacaacacacaaaatgtttaaaggccctgtattaggttgctggggctgccataacagaggacctggaagtccaagatcaaggtgtcagcagggctcatttctcctgagtcctgcctgcttggcttgtagatgctgtgtcctccctgtgtcctcacatgaccttccttctgtgtgtgtctgtgtcctaatctcctcttcgtgtaagaacacagtcagattggattagggcccatcctcctgacctgactttaacttaattacctcttaaaaaccctgtctccaaataaggtcaccctctgaggtgctgtgggttaggggttcaccatgtaccttggtgaagggaggagaaacaattcagcccataacacaaccaaacaggcatttcttaaccagttgctcatcttgtttctgcaac

SEQ ID NO: 35596 - DNA, 1070 bp, Homo sapiens
ctagaatcagaggttgttgctgccctagatgtgttgatgtagtcgggaggggagaggacggctggccacaagtgttagtcctttcttctctgccagtggttcccaaccctggcagcacattagatgccctgaggagtgtgcagattatttcagtaccagggctgtcccctcaaagactcagactttgtggtctaggatcaggccctgacagaggctggtccaaagagctcctcatgattctaatgggcagcccgggttggaaaagctgcctgacgctggccatggtccacctcctccctccccacccatctggcagacacagcctcacccaccagtaaccacagcccagagcttcagaagtggtgataattaatccccccaacctccccaccccacctggctcacactccctgtcctaggtcaaccctgactcagcgccttcaaagcccgacttctgtagagatgccatcctaaagccagccttcctccctggactgcttatgtagactacgagggagtgtaaaccctgaaaaagaaaatgtagggatgattccctccaccctcgatgagacgcagctgcggagggtggtgtgagcagaccctccagagccgtggctgacaaattaatacagcacgggaatcgagtgcctcccgtcatgcaggaacttcctaggcatcattgggggatcagatacacatcaagtgcctgccacagggaacgtaccctctaatggggagaagacaaaacccttcacatttgcttttgacctgccaagtggcttcacaagtatctttttgttaatatttaggaaatatccatggatctgacaatagacagtggcctgggtatatagtggggacatgggcacagtggggtcctgggatcagcagggtcttcagaaattccaagtgatgttcttagaggaaacactctacttaagggtgattgagactcgacattaacatggggcattagtcactcagtgttttttggaatacggtttcattgctgataaatggaaaggccaggcatgcccccacactgaccaagaagttgtagtaatggcaga

SEQ ID NO: 35597 - DNA, 1802 bp, Homo sapiens
actaccagttatggctaatatgttacactaacaatggtaatctgaagggttgcaataatactgttcagtcaggctggggctcgtagtgaaattttacggtttattagccataatcatcttgcaatttttttcctttaggttttggcttgtggttaacgggcatgttgataaacatccattcagatcatatcctaaggaatctcagaaaaccaggagatactggatacaaaataccaaggggtacgtacagaaagtgaagaatttctgtgaaagttgcttgccatggttcctggctattttagtgttgccagctctaagaagtagtagcgtagtagttattagctacaagttttcagtgtaagtcatcattattaataacaagtgctattgttattgtcttattagaataacaaaagacccaaatctagctaactgaacagttattaaacaaagcagaaactccagttatatctgtgcttgggaagagaggatgaggaagaatttatgattgacgaggagtgtctgacacttttgtttctagcagtataatggaatagatactttgaccctcctctgaaaacagtttaaaacattggaatattttgaaaatcttcttaaacgcatcagtatactatcaagaaaggaactaatcatcagaggacaagatctaggtgaatgttggaatctggagcgtgtcttttgagaatttgtgatgaggcgccgaccaccatgctggtttataacccagattcgcactacttgtatagtatgaaaaatctcaagccataaattaatttccgtggcctggggtagtggtggactctcctggccagcaaaagcccagatccccaaggggatgtgcattcaacctgagtctcaaagaacccaatgtgccacgttccacagagtaagaggcacggtcacaaggtacagaacccacaaggaagtacagcaccatgagggagagcgtaattcaacatgaaagatttcagatgttagaattaatggaaacattataaagtgagtacttgaaatgctttttaaaaggagtagattacaattaggagtaagaagcaatgtaccataaaaggactagaaaccaatagagcttcagaaaaaattttttaaagtacataaatctaaaactttaatggagaaagggcgtgacatcacttagtttgaaattcttccacttatgttcctagaaaccatatgagaatagcaacaaaaacaaacaatgctacaaacctcaaattacttaaactgtgaccctgagaacctggaatcagcaaagccagctccagacgtgatggtagtgtgatagaagtggcagagaagagaaaacatgacagagtcctagacaggctgctgatcacctattcagcccctgggtggattggggaagaatcctctctttggtgttgggcttatgagcaaactgcaccctcatggggtcatcccaaggagccgcttcctctggcaggtacagtggctgggagagcacagtgtaagctggatggtggccccctcgcttcctgcccagcacccttgcatggggaacagcatgattccaaattaatcggcaagtgttcatcccctgaaggagagggccctgtcctgaggaggagctgccatgagccagactaagaagggacagggcacagtcctggggaaggcagaatgaaaaggtgcagaagataccagaagccacagactggcagatttgagaaacaccacttccaaaagaaagggcatccccagagacggcaggatcccatgggagggccctcctgggccaggct

SEQ ID NO: 35598 - DNA, 1098 bp, Homo sapiens
aggatgtcaaggctgaagtgaatttagagaacatctttctaatccaatggatgaggaaactgaggttcagggagcagagtctgaggccagccaggagccccatctcattgacgggaagagatctcaggagcaacgtgggatctttacctgccctgacattggcgcgtgtccctgacaataaatgatggagactgggcttagcaagcggccagcctggtatgcacatttactatgtcccctgagccacccacttcatccactcaaaacatctaatcgaaatctccaatgctgctgatgctacgaggtgcaaaaatgtataactctgtcctacttcatggagtttatcatcttttttgggactaaggacagagagaaaaagctaaaagaagaatagattgatatggtatagtgggaagagtacctaggtgtacttcccagcctcaccacgagtttgcagatgcaaaggatgattattggagataagaagaagaaaggtcatatctgaagtatctctttgtctaattttttttttaagacagcatctcactctgtcacccaggctggagtgcagtggcacaatctcagctcactgccacctctgcctcccaggctcaggtgatcttcccacctcagccttccaagtagctgggattacaggcatgcaccaccaggcctggctaattttttatattttttgtagagttgtggtctcactatattgcccaagctggtcttaaactcctggactcaagtaatcctcacacctcagcctcctgaagtgctaggattcgaggcgtgagccaacgtggctggcctctttgtctaatacttgaagaagtgatagcataaatgtgagctctaagagcagcgccccgcattcttcgagacactccatcgtgccagtggcctggtattttcacgcatagacagtgaggagagagcgagatcagagagccacgacctacctaaatcccagagctgctgagaaaaacagaggggtctgcggaaagttgagtgagtgccgaaggcagagagggtttgagaaggaggctcaatgccaggcatggcagaaaacactgtgggccaggaatgggcctt

SEQ ID NO: 35599 - DNA, 1104 bp, Homo sapiens
tttttttttaacaaagagctatcaagccatgaaaagataaggaagaactttaatgcatattggtaagtgaaaaaagccagtttgcaaaggctagatactatatgatcccaactgtataacattctgaaaaaggcacaactatggagacaataaaaagaacagagttttggatgaagggagggatgaacaggcagaatacaaacaaattttagggcagtgaaactattattatgatactttatggatatagaatattatgcatttttcaaaacacatagaatatacaacatgaagaatgaatgctaatgtaaactctggatttttattaataatattatttaattaaaatgatttattttacttattttcattattatctaaaatgttatttaattattaaatttagatgctacttaatttttgctttattattattatgttaatatcatcaactgtaactagtgtacaacactaatgcaagatgttaataggggaaatcgtgttggagagagagatatgtgagaactctgtactttcttttcaatgtttctgtaaacataaagctgctctaaaaaattaaatctattaaaaaaaaaactgagtggaaaaagagcgttttgctcattggatggactttttgtcctccatgtgatggagtcagctggctgggcgtaaacttgcagaaggtgggagaaggctctgccagcctcgcccctgaggtttccatcctcccgtgctctgattcctggggttatgctctgttgcctctggtgagaggtggtcagtaactccatgagctgcttctggtgcctttgtgctagacagattttgcaaaggcaggtgtgtcaaccacaaccagaggccaatttccctggagtcagatttcagaccacatgctcctctcctcctcacaatgtagtctcctccccaggctgagccctgccagaggggagagttaggactggtgggaagggcttgcccccttggctgcaggaagctcaggtggcaccttggggacaatcctaaaaagatgctcttcttccagatgcctcacatctacctgtcagaaaattgtcacactgttctgatgtttcagaaaactca

SEQ ID NO: 35600 - DNA, 1034 bp, Homo sapiens
ctttaaagcgtgtgatacactgtaatagctgcatgttctgtaacttatttcacctggcttgggctacaagcgataccttctaaatttcccgaagtgtaaacatgcagtgcagacgccggcaggagcgcagactcctcttctctccctccagttcttacctgtagaactttctgagagcaggtggttgggagcagtttcttcttgatgaatagcaatatatacctaagggctcgcttggggaggacctttaggtttccagcctgttatgtaactggaatggactccgtttctcttagcactagaaaaaacaggaagacacgtggtctctgccagtcttgggttgtacctctgctcttagaaagtggtagcgcatcaggtcccatgcacctcacttgggctccccgagctgtttcctccaggtaactctagtcaggctcagtaggtggtgttgcttttgttagtgaatgagcccactaggatcaggtgctgtgctaggatctggggatctggggcagggacggcatgggagacacagtctcatgatcttgacccaccctgaaacctgcctgcaagtgccccctgcctagagcacaagagtaccctgctcagttgtgcaggtcccctctcacgctcttcgtcacccacgtccagtctctcatcacatgctgttcgtttggcccttttaatctctccacacctcatcctccctcatgcaggctcttgttacttctgtggagattgctcaagcagccggaggtgcctttgatgcactctggtcctgcttgagtcctttcccatcacaggtaatggggcaatcttctctgccagcaggtctggtcagattccccttcaccctgtgatgtcacctcccccatctccaatcccccacattaaagactaaagcctaaaactcagcaacacctccagggctctgctgctcagatgcccctaggtcctggctcctggccccaccccttgccaacccgttagaacctagctgtaaggcagtatggtgtagggcatgagagggctct

SEQ ID NO: 35601 - DNA, 1116 bp, Homo sapiens
cttttctggggaggagttttctgcccttggacactttgcctggtggcttggccttgtgagactgccagtctgccttctgcttcaagtaggatgaagaaaaagcaggtgaaagaggacagggattggtgcaagaaccttcagaggagaggaggtgaaatgcttcttttggctctggttcttgaatcattgtttgattgaaatctcaagcctttgttttgggagtggtgtgcttagcgtgagctgtgctatctacctgggcttctgacctagagatgttgggcaggtgtttggacaggccctgggccctttgcatcccagcctctggctgctgtcacttgcaagtgctctcatcccctgacccagcagggctttgggctgttgttactttgtcatggtcgttctagcagctttggaaacctcttcaggttaagagtcttgcataagtgagagtgggagcatggccctcagatatttggccacatccttactggtgtgttacagagacccaggaagaatgtagttgaacgaggacacatgcaggtgtcccgggccctgaacagcttctattcagagtttggcctttcgaaggctgtgccatctcaggtgtgcctgcagtgtgcagcaggtgtatgcagcttcctctttgcaggtttcttggtatttaatctcatcctttaatatcttctattaactcaaaggaaattctgttcttagtttgaagtctgagagagaccgacgactgtcggcataggacatggtcagccatgccccgcaaggcgtctggtgagagtcgtttccaacttggtgcatgtttttctcaattctttcttgcgaaggagtcacagcttggaggcgcaaccaggatcccccctctccctctagcctgacctcactgacataaagtagagcaggtgtgacctgtccggaacatccttgtgatgctcagcagggcctgctgcagagcacgggaggcatcactctaggggcctttccctcccatactttcctgtgagtgtccaggatgcatgagagaggttgttgtgagacctgccttaaagggtggcggtggcacgtgtggaccttgctttctgagtttcactctccgagtcccagagg

SEQ ID NO: 35602 - DNA, 1958 bp, Homo sapiens
ctggagagttggaggttgcagtgagccgagatcgcaccacagcactctagcctggtgacagagcgagactctgtctcaaaataaataaataaataaataaataaataaataaataaataaataaaagtttgcaggaaagccgtgtgaatatatgaaaatacagtgattgaaaagtcctgttcacgaggtgtcctgcattggctagtttaggaaaggggtctttcctatgcaggtgggggttgatgacttacccaagagtcacctctggaacccagttctcttaagttgatagcagtctatctttgctttgcagaagatgtggggaacacttgtcctgcaagcccaggttcgtagcaatgttggcttccccagaaccttggcttcagagcactgtgcctcctttaggaggcacaagaaaactcccacacggttcttccctctgtcccttcctgagccccctgagtgtttggctcttgtggagttgctgctattactaagttgatcccactgccctcctgagtctcctcagggaaggaggggctgtattgtagcccgcattcttagtgccaagcacacggtagccactaagtaagtatctcccaagaaagaagagcaggaggaggatctgccaactcaggagagcaggtgggggatggcaagtcttcggagtattcataaaccaaatgctaagggaaacttttgttgtttgtcttagaattttaaaaaataaagtctgttgcagtttatctgctttccttcctggagagtggctaaactagtgttctgttttacaatgtagaatgcaaaagcagaaaacattcaagaaaattctatactgtatttgaaaaacatcaccatttagttttaactgctctttgtttcttattataaaaattaatacctaactatgaaaagttagaaagcctggagaagtatggaggtgagttgtccaccattgggccactagagagtgccctatgagcctgtccctggtgtcctggactctggtggtgtgcactgcatttgctggcagtgagccagggggtgggccacatctgggcccgggcggggtggatctctgcagaagtttatccatctcttggctgacagggtgggcgagatgggagcagctctgagggtccctgttggcagagaatgtctttgattatcaacaacatgcctttttgttgtgggcttgtgatccttttctttcctaaatcagctgccgtgcataaccagttaggctctcctgtggcttcagattggagttagtttcccaagtgctaggatgtgggtgttaggtgatttctgtctttccgtttgaaagagatttcagatcattgtaacatttctggaatcctgtcgatctgaaggaatggctaggatgtagtagtttaagggaaatgaaaagtcgaatgtattttgatgtttctgcatcagacctgctcggtggagtccatttctcagcttcgggagccacgtgcttggctcttgagagcctagctccatcagcccatgtcacacactcacaggtctggctttagctggtttcgccatggtttctaacttgagcctcagtttccccccctgtgaagcagagcctgtggcacccacctcagagagtacatgaaagacttggaagcactctgtgagttgtcatgcgagagattaaaaaggccaccgctgcccttttctcctctctttaaggaaattgaaaccaaaaattaagtccttcttgccagctggacaggaaaagcctttttcttggtttttgaaaatacaacttccactttcagaccaaagtgaaaactgctaaagactgaatattctgagtcttgggagtggggggctagaggggtgttgtgaattgaaagatacctttctatttttaaaacattttaacaatgccttaatgatgaataatgtctgttctagttttgcatttgttagtttttttt

SEQ ID NO: 35603 - DNA, 1050 bp, Homo sapiens
ggagtattcttagaagttgcattctatgaagagtggagcatctgatgagctgtttactcgctgtttcatctgacggcagttgaaagacaaggcaggactggcagcgcagctgcctcagtcagcactgctgcactgggggcttgacctgcagtctcgcaatcctggactataactcattttgaagagagaaaaattaagcattaagtgattcaagcgtcttgcccaaggcgctactagaaaataaaggcactggtgcccagatgcaggtctgcatggtatgcaagcctgggcttcttcccacctcccccacagagagggcactggtatgttggagtgaagagccacgcaagacctctgtgaatgggcagagatgggccagtgacgcaacacagtaaagtgtattttggttataggcatcgtctctaaacttatgtaaaacattattaaaaaatggaaggacaacgatgaaatgatggccaaaaatatagaaaaggataccttgcatgtcctgtgaaatgcaaaggaattctaaagtgtcattatgagttacctcatggaagaaagcaaaaggtgaatctatctagagtttgtggttctgactcacaagagactgatgttcatgctgaaggacgagtgtgacaggtggaaggatagagcaccgagaccacactctaaagggtaggaatctatgggaactattcagggagatgaaagcatggaatgaactgaagcttgcagactcgttgagtaaaaagcgcgttttaggattggttttagaataaaataacaaggcctgtggttggggaagatgacttgctgttcacagagcctcccttaataggtggggacctcagcttttcctctgctgccatcaggtgagtggtgtacagtcctagccacagtagtaatcaccactggcctgactgagccctcaccctttatacagtgtctcctgccaccctcctgggagaggctgttctcggcacagctggcctggggtcacacagctggtaggtgtaaagcaggcattggagtccaggtagtctcact

SEQ ID NO: 35604 - DNA, 1076 bp, Homo sapiens
tgcttcaaagctagaggttgtttctaagagtgcttcgtgctaactaactaaaacataatgacattgtttttgtaaaactgatccgtggtttgttttttaaagcagaaagctctaaagtcactcagtcccaccacccagaagcacaagcaggtggctgccactgtaggacctctctctctaggctcgtgtagatggacacatggattggtcagtagaaatacttttattaaaagtcttatctttacataaatttgccaaattattaattttgcttgaaagggaaaggtgtccaacttcagttggaaatactagtttctaagagatactgctgagactaagagcataaaacatgatgaaaaccttaagtggctaagtgcagcaacgtcagagtaaaagctttgatgaagtcttggtttgcttgggctgtgtaggttggaggctcagcctttgtttctccctcctctggtgcccagtggtggtgtttgtgtccgtgaattttcaacctctgtagtttgtttgtagttatgaccactgttgcaccgaacccttaccgagggccaggccctgtgctaagcacttgccagtgtggatttattaagtcttcatgacagcaccatgtagggggagctgcgtccctgtgttgtacttgggacgcgatctgacctcaggcacttcaggctcctgaagggtctgcagtctcgtctctgcctgggaaaccacgatttgcagcatattccacagacctcatgctcatcatcaggaggcttcccgggactgctgcctgagatttctaagttcctaatgtggttcatgcttctggtgagtttctttgaggcgacgccccctgcgttgcctctggtcagctcagtcctgtggtcctgcagggcatcctacagtgtcctctgtctgtgacttgtgccgtgccaccttgacctggcatccactgtcctctaccgcgtttgcagataggagccactgttggtgcctttttgtcgtgtgtgttgaatggtcagggtcccaaatagctgattgggagcactctccttgaatctgccatgtgcctgggtctcaggtga

SEQ ID NO: 35605 - DNA, 1031 bp, Homo sapiens
cctaccttgatccccagctcaccaccctagtgcagttgcttcttcgctcttgttccactccttgtcgccatccaccctgtgctttctcgatgtgtccttactcggtgtttctgtggagcagggcatcctgggcttcctttctgatccctggctcctgtgatcttccgtgctgggctccctcttcccttcccttttccactgtgttgccctcacacagctggcatgccatggatgtcgctcacccaagcccttcctaatgttgctcaccaaaacccctcccaccttgcccctgggaccttctccccttccaggctgcatgcaggccgagggcctggcgtctcagcaggaggcagtggggcctttgctggcacctgggctctgcatcctgaccttctgagggcttggtcctttaggtccatcttgaatctcctccaggcttcggactctctgctctgtagctggcccatggagacgggtacactcaggcctggtcttagactccgctgcttgggctgtgctggtgcctttggtgccctcttagtccatcccacctgggggccctgtcctgctgtccattgtgccagagtgctgtccccttgtctttccgtaactggctgctcgttacctttcccatctcagcctcagtaccagccacttggtatcagggaggctctccctgaccaacctaaagttcacagccgtggttgccagtttaaatttctgcatagcaactttttggtttattttggctacttatcttccccatcatgccccctgtccctcccatataaactcagtgagagtaggggccacatctcatcatcctgcccacagctctgctgtctgtatcagccagggtatgctgtgcagaggctcacggtaaatagctgcagaccacgaatcccatctgcttgctgtgctttaatattggcttacatctttggatccagtgagttcttttctctgtctccctctctctcactcgctcatacttactttgtgtaattggtgatttccagccttttgtatag

SEQ ID NO: 35606 - DNA, 1128 bp, Homo sapiens
ctgtatcagtaaatggatactttaaagaggatcattgatccctcaaaatagaagcaatgcagtcattccctcattatgctttacttgtgatttgcttacaacccactcttcctagttaaagttaaatattaatccagaccctatcagtgcgatgtagtagtgtctgaatcagttgttgttttggtgtaatcgtatcaaagcatgttataaaatctacaaaattgcagggttaactccaaatattttcactaaggtattgtttttttgggcaaaaatgcatagtgaacattgtggagctgaagtgagggaacttcgatttctgagaaaccactagttttaagggttttgaaggaagagttggaggaggagaggaagagaataaattcacagttaatgagtttccagtattttctgtcgcattttacgttgtaatggaaaagactgggaactgaactcacatgcagtttgtcaaatcactttttccctagaattcaggattgatgagattaacggggtgttaaaggtaaactgaggcacataattaacatggacagaactgtagacctgagtgttgagagttgggaaatttcagtgagttgggaagactggaagcacctgttcttcagagtgcaggtcctcatattcagtgggtttaaggtgctgaaactttttttttttttttgagatggggtcttgcactgttgcccagactagagtgcagtggtgtaatcaccactcactgtagcttcgaatcctgggctgtcagcctatcctcccacatcagcctcctgactagctggactgcaggcctgggccaaaactcctggcttgaaacttcttgtaaccagattggaggaggagggcatgttcattttcgtgacgtttcctttcccttaaacatccagtgaaatctgacctttgaccatcactttgcttaaaagaagctactggatttaaagtctaggagaatgtcctagacaagcccatagtatgttcctgtatgttccccacccagagacctgcgttatgaagtgtttggtgtgcttcttccagccccactgttctttctaaagtgttttattttacatacgctgtcctggcttctgggctatgacctttgcctttttt

SEQ ID NO: 35607 - DNA, 1260 bp, Homo sapiens
gaaaaaatattttaatgttgggctctgttaacagctggactggtggctgtctgaattgggaccatgcttggggtgaggttttttcttacttttttttttttttttggtgagacagagtcttgctctgtcgcccaggctggagtacagtggtgcaatctcggcccactgcagcctctgcctcctgggttcaagcgattctcctgcctcagttttctgagtagctgggactacaagcatgtgccaccacgcctggctaatttttttctatttttagcagagatggggtttcaccattttagtcaggatggtcttgatctcctgaacttgtgatccatccacctcagcctcccaaagtgctgggattacaggcgtgagccaccgcatctggccacatatttttttaaattaaatgtgatacataaaattaggctgcaggcatggcctgatttgcaggtgcttcatgagcaagcgtgcacagcatttatttgctgctcctggagtctctcgtgtgtgcttgtagcctagccttaagccctctgtggacggcttggaatgcgtactccaaatgactcttttggcggggtgggaagtggcaatactttaggtgactgacagttgaaattaaccttacacaagagccaaactgtaggctgatgcagggccactcacctttgtactcacccctggcaggtcctgtaagaggtgctacttgcttccactttgccagctgttcgttggccctgttttgtcttctgctgtttgccttatttatgaaacagaatggaaacaggcgagtttgatttgttataattcctaggagtcatagaatggaagcaggtgagtttgatttgttataattcctaggattggataatttgccttcccctctctccatctttaattaatcccttaaaggaaaagaggacgacagcacttttcctgcagtcatctgtgtaggcctcagccttaactcatgacataggctggtgccactggccacagggctgacctcagctcttggagcccatggggtgacaggagatcagcacctttgaggtggcggcgtgaggcgtcttccaggccttgctcatggtgcttgaaaacactgctttagagctttgttaagagagagaggccctacttactcctgtcccacaggcatttgggtgttgacctccttgttggcctcttaaggagagaatacttgagtattgaattcgatcagcttttctgcctccagggaccctgtttctctctgct

SEQ ID NO: 35608 - DNA, 1035 bp, Homo sapiens
ttgctgtagttcatgaactgcacttcacctccttaggggccataggctagtgggattgtgtcttggcctttgtgggagacacaggcacatgtgccttggtgcttatcctccccacacgagtgtgtaggctgtggcgaggggagcagtggctgacgtgcgttttcttctgtcagcgacatagacctggtggtcttcgggaaatgggagcgtcctcctttacagctgctggagcaagccctgcggaagcacaacgtggctgagccgtgttccatcaaagtccttgacaaggctacggtgagtgcctggctttggcccctctgaccgggcaggagccttgtcacatcccaggtggtcacaggatacgcctgcgtcacgagcttgtggtattttacacagttattggctacagttttgaagattaatctgcttctggtatagacatgtgttttatgtttttgtttcatagtcgtgatcaccaactgagaacatgtttagtgacagtctgaacttttgggacttgtgagcccattaaactgttcttggaatgaaaatatatgattgtgtctacttgtgttaggatgaataggaaaggagagtcatctgaaaccggacactgacattcaggtgctgcccattatggagagtgtggctcaatgattaaaccatggtttttatgattaccatttgctatgttatgttaaagaggaacaacttagctgttcctttcgtggttccaaaaaatatacatatatgaaaagccttttatctttgggggaagtttgaagatgagactgtttctggtgtgtacttgctaaggtttatgtcagttcaagattataagccccccagggactatgaggtacttgcctgttgtatgacagttcttagctcacctgtgcgaccggctagcatttcatttttaaatttgtgtgtcaacttgtgtgtgattcacatccttatagtgtttagcagaatgtaagttaaggcaggagcttcctcctgcctgtgtggtgataggggagggggcattcacat

SEQ ID NO: 35609 - DNA, 1060 bp, Homo sapiens
gtattagaatcaaagaaggaggtgcctatatcgccaaagaggagatcatgaaagccatgaccagcgggtacagaccgtcgatgctgtgcattgaggaccccctgctgccaggtaagggcgccctgatctccactgctgagagctgggccagcctcggggacgtgctggtgacagggcctgtgttggggctctgagagccccgggcagttcatttgctcttgatgcaggtttctcttatactaaccagttaataatcacactttgagaaatccttatttaatgcttctaattaacttttgtctttctaactgtttacattctataataaagaagaattaaggaaaatcttttctttttctgattattgaagtataacatatccaccctaaaccatttgtttctctgaagtatgtaatatagaaaaaccatggatgccataatccccttttatttggacatgtatttctccactttttccctatatggatattaatgtttattattgttatcttgttgaacacatcccacaacgcaaacacgtttgtcacttggcttttgacttaacgcttacccttgaccctttcctatgtgtgtaggttgtgttttgtcgtgaggattgccgcattgaagagtctaaggctgggctagaggtttcccggttttattcccattggcgtattcaggggtatttatgtcctcattcctttggtgacagtcttttaaaatctttgccaatctgataaaaccatgtgttaacgcttttaaatttatatttctttaatgattagtggggttaaacacattgctatttatgaattccacaaattttgattgagcgtctgttaggtgagataccattcttactgttggtgataaaatcgttggcggacgggtgacagaacaggtggtggagagcccagctccaggcgcgtgtccctgggccttctcctctgtgtggctctgtgtgctgtccgcccggttgctggctgccctcctctgctgtgtgcaaggcctgtgtgtgtcggggaagcctttcttgtcacacatgtcatactttttc

SEQ ID NO: 35610 - DNA, 1050 bp, Homo sapiens
ccacacatagaatttcaaagtttctaggctgtgtcaaatgtgaaaagaaacaggtgaaataattttgatagattttattccactcaagtcaaaatattaacatttcaacatgtaatcaacataaaaataattaagatattttatagctgtttcttgtactgtctgaaatccggtgtgtatttattcgtacttatagtacatcctaattaggatgctaaattttcgtaaaaaatacttgatctatatttagattttagaaagttcacagttgaagatgatttgcatacccaagttattacaaacatgtttaatgttttccaacaactaattgaatgtaatttttaaaattaaattaggcaaaacctaatgttgggtttgttagtcacattagcagcgttcccggctcagcagagcccgtgactgatgctgccggggcggctccacgccgcagttctcaggagttattaaccaaggctttttccctccacagacagcaggatcaagatcaaagagcgaatagccacatgcaatggggagcagacgcagaaccgagagcccgagtctccctatggccagcgcttgactttgtcgctgtccagcccccagctcctgtcttcaggctcctcggcctcttctgtgtcttcactttctgggagtgacgttgtaagtgccctcccctcctccgtgtgtctgttggacagtttgtgtctctggtaaatgtccatagccgcgagcttaaaatctcccccttggttttgctcaggttttgtttccttgtatgtgtgtggaggtgggtggggggcagccccgtgatgtgggcaccaggcttcctttcccctgccgtgaaccttcagaacctgtctgtgcgactcatgcggctgtcgagggcagtaatcctctaaatggttgaactacagtggacttccttgagtagtttttaaaaatttatttgaagattaaaaaaaaaattaaatccaagtatctcttctgtatttcctttaacattctttttcagttgtgatgaaattacttgaaggaagcctgggtagg

SEQ ID NO: 35611 - DNA, 1569 bp, Homo sapiens
gaggaaaccaaaagctatttaagactgttgtgaatgatactgtggctcaagttttgttcaggttcttggcttgtgccacatcgtttttcaggtaggtggtaatactctcatttttaggataaaggagctgtggtacggatcatttggggagcttgtctacagggttgcacttaggaaacacagattcaagcccaagtagtttcgagccgatcatctgatttctgagccatggaattagagtttcattcgtacactctccttaatttgatgaattcttatttaggctcatttgagattagtgctgaaaacaaatttagaaaaggccatttcatattatgtgtgggtattgttgcattgtttcttaaagattgagggagaattaatatctttaggttgttactgcttcattaaaaagaggatcttttttcccccatttttcagtttcactgttacatgccttgaagtgatgaggaggtttctgttactatatgctacacagcagggacaggcaaaggccatcgcagaagaaatatgtgagcaagctgtggtacatggattttctgcagatcttcactgtattagtgaatccgataaggttagagccgttacagtggattttaccgttttgtgctttgaagaattttggttgggaagtgatatttatgaaacaaaaggacactaataccaccacatagtctttgttttttaacagaaatgtgtttgttcaatggtatagtaagatatcaccagcatttttttaatatagaagtgtgtagttgaattagactaaatggtctcaaaaattgaaacaagtaacaactccttaactgtaaatgacagaagtagcatatgctgtgtctgtttcacagggtggctgtgagaacaagtgagatgtgtgtttgcctgctcaggtgtgctttccacctcttgaatctcagtgtcccacttttttccccaaaagaaaggccttgccgtgcgtgttagagttcctcctgatgaaggaccgcctagattcttttgtgaaatagaatttaaagtagtagtgtaaggatctggaaaaaactcggctgcttcttcagggactagttgtttatgttcagtctctgcagaagttcctaccttagggtatatgcaactttaccatcttgtgttcttttatttagtttgctgcctccagattatactatttcagacaattcaggcgataacagttggcaggggctttataccacaagatgatttgccagccgctaagcagttaaaattcacttcaacatttcagagactgtcctgccagtgctctctcacccaagtgcacaaccctctctggcctttcctaaaactccagttcagaacactagactgtgtgcagctcaagtgaattataaacccagctcacggaaggagactcacctagttcctttatgcagccctgccacggtaactctggacaccagagaaaagggagcttcctggaggagactgccagtcagcagactctgtcattctacagtaacttaagttcagattgcagtgccacatgatgaagtatctgaatctgttactttg

SEQ ID NO: 35612 - DNA, 1027 bp, Homo sapiens
atataggttttgtctttcttatgtaaatattatgtatatgtatatataaatgtatgtaatgtgctaccttttctgaatcttccccagactttaccccagagccacacctctgcagaacctcttgagtagcattttaattaaggatgcacctcagatgcagccatgaaacattttcagaatagcagtggctgggcctcatcctaaacctactgaaacagtccttgaagaagcaacccctcatgccattcctccatttagaaaagcagaacaaaacaaaacactcccaatgattttgataacttctctaagaacgattctcccagaatgaatgattttcatttcccagctacacatcaggattagctaggggagtttttactaaattatatgacttaggcccacctccagtgattctgatgtaattattccaaggtagggccctggcatcgttatttttaaaagctcccaggtgattctaacatatgtatcccaggttaagaaaaactgacttaggactctgtgaaccatagtttaaaaatgttaaaggatcaaaagaaccagatcagcacaatatgataccagaggggaattgagggtctgcattcctgacttgtgacctatgttgttttatctttgaggattattttttggagagggtatctagcaaggatgggttgagtataataaataactgattagaaatttgagattgtaaccctggcaatgatctgtcatatataacatgttcaagagagtatttcacagtatttataattttttttttaccttaagtttttatactttctgtattttcaaagagagaacacatacttgtttgaaaatccagaaaagacagaaacagaagcctgtcccactgttcgagtcaatgttaggcctaagcgtggaaccactcatttctcacccttttgtagagaaagaacatggagatgcctgcacaactgagggatttaagcttttttttttttttttttttttacaccatgagacatagaagcaattcttgatt

SEQ ID NO: 35613 - DNA, 1034 bp, Homo sapiens
acaaatttagaatatgccctttgcagtcttaaaaaatgtgatcttgatagcatgtttttaatattagttcccaagggtgtgtgctatcatcgtaactatcatctatgaatctttttatgttgtatttgcatttaaatttttgttttctattgaaatgagggcttaaatagggctttttcttagtctaaatagggctttttctttgtcttacttttactagttattaactacgtagcacattccacagtgatggaggtgactgcagttgaccttgtgttacccagctacacattgctgctccttctttaattggtgacagaaagctaatgagagcgtaggattccccccaaccaccacttgccacttcctacagttgttaagatctactttgtgtaatactacataactatttattgctgtaacagaaagcttcaggaaaaatggaagggttttggtaggtaataatcaattattatgtgaacttggaggtagaataatccactagatgtcagtattgtaccaggaactgtttttttaaaactacttgtaactgatttcttctaaccagctcccggaagtggccattaatggatacaatttttcaaatgtgccttgccacacttgtattgtcagtgagcataaagagtgttgtaattaggccgccatctccccagtgtggttttcgtgtcgttttattaatgtgtttattgcatttctagtcttgggtgagtaaagtactttagagagaggctcagctctctaaataaatatatgtatatttatatatatatagatttatatatatatatattccatcttcctttcctggtaatcagctcgagatgtaatttgagtatttagaattaatttactgtaatgaaagcttaccgattaagtcacaattttggttcagctctacccttttaaaatttgtgtaaagtgtgtgtgtatgtctgtatatgtgtatatatatgtgtgtgtatatatgtgtgtgtatgtatatatttgtgtgtgtgtgtgtgcatatatatata

SEQ ID NO: 35614 - DNA, 1048 bp, Homo sapiens
gctacactggtttgtagcatatgtggttggggacaaatattgggcataccttcgtactgtgatgatatacagctgttgtatctatcccttaattggatacaattggtagtgacagagatccaattttagtaaaagtttcaacattaaactcaaacatcagtaattttcaacagaatgttaataagtttaacttcatatcagaacagaagtatttgatatgaaataagtaaaataaaattgtacttctgtttatatttgtgaagtaatgagcaagtcttagatactatttgtcagatagtagagtcctgtccttcggacagttattttatttcgttttaattttttccttaagcaaaagcataatcacagatgtctctgtctcatcagtgtgttcaccatttcgtagacactttacacattctgcctttaacagccctgagccacttttccatagtacaagttcatttattcataaaattgctattaatgttattgaatgtagagctctctctagatctcacagtgtgatactttgaattgtcctcattttgtgtatgtcggatgtagctgcctctccacacacttgcctagtgtggcatctgctcgagtggccatgacagcctgtggagagtaaaatgctaattaaatgactgaatgttcaaatgcagagatggattttacaaatccgtctgagtttgttggtggtagttcctaatgaaagagattggttttacatattctttatatcacacacctaaactttttttttttccacttagagagaaactccaagaacaacacccagatggaaattttggagcaatgtggttgttttttggctgcaggcataaggatagggattatctattcaggtattgtacaattccagtattgtactcaaccactgagtgtacaattctaattctcagactttttcagcttgacaaccttttagtgatccattatatattatatttcagaaaagagctcagacatttccttaagcatgggatcttaactcatctaaaggtttccttctcaagagatg

SEQ ID NO: 35615 - DNA, 1026 bp, Homo sapiens
ggtgagaggtagcattctagggagaggaaacggtagaagtaaaggcttgggcaagaatgcgcatggcacgttgtagaatggaagagccatccggttttaatggagcactgacttctttaacttacaatagttcccgaaggtggaagctattgaatgcccaacatggaaaatacgacgttatctttggggaagaaggggagccattgagggggttttgagcagaatttcagtagagctgcacttcaggcagcaaagcttgagatagaccgaagggaataaggaagaccagaggggttaaagaaaccagggcaggggtgcaggtaagaaacatctgagcaccagacgttgacagaaaatgcagaggaagggacactccgagagggccttcagggtttgttataaagtgaattcataatagaccattccactaggtctctcaggtgtccctgttcacttagtgtcttggaggtttacttacgcaaagttagaaacaatacagttcccctatggactctttgtttgacttagtgctagttacacaacctcgcggaacctccttttccagggggaggtgataggcctccgtcaagctgaagacttgacagtgatattaaatggagtgacttagaggggctgcacagtggttgatccacggtaggcactcagtatttgtttcctttctagaaagaaaaagtttcaagctaattgtattatgtattccattttattttccacttaacagggacctgcagagaaaataacatccaatacacacacctggtgtaacaacataactaaaactaggttgttttgcatcagccattttgttcaaactgcatgcatttgtgcccagaagtcgcacactctgagacagggttattttacaaaactggggacttgggcccagagcagttgagaaattgttctgaagagcagttgctactaaagagcattaccatggtcagggccaccgctgtcagagtcaaagccagtggtctagagcagcattctcaagtttggcatatt

SEQ ID NO: 35616 - DNA, 1584 bp, Homo sapiens
tcacccacagatgccaaaagtgagccattgcatctcacagcttcgcactgttggttaactcttaattccaccaattaaaatgtctttatgttcccccatagaaagtggaagatgcgaagattgcaattctcacatgtccatttgaaccacccaaaccaaaaacaaagcataagctggatgtgacctctgtcgaagattataaagcccttcagaaatacgaaaaggagaaatttgaagagatgattcaacaagtaagtcttaccagagtcctcagtggaatttaaactcccaaagggtacagttagttaggtttggttagtaaatatgtgtagtctttcttcagttctaaaacatacacaggaaaaaaccaaattgcatagaaaggcataaacagggaagaattctaattttgtcttaaaatggtagcgtgttcaggccaggtgcagtggccatgcctataatcccagcactttgggaggctaaggcaggcagatcgtgagatcatcgagaccatctgactaacacggtgaaacgccatttctactaaaaacacaaaaaattagccaggcatggtggcaggcacctatagtcctagctactcaggaggctgagacaggagaatcgcttgaacccaggaggcagaggttgcagtgagctgagcttgcaccactacactccagcctgggcgacagagcaagactctgtctcaaaaaaaatggtagtgtgttcagggtcctgaaagaagtgaccctgttacctaaagccgtgctttcaattgtacatattatatttgccgtcctggacaaatttaacttagcttaccttgcctttaagatttctgactataccttttaggcaagagttaatgagtaactggagttaaaccagaatgcactcatagtaatcccagttctttgctcagttaagtctagtttgggttcatgaataccttagcgtaggtgtgctttctctctgacatagcaactcctctttgggggctgcgtccttgggagttgaaaacaccagtactcaagaagacaggaacgtgggttggttagggtattatttatcatagcaaaccaactagagactattttcatgtctgttcttgggaaagttgttgaatgtactcattgatgatacggttcttggtgcctacgacataccaggctctgttgtaggcactaaaggtacagcagggaatgaagccaagctcgtgctcttgagacacagataagagaaaggtgggtacagctccattacagacactggtcagagaggtgacctgtaaggagaggccaacatagggtgagagcagtgcccctgggggaggagcattccaggctgaggacagatggggatgctcctgagccaggaacattgttggcttgtacaaggaagagccagcctcagggattgaagcatgctggcgggagcttataaataaaaggccatcatctgggccggtgggacagttttcatgagaatggtgcctcagctgtgctggggggccacagataaattgagaggccagggatgttactggatcgtgctggtgaggcgcaggttgctgagaatgagaag

SEQ ID NO: 35617 - DNA, 1537 bp, Homo sapiens
agtgagctgagatcgcactgttgtattccagcctgggtgacacctgtctccaaaaaaaaaattagcatttctagatctttcttggaaatatcttacatttcagctgtggtcagatggacttactttagatttcctaagttagggtatggatactttgtgggataagatgttcctgaaaaatgtcaccctgtagctagtcattgaagacagtgccctcccaacagctctctttaccaggtgcgagttccagagtgtccttggaagtaatgaaattacattcatctgaaaatgaaatataactgaaattagtggcttcctgcttggcttccaggagtttgtatttcttaagtcttactgtgattccctaaatcagaaagagttggttattgatagtttattgtatgctattttaggataatcagtgtccttgtatttttcagatatgaagcaacagcatgtcatagaaaccttgattggcaaaaagcaacagatatctcttgcaacacaaatggttagaatgattttgaagattgatgacattcgtaagcctggagaatctgaagaatgaagacattgagaaaactatgtagcaagatccacttctgtgattaagtaaatggatgtctcgtgatgcatctacagttatttattgttacatccttttccagacactgtagatgctataataaaaatagctgtttggtaaccatagtttcacttgttcaaagctgtgtaatcgtgggggtaccatctcaactgcttttgtattcattgtattaaaagaatctgtttaaacaacctttatcttctcttcgggtttaagaaacgtttattgtaacagtaattaaatgctgccttaattgaaggggtttgggtggatttttttttctcaaaataagctgtagggactattttaacagcttaaacaggagctctcaagatgcactttcatattgagaggaatatgggcttgatcctcttcctatctaaatgggtgggccatttgattgtagagggtccaccacagaattatgggatgccttaagtgctgttactaggttgctcacagcctaacctggcgtgttgtttagggctgatggagacccatgtgagcctttgctttcctctggccccggccccaccctgaacacagctcatacacagaatcaggaccagcatgtgcagagctggccaccagcacaggcttagggcagttcagaacccacttgtttccctatcagagggacacagtgaagtggaggttaaagtaaattacaggaaataagggagaaatcttgcagttaccatgttcagatagagtgactgaaattaattgtacttactaaagtattaactagctaacagtgatgggccaagacgctccgagaactctaccgggattgtctgttctgacaacccagtgaggcagatacactttcttactgctcacatcttacaggtgagtactcataattggccagcatctcaccaccagcaagtagtagggccaggtcaatcccaggcagtctgaccccag

SEQ ID NO: 35618 - DNA, 1031 bp, Homo sapiens
attataggttatttctttaaaaaatgcgacttaggttttttaaatctgcttagaaattttttggtaggagatattcaaagtatggccaaacataaaactaaattaaaaaaaaatcagtatcacctacttttgaaaacacttatactgttgtggttctgttttttatttattttattttattttattttattttattttattttattttattttattttattttattttattttccgagatggagtcttgccctgttgcccaggctgaagtgcagtggcatgatctctgctcactgcaacctccacctcccaggttcaagcgattctcctgtctcagcctcctgagtagctgggattacaggagcgcgccacctccctctgctaatttttgtgtttttagtagagatggggtttcgccatgttggccagactggtctcaaactcctgacctcaggtgatctgtccgcctcaacctcccaaaatgctgggattacgagcgtgagctaccgttcctggccggttctctgtcctttaaaaatatattttaatattctgagcaaagagattaagaatgttacaaacacatcaaccgtgcgtatagtaagtcttcccttccttttaaaaatagcacattgcttgcctctgatggtaccatatatgatagtctgatgctcagaatgttatgcatttgtagtaatacttagttccgacatggctgtttcatactaattgtttgctagattttaaagatctctaaagtttcttcagtattaaattaatttttgtaaaatcaacaggtttataatccattctcataatacagggatggataaatcattcttactgtgtatatgttatttgtatgagtgcagatgtgttatgtcaactgctatccatcctgacatttttaaacttcagagctataggagaccttagacatttgccctcctcattttatgggttaggagtccgatcctgtaatgcactgagatttctcagtttcagagaaaagtctatcctttggtcaaggat

SEQ ID NO: 35619 - DNA, 1148 bp, Homo sapiens
gcattgtagaaaaattggaaccttcatttgttacgctaggaatgtaagatagtgtgactgattttggtaattcctcaaaaagataagctgagtaaccatatgacccagaaatttcatatacccaagagaattcaaaaaatatattcacacaaaaacctgtatatgagttagcagtattatttataatagccaaatagaaacaacccagtgtccatcaactgatgagtagataaatgtgatctatttgtaaaatagaatattacccagcagttcaaaggaattaagtactgatgcatggtacaacttggataaatctcataaacattaggataagtgaaataagccagtcacaaaagaacatattttctatgatcctatttgtgtgaaatgtccagaataggcaaatctatatatagagaaattagtggttgtctggaactggggagagcagatggagtaggaagtatccactaatagttacagggtttccttttgggatgatgataatgttctaaaagattatggtgatggttgcgtaactgtaaatatacttaaaacaattgaagtctttaaattggtgaactttatgacatatatctgaataaaattgttaattaaaactactgtgagatatcattacatacctattagtgtggctaaaatggtaatagaatgactgaccgtaccaagtgtttgtaaggaggtagagcagttggaattttcatatactgctggtgggagtgtaaagtggtacaccacttcttctggggagcagaaagcaaccttccgggtacaggtgagccaaggttgatgggcagttatgcagagggagttgggatatcactgtgtgtacctgtgcaagtcctggagtgtgttgggtcctcatcagcagggctgtatgaaggtgttcattaaaacaaaactactgatagtgtggcaggagctagaaaacacccctttcttcttagatatccctccagcaccctctactggcaaagtttaactgcccctagccaaaagaaaagaaaagaaaagcttagcatccctatcactgaacagggactgaaagggagaatttggagttgagaaggggatacatggataactagctcattactgctgaaattgttggaatcattcattgcctg

SEQ ID NO: 35620 - DNA, 1001 bp, Homo sapiens
tgattaaaacaatatagaactctttcaaggccctgtagttggaaagagtccagtttaaatcctttaaagaggatctattgcagggcaagcctggtgctggcagccacggtaatcccactttcaatgtggtgtgctgaattcctggcagttaaaatgcttgtttttggatcttaacgtgctgccggggtccattgcaagaaagtccatgcctcttgtctttttggtaccttacgggctcttcttccctgagtttccctggagctgaagtgtgcacttgaagaaaattagtgttcaaagtagcgtgggctgcctggatactgctggtgggaatcatggaatgggagcgtggttctattttgtttgtgttggaactttgaggaagcttattaagcagggcagttggggcattagtattgcaccgctaggactcaaattctgggccagtaataagactgatcagagtgaaagtttttgccaaggatgttttcattaaccaagaatgaaggtgaaagtgggaagtttaaagatgttcaggtcctgtgtagttacgaacataaatgtgatgttgaccactgcattaatgcccatgacccactagcagcttccaggaaaccagagccctttgggtcgtggtagggggaaggtctgtgttcatagctgaaactgaaaggcaacagcaatagagacagcttaatttgactgaacatgagcaaccttacctgcttccagcacagacaggattgtcccattgatagttattctgtgggtgggggtgcatggcttttctacttgatgaagagattttgagaggtgacagcatgctggcagtcctcacagccctcgcttgctctcggcgcctcctctgcctgggctcccactttggcggcacttgaggagcccttcagcccaccactgcactgtgggagcccctttctggcctggccaaggccagaactggctccctcagcttgcagggaggtgtggagggagaggcgcgagcg

SEQ ID NO: 35621 - DNA, 1202 bp, Homo sapiens
ccacaaggtaaaagagataatggagatgaggaaacaattggtgtcttttagattgaacgagaaagctgaccatggtaaaggaaaagtctcatgaacctagacatattctcaagttttctggagctgggtagggtggcgatggtgatagaggtatagagattgtatgcttccagattatcctacaaagtaaagaaaatcagagtggcatcagacttaaaattagcaatgttgaatgctagaagacaatggaaactcaaaatttgatgtttttgaacctaaaattccctttctgcaaattactctcagattgaaggacaaactacagatgtttcaatggatgtgagggattggaaagtttactaccttaaacctttttgaaaaaacaggatatactttactaaatgagcaaggaatcagagagaaagatgtgagatacaaagaagtgtttcatatagctaagtctcaattgttaatctgcaataattaatagtttttgggtaacagcctggaactaaaattccagatgatcttaacgtgggagaaattgtgacgggaagatagaaattaaagcttttaaaattgcttatctcatttgtggggagattatagatgttctagatgtaggtagaaaaatacagcataactgtgcattaaaaatgtggactagacttataactacccagaactggactcaaaactacattgttacattattaatgacaaaagtgccaccacagatcggtggcaaaaagatggtcttttcagtaaatggtatggcagcaatcagatggccgtacagaaaaaaagaatcatatcattacctcaacctaacacagaaattaatttgagatgaatttaaaagcctgaatgtgaaagttaaaaagaaacttctaaaataaaatacaggagaataagcataaaacaaaatattagtaaattgaacataattaaagttaaaaacttctcttcatccttagacacttttaagaataaaaggcaattgaattctggcactcaaaaaaaaaaagaaaattgaaagccatggagtgagagaagatatttgcagtacccatagccaacaaaggacttgtatctagagtatataaatcaataacaaaaaggcaaacacatcccaattaagcagtggacagaattttgaacaggtatttctggaaaaatagctaaatatactaagctctccg

SEQ ID NO: 35622 - DNA, 1176 bp, Homo sapiens
tactttgtctttctctaaatggccagaatttagaataattatattctgtattttagaggacctgtgaatctgtgcttttaaaatattggttgtcaggttgccatttatggcattgcagtacatactctactgaaaaattctcttaatttcaaagacttatacctccaaaactgaaaccttttattgtcatgagcagacttaatgaattttggaattctagaatttaaaaaattctttatattataattttggagatctttactttagatttttcttttcaaacatctaagctcattcaataaaaaaaagcaactaaacctagagagaatctaagtgctaaacatgattgtgtaacatttactcttcattgtcactatatttgtgcttgactgtgtttttaaaaatttaatattttgagacttaggcttgtaaagactaaatgtttatttcagtggcatttgtggcgttccactttacctctgctttcttgagcagctatgtgaattcatgatgcgagttgtgactgtgtgccatcatgctctttttcggtaggccgcatctacaagtgcttgtttactggctccgtgagctcactactgacgctgccattagatatgctgtcaacgtgagtattgaacctctgtgacgaatgttgcatgatgtagatgatgcttgcttttttccttgcatatttattttattataatttgtaaattcttttgttttgagaacaataatttatgtctattacactaacagttatagctgcagtagaagtagctgataaatgtaaatgacacttcttttaaaacatacctgttttatgggactgttttgtaatgatgggatgacttttctttctttcttttttttttttttgagatggagtcttgttctgttgtccaggctggagtataatggtgcgatctcggctcactgcaacctccgcctcctgagttcaagcgattctcttgcctcagcctccagagtagctgggattacaggcactcgccagcatgcctggctaatttttgtatttttagtagagacagggtttcaccatgttggtcactctggtctcgaactcctgacctcaggtgatccacccgcttcgggctcccaaagtgctgggattacaggcgtgagccaccgcgcccgtccgggatgactttttaa

SEQ ID NO: 35623 - DNA, 1021 bp, Homo sapiens
actagaattttcattcctagtgaaagttaagtgatatattgtttatggtcaaaatattgtgatgttggtggctttttttggtcttacaaaatcttgctccatttaggaaatgttttacctgaaattgtggacttttgaaaaacaaaataacaatttaaatttaagtagtattttcatgcttcagttgacaaaataatacagttttattatgaagtaatcttaattagctgtatatcttgagtaacaaatccaagacggaattgttttagactttataaatcatgtaattttgaataaaaggagacccaaaatataaaactctcattcagaaacagaattttttttattttctgaaaatgataggaagtattggaaagtataggaagtgggtgaggactgtgtttaaagatattgaaaggaaaatgaggcttttcataaattagaatagaaagttctgttgcatcttaaattaatgcttatcgtttttgtttattttagatgctaggacttgatggatcactagtttttctggtaagtaaaactaattttttttttttttttttgagacggaatctcactctgtcacccaggctggactgcagtggcgtgatcttggctcactgcaacctccgtctcctgggttcatgccattctcctgcctcagctttccaggtagctgggactacaggtgcccgccaccatgcccggctaattttttgtatttttagtagagatggggtttcaccatgttagccaggatggtctcgatctcctgacctcgtgatctgcccgcctcggcctccccaagtgctgggattacaggcgtgagccaccgcgcccggccaaaactaattctttctagtaacagaattggagttgtcttagtgattcagaaacttcacatttatagtatgtagtaaaggtcaagatgccctttggcttttaattactttatatgttgaagattgtatgtttagtgtgctgaaaatattgaaaaagcataaaggtaatatttttaaaa

SEQ ID NO: 35624 - DNA, 1048 bp, Homo sapiens
taattttggttttcagaataaggaattggtgtattaactattcacatgggtgtgctaactgcttccaaaacatcaaagtgttttctttgatgttgctttttctcttttcgtgattattattttggacttttccttttttgagcatcataaactcatggatttgtgtatgttcagtgtttttccatcagttttggtcattattctttttgatgctcatattatcctctctttggcctgttttcacaatggtttctgtgttgatttggcatggccctattagaccttaatagctttgttgttctctagttacagagaatgtcctaggcagtgtatttttagcctagttctggaatctttcatttctccaagaagccctagttccttttagtggggaattgtagtaggagtgttcattgttttgatgtcggagttttcatggaattttttccccctttttagcattttgcccttaccatattggtcatttctcccttgttggtttgggatttgaagaacacgtgagtataatacttttacaaagttactttcattcattactcccaaatgtgattattaataaaatagtattctaaagagttacatcatttcttcattggcattatgcaagggaatagttaggcaataccgtctcattcttttttaaaaaaaataacagtggctcaagagatagtggtcatgttgccaactaatgaaaatgtgctctgaaatccagtcagctgggtgggcctgaggcataccgtgggaaagtttcccacaggctgattttctgtccatctcaagaacctgtatgttctcttctttccctttccccaggtgccccctgctgaatttagaaaagtaacaatatatcaatcaatttaaaaagggtagaatattttggaatgacgggttgtagtgttttctagagtgctttagttttgacattttatcagtattttccagaggtaaataaattttggaaggattattacttctctgttggggccctagaacaatttagtcttttatggaaaagctgactatctgg

SEQ ID NO: 35625 - DNA, 1067 bp, Homo sapiens
gttagtcttttgtaaaattgttgccaatcctatagaacttctattttgatgtgaaataatgtaagaaaattatacagcctctctgctgtgtttattgttaaaaaacaacagaaatatgttaaatggtttttaattccctaggactgggcacttggagtcctgcatgccaaaatcattgcagctataacattgatgggtcctcagtggtggttgaaaactgtaattgaacaggtaagcaaaatcagttttcagagaaagacattctggaattggttgtgtttatgtttggcagctataactcttatttcttatcttcctaccttgctgagttttctacattttttttgatgggcatatataacctttttttttttttttaaagacagcagtttagttttaccactgtaggggaggaaaataatttgttctcaacccttgttttttttagttaaaatggaaccctttaataaaagacaacagaaaaacaaaagtttattaaagtacatatttcatatatacatggagatacccagggaatgagtaatttcaaagaggtggctttgaattccaacgaatcttcaacaaagaataataaatttttagagaagtgacaagatgaaggaaaaggactttgagtctctaggggtggcaagtgaggggaagcaaaaaattggcagatgcggctccttagtaaagcttggcagtgttgattcctctggtgccatctagaggcccagaaaggcccaaagctctcttcagtgggtaatctttgtccttcatggtgtagggaagtggggtgggctaccttttgtctttatacatttatattctgcttctaggcaatagagggaggacggaaagttttcctgcatctattctttctcagttgcattcaactcaaaacaatccttatgcctaagaggcatatttttagggtggcatattgtggttttctatactcccatgaattttcatcaaccacgtttaagccatcctttatctgaaggttaaccagtagcttacggtatctagaaccctgttcatagtggagacaaaaatgaaaatac

SEQ ID NO: 35626 - DNA, 1127 bp, Homo sapiens
ttcatactaaatttttaaataccttttgatttgttaaaatttgatttatgcaagcttttcagaaacgcttcctgcttcagtgttttctcatcatactcagataaaatgaatgcaatattgtataataacacaatattacatattacgtatctctttcataagatgtatgaagttacttcaagtaatgtggtcttgaatgaataccactgaatgtcatctggtattgtatagtgcaagtagagtataaattattctagattagtgtcttatttcatcacttagcagagctaactgcagagcgttagtgggtaaatacatttcttcagaaactcgtgggcactatgcttatgttgatataccagaatttgccttgactttagaagaagtaaccagtttgactatttttgggttggcagattcagttgtgtggagattgctgtattaacttggaggaatttgtcttgtatctttgttctaattgctttttgtaatgtttcaggtttacgcaaatggcatccggaacattgaccttcactatattgttcgtaaactggcagctcccgtgatctctgtgctgttgctttccctgtgtgtaccttatgtcatagcttctggtgttgttcctttactaggtacgtaatgctggttgtggagccttgaaggagcacttttattaacattggacattctctttacccctagtaaaaaggatgtctcactccatatgctttatttgtaaatgtgaatccagctaagacaatgatttcaaaataccacttttcttagatttgactattctgggtaagattagaggatcataaagctctttgatacagttcttttctctaccagaagataaaacttgaaatttacatgctgtacaaaataggcaggatcagatttccttcaggttgtcttcttctgactagaagtgctgtgatcatataaaattaagtaacagtgttgttgtatttaagttttaaagaaatattctttggcataaaagatccaaagaggagatgctaatgggcaacacgtttatactgaaatacactgtcttgttgattgtgtagtgaagactcctcatagctccttaaacccaacatattttcaaaattataagcaga

SEQ ID NO: 35627 - DNA, 4151 bp, Homo sapiens
ctacaaacccatacctaggtagatgtgtcagcctttacaggtgttcactcgggactccctttgacttgcccaaccattgacgagttttaagtaggagttagatttaaaaagacatatgaatgttttactctgtacattcatagaagagagtaaccaccttgtttttgcaacctaggtaccttgtgggtcaacgactcgtgaactacgaacggaaatctggcaaacaaggctcatctccaccacctccacagtcatcccaagaataaagtagttgtctcaacaacttgaccttcccctttacatgtccttttttgtggacttctctctttggagatttttcccagtgatctctcagcgttgtttttaagttaaatgtatttgacttgtgttctcagcattcagagagcagcggtgtaagattctgctgttctccctggatcttctgacattactgctgtctgagatttgtatatgtgtaaatacaagttccttgataccctaaaaccttggattaaacagaatgtgcattgtacatctttaaacaaaatgtatattaatttattaaatctagttgtcactttattttggacctgctgtgatctcgacaggaaacgtgccacagagcagtagtgcgcaggcaagacttttcagtgacgccttgtggaacgcagttcatgatgtcctagcagctctcactaagggaactgtacattctttctttcttggctattcagaccttaccaagaacgttaaaggaaacaagtagaaatcagcagtggagtgtctgtggtaagaaaacatgaactttatgcttcactgttagttgtttgtggaagttattttgtataacaccaaagctgttgtacatttcctactgcctgatttttttcatgtgtctgtgtttgtaatattgtatagtatcttgtgctaggtgaggaaattatttttaattttgataatttaatattcctagtgtgatcagcattgggagttgggtttcagtggggcatgtctatacttagagaaaaaaagtccaaatgaagattttcatgagtcagcccccccgcccgcccccaccccacacccacatcctctcttttccacacacaactatctgtttattttttgtagcagtggccgaaagtcctgcaaggtcataaatctttcagagtgacatcaccaactgtactgcatcttactggatttaggacttctgagatgcttgtgaagtatagatgtggttgtggtcttagattgacagcattagagaagactggttagaacatctggtctcgctggttagtgcctcgttggctgaggactaggtgtgcatttctcctagcttttcatcaggaaatcccaaagtttccaaagctttttgtttacagaataaaacttcaaataaaaccaattcattatttgtccagaaggaagcttggctgagctggccttttaacataggaatgtatttcgttggaaacattctgaaaaatctcagagaactgaacccttacaaactttgttttccctcataaccaaagcttcaggttagaagtttagaaaaatagaatggttgggtacatgatctaaatgtttaatgctaaaggtatatcgtaagggtagtgtttgtttttgaacgataatttagaagttctcatagaaagcgtataacataggtcttcagaaactataaaagaattttcatatagtattaaaatccatagactaaaatctgagaattttttaacatatgcaagtcagccaaacataagctaccaaaataaagagcaatgtgttctggctgttttatacttcaacaattttttccctaagtggtaagcaattactttaaaacatatttttaaaaacatcggtatcgggagctgcggtggctccggccggttgtcctggcacacaaggaggcgaggctatgcgttcgaggccaacctaggcaaaattggaaaaaaaaaaaaaaatcagtatcagaaataatgcttgacataggattcagtgttatactctttggcactttagagcagccttttctctcatttgaaataaggtctttgttagccctacctttactcagaaatttagtcctactataaaaaattaggattttaaaatataatgctgcctgtcatagtgtatttctaaattgctctctttgggagaaaaacattattattgaattgagcatataactatataactatataactatatatatatatatatatatatatatatatatatatatatatatatatatatatatatttttttttttttttttttttttttttttttgcccccgagacagagtcttactctgttgcccaggctggagtgcagtggcacgatcctggttcactgcaccctctgcctcccaggttcaagcgattctcctgcctcagcctcccaagtagctggtactacaggtgcgtgccaccacacctggcttattttagttattttagtagagatagggtttcaccatgttggccaggctggtctcggaactcctgactgcaggtgatccgtcctccttgggctcccaaagtgctgggattataggtgtgagcccccacgcctggccaacttgattatattaattttgggttttttgttttgttttgttttgttttttaatttttcaaagaatttgtggatcttggtataaagtcattggaacatatctgttttaacagcaagagatcctaggcagatacttcaaaaggttaaaaattcttaatcctacagaattttaaatgaatcttatcaatgttttgtaaacaaacaatatgaatggccaaaaaattgccctccattttactggcaggtaatttatattgtcttacttaagaattctcccctagtttttcaattgtactttatcgtgttgttttcaatgagataagtattttcatagggaaagcattttccagcataatatttgcttgggtagcatccgggttttagtatttaaccaagagccttttaaatattgaaaacccatagttcagaaaatgttagtattgctgcccttcttcacataaatttttttttaaattatactattattttgcttaattttatattgggttaaaacaaccttcaagaaggttaactaggaaagaagacctttttgttttatttttactatttatatatagaagacaaatcagcatttggtgatagttttacatgaccagttatcaaacggtcatagtatgaagtgtgcagttgttcattattagtaaattatgtttgatttttaaactatttagtactaatagttgagatgaaaactgaagaaaaatgccaatgtgacgtttgtgtatagctagccttaaaaaacttcccatgtttttaggtgacttttttccccctcttagtactctggagaaacaatgaagatgggccatctcaattccagatgtaaacaaaaagtaatttttatttcaacatttaatgtaactgctattattgtggattcttgtcttgtgtattttctttcccttattcaagtaatatagaataactttccttaaaatgatttgatccaagatacgtcatttctgtattggcaaaatgccactattaaagtgtaattcttgaatttaggttgaattgatgactttttaaaacaaaacaaacactggacagttctacattgtattgcgtttgcgaatgtgcgtgaacacacgcacacgtgcaggagaatgtagtgccataagaacactggcgctttttaaaactttccaagctagctacttattttcattttcagggttgagtactctaagctctctacttactgtgagaagttttctacattgtaaaattaaaagattatatttaaaatacttctttaggatgttattcagccatcaaaaaaaaacccaactaaaatgtcttaccagtaaagtattattaaaagcctcatttgtggagattcgctgacttccttggttaagctgtcttgtatttacttaatttgtcccctcaaccaggtgttttcttttcagcctgttactgtcctgtgccatttttaaaaatagccatcatgagtaagggcttctttaaaataatccctgacaatatctttggcattaatacgacataaagacaagacagtatatgtatgt

SEQ ID NO: 35628 - DNA, 1019 bp, Homo sapiens
cgaggaggagcacggcgtcgagagcgcggagagcgtcccggagggcgtcccggaaagcgtcccggagacggcgaccctcctgcgcgccgcctgcgccaacaacgtggggctgctgcggacgctggtgcggcgcggggtgagcgtcgaggaggcgcaggagactgaccgcaacggcagggtaagcgggcgtccccgcaggatttgagccccctcactgcccccactcccctcctccccaccacatccccgcgcctcccagctcctggctccggaccggtccctcggtcactcagccgccgcccagagcgccttttccccgctgtttgggagcgcggtgccctgggtggcttccccgtctcaggctgggggacgcggtgcggggagggagcagtcgaggtgtcagcgcggcagaaacgccagtccggcgtcctcaccgcatccccttctcgtttaccggtccccgtggacctcctgactgaattcgcgctggctgcccgtgctgcaatccaggatgggcttcttgcggcccggtcccctcctgactattacctttccccaggtccctggcaggggaccattcctcctcccctgcaggagacagcccctcctgcccagcgccccatttggcccctgggcccctcgcgccgcccttgtcctaacacgctggggcgcagatcggctcctccagccgcaatgatttggaagcaacagtttcttccctcgccgggacagcttggtcccctaccccacctccgctgagctttgtggcccgcgccgcgaccagccaacgtgatctctgactggtctgtccgcaggtcaccttcgcgagccaatgccagccggggctccccagagtcagggcatagggagagccccagagccgcgggcatccacccgggtagggcaggaggcgtggaggcaggcacaggctatcctttcgttatgaccagattcagagaaaacgagatgtttagaaaagaaaagaaaagaaaggaaaagaaaaaaagttggcttaagaa

SEQ ID NO: 35629 - DNA, 1073 bp, Homo sapiens
agtaactcaagagctgcaggagcagatgttgttaagcagagaggaaacaccaaacatggatccctatctctagcgagtgtgccctgtgactgtggagggtggaggggagtcacgccagagggaggtgctgtgttggggccagaccggagggttacatcctgagcaggagaggagggaggaggccaggtggaggagcggcctgggggacataggtggttgtggtgctagattggcagtggatttttttctgaaggctgccgtaacaaatgaccacaaagtaggtggcttaaacatcagaaattgattctctcacaattctggggggcagatgtctgaagtccaggtgacagcagggccacgctccctctggcagagctgggaattctgcggtctgtgacagcatcgctccaatctctctctgtcctcatctgtcctctgcacatctgtgtctcaaatctccaggatgatctcatcttaggatccttaattatgatctataaagatgctatttcccaacagagtctcattcacagcgaccggggttaggatgtggacatgtcttttctgggcgatacatttcaacctactacaggcagttacctgaaggagtaactgaaggagaggggttcagaatcctccagtggggcctgatgggcagaggagagacttggacacccttaagagacgaaatgaatcttcagaggttcagccattgcttgcaatgtcatcttctgggctcatccctgcactccaaccctggacattttctctggtcttttctagtggccaccatctggatgattacgactctggaaatctctgtccatcatccatttttttgcctcctctgtgaacgagcaggtgtgatggcctgaaaacagagagggagaaggctgagtgtaccagggcaggggaagcgcttcctggaattacgtgtcccaggacaaaagtgaaactgccttcgctgactcataggaaagtttgaaaatatcatgtttcgcctatgcctgggggatctttgtttttggcataagccgaacagattgttccaggccagaaaaaaactaagccaa

SEQ ID NO: 35630 - DNA, 1046 bp, Homo sapiens
atacaaaaaaaaaaaaaaaaatgggcgtggtggtgcatgactgtagtctcagctactcaggaggctggggcaggagaatcgcctgaacccatgaggcggacattgcagtgagccaagattgtgccactgcactccagcctaggcaacagagcgagactccatctaaaaaaaaaaaaaaaaaagagccgtggtagttctgaaggggaagagcaaggaaggtttcttccctgcaaaacacaaggctgcagtagcgaatcaggattgccttggggctgaggtagattgttagaccaatgggagcaactctcaggttcattcctgtgtttatggggaggtgggatgagcttgagcatgctgttactaccaatgggaaaagaatggatgtgttcatatattgtgctaggaaaacagaaaaaggtaaaattaaacttctataataaaaaccatggtggattcaagacctcactatgaaaaaaaaaaaaacttgaaactgttgaaattaaatacagaggaatatctttagggtttttgaatgggaggcattgcttaaacgcatgacaaaaagcattcctataaaggaaaagattaataatatgactgcatcgaaacgtaaaacgggatggtaaatgaaaaacaagtggtgtcgagaaaacaatcgcaacacccttgacagagcttcaggtccaggggcagcatttacagaggcacctactctctgtggtgcctgagagggagcgcctctttaaatttggtgccccagggcctcctttgccacatcttagtgccagccttgggcgccagtgccatcctgatgccagctttagtgtctagggctgtattgcccagtagtgtagctggtacctccaagtggctgtggaacacagtgcaactgaggtgtgccgtaagtgtaaaatatgtactagattcatccaaaaaaggtaaaatagctcattaaaatttttctattgattacattttgaaatggtaatattttggatatgttgagttaaatacaatatatttattaggatttcatttggctttta

SEQ ID NO: 35631 - DNA, 1044 bp, Homo sapiens
aatacacaaagccttagctctagggcttttcattgcaggttttactcatgagaaagaaagtgagaaacagatcatctgagtatccaagaatagggatttgttaaataatgacaattctaccccacatagaataggatagtctgtatctaccaggaattttgacacagagttacttttattgatgtgaagatattgctgatatagtcctaactaagacatatagcaaatggtcctgttttagtttgaagaaaaatgtgtgcatatgtgtgtgtctggtctataactttttttcttctctttaatttttggatctttttctgcaataaatatgaattacttgtgtaattatatgcaaaggaagatgttacattatgttcaatatgttttatttataagtcaggaaattgtagaatactagagcaatatctccatccaaagaagttaaaaatgatttttgggtgctccctggtgggatgacaagttttccggcacatttatgcgaaagcaggtgggtaggttagctgggagaatggaggtggtggtggcagcgaactcttagttcccaaagaggctgaaaacctcagtggcttttaagtagagcctgcctgcagcccactcttttctatttaaaattagattattgtgaaacatttcaccatatagatggaatgacctatttcaaagggtgcttaagctagattatattaaagaggctttaccatagtcaacagttattgagttgattatgctgtggtatggatgtcagtgttagaaaatcaatggtattctgtagaactttaaacatgtgaatatttgtgatttaatattcttctgtggggcaactaggagccttattgagataagtgggcagggctactcgagtcctcttgttgttccatgaaaaattatattcttactaaaaattggccgggtgtgttggctcacgcctgtaatcctagcactttgggagactgaggtgggtagatcacgaggtcaggagttcgagaccaccctgaccaacatgatgaaactctgtctgtactg

SEQ ID NO: 35632 - DNA, 1060 bp, Homo sapiens
gaggatggcttgtgtagacagcagtcgcactaagcagaatcagcattgtgaagcgcaatcttaaagcaaccatatgtttatattatttgctatggcaactgggttggttgtctgagagttggaagctctgggtttctggaggacacagcatttatgagtacgaattcggatgcaaatgccttcatctgccttttgagtgttctctaaaaagtctaatttcctcggctatttaatgcacaataaaaatacagccaaatctgtactaggtctgtaaatggagagaacgtttgaaaataaatccccatgtaatccctaagtctcatttagccagtcatttcaactttcaccaccgctccactaacaaaaataaaataagataaccaaagaaaggaacaagaagtcccatggatagagttgtgtgtttatttctgtttccttgttgtgctttaacagaatagcatggacgtggtaaagtgaggaaacgccaggggtctctttgagctggtgatgggatacagcacgtgaagcttgttttgggtataaggaacctctgatgtgtgcttgcaacttgttatttcttgcatttaattgtaaaattctgaggctacgtgctgagagccagcctggcaggatgctgcccggggacggggacagaacgggagggattctcaggggcagctgtgggtttgggctgcgggggagccctggttcctgagctgaatcggggagagtcccagttcagaggagaatttatgacttggtcagaacccaggaacaatgcctcttcatgttatttatcttattttattagcagtgcacacgatcacgatcttagtgtgatctcattgtgatgttcatgttgttttgaagtgcttccttttttctcagtttataccgtttcaaataagagagtagaacttggtgagtctcggtttcccagcgttgccttatcttttcctgtgagcttttctgagctcttctgattggccatggcagcgccacacccctgcccgctggccagccaggagggctcctcagccagcttggggcttgcctggct

SEQ ID NO: 35633 - DNA, 1049 bp, Homo sapiens
aggtccgggcctggagaggcgggcgggggtgctggtggcggcctcggggaggacggccgggctggggacaccgacaggccgggggagcggccctgcgctgggggacgcgcgggaggtcggcggttcacgcttttccgtggcctctttgaaaatcacctccccagattcggtgagatcagttccccaatccgggtcacgaggagcaattgcagcgggagggcgatggtgagaggcagaagttagcagtgctggtagatacctggtttagtactgtcttctcttggttgtcttgatctttgctaggcggggttatttttgattcattttagcagattggttgtggctgggagtgacacagccgactgtccagtgttagcttggggttaatctactccccagtgctcactctccttgagaagtgcctgcagaaagcaaaggtttaggaaaacatgagctccttctaaagaaagctacccccccccacctttttttttttggtgcgactggccagatagagcagccccgtcttacctcttaatagcagaactgggacgtattcccttcatgccctgaagctaagtctagctttctctctacctacctgtcacagaataatagattctgtgcagaattcagctcctctctgttagaaaggctcttctgcgttggagatggattttttggtgtttgtgagaccaggcttttttacatctctattatgcatagtacaaaaatcacttctgctgctgctaagagccctccctaaaagacaccgaagatttgctgcctgttggcgtggctctctccaggagttgtcgtctgctcttggctttgcttaggcctgtgctgcccccgccgccagggctcctgttcatgttccgtttgggtcagaaccaggtaatgtctcactggcttgttcctttcttctgccctccaaaatgacaaacttaactttttagttgtttcacttagaatcaggagccagggcagaacttaagtaggtatcagatgcagcatcccattccagcgatagcctggaacgtcttttt

SEQ ID NO: 35634 - DNA, 1026 bp, Homo sapiens
ttattctgaagcatcacgtcctgtcgtgcttggtttctttcattattaaatcttactcgactcctcctgcagcccctgtctttccagggaacaggtgaagaaaatcaagtctattagggagaagcacacatacttttatatattttgatatgacggtttccttgtggagtattgagagaagcttttcttcatatttataccttgaatgccacttaggtagttggcctggggcgggctgtgctacttctgttggtattgagaagcctggcagctttggtccttgtgagcaccaataatgattgtattacaaagtgggtccttgttaccctcaatatttcaaaaatagaaactgaaggaaatgtaatttgatagtgaatgttggtttctcctttttaggtggcacagtcagttttagaggaaagcaaggagatttctaaaattcctgtaagtgactttcgaggaatcaaagaagtgcagtaaagtcatcactgaaagaagcttttcattgagaccttgtaaaccgacatattgatgtgggatattgtattttttccctttgcaatttaactatttaagattcaaatgaaaatttaaagaagccatttccaccatttaaatgattaaccagatttaaatgaagccggtggtggtgttcaaaatgaagcatgtggtttacatatgtttcctaaatgtaccctaaaaatatgtaatttcagtggccttttttgaccttttaaatgttacgataaagttgagatttgttctgaactgcaggtgaaagatgtgtttgaagctgtcataatctaagtcagctgtattcaatatttactttgtttatttacttgactatcgagaaaataaaattttatctcataaccttggcagaattccagagaaaagtctaattcttaatcaatagccacactttactgcctagtaaactcactgatattgatagggatgagctgtgttttactacaaaaagcagtgataacaccctgcccccattcctcctcaattctataa

SEQ ID NO: 35635 - DNA, 1057 bp, Homo sapiens
gtagcgactccctggacagtgaagacttggatttgcgggagaatcccagtgtattctggtggaaagtgcgtgctctgacctcatcctcccatttcttccaagtactcagctgcgtagacttggccaaactgacaagggtgatggtgtggttggcctggtggatggagatgctgtcttttgaatcttctcagcctcattttaattaatgggctgcagggaccaggctgggtccccagctggagcaaggggtaagcgggttcgatgtgcatccacagggttctcttcgtcctattccagttctgctgacgcgctgttcagtgggccactgggagagggaatgaacagggagacttcccagtgacccttgcacttgggaattctggctgctgttactcagcgggagctgttctgggaattcctattgctgtgcctctgaactgaggggaagggagcatagaggagtggtcagaggcttgcggggccctgcatgtgctgctggcttcctgctggacccctggtctcctccccctgtgcccgcagaacaggacttcgctctcactgccaaggtgcccagctccctgctagttcgtaaatctcaaagagagatacctggctagattgtccagtgaggactcccagctttttgatgttactgagccttctgtgcagacagtcttgcttttggggaatcttgctctcatgtttaatggttaacaagtgcataaacactcattttcgcttctcattcactcatggaaacacttaatttgcttactgaatagttgtgttgttaccttaatttcctcttttctgtcccctctccacataaggaagccccttgaaacccaaattactaatcacctgccccccgggaaaggttgtatgtggggaaagagagagcaaaccagagtgaggctacgagcggggggcagagggcattgacctctgagatttctccctgtgccatttgatggcagaggggctgtggaaatgtaaaacctcgttttggtgatgaacatacttgagttttagattactggctcttttcattagccac

SEQ ID NO: 35636 - DNA, 1334 bp, Homo sapiens
aatgagctatgatcttttgctgtcacttagtttgatgctgtaattatctaagatttggctagtgggagccccttcatcctggctcttttatcttttgtgacctgtctccatcatttttttggagcactttcttactttctggcacaataaactgttccaggtgcaccttgtgctttccttgccccagggctgggatcagccatttctccaaggagcccttggagaaatggttcattttagtagtgaatggtatttagaaacacgatctaggcactaagcgtgctcattgctacagagttgtccttgcttttagggcctctcagtagacagagctaagaagtgtatgcgtgtatgtgtgtgtatgtatgcatacacatagacattaattacacatatgcaaacgtgattgagatctctttctgcacctcttggtgataaaaaccatatgtttagactcagtgtgtccaattccaatacagtaccacagggtgcattttagtctttcctcttccgtatttgtaattcccttctctgacagtgaaaaacctggctccttttatcctccgtatctttacttattcactcaatcctagaatatgcagaaagtaatttgagaatgctaacccacaccacggtgataaatgaacctccacccccaagtttaaactgttcaaatcagcagttagtggtcagcttctgttcagctcagtgccttgtcagttagtcatccaaacaaaacagatgaagtaatgctctgcagttccccaggggcatgtttaagaaaagagctgccagactccatcaacagcttactttctggtgatgtcggagcacaaaattgaaaaatcaggagtcgccagagaagaaagggagattaatttcatacagtttataaaaaggacacctgttgtgggaaaaacagtttgtcatcttcatctcaatgtacaaattgccaaagagaagaaataaaaaggaaagtgttgagccagtgagaatgggtgtgtagaggaggatgggtcgagcggacctttctcagggatccagtacattctacaaggaggagaagaagctgagttcatgtgttggagtaagctgtgagtcatgacttgaaagactgttgcttactgcccttcattgactaaatatttcttcccagaaaccacctgcagtaaattcaaagcagctatgtttctgcctcagtgcgggatttctgggaactgagtttatgtgcagtcagtcccagaaatcatggaacggtgggtgagatcttaggatttcatttgctgttctgtatttttcttttctctctctctttctctctctctccccctccc

SEQ ID NO: 35637 - DNA, 2086 bp, Homo sapiens
gtttcgccatgttgcccaggctggtcttgaactcctgggctcaagcgatccacctgcctcagtctcccaaaggcttgagattatacacaggagccactgcacccagcctgttctgtgtttttctacattaaatgatgacacggatattacgtcgctgacttggggagacagtctcagtttcatatattatgttctgtactgcccataaacatcctcatgcttgttagattgtgttctggaaaatttggcctctgtatttctagcaaccctttctatgatgacacattttagcaagaaaaaaaatcataatttgcttattaatattttaatggagaagggcttttgatattagaaaactgggaataggccgggcgctgtggctcacacctgtaatcccagcactttaggagcccgaagcatgcggatcacgaggtcaagagatcgagaccatcctggccaacgtggtgaaaccctgtctctactaaaaatatgaaaattagctgagcgtggtggtgcacgcctgtagtcccagctactggagaggctgaggcagaagaagcgcttgaacccgggaggcagagggtgcagtgaactgagatcacgccactgcactacagcctggcggcagagtgagactccgcctcaaaaaaaaaaaaaatctgggagtaaaaagtcatgactaggggtagtgagaatgactgctaataggtcaaacattctgaggaaagtttttgagctaatggagatgttttggaattagatagtgatgaggctggaaacggtgatttctgcctgtaatcccagcattttgggaggccaaggtgggagaatctcttgagcccagcagtttgagaccagcctgggcaacatagtgagattcagtatctaccaaaaatttaaaattcgctgggcttggtggcgtgcacctgtagtcccagctgttcaagaggctgaggtgggaggattgcttgagcctaggagtttgaggctgtagtgagccatgattgtgctactgcactctagcctgggcaacagagcgatgacacgctgtctcttaaataaataaataaaaataaagaacaaaaagtcatggctaaatgtgtgatacatttcagattttgaaatagcttcagttattgagtgtttactatgtataagccacttaattttcctaccccttacaaagtaggcagtgataacattatacctgaggaaatggaactcagagaggttttttaacttgccccagctcaggtggctatagggacaaggttaccacgcgcacagtgggttctgccgggggtggaatccgcctgtgctggtgtctcctactctgacgtgcgtctcttatggaggaatttgactcagttttttctactcccactccccctctccctttttttggtgttagaaaaagtgaaatcacctctatttgaaggaggggattgtggataagatttgaccaggtttcagttgtgatttgatggcatatttggaaattttgtggaaaaacctgggttaacttttcaggaaatcgcagtcaaaaaaaaaaaaaaagagagagagactttgcttccctgtagattgtttcagtcctggtggtgtcttttgagatagtgaagagcatagctgaaaaagtggaaactgatgatgctttagcttttattgttttttaaacattctgggaaagttgaagggagaggcaactttctgctatgcttctcctgaaagtgatattaacattaaaaatcggtgtcattgtttttctgctagtgtgagctttatattttttttctttttttttttttgagatggagtcttgctctgttgccaggctggagtgcagtggcacgacctcggctcactgcaacctccatctcctgagcgatactcctgcctcagcctcccgaatagctgggattacaggcatgcgccaccacacccagctcatttatttttgcatttttagtagagacagggttttaccatgtttgccaggatggtctccatctcttgacttcctgatctgcccgcctcggcctcccaaagtgctgggattacaggcgtgagccaccgcgtccggccg

SEQ ID NO: 35638 - DNA, 1596 bp, Homo sapiens
aggctggagtgcagcggtgtgattttgactcactctatcttctgcctcctgggttcaagcgattctcctgccttagtctccttgtaactgggattacaggcatgcgccaccacacccggctaatttttgtatttttgtagagatggggtttcaccatgttggccaggctggtcttgaactcctgacctccagtgatacaccttggcctcccaaagtgctgggattacaggtgtgagctaccatgcctggctcaaacacacatttcttagttgcagatcagtctgtcctttgtagctgggcagacctcctgggaaacttggacttcttgcccctgttggcctgtgtgtcttgtgctcttgtacctgtacctctttgtgtttgctgttccctcttcttcctggtttcccttcctaactcagctcaaacatcctttcctttggaaaactgcacttgaccatcctgtcccagcctcttgaggcccattggtgttggcatgacactttgtgagaactggattctggactggttcctttgggttataattgttccttcactcgtgagtttgagttgctgggacctctgaccccagcgccggcccagagcagtccccaggtagaagtgcagtagatggttgttgtgatttatgcctgtggttccttaactcagattttagcataattacctggaaagttttctttaaaaatacagaatccctagagattctgatttagtggttctagattaggcccctagaaatgtattttgaaaaaactctacttgtagtttgttttgagacagcgtctcaccctgtcacccaggctagagttcagtggtgtgattatggcttactgcagccttcaccttgtgggctcaggcgatccacccaccttagcctcctgagtagctgggattgcaggtgcataccactatgcctggctagttttttgtagaaatggggtcttgccatggaggccaggcaggtctcaacctcctggactccagccatctgcctgtcttggcctcctgaagtgctgggattccaggtgtgaaccgccatgcctggtctctactgggaatttagacgcacagctagggttaggaaccaccgagttatgccaaggcacagtattagttgtgggttatggaatcacggccaatttggagtaaggtgtaagtgcagtttgcagaatcattccattcacatatctggagagagtggagaaaatgaatgcagtccctttatgatgaggatgtgctccatgaaggagaagatcctggctcgtggaggagcttcctgctctgtgaacatactgaaggcacaattggcccttcaaactctcatttgaagtcactgtgttgccatagagatattgtgtagtgttgaaggagattagagaaatcatgtcgtaaattatcagaacagatggcttgtaatttaacactcttctagcccatattctttgtactgaccttgagaacattgaaggtatcagtttttactttgttcttttacctataaaaatggcagagttcatattgagtgagatctaaaatgggtattagatatgccacatacacagtgtggtatgtgaaagc

SEQ ID NO: 35639 - DNA, 1067 bp, Homo sapiens
ttatgccctccctccctttgccccccatccctggacaggccctggtccggtgtgtgatgttcccctccctgtgcccatatcttctcattgttcaactcttacttataagtgagaacatgtggtgtttggttttctgttcctgtgttagtttgccaagaatgatggcttcccacttcatccatgtccctgaaaaggaaatgaactcattcttttttatggctgcatagtattctatggtgtaaattttgtatttttagtagagacggggtttcaccatgttggccaggctggtctcgaaccacctgcctcagcttcttaaagtgctgggattataggtgtgagccaccaggcctggccaactaaagggtattttctaaaaggagacttctttgaaattttttctgtctctctattctagcctgggtctgatgtgtaagtcttaaaagattgtatccttcattaaggacaactattgcctcttgcagggagctgcatcctgattgggattctggcacattcacacatgcacattgttgtagatgaccagagtagatatgtacctaaaacatttcaaattaacaaaatcataatcctgtgagtgtaatttaaaaatctaataaagcttaccttatttttaaagtacttgtagttagacatatattaacacaactatttcatatggttttattctcacatgcttgaagtattcaggaatcttaaataggctcttcatacattttcatgagcctcatttcttatgtgtcatacagtaggaaattaagtaagttttccgatctccagataattcctgagttgctcttgtgtgaatgtgtgttttaactgaatccagacattcatagtagtgagcactttctttgactccttttttactagcctacactgcttatactaatgggggtttctgatgccactcagcagtgggacagagaggtcagttgtgagcctgaccctgttggatatagcaatttttacctcaggatgacacattcacgtgacttaaattctttgacacttctgtgtcaatgctagaaaattttttataaaag

SEQ ID NO: 35640 - DNA, 2295 bp, Homo sapiens
aaccctattgcctagggcttgggataatactagtactagaaaatgctgatttctggggcctgccttggaagaactgagacttgccccagacatcatgaagagaaagcttgcaggccacatgtactaagatccggggataggtgtgagtcagaggctgggcaagggcctctaaggagctcttggtgcccttgaagaggagcatggttctgggtggatgcaccatgaagggctgttactggcagcattcactagtccccctgacccaccaccagtggaacaagtacccttgctttacctaaatactgaacattcatttcttacttagtagagattgacttaaatctcttttttttaaattgtgctttttaatctatatatcagaatcatctgataattgtgtgatactgaggaggtatttaagccatagcaaatcaggaagggaagaagctaagatggggtttacaagatagttcttcacatgtgtctgaaattagtactcttaagaatgttactaatttctggcaggatccctggaaaagtttctagaacaattggaagagaagccagaatagctgtgaaaaatggcggtgttcacaggtgtaaatactcacagcctcacactcaagtgtgtcatcctgaaatcagtgaaatgctctcactgatttcatggaccttatcatccgtgagaactggatatgccacgtgtttaattcatgactgagttttatgtgctgttcacacagcctaatgcaagacattcacttgaagaagtttaccctgaaatcccccaaatagggaggtcccacgtaggtgaactaaataggctctctacaagtacattactcatatttttaaaataggagattcccaagtggatctggctattggccaacagaatgagacttacacagcctgatataaatcggttcatttctccttgtactgtagttgattttcaggaggattgatgtgcaatttattgtttgtctgcagcagaatgacttgtatggctctgggtgctgttttctagtgctgtgtttgtggtgcatgtcttcttcctgtttcttctgattctgagttccgccctttttagctagcattcagttggtctggctttatttgacttctttgacttggtgagtgccatggtttgtgagttatactatcatttgtggtttaaacatttcagtttttgttactatatgtccatctatgtggccatcttctcattttaattaccaatacatgtttcagcttgctttttggaaaaagtgttgagatgcaaatgtgtctttggaagtgtcactgagaaacccaaggtctatctggcattccgctcctggcggcagaccgtagtctttgtccacgggttgggaagagagctgtgaaacagggaggccttgccgactgtcctacctgcaatctggactttgcacatggagcctctacttaggggattagttttttgactactgctgtttgatttttgctttttaattgggttatttgaggtgaatgcatggtttaggtttctcgttctttgtgttggacagaattaaagggaaatttgagacatcctggtctacttatgttcaactccgttatattcttttttaatgggcaataaaactgccttttttttttttttttacttttctcttttttagatggaaggttccccatttttatttttacatcacgttcttcctcatacagttttcttcaacagtaccaagagtcgtatttttaagaaagtgtctctaaattttctttgcttttgtaggactatgtcatttctgatgatcattaattggtatgcctaactctcccctttgacccaggtattactaatattgactgaaagatggaaaatttcaaagatggaaaatttggattactgctgtgtctttaccattgagtcccaggaaataacttgcccagtttcataaattcttagacgttggtttctcttgtgattgtcaagtctttggtgttctttactttattcacctggaccacttgagttgttattcatcgaacacacacgtgtgtgtgacatgaagtataacttgttcacccttactttgtgcagtggtggtaataaaattgttttaaacctcttaattatggtttttcatgttggattcactgtgagttcttaaaaaaaaggatcacccactgatggattcaaatctacctttggaaaattaaagtgataagcacttaatggcattttgggattagcttgagaatatctgtaagttgattgtacttgaaacatgcagttgtgttgtg

SEQ ID NO: 35641 - DNA, 1789 bp, Homo sapiens
tcctctcgccttcgcttcccaaagtgctgggattacaggagtgaacctctgtgcctggctcgagatgtaatatattctcttgaaagataatattacatctagggaactatctttatcactttatttaactatttacattgaaaatactagaataaaatataagtacatatttgtttttaacttaatatacaatttcagtgttagatgaaatgaagatggaatattaacaatgtataagtaatgaaaaattactgaaacttgactctgttttagcattccaaatcttaaattatattccttgccctaaaataaaatatcatgaagatattttgggtgaacagttggaaattgttacaattctagagtattaaagataccaagaacattcagaggatccagccgaacctgacttgcccaagaaaataagtaaatcatttagtttgtcacttcagtttgcatgaccacaaagaactgtacacgcaatgagttattacattgttatagaagaaacaaaatattttataatagtttgccaaaaatatcatgccattatgagaaaaacctgttgactaagtcggcctttggtcacagtaaataatcactgcttttgaccaaaactgcaggaatgtaaatctacgtttttcagtgtttgaaagactttaaaattgcaccatataaggtaatgctggctaactaaactttataacatttgaatgtagaccataagctgatgagccggaggtcaaaattagatagctgtaaattatttgggctaatgaaggataaaggtagagtttagccaaacactgttcttatgtagtcttatcaccggtggaggtacagatggatatcacccacagaggtgtgggtaggttgcttcagaattaattttttaagaaactgttaagtaatagagtatctgaaactggactgtgtttaaggactacttagttgctgttgctgggtattattcagtcttaagcttcttcctggttataaaattaaaaagcaagaaagagacggcaggaaggagcggggtggggggatggtcggtggttagtagatatgtggacctagagtagccttttcagccagtttgggttgtgaaatactgctgagtgcttatgtggccaagttctgtagttatagaagattatgtatacacactcttttccattttgcaaaagtgagcaaagatatccttgtatgcaaggtgtcataatcccattcctcttatgttttgaaaagaattacatacacctgcagataagttgagtagtgcattgagcatctgaatacccttcccttcaattcactgttaactttttgccaatctgttctctctctttctatcttttatattcattaggacactaataagcactgcagcattactaagctgtgagttacttttgcttgaagtcagtgtcagttaggttttagaaagattgtgcatatttttgttttaatttgtcttgagggcagattttgggcttaaaaatacctctgtaactgaatagccaagcagtacttgcccctgagaagcaggaagtgcagcagatttagtagaaatgcttgaacaaatctagcgtcttggttgaaattgactaaagttccaaaataactaaacagtgtcacagagagtagtgacaggcagactcatctcagaagcagtggctcctgtcttctgagtgacagtcactttcaagtggcagtcagagtgttgaccaggcacacagaataaagccccttctgttgaagaactggcttaatggagtgggacaggtta

SEQ ID NO: 35642 - DNA, 1054 bp, Homo sapiens
ctttatgcccgcctgcctctctatctacccagtcaacttcctctcaccttcctagttcaagacaggattgatgagcaaccctgaaaagtttcacatttctgatggtcacgtgatgggtcaggccatctggtcagcagtcgtcagggtcgtatacaacacacacaaggctgcgggcctgaacccttgccccaagaagattctgccacagagtttatggccccagttaagaagatgttctttgatcactttttgtgacattccctccataggtagaggtcagatcgccaaataaataatagtatctagagtcagggattttagtctacagtcgagacctatgaattttggtaggaaataaatgaattatatctttattttcgtggatctcaataaaattcagtatttctttcaattgtgaatgtagttctagcagtatctgtgacttttcacctgtggatactgcagatatttttaatcgacattaattattacagatctctcaaaatgttgttcatgctcatcacttcaaaactgtagaagttactagaatgactgctattttcatttaatgtgtggtaaagatgcacatattactttaaaatcttttgatgatcattactattttttttagatataattggttttctggttaagtttctctatgcacttaaaaacagtgttctgagaagagcttcataagtttcaccagattgccactagttagaaatatactactcccccaaaattgctggttggaattgagattacagttttctctttatggctgtcaggatttaaatttttctttttttcttaaagttttgggatacatgtgcagaatgtgcaggtttgttacatagcacatatacatgtgcaggattcaaatgctttctaaaaggcgttttctaattcctttccagttttttccactccttacttagaacttctttgtccctttcaacaattcctacttcctttaatgttttaatatctagtaatagattccattttttgtttgctttttgctgcgtaaattatacattctttggagcta

SEQ ID NO: 35643 - DNA, 1985 bp, Homo sapiens
tactaaaaaaatacaaaatcattagctgggcgtggtggcacgcgcctataatcccagccactcgggaggctgaggctggagaatcgcttgaacccaggaggcggaggttgcagtgagctgagatcgcaccactgcactccagcttgggtgacagagcaggactcctgctcaaaaaaaaaaaaaaaaaaaaaaaaaaaagattaactgtaatatagatgtggtaaagcctatgcgttatattccctagttttctggcacaacctcttaaagttacctggatcaaaagctggttacatgctgatattttcagtctgtggcctgaatttccaaaccgatcattagatgttgcctggagcttcctattctcattggattaaaaaagattattttgaaggtaatgggacaaaagaagataactgactttacaactttttataaaactatgctgagacttagtattgtttgaaatgaaagctgttagtattcttaaataaataaggattgtttgccttctaaagaatataacctaaattgttcctttgtaagaatcacatttttaacttaaataaaaaaggcagaccatgttgttagaagtgtctgatctttgcatatgaaaatataggccagacacaatggctcatgcctgtcatcccagcaagttgagaggccgaggtgggaagatcgcttgaggccaggaatttgagactagtctgggcaacatagcaagatcctatctctacaaaaaaataaaaagctgggtgtggtggcacgcagttgcagtcctagctactcaggaggctgaggcaggaggatctcttgagcccaggagtttgaagctgcaatgagctctgatttcatcactgtacttcagcctgggtgacagagtgagtggtcccatgtccccccagtgcccccacaaaaaaaaaaaagaaatataggtaggtaggcagttttaattttcttttgaaatttatgatttgagttggcttattttctgtatatactaaaatatttaattttgtctagggaaatccttcagaaaaaagttaaggtataaagaacatgcaagaaaattgtgttcataaacattcacatttagaattttccttgtttccattatatggattataaaaaaataacaatggaatactacaatgtatttttttttgtttcattcttctattagctgtatttcttaggctcttacctttttgtaggacatacagctaacactgcagacttaaaaaaaaaagacatcttatttaagggatatagaatttctacaaataccgtattattcttggatgccttaaagtgtattagagaaccatgaaaaggaaatgtcctttcagatactggcctgcttgaaattttgttagtacttctctgaagtttttggtgtttgttgaaactaaaattgttgtgggctgcttcacccgagcccagacaaatctgtagaactagttatctgtcaccgtcatctgttgtttcctgcctggggggtccctggcactgtctgttagaacttcacagccattctgtggcctgcccaatctcagaatctgtgatggcctttgtgccagattgcagatggtcgtgggcaggcctgtgagtggatgtggagcgtttctggggggcgtagtctgtgagatggcacgtgggaccactcacacaggacctgtgtctacggttgcccccaggcagctgcactgcagaaatcctttgagggccatttcagtgtcctgaaaacgctggctgccccctgcttgacttagagaccaatgtcaggggtctgtaaaggtggattagaggattgaggccaagttcagagtcttgaatggatggcaggagaaagaagagaaagtctgaagaccacatggtggccacgcccctcccggcctgggctcttttgcatccccacttgccctcactattccttttctggtagtttctacactccgggctgatgtgggtctgaaattcta

SEQ ID NO: 35644 - DNA, 1026 bp, Homo sapiens
tgccacataaaagtccaattaagtaaaaggtgatatgaatgtttattttatgtgaagtacttttaagtgattattgttatttaggtgttgcgttctgtggagtttcctcattattaaagtaatgtatttgtttacaaaacaatgacaaaatgagacttatgggaggggaggaaggaattattaacataataggagaaagggctttcttatggggataaatgtgttttgtcactgaagtttttatttgttctgtcaccgagccaatctttattgcgtgagaagcagaccctgctgtattaaatgtgctgatgggaaacccggatgtctttgcttttctccttgccagccgaggagttagactagaacaccttcaagatgagctgtaacttttgaatagtgaacacagattttataatatctgctggtgttttatttgtcacatctgccagtttacctaaaattaaaattttgaaaaccattttttgtggaaaggacaaatcatgtacttgttggagttctgggctgaatattttgtgatgtggttttcaagtgatcttagaataattatgatgccagctaactgtccttgagtgccaatgctgccatgtattgttctcattgcctgtattatttaataagtgtaatattttctccattttacagatgaggaaactgaggtacagagagattggttaagtagcccaaagtacagagttagttaagggatggggtggtttgaacctagttcttggcccattctcttaaccacttcgctataactgttgttaactaaatcatatagtagacatgagtataatttaacacaatttgtcttttatatgactgatgaaattagccccgtgggtttattttcaatgccttatacatactaaagttatgcaaagtgtttctatttttgaatgatttttctttccttattttcattgttttcccctgcactgttgctgataaccttacaaataaagattgtaaaagaccaggagaaagataagcatgccaatcata

SEQ ID NO: 35645 - DNA, 1035 bp, Homo sapiens
tgtgcactcaaacctggtagctttttcctttttttctcttatcgttacgttgcacctcagaagatgcctggtacttttaagtaaagcaacaaatgtaggaagaattgaactgctcttttcaggatcctgatggatgtctcaaatgtttctagaccttgataaaagtacttgagcctgtcaatagcctagacgttttaaaagctgcttatgctttttatttcttgggaaatgcttgttttgagttgtgtgtcttgttttaagccaaacaagtgtcatctgtggttgtgctgctagtacatttctgcttgacctcacaataaaatactgattttgaaagcaccagcctgtctttttaccgcagaggtaatttgagagaggagtggagggtgcccggggaaggagttctgcactgccagcctcatggatgccagagagaaaggggagttcttttccttggtcgatggtcacagaggaggaagagtgtgaacttactccttttttgttctgcaggttgtcttggtctgtctttatgatcgtgggcagcttagggacaagcaaggtcctggcacccatggttgagtgagtggaccacatactaacattgtatggtcagtgttggtctctaggtcttacgggaatgtgtacttaagtatggtggaacaatagctaattaagtagagatttcaagaaacaaaggatttgaggaagatattgcccaaaataagactattgtatattatcctatgaagtcctgaaccctgtctctcattaaaatgctattcagattttggggaacagacatgaagtaaaagatacagtgtaacatggagagttaacctaaggatataggagcttagagcagtgaccctgacctgggcaagtgccttcccctctttgactctgtttcctcactgtaaaatgcagataacagtagtactcattcactgggctgttcggatgattcagtgatttaatatttgtaaagagcctagaacagggcctgccaccatgtatacactttagtaataatattag

SEQ ID NO: 35646 - DNA, 1045 bp, Homo sapiens
aggaactctgtgttgtttgaggttgtgcagcacactttttttctttcattaaatgctttaaaatgtactctaagaaagaaaaaacattcaacaaaattgacagtattggccctcaaggcagtatttttaaattgtcaggagattttttatcagactcagatcttctggtgagaggaatttaggagggcttctgcacagagggacagaggcagtggcagagcattgcagccccccagaatggggtccccagggtgttggctgctccccctctccctgtgtgctgagctccctgtgtgcgggcctagcatccagcttgcagcgtggaccaagtggggtcctggtgccgtgggagccctgattgctggaggagcccagctggggccacaactagggcagcgagtgcagggtatggcgccccaggtggggtcagggggagtcagatggaggagcggtcggcccctttggttgagttttgaaggaatacaagtagatggtagatgaacggggaagttctgtgtagaaggttggaagtgtgaaatggcatgaaattaaaccactggttacttttgaggacagcttccttgttgacagatgtagaaacagagtctagggaagctttggcttgtctgaggccaccaaggtaattgtccagcgaccccagccaagagtaggggtgtccagctttccccaggctccgcaccctctgctgtgatccccatggggacctatttgcagccagccattttgtggcctgcgtttagcttcttgctgtccaggtgccctttaacttatgggagcatctgtcagagcccatttagaggtctctcttttccagatctgtggagcagttgagaggaggttattttgcagcatttgtttcttctaaatctcctttcaaaccacttttgaaagtgtttttttgttgttgttgttgttgtcgtggttttatgattgttttggggaaaaaccatgaaagaaaaaggaaataaatttttatttcaacatgaatcatagatatcacccttatttttccatcagttattgt

SEQ ID NO: 35647 - DNA, 1052 bp, Homo sapiens
gaaatgctatccctacacctgcagcttctttctgggcccctttcttgccctcagtcctggcactagtccccaggagagtgagagttgttgcattgaaatgaccataaagcttttcttctccctcgtgctgtcccccacgaacccaggtatgaagtatacagaaggtggggaattaggattctggggctttcccatgccagccacgacagctgcagcctgctcagtcacaggcacactcagttattaaaattagatttctgatttataggaagattgtcttgatcaatgatgacaagggcatacctgactaaattaatgagaaaatggctagggtaagtcctgggcagctatgtgaatgtgagtatcattctagaagtgtgtgtggcacttgctgcagccctgtgtggctgtcctggcactttgttcccggtgtcagggcctctggtgtgtgattgtcgcagcacgtgtggggcagtgtgtgtgggcattcccagcctgacacatggcttgcataaagattgcataaggttataggaaagtgtctctgtcttttacaccgtattgccagtactaatcagtccaaagtttgagaaaatagtaaaagaataacatacatggttgaaatcaagcatttaaaaacattcagtaactttttgaaagaagactctgcttttctgattaaataaataaaagtcttattaatgatttttagtataactatagttcatgtgtgtgttggggggagagtctcgtttaccttcccaaaacaggttggattttaaaatgcaacttttgcaaagtaagtaagtttcagcacaagggcatgttttcatctctgcactttgtcatctgtgtcagtaagcagttaagtggcacagacctgcctggaccccctttggcaggttgttaggatgaattagtgaagtcgtcggtttaaagagcttagggtggtgcctggacagagtgagtgtctaatgattgctaaagtaattttcttagttttactatggaatcataataacccacatagaagactgatattaagagcacag

SEQ ID NO: 35648 - DNA, 1027 bp, Homo sapiens
tgatagaggtgaggaagctgcagaagaaaagttggaagctagcagaggttaaatcctgagattgaaggaaggaagccatctccataacaaaagtgcaggatgaagcagcaactgctgatgtggaagctgcagcaagttctccagaagaccttcctaagatcagattttcagtgtaggcaaaacagccttctattggaagaagatgccatctaggactttcacagctagagaggagaaatcaacatctggttttaaaacttcagaggacaggcgactttcttgttgggggctaatgcagctggggactttgttgaagccaatgctcattgaccattctgaaattgctagataccttaagaattatgctgaatctactctgcctatgttctgtacatggaacaacaaagcctggatgatagcccatctgttgacagcatggtttactgttttaagccctctcttgagacctattgctcaggaaaaaagatttttttttcccaaaatactgatgctcattgacaatacacctagtcacccaagagctcttgtgtagatgtataagaagattaatgttggtttcatgccggctaacacaacatccgtactgcagcccatggatcaaaaactaattttgacttccaagtcttatcatttacaaaatacattttgtaaggctgtagctgccatagatagtgattcctctggtagatctggacacagtacactggaaaccttctggaaaggtcaccattctagatgtcatgaggaacatttgtgattcatgggaggaggtcaaaatagcataaacaggagttctgaagaaggtgattccagtctcgtggatgacttcgaagggttcagcacttcagtggaagaagtaactacaaatatggtggaaacggcaagagaactagagctacaagtggagcctgaagatgggactgaattactgcagtctcgtgattaaactcctcagggatgaagcgttgcttctcatgaatgagcaaagaaagtggttttttgagat

SEQ ID NO: 35649 - DNA, 1101 bp, Homo sapiens
gtggaaccagactgcagttgatcaaagcatggttgagggtgggaagtgctgggctcatgcgagggtgtgtgagtgattgtgcatcaacatgaaggatcactgggggagtggtggggtgtaaggttcattggaagtctgggactcagctatgattgaggtcagatacctagttcaggggataagaccatatcatcttgaaatgatgggctgctgaagggtcttaaagaatcatgggtacagtggctcacggttttaatcccagcacttcgggaagccaaggcaagtggatcacttgagcccaggagttcgagaccagcctaggcaacatggcgagacctcgtctcttaaaaaaaaaaaaaaaaaaaaaaaattagcccggtgtggtggtgtgtgtctgtagtcccagctacttgggaggctgaagtgggaggactgcttgagcctgggaggcagaggttgcagtgagctaatatggcaccactgcattccagcctgggtgacagaatgagactctctgtcaaaagaaaaaaaaaggaatcatgtaactgtcctcccttctcctttagtaaatatttttccttcctttcttccttctcttattattatcttattaatacataccaaaacatgtatctcttattatttcacagtggcacactgaatctaaagtgatcctcctgcctcagcctcctacaggcatgggattccgggcatgcaccaccacgcctggctaattaaaaatatttttttgtagatatgagatctccctatgttgcccaggctattttttgttttgttttggttttgtgttttttgtttgtgtgttttgttttttgtttgttttgagtctcactttgtcacccagattagagtggagtagcacaattagagctcactgcagacttgaaatcctgggttcaagtgattctttcacctcagcctcctgagtagctgggattgcaggtgcataccaccacaaccagctaattaaaatttttgtatgtgtgtgtggagacagggtgtcactgtttcccaggctagtctcaaactcctggcctcaagtgatcctctcactcaggcctcccaaggtgctgagatagg

SEQ ID NO: 35650 - DNA, 1043 bp, Homo sapiens
catctccccaccctcacaaacccctagaggtgtcgtgcacgtaatgacttgtattcactgggcactccactgggtactgattccctgtttgatcctcgctgacctcatcagatgctgctgccccactttacaggtagggattctgaggcatggagtgttaacagcctgcccaaggtcacctagttgcagaactgaattctgatcagcttgagccaactctaaaaacccacattctttccactattgtctgcgttctcgttgcatggagggataatataggaacatgaatgactatgagatttagaacagaggcgcaaaattcacttcagcaatgaagaatgggtagggaactgtgtaggatctgaaaggagaacatttgtttttgatcactaggaaaggcttcatgaagtttgagatgcctttaacgaaggatgcttttcacgggagggaactgccatgggaggaggaggagtattttcttgatttaaaagtattcgtatataatttagaagttgtttcagggtaccctggttttctcatgtagatcatcccccaggtttccctgtctcttcagcggttctttcctaaattagcttttgcctgactttccttcctttgcaacctcagtttctgattttatgtctagtctgtgactaataagttttcaaatagtaataaaaagagttaaagggactcatacaggtttgtggaatgaggcttgagaaactaagtgaagcctgaagtttatttccttttatgaacacagtgtgcttacattggtttattttaacataaactatttctaaaaatggagtcagttattatctactaaatgcaatttggtagggagatttctttcaaatcatgagcttctcagtggggataaaggaagaaaagggggttctcagtggtgaaaagattgggaaggaccaatattcttatgtctgtgaaaatcactgtaaaatttgagctaagctgttaccctgaagctgttttcccgttcttttacatcacagcagattttcattcttctcctctttccc

SEQ ID NO: 35651 - DNA, 1031 bp, Homo sapiens
acgcacatcaatgtagatgagtcatgcaaactggaggcaagtcacgggagaacgcaagtacagttccagcgtccctcctctgaaatgctgggcaccagaagtgttttggatttcagatatttttggattttggaatatttgcatatacaaaatgagacatctcgaggatgagactcaagaccaaacacagaattcatttgtgttttgtatataccttatacacataacctgaaggtaattttatacaatattttaaataattttgtacataaagttttgatgtgctttgattgagacctgtcacattaggtcaggtgtggaattttccacttgtggtagagtcatgttggtgttcaaagactttaggaatttggagcatttctgattttctgattagaggtgttcagcctgtagcatgattgcatttatataaagctcaaaaataagcaacacagcaatatattgtatactaataggttaggtttgtaaatggcaaaactgtaaagaaaaataaggactgaatgacatactagtctgttcttttgttgctataaagaaatattggagactgtgtaatttataaggaaaagaggtttattttggctcattgttctgcaggctgtgtaggaagcactgtgccaggatctgcttttggtgagggcctcaggaagcttccacttgtggctgaaggtgaagggggaactagtgtctcacatggtgaaagagaagagagagaagtgggaggtgctactctctttgaaacaaccaggtttcacatgaaccaagtgagaactcacaaagacagcaccaagacattcatgagggatccacccccatgactcaaacacctcccaccacgccccacctccagcatgggaggtcacatttcaacacgagatttggagggaacaaaacatccaaactatatcaaatggttatgcagaaagtccgcatagtggttacgtctagagccagggaggtgtgtgcaatcagggaggggcatggggaaggcttctaggggagtgtcagtg

SEQ ID NO: 35652 - DNA, 1029 bp, Homo sapiens
aaaagccagtggttgccagcatcagtataatcctgagacagttggacaggtatggcctctgggttaacatacttgttgagcagtcaaatctttttacaacaaatagaaggatctggaagaaaacttccaaattaactgtagattgcatgctgaattcagcctaaaaacaagttacaaagtgccaggttttttgttttttttttgagttgtcataatagtaacaggattgctcttacgggggttcttagactgctacaaggctgtctggcctctgcaggtcaataaacatctaaagagcaggacttggctggcctctgatcggatgaatcctcagagcatcagatgtattgcaaattacattcagagaagaaggaacaaagctgtcaaagcaaagtagattaactgaagtaacttaggcaaggcagtttatatgtgagctataatatgggtttctaatattagaacatcacagtattaatctttgaacatgttacttacgttattattcactaatgggctttgtgtttctaatctccacagcaagcgtttccaaccctttcagaatggtctggaacaccttttttatgttaaggacttatttttagtgtcagcgatagatacagcatttcaatgaaaagtaacacttttaaatggatttgtctaattaataataacagtatctatatctctttacacataacagtgtgttttggaagacatatttgtcagctcttactgtttacacagttaaggctacggttagtgtaatgtgtgttttattttgttttagagtataagcttcttaaaatcaggaacatgccatttaggggaaaaatctctggggtttaagagagtaccatgcataaatatgtattttatgaatgccaagcgattaaacacaattctaagctttatcaagggactgactggcagaaagttttgccaaattctttgatgttattaaagatttatttttgtactgagtttcatgttagaatcaaatccatgcttactgaagtggaaataact

SEQ ID NO: 35653 - DNA, 1030 bp, Homo sapiens
atgtttaatagtacttttcattcataaatgttagccccctctaaggaccaggaacccgttatttagttatctctgtgacatttttactactaaaaaagaagtaaagccagtagttcgaaagatcatgcaattttcttttgtctgggcgaagacctagcgatgacagtgttgcatagttccttcatctttatttaagcttttggagcctcagtatctttataagactggaatgataaaacctctcaacagagtcattgtaaaatcacatcagaaagtgtatgtagagcacgtgataccctacctggatctgttgttacctatgattgttgctcccatataatacctaaattattggatttagaaataatttaaggcttttctagattacatgactgaacagtacatgtggattgctttaagtattcccaatcaaaatgaagtttcattattatttagaatgagtacataattcctatgaagttatgaaaaccatattggtaaaatatgtttttaaaataccatcatcttctgctgtatgctttttggctgttctaaaaggaaagaatcttctgggtttttttttatttgtttgctttctttctaattttagatgatgatttttggtgcacagaaaataatgaagagttttgtattgtgacttgaattttgaggtctcccgaagagagatcattagagttctaaaactaaatgaaggatccacttgagaaggctaaattttcttcctctattttcctgacaaccccgatggaagtaataaaataaatgtgacaattttaccataagcgtttagtgataccaagctgacttcattaggattgtatatgttaacaagaaatcgttctgcctgcctgtctgtcaaagtcacatactctgagatttgtactcttagtgtgtgatagaaattttctaaaatccttaagctaattagctttaaaattctcatgtggttctctcacatgcatgtgtgtggttctgtgtgagagactggcaaagctggaccagtgagggt

SEQ ID NO: 35654 - DNA, 1087 bp, Homo sapiens
ttagcctggtgtggtggtgggcacctgtagtcccagctactcgggaggctgaggcaggagatcacttgaacctgggaggcagaggttgcagtaagctgagactgcgccactgcactccagcctgggtgacagagcaagactccatctcaaaaaaaaataataataataaatataaagatttcttgcttagactgtaattgactaaaactttgtcactgttaaattgcaatgtagtacagattatatacaactctaggactgttcagaatcacagcagattattgcaatgaataaaacattgcctctatccttagctctgtcaaatgagcctctgccagctttcttgccaactcttgaatattttctaaatttttataaattcattcatatcccatcatctgttatttgatgggcagtggggttaggcttaggcaagatgaatgatagggtggtctggttggagcagcattcatcgtttaataggcagcccacacgtaattgaatttagagtgatgttacacttaaaagggttttgatgcccttgagcaagacgtttgtgtaatagcaagtagtagaaaacctccacagagtttctggcatggatgaaaaagaatggggagaagaatgcattgatgtaagtgaaatttctgaattgtttgctctgaacttgcaatttaacctgtttcctagtttaatgtgtctgttatagtgggttaatctccatcttcttggaaagaaatctcatttctttagctctcatgaaatacacgattctacagttttgggtattccagctgacatatatgtgttgctataatggatttgtctttcattgtactgataatgcttctttcatctacatttatttttatggggccagaaccaggtatgttatgttttctataaatagattactttaactttgaaaacctgtgactgagcattgcaaattgcattatgttaaaactatataaaattggttcatcttctcatacgtgattttttttcccttaagacaaatatggtctctttagaaggccttaccaaagtagttgatccttctcagctaactcctgagtttgatggc

SEQ ID NO: 35655 - DNA, 1042 bp, Homo sapiens
atgtgttgcaagccatgaacatgggtgaattaatcattgagttttattggagctcattgaattttatattacatggacaggagaatattttgtaaagtaaaaaaccacattagaattcttggatgtaaaaggacttttcaaaaggtgataatccagtgtttttattactaaagcttttaatgtatctgtcagtgttcttttgttttaagtagcaccttgtctaagagactggaataccttcttttcaattactggaagaccaggttactgtcactgggattctggttcaagtcatggtagcaatgctaattgatgatagtcatctatattttcttaaatgttttcattgcaaatgtcttaattgacatccttgtccaagtaacatctatattgaaccttaagggagatgtcatagttagtttttcccaccttttttatagtaaattttatgtttttgcaatctgcacaggtgtctgtgtacttcttgatcaaacagtggaatcttttagtcattgatatttctgtcagtaacctgtgggcacagcagaacccatccagagacccataagttcctaatttcaccctaacgggtctttaattgaacctcactgtggcaaattaagtagttcagcgtggcagggagactgggctgagagtcagaggatcagagtttttaatcagcctgggggattagagtaactctctttacttatctgcttcttaattccttctctgtaagaggaacacatcagataagattttctggtaggtcctgcaagttcagaactgctgacttgttcttcgaagtaaagactcttctgagagaatcagacagcgcttgaagttgtccagggaaggaagttgccctttcttggtactgccccatctgtgggcttgtgtcagtaatttctctttctggagtgattgcgggttgtctttttccttccggtagatgtttgactggatcacacacaacaaaggcctgtttctaaacagctacacagagattgggaccagccaccctcatgccatggagcttcag

SEQ ID NO: 35656 - DNA, 1136 bp, Homo sapiens
accatggctaggattatttctatcatgggctgttattaacccagaaaaagggcagaatcctttgtccacaaggttttcatgtagcacaccatccttccctggctatatgttttcagagaagtataatcagtgccctctcaggatactttaagaaattataagttagttctaattacaggaatatgtaaaacttcttgaatgttttttctttattggttgttgcttcaaaaattggagtccaatatactttaatgattttgatatagtgatatgttaatctgatgcttctgttcattacattatgaagtattatataactgaaatgtgtttccaccatgttctgtcagaagcgttttgatcttaagaatacgttgcaactcctcttggttttgggtgttctgcagtggccattgtccaggagcgcttaattgctgacttagacctgatgatttattaatgatgatggttaacctcaatcaatttgtgtttgaaaaacaataatttaataattggtattaaatgcaatacaggaagatgatagagtgaaacagagctcaaaaatactgacaatcatctgacctgaccaaattgacatttatagaacatgacacccaagaaatactcagttgacacttaatgccgtatgaactggcttcaagccgtaaggtctgcatagatatttttctgcactcaacaataaaaggatttccataaacagttattatttgggtgacttgtctattttaatgtcctaaaaataaactgggagtttgttcttactatattttaagggaattatagcacatttctttctggtcagttgagtattgcatttcaaatagtcatcctctgcattccctgctaagttaaaagatgtgtgaggaacaggagtaaagaggttaaaaccgagggaaatgtgttgatgtctgtttggcttaattgaattagcttttttaattgggccttccgcacttgcctttcactcttaactgtgatggatttcgataggatctccctaggaaatttggcagtgatttctcagctgttgatgatcctggagatggagggtgtcagtggaggagattgagccagggttgggatggctgccgcaggaccgttgatgatcctggagatgg

SEQ ID NO: 35657 - DNA, 1049 bp, Homo sapiens
gttttgccatgttggccaggctggtcttgaactcctgacttcaagtgatccgcccacctcggcctcccaaagtgctgagattacaggcgtgagccaccacgcccagctgtcacttccatcacagttgtataaagcctcattaaagatcgcagtgttgctgtagcgacatgcagtgctgtagtcagcatctgccatagtatcagagccaacagcccatatgacagctgtcttcttctcaccccaaactcagcttgaggccttgcaagcacttgaaatataagagcagcaaaagtagagcccaggtgcagcctatggaacacacatgtcaggcatatggaactgactcacgccaactgggctgctccagacgtttcctgttttggtcttattttggtttttcctttctgataatcccaggtttacaggtgtcagagagtcaaaccaaggtaaactgatctggttttgaataagaaactgaatagctgaaagaaatagaaatcatcatttggaggtccatccaataagaactttgcctggagaaggaaccagctttctctgtgttctccctgaagcatgggaaagtatctgtcgttgggaacacacatgacctttcaggaggtaattgacctgcactgttggtaggagcatcttatgtagccatctgaagacagattggaacctccttactcagaagggttcgattgtttggccaaggaatgtcaactgttgctgcagaataagctgggtggttacctgctgaccccttttcattcttttctgctttattagaaccttgatatgagaataagttcagcaagagttggagaggagagtgaaatcattcccaggcttcgtgtggaggtctgtgctttgcaggccatggcgagctaagcctgaaaaagaattaagacggtgttggctttgagtcggcagaaatagtgcaattcatttcataaaagttttgaaggaacactttttctttattacaggctaaatgtcttggtgtattttgcctgtttttgttgtatcttgggaatgccattttctag

SEQ ID NO: 35658 - DNA, 1047 bp, Homo sapiens
gatttaaataaaagacagtgactgagtaactaaaataaatggaaccaggttgttaattttggttttatagagaatgtgggctggcagggaggaaatctttattttgcaactggaaaaaaaatctgactttgtataaaaaagaacaaattcagagtattttagatttacctttgcttttcatttgtttcatgtattctttaaatggattatagaatcagaggagcttattttcatttttgtgtgcgtaagatgtgacttagaaggggttctcattgttttgacttaaaacacactaattcattatgtattgtatcttgagaacagtggctacagttgacagatgattatctattttctctgtgtgctctttggatgcagaattacctgtaaaaacaaactagcttagtatgttcttggttgctttatgtcagatgtattatgtagtttttcaagtagcaattctagagatgaaactctagttttagaaatattttaaagacagtatttacaaactgaagtggaatgtagtgagcttggagttgagaagacctccatttgaatctcttttcttgggcaggttacttatccgagcctcaatttcttgcttaatagaaataatgattaaagtctgctctctttttatttgtagcttttatttgtgattcagaattcagaatttctcaaagattagaaaagtaacacagtgtacaatactaacacttctagtggcatctggacagcccccccataatcaaatgcatggctatttctatagctgaatgttcaaggacttgcacttattaagtactcagtaaagactatgtaagtaccctcaggttaggttttattgacggatgaatttttagaaccaagttttgaaaaatatttggaatttcagagctttctgtggttgagatcatggaactgtattgccctcccaagcagagcatagaacagtcattcaataaatagagctgatggcaatgatgcgatgcatgaccatgatagaaaaccattctaggaagtatttgcaatcaacacctctgc

SEQ ID NO: 35659 - DNA, 1051 bp, Homo sapiens
gtttaggtggtggaagcgagtcatacagtgtaacttctgcagacacaagacctagctgcaggggccctgggtttcagaatttgttttagacacggctgcagtcacctcaggaagcacttggatccattttgcatgcagttttgcagagtcaagaacttcctcgtaactaatttgaaggtcctttccttaattttgtacagtgattgtgagtagctctatcctgttgaatgaatccatgctaattgatgtgtatgtgtggtgtgaatagccatcgtgcattttcatgggctagtgtaaaaaaagaaataaaaaatacttttcatgcgaagctttttgcaaataactgtcaggaagatactctttcatgttaatgttcctgttttagattttaaaagttatgattaaaacagccagtaaagcccagaaaactcaggttcaaggaagaatctggttttgagagcacagaaggtatctttactatcattagtaaatctttggcatagcatccttcctaagtacctgctctgtgaattcttaaaccaccctcgctcttttctgcctatccccctggattcaaattatctttcagagatgtaacctgtcacaaagttattatccaggaagccatttctgtcaacagcttttcgtatgtgccacgtaattatcttgtcttcctggataaaagagtttgtcatttaggaaagcaggagaccttgaattcattcttgatttttaaaagaaaagcagaccagtgactccctggtcatgacttaactcattcatcttttgcaaggaggataactgcctccataacacgtggacatacagaatgtccccacgtgtagcatgctctaaattctgatttgtgacagccgttagagcatgcatatgtacaaaataggctgttgctttgcagtaagtttggttcctaatataagatgtattgtttttaatcttttaaaataaattactagtggaaaattcaggtcaaattatttgctatcaagcattttctttagactggcacgtatttacagggtaccaaatcttc

SEQ ID NO: 35660 - DNA, 1029 bp, Homo sapiens
ctatgcatatttcagagaaacaaagtcatctggtaatagtgtgtttttgaagatatgtttgacagcaaaagaacacttaaaagcttagcttggatttgccatcattagtaattagggaattggaaattgaaaccatagtgagatataccactcatttagaatggcttaagttaaaaagactgaccacatcagttattggtgaggaagtggaggaattgaaactctcatacgctgctggtgggaaggtaaaaatgatacaccactttggaaaagcttggcagtttcttaagttaagcatacacctgccatatgatccagccattctacacctaggtatttatctaaaaggaaggaaatcataagttcatacagaggttgtgcccaaatgtttacagcagctttatttgtagtggctccaaactggaaataaccgagatgcccaccagcagatgaagggatcaattgtggtttcacacatgcagggactgctattcgacagtggaaaggaacgaacccttgatacacacagtagtatggataaatctcagggtaattatgctgaatgaaagaagctggacagaaaaaaaaagagtacatactgtcccattccagttctagaaattattttagaaaatgcaaggtaatctccagtggctgagagcaggtgagtgccagggagggagcatgacagagggcatcagccagctttgaggtgagggagaggctcacggtgaagtgggtatagacaaatgtcagaactcacattggacactttacatttgtgcagcttatagtatgtcagttagtcctcagtaaagccgttttgtaaaaagcttggcttggaaacagaagaccacatgcacacacagtttctttctgcaagtgcagttttgacttatgagtcttgaggcagcaggcgttgcacagggtatcaagcgggaggtcccgacttgccccatctcaccagctgagccggctgtccccactagacatacagaagatgcgtgagctgactcttagtccctgagg

SEQ ID NO: 35661 - DNA, 1030 bp, Homo sapiens
ggaggatcgcttgaggccaggagtttgagaccagcttgggcaagatgacaagatcctgtctctacaaaaagaattttttttaattagttgggcatggtggtgtgtgcgcctaaagtcccaagctatgtctgcttatttgaatattgtttgattataaaggtattaagaaaatgcctaacatcacataccacactcaaagctagatttaagatttgccatctttcacctctgctccactctgcaggccattgtgtatggccagacagcctgctcactgcccagctccaggggccatgcatgggggatgtgatgtacacatgactatttggaattgagtaacatggtggcctgctccactaataaagtgtatatgaaagaatttttccattcctgaatactccttttcctcaagtttgatgtgtggttattgaaagattgggcaatgacaggcttatttttattcttgtattttataagaaatgtctaaaattgtgagtgatatatgacctttctgatcctcagatatgtagaactgtttcttttgttgggtttattgaattggttataccaggaggaactggtagattttgaaaagaacacccctcacctttccttttcttagcaatctttttctttggtttctgactgcctttcccttaatcagaaaacacctgctttggtgtttggagatgtcctttgatttttcatcatgagctgaggctccctcacttgccttctgtcacccgatcttagaatcttctaagaaaccattttgcttttactgtatagagaattcttagctctgaaaggaaagtctttcagtgcacttgttacaatgttataacatttttagtgttgatggaaatgaagctggaaggctaaacaagagtctcccatccccggctcgctgagactcggctcggtccctttgcagctctcagtgcagtcatttctccacgggtcttgcaggcaccacctgcatccaggttgtgggtgtttatttaagagagatttctgtcctcactccaaa

SEQ ID NO: 35662 - DNA, 1038 bp, Homo sapiens
ccattcccattgaattaagcagatttcagtgattttgtttccatttgaatgaagcctatcagtctttctccaaaaagactgacattctagaaattcttttaatacagactcaactttatgtttgtacttatcttctacagaaataagatcaggaaaactatgaaaatatttttataggaagcttaatttctctgaagccgagccgtcaggtgccctgtgacttacttctgagggttgagagacagtggagcccccttgggactgcaggcctatgctgtttgctctcttatagtaagagaaaggaactgaagaagcaacagaagtgtattctgaccaaaataaaatgcattttcctttggccacaggaggtacatgattctcttttaatattgttaaagcagcggcagcagaagctcctttaggtggcctgtgatgagatgatgctggggtcagcaagagcgcagtcccctcacccctcagcagaaggcagaaaagaccaaatgggtcttcagccaaatatttacgtctccgaagtatatgctcagtgaacacactagcacttgcccagaaataaatttgttagaaagcatttgaaggcgaaactggctagctgtttgaaagtcacaataacttaccctagttaagagctacatgttttgttcattctttagggggcacagatttctcagtttctggcatatctcactagtaaaatgttttaaaacacctttgtaatatgataccatttttattctttgcagcatattcctaaaggagctggaaaaatatgaacagttgccagaggatgttggacattgttttgttacttgggtaatgaaacctcaaccatttgttctctcccagctattaggtgacgttgaaggaagttaggagggatggtcttcatttcctttaagtcaccatcttctgctcatatccatgcttgcggagaaatagactttacctcaaagaattgcatacttcaactaattgtttttgtggagtgagtttttttattggccctggtgatggtttgaa

SEQ ID NO: 35663 - DNA, 1039 bp, Homo sapiens
catttactatatatttatataattaccctgaattttttgaaacacctagtcaattaattttactttttaattcattagtatttattgacctgcctaatttctcattgcaggagttaaatgagagtgtgtgtcatgattatgcgtctgaactgcactgactgaccctaaacataaaatgagaaatcatcagttcttgatattttagtacccttagttcccagctgtggcttgctgactgcgggccaggcatggtgcactttggtacgctctgcatatgttaacctcccaacaatgctagtctgcaggcatggaaactagcctcagactgtaaggagtgtgcccagaatcaccactcaaacacgttaacaggctcagctcagaacacagatctggctgatgcccagggcttccactgaagccacggagaacccatgcccaggaggcttcctctgtcttgttgcttgtccctgatgtcacacccctcgcggcacaccttgtccatacagaccgcaagtattggagtcaggctgacctctgctttttattagttgtgagtgactatagttaaaatcacatttaagaaaacaatagtgattagtcttgacaatagaaaggtaaacaaaacttagaatttgtgctaagagttgtcacaaaatgtattttatttttatattatatatcatcaatacacattttcttgactacctaaaaattgacagattttgtctggtaatgttcagcataccattttctcagctggtgaatgttattaagcattaaaatgtagaaacatgcattcatcccagtgatggtattctatgaatcctgccatgttccagggactgccctaggctcgacaacgggaagttattatgtaatttgtctagatataaaagaaatttagaagatggagttacaaatgctggaactcttctttaccctttttgttagcaagaaaaatctacagacagtaataagtagctacatcgttttgtgaaagtgatactattatgggatttttcaattggaaaagctctcc

SEQ ID NO: 35664 - DNA, 1023 bp, Homo sapiens
agtggtgtgttaggaagaattatcctctgtaggatgggtcagtggcgtcgagtcaggatcagatgggaaactcttatctagggttggccgatgggcatttttaaaattgttgaaaatactaataatgctttcttgtgcatcagtttttatttttcttttaaattgatttgcctcccttttttcatgttgtagggtttgatgaaaacattgagtctcagggagaactcatcctacaggaatccttccaagtgtgggacccaaaaaccttaattcgaaagggtcgagaacggcatctcttcctttttgaaatgtccttagtatttagtaaagaagtgaaagattccagtgggagaagcaagtacctttataaaagcaaattgtttgtaagtataggcgttcagaattgtaagtctaaaggtaacacaattgcagtctttttgtaggtagagaagaattgttcattgtcttcagtttaacctcccaatctgtcctgaaatgttcaagtctgaattgtggtagggttttcatcttcagtgaaattatttcccaccctcaagtccactagagggtgctctggagtttatagacttaggaaacttgctcttcttaaatcctgtatcatataactgcaggataagaaaacatttcataagtgaaatcatttatctccggtgtgcttaactagctttataaataaaataatcatatctatgactaagttcttattataattaatttttcaaccataaacattggagtatatggaaacagccttactgggtggctcacatttaaaaataaatgtatgaaatataagtgcatgagtaaatttatggttgtttataacagtgaaatgtcattattagagaaaatatacttaagccaaagtacagtctgaaagatccacagccccagctatgtggagacagctgcccctgagtgcttggcagatccggtgatgcattttaattcgtaacctgtcattgtacttcttggcaagagcaacatacctgctgccatttt

SEQ ID NO: 35665 - DNA, 1026 bp, Homo sapiens
tgccatcagcggctttgggatgtttgggggacggtggagctaaggcttatcgaatattgggagatgagccagagtgtaatgggactctggtgtatgaacctgcatgtcaccccttgtgtctcttgcatgctttttcatctctttggtattttcagtgactgtgagttactcccctgtatgtcagccttctagagcctgttcttcagtggaagccattgtgttcataagatttttgttcatatgtgatagtgggttgttttgcagtgaatatgtgattatcagcccaatgtgctctggctagtactggcataaagccctatatgatatcagttgcaccgatagctaaatttaaataactgtattttcttcctaaggtctaacattttaaggtatactcaaaacctggaaacttgcaacttatataaaccgcttatccagactagctacagtagtagatgccaaaaggtgcttccaaaaaatagtgacagatactttagccagatctggactttcatttaggatgtcgtaaatgctcatggtacagttgacaaataagactcttcttatttgtcaggcttcgccaggtacaagttttctagggaattttgggtaatacctttctgacttccaaggagaaagtaaaggaaacgatgttctcattaatttcagggattgctgcatggtgttggtgtagagaggcaggcgatggtgatggtgggaatggtagtgtaatgatgatgtaggtggaggtggtggagacgctgtggtggtggtgatggcggtgaaagtttagatggcagtgagggtggagatggtggtggtatggattttggtggtcacggtggtatagatggtggtgagagggtaagggtgtagaggaaggtagtggtatagatttggtgatgggggtatgggtacagatggtggcagtggtgtagatggtggtgatgagggtatagatggtggtggcatagactttggtggtgatggtggtgaggttgtagatggaggtcatcgtgtagaatt

SEQ ID NO: 35666 - DNA, 1035 bp, Homo sapiens
aaaaaaaaaaaaagtctggatcaagtgatgtcgtgcgtgctcagtctgcaggtgcttgctgacaatctagtctgtgtggttctcagaggacatttcttgagagttgtaatggagtcaaggtgaatctgccatcggggattggcagttggtgagcttggaacattgggcacatttcttctgtccacacctcagttgctcatttataagacggggctgcaggagtctcccacccgcagagtccttatgggagtggatgacagcatgcgagaagccctcggctaggcacagggggctggaggtggtggcagctgcgccgctgttccctgagtccagcaaaggaggccgcaaggctgtggggatttgttcagtttcctgctggcagtatgccccctactgaccagtgcgcagtgtttgcctcaatagcctcagaggcgttttggtggcagtgagggtggctgtgttggtttatttgcccagggctgcttaaaaggtcttggggctggagaatgatggattattgcaatagtcagagatctggagtaatatacgtgctataaaacaaaaaaggttttgatgaaaacgtatttttaaatagtcatttatttggtagcatattaaacgtcggatgtggttgcttttctgctaaaaagtcattttgaaaatagaaactcaaggaatgcaggaaacctgggtgtggttagggcaaggtctggaaagggccgttccgtatcctaagcaacgctaacaccttgttaaggcttccagcatagagaacaagcaggactggataaagcatatccgcgaagtcatccaggagcggacgatccacctgaagggagccctgaaggagcccattcacatccctaagaccgctcccgccacaagacagaagggaaggaggtgcgtgtctgggcgccactggaggtttgtggatgtgggagggaggggcgaggcggtgttagctcaccctgcttcaaaaatcctttctctcaaacattttgaggaatacattttttaaactgccatttgtggata

SEQ ID NO: 35667 - DNA, 1086 bp, Homo sapiens
ggaggagacccactcctaacagcttctgtaagtcacatgcctaccaccactggcactgggggactcagggtgactgtgcccagccccatctccgccctcccagtccagggatggaaagttcacagaagagtagggtgagcctgcttctggtgatgaaggcagacacacacacgtgtaactccagctgtggctcacttcagaattgaagtgccatggaggacaggcacgagagggacttctcggagccagtggggagcttagaatagaggggacgtgggggctttcagcaagagggatggtatgggctacttacaggcaggacccctcaggaggaggagggaggtgcttctggccactgggggggacctttgcctcctatgctaaggcctttgtgtgtgagggttttgcataagaggatgacgtgtttttagaaggtctcctgccagcagtgtttagatggcttggaaggagaacctggagtctgtgagggaggaagctcaggagcccctgcgggacccagtgaagtgattggtatgggagtgcagagaaaggaagtgatcggagagccgcgcaacatctgctcgacagcatttggagggaaaagagtggggttttttagcttgagtgacttgatggtgatactgttacccaaaagacaacaccggaagaaaaagagatttagggggtgggagggcatgatgagtcatgtcccagactctgcattgcggggacagggaagcatccagttgcccagcagggatcgaaagtagtctgcagttgggatgcttgctttgctcgggaggagtcagcttgagggtgtggttgaagagtccctgcagggggacagtggagaagcagcagagacagaacctgggacagtccagagaccaggagctgctctcgggattcttatgtagaaaaaacaatgaaaagattcttaggtaggagggatgttaatgagcgcatgagccctgtccccacggagtttactgtctaagggaacacacaccagggctcaggccatctgaagcagacagtcatgagaagaccatgcacttgttttaccggcagaggccatggggtgtg

SEQ ID NO: 35668 - DNA, 1046 bp, Homo sapiens
tagtctgttctgcagaggggccctggtgaacttaagcatgcctcaaataacacttgttctgaaggatttcttccgcatgtgcctttcctgtggtgtgttcttacttcctggtgtttgcaattgcaggctagccaaggcgaaagaactaggcattcatcacacttggcttcgtccggaaaacttctggtggaggttgggtttttgaatgttgctacgttgtaccattttgtttttccctatgatactctccgatattcttgtacctggaaagtcactctgcccctcacaaaccctctaatgccctatttttaccaagaaggtgtttcttaatgagcaagacctgctgtgaacttatgccagccagtggttaggggctcagaactgtatccatttttttcttttttcccttatttaattatttatttatttattttattttattttattttattttattttattttattttattttattttattttttcctgtaatgcaaggaaactcataagattgttcctggccaggcacggtgactcacgcctctaatcccagcactttgggaagctgaggtgggtggcttacctgaggtcaaaagttcggaccagcctgaccaacatggtgaaaccccgtctctactaaaaataggaaaaattagctgggtgtggcggcagacgcctgtaatcccagctactcgagaggctgaggcaggaaaatcgcttggacccaggaggcagaggttgtagggagcagagatcgcaccattgcactccagcctgggcaacagagcaagactccatctgaaaaaaaaaaaaaaaaagattgtttgttcccttgcagtgttaggagctgcgcagcaacagacagcaggtgtgggtcagaagtaacatggaaacggagggcgtcttcaaccacaaggataggaagcggtagggcgtgggtgaggtcctgaccatgtccacgtccaggaaaccaggcagcttgaccagaatctctgtctaggagacagaggccatcatcaaaaagtcgggcaacaagggatgagga

SEQ ID NO: 35669 - DNA, 1592 bp, Homo sapiens
aagggaggagtgagtggtgagcttggaggatgcgttcttcctgtcaggaggcctgagatggggcgggcgcaggaggcctcccagggtcttgccagctctgacattctgagttcagagttcttagaaggctttatgagcaaaggccgattcaaaactgccgtttccttacaccaacccatcatgtgatgacaggtggcctttttgcttgtgctttcaaatatgtctagaagaaaacacccacttataaaaattaacctttaccactctaaaaggcattcacaattttaaagttttttctcctttggatagagaaaaagtatggttcagtacctgcattttatttcgaagaagttcagagtatgagtcatctgcagtgaatgagaaaattaaagggaaaaaaaacatgagaaataaaaccttttgcttgtgggtgacttgagcctctaaacccaggggctttaactcaggatgctacgttttactatggtaaaatctgtgccaaaaacagtcccccatagtttaccacaactccagtgggcactaccaagatcagctctcaggcttgaccagactggctgcagtagttaagagaagacgcagggactgtctttcgtaagtgtagtgatacatgattgctattaatcaaatggggcatttttttctaactcaagttaaaaatgagaaagagacatattttcattcggaactgtccgaaatgttgacttttctgtgggtccaccctgcttttctccaagctctccttgcttctctccaagctctctcccaagggttttcttgtccacccgaatagtttacttttccacttgactgtcttagcaactttttcaaatctgaagtattcagattccctctcccaccatctccccacttgttcacccaagaacatggctaacgcacgtgagggtctctccactgcccaccacagtttttaaaaactggtaaactccacataacaaaatgtatcatcttaaccattcttaagtctacagatcagtggcattaagtaccttcacattgttatgcagccgtcattaccattcacatctagaattcttttttccgtcttacagaactgaacctctgtgcccatggaacaaaaccctccgctctctcctcccagcccctggcactgcccctttcctttctgtctccatgagtttgactgttgtaggtgcctcatgtgagtagaaagtcatgtagtcttgtccttttgggactgtttatttcttgtagaagattccgtgttctgacttttgtcagaatttcctttctttttaaggctgaatagcatccccttgtatgcagatgccacattgagttcaacattcatctgctgatgggcacttgggttgcttctgccttttgactcttgtgaataatgctgctatgaacatggatgtacaagtaatctcttcaagtccctcctttcagtccttctgggtgtatacccagaaatgcaattgatggatcatatggtactgttgtctgaatgtttgcgtccttccaaaatccgtatgttgaaatctaaccgccaatgtgatggtattaagaggtggactgttgggtggtaa

SEQ ID NO: 35670 - DNA, 1027 bp, Homo sapiens
tccagctgtggctatcaggagccctgtctgtgaacttctgacgtgctcccaacttgttttagagcactcctttactttctggcactataggatgtaccaggctcatattgtattttgcctgccacagtcctggagtcagccatttctccaagaagccctcctggtccgttttgttggagaatggtcttagaaactaaggtttgggtgctaggtatgctcattgctgtgtgttgccatggcttcaggccctcttagcagatgtgtgtgtaccaacccatgcatacataaacatctgtattttctgtttcccctcctccatcctcccctgcccccatctccgtctcttcttgtattcatctgttttcacactgctgagactaggcaatttacaaaagaaagaggtttattggacttacagttccatgtgactggggaggcgtcacaatcttgatggaaggcaaggaggaacaagtcacatcttacatggatggcagcaggcaaagcaagagagagcttgtgtaggggaactcctctttgtaaaaccgtcaggtcttatgagacttattcactgtcacaagtacagcacgggaaaaacttgcccccatgattcaattacttcccaccaggtccctcccacaacacgtgggaattcaagatgagatttgggtggggacacagccaaaccgtatcattccacccctggtccctcccaaatctcatgtcatcacctttcaaaagcaatcatactttccaaacagtcccccaaagtcttatttcagcaataactcaaaagtccacagtcaaaagtctcatccaaaacaaggcaagtcccttccacctatgagcctgtaaaatcaaaagcaggttagttacttcctagatacgatgggggtatagatattgggtaaatacagccattccaaatggaagaaattggccaaaacaaaggggctacagaccccatgcaagtctgaaatccagcagagcagtcaaatcttaaaactcagaaatgatctcctttgactcc

SEQ ID NO: 35671 - DNA, 1031 bp, Homo sapiens
gagacaaacgttatgtccttaaagcagcactatcttgatggatcttctgttctctctgtgacattttaaattgtgtgtccagccatcaaagtaaaatgtcaaaaattatcaaaaataccaaaaaacagaagttcttgttttccttcacaaactccgttaaatttctacattacacgtgttctcttccgccaagtgcctgtgacgtttgtctctgacccaccccattcgctccattttcacatctctctcctttctttgcaaaattcaactccatctgcactaaacctgtctcactgtttcattccttttcgaggtcctgttcattgacaattcaggcttctgacatcatttcctgaccccctttacttacttgctaatgttctcacacggcagatagactcattcagcagatcaaatgaggtttaagactcaaagctttaacctcattgtcccctttctcaagcctttcagtagcttccagtttcctttctggttacatcacattgtcgcttctgtaatttgttcccagttaaccaagtcacccacctgttttcacctccttctccttcccaccctcacggccatggttttgaaccagggtttcttcccacggtctgttgaggtcactaacccctgtgtcgtcttctcctgaaccgagtctgttcagattctcagaccagatccctggccatgccaccatggtagaaataggccttggcgtcaaaacttatttccagggaaattttgccagtgatttggacttccttcctttccttttgcctcgcctcctctcccatcggtcatttactcacctccgcatttccgctggttccgcgtttctgtctagtggctcaggttgtcgcccttcagggcatgcctttaattgagataatttctctttacttactgtataaaatgccctgtcccatctgacacgctctgcagtctctcacctacatgactggaaggagggaggggacccagaaggcgtcttccttcctcactccctcatctgtgcgatgctacacctc

SEQ ID NO: 35672 - DNA, 1063 bp, Homo sapiens
ggatctatcacgggaccgtttaaagggaaaaacaaccttacgctttgcttttggtgttttaagaagaatatgaagcctaacgtgggcccataaatgccagactcccctctgcagcagttggtgagagagccgttggagcgcctgagacagttttctctgggtgccctggatatagcatcttgatttttatagtagttaattgtcttaaactcagaaagaaactagaagtctgtgctgttttcacgttctttttcctttgaggattttaaaattttattatgcaacaaatgtggaggtggggacaaaaccaaaattttaacttttttttaactgaggaagtaaaaaaaggcaacattcttcttagcaaagccataaaaaacagcacaaataaaattgtttatactgtcaagttagataaagcagacatgagaaaaattattaatataaagaattcaagatagtacatgttttcttaaggttcaacaaagaacacttcctcaaagaaattgtaagcagctcagagccacactacaggttgagatatgtggcgaatattccaggtgacttttcgtcagaccaaggcaagggcatccaggtctagtgtggagggcaccgaggaacaggggagcgcacacacaccacagaagctggaagtcagacccgacagttcccacgcagtggacattctcctctgaagccattgtgtggtgtgggacaagggagcgaacatatggaaactttcaaagagagagtaagaatgtttctccgctaaggaaaagatccaatttccaaggaagacaagaaagaacttctaagatacgctttcctaaaaactccttatagttcgcatgcaagaatttacattttcagttctctggctgcttcctgtgaggaagaatgaagatatgtttttaataagtgaggagcggcattacagcacagtgatgtaaccagttggctattaggccgcattacatttctttttttttatcaagtcacatcaggaggtgctgtttggtgtgtgagtctcagggcggacctccctccagatgtacacaaagcc

SEQ ID NO: 35673 - DNA, 1030 bp, Homo sapiens
gatgctcgggctggcgctgctttctctctgcctgctttctttccagtggctgcgcagtgattgacatgtgctttaaaacagaaatgttttgtgcttggaacctgaaacgtgttccgtggtgaccaccttgggagggggctgtgtctgggagatggtttatgggggggccactgggaatgtgaggagcaactgggaacagagcactgcacatccattgtgtgttgtaagacctttttaatatctggggactgctttttattatccctttttcttataaatggcatgtaaagagtgtaaagtaatctgtgctacaaattgccttatgattttagttggctttatgtctgtttcaggtttaattttgtttggaggttttcagactagagaaaacaacatgtcctaacatatttagactctggctctccatgagaactacagccatatgataagataatacaaagttagctggggagagggatgcttccaacgttgccattgtattcaagggagtgtctgtgccagattctggctttatctgcggaactagggaaaagacgtgaagatgtgattcctgcaaaggttatttgagaggtcggtaagcttcactttgaggaaaaggcaacaggatacaaaagagacaaggtgaggggagttgggtctgcagatgcccatggaatgctgccctgttccagaggccagctttgtttcagtaacctttgacagctctctgtccagaccatacagccgaaaaaaggagtctctcacagggtgccacctgcatgccagcaggaatgctctctaccagaatttgggtcttggcctgggtcactttcagtgtttgccttcactttcttgtcagccgttatccgcgtatatgcttcggaagtgggcggcaagacgcagagagccaaggggatttgctgagacttaacggggcacttccagttcattaagagctctatggagaagggtctttcggggtgcagggatcccccaaagaaagggggtagggtgtcggatcaaaaggggg

SEQ ID NO: 35674 - DNA, 2139 bp, Homo sapiens
catatgcatcacattttaaaaggaagaatgattctgggtaatatccaagaaataaatcccaaagtaactttacagtgcccatgaaatcactgagtgtgattgcaaagcccgtcttacacctgcaagcagtctggggcttcatgtgttagagtactttgggaaaaggcagttttcctgcttcctgaagttcattggggcatccccctgtccaaatgtgaaccagtcttgcttggagtaatctgcacagaagcctgttttatgtgctgacattgccattgtcaataacttacacagacatgagccaggagagttttactgctaagcgattgttaagaaaataagagaaggtaaggtcaagaagaactgtaaatcttcttttatgacgtttccaatgggagagcctagttctacggataagagagtggaactattgggttggttatcattctgaaatcagtattcccttttataggacagatggaatctattccagtgctatacgtattcccctgactcaagctcaggaaaaacataatctggtgactctccttaacactgaacagactcttacacaaagtgaactgtgtgctttataattcttgaattctcttgaagtcttttttttttttttctttctgtttgggttaggaatatggattctcaccactgcaatttttgtttttataaattaaagggaaacattccaaagactaaatataggataaagaaatttctttgctgaagaaatacataatatgaacctattctgaaagtatccaagtggatgaacagtactgcctcaaattaaagctgtcagtacatggaatattcagtttcacatgaataaacaaaaaccacagaagtacttgtcacaatgttggattgtttcgactgtgaagactgattgtgtcacacaagttgctgtgcaaactaaattctatctcaaatcgttttttgccctttaagtatctttaagtgaatggtttaagacaggatgtgcagtataggatagtgggaatggtgtgttgctgtagaagccagtttgtccctgctcacccctacctgtgtgatcttataagttcttgataatctcgctgagctgcagtttcctcatgtgtttaaaacaaacaaacaaaagaagatagagaatgctcgctattatggttattatgctctccaaaatctacattgaaggttctatttcattttaagcaaactgcattttaaaaataattttgttcccttgcttccatgttaaacacgaaaaaagagtgttacacattgaatttgtatatatttttagccaagaagcaaagaaacttgaagttatttggtattatagccttttttagagtgaatataaaatcttgaaatattagaatgtttttgaagttaatattaaaattagactgaaacctcccccaaaaagtgcccaagaaacccacaggtcccaggttaggagccttcaggcaaagtggcttttcctagttttggaattcttttcttatttctagacaaggagcaggcaccctcctcgtttaactgtaatctgtctttggtatgtgctctttctaagtatatctcttcactagattttgggggaacacaaatttatagtttttcattctgaaaaatttcctccaggtgctcaaagttggcctcagggacacgtgagcaagtccataaacagagtgagtcggcctgggagctgggtaacaagccatggaattcatccatggagtcttcctcatttcctcttcctgtctccaaggagtggcagtgggggctgggcagccataaagatgctcctattaattttttgcaattctcatataaaaccatacaaatatgagcaaaccacataccccccgccaaatatctagtttctctgaaactatatgtgctaagtggaaaactcccagacagagcgagcagcagaagggaacatagcacccttaggcagccactaatcacgttggacacatcttctagtctgtttatatgtaaaatgatgcttcttttgttgatacttttaatatttgactataagaaaccatctcaatcatatccattgtccagtttctcagatgcgcagttgagaaaccttgctattgctacttcttgttaaaatcaacaatt

SEQ ID NO: 35675 - DNA, 1378 bp, Homo sapiens
taattggtgttcttagcagaggcgttcctttcattccctttgtctccatctccgcgcttgctttgttcctgcctggaataactccagccctccctccctccctcgctcccttcctctatcctcactgtgatcactccgaggcttgacaggcagggaagagttcctcacaggaagacttaacaacaggaaggtgcgggacattcttagaaagccgccttctccccaggcactggcagcactggagagacagcgtttgaaccccatgtgggatacatggagaactccaaaagcagttgctccagccctcttttctttttgtctttggcctttattgttgtggtggttttagtatgtgataacccaaaaaagtgggagacagctctcaataaatgacaaaatggtgatttgaaaaataaaatgcagtgccattcagtgcatgtgggtgggcagggggaagagagggggacaagatgtcataaaatcaaattagttcaggtcttggtgttgcatcccgtaatgctttgtgtgcttgggagtagatggtacctgtggggtgcatgcacctgggggcgctttacctcctccagtctgtgcgacatgtcttcatcctgtttccaagtgcttattagctttagttgagcagcattttccttttgatgggggagttactcaaatataattgtaaaaggaattcctaattggttacagcttttgtttctttgtttttgaattaaccagggactgtataatataatgtactagatatttgctttgtggtttattggggggaaataatcttctggttcctcattctacatagctgtagctctttctaagctaatattccatcccttgaaactctgaaactttagctaacctttgctgtagacagtgtaaagtggctgggcgtggtggctcacacctgtaatcccaatactttgggaggccgaggtgggcagatcacttgaggccaggagttcaagaccaggctggccaacatggtgaaaacctgtctctactaaaatacaaaaatattagtcgggtgtggtggcgggcacctataattccagctgctcgggaggctaaggcaggagaatcacttgaacccaggaggcggaggtcacagtgagccaagatcaagccactgcactccagcctgggtgacacagcgagactgtcccataaataaataaataaagagaaatagtagttggcaggctgattgcagaatactccaaagccacgttttttccccttaatgctgttattaaaattagtatgttgtcatgtggctctgtgaaaacatgtataagttagcatggtttatagtaaattttcttgaatgtaggtaaaagatgtttccatgctagcattctga

SEQ ID NO: 35676 - DNA, 1044 bp, Homo sapiens
gtaactatttctttgcataatagatgcatctttttttttttgagacagggtctcactcacccagactggagtgcggtggcacaattctggctcactgcaacctctgcctcctgggttcaagcgactctcctgcctcagcttcccgagtagctgggactacaggcatgcgacacgatgccaactaatttttgtaattttagtagaaacagggtttcatcatgttggccaggctggtctcgaactcctgacctcaagtgatccacctgcatcagcctcccaaagtgctgggattacaggcgtgagccaccgtgccctgcccagattgatctttcatggtatttctcaggtcagttctgtcctgagcccccaccccgacactgctttacatgacaggcagtgttcacgtacacttagtctggactctgccttctgagacagcaaagcagtaacacaagtgagagatgagtcgctagaagggttgccttatttgctttgaattatcatctttgaataaataattcacaaactcatgaacttgactaaaattagatgttacttgtgttcacttcaaaactgatcaggatataccagtaactcaggacatcaccattcatagtggttgacttatcagtcagtatgcataggctgagaaataatagcttgcagctggtttgttggctcacctgtttgtcatttattcagtgtatactcattaagctccaggtgtatgccacgctgcctgctggcagctgggtatgtagttagaaacaaccagacatggtgccctggagtctaaggtcatggttggcttcctgccttcacagttgcccagctaggaaaatgttgtgtccgaaattgttgggttcttggtctcactgacttcaagaatgaagccgtggatcttcgtggtgttacagtttttaaagatggtgtgtccggaggttgttccttctgatgttcagacgtgtttggagtttcttccttttggtgggttcgtgggctcactggcttcaggagtgaagctgcagaccttcgcggtgagtg

SEQ ID NO: 35677 - DNA, 1058 bp, Homo sapiens
cattcctgtagtcccagctactcaggaggccaaagcaagaggatcacttgaggccaggagttcaagaccagcttgagtaacatagtgagaccctgtctcttaaaaaaaaaaataaaaggtcagctgctgttgtctttgtcaccattatcatgtcctctccatttcccttgcaggacttcctcaagtattccaaaaaggccagcctggatacatcagaattagaggtacatgcatcagcggctgtgggcacccaaatccccaccagcctcttttcctaatccccaagtgtctcctaacagtggtctggccctgggagggggtcaaagcagtggatgacagagtctctccagtgcatctccataagccctgcacactagagggtggggaggaagaacagaacttcatcaggtcagagggtgagcacgtcagattttccctagaggaacttgagctttcactcttctctctcccctcccacagagagctgtggaagtcatgtgcatagtacccaggcggtgcaacgacatgatgaacgtggggcggctgcaaggattcgacgtaatgcggctcttgttttttaagagagctcctctgccttcatctctttcttttgtcttggattatttctctccacatagagaaagctgatccttttcacttggttttctggcttctctcactttacctcaatctgattgatattttatttcctttttttttttttttttttttttggtgcgtttggtttgcttttttgggacttgcctgtgctcaaagcccagtgtctcatggcagaaacaagcaggaccgggctttgtctcttgggcccagtactgtaagagctgagtttcctttcctcagcacttaagaccatggttagctatggatgtagtaggacctcggaggtccccactctctcatctctgggacttgatacttcctcattagtttaagatatgtttgcatgagttgctagactattcatattacatattagctattacatatcctcaagatgaattcagaaccagaatcttcttttaaaaatttgactacgg

SEQ ID NO: 35678 - DNA, 1029 bp, Homo sapiens
atgagtgagtcagggaaggcacatggaggaggtggccaccaccccagggagcccaattagacaagtcagcttggattggacatggtttaaggaaacgcattcccagtgacaacctggggagaggtgaggaagcccacgtgaagatagggatgggcagatgctcggcctgggctggactgcaggtcaggtgagcgggccgaaagaggggagaggaaactaagtggggagaggaggctggatgagtggggtcgggagggccaggctcccgtggaggcctagaatcacagtggcagctgtgcttcccaggggctgcctggcagcaggaccacgtggggctcccccacttagtgcttcttttcacaggaagactcttgaaaggatgctttctgttcctgtggacatgtacacagggttcattactcacaggtgatttacagttggcacttttataataaaatcctctttgtagtgtatttatgattcattaaccatgtaaaaccctgtggacgttaagtaaatactgtggactcttgatctctcacggctgtgaaaggaggcgtggggaggagagagcaacttagcctcgaggtggtgcggccaggtgaacggggaggaccatctgtagcagtgctgtccaatagaagcaaaaagaggccacatatgcaagtttagatttttctagtaaacacattttaaaaataaaagtaaaagcagtttttactaacatgtatttaatttaatgaaatacatccaaagtattagatttcaacatgaaatcaatatttgaaaaatcattagtgaactattttgcattcttccttcacactaagccccagtgtctgtgtgtcctttatgcagccaccacatctccactcgcatgagccgtgtggcaggtgcccggtggccacgcgcagctgctgtgagggacagtgcgtggcgatagccttcttacccaagaagctccacgggaaacaagctcaggcaggtgctgttcttcttgcaggtccagggatggatgggatcatggtg

SEQ ID NO: 35679 - DNA, 1049 bp, Homo sapiens
cccccccaggagggtctgtctcaccccttcccagtcaatctctccctcccaaggtaatcactgttctgatttctatcattcatagatatgtttgccttttaagtaaaactcatatattacatgcttttttaaagtaggttgtaccttttattttgaggccattgtagattcacatccaattgttatgaaatgtacccttaggctgggtgtggtggctcacgcctgtaatcccagcactttgggaggccaaggtaggcagatcacctgaggttaggagttcaagaccagcctgaccaacatggagaaactctgtctctactaaaaatacaaaaaattagccgggcttggtagtacatacctgtaattccagctactcagggggccgaggcaggagaatcgcttgaacccaggaggcggaggttgcggtgagccaagatcgcaccactgcactccagcctgggcaagaagagcaaaactccatctcaaaaaaaaaaaaaaaaaaaagaaatgtaccctttgcctgtgataacatacacgatcgtacatcatcacaaccaggatactgacactaacactgtcaagatgcagaatatttccacgactaccagggccctcctgttgcccttttatggccacacttacttcccttctgccaccacacccttctttaacccctgccaaccacttacatgtgctccatttctataactttggcacgttgagaatgttatttaaacgaaatcacacagtatgtagccttttgaaacaggtgttttctacgagcatcattatctggaaattaatccagattgttgtatcaagaggtttttttttctttttattactgagtagtagttcacagtgtggatgggccacaactgaaccattcacccattgaaggacatctgaggttttttttagctttgggttgttaagaaatagtttgcatgaacattcattgtacagattttcatatgaacataagttttcatttctctgggataagacaattggaagatcatattgtagtcacatattacatgttttag

SEQ ID NO: 35680 - DNA, 1209 bp, Homo sapiens
acggaaatgcaaagagcatgaaaagccaaagcaatcttgaagaacaatgaagctggaagcaattatataaccagttatcaagacctattataaactttcagtcatcaggacatggcgttgatacaaggacagacaaccccatgggacagcataatttgtctttgtttttttccgggttgtattaaaatttatttatttatttttagagacggggtctctgtcgcccaggctggagtgcagtggcatgatcttggctcactgccacctctgcctcctgggttcaagccattctcctgcctcaacctcctgagtagctgggattataggcacccgccgccacgcctgggtaattttttgtatttttagtagagtcagggtttcaccatattggtcaggctggtctcaaactcttgacctcaagtgatccacctgcctcagcctcccaaagtgctgggattacaggcatgagccactgtgcccagcccaggttgtattagaatttaaagaagtcatgattgcttggaagaagatcctagaattaacatcaccctgcaaatgactgccacttggaagaaaggcctgggctgcagccataggtcagtgaaccatcaggatgttgaagccagggatggttaaactttcctgttaagaaagaaggcagagagagtggtaggcagtggagagagagagagggctgaagccataagcttgttcagaaagtgatatcactattactttaagaatatttgttctattttttttcattaacttcctcttggaagatgatgtatggtttgtaccagctgactagattagcattgatttgtgtgatcccagcactaggccaatactcaagtgttccttatgcttcctagataagagggcccgatgagcccaggctgtcactgattggacactgataatgctaatgaaaacctccaaaggtaaatcaaaaacaaactaaaggatcactcagataggatcagttaaataaatcaaggtacattcacacaaggaaatactgtactatttatttatcaaatcagtaaagtcatctctctgcatggattggaaaaatcactaagataaataaaataatttttttaaggcagagcacaagacagtttgtatggaaccctgaatgtagggaaggagttcaaatgtttattttttatttaaccttcataatgacatataattaatcccgtg

SEQ ID NO: 35681 - DNA, 1034 bp, Homo sapiens
cctgcttgtatgctaggtgcatgtttaacttcataagaaactgccaagctgcgttccaaagtggcccagccattttgtattcccaccaacaatgtataagcaatgtttcagttgtttcacattctcaccagcacttgatattgtcaggtttttgtttttagccattctaatagttgtgaattggtatcattgtgcttttagtgtgcattccccaatgagtaatgatgttgagcatttttcatgtgcttatttgtcatccctgttatcttcttggagaaatggctattcaaatcttttgctcattttttatgtttttttttaaattattgagtcttgagagttctttattctgaatacagtgctttgtcagatatatgatttacatatattttctccagtctgtggcttctgattttcttaacaatgtaaggcagtgcattcttgataagtaacctgagtttttattttaaatgcagtatgtctaatataggaactacatttaaggatagaggtgcaaagaaatataaaatatgtgtgtgtgtgcgcacgtgtgtgtgtgttcaattttcttaatatcttttatttaaacttgtttctattagttccatttcatctagcaaatgcttgtcaaatatatgcaatgtgctagcccagttgctaattgctgaggacaaagatataaaaatacaacagaggccaggagccgtggcttatgcctgtaatcccagcactttgggaggccaagttgggagtatctctggaggccagtagtttaagaccaacctgggcaacagagcaagactccatcttgccaaaaaataaaaaaatgtagccagacatggtggtcatgcctatggtcatagttacttttgggagactatgatgggaggattgcttgaccctaggagtttaaggttacactgagctatgattgcaccactgtactccagcctgggtgatagagtgtgtattagtctgttttcatgctgctgataaagacaatcaagatgatatttgggtggggacacggccaa

SEQ ID NO: 35682 - DNA, 1050 bp, Homo sapiens
tgtggatgtattttctgccccaccccacccccagatgctgctacagttcggagtagggataaagtccactttctcccaacctcatgaagagcctgctttgaggcccagagctgggatgtctctaagaatcaaaccttattgagagtggctgcattgaccccggatacctctggaagtcacatggagtagcatgagccagtcgtggaaagtccacttgcagaagaggggtggaattttggcctgggtgccggtactttcctgtatttgatgtgttgttcacccatctctgaaccgcaaagtggtgaagaaaggctgggttgagtggtctttgcttttcctgtgcctgtgtgggaaggtgtgttagtgtaatattggttgacactgtctcaccaacattgccttagtgttgacattagtctcataggagaggctaagttaagtatgaactgcagggttcaagtccagagagttgaattaaaaaaagccatacttagttcttatagacgactaaggggaacaacttttaaaaagttcataatggtgagtgattaaaattctgtcttgttagctttgcatatacattagaattgattttttttctgtacgtatttacttgaatcaaaaattgaaaaactggcttcacagaaatgccttcggcttcactaagttctgcttttaactcacagcttttgctcttgggaatagtataattttgtgtctgtacagtaagcatgtttaaaataagttttcaaaaattggttggtatgcaggtctttgaacagaacaagtggtaccagttataatttagtatgcaacgttatatagcttactcagttggatatgttgccttaatatcaaaaataaaatattttatctccaggttaagagaaaataggtaaataggccgggcgcggtggctcacacctgtaatcccagcacttttggaggctgaggcaggcagatcacctcagagtcaggagttcacgaccagcctggccaatgtggtgaaaccctgtctccactaaaaatacaaaaattagccgggtgtgg

SEQ ID NO: 35683 - DNA, 1015 bp, Homo sapiens
cggattgcttgagtccaggagttcgagaccggcctgggcaaacaaggagaccttgtgtctacaaaaaatacaaaaattaatcgggcgtggtggtgtacgtttgtggtgccagctactcaggaggcggaggtgggaggatcgcttgagcctgggagtttgaggatgtagtgagccgtgattgcattactgcactccaacctgggtaacagtgagaccttgtctcaaaaaaaaaataaaaaataaaaatataaaccttatttctcaacataagctccatcagtttcaagccacttttaaatgatgataccagccatttgttggactcatccctaaagaactgacaggcctgggaatttaacaatgtgaatgcagcagtcttttttgcattattagctgaagaaaaatgtgtgtcctttaaagcttcttaagattaggaaacaaaaggaagtcagaaggagccagatcaggactgtaaggtggatgcctaatgatttctcattgaaattcttgccgttgtttgatgttttttcttgctttaattttagcagaactcatgttgctctaataggggctcttttcaagctgatgtcttatccttcttagtgccttagactagatcctgttcatacatgttataacaagttagtatgagtttattatggtgccaaaaaaaattgaaatccgtccatagctttttcataaaactcattttccatgaaccttagaagacccttgtctgtgctcttctgttttgagaactggcttctgtttttggtgaacaaaagcattgtcatgtgtgattaggaacaaatgatacacagtgtggtttttataatacttcttgagcccccctcaagcaattggtgaactcttcactgtggtagccacaggagatattctttgtagtgatgtgtggcggggccgcaccgttccagtcttccatgaaacttgaagaatgctctgtctctactctgtggttgttcaaaatttcatgtagggtgcagtgtcctcatta

SEQ ID NO: 35684 - DNA, 1010 bp, Homo sapiens
ggtacatgccactgtgcccagtgaatttttaaactttttttttttatagaaatggggtcttgctatgttgcctgtactggcagaactgtattaataactgctaaacaaggtcaggttcctcataggatattgtaggatttaattattctttaatgatctgttgacttggaggtgaactttttttcctttctaaattttatagcagtgaagtgacacacctgtgcccagcctaattctaggatttttctcctgacacacccaagactgttggaagagtcttacttcccatgctgtcatcagtcaggctgtgcctcagcttgcctttcaaactgcagattgtgttgataactagagggaaacaaagtaacaaatactccaggaataaaaaaaatggaaactagcaatgtagttcagctgtcacttctttcatgaactaagtgagcacagctcacttaaccctgcctctgattttcaattgtatgttttatcttaatagatcgattagatagttaaactagacatagtatcatttctctgaatgttaaaacttgagtatatgtgttaacattatttaaccaaactttttctacctttttttggtggattttttaaatgccagaaactaggttttatttttcttattgggaaaggagaaggtttggcttcaccctggaccttctcacatgctcagaagcactgtcccgagccatgtgttaggtggtggttgagaggctgcagtgagtcccatagcctgaaggtggttggtgtgaggacgtgctgtgggcatggcctgctgtggaatgtcctggccgtggttggagtcctgcaaggcagattgtgctttggctcaaccaaaagcaccatttcactccagcagccctcctcagggtggtactttctaagttcctgacttctagatttaggtcctccatcctaagcccacatcacagatttgcagaattaattctggaaacaaagttaggttttatagactttgtggtttcttacag

SEQ ID NO: 35685 - DNA, 1031 bp, Homo sapiens
tttgaggttagagggataagtttagtaaattattattcaggagcccctacgcccttccttgcctctcttccatttaggagggttggctttgtgtttctgggtgctaaccctcctgtaagccccttataattgtagctgcccttcacagcttcacacacaggcttcacacacatgtgttagctcttccataagtgtctctgattggctggttcaatctcattgcctgggaagttaagggagtcaaaatttccacagcctcggtgcttcttattgcattgtatttttctttcaaattaatgggagaaaaagctgaataaggagtttgtgtgctttaaagtgtaccatttgttaatctggaaacctgaatgttgtgagcattggtaagtgacccatggtcacttttaaaaaataattttgtgctcatagtatggtactataccagggatttttagaacaaaaattctaattattacataactttcttattgtagtgggcaggcttggctgaaatgagaactgctgaagcaagacagatagcttgtgatgaactattcacaaatgaggcggaggaatatagcctctatgaagctgtaaaatttctaatgctaaacagagccattgaactatataatgataaagagaaaggaaaggaagtaccatttttctctgtgcttctgtttgctcgggacacatcaaatgacccaggacagcttctgaggaaccacctcaaccaggtgggacacactggtggtcttgaacaggtaagttgtgcttttgagcatgtattaccccaaaataaagcagctttactgatcaaacttgatgtcacagtttttgtaggtcagaaattcagggacagcttagttggatggttctggctcaggatgtcatgaggctgcagttgtatgttcagggctgcagtcatctgaaggcttgactggggctggaagatctacttccagtgttgttcactcatgtggctgtgggcaggaggcttcagttccttactggtagttagtaggagggttcag

SEQ ID NO: 35686 - DNA, 1019 bp, Homo sapiens
tacaggatccttatcagacatatgatccattcttgattatctgctttttttttttttttatttaaatcgaaaaggattggggctgggcccaaagcaggaggaaaaaacgttgtggcttcaccattgctgtgcactgtgggataatggatggaacatggtgttaagccacgtttttcagtgtgatcttcctcagaatacccgtttgctcttcttcccaggttgaaatgttccttcttgcctatgctgtgcgccacaccatccaggtgtaccggctctccaagtacaacacggaagaattcatcacagtctaccccaccgacccacccaaggactggccagtggtaacgctcattgctgaggacgatcggcactataacatccccgtcagagtgtgtgaggagaccagtctatgagagacgcatgctcctgacagcctggcgacgtggcgaagatgcacaggtggctcctgggcttgggctgcaggtttgggggtctctaagaacaatctctgagaagaacccttgggcccctgggagccaagttggacaggatgtcctgaagactagcttttgataagagaaattaaccaagtctttcccctcatctatgatgcaatatatttcagtgggggccttcagagcacacctgttggacggtgcaaaccatatcttctccagaaggcaaatacttttgtatcagaggaaactcagttttggagaggaatatgttctttatgtctcaaatcaaaactctctctaatggtaaactggcttctaatttttttaagtacagtatttttttttcccctttagtagtaacgggtttctatagatcttcctatacagtctgctttaactcaggaccttgagattatgagactgacgtgctgcccactgcactgagggggcttctaacagtctgctttaagtggtataattctgggatagatctgttactggcatagtcatgacaacctctggtaatcttaccttctcctttttatgaagggaagagcaatg

SEQ ID NO: 35687 - DNA, 1034 bp, Homo sapiens
tgatcatggcgtcagagaagcaaagctttcaaataaatagtacttcaggaaatagaaatgattgaccaactttaaaaataatttttttttaattgcaatatgcagcttcagttgcccagaatcttagttccgtttctcattcttggtcttgagctggtcaggtgacatcagcagattagaagttgaatggagattaagtggattcaggaggatgttccacttagagcagtcttcaaaatgataaggtgttctagaagaaaggaatgtagtaggaactatactatgcctaactttctatcccagagtgtcttgcaagagtttaggagttttggaccctgtgtattggcagaaaagttatctccatcttaagcaggcatgacttttatacctgtgagctcatttaaggtgcatttaaacctaaaataatttccctgtattatgcttcatgggattaacactgcttttccagaacattttcagattcccctccttacatcctgagctccttctgtatatacatctgttgattttatccatccacaaggaacaatgatagtcacattagagaacaagaaaccagtaatacatggtctctaactgatgattcgggcctggatttgattgaaagtgtttgcagttcctcttccgtagaatacagagtggatgaaaatgttttcaatgcacagaacaggatgaatccttttttctttatttagcgatttacacttttgttactctattatatattcagttagtgtctgataagattttctttgcttaaggagaacggacattgccttggtatgtttttttttttttttccctccacttttggagcttatcaggtaaaaatctcaagccacatgaattgttaacacctctgttgggaaaagcctttgtgagtttttatgtacttggtctttgtttttgttattcatcctgtgtcctccctcttcccgatgtgctgttttacctaggagttagtctgctttctgaggatcttttagagagaggctgtgaagtgctgaatcacc

SEQ ID NO: 35688 - DNA, 1044 bp, Homo sapiens
tccaccgccttttcccactcaagaaagtggagagaaaaacagggatgcaggctgtgggtcttgtggaagccctttacaaccattaaataaagaacaccagctgcattatgtgtgtttagaacgagaagttgtttgtacagtatttttctattgaccgcttccgtcttgcctgaaacctgggcattctttctgtagtttctctgaattttctgtctcacctcctcacccctacccttgccttttgtctgggctcggttgcctgttcatgttctttgcctctgacattaaactctccctagttgcctgtgtgcttgagacgtcttaacaagttgtcctctaagtggtgccattgatgtacagtcccattggagagcacgagtatgtttccttaggctcttacaacactggctttatcaaacattttgatctttgctgagctgatggttggaagtctgacttgcgtttcttgagaaaggctgagcatgttttcatttgcgtaaaccattttcaggtcctttcctgggagccatctgttcatgtcttctgtaaccacttttgagttttctatctgaatttcacagaaacgagatagatgtagggtgggagcagtaggaaggaaaggcggaccaaggggtgttagagattccatgtcaggccctttggttgcaagtaacaataactcactcagagtattttagttcacaaagggtttggccttcttcagggacaagaagagagcattgaagaccagaaggttacgggagggagggctgtcttgctggtgtcctagagttggcatgttcagggtaggaatatgggaatgcctgcatccattcaccaaagagtgccagccctggggccaggcatggttccaaacttggggatgtaggggtgagccggccaaggcacagtcctcccagccctctccatcctcaccccaaccccatgcccaccctccccaaccctccccatccataccctctgtgctcaccctccgcatctgcacctccccctttgcccaccctccccatctgtacctcccgc

SEQ ID NO: 35689 - DNA, 1029 bp, Homo sapiens
cacacgtgaattgcaagcagctgccctgatggtgccatcaggggcggtggagatacaggccgctctcctcagccatttcctttagaccaagagagcttttattgtgtagcagatgaaagacccgatgagaatttgaggtgtatagtataatgtaaagtttggaaataatgattgtacttgttaattctgtattggtctttggaatcaagggtttctgaacctgagataagcagcttttttgtttcataaaagctctagtcatttttctgtgttgaaagtggaccacagtaatgttcatggatttgttggctgaagcacttccatgtggcttagaagcttagcagacacggcacctccgcctttgtgaactgtcattggccactctgcaaatcctggtggtgcagtagtttagaactgtgtagaaaagatctggttgtagaggacaggaggctgatccagaggcgtctagtcacttgcctgaatcacagctaaaaagcagcagacagaatgaggactcacagctcctgatttattttttccttttgtttaaagcccagtgtattgaactgggcagtcagcatggtatttactgttttatattgtccaggtaagaaacctggagcttattgggagcagaattacaaatataagcaatgccaaccttccctgcaccttagcattacctttaatagtgtcaaaaaaaaaaaaaaaaaaaaaaaaaaaaaaaaaaaaaaacttagaaggaggcatagttttctccacagtttttgagaaattctccacgatttttctcctgagctaagccagtgagaccacagaggataaagaggaaggcgtggaaggcagagataccagggggcagggcttggtgggactccactggcggtggggggttgaggaggaggtttccaggtgggaggtaaatgtgcctcctctagatggagatgtcaggggaaagcatgggttggggacgtagatttgccccttgtggtattaagagtaccactccccacagggacagtgaatgat

SEQ ID NO: 35690 - DNA, 1044 bp, Homo sapiens
ctgctgccctttccaatgagggctgcgctctccccgactcctcacagtcacctgtagactgcttctccttcctcctccctaaagcctcaagcttggaatctcacattatcaaaatattccaccttgtacagcatccgtcagtcacctctgggacagctccaggcttgccgtcattctctcccacttactgcctgtcctagttcctggtcacttccctgccatgttgcctgttcttacaataaatggcctctcagggatcaggttctcagccccagccccacctcagccactgctgggtcactgcagaccttgccattatcgacacaccaacaggccaaggcaaggacattgtcctctgtctgccaaccccgctggtcccccatccacggatcccaccaacccttcattgtggccaccttttcgatgtcctgtctcccctctttcctcagcttacatgacatgctcagtaatgaccatcatttccctaccctgcttttctttcattatatttgccaggcaaagccccagctgtgctgaggttcagatctctaccatctcagcccacacccctcagctgccatggctggggaagcccaaccgcaggggacagccagtgtcctgagatgcacgtcacgcaccgtgagcaggctctctgagtggcctggccgtcactctgctgccccggcctgttcactctgctactctcttgaccaactgtttccccacccatgtgtcctcgttcttccaccctcatatacctcccttttctcagacaatgatgtggcttcctacttcactgagaaaaacaaaagtgatcagaagggcccttgcgcaagctctcggactgcatctctgctccgcccatgaccagagaggctgcccgagctcctgtcttggactgcccagtccttgtgtgcacagccacattggtatcactgtcccctctcccatcggcagcatcgcatgtctgcgggtcattccccaaagcaagccataggctgaatttcgccccatctacgctggctttctgaaatccatgtccac

SEQ ID NO: 35691 - DNA, 1040 bp, Homo sapiens
attcagtcatcttacagaaatatgaggagtttattaggaagatcattcagctttgtatgcatacatgcatttacagtcaaaccacacaggaacaaattgaaaactaaacaaaaaataccttaggacaaagagctgaaaagtctaattcactgtcatctttgtgacttttttctttgtctgcttctgttgaggaaaaaatttggaagctttcagtttcctagccaactcagacatagtgcatttatttcattatgtattcttaccccacatttctcatattctccaaatacaaatatatatttctcatattcttaactacaaatataattaaatgtttgcacataacaagcttcacatatttgcaaaggaaatgatccacattagtggctctcttaatattgtccctgaaacagcaaaagcatcctccctgggaactttttagaaatgcagattctcaggccctaccctagacctactgaatcagaaactctgggctggggcctagcaatctgtcctttaataagccctccacgtgactccgatacattctagtttgagaacctataaggtcataagccaagttaaaaagtaagagatgattatattggcttttcctgtattttctttttctttgtgatagtccaacccaaaataaaactaagtaaatcataagtagcacaataaagagtgttgaagccttttctttctcccctgacactgtggattaaaaagtcaatttatttaattgtatatttgagaaaagaaggaaagcccaaataggaaaaggatatatataactttgagggagattagcttctataataatatttagtaaaaagctaaaagtatcctcaaatgtattaaagaatttcctaaaaatagctcgctaatgtctcatttcatgcatagaatctaaaatataaactttacctaccagatctctcacgtttcttctgattaatatattctccaattccaaaatccagtttcagcagaactgacttaattttgctgtaaattttttgtccaatatcattaca

SEQ ID NO: 35692 - DNA, 1053 bp, Homo sapiens
atttcatgttcctcactccttcctagaaccagaagagatgaggtgtgattgaccaataccaacgtgccatcatgcaggaccaaccctttccaggaaaacagagcacttcatgtgcagaatccaaatactcagcagaaaccaagatctacgcttagtggttggttgatgtttaacacaggtgtcatctgcacacacacacatacacacgctgagttgctacgtaatgaaactctaggttttcccagagagccttatttggaaaacacataactagaaaaaagatctcctgtgaatgctgggcaaggcttggggaacagatcttttccatggtgtgtagctgtcttcccaccatccttggcactgatcaccatgcaacataaggcccaactaacataaaaggaaatgaaaatacctaaggcttcaaaacattttgagtttgtactaagttcctaaacaaacaatacaagtcttctgtgactgacgctcaactaagggagaaaattcattaccagtagctttattaatatttcctccttagtttcagagagaccatgcactttccaagttcaaaaggaaataggttctttggttcatctttctatccatctcccctccctctcgccagccttccagctttctctcacactcttgccttcactaaggagtgaactcaccacacactccagccacaagataaagaccatttaagagtcacccccgatgaccatcatccccaactttccatcctcgtagccagtccagttcaagtagttcccagggagaagtcactacaagccccagcctctacatggccatgccatctatcaaatgggctttgctcaaggatctgtaactgtaaatgactcccaaaaaagccccagcagatgccatctggttaagttttccttcttacggaaaaactagtcaggtgttttgatgaaggccattctccaatcaagcaattctttatcaaagaagcctaagccagggcaaagtcctttttcagcagctgaagaatttctggttttacctgccagtgaaactctaagggaa

SEQ ID NO: 35693 - DNA, 1089 bp, Homo sapiens
ctccgtcccccaccgcgccgcgccccgccccgcagcccccgggctctcccttcatgcagcgggcagcagggatgtgggcccggattggacggcaagggcctggggtccctctgtgagggctccgtcgcacttcggggatcccgggtgatggggggcccagaagtgggaggcttcagccgctcgcatggtggaggggtgaggggggcggcgaggttggtaaacggagctggggggagggggctgtcggggagaggagctgcgggtgacgggaggaattgccgaatgcgaaaccccctcagtgcgttgagtcccggggagacggttctgtgggctgaagggagcgcttccgtcatcggagcccttaccagcctgggagaaagcgctcggggcgaggggcgcagcagccaaagatggagggtgggggtggggtggggcgggagtccggggagaaagaagatggggaatctggcccgatcagaaggaagtgggtggctttttgctttggcaaacgggttttctcgacccatgggactcctggatcttggttctggggccaaggaatacgaggttcacacggcgacgtgcactcagaagcacctcccgagcagatcggagccccagcctcgtcagtggcggaattgccttcctacgaacccgtgggctgcctcggagcagtttgttttttcgagcctttggttccaagaatgcgccaggcgcctccgccctgggtcccggccccggcccgggcccggggggtgtgggcttgaacctgacagcgcgcggccctaactgggctcagccccgctgggagcgtagggttggggttgagcagcttttgcccaaagcgctaaagctgaaacccggcgcccggttcctgctccccccgcccccgtcccccctccatttccagaaaaataaaaattgcggaatcctggatccgatcgcacgcacaatgcgcggctgcaaaccgcattcttttcatgaatattcatcgaacgcttggccaggctccttatctgcgtccccagagacatttccgccttgaaacgaactcggtggacagcccttgcccatgtaattctcactctg

SEQ ID NO: 35694 - DNA, 1048 bp, Homo sapiens
ccctttctgttttctctggactccgaactcattgtttcattaaggattccaaaaggcgaatggcgtccagatggaaatctgatgggggcagaaagaaggcagtcgttggggtgaagctggttgattaggttcgcaatgattcctttttccccattacctaacagaagccatgatatacctttgatggctgattttctttcagatgatctattttccaggttatggccatttagatttattttcaggtagtttgtttttaccacacaaaaagggacttattgtgtatattaaataggagccaaatatgatattttttgcagtggtaggttatgtttaatagggttttatgcttaagtactgtcagtacatcctggtggaataacgcgtggcagcaatggaaatcatctcttttgtcctttttgatgagaacttgatattgaccacgtttaatatatcagggcccatctactggctacggtggctgtctagctgtcttctaggtggcatggattgtaccctctgtactccttagtattgagtaggttattatgatttagagagctacgttctttcttttttcttttcctttaggttgtgtttttggcgaggggtatgttggaatatagaacaaattcaatagcaaatatataccagcatgtccccaattcagtaaatcttaggtttttgagtgagataatatttaaatcgatttttaaaaattattacagaattaaaatatttctatcagttcgcttattcttttagccagctagctttttgccaagctttagcagatagagaaattgagccttttgataaaaagcaccaacaatgacagtggcatttctgttctttaactggtactcagtctgccattgtgacgtgtagaagagaaccttatctccccacatcaccctagtttaaaggtccaatgggagagccctaaacatttaggctgtctatccttggaggcctcttcataatcctggatttactaggatccataatcctcctggatcttatggtgcaagaggtgatgcgttctgtc

SEQ ID NO: 35695 - DNA, 2129 bp, Homo sapiens
ttttaatttcacaattaagaacagtttgaagccattttcatttcatggtcaagcggagtatgacatcagagagaaactttcatttggaggagatttgatcactctaaaatggatgtctgtgttatttacggtagttttgtaaaaattgcaaaatccacacccatttttaaaaacaaggtgtcatgtatatacacatgtacacatacacatacttgtttatacacactctaaaatcttatgaataacttgaaatcaaactggttggtatagaatattattttatagtgctttgatactggtctttggaacataatcaatttctgtctttctaaatatgtgtttgaaagggaaagcctagcaagtctattaataagctcacttcccatttatcccagtgtacctggagcattaagctaagacgttcatccacaggcttaaaaacttacatcaagcactactgaactttacaagctggaataaacaatgcctactaaataaaagatttataaaattgttctgtcttatttttgtgatctcttgtaaatgttttttttttttttttttttaaatatccaaagaagacctgtgaactattatttgtcagaagcaattgcccttggtatctgattctgttgaaagaaatgcgttgatttgtccagacctttatcttaatgtagtttgtacctacttatttcacatcttctttctcttcttaatgatggtcttagctggtaccctggaaaccaggtaactgctggggaaaaacactgagtagatatatagacaacttgaatattctctgaaaatgggcatggaatctttattgttatatcaaattttctctaattatatctaatcctttaaatttattgtatctcttaagacattagataagccagtgaacatgagcttttttctttggcttaattatagtggacaactattaggaaggaactgtgaggttgcaaatagaatattttgaaagataaagtactctttatgtgttttggggtaatgtttttggagtggtttctcaggaaatcgtataaagactggatttgaagaatctaataattcctattttggggttgtaataagaactacatatgatatctaaaaatgacttaagtgtggaatggctggctctgaagggctcctcaacctctcagtctcaattagtgatatcaattacactgaaagtgttttcaacaactgaaagtgtcaatcaacactttcagtgtaattgacatcactaactaatttcagtatattcagctgtatttttgttccagcttgattaatgaagcccgggggaccccaggagtattaagttagaagtaggatgtctcaatcctaaaggggaccaaatatcatggttcctattttctgtccttgtgtttgtagatatttgaaattctgtattatatgggaattagcctgaaagtggatttcatgatatcaagatggccaccttccttgaattccccaggtctgcttatacttatacttatgtaacttaagaagtggcatttaagttctcttgagaaaatacaagggtagtcttgaaaccacagcagtgcccagcctgccaaaggaaggcttttgtgaaacgcctttccagccacagcctttgaggcagacgtctaggtaagtgtcacatgagaacagatgtctggtaaatgctctcaagagtaaaaatcaaccatacagagtccatttctcaccagaatatagttcaattgtaattttgaggagccacaagcctaagaaggaagcagtgtgattaaaacagcattctccttttccctctagaagtcagaaatgggatgaaatgggaggcagagagaatgaaatagtgtgtttttcttctgcaccctaaggatttaaataacataaaaaattatttcttaatgttttacagactttccatactcagtacatttttgaacaaaaatagggaaagctgagattttttgactcaacaaggccgtcagtgctgagaggtggtgattgagcaggcttggaagtctaggaatacattcctgaaagctttagagatttagaaatagaaaccatctgcaagcaccacaggggcccagggcataaggaaacacttcaggataatatag

SEQ ID NO: 35696 - DNA, 1574 bp, Homo sapiens
aatccaagcatgacattcctctgcttaagattttaggcctaactctccattaaacctggaataaaacaccggctctcagcatgttcaccttctattttcgtctcttacctccgttcctacacactctctcacccaccctcttcagccataccaacaggctcccaggtctcccagggctccaagctcatgcctactgctttttctgcctggaatattcttttccccactgttgaagttactcctagttcagatctcagcttaaatgtcactcttgcaaagatgttcccacacctcctggcactgggcatttttgtccctgcatttgccagaattgatgagattatgtaacgtctctgctcctctagattaaaacatccaggaggcagggatgtgtctgttttgtggacccataacagtgccctataacaatttctgatccataccaagcaccccatgtctgttcagtgttgaaggttgtctacagtacattatgttcatggagagcacgtgtcttctgaacatcgcctttggcagctgagatgacttccataaatgggccaaaatttcacctcatcagttgtgcttactatgaagatgaatagctgatgaactccaattacagtaattattctgtttccaggcaataaccttagcagtagttgttctaaagccctgagacattacaagtaatgagtactgatggctcatgcatctgagtgtcctcccaaggtagagtccgaaatgaaaaatgaagctgtgtattatttgagggagacaaatagtattacattgtgggaacctttcagaaacacaacacgatgagtgaaagctgaggatgattgtggttacactcctcgtctgtccttccaggttattgaatgcttttggtctgctttggatcaatcattattgaacaacttaactgaatgcattttagtaacagcctttgtgaagctgcgaacatcaggtccctagaaaagcaggtggcttgaaatctttacacattagtcaattataaacctaatgaagtaaaaacgaatttagctctaattctgcgctgtgactacttactctgcatcgtgagttctacgaggttaggaccttgctttgttcatctttggatgtcagtttctagcacctaaccgaacctgtggtccagtaaagggctggatacgtggaagggcatgtttcatggtcatgtgacatcatgctgtgcaaataaggcacatttcagaacgctgtcctttactttcacatccaggaaccagcttgtaacgaacctttggcaaacatcaccgtggatttttctttttcttttttttttggaggaggaggtggggcacaactaagacatcatttgtgatttactccccctcctcttccatgtcacatacctcttagatggtcaacattcaccttctgctgtctcatttctgagacatgagacagccatcggacttagttttaactaggattattagaaatatttttgtgtccatcttgagatctctcatcagatcaatgtctagttttcttttgctgattcttattgatggaattcttattaaataaaa

SEQ ID NO: 35697 - DNA, 1072 bp, Homo sapiens
ggggattcttgttctcagtggccttctctcttttggatggatatacacagtttgattggcactcctattgacactttatttggtttgtgacttgtttgtctcggtgcctttctattaatatattttttctatttaaactaccctctttttttcagtacagcactggacattttctttgaaatcttccagattcatttggttgtcttcctcatctcagctgtcttatgcaggaaaagtggtcactgttcagtcaattcattctacgtagctggctatctgagttttttttttatcgaaaccaaaataaaacttaaaagaaacagaagaagctgagtctccctcccctccctttcaactaacacctactgatgtttatcttggaaataatttgacgtctatttgatgaaacctgtagttaagtgttaatggagactaacgtcaagcttcagaacagtgaggagaaacctttagtattgtgtgtctagcatttgatgcaagtgctctgtggaaaccatggaagctgggataaaaatgctcgcctgatccccagatagtctcatctgaatgtactgaggcatcaccgcattcattccaaatctgaacctgacctacttttccccttcatctcctgccatctcttccctagtttgtcatcttcttttccagcaccacgaatggttcatgctttctgataaatatctgatgtatggcatcaattatatgactatttaaacatgactcatagtgaactgtatttaaatattgatatgactccatgcgttttcaaagaatgtgtggaatgttctttttgagtgtcagttattaatcatctgttttccgttcaactttggttatcttcagtaaattttaatatctttcccttcaagaggacttcccagctgtctgatcaacgggtaggaaaggacagttggttcagtgcttgctcatgttagccctgtaagaagtcagctcagtttagttcatccaatagctggggaataaaaccacacaattcccttccttacttgatatcaatcaacacttgactaaatcttacatcctgtcttcagct

SEQ ID NO: 35698 - DNA, 1045 bp, Homo sapiens
ctcagcctcccaaagtgcggggattacaggtgtgagccactgcacccggcccagctctttcgtaaagaaagccttggcaaatgtggaaattctccctattcactacggtaaataattcttgaggttactaaactcagtatctaaataaaacagatcagtgtgttagtacatggaacagaaggccatatttttggttataaccgttgaccccacactcaccctggggtcttggtgtcaatgtcaggatgtgtttaaataccctaggctgtcaatcttgtaatacaactttggttatctttgttctagagccttgcaaagtaaagctgatcctagttaggacccagttaggaatttggatatatgtgttgtatttgcatgtgatactgcccttcatttgaaaacacaggcttaaattagtgaagtagaactcttttagtccagattacccccaaaatctgtgaatttgtactaattcaaaatcctctttgctggtaaccgttgtaatgaggtctttggaaattttatcctggtagcatggaggtgttgcttcttttcatttgtctagttttgtagtcagaactgtttatagagatgtaattttaaagtgaccctatgctatggtttgaatatatgtgttccaccaaaattcctacgttggaacctaatgcccagtgtgatggtattaagtaagagctggggccttttgggaaatgtcgaggtcatgattattccaccttcactaatgggattagtgctcttatagaacatgttgggaaaaaaataaaaataaagataaataaataaataaataaataaataaataaataacaggttggagcccaggagtttgaagctggggtgagccgtgatcatgccactgcactccatcctgggcaacagagtgaggctctggccgggcatggtggctcacgcctgtaatcccagcactttggtaggccgatgtaggcagatcacctgaggtcagaagtttgaaaccagcctggccaacatggtgaaatcctgtctctactgaaaaatacaaaaa

SEQ ID NO: 35699 - DNA, 1047 bp, Homo sapiens
ggccactggatctcagagctttttatccaggtgcccagaggctgagaaaatgccccataggttctataaaggacatggatcctgacttcatacaggtcaacaactatgttactgtgtttttatctggtttagaggatgggaaacccatcagtgttattatgccttcattcaattatggaagaaatcggttgaataccagactgcccaatgaatgtagtttctgtatattttcaggcttttagactgatctgaagttgtgcctctatgcacgaatgctgcttcttcaaaaggtgccagtggctgggggtcaactttgatgtggcctataaagttcctggcccagcacttaggcctgcctttcaggacataacctctcagctggatttaagaaatagcatctctttcagtgtgaggcagcggcaggaatgaagtgtgttcgtgtccgtgtgctggcgcttcgtatgtacatttttgttgcgtctttaacttagaaaatcagtagactttatgagtatcagaggataaatgtactgcagaggatgagaaaatatttagcgtttttgtggtctctcttcagcagtgcctccctctttcctggaaaagggcattggtgaccagagaaattgtgattctgtttgcatcctaggccaccatggagttgacttatgtgtagactggccatagcccagggtcatccctcccctctctgtcttgttctcagttgcttgtcatcatttccattcaaacacttgaatattccagatctgggatagtgggcagatggtttcatgctattcaatattctagtaaatatcttttcaatggttacctgtagtcagtcacattgtcagaattctcacttcagctatacgtgtgacaatcccttggctcacacttaaatttaacccagtgcttgtaaactgtggaaattaaaggacctagttgataccaaatgtccgttatctggagtagcctctgtcggtagctggatgccttcatttgatgtgaaaacaattgtgtcatagttgaaaataaaagaatgttttt

SEQ ID NO: 35700 - DNA, 1047 bp, Homo sapiens
cgatctacacgctgttagatttagattttgctgcatagaacagaaaacctaaaactaaaatggcttacgtgagagaaaaggttaactcttcatatgttaaattccagaaatgggttctagggctgatctggtagttgaggggtgtgatcaagtttccagatttcagatatccaaaataccctgattttatcattacacattgtatacaaatatcaaaatatcacatgtacccccaaaatatataatgtgattatatgtcaatacaaaaccattaaatatcccaaataccccgattttatcattacacattgtatacaagtatcaaaatatcacatgtacccccaaaatacataaaatggttatacatcaatacaaaagcattaaacatcccaaataccctgattttattattacacattgtatacaagtatcaacatatcacatgtacccctaaaatatataaaatgattttacatcaatacaaaaccattaaatatatgttaaaaagatttcagactcatctctcagctcttccttccacagtgttggtttctgtggaagggtccaaacagcggctggagctccaactgtctttgtctagcagcaggaggaggtagggaagaacaaaagctttctcagaaggccatgcagtatttcagctcatattttgttttctagcacctagcagtggagttatgaacatattttagtggaacatatttagtggaacataagcattggatgtgagggtagcggtggtggtggtgaaagttggtccagaaagactcccacatttctggctgggcgatggggtggatgtggttctaatctcttgggagggagcagaggagaaagaaggttcgggtaggtgagaaaggtagtgatgagctcacttggggaaatgttgagtttgaaggacatcctgttgggtcagttgtagaccactatgtgcatgagtctgaagctcaagaaataatctagtgggcgctagagtgtagacaaagaatcctcagtatcccagagggctttcaaaacccttcaactgga

SEQ ID NO: 35701 - DNA, 2176 bp, Homo sapiens
agtgcagtggcgtgataatggctcactacagcctcaccctactgggctcaagtaattctcccaccttagccttcccagtagctgggactacaggcgtacgccaccatgcccagctaattctttgtattttttgcagagatgggggtctcactatgtttcccaggctggtctggaacccctggactgaagtgatcctcctaccttggcctcccaaagtgctgggattacaggcatgagctaccatgtctggcttataatgatcttttacaagtgtaatgatggttttaggagaacagatgcacagtatgacattagattccccactttcttctctattttgtttctttctgtgtagtcttgctggaattctgattaatcatggtccttcccaatctctcagaatgacccatatctttcagaactattgtcttaatcatgaagaccctcaattaccaaattgagaagtttatgttgctttgaccaccatctgtgtgcatcccgatacctggggttacagactggaatctgtgatcaagggagagcgtggatacttgctttattaacaaatttacgtgtgttttactcaccagtgatgagaagaccaccgacacattcaggaggctttatggaacagagaaatccttcaacattaattactgtatctagtgtttttttttgttttatgcaaaagatgtacgtagctattttggaaaagcattataagtagaacttgcatgttgatagctttaggatgtgttcagattacaaatctccatttgtactatacttgagtttttggtaatttgaactagactagatctttaagggaaaaaatatatatatattttttctcagagaacaaaccaggaaaactttagcatcttgaaggtaaattagtgttgattatgacaagtgagaataattaatttgcaaatagtcataagcagattatctttttagcagttagttctcatttatttgtaattgaaaaaacaaatatctgctaacataattgtaattcatcttttgtgttcatttttaaagtgcctgttcctttccagacaagctgcactcatgcatggcagtgttacaagggtgggcttgtagactgagtttgggaagtgctatgaatctactaggatcacctatcacaatcaagattccataattccaagtaaaggaagatgcttttgcctgacttagatgatggttcggattctagtgtagttttttttggaaatgcagttctgtcactttcacagctatgttaccaatgaaataagtctgtgtgaataagtaaagggaggtaagttgataaaagcattcagtttgcaacggatctgcagtgcatcatggtgctcaatacagtttttgaataatcacatttatttatcagattttaattggagaagatttgcagatcccacctttgaatcattacaaagtatgaatcctgtcatctagaatactgaaatttagtatgtaccatgcttaggactgatccgaagacattttaggtttgaataagaaaaaagaggcaaagaggcccaatataaaaacagagagaataaatcttaaagcaccatctatgttggatatccttattgcaagagatcccacattggacagacgatttcagttgacaccaaaggaagtaagaattttctgagactgacgggtatcttggtaaatgttccctctttgcaggtggtcgtagataatttcaattcaccctctgctttcttcgaactgacgaaggtgtagctttgatattttcccctcttcatgttacatgatcatttattctaactggcaacattttatttatttatttatttggacccattgttccaaacatgtaaaagatttggacctgcaaatctttctatgttagtatttattgtattagtgtttgagatacctggaattttggagatgaagtgactcaatccatttattttctagaagaaatcttagagatgtgagggacaggtgtagattcacaagagctaggacatgctgttctaacaaaaatcctccttccctttggttcaatttttaatctattttaggtccttccatttcacattaatgacatagtaatctacccacttaaaactataataagttcactaggtttttttttcccattaaaacagactcatgagtcatagtt

SEQ ID NO: 35702 - DNA, 1029 bp, Homo sapiens
ttttttccctcttattccaacatttgcttcaggtaggtttgaccaatatcttggattctttccacttgtgtaattataaacccaacttgttggtgatggatttgcttgtagatgcaactcagttgtaactttgtgttacttaaaaaaaattgttagtggattggctggtgtataattcttgttaacctttgcagctctgaattagtagatgatagttgcttgtccaagggtacacagttaatgtgctgcagccacacattgaactttgtcttgaaactttgattcattccctgcatctttgtaagcagatatatttttttctgattataagatggaaacagaatgaaaaggagatgacttcttgtcttgattgcaatgatgaagctgcaatcaaaccagaaataacactccagtctctgacacacattgttgcatatttatgttgggttttgctatagacttggagccatcttctccattgtcatctgtctgatctcatccttaataactttattctgctggttctagatgaaatggttaataaatccaaatttgcattttcaaagtagaaactttatagtggatagggcctttgtatgattcaaactgccctatataggaagtgcttagatattataataatgcagggaaagaagatataaataggaatggcatgtaaagtagtgaacatagtaactttcaaatcatatggagaaatttgatatcattttcttattttatatggcagttaatgtatgccagtgattcttattacattacagaaccatggtattgttaattgacagagcaacgtaaatgtaaaaatgtgttaatgaaaaatctaattggagatatcatggagcacatgtggtaattatgggaaggacccagtgcatgtaacccccttggcttgtgggtggataactcctggaaattgtgcattgtgcaaggttgcattttctgaagaagggcaatggtatattggggggcttgccatttttcatccaaaaaccatatcatgcgaagact

SEQ ID NO: 35703 - DNA, 1063 bp, Homo sapiens
agtgatgaagaggtggtgaggggacagcaaaaaatgcaattacatttcttctctttatttttattttttgagacaagagttttgctcttgttgcccagggtggagtgcaattgtgcgatctcggctcaccgcaacctccacttcccaggttcaagcgattctcctgcctcagcctcctgagtagctgggattacaggcatgcaccaccacatctggctaattttgtatttttagtagagacggggtttctccatgttggtcaggctggtcttcaactcttgacctcagatgatctgcccgcctcggcctcccaaagtgctaggattacaggtgtgagccaccacacacagccccctcttctctttctctgatcactccaatactcgttctaattgggaggaatggatttaactaatctttggtttttatctctgtgtagaaactgatttcttggcagaatggactgttaatatatttaaaaagactgaaaacctcttagaatcttaagtagtaaaatattcagagcgaagaagtagagattttacctttacaatatggtgacaacagataactgtaaaaacttctttttcaaatagaaccagcaggagcatgcatggaacacatataccaaacatctttctgataacattaaacatttttaaaagatgttaaatgttcttttcattgtggtgcttcagattcctgattctagaacttgtgtgtgtggaacctgtgtgctaactattctgttggaatttaccagcaaagaattatctaagaattttcaaactaaatgatgggggaaggaactaacatttttgcagtccctggaaatgtaaaatgttgtactcacatggcctcacattaaattcccattaaattgacatttaaaaaaatttttttattttaaaggaaacggaaggacgatgagattaaataacttgcccaaggattctgggtgggtgtgctgtggaggtgggatttttatactctgccatgacccaatgtgcaaagtctccttgaaattcaattcttgtccaatatttaccagattaaactcagt

SEQ ID NO: 35704 - DNA, 1057 bp, Homo sapiens
ggccaacgtgatgaaaccctgtctctactaaagatacaaaaattaacccggtgtgggtggcgggcacctgtagtcccagttactcgggaggctgaggcaggagaatcgcttgaacctgggaggcggaggttgcagtgagcctagatcgtgccattgcactccagcctgggcgacgagagcaaaactctgtctaaaaaaaaaaaaatgggcacaatctgttggaaagagcttgggatttggaattgggggacctaggtttaaggcccagccccacagtctactagatgaggaacattggatgggttttccaatttctgatccttcataaccctgttgtgtgtgtatcatctaccttggacgtttcttgaagagattaagattttgggtgtagtagcttataaacagcaaagtactttataaatattattttaaattcttgcaatttttcttagtaaagcatgtatacattttacctaagaggaacttagggagttattaaatttttaaattattgaaaaattgtctcaagactatgatctcctttgatttttgtggacaaattattgaactttcttgatttactattacatctttggactgcagtttctacctctgatctaaacacatgaatctaaattgattatctctttgaaagatctacttagctttagcatgtaaatagaaaataacattggaataatttatggaagtagtattcatcattatatgggaagttactcataagagatttttttttttttttagtgttcttccagacttggcaattagattacatttagactgtggaattaaaagtgattccctgtgagctctcctagcaaattatgaaattgaagagagagagaacgggttgcgggaaccctagtttcctaccgtgagacagtttgacttacttttctttaaaagttgaaaattctcatatgggcattatttatctcatgcttggtattggagtctttccctgggtattcatagtacacttgaggaaactaagactttgacccttttaatagcaagtttgtctgtatgtgggggt

SEQ ID NO: 35705 - DNA, 1033 bp, Homo sapiens
catctttcaaaatgtggtctttttgcagtacagctggaatgtctctgcctttcccaccatgcacctttgtaaaggggcggcttctgtctcgctggtgtaacagatttcttccctgtgtcccctttctcttctgtcaatgaatcatgggtggctgtcagctggggaccactctcagtgtctcatgcactgaatgcaacatggacacaaacttacgatagggccaggtgggggacagcaagaggtgagcaccggaaattgcatgaggtaggagtcactggctggtagtgggtgagggacacgtggtagggacagttcagcagctggatcagggtggaaatccaaatcctgacagctgagaagtggcacagacctgcttctgtggggacaagtgtccactggccctggccaactggcctccagggggcattgttggaacatgcgatcatcccaaagcatttcagcttgaagaagatctaggacacagtttgttgttaccacctcagagcatttagatgggatgtgatggatggaattgaagttaaaaacccattcaccatttctaggtagtacagtaggctcctaatttacagaaatgcttgtgaaattgggaatcatgataaaatcctcatacctcctcctcttttaaccaaatctttctaaaatgcacaattataatttcttacctttaggaaaaagtaattatgttatatgtgttatatacactatgtaaatatagttcattaaatcattctttggcgtttgaagactttctaattcattacttcattccagacatcaatgacaacagcacataccgagcaggtacacatatgagctacctactaatatgccctgattttgattgtattttgtgaaaaccttggtatgggttatttttaaatgaatgttttcccaaattttaagctgaaactaggatgcgtcaaaattatcttggtcataatcttgtcaatgatgtcgtctaaaggccaccaggaacacacctgtagcccagcaaagttgaggccatcaactg

SEQ ID NO: 35706 - DNA, 1147 bp, Homo sapiens
tggtttgccaggggctcccaggcctctagccgcagactgaaggctgcactgtgagcctccctacctttgaagtttgggactcagactggcttcttggctcctcagcttgcagtcggcctattgtgagacttccccttgtgatcatgtgagccaattctcctgataaactcaccttcatatatacatctatcctattagttctgtccgtttagagaaccctgactgatacacaggccatgctcagatggagtgctgtctggaaatgggagtaattctgtggttgaatgtcttaattgtcctggaaggtgggagaaatggaatgaggctggtgctacaattgatgtaaaagcagcagctgctcacataagccggggtgggggctgcctaggcgtatttgtggtattgaccacgttcttgtttttgtttgtgaccaggccagattacagaggggtattgatttgccttgcccccgcccccaccatcacagtgtgtccctgtccagtgttggtgctgtgtggcattggcttgtgtccataggagtccatcaaggcagagcggcagagtgggaaggcaggtcagcttccagctcttccaggctgcatgtcccactcaatatcctgtaagttctgatctggcagatactgaatactcaagggttcacattctcttagcctagaggtggctgcaataatgaaaggcatttggctgatgtgttttcaaaggagagggaagctgtctgtgtttgttacctgcggctgcataacaaatgaccacagcctagtgactcgaaacatcacacaccagttacctccgctctcagtaggtcagaagttcaggcatagaccagctgtggcctccactctgagtctcagcaggctacaatcagggctcaatcagggctgtggtcctgtcagaggctctctcaggttgttggtggttgtaggactgaagttcctgtttttggggggtagtcagctggtgtattagtctattttcacactagtgatcaagacatacctgagactgggtactttatttaaaaaaaaaaaagagatttaatggactcacagttccatgtggctggggaggcctcaccatcatggtggaaggcaaaaggcccaccttacatggcagcaggcaagagaga

SEQ ID NO: 35707 - DNA, 1049 bp, Homo sapiens
cagttcaacccaatggaaatggattgaaagagtgaaagtcactggtctcaaagaatctacggaatttagcattttgaaaatcacatagcaattttgggtaggtattcacctgcactaaaaaaccaggcaaacatccgactcccaggataaagtgactgagagcagtagaagacttgttgagccttaaggaataagaggaaaattacgttatgaagtgcaggaacagcacagacccagacgaggggacgcagcccggagccagtaacccggcgccacctcctccccagggcgcagcgctggctgatccccagataccgtgatcacacgtcccgggtcctgagagcgcctcataggtagacagttctttgggacttctgggatgcagcacttgaagagaggtttacctaaactttcctcctgggagcctgtgatcatttgaaagtaacagaagaaagttgtcaggctgaggaaagtttcaacaggcacttggtgagaatgggaagcatccattcattgtgaaatcgcggggacagaggaggaattcacgggatcagagcactgagaaactccagaggcttctggttcaccgccctgattccacagatgtgggtcagaggcagagatggaagttggaatggacaagcctgccctctccttggctctccatggctctgtcctcaggctgtttctgcaatttgacatgaggcctggccccagggaaaccagtggggcctcatctcctccctgtgctgctctgaggtggagccttctcagggtcagtccagctctggagcccctctccagctcggtcaccaaagctgtctggtcccagggcggtgctgagtgacaggcatgccagccaatccaatcggcaatttcatatccaatgcatgtgactgataaagagataacgccctgtctccaagacacaggctttacataaacagctttaatgacttcttcacttagagacaagactccttagtggtggaacctcaggcatccgtgcaggacgtaagaaagctgccgtatatacatgaactgagaag

SEQ ID NO: 35708 - DNA, 1116 bp, Homo sapiens
taccagatggagataattacagctttaaaaatttttattttttcattttatttcacatattgacattaaatttttattgacacataataattgtacatatatatggggtacaatgtgatgttttaatacatgtactcaatgtgtaatgatcaaatcagggtaatttgcataatgatttttctgtagggagaaaattcaaaatctactcttctggctattttcaaatatataatatgttattgttaactatactcatcctactatgcaataggacaccagaacttattcctgggttctacatctgttaagccaaccaaagattggaaatattgggaaaaaaaattgcgtctgtactgaacatgtacagacttttttcttgtccttattccttacacaatatagtacaataactatttgcatgacatttacatcggatattatgagtgatctagagttgatatgaagtatatgggaggatgtgcaaaggtgatgtgcaaatactatgtcattttatatcagggacttgagtatcctttgttatcctcaggagatcctgaaactagtcctccatggatactgagggctgactgtctagtcctatcctcacggaactttcattgtaatgagggaagactgactataaacaaaatatatgtaataggtggtggtaagtaccgtggagaagtaacaaatggggcaaagtgagttatacagctccatccttagaaaccttggagtacttttcttagtttatactcgtggtggtttccttttgtctcctttattacatgggactctgacatgtgcccatagctagggtggcagtaggatctacccgaaaagcgtcctgctgatacaggaccaaagcatcctgttgttctcgagcctataaaaagagctaatggtcttgcttctcttaactgtggcctcctacactgtgttttggatgattggtgatgtcttggatattctgtttctttggaactttgaatatacaacactttactagggaattagcaatggaagcagagcaaagatgtacagaggaaacaatgcataactctgatggaattgaagtcatgaggcagcagagagcttaaattagagctttaaaaa

SEQ ID NO: 35709 - DNA, 1067 bp, Homo sapiens
tgtgttctggcaggggaagatgggacagagaggatgggagggtgtctgagcctttcccggactgacggaacctgtgtcttctctcttttgtggacaggatggtgattgctcacaccaaagccttggacccctcccagcctgtgacctttgtgaccaactccacctacgcagcagacaagggggtgagcctgggggtccccaccccatttctccctgcctttgcctgggcttgtcctgaagcctgctcatgggaagagctggaaagaaccatgtgctgccagtctgagctttttattttgttttacttagaaagatagagacagggtcttgccatgttgcccaggctggtctcgaactcctgggctcaagtggtcctcctgcctcggccttccagagggctggggtgacaggcgtgtgccaccgcactcagccgcagccagtctgttttcaaagatggtctttgggttaatgacaattctctctctgcttactctctaggcagtgtggctttctgaatttaaggaggctgggcatagggagatgggatttgtttgcccagtttggactcagcattttttgtactcgatttaatagactcataaaatgtcaaaggtttaagtgagcttagagttcatctggcccaaacctggctgatcagaatctccaggggaagttttattgaaatgccagatctctgcattctgagatcctgatttagtaactccagggttggaacctgagtttttttttgtttttgttttttttttttgtgaaggcaaggtcttactctgttgctctggctggagtgcagtggtgtgatcacagctcactgcagccttgaattcctgggcctaagcaaccctcttgcctcagccttccaagtagctgggactccgggtgtacaccactgtgcccggctaattttaaatgtttttgtagagatgggatctcactatgttgcccaggccagtctcaaactcttgagctcaagtgatcctcctgccttagcctcctaaagtgctgggattacaggcatgagccaccgtgcctggctgatactagcattc

SEQ ID NO: 35710 - DNA, 1202 bp, Homo sapiens
tcatccatacaaaagaacaagatcatgtcctttgcaggaacatgggtggagctggagaccattatcctcagctccacccatcctcagctcccactaacgcaggaacagaaaaacaaatgcagcatgttcttatttataaatgtgagccaaatgataagaacacatggactcatagaggagaacaccacacactcggacctacctgagagtagtgggtgggaaaagggagaggttcaggaaaagtaactaatgggtactaagcttaatacctgggtgacaacataacctgtacaacaaatccccatgacacgagtttacctgtataacaaacctgcacgtgtactcctgaacttaaactaaaagttaacaaaaggccaggtgcagtgtttcacgcacgtaatcccagcactttgggaggctgacacgggtggatcacctgaggtcaggagttcaagaccagcccgaccaactaaatacaaaaaattagctagatgtggtggcatgtaatcccagctcctctggaggccaaggcaggagaatcgcttgaatccagaaggcagaggttgcactgagccgagattgtgccactgcactccagcctgggcaataagagtgaaactctgtctcaaaaaaaaaaaaaacaaaaagttaacaaaacgggcttctctagttctaaagcaccaacacagaggtgatcaaaatactctaagaagcactgggaaacattgaggggatggttcaaacatcagagctaaggcctaatttcccaacagtcattatttctgtggtattcggcatattagagacgtataggttcctcacctaatccttgttttgtcattttatttttaatacatatgaaagtcataataacaaaaaaaattcatacatcagcagctcagctagaaataaaagtctcaatctactggaagcccctgtgaacttgtatcaaattcctttctctcttcatagaggaaataatgactcctaaaatgtggtaatgaacaaatatctctaattgtttaaaatttagtatatgtgcaagtctccacagacacaatttaatcatgatcatatatttttagaagttaaaaacgtgtctatcatcagggcgtggtggttcatgcctgtaatcccagcactttgggaggcctaagcgggtggatcacctgaggtcaggcgttcgagaccatcctggccaa

SEQ ID NO: 35711 - DNA, 1029 bp, Homo sapiens
tgaactttgttattaagaaaatcactcaaaccgaaacgtataaagtggacgcaatgtagagaataagtgtgtttttgcaaaggaaaaagattttgaaaaagtcaatattttgagaaatagcctctcagagtttctattcctacattgatcatgaacgaaactgaagcaaaatagtaataaaattagtaacttattattaaaataatttaaaatacaacattcataaacctgtgtgtgcatctaacagtatcaaaataaatcagaactttttggaactgttagaaagcatccatactcacagtaaaaaattatgatctgataggccaagaatacattggtaatgaataaggaatatctaaaaaaaaatgcattaataagcttaattaaatgggtatataaacaaactgtcacacaacaaagataaaaaatatatactatttaataaagtaattcttttaaattttaaaaaatacaaacattctcatttaattctgaaagtaaatatcatataaatcattctgtaagaaataaaattaattagtaaatctataaattaacttttttcagatagtgatagaatcatttttatatcccttcaatcatcaatataatggactaaatacacagacttattaaaaatttattattattattttgagatggagtctcactctgtcacccaggcttgagtgccgtggcacaatcttggctctctgcaacctccgcctcctgggttcaagctattctcctgcctcagcctcccgagtagctaggactacaggcacaagccaccacgtctggctaatttttgtattcttactaacaaggaggttttaccaggttggccaggctggtctcgaactcctgacctcaggtgatccgcctgcctcagcctcccaacgtgctgggattacaggggtgagccaccgcgcccggcccacattatttttatacaatataaagacaaactagagcacattattgaatatatttcatgtgtcattgctttatttcaggaattaagtctga

SEQ ID NO: 35712 - DNA, 1023 bp, Homo sapiens
tggtgttcaaaatcaagctcactgaaaaattgcacatattcgccactccactttttttctccagacttttctctttcttgggtttccccctaatgttctgtcttctttgcagatgtttctttccgcattttaaatgctgagatttcccagagctaatttcatctcttcatgtcttcgtgctactaaatgtgatccatatattgcagggggtactcacacagaatttgcataagatagaccggaacttgaagttctgccatttaccactcaactttgcaactttgggaaacacactttatatccatgtccatctgagaattcatccctcaaatgggaaaatagagtttaacatctgaatccatttggtagattaaaagaaataataaatataaaataattagcacagcatagtacccagaaagcaatactaatgaccaccataactcccaattctctatcccaagcttgacttcctacacacacatttgtcaactacaacctgatgtctcatagaatctctaactcagcaagttcagaactaaattcataataattcatctgtttctagctctttctcctcccttccttctacagtgatacagggtcctctctaaacattctgagtcatgggttatttgagtgagtgagaatataagccaaattaaagaagcaaaaatgcaacacattctagaatctttctccctaaagctatagctagtcattactataatattaaaggtcctgccctcttaagatgttatatattgaatcattttctatccccgttgtcactatagtgtcataattcaggcttatattttacctggtctcaaaaattacaatacattcttatctatctagagacgcattcacacatgcactaagatagatttttccaacatataaataattacattatctaatttcacttatagcaaaaattttacttatactttggcttatagcaaaaatttcctgattttttgtatattatagcaatatgaaatcttaccaaatttggaa

SEQ ID NO: 35713 - DNA, 1069 bp, Homo sapiens
tttgcacagtttttgtattcgcataatgaatgaacagcattgtcacgagcatttttaagtgccttaggatgggactgtcatccagccattaaatcctgcaaattcagttctgaggggaataaaaaagaaatacaggaacatagagtgagagttgtattttgtatttcctttgtcccttttgcacagtttcagaatgcattgacaaatcagtttctgtagcaatgggattcagattctggatttttttttaaaaagaacataagcttctgaggctagaagtagagaatgacctccagtggctggtgtcaaaagaagagaacagccaataaattatatttgtcctagatctgacaacccatgtagaattacattggtacagaactaaccagtaccctgttgatgtcgaagatgtttcttattccccaaatatgtgaacctaattatgactgtattataatctagcagatctcactaagtatattccaatggctatatgcagtcttagaattgaacacacagagcacaccattgtgttgccgatggcataaaaacttgaagaaactccaagatgaccagaactcagaagtctgcagtcatagtaagtgaaatgacaaaaaaaaagtagagaacagttagatttcttgggtaaaggctgaacaatctactgatgcaagaaacagaggaggagtttcctcttaggacttgagaagattcattgatagaaaaaggactctgtaaaaatgagcagatagtgtttgatataaggcaatgatttgactgtatgatgggtgccttgatcaggtttggaggtaataatttgcatggcaacctaatatataccgtcaggtaaaacctcctgaaaattacatgaatgataccagatagcacatgtgtcctattttgatacataccctggtcctgctgagattgtgcctttgctatgaagcaaggcctctttgaggcacattattgtacttagacaaggccctgcattctagagaaagagacaagctgggaaaaaagattttgtacacgctcaaagaatgaatgtccatttgagagtataaac

SEQ ID NO: 35714 - DNA, 1065 bp, Homo sapiens
tttaaaacttaaacagaatgcagattgcaataatatagcagagatgtgcacaaaattgtgagtcactttaaaaactgttaaccctgcaatgtattcttgtatggaacagtgcagtaaaataaacataactgaagcagaaatatttctgtctcctagaaacgcatatataatattaaaactgacaaataataccccctttgtatggcattccgtaatttaatgtgttaccttgttttcatcattgaaattaatagttttttttttttttttactgaaataaagaaacatttatgaaaagaacacatgataacatatttttttttggtccaagagaaaaagttagcatctgatgttggaaaatgatcaatgataagaaatgagattttgcaaaataaagtcattgaatatgttatggaaaatacagcctctgtccctcattatcatggtgtgcaaactgaggagttaaacaattgagatctctgtgatctagtacccccatctcgcctgttatttccaactctgaagacagaaatctatcaccagatggatgcagtatatctatatctacatctatatctatatctatatctatatctatcaatattatctgtatctatgtctctatctaatctatcattttttggtagctacttaatcctctattgaaattagatttcatattgagacaggattgttcccctgacctcccttcatgggcgggaagtggagtggcctgttacccttagcctgctgctggccactccttgcaagagggagtgtgcgagcaagcaagtgcaggaaccagaagaaaggaacactggaatcagctagctgcttctctctggtaggagcaggctctatgcgttccacagcagcatccaatcccctgccctcttggcacccatttcttgttcggggtccagaaagaatcaggtcactaattgaagggtagtgtatgcagaggattttactgggcaatggatgtggttctcagtggaatggggagttggaaaggggatggtgcgggaagaaagtgatctttccctgaagccgcaccctctgaag

SEQ ID NO: 35715 - DNA, 1038 bp, Homo sapiens
tttgaggaatttcagactgattttcacagaggctgaatgatttacattaccaccagtgattaaggagggctccagtttcttcagatctacatcaataattattttccatgtttttagttatagccacttttgcaggtttgatagtagtaactttgtgtggttttgattggcatttgtctaataactaatgacactgaacatcttttcatgtgtttattggccatttgtatatctttggagaaatgtctacccatgtccatgatttatttatttaaattgggttgtttgtctttttgttgttgattgtacgtattctttgtatattctgggtatgaggcacttattagaaatatgatttgcaaacattttctcctcttctctaggttatcattttcttgataacgtgaaatgtgttactctatatgtgtatgttgaaaccctaacccagaatgttactgtatttgaagttagggaatttaaggttaaatgaggttatacctgtgggatctttgataggaatggtgtccttataagaagaggaagaagagccatggatttactcataggggaatacctatgtgaagacaatgagaaagtgaccatctgaaagccaaaaagagaggccccaggagaaactaaacctgcagacaccttgaccttggacttcctgtttccaaaactataagaaaataatttatattgtttaagctacccagtctgtagcattttgtcttaggaaacctagaaaaacaatacatgttttttttttttaatgcccaaagtgttttaattttgatgaaatacaactatctgttttttttcttttattgcttaattttgttggtcttatagctaaagaattcattgacaaatctaaggtcatttggatttaatcatgttttcttctatggctttcatggttttagtgcttatatttatggcaatgatacatgttcagttaattttttatatgttgtgaggtaggagtccagttttattcttttgcatgtagatattcagttgtctaaacattatttt

SEQ ID NO: 35716 - DNA, 1050 bp, Homo sapiens
ccgacagtcctagctaaacttcgctaactccgctgcctttgccgccaccatgcccaaaacgatcagtgtgcgtgtgaccaccatggacgcagagctggagtttaccatccagcccaacaccaccgggaagcagctatttgaccaggtggtgaaaactattggcttgagggaagtttgtttctttggtctgcagtaccaggacaccaaaggtttctccacctggctgaaactcaattaagaaggtgactgcccaggaagtgcggaaggaaagccccctgctctttaagttcagtgccaagttctaccctgaggatgtgtccgaccgaggaattgattcaggacaccactcagcgtctgttccttctgcaagtgaaagagggcattctcagtgatgatatttactgccggcctgagactgctgtgctgctggcctcccatgctgtccagtctaagtatgggaacttcagtaaggaggtgcataagtctggctacctggccggagacgagttgctcccacagagagtcctggaacagcacaaactcagcaaggaccagtgggaggagcggatccaggtgtggcatgaggaacaccgtggcatgctcagggaggatgctgtcctggagtatctgaagattgctcaagatctggagatgtatggtgtaaactacttcagcatcaagaaaaagaaaggctcagagctgtggctgggggtggatgcactgggtctcaacatctatgagcagcatgacagactaactcccaagataggctttccttggagtgaaatcaggagcatttctttcaatgataagaactttgtcatcaagcccattgacaaaagagccccggactttgtcttctatgctccctggctgcagattaacaagcggatcttggccttgtgcatggggaaccgtgaactatacatgcgccgtcgcaagcctgacaccattgaggtgcagcagatgaaggcacgggcccgggaggagaagcaccagaagcagatggagcgtgctatgctggaaaatgagaagaagcgtgaaatggca

SEQ ID NO: 35717 - DNA, 1049 bp, Homo sapiens
gagtatatagaggcttagctctatttttgaaatgactctctaaggtcttacaaattgaaaaagcaaaactcaagacaaaaaaaaaattaatttgcaaaagtcagtattatctacaggaattaacaaagaaaaagactcaaatctctgaatatttaatgtgtgggtttatgagtttttttttttttttgctttgttttgcttttttgagatggagtctcactctgtcacccaggctggagtgcagtggcgtgatcttggctcactgcaacctctgcctcccaggttcaagtgattctcctgcctcagcctcctgagtagctgggactataggtgcccactaccatgcacggctaatttttgtacatttagtagagacggtctcaccatattggccaggctggtcttgcactactgaccttgtggtccacccaccttggcctcccaaagtgctgggattacagttgtgagccaccgtgcccggccaagtttaatatgttgttcgatttgttactttcctttgtctccgcttcccctctctgaattaaaatcaatgccttgatttgtcaaacaaatatgtagtgagtacccactatgtataaatctttgcatcatttgccacaaaaaaaggctgatatcaattatataaagcattagaatgtactagaaacaataaggaaaaaagtgacagataaatacaacagaaatatatctaatattgctttaaagttataatttgtaattttaattcaacctgtagcagtctggttagttttaagtatttattgaaattctatggactgtatttgtaaactgagaattaaaacaaatagcctgcagattttctgtattgacttattagaatggtatatataaattgcctgcctgatataaagtaagtcacttcatatatagtagttactgttactatatttggggaaaaccatgaaagtttcatgaaaaaaagtgtcctttgagcttttacaaaccagcttagtaggtagagtctgaaagttaaatgtgtgtgtgtgcacgtgtgtgtgccatggccc

SEQ ID NO: 35718 - DNA, 1035 bp, Homo sapiens
ttacagaaagcgtaactagagagagacattaacttgcagatgatttgtttctggctaatgttgtgacaggagtgtagcatttcctttcttctcagtttcctatctcacttaccttttgaaaagacatgattccatattatatttattctgtttctctctttctttattcatttaccctactttactgaaaaatctcaaacatcatagaaacatgcatgtcttggttctccaagtttgaaaggaaaataatgtagaaagctctgttttttttgccctggcatttatatactctccaatctcactactcccatatcactcttctacctctcttagagcaaaattgcctcttaaaaaaggacattgcacccagcatggtggctcatgcctgtaatcccacaactttgggaaattgcgccagtgcactccagtctgggagacagagcgagactccatctaaaaaaaaaaaaaaaaaaaaagtacattgctgattccatttcagcatcactcaattaccattctctaactgtctctgatttgtctttaccaaaagccacatctggcataattggcaaaagactttttttttttccccaccattccaatgaacacaaaaatgacattctcaacatcaaatcaaatgatcacatttttattcatattttactccaactgaaatgaaggatataactaatttgtccatttttctttaagcacatatctgtattcattttgataacccagcactcttgattgttcccttactgaatgtttgtctcttagtatcctttgcccattctactcctttaaaaaaactgttgcagtaaccaaagagttatttttgattccacttctttgtcaaactaaagtcagctctttgaggcttctggattttgatattaaatatgtgtttagcagttcaaattttatatatgtatattctagctcagatccagaaatctatttccttcttatcattctcacttggattcctcaagcaatttaacatgctctaaatatttcttccatgtttattta

SEQ ID NO: 35719 - DNA, 1026 bp, Homo sapiens
gaaaatagttttgtaatagtgatgtccctgaaaaagtctcaggaaccactctagggaccacactttgagacctgtggtcttaaaatgttgtggataaaattacacttgggaaaaaataaaaataaaagttttaatgttgtctctatgtttcttttccagagaattaagtattgaaaattggattatgcctgcagtttatgctggccatttttcacatgtaatatggtttcatcccacatgggctcagcagatcagagagggcagacaccactttttagtaggcaaagacacttctaccacaacaatcaggtaatttcctcatatttgtgaatatggaagtgattgaatgtttctatcttattttggattcctataataacttcataagtctctgcacacaaatagggtcagattaagcctcgacttctccaaagagttctcaaaacacgaagaacaaacttttaagtctcttgatattcttcatgtaccatttatatttagttgctggtcaaattagattttgaatgtgatcattatcctccggaatttgggcttcattggtgattaactccttaagccattgaagtatcttatagatttatacattcagtagtacattttactgtttcctgtcagtataactgttgtctgctgaatttgccgcagtggctcacgcctgtaatcccagcactttgggaggccgaggtgggcagaagacgaggtcaagagatcgagatcatcctggctaacatggtgaaacaccgtctctactaaaaatacaaaaacaaattagccgggcgtggtggcaggcgcctgtagtcccagctactcaggaggctgaggcaggagaatggcgtgaacccaggagacagagcttgcagtgagctgagatcgtgccactgtactccagcctgggcaacagagtgagactctgtctcaaaaacaaaacaaaaaacaaacaaacaaaaaaacagtaattagcagtgaaagggcaaaattatctcactttgatttttttataaatcc

SEQ ID NO: 35720 - DNA, 1130 bp, Homo sapiens
tttggggaaccctagttccttctacctttttgcaccaccgtctctagaatattgcccctgtccttatagtccagggtggcttgccacctctgtgttcatatgccagtcagcagggaacaggagaacaaagctctgcatgcttttcttccattcacaaccaccggccttaatttaatcacatggccacaccaggctgcaaggcagactgaaatgtagtctttatatggggcagctgtgtgtccagctaagaatttgaggaatgctatttctacagaagaacaggaagtataaatactagagactgctctcagtttttgtcaaataggtccgttcttatatttctgccataccatagtgaaatgtcaactgatttgcccattcttcttaaaaatcgttttttcctctgattcagggttacaagtacagatcattatttcctaagtgatggtctgtatgtacctgaagaccagctagagaaccaaaaacctttacaattggatgtaattatggtaaaaccttataaactctgtaacaatcaagaagaaaacgatgcagtgtcttctgctaagaaaccaaagctagccctggaagattcggaaaacactgcctctactaactgtgactcttcttcagaaggactggaaaaggacacagcaacacagagaagtgaccagacttgcctagaaccatcatgttcatgttcttctgaaaatcaggaatgccagactgctgccagcactggggaaattctggaaattttgaagaaagggaaggcatttgttttagatattgacttggattttttttcagtcaagaatcccttcaaagaaatgttcactcaggtaaataattgtgtttttaacacatagatcttgagaattgtatggcttttctctagatgaggaaccagcaaactctttaaacagccagctagcaattattttaggctttggggttcacattctctactaatacccttttctgttgttttctaaaccttttaaagttgtatataccattcttaacttgagggccatacacaaacaggctataggctgtggattgccaactcctgctctagatagtattcattattttgcatttattaattggggtaatgtatacatggg

SEQ ID NO: 35721 - DNA, 1035 bp, Homo sapiens
ctaccccagccagaaactaacattctcaaaagctactaccaaaaaaaccccacaaatttgccaatccatgaaagtatcataggaagtctacctttccaaggaatttggcattgtggccctgctcttgccaaatgctctccagcattgttggtatcaaggtggtctggttgagtaaacttgaccaaacaaaaattaactgttttttgcttttctgtttttgttttgctgatcaaaaaagcccttcagggtctcttgtgcatccaggaggtcattgtagatatcaataatatagtgcctaagtgccactttattgccaagtctagattgatacttttttcagataaaccagctttttatgtaaagagtaagggaaaaagttaaatctttaattctgacctgccataaatacccaaagatataaactgtcttccaccacccccctcataactaagacatccttcctgagtcactcttaatcatgaaacttgattttctcaattggccagtcttctgatctttagtatctctttagttcagtaatttttacctacctacttgatttattttcctttaaaaggtgaaatgacatttaaagaaaaacaaacacccatcattcctcagtcccaacacagcagttcttttcactcttgcttgtaactttcaggccttacccacatgtgttcctatagagttgcatgtagctaaaattatagtgtgctgcctaactttgtgctaataacgaaggacacacattatcattgcctcacagtggatggcacctgaccccatttttccaaggattctattttccagtgaatttttgtcaccgagttaatttcccaagtctgatagcatgaatgcttatttgtgctgtgaaaagcagagcagcctgactcagctttccattttcataggataatatgtgccaaaaaaggtttattttcttggtaaaatcagaattgtagaattgtgctatttttaatttttaaaatttttggttagagcttatagacattacttttatgattattttgc

SEQ ID NO: 35722 - DNA, 1028 bp, Homo sapiens
gtcttctcaaggttgtatgtgtcataattggtccaaaatgaatttctttgcttaatttctagttaaagcgaaaatacttctcatgcctctgtttgagctcccaaggtatttgcaagcctaaattgcttggccttttgacttgcaagtggttaatttatttctacctctcctgtttccagcctgcagtttgggtattcagaggctaaagagccttttcagggtgtctggtatttttgttgatgttgttttgctttgttttacatttccaaatccaggaaacggctgtggttaagaggttaagaggcccagaatgatagggctcccatatttaccaggcaaccatggtacccagcgcagcacagagcctgcttactcaggattggttttatttatatttttttaaattgaggtaaaattaaccattttaaagtgtacaattcagtggcatttagtatgtccgcaatgttgtgcaactgtctgtgtaattccaaaacattttcatcatccctcaaaagagaccctgtatccattaagcggtcactcgctattggcccctctgcagctcttggcaaccactaagctgaaccctgtgtctatggatataactcttcgggatggtttatataagtgaaataatacaaccttctgtgtattattccacttatatgtattctgtgaccttctgtgtctggcttcttacgcttagcataatgttgtcgtctgtgttgtagcacgtatcccaaccttcatttctttatatggccaaatagtattctatcatgtggatgcaccacattttgtgtatccattcatctgttgatgaacatttgggctgtttctaccttttgactactgtcaacactgttttgttactatgaacatccatgctgagtatttgtttgaataacttatcagttcattggggcatatacttaagagtggaattgctcagtcatatggttattctgtgtttacctttttgagggctcagcgttggtttcagtggtttagctcctgggctgccatta

SEQ ID NO: 35723 - DNA, 1057 bp, Homo sapiens
caaatattctttctgattagccagtccatcttcacctttggaggatgttatatgaatagcattagtactcttttcccctgctgaattctgccatacatacattgattttgacctactctgaatctctttagtgttgagtatgtcatgtattttcatattaggttatattcttttttcttttttttttttttgatacagggtcttactctgctgcccaggctggagtgcagtggcacaatcatggctcactgaagcctcaaccttcccgggctcaggtgatcctccagcctcagcatccccaatggctgggattacaggcatgcgccaccatgcccggccaatctttgtatttttttgtagagataggtattcgccatgttgcccagggctcaagcgatccacccatctcggcctcccaaagtgctgggactacagacgtgagccactgtgcctggcctatattctactgcttgtcgttgcttgtattttcttttctggtacagtggaagtctgtcatatttttatgctattgtatcttgcatgatgcctagcatattgaaaataataaataaattgctcatggaatgaatagtttaaatcatcgctagaaataggggaatggctcttttgaaggcaggcctatggcatccaggttcttttaggacaaatctttcacctgttccttcatccttcagttcatccattcattcgtccatctatccccagcaaccactgagagggtgcccactctctgtcagattctcagctaggatattggtgcctcagatatgaaagaaatggaagaaacatgccccacggaagaaactgaaagaccaggtatgcatgatgtgtagtttgctaatccagacaatgactgtgcattttgagaggctagtaggtgagaaaatgaaataaagaattctagactcagctaattggctcaggcggcatcaaatatagagttttctgtcctagtctttccttttcttccctttaattgtgcctgtttgtaaccaaagcacaagtaacttcttactaatgtggtaagagctttata

SEQ ID NO: 35724 - DNA, 1095 bp, Homo sapiens
ttactagaaatcggaaatgcctttttcgtttgattaagagttactggtttgtgagggcagtgactgagatgtcattatctgtgtttttggaagctgcagggctctgagtctagccctcaggagctcttagcatcagtgaaccttgccagcatcagcaggcccccagctcctgcccacagagcacctccctgccaggggccacagtccctagggcctccggtatcaggcggtcaggatgacagtatcctaagaaaaccctttcccctagccagtccccagcatgcggcacactgtctacctcagccatgagcctctgtccttgcgtgtgtgcagtttcttgtttagaacagacccacaagaaataaagaaactcatgaacctcaacaaaataaccacctaccgcaaggacagaatgatgtttacgagccacaatggaaggaaggaaccactttggcaaattcatcactggaatttgaatgatgcgtatgtgttcttacatataatttgaagttgagaacgtggaacattgagaagaagagactgagaggttgtgacgtcatcaagaaagcagaagaggtagccccagaccctctttcctggcatggagacagtgactcagcaccatgcagaccagttctctttgtgaaaaatccagaaaccagaggctcctatacctcaggtgagcgcttcaccagcctcatcaaagctggtcatctgacatcaagctggaaatggccaactgcaagcagtcttcaaaggatctgaaaatacaaagaatttgaaagtaaaggagaggagggagccctctgattaaaaaaaaaaaaaaaaaagtcatagtgtagacctttaatctctgagagtagtgagctcgggctctgacttgactgaaggcaccaaaatagctaagcccagaaggttatttattatatacgaatgggatggtctggccgtggaattcctctggaagacaagctgcagaactgcaggagagggcacctgctgcccgtcacggatgtccacccaatcctgctcaggaggaactcggggactcagggaacctgaaactttttacacgcttccatccacactcattcc

SEQ ID NO: 35725 - DNA, 1052 bp, Homo sapiens
tgaaaacaaacacaatatatgtttagacccactgtgtctatgttaactggcctgtcattgctccttcctcccccaaggcaggcttttctgccctttacattgttacgaacattgtatttattgtagccatttagttgtggagaaaccatggctgcccccaaacttgaaacatcggcatattagtcagggttctacagagaaacagaactgagaggatatatatgcacacacatacagacatatatctacatacgtgtgtgtatgtgtgtgtgtacagtcatgcactgaataataacgtttcagtaaccagtggattgcatatacgatgatggtcccatatgactataatggaacatatacaaaaaaacctgctaatggcacttgatattggcgttgcaggactagtaggggagatgattgatagtaatggtgctgagacatttggttttccatatgaaaaaatatataaataatctagttttgtgtaagtacactgcgtgatttttacacaatgacaattacttgacgacacatttctcagaacatatccctatcattaagcaaagcatgactacatatgtatatatgtgtgtacatatatatatgtatatagagagatcctgagagcaattgagatttaagaaatttggtcacagatcctagcactttgggagactgaggcaggagaattgcttgagccaggagtttgagaaccagcctgggcaacataatgagaccccatctctacaaaaaatttaaaaattagctgggcatggtagcatgtgcctgtagtcgcagctactcaggaggctgaggtaggaggattacctgagcccaggaggtgaaggctgcagtgagtcatgatagagccactgctgtactccagtttgggtgacagagtgaagccttgtctcaccaaaagaaaaaaaaaaaattggttcacagctcacatgattgtggaggatgacaagtcccaaatctgcagggccagctagaagattgaaaattctttttatttatttatttatttatttatttatttatttatttat

SEQ ID NO: 35726 - DNA, 1088 bp, Homo sapiens
cagtccatcggccaactggtcgtcacttgggtggacccttgaacgcgtctgtctgctgtgctgtctaggaagggtgtgtggggttctaactggcacctctctgtctgttgcagttacctggctgagcagtgctggaatggcggctttatctacctgatcatgctgcgtcgctttaagcacaaagcccactccacttataatggcaacagtagcaacagctctgaaccaggagaaacacctaccttggagctgggtgaccgaactgcgaaaaaggggaaacgaaccagaaagtttggggtcatctccaggcctcctgccaacaaggcccctgaagaatccaagggcagcgctggctgtgaggtgtccagtgaccccagcactgagctggagaacggccctgaccctgaacttggaaacggccatgtctttcagctagaaaatggcccagattctctcaaggaggtggctggaccccatctagagaggtcagaagtggacagagggacagagcatagaattccaaagacagatgctcctctgaccacaagcaatgacaaacgccgcttctcaaaaggtgggaagacggacttccaatcgagtgactgcctggcacgggtaaggtttggtttgattatggaaccagaattttatttatcgtgtgtgtttgtttgtttttgcagcccagcccatgcgggaaatacaagctgggctcagaaccagaattttgaaagaaatattgtttgaagttgcttttaaggtttaaaaaatatacctaagatgacctcgcattgagaagccaacaaatgcattaagaaaagtgatcagaggagaatgacaaaaaagctccagtcattttatcctacttaaataaagagctagtcaagtgatcctaagtggaaaactcaagccttctgtgttaaaatttgagtcatgtgaggtccagataaagtacttcactgcatcgttatttatcgctgctgtcaccagtggaatcgctgctgcaaggccaagaattcctgatggcagctgacaccacaaacatctaagcctcagtattacacaggaagggtattcaatacacagggaag

SEQ ID NO: 35727 - DNA, 1012 bp, Homo sapiens
aagagaagaggaagagtttcagtataatagggtgtgaaatgggtgatacttattaagttggagcctgtctccctttttatatttttaacaaagaaaaaaaaatggaagtaatggttgtctttgccaaatctgcaattgtaaagctcagctcggaagagtttgtttagcacatcaatcaggagacccgtatccggcttccgttgccatcaagcaaatcagttctaacatttttggaatcacaagtttggaaaaatcttggagaacttttgggcgattcaggttttagaaggaataagggacctgtttcttacaaggaaagaagagcaaagcaggaccttccgattctgtgagtctgatatgggtgtttgattcttcgttggtggaactgccaggggtatgggagcctgaaagccagtatcctcgagtgtagaaatgaggcctgtggaaagaaaggagaggacctcttgtgttttatttggactgaataattgatcaaatgtccgctctaaatgtttccaaatgtgtccgggcagtaaggacttctgttacagcatctgaatgtatcatttttggttgattcgtggtgtcctagatgggaaactctctcttgtttcggggttgacctggttttttctggcaaattgaacttagagtctaatacaaagaacaatgaataccaagggtgtaaacctgtgattagcattaaaacagaaagacacggagtctgactggaaggcagatcttcggagtagtactgttaatcctgaaagacaccagcatggagctctgcatctatggggagcgcatgttcttcccctgaggccttgaggatagagggttaccacttaggctgcttctatgggcagtgtgggctgagctcacagtctctctgagcccagggcaatcacagcagcctctgcttatggattccccactctgcccctgggtcaagaacagtctgcccttctctttggacttccacttgctatttatgtaacttcaggattcacct

SEQ ID NO: 35728 - DNA, 1050 bp, Homo sapiens
aatcccagcactttgggaggctgagatgggcaggtcacttgaggttaggtatttgagaccagcctggccaacatggtgaaacccccatctctactaaaaatacaaaaattagctgggcatggtggcgtgcgcctgtagtcccagctactcgggaggctgaggcacgagaattgcttaaaccctggaggcggaggttgcagtgagccaagattgcaccactgctctccagcctgggtgatagagcaaaactctgtctccaaaaaaaaagaaaagaaaatgactgacaaggtttccactgaactctaagacagataaaaatgaggagcggatttttcaggaatgttaaacactcattgtttagaagaaaatactgtttgttgttgaacccctgaagtaccatcaggttctgtgatgcacagtttgagaactgctttcttgggaaggagcttagagcaataaaactataagatggcagaaggaatgtccaacacagtggggttcaaatgacaaacctggaagccttttccacttcctcgttgataaagtggagacaatgacatctacctcaagtcttactgtgagtaagaaaagaactgaacacatacattgtggagctcaatgttgggtgtgcagctggaccctgctgcatttttgttctctttcgtctgtctttgcttgggaacaggtcacttcactttgattgggagtaagtttgaggagaaaacaagacattcctggaagcgtgttgccacttgaggctcaggtgggataacgaggagcacaaaaggcagaagccaagaaaaggccccaccatgccacagccaaaagcaaccacagatgtaaaatggcacagtggatctggcagttctccttaaaacgttaaacacagagtcaccatatgactcatcagttccgctgctatgtatatacccaagagaactgaaaacgtatgtctgcacaaaaacctgtacatgaaagttcaaagaagcgttattcataatagccagaaagtggaaacaacccaaatctcccttaaccaacgaatggata

SEQ ID NO: 35729 - DNA, 1007 bp, Homo sapiens
ttttcttttttttttttttgagacggagtctcgctctgtcaccaggctggagtgcagtagcacgaatctcggctcactgcaacctccgcctcctgggttcaagagattctcctgcctcagtctcctgagtagctgggactacaggcatgcgccaccacccccagccaatttttgtatttttagtagagacgggatttcacctggttggccaggatggtctcgatctcttgacctcgccatctgcctgccttggcctcccaaagtgctgggattacaggtgtgagccacggcgcccagcctaggccttattttcagagtggctttcatggatctagtagtgtaggcattatgaaataatatgatacttaatttcattgccattacagcttgatgtacatcaaacatcaatacataagcagttctctaaatgtattaaagagttgtaccaaagaaaaatcaatagacttatcttttaaagtctgaagtgattggggcagaatcgtgactagagagaagatactagagatgcttacttcctggttccttcagctctgattttgaagaactttcttccatagggatgtagtctacctgaggtgacatctgtgatagtaaagagactggagaattatctcataattatttagtacctgtgtcttgaaaggtcagaatagttgaggcaggaaactttaatccatatttttcttcagagttaggcacaaagggtcagtaatactgctttagtttatttgatgatttaaggatacttgatacttttaaattatttaatttaaaatgattataactggtcattttaatctggggcaggagtccatagaattgttttttaatttgagttttcttttttgtgtttgaaggaattattcataacctttatcacaggggtccctcctgcacaggaggtgagcggtgtgtgagtgaacattgcagcccgagctctgcctcctgtcagatcagcagcggcattagattctcataggagcgcg

SEQ ID NO: 35730 - DNA, 1050 bp, Homo sapiens
gttgtttccacttcttggctcttgtgaataatgctgctatgaacatgggtgtgcagatgtctcttggagtctgtgctttcaattttttgggatatatattcagaagtaggattgctggatcatatgatagtttaaacagcaatttcctttggttgcagttttgatactgagagtagtacagttgacccttgaacaatgcagggtcaaaatgcaaggcaccaacccctgtgcagttgaaaatctggttataacttttgactttgtcaaaactgctaagtatagcctactgttgactggtagccttaacagtaacataaacagttaacatatatttgtatgttatatgtattatatactgtattcttacaataaagtaagctagagaaaagaaaatattactaagaaaatcataagggagaaaaattacattttactgtactgtatggtgtttatcaataacattagtttacgttgtctgtttataagatatgtcatctgttaataaaatatgtcatctgttagaaattgtaggcaaccacagctgcagatttcagtccgtggtacatatcaagcaattcaacttttttatttttatttttatttttatttttttgcattttaaaattaaagacaggatcttgctgtgttgcccagattggattcaagctcctgggctcaagtgatcctccggcctcagcctcctgagtagctgggatcataggcatgcaccactgcttctggcagtttttttcttgtgatgtcatgccttctctctgcttcttgggagcactttcagcatcactaggggcactttgtataggactcatggtgttatttaaagtttatggtattgcagtaatcatgatgaaaaataatgtgaaaaccgtgagagatcactttttactgcaatacgcaatttgttggagacatgaactgctcagcagagatgattagcatcacatggtgttttacacaaggtgttttaagcagatacttgtaacatttgagtacactgagataacaggaagtggctatgaagttaacactagt

SEQ ID NO: 35731 - DNA, 1030 bp, Homo sapiens
tttcttaaaagttgtagtatgtaatttccccttgaaaacttgaatttcatcattgacaacacatgctgtcagttgtttttttttgaagtgataggctcagtttgtttgtttctgagaaattgtctgccaaatccacaggtctgaacaacgacaatttgtcaatcttggaagttaaaatggtgctccgtgcaaagtgccgctagttcagttcacactccaaacagttctgccggtgcttttccttgagactgccttggaacctcaatgtgcatttcccaagagtaaagacattcttctacctagcctcaatattatcacaacttaaaacatcaataattttatcaactattcagtccgtagtaagtttccccagttcccaaaaatgttcatttcttctcccaatgcagtgtcttgatgaaaattcatgctgttcatttggttatcagtctcttttaatctagaattattccctactattttgttttccacgacattgaccttttgtaagagtccaggccacttgtagtatgtcccatattctagatttgtctgtttcctcatggctcagttcaggttaaatgtcttttgcaagaatgctacataggagatgctgtacctaccgcaccacaccagaaggtacatcaggccaggttgtttcacaactggtcatgtgaattttgatcactaagttatttaaaatggtgattgcccgttcttttttttttttttttttttttttttgagacagagtcttgctctgtctcccaggctggagtgcggtggtgcgatctcggctcactgcaagctccgcctcctgggttcacgccattctcctgcctcagcctcctgagtagctgggactacaggcgcccaccaccacacccggctactttttttgtatttttagtagagacggggtttcaccatgttagccaggatggtcttgatctcctgacctcgtgatccgcccacctcggcctcccaaagtgctgggattacaggtgtgagccaccgtgcccggccttgcccg

SEQ ID NO: 35732 - DNA, 1032 bp, Homo sapiens
catatctcaaaataataagagctatttctgacaaacccacagccaatatcatactgaatgggcaaaaactggaagcgttccttttgaaaacctgcacaagacaaggattccctctctcaccactcctattcaacatagtattggaggttctggccagggaaatcaggcaagagaaagacatagagggtattcaaataggaaaagaggaagtcaaattgtctctgtttgcagatgacatgattgtatatttagaaaaccccattgtgtcagcccaaaatctccttaagctgataagcaacttcagcaaagtctcaggatacaaaatcaatgtgcaaaaatcacaagcattcctatacaccaataatagacagagagccaaatcatgagtgaactcccattcacaattgctatgaagagaatacaatacctaggaatacaacttataagggatgtgaaggaccccttcaaggagaactacaaaccactcttcaaggaaataagagagaacacacacacacacacacacacacacacacacacacacacacacaaagaaagaaataagagaggacacaaacaaatggtaaaacattccatttggataggaaaaaaacattcatggataggaagaatcaatattgtgaaaatggccatactgcccagagtaatttatagattcaatgctatccccatcaagctaccattgactttcttcacagaattagaaaaaaacgactttaaatttcatagggaaccaaaaaagagctcgtatagccaagacaatcctaagcaaaaagaacaaagctggaggcatcacactacctgacttcaaactatactacaaggctacagtaaccaaaacagcacggcactggtaccaaaacagagatatagaccaatggaacagaacataggccccagaaataatgccacaaatctacaaccatctgatcttcaacaaacctgacaaaaagaagtaatggggaaaggattccctatttaataaatggtgttgggaaaactggctagcca

SEQ ID NO: 35733 - DNA, 1029 bp, Homo sapiens
cgccgaagccgcgggaaaccctggactccatcccgggatttgtccccgtgtcgaagatggtatccaggtcgccgaaaacttcccggaagtttagaccaagacctacttattatctacggtgtccgggaaggtccatgattgttccacataaagtcagaagggaggaaaggcgcacgcgcattggggacttgactctggaaagcgtccagaccaaggtcagcggagagtaggcatgtagcttctgcagttgctcctcctcaccctccgcgacctgatttcctagaagggctctgtcacccgaaaagattttccactggcttagaggagggagggcccgccttcccccgttatccattggctgctcgttccgccgcaagttgggggcggggttagggcgcctttcgattgcatcagctggtccagccgaggccaagtcccgggcgctagcccacctcccacccgcctcttggctcctctcctctaggccgtcgctttcgggttctctcatcgcttcgtcgttcgccaatgtttgaggagaaggccagcagtccttcagggaagatgggaggcgaggagaagccggtgagcaaacttggtgggacccagagaccagcctgggactctagtgggtgcagacgctacgctcgcggcgggagcggggggcaggaagcaggaagcggccgggaccgcgtgggtcggagaagtgggggatggtgggactcctggaaagtcggaaccccctttgggaaccatccattcataaattagggtggggccttgcagttcatctgtgggtccattctctttacagatgaggaaacagaccttgagtgagcgacttgttcagagcctcacatctacagtagttagacgcggagacagaatcagaatcttaggcttgaggcttccaaacttgcgtttatggcttactgtaagcgggaaacacattgcagagccttatttaatcaatctcctaagatcctgcgggggtaaagagctccattttaaggaaaggaaaaccgagtgccc

SEQ ID NO: 35734 - DNA, 1050 bp, Homo sapiens
ctatttccaaatgaacatttttcgaagccatggtgtgattcgaatggaatgaaaagattatactttcttctccttcaggggtgtgtctagcaatgatttctcttctctggaggctttgtgtaagaaaatcattaaagaaaaacaagcttttgaaagactggaagttaagaaagaaactttactggcaatgtttaaggtaaattgaaccatagtgcgtggcccccactgttaatatcatttattcatgttagttgaagtgacaccactggcgttccgtgtactaagctgaagtctaattggttctttagcaaaaattaagtgtttttattatttttttaatttcatttttttcctagcaaaccattccttcaacatgtttttaaaacatgaagtatcaacatttatattcatacagtgctacgttttagctatagtacttagaagtaaaaattaaaggacagttttttaaaataataatttttcctgttttcagtacaacaagttcaaatgccggatattgaatgaaaaggtgaatactccaactaccacagtctataggtaagaatattagatgtcattaaatgtatctggtatgtatgtcattttgtctttgttaaaattcctttcattttatctttagatgtggccctttgatagatctctgccggggtcctcatgttagacacacgggcaaaattaaggctttaaaaatacacaaagtaagtaatgtaactttaaagactgtgaatgtatctgtctagaatagatatatgtttaaactttcactgatttctctttaccattttctgttgcacatgaaaggatggtattttctcatgctctctattaactgggagctgtatgccatcaggattttataattgaaatccctcaaggggtgactgacttgctgtcattgccagagcaatcacaggggatggagattttacaaaatcatacagcatgggccatcctggctctataaaagctttgagactcactgggagtatgtgcttttgccctttatatgtctaaattaataatttccca

SEQ ID NO: 35735 - DNA, 1046 bp, Homo sapiens
ctcacaggactcacccgggtacgaagattccaacaggatgatgctcacatattctgtgccatggagcaggtatgagaccctgggaataaaatacttagaaagaagagtcaagaaagtcaaggaaaataactactgtttctttttttgttttttaatttgaagattgaagatgaaataaaaggttgtttggattttctacgtacggtatatagcgtatttggattttcttttaaactaaacctttctactcgcccggaaaaattccttggagatatcgaagtatgggatcaagctgagaaagtaagtggtgtttttcagcgtgcttttgaatactgtttgaaattggcttgttctgagatgtaagaaagccaagcctctttaaatggataaaagcaaaatgaaattggaaatggttcctaggtttgtgtaagctagtttttttctttatgattgtgtatttttgaaatggttgaatgttttcatgacttttttcagttatcaagctataagctttaaaaaggggttggtatgagcatatgttcaggtggacaaaattctaaagcagagaatattgatctatgaaagtaattactgtatttttagtctcaaattaggctaaaagaagggaaattgcgatgaaaaaaataaaaatcattttgctttatcctcagcaacttgaaaacagtctgaatgaatttggtgaaaagtgggagttaaactctggagatggagctttctatggcccaaaggtgagcactaaagtacatttgggtaatatgattttcacttgtggatgaagaagatacgacttcgaaaaaagttggaaaaaagaaaatcagccctaatccaactattgagctccactttagtatcactggcattttataataacccagtctttgcttcttagattgacatacagattaaagatgcgattgggcggtaccaccagtgtgcaaccatccagctggatttccagttgcccatcagatttaatcttacttatgtaaggtgagtttctggtgtctgctctgaatattctccag

SEQ ID NO: 35736 - DNA, 1493 bp, Homo sapiens
acccaggtcaaccagagattgctggttttactcatgatacttaagtagagtatgatagttactatttcaccttcagctgtacttaagatgttttcctggaaaaattcattctgctttctgaccaggatttccagaaactctgacccttctaagaggtctgggtggaattgtgatggtgattctgctagtagacagtgtaacttctgcgtctacaaaaagaggataggccgtcactgctcacatggctttgcgtgaaagcccaatggtactgtctctatggcagagatgaggaaggaacaccagcgtcctccaactttcctgttcttcctttgggttaatggccactgtaaggaaacagttttctgccacgtgtggggtgatttgaatgtaaaatgcccaactctcatagcaggctgaacagaaacattttttatactcattgttaatttgttctaatctaaattacttttagactattaaatattattctattttaaagttaagggactaatgcctctgataacctgattaaaaaaaaaaactttctgatactcagaagttaagatttattcagttgaagatcatttctttcaggtgttgatcgtgtgatatttttcacatctgtaatctgaggttcatatgaaatgatagtgaaataaaattgttcatttaggtctttttgtcatgttaatatgttatcaggttaatgggaagtttaatctagttaatgtaaaattaataaattgtaatctagtttattgcttttttggaaaagaatactgaaaacattgtttacttaatacacatgacctgaggtaataaagaggagctggcctttttgaggggggaataatggcagtgaataatattatctaagacagttttgccagctttaaattcctggaagttcatccaagaagtcctgatccctgtgttcagtaaaatcatgtgagatcaaaatataattctgattttagatctgacaaattctgtatctctgttacaataggtacgacaacaattccacgatgccaaattcatggcagacattgatctggatccaggctgtacattgaataaaaagattcgaaatgcacagttagcacagtataacttcattttaggtaagaatggaaacttaccaaagaaaatttgccacacctcaggaaaatctactgaaaccttgagacaggtttaagtgaattgtaatcaagaatttatttagttccttccagtcctgattttttttctattatatattttaatatataataactataaaaataggctcatgcatacatactgggtttttttttttttcacttaaatcatggatgtctgtgagaaaatattttgctattataacaagaatgaagacgcattgcttttaaacacatctattggattactttctcaagataatgccttatgtgggattacttgaaaaaagatattcatgatgtttggggttttattatttggttgttacgttg

SEQ ID NO: 35737 - DNA, 1089 bp, Homo sapiens
acttttctgtttctctcacaggtcaacagtgaccttgagactcctgtatgtagctaattataattgttatttggaattgatatcatttttctattttgagaaaatgttcacgtttctctttttttctgagacaggatctcgctctgtcccttaggctggagtgcagtggtgcaatcttagctcaccgcagccttgacctcctgggctcaagcagtcctcccaccttagcctccctggagctggcactacaggtgtgtaccaccactcctggtgaatttttgtatttttgtagagacagggtttcatcatgttacccgggctggtctcaaactcctgagctcaagcaatccgcctgctgtggcctcccaaaagtgctgggattacaggtatgagccaccatgccctgcctgagccttttttattattattattttttttgcattggaaaaaaactatttaaaacataggcatagaaattatagccaataacggtatatttaccatccagaatttccttgggctacttttgatttttgaggaaagactcctaagtcttaagtgcagaagacttgtatagacttggacaattcacctcgaagaagagggtaaaaattgggagttccaggggaggccaatggcattgagcagcagcacgaaggtcagaaaaggtgcaggacccaggcccttggctgtgagaaccgtgtaacaaatgtttgtcaggctttgttggtgagctcacagattccatgctgaggctcttaatctgacaagaatgctcaagtaatttgaacatctcctcccatgaaagctgacatattggtgattgatcctttttcaaaaatgaaaggaattacttctgttgccgagacaggagaggcatacacagtggcctcttctcagccacccagaggatgtgggaacttgtgagacaggaggctcatggacaaccggctgcattttctttcttctctaggaaagacagccaagacaggggtggactcacgcgtataatcccagcactttgggaggctgaggcaggtggatcacttgaggtcaggagttcaagacgagcctggccaacatggtgaa

SEQ ID NO: 35738 - DNA, 1047 bp, Homo sapiens
atcctggccaggcgtggtggctcatgcctgtaatcccagcactttgggaggcacaggccggaggaacgtttgaggccagcagtgcaagaccagcctgggcaacacagagactctgtttctacaagaaatacaaaaattagttgggtgtggtgatgcacacctgtagtcccagctactcaggaggctgaggtgggaggatcacttgagcccaggagtttgaggctgcagagagctatgatggtgccactacactccagcctgggcaacagagaaagactctgtctcttaaaaaaaagaaaaaaaaaaaggaatggaatcatataatgtgtggtcttttctgtctgactttcacttaacaaaatgtgtttgagcttcatccatgcttcaccatggatcagcttgctattcctttttattgctgggtagtattccattatatggaattgccacagattatttacctagttgacaaacatttctgttttactttttccacaattacaaatgctacttctataaatattcggtctttgtgtggacatatgttttcatttctctcgtaggtgggaatagcattgctgagtcatgtggtaaatgtacatttaactttgtaagaaattgtcacactgcatttcacaatgactataccattttacattttcaccaataatgtttgaggattggatctctatgtttaaacttgatgggcccttttgggtttcaagataggtgaaacttaaggaatggactttggaggaagatgtgaaggggcttacccatacacggtcacttggggtcagttgctgggcactctgtgaggtggtttttctcttcagaggtgaacacggtggtgtgtttagacggtggtattgtaatgaacatcaaaagataagtaacacagaacaggacaagcattttagagatcatcttaaaaataacctcgatttaagggataattgcatggagtttcttagtcctagagtgatttttatattccagaggtagcttgttttgattaagccatgctttttaaattgaatggagtta

SEQ ID NO: 35739 - DNA, 1031 bp, Homo sapiens
catgttttacaccataaaagtatatacaatttttatttgtcaattaaaataaatattaataagaaggaaaaaattaaggttttggttaatttgaaaatgtcagaagcttctaggaagtatatcgtaagtggaaatatgttatttaccactcctcagctgttaactgaccaccttcccaacgcaaccctgctctgtctccttcccatgacccaagttgtaatccaatcaggagagaataccttatttggaaacctacatatgtcctttttttctctgcttaggtgttgaaaagtctcctctagagctttggaaggctgaatgcactaaacatgaagagcttgaaagcgaagttcaggaagagtgacgtgagtatgcggtgactcacagtctggctgttccttcttctccatggagctgcagaaacgctcctccccaccttgataaggcgctgttgggttaataaactacagacactcaagtgctcttggccccagctcagggtagcttctgtagatggcatgctctaggttccttgctgtttgtgtgcatagctttcaaaaacaatgtttttttatttttatttttaattttggggatctgtgccttgtagagaaaggaaccgtcacattaaacatcttcaaaggaagaatcagtaaaaacctcaacatttctaaagttgccagaaatcctgattcagaatgtcgtttttagaagaagctagtctctctcatgcgggtggtttaggaatgacatattagcatggttcatctttggctttaggaaacgtgttcaactctctgttaagggttttgtggtaaaatggtatctactgctgcccgtacctttcctccccccgaattccagggactcgtactcatttgttatctaaccaatccataaaagactctggattggaggaagcagttatgatgtcagagttatgaaataaagtctcccccaggagaagagggagaaaaacatagcagaggggttgtacacgataatatttttttaaaaggtcaccccataaa

SEQ ID NO: 35740 - DNA, 1073 bp, Homo sapiens
tttcattgtaatagggaagtagcggacattccattaaaaaaatcaaaacagccagtttaaagtgacagtctccatgagagattaaattgatggtatacctttacatagcatctactaactactgtagctttcagccaaggaaatgcacacaccccatgaatcttaaagaaccaggcatatcctgctcagacagaggtttgagtttcttgcctattaagataacagttggcggtggggtgtggtggctcacacctgtaatcctagcactttgggaggccaaggtgggtggatcacctgatgtcaggagttcgagaccagcctggccaacatggcaaaaccccatctctactaaaaatacaaaaattagccaggcatggtggtgcatgctcgtaatcccagctactcgggaggctgaggcaggagaatcgcttgaacccagggggtggaggttgcagtgagctgagatcacaccacttcacttcagcctgggcgacagagcgaaactccgtctgttaaaaaaaaaataataataaaagataacagctctcatgaggatcaacaaccaactctaccaacgtatttttttcaaggagtttttagtcatttataataagtttttacaattgctcactcctcctttcgtcaccacacatacatgcacatacacacaatgggagtatttaaaatccaagtctctggcgtgaacctgggaagcggagcttgcagtgagccgagatcacgccactgcactccagcctgggcgatagagcgagactccatctcaaaaaatataaaataaaataaaatccaagtctctctgtagacataggaactatggccaaatctattttaagctaagccttttttttttttaatagacataattttaaaaaaatcagcaatgaccccactgggtggaggtaggagactttactaaagttctagagagaaatttggtcaaatttgtgccgtgctacgtgttttctaggtcttttcagcctgatttaaatggagaatctgctcactgcctgattttgcctggtattagtttgctaggactgccataacaaagg

SEQ ID NO: 35741 - DNA, 1038 bp, Homo sapiens
ccgtgccattgcactcccagcctgggcaacaagagtgaaactccatttcaaaagaaaggaagaaaaaacaaaagcaaaaacaagaaaaacagaacaatttattgccccataaggctacctttgatgtatcagagtaaaagaaagcaggacaaaaatcagttatgctagaaaagagataacttagggaagttcacttaagggaaatacaacaaaatgctctttgtttttagtagaatattaaagtatgggtgtggatttttatcccccttcttacagtgtttggttatgtggttatgttttgtttctaaggccttaaaataaatagataaaaatgtatactatagtaaattgagaaaatatactcatatacatatatttaaattacatacttatcttcacctaaaataaagatactttgtctaacaaagtaatattagggatttattttatgttttaagtgaatgataaattatcttgcaatgatatacctcagatgaactcttctattaaacatctgtgtatttgtgcatctacttatttactttagaacgggcaagagaaaatggccttgggacttttgacctgtggaagttttgcattttccagcctggatatgtggaggctgtgggcaaagccatcttacttccacattgtttttctgtttcccagttcctgggcactcagctgcctaagtgcttctcttttgcaggaacaaaaagaaaaaaaggtaataagcatctcagaactcatctggggaaaaaaaaataaagaaatgaatagttaatttgctgctactgtgataaactttctttgtaaacattgtcatctcaacttctgttttgatagaggacagttgaaaacactgtgcttgcactggctggctgaagtttacacttattcaaagcaaggcagttgagaattaacccaaaaacgaatgacctgaccttccaggagtcctgatgcggccagggggccatgtgctcagggaggctttgcagggcagtcatcccaggagctcggtggagtggagggagaggt

SEQ ID NO: 35742 - DNA, 1597 bp, Homo sapiens
gggacatcagtgagttgactttctcttcaggaaaaagaaaatgagagcgagagaaagagagtgcactacaaaactcttattagcactgaaaccttggaatctttccaagtgacaagagtagggacattccaaatatcaataagcagcaaagggatcaaagtcattttgtgtaaatcttcaggctgcttatttgtgccattttgctacattgctgctgaagggccccagctgagttttataagcaaatctaaacatttcctattgtaatgaaatgtaaaacagcagattcctttatttgtggaacatatccataaaattgtttttatggctaagtttgttttcaaacaaactttgaaacaatgggtgccttggcaaaaaacgatggtgtgaccctcttcaataaatagtgtgggaaaattggatatccatatgtagaagaatgaaattggaccctcctctctccctatatacaaatatcaactcacaatggattcaagacttaaatgtaagacctgaaactgtaaaactaccagaataaaacataggggaaacacttcaaaacattggtctaggcaaagatttcattgctaagacctcaaaagcgtagacagctataacaaaaatagacaaatcggattatattaaactaaaaagttttggcacagcaaaggaaagaacaaagtgaagagacaacctgtcgaatgagagaaaaatatttgcaaactattcatcaaggaactaatatccggaatacacaaggaactcaaataacttgaccatcaaaaaataaataatcccattaaaaagtgggctaaggacatgaatagatatttctcaaaaaaagacatacaaatggccacagctatatgaaaaaaaatactcaacatcactaagcatcagggaaatgcaaatcaaaaccacaatgagatgttatcctaccccagttagaatgactattattacaaaggaaaaataacagattctggaaggatgcagagaaaagaaaactcatacactgttggtgggaatgtaaattggttaaactactgtgaaaaataaaatggagcttcctcaaaaaattagaactactgtacatccagcacttccacaactgggtgtttatccaaaggaacagaaattgtgaagtcctagctaaagcaatcagacaagagaaagaaacagcatccaaattggaaaggaaaaagccaagttattcttgtttgcagatgatatgattttatattggaaaaaaaccaaagactccaccacaaaactattagaactgataaacaagcctgggcgcagtggcccacatctgtaatcccagcagtttgggaggctgaggtgggcagatcatttgaggtcaggagtttgagaccagcctggccaacatggtgaaatcctgtgtctacttaaaaaaaaaaaaaatagccagacattgtggcacctcccatagcaggcactgtgcctgtcatcccagctacttgggaggctgaggaaggagaatctcttgaacccgagaggcagaggttgcagtgagccgagattgcaccattgccctctagccttggtgacagagtgagactctgcacaaaaa

SEQ ID NO: 35743 - DNA, 2044 bp, Homo sapiens
ctactaaaagtacaaaaattagctgggcatgatggtgcgcacctttaatcccagctacttaggcggctgaggcaggagaatcacttacacccaagaggcagagattgcagtgagccgagatcgcgccactgcactctagcttggcaacagggcgagactccgtctcaaaaaaaaaaaaagaaaagaaaaaaatacaaaaattagttgggcctggtggcaggcacctgtagtcccagctactcaggaggctgaggcaggagaattacttgaacccaggaggcagaggttgcagtgagccaagatcgggccactgcactccagcatgggcgacagagcgagtgtcttgtggtggggagcagggacaaagtttacttatatggaatctaaaaaagttgaacccatagaagcagagagtagaatgataattgggggagtggtgggaggtattggggagatgttggctagacggtacaacatttcatccagataaaaggaataagttcaagagatccatggtacaacatggtgactatagttaataacaatgcattggattctgaaaatcactcagggagcagattttaagtgttttcatcacaaaaaatgataagtgtgtgagattaattagctccatggccttttcacattatgtacgtatttgcagacatcatgatgtacatggtaaatacatacaacttttatttgtcaactaaaaaataaattaattttttcaaaaataaggtgtggaagttaccagcttctacctgttattctcctcattctttcctgaatgcagaatattgaggaaatgccaaaaattatatttcaggaacttctctatttataatgaaatattctagattggatcctgggacagaaaaaggccattattcgaaaaactggcgcaatttgaataaagttgtaatttagatagtagtaatttaccaattgacaaatgtataatggctacatctgttgtaaacattagaagaaataagtgaaggtttctatcttgcaacttttttataaatcttaaattgctccaaatacaaagtgctaaagtttttttaaaaagagacaaagataagaacttactagataagcagtcttcttacccaattaagtttatattaattccaatcaaagagacagaaacttgtgttattctctgttgtcttactgagaattgtatagttaatttttttcctgactataaaagtaatatgtatttattttacaaatgttagaaaatccattaggttttatccacctggttctgtagatttgtggttgcaaaacattttaaggaagtgggaggatatttccatttaatatctgtttaatatactgagaaattgtactcaagggggaaataaaatttataattgttaacatgaaatttcgatattttatatttacttactttcccttatttagaattattaaagatgtttttttttaacttggatacacattaatctgaaacagattctatcaacctatcatttccctcactttagactttactaataaactcttcagatgaatttctatgtaagacaaggcaactatactcttatagttagtacgataatatcttctgatatgactgtgcctcaaagaagcagtgcaatccgaagaatatcacaaattatgatttttcagaggtagagtataagactgtcatttctgaaaaaacaacaacaaaaaaaaacaagataaaaagtgacatttattcctacgttagcttagggaggagacaaaagtgatatctaggccaggctcggtggctcacagctcatgcctgtaatcccagcacttcgggaggccaaagcgggtggatcatgaggtcaggagatcgagaccgtcctggctaacacagtgaaaccccgtctctactaaaaatacaaaaaattagtcaggtgtggtggcgggcacctgtagtcccagctactgggaaggctgaggcaggagaatcgcttgaacctgggaggcagaggttgcagtgaaccaacattgtgccactgcactccagtctgggcga

SEQ ID NO: 35744 - DNA, 1075 bp, Homo sapiens
atttccacgagctgagggtcacggaagaggaaataaatgtgctaaagcaggatctgcagaatgcattagaagaaagtgaaagaaataaagagaaagtgagagagttagaggaaaaactggtagagagggagaaaggtacagtgattaagccacctgtggaagagtacgaggaaatgaaaagttcatattgctctgttattgagaatatgaataaggagaaagcatttttgtttgagaaataccaagaagcccaagaagaaatcatgaaattaaaagacacactaaaaagtcagatgacacaggaagccagtgatgaagctgaggacatgaaagaagccatgaataggatgatagatgaactcaataaacaggtgagcgagctgtcacagctgtacaaagaagcccaggctgagctggaggattacaggaagaggaaatctctagaggatgtcacagctgaatatatccataaagcagagcatgagaaactgatgcaattgacaaacgtgtccagggctaaagcagaagatgcactgtctgaaatgaagtctcagtattcaaaagtgttgaatgagttgacccagctcaaacaactggtggatgcacaaaaagagaactctgtctctatcacagaacatttgcaagtgataaccacgctgcggactgcagcaaaagagatggaagaaaaaataagcaatcttaaggaacaccttgcaagcaaggaagtggaagtagcaaagctggagaaacaactcttagaagagaaagctgctatgactgatgcaatggtacctcggtcttcctatgaaaaactccagtcatccttagagagtgaagtgagtgtgttggcatcgaaattaaaggaatctgtgaaagagaaagagaaggtccattcagaggttgtccagattagaagtgaggtctcacaggtgaaaagagaaaaggaaaatattcagactctcttgaaatccaaagagcaagaagtaaatgaacttctgcaaaaattccagcaagctcaggaagaacttgcagaaatgaaaagatacgctgagagctcttcaaaactggaggaaga

SEQ ID NO: 35745 - DNA, 1029 bp, Homo sapiens
acttattcagccttcacaatgatgctaatttttgtttttcaggtatgataatcatagagaggccctacttaaaggtgggtttgatggcgaatatcaagatgacagcttagatttgctacgctatttcaccgttacctgttattctggttatggagatgatgaaaaggtaagataaatgaactcacccttgatttctcatcaagtacttcattaagactcacatacaaagagaattcttaaaactattctgtaatagaaagtgaagcagtgttcattttgaaaactgaagatgcattgccttcatgtttaagctgtcagtgtataaaaacctctagttgaaatctaaatgtattgcagggactgaactttgtcccaaaattcttcaacattaaaatttttcattttgtattttaaaatctttttctgtgatcaggctgcaaaagtattaagaatttgtttttgttactgttttttagggattttacacggtgtatcgtaatgtttttgaaatgattgccaaggaagaactagaatctgtgttagaggaagaggttgatgatttcccaacttttggagactcccagagtgactatgatacggtaaaataaaaatgcattgttctataattagtatttatcactgtgtcatttttaaattttattttactttttgagatggtctcactctgtcacccaggctgcagtgcagtggtatgatcatatctcacagcagcctcaaactcctgggcttaagcaatcctcctacctcagcctcctgagtagctgggaacacaagtgtgcgccacgacatctagctaatttgtcaattgttttgtagagatggggtcttgctaagtttcccaggctgatcttgaactcctggcctccctccttggcctcccaaaagattgggattacaggcatgagccacagctcccagcttctcatttccttgttttaaaacaattggttctagttctcgaacctatcccatgacctctctttgtctctcttcctttctgaagtagct

SEQ ID NO: 35746 - DNA, 1050 bp, Homo sapiens
tctaaagttttgttattaaaaagttactgtaaatgcattgtgtccagagcattatagcatacttttaaaaattattcacttcttaagaattctactcatcccaccctcatcttttgaaaattaacactttacctacatgacttaaaatcatctgaagacttttaataagttgctgagtttcatgtttcaaaacctgttatctactactggagcaattaaaattaaccatacaacaggtaacaggtttaagtgactttgccttggttttaactaagcacaggttttaagtttgtaagcgtggataggttgggagcaagctctctagtgggaatggattttaaacctaagtagtaagtgaaaaccatgcagaggcgtgcttgtcgctgtgagactgtgctgtatgtgtctagactggtggagcagtacagagaacagagctggatgactatggccaatttggagaaagagctccaggagatggaggcacggtacgagaaggagtttggagatggatcggatgaaaatgaaatggaagaacatgaactcaaagatgaggaggatggtaatattatttttattttatttatcttttttgttttttaagtgaagctggaaatctccttgcttatttgacatctcccaatttttaaatgtggcaaataattaaaaataatgttgtatgggccaaaggtagtcggctgagctagtctaattcaagtaatttgattaacaaattcttttctgaccatgtcctaaacagtgtgtacttctagctgcataatatgacaaatggacatgtttacaagtgtgactatttttttttttttttgagacggagtctcgctctgtcgcccaggccggactgcggactgcagtggcgcaatctcggctcactgcaagctccgcttcctgggttcacgccattctcctgcctcagcctcccgagtagctgggactacaggcgcccgccaccgcgcccggctaattttttgtatttttagtagagacggggtttcaccttgttagccaggatggtctcgatctcctgac

SEQ ID NO: 35747 - DNA, 1062 bp, Homo sapiens
tttagtcagttggtttttgtggactatactgatagtaattattcagttgtaataaagccaaaagcttattaaaaaaaagtttataatgttaaactttacatgtaatatgttaacttatggcctatccgtcttacagtgatggaatgttataaacttataaactaagtttattaagtatttaagagtaagtcacagttgtaaatgtgtttggaccaaatcttgctcaagaggtaaactaagaaaagaccttttttgaaaaactgcttcgtggtagaactatgaaagtgggatttaattttttaaacttagctgacatccaagactttaaagatgttttatatcttcttctaagtagacttaggaaaagaacttgaaagttaaggtgctttatttggagcctttccttatagtacagtgctgcttttaaaaagccaactcaaatccttaggattatttttttttaggtaaagaaataaaaaaatttaatttctaatttgttagcatattttagatttgtgctctgatcaaagagggttcttactgtaggcttccctgtcataggtaaagacagtgatgaggccgaggacgctgagctctatgatgacctttactgcccagcatgtgacaaatcgttcaagacagaaaaggcgtaagtttattaatttaatttaatttaattttgagacagggtctcactctgtcaccaaggcaggagtgcagtggcacagtcatgactcaccacagcctcgacctgttgaactcagatgatcctcccatgtcagcctcccaagtagctagggctacaggaacctgccatcatggccagctaaaaaactgcagttacttttgcaccaacctaaatattttctttggagatggggttttgccatgttgtccaggttggtcttgaactcctggattcaagtgttccacctgcctcagcctttcaaagtgctaggattgcaagcgtgagccactgcatccagttaaaaggagtaagtttagtatctctgaacttgtgttttctttttttttttttttttttttttggagacagagtct

SEQ ID NO: 35748 - DNA, 1357 bp, Homo sapiens
cgtcaactataatatttatagaacatattatcactatattaaaagcagtttttatacctggcagttgataagctaattactatccattgaactacagccttgtgttattctctaaaatgacaatgtgaatactttattttccttttaatgctttaagatattaaatatttttaatcttttacttctgttttactactttatcactagtgtttcaacttttttttttttccacttactcttcacagagtcaagtatttgacatttcgatttatatttgctcttaggctttctaaaaaacagaagaaaaagaaacagaaaccagcacaggtatgttagaaaggttttgttaacattaaatgccaacgataaagttgcagtgctcttatttattcagtgtagtctgtgttaaggagagaaacttatactccataattttatgttgattgtaagattgattaaaaaggaattagaaatattttccttttttagtgcttccccccccttgtatgtatgtaataacaaacttaattatgactgccagtgtgtttaacaagtatgcatgtagaattcccctggtatgaattagctgaattttcagtattttaaaaatctgaatacatctcacaaaaggcttttaagtcaagacaacaattaaaatcttgaaataggaaaatctgggattggtcatttttttatctcagtttattctgccaacaacataaacattgcaaaaggaacatttggttagaaacttgtaatgattgtgagtcttgaaaaaatgtttctatttttctgaagtttaagtaatttaaatatttcacagctgaagtccaaattcattctctgtcttaaggactatttttaaataaaatggtattatgttgttatacctataaaaataaagtgaatttgtccattttaccaaggacatttggatttatggcattttagtataatctagttatattaacttacattaagtattaaatatttttaagaaaacacattaatgctttttaataaaacttcagatttggtttatttatccaaatggttataataatatatttaatagtcttttttaaaatcagtttcctattcaaaaaatgatatatgacacatgagttaatcacttaaaattgtaatttggaactttttgcttcagttataaaaccgcatagcaaatatgtgttctttttataaattgacatctaccatcatccatccaaacaccttataattattagtttggaacactttctctttcctttgtgtatgtcagtaccattacagtaaggacaaaataaatggagagagatttatgtttaacctgagcctgtattaccttgattaatgg

SEQ ID NO: 35749 - DNA, 1056 bp, Homo sapiens
tattacttttcaatctaaagccttggtgataagaattacatgtgtcaagttctggagattaattgtgaagcataaactcttcctcttttttagtccatgaggtacatgctattgaaagtctcaggacccttaaagttaatcgtgttgattagtgggatttaacctccaagaacatctgcctttgttgaacgtgtttattacctgtccactctgttaaaacatctttattttacaattgtttgatgcttaatcttgatattaaaacctaaaacactactttcaagtgataacgcttacttttatttatgattttttgcccttctcagagtgttcttatcagctgtacaacctgccatagtgaatttccatctcggaataaactttttgaccatctaaaggccacaggtcatgcaagagcaccttcatcatcgtctttaaacagcgcaacaagtagtcaaagcaagaaagagaaacgtaaaaacagatagagattctgcctgtgcttttgtttgactgtctctagattttgaaaccaaaaaactgaactgaaatcatctaaagagttaaaatttcagtgatctgcaattaattacattgtggaagattattttttatcttgtaaaaacacttttttggtttaatatatatttttaaaacatttcactagtgattgaattctacttttgccatctgaattgacttgaatgtcttaaaacaggtaaatactgtaaagtgtgtattcttgatgtttattggctcatgtggacagaaatgtacagggagaattacattattttaacacacagaagtgcaactttctgctttattttctgaatttcacattacttttacttaatgcttttgtgttttgttaatacttcataatatgtgaaaaactcggatcttttaaaaagcatcatagatcatttttccatatgacactggttccgattttaaaaattatttttaaataaccgattattgattactgtattttttttctcaagaacagtgataggtagaaactaattgaacatttggtagtctttcaagaat

SEQ ID NO: 35750 - DNA, 1054 bp, Homo sapiens
ggtcttgaaagtaattttggctggtcgcggtggctcacgcctgtaatcccagcactttgggaggccgaggcgggcggatcacgaggtcaggagatcgagaccatcccggctaaaacggtgaaaccccgtctctactaaaaatacaaaaaattagccgggcgtagtggcgggcgcctgtagtcccagctacttgggaggctgaggcaggagaatggcgtgaacccgggaggcggagcttgcagtgagccgagatcccgccactgcactccagcctgggcgacagagcgagactccgtctcaaaaaaaaaaaaaaaaaaaaaaagaaagtaattttaaactcactggcttgaaatgtgtgctttctgtacaatgaagttattgctttccatatatccttgaatcttcagattaacgaaatgaacaaattttcggttacagatcagctctcaaacactaaagtccttaatggcaaggtcttttctgatagcttcatggatagtattgatgatcagatttcttctgtgttattgtcttaaaaataagcatttgaaccttaatttaaattcttttcttttccatttagagatatgtttttttctttaccttcatacctttctatttcttgctaatttctatcactaattccttataattgtccctgctccccttcttgatctcttcagggggaatactaggcagttttgtatcttctgatctcgtaccctgagacttcatctgaatgtgctctgccgccttcttatctgaactagatgaattggccataattatgaataggaatattaatgaaccagaggacatactagtcacatgttattatacactaaaaaataggaagtcatcttgaaaggcagttaatgtactgcaaatgtccctatgacttctttgctttctcttataccaaacatgcaggtatttaatttgtttaatgagggttgagtggagttatgtgtcgcttttattcggattgacgaaaatcaaccataattttcaagggatcttcatgggttgtgactggaagctgaccttagtcttg

SEQ ID NO: 35751 - DNA, 1001 bp, Homo sapiens
acacatgttctcattaagtgggtggagatagacatctatagagcaaaatttggtaataatataagccacttttttttgcatgtatttaatctttatcagaatcatctctgtctgactcattgttttggtgcttctcaaatattgccatgcttcctgtccctttcaccactatcaaacagcaggttccttcttcttcattcccatatggcctgatctttgaaatctcgtaggaagtttgttgcatatgccactcaatttgcattcctagggctaatattggtctgaaatttagccagtgatgaacttgagccacacctctacgctataaagggacttcttttcttaagcggaatctatactcatgattaggtgatgtgctcattgtgtgcagttctatacaggatcaagtactcagcatctttttttttaatggggtaaattctaaaaaaacaagactaagacttggacatgatggcatctaggaagtagaattccaggtgggaacagaggtggctcactgtttctcttgttacaagaattataaacacttgatttattttctcttatttcaaaaacaaaaaaatatttttaaaatttacagtagactatttcagacaaacaaaaggaataaagatttacatggtataatggatatcttccaacaaacttaaaaaatattattaatccactttccttatataattatacaaaatttatcttttaaaaaattgatggttatgtaggtcatttccaacttttttgctattacaatgttataataaagattatagtttattttcctttccacagatgtgaaaaatctctagcttacatctgtctattaaaaattacaacttcctgaaccttacacaccagtctagctactgcttttccttctcacttataggcagctcctttaatagactacaattgttgtctacattttcttatcattcattagcttttcagtcctctcatattaggtttgcacaatcaatact

SEQ ID NO: 35752 - DNA, 1048 bp, Homo sapiens
gccaccacttgaaccctagcacacacctaccctgaccttggcccatgaaaataccaatttcttctcattctttcacccatctctctaaccataggctctgtggtgataaacagttggtgtccaccagaaagaccatcttaaactactgaatactttgctacttggtgaatgctactttctgtagctccctggcctgcccctttcctgggacccctcaatttccacacagtttagcaaccatagttaagatgaagcacagcactgtctcccaggccctgcaccagtatccatgtctattggttagtgtccttgccatgtcagttattaaatgtcttaaagatcatccctgtacattacagctgcaaacatttacctgctccctattgcctttgccaacccaaccagaccctaggtctctatcagttagtttcagaaaccccaaaacaacagtgaatgaaattagagggaaatctgcttgtctctcatgtaatagaaatcagaaggtaagcagcccatagtgtatgctgtagctccagggttatcaaggactgaggcttctcctttcttttgcctcactgtcctgttgtgtggttttcatcctcaaggttacattcatgatacaagatggttgctgggactccggccacttggcccatgttccagatatcaggaaggaagacagacaaaaaagtagatatctcctatctgaaatagcttctttcaaaagccttcccagaagtcccatataacatttctgcttatatcttattggagagcattcagtcacatggccacacctgacagagtgggaagctgggaaacgtagtctttaactggacacactgtttccctgcataaaattggggttctattttgagagaaaagggagggaaatagtagtgtcaggtcccttcttcacagaagccttcacttggtcctgccaaagatttccagcagagggcatctgagatattgacaccctcacttacagcaggaggagaaggcctggggcagctgaagtccctgggccagttacctgtggctgtga

SEQ ID NO: 35753 - DNA, 1048 bp, Homo sapiens
tggcaattgttacattatcctgagcttgtgggattattctatgtattcatatgtaagagtttcatacttgttgaatagttatttagagattgcttctatgaaagaaaactgcgcttcctgcatccacctttctgttctaaacacagcagccagagtgatcctttttgaacttacgtgagggcctgtcattcctgtgctcagaatcttctagtggtgcctcatagaattcagcgtcaaagccaaaggctttatcatgacctaggaagcctgcatgacctggctgctctctgatttttctacccacctacctctgcgctctacactggcctccttgctatgcctcaaacacacatgctgttccttggatctagaacacgtacaccagatactcacagggctcactccctcactttgttcaagcctttgcttagtgatcgtcatctcagtatggccttccctgaccaccatgttcaaacttaataacatctgctctgaactctctgttctctcccttgccctgtttaatttttctgcacagcacagatcaattttactatatcatataatgtacttattttttgatgtgtgattatctgttccgcattactggaatgaagtcccacgaaggtagtgttttgggtctgatttactactccttcccaacacctaaaatgatacctggcaccatagtaggagctcagtaaatatttgttgaattaagaaatgacaatacccttttgtattgctcttttaggtaaactgtgccttttgtaaacctgaaagaaagcatattagtctgttctcatgttgttaataaagacatacccaagactgggtaattcataaaggaaagaggtttaattgactcacagttcagcctggctggggaggcctcaggaaacgtacaagcttggtggaaggggaagcaaacgtccttctccacatggcggcatcaagtgcagagcaaaggggtcggggaagccacttgtaaaaccataagatcttgtgggaactcacttatcaccagaacagcatcaaattacagggg

SEQ ID NO: 35754 - DNA, 1031 bp, Homo sapiens
cacttatttcaagcactattaaaaaagaaaattctagtacacctaagcatttaaaatgttccttcatgtgcttatatttcacattttctttttttaaattgaattaaactatggatattaaaaccctcttactgtgctattcagtacgtttttagaacatcccttttgttttagaaacaccatctataatccgttgtatttttcccttatttcacattagttcatacacacacatatgtacacatacatatacacgtgtatgttttaagcttcaaatatattataaggcacagctgaaccatgactgttgctattgaatatctatgacagccttatttcataataaaataatgctaactttcgttcctttagtaattttccatgttgctacagtaatcataattgcttgacaaaagtgtcaaatagatttaaaacttcttagaggatcctatttgcctagtaatataataattaattgatttgagcaatcattttttaaatttgtcaacttgaatgctggaatatgattctctggttctagatcacggcagtgctaatgttcacattgaaccatctaaattggaagtatatagaaagagaaagatggaagcttatccctggtgaaatcaagaaaaattctctagtgccttaaaaatatcatagctaattgtatagccaacttaaaaacaaaagttcttttagaatatgcttcaaggagatttagcagcagtgtcctacctgttagtaatgttgttgagggcttccagcatttagtgtgaccgactggccaaattaagtatctcctcttttataggtctgatgagtctctatggcagaccttagacctcacaggtaaaaatctgcacccggatgtgactggtcggttgctgtctcaaggggtgattgccttccgctgcccacgatcatttatggaccaaccattggctgaacatttcaggtaaagatgaaaaatccctggaaaagactatttctaaatttcgaggtagaaacagatcaaagctttttttttt

SEQ ID NO: 35755 - DNA, 1034 bp, Homo sapiens
agacacagggagactgagtaagtcttttccagggtcacattgttagtaggtggctgaaccaacatgtgaacctagtgatacaatattccagaattcttactcttaatcactaagttttactaacacagggcatttggggatgtattagagaagatggcaaatttgagagatgtataatcaaaagaacctggtgattttacaagtagatgtttgcaagctaattctaattatgggtgaaatggatatatgtttattccattgtctttttaattcaaaaagtacattgattgatattcttgtgtatttgcttcatagtaagtcttttattacattatatcatttaatcttcttaataactctgccaagaagtttgataataccatttcacaaatgagtaaactgaggcaaattatcctgtttgatgtctgagagatagtgatatacattttaaactcactgactcaaagacctgtgagcttaactacactcgcctgctttcatctaaatgttgttgatgaatagtgtcttactggtctttttcttctgacgtttttctctttttccagtactctcgcaaaaaactcaaatttagtgcgacttaacctttctgggtgttctggattctctgaatttgccctgcagactttgctaagcagctgttccaggtatgaaagatgtgagacttgattatagactcttatgtcaaacgtaaaattatccctcacatctgtataaaatgggatgaactttttgagctttttgtactttccaggctcttgatttggtgaatgcaaaatcttttgccctcctaactttctgtccaaactcaggagccaagtcaattgagtttgcaagtgatacttgtatagtgatctcttttttgtttatttggaactgttaaaataagggaagtgtagtagtgtctatcaacagtatggttgtaagaaatttgctcacacttaactgtacattcaggttttttcccctatggtatctgtagacctaacttacaattttttatcaaatttggtgtt

SEQ ID NO: 35756 - DNA, 1776 bp, Homo sapiens
taagatgtataaagctatagaaaataattgctaggatctcatgagtgggtagaaattcgagtctttcacctgtgcaaggactcaaatttggactactgccattccaaacacttgcattttcagacaaggtgaacactttctttagcaagctgtaaaagcagcaatcatgtcttcatttcataccactctccccacccagtatttataattactattttaaaactgatcatagtgttatacagtcatttaaaaaaaatgtaaaatacagaaaaacacaaagggaagcaaattatcaataatcttaacatcttgctaggctttttcctgtacaaaaactgtttttttttttaatgggacatggtatattaaatacttcgtaatatgctttttaaccccattttcagtgactacatgatgtcatcatcagtggctatgtgatagtccatcaaatagatatgcaataatttatattaagtcaataacaatatatgcagttgatcagaattctaatggactttcagaatcttcccagtttttctctcctataaacaattttatgagtgacagagacaaatctttagatgcatttctaaggatagattcttaaaagtggaattgctgggtccagcattaagtactattctcaagttttggatagtttctgccaaattttcctccaagaagtttaaactcttcacccacgagcatcctcttagtgtgaaatcccatcactcttggttcttctctgtctgcaggtgaagggaaggcagtgccttgtttatatttctttcccacatctggatctttcactggtttactgaaagattttctgacatgaatcgaggctctgggtgcaaggttgagaaactgctgtaggcaaagtgctgttggttttgtccaaatttggcttaaaatctttccctttgttcctccaagaaagaacagagagcctgtttaccgagttttggcagaaatagtaggtattaaaatgctgcttgctagacacattcaggacagagagacagactgtaaattgaagtgttagttttttaattataccatggggataaaaagtttttaatgtcattaacaatagcacacaccatttcattatatatgagataatatggatttggttttagctcatagactggtaccagatggcctgggttcaaatatccactctgccatttactgggtagacttgagcaagttgctaaacttgcctgttccttagttttctcagcagtaaaatggagataagtagaacccatctcttagagttacaggaaagaataaatgagttaagacatgtacagcatgtggaacatttcttgccacatggtaagagttcaattagtgttggctgttaatactgttccttcccccactacccccatcactacctttccatggagcaatggatgaagcacagaaacatttggtcttggatttgaccttgacttctgtagctgaaatcatctctcctttgaagtaacgggttggattaacgggtggtttctaagatccttctagctcaggttgggtctactgtttatggtgaaatgaaggggacagtgaaaaggaaaccttggcagtgactactgtttactaactacttcctgcccagggaggacagagcttaagtgtgggccagaggaaactaaccctttatcccccaatgtttcgttctttctccagtggtgtcaaagtatgattgcatcagattttgctgatggctagttggctggctagatgattggtccctcaaaattt

SEQ ID NO: 35757 - DNA, 1865 bp, Homo sapiens
tttaatatttaatatattattaccctaaatacaaaaatattatttttgtatttagaacttattatgtggaatgtatttaaatatgttatttgagttggagaaatatttttttccagttgtagtggcaatatttctttttactgatccattatttctcttgttgatctgaggtgctacctttgtaatatattgtttgcttatatatactggtgtttaattttactttttgcttttgtgaatgggatttttttccctattatttttccagcctgctattgctgatacatagataagctaaagattgtcattttacacagttttctttttcggatgattctcttgggctttttgggtagaaaattttatgttccaagatgatcattttttctttctaatagtgtgtggttctaattgcattgccctgaacttccagcatgatgttcaatgatagtagtgataacaaatatccttgtcttgttcctcatttaatagtgaccatcatgtttttttgcttttcctagatctctctactttagttagaagatgccccaatcttgtccatctagacttaaggtatttttttatttgtttattttagatcaaaagttgaaaaatcttgatttctcattaaattgggaaaggatcataatgttgaagcaactaaacagtaggttatttctgtcttctttatctaggatcaatgtgtgattttcaatatcttttcttctgccttcttaacagtgatagtgtcatgctaaagaatgactgctttcaggaatttttccagctcaactacctccaacacctatcactcagtcggtgctatgatataatacctgaaactttactgtaagtatgttttgtttttaatgcttaatagaaggcaggaaacaacagagatgccccttggtgtgaaaatccatttttattaatagacatatgaaaccgaaacattagtaataagtataccacagactggctatgaaagaccagcagagtattgcttaaactggtgaaattgagttgatccagattgttcactaaacatttattgtttagctgtaagcagttttaattactagcttgctgtcttagtatctatgagaagacttagcagagaagcagaagataaccttttcctccaggaaacttgaagtgtaattgggaaggcagacccaatgtgggttagtgtctttttttttttttctttccaaatttttcggattaactccagttgattccaaaactttcatctgggcttaaagttctgtatcttctagtgatgtaagtcctggatagtgaagaaattggaaagatataagcctgtagatggtatgtattgtaagtctgatactgtttttgaacaggggcatgttaaggtctaaaaagtgaagtgaagtgacttattcaaacctgatggtgagttggtggctgacctggatctaaatcctaggtctcctggacagaggcaaaatagtcactatctaatctaatagtttatacaagggttagttttacctgctcagcaacttccacagaatcaagggagtgcaagaaagcagcagcctggtccatctttcctttgggaaacaccatacccaactcatcctgggaatcatatcttgtttgaaaaggttttctgcatttcattccaaagggctggaaaagtctccctaatggcaaatgtacatgtgtagcaattttattaaaaaccacaagaggtcagtatcttagagttgatcaggtgcccaacatgtcttgaatgcggctgctggactcatttatgtagctcatgaactaaaagttaatttagcttccagctcctaggtaggaagggtggtgaatttgaacaaagaactttagtc

SEQ ID NO: 35758 - DNA, 1055 bp, Homo sapiens
tgtccccttgtgaacaagcatatttatttcccttggataatgcttttattttataaattagccttcatcttgtactcagctaacgtatattaaacatttgtggggtttaagacaccttgtagaatgtagaataaatacatttaggggagtagtgggaagactggaagagcaggttaaacacggaaggtcttcagactagctgaacagcctgggttctgtaaacacaagggaagcatcaaaggttttggagcagatgaatgactaacatgagctaggctttaggaggatgccttggaaattggtatatagaataggctagaaggaagaaagacagttataaggaaagtttggggctttttaaaaataattattgacaatgtgaaaatataaaggatgtttctgactttaggtaattgatgtgctcattgatctgtagtaggattttgttgaaattccaaaataaatgttccctttcctgagactttgtactgtatgtcccaaccttgagcaaacagagatgagagagatgaatttctaggcacatagatctgagttaagaaggaaaaaatcattaccaacaccaaacagtatttactttggaaaaacagaatttgtgaaacagaatttgagaaacagaatttgtgaaacagaatttcactgttaacagggttgaatttcatctaatgtgaaatacctaaagggactggcttatctatgcagaaaaaaaatggtaatacgtagggaggtaagatggctattacctcctataaagggtgtgatttttcacccattgtctctacctgtacccaactgtataaccctatctaaaatatcttagggaagtcagtggtagttttcatcacacataatggacttgttgactatgaaccattattaagaagttcatcagtcctgacagcatctccctttaagagatgagcctagttcaaataaaggtcaagttcatatccttaatttgcatgtaacctgtggtggttccaactggtgccgcagtaaaacatttgcttttaccatcactcacttgctagtttctt

SEQ ID NO: 35759 - DNA, 1067 bp, Homo sapiens
ggagatatggggcatcaaatgccgactgacactgcaaaagcccagttgtctatgaagtatttattgcaggatggtgtctcttctttagaacagggaaaataggcaggaagcccaattgctggagtacttagctagttttattcttggttttccctttgccttcattctgcaagtatactagggagccatttgagagggaaaactatgaaatcttgctttttgaaatgattctaaaagcttctatcactgctttgctcttaagagccaaagttgtaggccttttgaaattttaggagagtgagcctataatttcaagataccttaaagagcaaaatttgagccacctcttccaagtgcccttcttactaagtctattcagaatcaagcttaaaaattaccaccagcaaacaatcttcatagcccatataacttttatctatttaattttatagtattgctttataagacagcttagaagaacaataagctatttgtattatgagctgaacaaaaagagaatcataggatagtagcgtctgaggccatcttttctaggaataggaaagagaaaaatgtatttgaattttgcctttagatttgaaattaggttaatagaaataagtaaccccatgtaattcaccttaaaacttaacaaaagaccaaacattacaaaacccagagatatagaatcaatataggatttgaaggcccagcagacagttttctatgacaggttaatctgaagtatcctgtaatgttcattaagttactgtgtttccagaatctaaattagatgagaaatataattgtggttttctaacttgataatcaaattatgttaacatgggtcctttagcttttaaaatgacttgctttgttttagaaaggtggtattaatccactctctattcttgaaaatttggatgggagaattctgaagttgcctgctgttttcctttagcgctgaggttcttaaggttacttttatattactctggaatcaagtattttaaattgtattttttttttaaatgatctctcagcaataattgtttgaaactatccat

SEQ ID NO: 35760 - DNA, 1006 bp, Homo sapiens
gttgtgtctctgcccggctttggtatcaggatgatgctggcctcacaaaatgagttaaggaggattccctctttttctattgattggaatagtttcagaaggaatggtaccagctcctccttgtacctctggtagaatttggctgtgaatctatctggtcctcgactttttttggttggtaggctattaattattgcctcagtttcagagcctgttattggtctattcagggattcaagttcttgctggtttagtcttgggaggatgtatgtgtcgaggaatttatccatttcttctagattttctagtttatttgcgtagaggtgtttatagtattctctgatggtagtttgtatttctgtgggattggtggtgatatcccctttatcattttttattgcgtttgattcttctctcttctttattactcttgctagcggtctatcaattttgttgatcttttcaaaaaaaccagctcctggattcattgattttttgaaggcttttttgtgtgtctgtctccttcaattctgctctgatcttagttatttcttcctttctggtagcttttgaatgtgtttgctcttgcttctctagttctttcaattgtgatgttagggtatcaattctagatctttcctgctttctcttgtgggcatttagtgctataaatttccctctacacactgctttaaatgtaccagagattctgatatgttgtgtctttgttctcattcgtttcaaagaacatctttatttctggcttcatttcgttatgtacccagtagtcattcaggagcaggttgttcaatttccatgtagttgagcagttttgagtgagtttcttaatcctgagttctagtttgatcacactgtggtctgagagacagtttgttataatttctgttcttttacatttgctgaggagtgctttacttctaactatgtggtcaatttttgggataagtgctatgtggtgctgagaagaatgtatattctgttgatt

SEQ ID NO: 35761 - DNA, 1031 bp, Homo sapiens
tggtgtacatactgcatttgatttaaattctctaaatcttaaatttagggtttcttcctttctttccttgtaatttatttattgaagaaactatgttatctgtcctgtgttctacattctggattttgcgtctatccctggagtaataggttaatctttcccctattcccataaactggtggttagatctagcaacaaaaagctctagaccaggggtgattttcccccacccaggagatacttggtaacatctgaagacatttttgatggtcacaagagaagtgctattggcatacaggcaatagaggctaaggatgctgctaaccatccgaaaacaggaaagccccctacaacaaagaattgtctggacaaaatgtcaatagtgtcagtgctccagaggcttgtatcatcaagttctttttttttttttttttagccaggagacacttgataagtaatatcctgttcttctattcagatacatacctgtctgtttcattttcactgctgtcactttacctgctcttgggctcttgattcctaatagaccctatccacaagctccagagacatgagggacactggccaagtgcaaaactttatttctggataaagcgcttgtgtcctatcctggtgaacccaattacacttcaacatttattgaccatccacaatgtgcaggatacaacagcccaggagaagatgcagagcctatgaggaaacaaaggcaagtagtctagagactgggcaaactagaaagaaacctcttgtcactgcataccctaaccatggaacaagcaagatgacaacctcctctttctttactattcctccccacctagccaaatatcccagaaaatcaaagttttcttcaccaagagactaacccttcaagatacaagtcaaagccctaaaagcctatactaatattatggataactcaaaacgtaactgctttgagttactatgttttagcaaatctaaatactaaaatgccggtatttttacatttctctaaataccagaatatc

SEQ ID NO: 35762 - DNA, 1056 bp, Homo sapiens
aatgtctcctttctcatccctgattttatttatttgaatcttctcactttttctcttagtctggctaaattttatcaattttctttgacttttcaaaaaaacaactttttgtttcattgatcttttatattgttttctatatttcatttgtttctgctctgaactttctttctttctttcactaattttgagtttgattgctcctgcgtttctagttcttcaaaatgcaccattagattgtttatttgaaatttttcttctcttttgatgttggcacttatagctgtaaacttccctcttagtactgcttttgctgtatcccgtatgttttggtatgttgtgtttccattatcatttgtttcatgaaaattttcaattttctttttaatttcttcattaacccactggttattcaggagcatattgttcaatttccattcatctgtatagtttccaaaattcctcttgttattgatttctagttttatttcattgtagtcagagaagatgtttcatataatttcaattttctggaatgttttaaggcttgttctgtgacctaacatatggtctgtccttgagaatgatccatgtgctaaggaaaagaatgtgtattttgtagttcttggatgaaattctctctaaatacttgttagatccatttggtctatagtgcagagtaaatccaatgtttctttgttgattttctgactgaagatctgtctaatgctgaaagtggggtgttgaagtctccagctattattgtattatagtctctctctctctctctttagctctaatgatatttgcttgatatacctgggtgctccagtgttgggtacatatataaagttgttatatcctcttgctgaattgacccctttatcattatatagtgactgtctttgtcttttcttaaagtttttctctgaaatctattttgtctgacgtaagtatagcaactcctgctcttttttagtttccatggacatgaatatctttttccatcccttttattttcattctgtgtgtggctttatagaggaaatatgtttc

SEQ ID NO: 35763 - DNA, 1042 bp, Homo sapiens
tataaatattttgatataaattcatctacaagcataagcatagaaccatttgtacaattttatgtcatttctactgtcatttctaagcaatgtcaaagtctgaatgtgccatgccatgacaaaagctcatgtaacaagagcggttagcaatccgagagaacacagtgccaagctccacatcccttagagggcccgtcatgaaagcattagataatggtctgccagggctgttgtggacatccgtctgacaaaaaccacactgggaagagtggttattgtctttcttcctccagaaagaaatttctccctttggactgtggtaagttgtgttagagtgacctcagacatctagctgaaagaaaggaaaagtctttgtcatgttcaagtcacagaacactgactctttccatggctagggaatgaattgcacaataaaaatgaaatctcaggccaaacaatataaagaaatgggtcataagatcagctgcaaggttgggggatatgtataaataggaatgcatagaattgagtggtagttttacctgaaggcattcacaaacacagtaaactagcagctttctctgatgttggtcttggcgcacgcgcacacacacacacacgcacacacacacacacagagtttgcatttgagttctcctttttctgatggtctccttgcacagttcacatttgagttctcctttctctgatattgatctctcacacacacacacatacacacacactcacagagtttacatttgagttctcctttatatggatttgaaagaaatcggtgaatcatcctggctaaatttttataaagcatttccctctgttctctaatactctggcaatgaatttaaattgcactaaaattcagtggagggaggatcacttgagccaggagttcaagatcaatctgggtaacatagtaagttctcatctctccaaaaacattttttaaaaaagtatccgggtgtagtggtacatgtctgtagtcccagctacttgggggggctgaagtgggaggaggatcact

SEQ ID NO: 35764 - DNA, 1048 bp, Homo sapiens
aacattgagtgatgtgtcaaaggcgcttagaaataagagactgccagaaataagtctatagaagctaggatcaccccgctcccaggccagccctggctgctttagttacagtcttaggggatgcaacctgtccacaaataattccccagaatactggtgctaacagtctgagcacagatgggtctcggctgggctctagagcagaacataaaatcaggaaactagagcaaactttactcttcatactgcacagagacatatcagttagtagaacagaggctctgaaagaacagaaaagggaatagatggaaatgggaacacctttgctgtgcaccagcatataacacacaaaaggcaccaggggaacttgggaaattttaaacatatttcattcccagtttctacttgttcataataatttcctttttccagaaaggaaggcaacaagtcctgcttttaattgctatttctggaatagaagatttttaaaaataacaatggattggacatttagaatacctgtaggattatttgtaaattaaattaccacttcacatagccttttttggtgcagtttttggaagaaagcaccaggcctttcttaaaactccaaggttcttctgatgcagttgtctctaagagtcacacaccgtgtgcacataagtccgtgtctccactctacttggtcatcagtcacccagggctctctcatttgggcacccctggtggaacaaggctggggcaggtatttcccaccttcaacaggaaataccaaaggacaaaagaatgagccaggccaaggcccaaatctcccaaggatgtggaaacagaggagtgggggagggttaagaggttgcctccaacactgagtagcttctcaccaggaaacgcctgaaagtttgacagaaacaaaagaccagggaccagcagaactcttacccaggtagattcaccattatggctttgctttctttgtaaaaataagccaatacagcctggcacagtgactcactgctgtaataccagcaactcagggggttaaggcagg

SEQ ID NO: 35765 - DNA, 1021 bp, Homo sapiens
gaaacaaaggcaggctccattgctttagagtggaaaggcaacctcaaatgcctccagtggccacgtgggtgatgcatgtacatgaagctgccctttcaggctattttttgttttcctattttgatagagtcatggatacagagaaatatttctcttcaacaagagaactaagagggacaagtatgatgataaacggagagggacccaactacagaataatatggcaaaaggcaggcaaagagactattgagacaagggccagatcttcctgtttttcaagagtatccagaaatctcaaattttttaagaacctgcagattctttgatacaattcacgaaacaaaccagtgcaaagcaaacgcagtacacccattccaatgtaattccaatggcaggcccattccaaccctcagactaccaatatttgaactcaggtttgaatgtcagaatccaatcattggcagtcctgtgccaaagcttaactgataatgtggaattcactactgaacatcatgtttactgctgactaaacaaattgctattggaaagcctcttctctccatcttctgggtataactgcattgtgtagtagccattctggtcttttctgcaccagaaggaacactggagtaagaactcagaggtcatgctcccataggaaatatttcccagtggggaaatactttatagacttgtttctcctaagttcagttgtcccagggtctgtagacagaaactgaaatgcataaaactattattgtgtttcttggactaagctttttattgtggaagattctagaaaacatgctataagtttaattgtactaaagccacatttaaattctgagacatctaagttatattttttacttgaaacatccgtgtttatgagttgtggctctatagcccttgtaagccatgttcccttttccctgaatttgaaactccaatctttccaaacatccctggtgtgtattagcattccagaggctgccagaaagaagctgggaggaagcctaat

SEQ ID NO: 35766 - DNA, 1034 bp, Homo sapiens
ctttatctggcacattctttgcattgcctagaggacagagtctgcattcttggcaggacaaataagagccttagcagccttcgcaagcccctctaccagctttattgcctgctgctctcctggcagaaaccctgtccctctctcaacgtcctaatgccctcagcacttcatccttagtatgcttccctcttccctagctccatcagaattctttacctacttcaaagtaaattgaaagcttagctttcaatctttccgtaaagttagccctattgatccctccctggagtacctgtcactgtcactcatacattaccagcacatgctgtcatgctccaaactaaactggagggttccactaggaccatgtttgatgtatttttgtggcatctggagcaaagttcatcctgcctgagaagtgtaccatttttaatggttttttgtttgtttgtttttgagatggagtctcgctctgtcgcccaggctggagtgcagtgacgcgacctcagctcactgcaacctctgcatcccgtgttcaagggattctcctgcctcaacctcctgagtagctgggactacaggggcccgccaccacgcccagctaatttttgtatttttagtagagacggggtttcaccatattggccaggctggtctcgaactcctgaccttgtgatccacccgtctcggcctcccaaagtgctgggattataggcatgagtcaccgcgcctggctagttatttttaatcacaaaagcaatgcattctctattagaaatgacacatacaaatattgatgagcataaagtaaaaagtgaaatgctactctgcaaaggtaacaaccgttaacagtgctagacctgttgctggagaagcagtgtgtggtagggaataagtgttcaggctagaaggactgagttggaagcccagcgtggccacttcccagctcagtgaccttcgatgggctactttatctctctctgcctcagtttctttatctacacgatggggataatagtagtatctacctcatt

SEQ ID NO: 35767 - DNA, 1049 bp, Homo sapiens
tcacagggtttacttagcctggaacagagctggacgcatgattgctcctcagtaatcagataaataagatgtgatttacatcagaagctgtaaatgactgagaacattggtgttgcagtaaagattatacttattctaccttaaagtactaaaatcctaatcttgattaaaggttaattctataattggtcagtgactttttaattttacctgccataataattgctagcaactactgggtaaaaaaaatatgctggttattaaacatatgtacttgttattccttctgaaaggtcattgttattattcccattttatagatcaagaaactaggtctcagagaggttgcataatgtctcagggtctccctgctagcaaggggctgagcttgaattcaaactcaaatctacgtgtcactaaagccccctctctctagagccatgtaacccctgatgtggtatgtggcctctagattagtactggatcagtttataattttaaagtgcatttgttcccttaagtcttttctccacatgagctaaatatttttcataatttttctgtactcgtgtacttagccctttacatcatgtgtggttgaacattctattatttggtgagactatgactgtctaattggtcagtgagaatctgacttgtctagcaacaaaagaactccttgagaagaggagctactatttgtacatttgcattgcagccctggttgcagtgatgaactcttgctatagtatgttacaaaattatgtcattgatttgtagattgagtatagttgcttaattattctcacctgctgaatttgcagaatttgtcattcatcattcattcaacaaagctatactgagttcctgcagtgttagtcactgggcatatagtaatcaatgtaaaccatcgtgtattactatacttcaagggctgtgacctggaaaatcactgatatgttattccagaatgaataaaagtgaagttgaacttaaggcatatactttaaaagaatggactttttaataatcattgtagcacaaccaga

SEQ ID NO: 35768 - DNA, 1023 bp, Homo sapiens
gcattctgccagctaggaagcgtgctatctcgatcatcttcccaagacagtcatgcgggaaggtcttttcgctaacaagaaacacaatccaaagtaaagacagcttttgtggaaattgcaaactactcatccagtggtcagttgtaaatcatgattcttttggaaagaaagggagacaggctggggctctggccctcaaagaacttcctctcattaaaccaaagcaatttgctgctctccccaggctctttctgtgcgtaaattcacctacttttcccgccaccatcagtggtcctggtgctgctggtgaatgggcatcatggggagacagggctttccacgtgatagaggtttctttccaaacccaggctttacaggtagatccaagggtggctttcgtcagcctgttgcccccactgcccaacacacactttgctttttgctgctattttctgcggtcctgggtttctaaatcttggcaagaggacagtcattcctttgtgctcggctgttacaatgaggtagccagagaaagggtcttggtctgaggctgtcagctgttactaatcacgactccccggcccatggtgggtcccgctcgcctctccctcttgctctgcttagcacacataaagaagatgaattactctctggttcctcttcaaaaaagcatattgtgcggcacattccaatacagtgagcgaaggatgggctcatgtgaagggtaaatgggtatccaaatcacctcgcagcggggctcgcgccggcagctgtgggcctctgagaagtgaatttcggagctgccccttctgagagtttccggcgacctcgctgagagtgagaggaagtccctgcggtgggccctctggcaaaccacatactgggaagatcgcgggactgtgttaagctgtcatgagagtcaattgaatggtcaagaccagcgtagacagaaataaagcttgaccactcagaggccgccatgggctgcttacccgggagaggcagtctccaccccaaaggtta

SEQ ID NO: 35769 - DNA, 1891 bp, Homo sapiens
taacataaatagcatttttttgcaaaaaacaaccatttcgaccccaaaatttattttatttatttacttgttttgagatggagttccattcctgttgcccaggctagagtgcaatggcacagtcttggctcactgcaacctccgcctcctgggttcaagtgattctcctgcctcagcctcctgagtagctgggattagaggcgcccgccaccacgcctggctaatttttgtatttttagtagagacgggtttcaccatgttggccaggctggtctcgaactcctgacctcaggtgaaccacctgccttggcctcccaaagtgctgagattacaggtgtgagccacggtgcccggcctcgaccccaatatttagtgaaaagaatggtactattttatgttttgcaagttttcttaatgtctggcttaatacaagacagttggagtttcctgtttctgcagtttcacaactgcttcagtgagttgtgacatcacacatcatgtagtctttgcaaaactccactatacattcatgagaaaatgagactgagagggacaaatgacatcttagtattattatgagaatggcttaaagagaaggctcgttccccactgttgggactctcacttcagtcaaactaataactgaacattcatcatctatatggccttataacctttaatagctactattatgaatattatgtgtctattacgtaatcttgcagttggtagatacggcgaactgaatgttaagaggtgcttcgctggccagttcctaacgtaagttgaaaacttgtgatgctcacgggagcctcgtttttccctcctccccaccctgcctgcagggatcgcctccggaccaccaccaacgtactgggagactccctgggagctgggattgtggagcacttgtcacgacatgaactgaagaacagagatgttgaaatgggtaactcagtgattgaagagaatgaaatgaagaaaccatatcaactgattgcacaggacaatgaaactgagaaacccatcgacagtgaaaccaagatgtagactaacataaagaaacactttcttgagcaccaggtgttaaaaaccattataaaatctttccatctcattacagctcattcgctccagcaagcccgtcatcttccctttcctcccttctgataagactggaaaatagtcctccaaaacacaagggaggattttgggtggccaaagtgtacaattttcatcccacaattgaaatttttaaatcatttcatgttagtcttaccgaataaggtaccaagatcacaaatagtgttgatcagatcttacaagtttatgtggcacacaatcctataaatgtgatttttttatataagttaaagagacaaatagtaggctaaaaacattttaaaatcaacttttgaaatttaaaaatctttcagaatacaattcagttttagtttcaaaatgttaacaacttgaattacaaccggttatcagttggacagtaagattttatccctttctcttctgactggtatacctatttcattagtagctaggtgcacatatacatctagcacagctgtgaggacagacagaaggcaaagtttccatgtggccttgagcaagtcccatctcacctctaggcctcagtgtcctcatctataaaatgagggacttccctagaagtcttcatggtctcttccagcccagacatcctgtgatgtcatgaaagcacctgccctctgtttcccctcagaacaccctgtaccatccatggagcacgaggccttcagaaaagacacttcaatgggagtgaacatttctaactaaggacaggatggctgtgtgtggtggtcaccaggtcctgtgagcaaagtgcaggttatgcaag

SEQ ID NO: 35770 - DNA, 2176 bp, Homo sapiens
aaaaacagtctacttgagattctttttagggatgtaaagtgaaagtttttactatggcagtaaacttggttcttcatagtaatcattattaaatttcaaaaatatgagcaagctataccaatacaaaattttctttacttgcagccgaaaaatgtattttctaaggcttcttcaactaatttcatatttaattttttggtaccaatccatcatcaaactgtcatagaaatatttgaacatatctgtgttacatgtttgaaataccccattgtggtatttttactttctcaaaataagatgtagtaattaataatataagagtaaataaaaaccaggagtttgagttttatttaatttcatttaatcctcctttctggtgcttattaggaaaagcataatttggaagaaattctaaaattttaaattaagatttcagttttatgtgaagtgattagggagtgtgaggtaaacagtaattccttttagagaaatgtaactttaattctgtttatcacatttacttgccataaaaatgaatgggaaataattgactaggaacctttatagaaggctgacaactaactgttcagttgaacatgcttattttaatatcctgagcgtactaggttaggtttggtggtaatttatggtcttatatagcctttaaaaattgttttaagatggactttttaagcaaagtttttcgttttttcagcagttgtcatttataataattcttcgtattttaaaactagtcctttttcaaggtgacctgagttcatttaaaaatattctgatatccctgtgagagaagtgaccagctttccgtttaatgatgaaatacttgacacttaagagaccatatgatttgtgtagattcatgtagtaagtcagccggaggataagggattccctgacactagtattttcttagattatgttgctttaagaaatgtgtgagctctggtcttgaagctaggtattgctcagtgctgacactgacaccatttgttactttttcaattatctaagttcaaagtgcatttttcttgtctttgagagagaggatacctgtttcttggttgtattttcctggtatgaaaatagagtgggattttagtgtttctggttgatttaaaaggaattttaaactccatgtctcttaaggccatcattgtaattttaaagggtattttatgtgcttagaatattttgcccaaataaattaagtaataaaagtaattttaggtatttgtcttgtgtgtaattttttttttttggtgtaaatctggagtcagttttgttgaattgagttttgtcaagttgcattatgttttaaggcatatttttttctattcccaaagttatatcattaggagagatcattgcttgatgtagcattgccagctaagattttgaggacttatttgccaggagttaagtctgtccccataatatctcatttaatcttttaacatgcccaaaagtagaaacaataattatctacaatgtacagatgaggaacctgaggctggaaaggtttagaaaactgcccatggtcctacaattagtaaatgatcagtctgatttacatttgttcttatggattcaggattctatgtatctagtttcaatgaaattttaatattatcttttgggtgttagttgatgtgatacttgcccagtcacttagtcaagaaaattgtgtacttcaggcaaagaagctgaaatagaattcaggctatatattctgtatttataatacttttaaaaatcaataactctttaccatcttgtgtttaaaacaatttttgttaagcagtctgtgaagcttttagttctttgaagtattttatattgagttgaagatgtttgtcaaagcatctgttgttagaaagacaaagttcagctttagagagtcatttcattcatagaaatgtatatgaccaattgtaggatagtagctagatctataaattagtatgactgatcattttgtaaagtttcagtatttttatagccagagaatgttgatcattatagtcatcaacttgggaggttgtgcgcttattccagaactgttgccagtacatacaaccttataggaattccttttgtgaatacctttaacacatttgaaatagtctttttctcatctttatgacaaatctttatt

SEQ ID NO: 35771 - DNA, 1031 bp, Homo sapiens
cataaaaatatttatgatgaatgtaattatggttaaatacatatattaatgctataaatttattcctcttttaacgttggatcataaagattttcctagttttctatataatgttcataattctttaaaatgttgcccagtattttgtcagtggatgaaccataatttattcattctattcttgcatactttttgcttttactttttttctatataaataatgaggcagtgaacatctttatatgtagttttttccccctttaggggctttattcgcttagagtagaatctcttaagtggaagtaatcctgtaagtggaagttgggtcaaaaggtttgaacatttttatggcctttaatatatatttccaaaactaattttattctgctataatctttattttcattcacatcttaattcattcagtagattcattgtgtttttcatatagaatacacacttcctatgaatattattaggtcatttaaatgctcccgtttcccactattgtgcctgtggtctctttttactatatatttttaacctcttgatgataaacagttgtggcttttcaaacggtgtatatcatttcgaggtattatatagtaaaattagcatgggatctaaactgctattagccaagtggcatttaggccaattcttaacccaagcccatgtcttcaactgtaaactgaagaggttctcagcttttgagatttcatggactagtcagaacaaagcaagaaagtgcttttctgcagaaataaagtggtaaggatattgtagattggaatgtaaaaagaaaagtaatgtctaggtaagacccattacttagtcttaatatttgaaatgtgaaatacccagtgtgatgtgaacatggtcatgatctcatattcattctcttgtacatcaaacactgagtgattcctatgtcttttctcaggagctattaaggcattgcagatggtgaaataaaagacttcaggccgggcacggtggctcacgcttgtaatcccagcactttgggaggc

SEQ ID NO: 35772 - DNA, 1856 bp, Homo sapiens
ccctgttgtctccagtcagtccttggcaaccattaatttaccttctgttgctgtggatttctgtattcatataagtggaatcaaataatgtgcccttttgtgtctggcttcttttaattgctcatctatattgcagcatggatcagtacttcatttctttttaggactgaatatactccattgtatggatataccacattttacttttgctttgtcgcttgatggacgcatggattgttttcaacttttgactattatgaataatgctgttataagcattcatttgtaagtttctgtgtggatatgtttttacttctcctgagtaggtacaaaggggcaaaatttttaggtcatgtggtaactatgtttaactctgaggaactgtcagactgttttccaaagaggtgcatgattttacatttgtagtagcaatgtatgaaggttagactgtctttacatcctcaccaacacttgttattgtctgtctgattgtattggtcctagagggtgtgaagtggtatctctgtgtggctttgatttgcattttcctaatgactgatgatattaaacacctttttatgtgcttattggtcatttgtgtatcttctttggagcaacattcatccaaatcttttgcccatttttaaattgggttatctgcctttttattgttgaattataagttgttagacatattctagatacaagttccttatcagatacgtgatttgcaatatttgctcccattctgtggattgtcttttcactttcttgatagtgtcctttgaagcacatacatttttaattttaaagatctctattgttttcctttggttgcttatgctttgggtgtcataagaaactattgcctaatccaaggacaggaaaagttacacccgtgtttagttttagcacttacatttaatactctgatccattttgagttaatctttttcataaggtatgaggtagggatccaacttcattattatgtacgtgtttatccaattttccattaccatttgttgaaaagactattctttcccattgaatggtcttggcatccctgtcaaaaatcagttgaatgtaaatttaagagtttatttttggctctcaattttattccatcagtccatatgtctgtccttacgccagtactacactgtcttgattactgtggctttgtagtaaggtttgaaagtgaaatgtgtgagtcctccaactttgttctttttcaagattgttttgactcttctggatctctcattttcatatgaagtttaggatgtttgtcattttctgcaaaataggcagctgcaattttgataggggtcgtattaaatctgtagatgagtttggggagtattgcctttacaataatattaaatcttaacaatccaagggcatgggaagacgttccatttttttaaagccctaatttcctttagtgttttgtttgtttgttttgagacaaactctcgctatatggcccaggctggagagcagtggcatgatcttggctcactgtaaagtccgcctccctggttcaagtgattattgttccttagcctccgagtagctgggattacagtcctttgccaccatgcctggctaatttttgtatttttaagagaaggtgcggtttcgccatgttggccaggcttgtctcgaactcctggcctcaagtgatctgcctgccttagcctcccaaagtgctgggattacaggcttgacccaccacacctggccagtgttttgtagatttaaatgtacaaatattgcatttcttttgttaaatttgttcctgtgcattgtgttctttttaatgctattgtaaatggaatagacttttatat

SEQ ID NO: 35773 - DNA, 1048 bp, Homo sapiens
cagactaggggtacttaatgcctgagttgataatcacattattacttcttacactttgtttatagaatctagaaggagttaaacagaaaagtatttttctgttccttccttatgatttagaaaatagaaaaagtcttcgctaaagcctttaatagccttattcttagtgatgatgatgattatattaatagcaatgatggccagtatttgtcatgagctcactgttttgaatatttgactggcattatttaatcttcactacagttcttgaggtataatcagcccttcatatttgagagtcacacatttgcagattcagccaagcacagattggaaatattcaggaaaagaaaccaataaaaaaaatacaaaaacatttaaagtgcagtataaaaactatgtagcatttacattgtatttggtattataagtattctattaatgatgtaaagtatacaggaaggtgtgcattttatatgcaaatactacaccattttaaattagagactttagcgtccatgaatttcatatctacagggatcctggaaccagtcccctcagggccaaaggggactgtctagctataatatctccactttccaaattaggaaactgatgcttacaaagaatgtgacttgctcaagagatgagagaaggaagtcccatgagcaattcagtcaacataattacaatgaatgtatgctctccttaagtttagttagactcctgacctccttgaggtcagggacttaatatgtttatttctttaattctagtaccaagcacagcacccagcatatggcatatgctcgggttttttttgttttgttttgttttgtttttttaataaagaaatgaagttgcgagaggctgattcattagctttagctgtaagtcttctggagggaatccataccaatttcatttacattgcatgattttttttcctttgccttggaataccgcttggcaggggacctagtaagttcctgttcattcttcaagttccagcgtaattccatcttttctttgatgccttccttgtctc

SEQ ID NO: 35774 - DNA, 1030 bp, Homo sapiens
ccacttgaaccttgttgactgtttttctagacttcttaaaactgaaaccaaatagcataccctaattatctagttgagtatttcccagccatatgttgggtgagagctgttggcattttggacaagacacttcttgtgctggactgccctgtgattttgtgtcccactcattactaccagttgcaaccctcaggaattgagtactagaaacaccctcacagttttcatggggttggtgagcaagtaccttctgttgagaattggtctagtcctttgaagaatgctaggtagctctttctaaaataggttaatttcatgtcatagtgtttaggtaaaagcttcacattggacatgaataaaaaggattagagttcagtgtattcaggaaactaatataagatctttgaatcttcttattttgttccaagattgatgaaattcaggagaggacttgctacagtgtttttggagggtaattttgcactactgtttgaatcaaaattttaaattacgcatttgtcattaactccacttctaggaatctagcctgtaggaatcttggagggcataaaaaattatttgccaggatgttcatttgcagtattattggtaatcacaaaaatagtaaaaactaaaaaaaagaacgaaataaccaacaacaatataaccccacctacctgaatgagtattataaatagagaaaaggttaaatgggcatatagtacatgctatacgtttattatttaaaaggaaccaggactctatatcctgaataaatttttaacaatgtattattaaaggaaaaaaagaacagtatgggccatgcacagtggctcacaccagtgatcccagcactttgggaggccaaggtgggcagatcacaaggtcaagagatcgagactatcctggccaacgtggtgaaaccccgcctttactcaaaatacaaaaattagttgggcatggtggtgcacacctgtagtcccagctactcgggaggctgaggcaggagaatcacttgaacctgggaggc

SEQ ID NO: 35775 - DNA, 1040 bp, Homo sapiens
aggatatgtctatttggtttaccactgtatcctcaacaactgctggttgtccctattgtaggtgttaggtattaagtgcatgatagtgaatacataaaggtttacttttttaaaaaaattcaggaaaccagataatcaaaaagaaagaaattaatcacttaataagtttcatctcccagggataagaaaacataggtaaagagagattaaactactccttcaagttcaggcaattcagtattctaattgaaagtgttgtgtttcctttttaagtctagttttgcttttgtgtttatatgtcataattaattgtgttaaaacataattttagaaaccgatctttctatatccctcttttctataccccccaattttacttcactttcttaaacaacaataaaagtctcctgtaacataagaaagcttttcttcctaattatcttctttaggtactttaaaaaaaatcaatcagctatcacatgttatggacaaggggaatcactattgagttaatatcctaagacgttcaaaacccagaaccaaaaaaaaaaaaaaaaccaccaaaaatgctgtttggagagtttcaggtttaattaaagagtttgttcaggtgtttttgctgtttggaatcattatctgagaaattatgctataacacatggtcatttgattctgtttccattagccttctactctgggatatatggctactacattttctttttaataatctgtgtttcacagtaagtttacttttgtggaactctattattaaataaatcagaaatctcacttaaaatttaaaaaattatttttctaatgaaaaattgatattacagaactaaatttttaaaagtttatgtacagaaaggatatagtatttgatgttatcaaaacttacatgttatgattagttcattgaccatgagtatattaatttagaaaaaaatacatccctaatttacatcatccttaatttgtatacttgtcatgtagtgcaggggtccagtggaaatcatagaaaggttgctgtaggtaat

SEQ ID NO: 35776 - DNA, 1034 bp, Homo sapiens
tgcactccagcctgggggacaagagtgagacttcgtctcaaaaaaaaaaaaaaaaaattcatattgttggccataccagtgtgatttacttttatatgataagtcttcttaagaatcagtcaccattttaatttttgatacttattttctcaatgccagagagttgaaagataaccttggcagtgatgacccagaaggtgacataccagtcttgttgcaggccgtcctggcaaggagtcctaatgttttcagggagaaaagcatgcagaacagatatgtacaaagtggtgagtttcttaataactgaattcccatatcaaacttgttttatacatatttaaatccaggtgtcttctttaacaagctggcctatcaggaatgcgatgtttatgccttcagtcaagccaagaacaagaaggaaactaaactgataagattcttgtagtttaatatgtaactaaattccttgagaattagacaaagctttaagtgtattttgttaaatatgttggaatatatcagtttactcagcttaaaaatttttttgttttagaaaatcagaattaatttgaaataagtctttcattaattaaataaatatttgcaaagcttttgaacatgtacattgtagcaggtatatagagttttaatactgattgtgattatattcatggttttctagtaattgatttaatactcctgttgccttagcaacagaaaaattggttaagtattattattaaagaaaaattgattcatggtattataaaataataaaaatattacatccaacacagatataatttttatgtagtcatggagtacctttgggttaagagcattgttctgttcaagcttactgaatttgacaagcccaagtgcctgtttggctctcaagattaaaatagggcaggaatagcttggacaacttcagaaagttcaactttgttaattaaataattgtatttaagaattttatcagccgggcatggtgactcacgcctgtaatcccagcacttttggaagctgaggca

SEQ ID NO: 35777 - DNA, 1092 bp, Homo sapiens
gtaaatatacaatttcccattaatcttttacttaaagggggtagcattcagtgaatctcattttatcagtttttacaaagtcattggaaaaacgatgattttttaaaattttatcattctaaagattacattttaaaatcagcatataagaatggattgtttaataaatgatgttggtgattgtctaggtattttgcaattttagctggattcctggatcactgaaagcaaaagtgttctagattaataagctgtttgtattttttaagtcataaaattataagaaaaacgtgggcgaatttttggtattctaagagttgagaaggcattatttctaagcagaccgaaaacctcgattgtagaaatgagaaaaaaagattaattataaatttgtatataagagaacataaatatataaattacataaatataaaacaaatatgggggatatatgcaacatttattataaacacaaagtattgatttaatataccgaaatctcatacagatcgataagaacaagacaaaaatgaactaaagaagtaaacaggcaatttactggaaaagaatagccaagtcgatacagaaagatttaataaatatatgaaattgtggtcaccttagctcatagagatgcattcaaaattaagatgaaataaaattttatatcagattgataaacatttcagtcttcatagtgatataaattggtgcaacttttttagagaaccgtgtgtttgacagtatctatcatataatttaaaattcatatacctcactcagtagtccaaaatctacctcccttaaaagaaggggaaagggataaaaacatactcagactgttctaacaagttctaccaaacattaaatgaagagatatgctaatcttaatccattccagaaaaaagaaaaacagcaacactttcttaactctttttataaagttaaattacaatctggataccaaaatcaggtgaagtgaggggagtatgagaaaggaaaattataaatcagtcatcacatatgaacattcatgtcctgttcccgaattgaaacaaaatgtttctaattttttctaccactaggtaagat

SEQ ID NO: 35778 - DNA, 1039 bp, Homo sapiens
gaagccaggagtttgagagcagcctgggcaacatagcaagaccccatctctaccaaaaaaagaaaaagccagatgtggtggcagtttcctgtagtcctagctactcagaaggctaaggcaagaggatcacttgaacccaggagtttgaggttacagtgagctatgatcatgccagtgaactccagtctaggtaacagagctgtctgtaaaaaaaataaataaataaaagaatttaaaactatatatatatatatatataaaatctcagtataatattaaatggaaaaacaagttatataaggatagatacatatatcatctatataaaattataatgtaaaaacaacacaatgaattacttaggaatatattcatgcatagcaaaggtataaagataacacataggcagaataaactcagatcaaaatagtggttacctctagggagtaaaaggaaaggaatagaggagagaaataacagataaatggagatcttcaactatatttgtaatgttttagttcttttcaaaaatagattggaatctggcagagtgttaagatttgatgaaactagtcagtacatgagtatctgttatattattctctgtaatttctatatgcttaaaatatttgtgaataattactattctccaagaatgttaagaatcttttattaaacctttttttattcttattaatttcagcatcggtatcaagtcccattgttgcaggtggtttgagaaacatacatgataataaagtttctggtccgttgtctggcaattcagctaatcatcatgctgataatcctagacatggttcaagtgaggactacctacacatggtgcacaggctaagtagtgacgtatgtaatatattatcattaaggtgataaaatagttctaatatttgtcatataacctagtatttccatttcaaaatttgaatgatacctaccgtatatcattatactgggtactgagtacaacatggctcctgcacatacagagcttagtctagagcaggattggtcaagtgtg

SEQ ID NO: 35779 - DNA, 1035 bp, Homo sapiens
tatgatgtgttcagtgtttgacaggatcatgacaagataattgtgtttctatgctaagaaacatgctgaagattagtattatatttcctgtctgtcatgatggctcattttaatgttattgaaaaaaaatggactgtatttagtaattgttgtactacaatgtttgcaacatatgtaaatcagaaatagatgcaaataaagagattgctagaagtcttcattttactggctagggagctgggtttttttttctttgtctttttttttttttaatatagattcaggggatatatgtacaggggtttgttacgtgggtatattgtgtggtggtgagatttgggcttgtagtgaacccgtcacccaaatagtgatcatagtacccattagatagtttttcaaccttggcttcgtccctttttccccctttttgagtcccctgtgtctgttgtttctaactttatgtccgtgtgtacccattgttgaattcccacttataagtgagaacctgtagtgtttcattttctgtttctgcattatttcacttagggtagataatggcctcaaactgcatccatgttgctgcagaggacatgatttcattcttctttatgattgtgtaccacggtgtatatataccacattttgtttatccagtccactcctgatggacgcttaggttgattctgtaactttgctattgtaaatagtgctgtgataaacatatgagtgcaggtgtcttttttataaagtaatttttttccctatggatagaaacccagtagtgggattactaggtcaaatggtagttctattttttgttctttgagaaatctccatactgtttttcataagggttgaactaatttacattcccaccaacagtgtgtaagtgttcccttttctctgcagcctctgttattttttgactttttagtaatagccattctgactggtgtaagattgtatctcattgtggtttaatttgcatttctctgatgattaatgatattgagcattttttaaaatgtttgttgg

SEQ ID NO: 35780 - DNA, 1061 bp, Homo sapiens
aaaaaaagaaaacaagattcttacccacaggaggctgggggtgctacaggaggtaatagaccagcttctcaggagacgggttctacgggaaatgggtcaaggccagcattaatggttagcattgatcttcatcaggcaggaagagtggactctcaggcttctataactcaggattcagactccataaaaaagcctgaagaaatcaaacaatgtaatgatgcacctgtttctgttcttcaggaagatattgttggaagtcttaaatctacaccagaaaaccatcctgagacacctaaaaaaaagtctgatcctgagctttcaaagagtgaaatgaaacaaagtgaaagtagattagcagaatctaaaccaaatgaaaaccgattggtggagacaaaatcaagtgaaaataagttagaaactaaagttgagacccaaacagaagaacttaaacagaatgagagcagaacaactgaatgcaaacaaaacgagagcaccatagttgagcctaaacaaaatgaaaatagactgtctgacacaaaaccaaatgacaacaaacaaaataatggcagatcagaaacaacaaaatcaaggcctgaaaccccaaagcaaaagggtgaaagccggcctgagactccaaaacaaaagagtgatgggcatcctgaaaccccaaaacagaagggtgatggaaggcctgaaactccaaagcaaaaaggtgagagccgccctgaaactccaaagcaaaaaaatgaagggcgacctgaaacaccaaaacacaggcatgacaataggagggattctggaaagccatctacagagaaaaaacctgaagtgtctaaacataaacaagatactaaatctgactcacctcggttaaaatcagaacgagctgaagccttaaagcagagacctgatgggcgatctgtttctgagtcactaagacgtgaccatgataataaacaaaaatcagatgacaggggtgaatcagagcgacatcgaggggatcagtctagggttcgaagaccagaaacattgagatcctctagtagaaatgaacatggcat

SEQ ID NO: 35781 - DNA, 1061 bp, Homo sapiens
ggctaatttttgtatttttagtagagacggggtttcactgtgttagccaggatggtctcgatctcctgacctcgtgatccacccacctcggcctcccaaagtgctgggattacaggtgtgagccactacgcctggcccctttatttcttatctttgtaatcaagcaacctggcggagtccatttataaagagcttcatgaaatggaagaaaggatgtggttaattcagaaaatgtgtgaaacctgtggaatagacaattctgttcaaaatgaaacagcgttcacttttggaggatgatacatgtagagacattgattcctggattttttttctttaaagttggagcaccttcagaaataaaacatttggcctttgaattacattgtttaaactttcaaagttttacagaagttaaaatgatctagaggatactagagaggtcttaattgatagtattcttgttaatgtagggaataagaaagggtaaactactgttgataaatgttgatacctgctttattggatataaggcataggttatctgtgtttggctattgtgagtaatttttttaaaaagaaggagcagagtccttgctctgggaacataatccattgcagagagagcacaagaactagtacatattttaacctttgattattgtgttaattaacaaggaaaatattaattctgggatattagtgttgagtcagtgtgtctgtgatgtgaacttaatctaagcaaaacacttaggtacatttgctttaaaaaaaaaaatcccgtgatggatgaaaggccaaatactttgggttatctgtatttataaacctatgaagattataatgtttccaatatactgcaaaaaaaaaaatttgtattcttagaaattttggaaatgtactcatttgtctatcaaatacagcaactcaggaactatccaggaagtacatctgtaagtggacatgagaaattgtgaaccagagttaggcaatcaagaagcatctattgactatccatatatatgtactcaatattatgtaggtcatgtggaaaagggaagatg

SEQ ID NO: 35782 - DNA, 1026 bp, Homo sapiens
ctatcaggaagatagtcccagtttatttcttcataagaactatttgtgtatgtgtttgtgtgtatgtgtgtaggattaagtagtataatggctcttattgtcttgtcttcttttttattgccttgactcttgtgggaagatatgaacttgaatttctaacttgaaatgtacttttcagttacagacatttatattttaaaagatttgtcatctatttatcctgtgttacatgtttctctcgtcttcagttaaattgtatatattgatttgtctgtttgaagaagttctccgtaatgctaaaggcattaccatgccctcaaatagacagtaataggtaaaagcatatgtatagctcttgtctcagccaccatacacaactgccaagatcatagagaaggaggaggagtggtaagtgtcttccaacacttctcacttgtattgaggggtaacattagattcaaactacttcagacctacacaaaacaaaatttatgtactaccaagaatgtcaagtgtacctcttaccacaaatccacttgctaatgtcagtgaatctctagtttcagaaagtttttagtcagtgcaaattgaaggcattatatcaaaaatgtattatataattacccttcatttttatggtggtgtcatgtttttaaagtcattacataattatatgtatatatgtacacatacatatatattaactatattgtcactttagggttaagagtattatagttgtgttttattaaaataaacagttgatttagaaaacaaatactaatatttttattatgctaacttagttaaaattttccttttatcttcagatttacattttttttttaaatttacctttcattaataggtagtatagatcaatcagtgttaaaagaattaccccctgaactcctggcagaaattgagtccaccatgccactttgtgaacgtgtgaaaatgaacaaacgcaagcgtagcacagttaatgaaaagccaaaatatgctgaaatcagttcagatgaagat

SEQ ID NO: 35783 - DNA, 1033 bp, Homo sapiens
gttaagcttgacattttgaactattttatttacctaaactttgtttgtgtttgtttggcttgattttgcaggtgatgatgatgaaattcctcaggaactgctcttaggaaaacatcagcttaatgaacttggcagtgaatctgctaaaataaaagcaatgggtataatggataaggtatctcaccaaagtaaaatttataaatttacttcatagaaacatttgaaattaatttaaggttttcagggtaaattataaaatttatgtaaagtaaatagtaaaaagaaaactcattgttgacttctgagagtctaaatgagtttttttgtttttttacaaaagaaaaaagtattctgcagattattctaaagagaatcatattactgcattgaaagaggcatggactttaattttttccagagtttttttttttcattttctcaaatatttagattatttaaatgcagaaatatattaaatttttctttgacatttgctttagtcatttagggtcgttgagtagaagttctaagtgggaaagttttcttactctttaagagggtgacaatgctatttcctccatagctcaaagggaataattgtacagattgtttcttgaataatatataacttttaccaacgattgataaagaatttatattgctattttagctttcaactgacaaaactgtgaaagtcttaaatatcttggagaagaatattcaggatgggtcaaagctttccactttgttaaatcatgtaagtttaagatccatactgttaattttacccttaatgttattaagatctatagtagtcccccacttctctattgtttcattttccattttctcagttacctacagtcaactgtgatctgaaagtaggtgaataatttttattacagtctattgttctgttttttattgtcattaatctcttcccatgcctaatttataaattaagttttatcttaggtatgtatgtataggaaaaaacatagtgtatatcgggtttgatagtatccatggcatg

SEQ ID NO: 35784 - DNA, 1832 bp, Homo sapiens
aggatgtaattgaaagagttatacagtacactaaatttcatttgcagaatacactttatcctcagtatgatcctgtttacagattagatcctcatggaggttagttcgtataatatcaaaattattgtaaatttttgccatgttagatgagtcaaaataggacttaaaatggcaccaaaatttttgaatcatataacttgtaataaacactgattttgattatggatttgactagaatatagtacttgttcaattataatttctttaggaacatttatatataatagaagttatttctacttgtcagggaaaatctcagaaaatactaccttctggtttcatttatcacttcgccctaattttacccaaaatagcagttgtctacaaaatggattgattcaagataaatactccttttcttgttcttaacctttataaatgagcaatgaaatgtatacatttgaagggagtaaggtcatacctaagtatagttcctgaataatgaacttgacgatctattgtataactgcaaattaatttaaagggaaatataatcttactatcctgctccaatggagaaaagtagaaatcaagataaaataatattttagatacagggatttaatagctgctgaagattatctgatgcaagaatgtttctaatagaatatctctagagagtaattttctattttaataaataaaaagctttatcttccaggttctgtagctagaaaattgtgttctcttaattcaaaaaacagtttgagtactgtttattaaaaattattaaaagttgatgttttccttatcttgaatttgtttcattttaggaggcttattaagttcaaaagcaaaacgggctaaatgttctacccataagcagagagtaatagtaatgctttataacaaagtttgtgacattgttagcagcttatcagaattgctagagatacaacttcttacagacacaacaattcttcaggtaagattttttggtaagcattttgtatatttctaaactaaatgattaagtctagtataacctagctcactcaataataagaccagcactatattatcaagaatttttcctgttaagagtatgttatatctaaatcgaagaaataaaacttcaggagttttaaaaagacattttatcaggagacaaacaaatgtagtgtaaattccaaactctaaattctttgaaagatgggttatattttcatgcagatattaaatgtttgttatttctttatattcctgtgacatttgtaaactcaaaaagtagagattagaggactgatagctatgatacaatgtacctgttgtatatgctaacgtgctttgaggatgaagggaaacagagaaaagaatagatgctgattaggtggggaaaagaaaaaatgctttcttagtgttttccagtaagcttatgaatgtattggaatttagtaagatagaatgttactgaaatcaactaaaggtgtatactacttactcttcttttttaaacaggtttcatctatgggaataacaccattttttgtggaaaatgtcagtgaactacagttgtgtgccattaagttagtcactgcagtaagtataatcaatttgtatttttagttaccccacaaataaaacaatattgatgtcatttaatccaaatttccaaaaaataatgaagatacctggttttcagtacattcatttcaatctaaggactattttactaagtcttattagactttattaattgaggatttatttttctgtttggttaatttgttgggttattctgtttttgtcacatttaaaacacttccaaatat

SEQ ID NO: 35785 - DNA, 1039 bp, Homo sapiens
ttttcctcacagagtgtagttcaagttattgtgccattttaaacttatgccactttaaacatttagtgccatattaaacctcaatacattaaactaatttcttcaatgttttccaagatattttttagaataaagttctgtaacgttggtaaatggttgtgttactgaaaaaatagtttactttaaaaataaacttttgaattgagaaaattgaaacatgtttcaggctaaagcataacaaaagtatattttattcacatttataaatatacttctaactttgattcttttcatcacccttaggttgcagcatgcagagatactggatatgactggtttgagcaactgcttcaaaacgtgagtgttcttttgactcctgataacctaaaatttaataggttagttttttgttgttggtgtttttttttttttggactgtatgatttaaaagaacctttttagttcttttggtagggaaaatttatttcaatatgttaggctggatgattttgttaatttctataattaattcagttgcctggttgtggtttttttttttttttttttttttttgaggtggagtctcgctctctcactctgtcgcccaggctggagtgcagtggcacaatcttggttcacttcaacctctgcctcctgggttcaagcaattctcctgcctcagcctccagagtagctaggattacaggtgtccaccaccacactcggctaatttttgtatttttggtagagacggggttttactatgttggccaggctggtctcaaactcctgacctcaggtgacctgcgtgcctcggcctcccaaagtgctgggattataggcatgagccactgcgcctggccttcagttgtctattgtacaagtaagttttctgaatcattaactaaaattctatcttactttctttccagataattttttttctttaatctctgtgattaatagatacaagatttataaatggatcaatatattgcattaaaaatataattacatgatttagtatgttatgcataga

SEQ ID NO: 35786 - DNA, 1052 bp, Homo sapiens
agcctgggagggcaaggctgcagtgagctttgattgtgccactgcactccagcctgagtgacaatgagaccctgtctcagaaaagaccaaactagaatgtgatattaatagctgctttaaggaaattagagaatggggcaggaagaatttgcggttcatagttgaaacctagtacattgaagctgtctgctttatttatttcttcaaattggaggaaaaggggcagtgtgtgtgttatgttactctggttgctgtcagttgttttaatcatttatgcatcttgtggggaaagtttaagcttgtgctgcccaagcttgtgcccaactgtaagccacatgcatttttttaaatgttaacttaatttcaatttttattttatttaattttaatttctcagtcacagtaggtacattgcaagtgcttaataactgcatgtgactcttggaaaccatattggacagcaaagatatagaatatttccattattgcagagaaagttatatttaacagcagtggaactcttcacagaaatcaaatacacatttagattccttcaatatccccagaattagattagctagcttttcttaggaaaacagatataccttatgacttttctgttgacctttgattatgaaagattagattggttttactttttagctatatttagaatgagctctatcctcatctcattattcataacacttttctagcattgtttgtgattttgcaaaggataatgcagaaaagaaatctaccgttatgttttataattgccttttaaggtgcaattcagatgcagttattaattatttaaaataattcaactagtattatgtgatactgtgtttttgattggaatagggagaaagggaaggtcatcttttctacatctttcacgtattaccttaggtcttacacagcaatttaagtactttgtagtaaaattgtttgaaagtattggtaaattactggtttataagatatttttaaacatatatatttttgttttattaatttgcactttgagtattaaattgttaatgaca

SEQ ID NO: 35787 - DNA, 2015 bp, Homo sapiens
atataaataatctagagaagatttaaagtatacgagaggatatgagtagattatatgcaaatactaccccattttatatcagggacttgagaatccacggattttggtatccctgggaggttctggagccaatcccccatggataccgagcaatgactgtacacgtaaagctacccaatgagattaaaaacttatttggaaattttattttggtgttatgattaaggtttatactttaatctgcatgagtagttatttatattagtcttttgaacaaaaatgagtaagaaaagattctaacttacccataccttattaaatcatgtttatgatttctgtaaataaattgaaaccttatcattttattcctcctccatccctttttgaaaattacatatagcacatagagtaaaaattcagacatcatttactaaggagttaaattgatgcaatattaacttcaagccaatgtgtaccttcagatattcagtctggacataatttatacggagtggcaaaactaatagtgttacaagtatttcagagtacaaaaagatgaagttttaacttaagcagcgctattcagaaaatattgcctctagaccagttaataaaagacatcttgcctgggccatagttatcctgagtgaccttgggctagttatctgatcactctatgctttgagtttagtttgttgtttgttaccaataatacttgctatcatcagagatcttcattttttcctcaaataaacattatatacaaataaacatggatgatatattgctacttattaacccgtggttataggattcagcattgtggccttattataatgccatatgaaaaagaaatggaagatatttttagctctggtttattatattgtttcatcaaatgaatatattttaattttttttttaaaataatgtcaatgtagtaccttctgctggggatctgaaaaatgtttgcagacattatttcttaaatcctgaaaacatccctgtgaggtaggtgggtggtaaatattattatccccattttacagatggagaattgaggcacagagagattatgtgactcacccaaggtcacactacaagtcagtggtggagccaggaatagaacccaagactcctgactcctaatccactcccctagccactaggccctgctccctcctcaaggtttcctcttgtgtgaaattctcctttgaaatgcaatttcttgtttttaattcatggggaaagaagtacctgctctaatgcttctctaggtaaggccaccagcatattcttccagtcattttaagttttaattttttgaaataaggagccgtttatataatttattaacatatttattaaatgttttatttaattttaatatgaatatatgatgagatttttcccctctcccataggatttgcctttattcagcatccaagtctaatgttcgagcaagaagtgaagaatctatataataatattttatctgataagaactcctcagtcaatttaaaaatacaagtgttaaaaaacctccagacctacctacaagaagaagatacacgtatgcagcaggcagatagagactgtaagtgaaaatatatttttaaatttcatagctacatttatattataatggctttatcttctttaatctaaatatctaaatttccttatttgttagatgaagaaattcagttaaatagcagtccttatgctgaggtctatagctgggctttagcatattcttaaattctctaaaatagttttaaaattgtatatgtgtgtaaacattaacattttgagggaggaaagagattatagttctcactgggttctcaaaggggcctctgacacagacacacacacacacacacacacactcacacacagattaagaaccattgagccagaacactagctgtaacgttttgtgattttggttatggcctaattttgaaatatttagtaaagttagtataggtgctcttaatgtgtgtttatc

SEQ ID NO: 35788 - DNA, 1052 bp, Homo sapiens
aggcaggagaatcgcttgatcccgggaggcagaggttgcagtcagctgagattacgccactgtactgcagcctgggcgacagaggctctggcttaaaaaaaaaaaaaaaaaaagggaaaggatgttatagaaactccagatactacttctcccctccagtggtctgagttgcgcggcgctttcccgcctgtccggtagggcggtgccgcgcagaaagccgcggtccctctgcggaaggcgccgctcttggcttcggcggcgccgctgtagcttgaaggcggtacttcctccagcatttgccgcaagttattggcaagttcccctgcagttgtttgggctgtccctgtggctggttctggggtgtgcggccagccatggagcgctctgggcccagcgaaggtgggtttcatgaggcgagtccgggcggggtgggccgtgtcgggggagctggggcgccgcactaactaggccgcctctcttttcctcttgctccagtgacaggctcagacgcgtcgggaccggacccgcagcttgcggtcaccatgggcttcacggggttcggtgagtgactgccccaggcagagaccctcttccttgtgcagaggtttgaagatccgcagagtgggagtggagatcgagctgtcaactcggaattattgtagctcgggtgcataccttgcagtttgtcaatattcttctcccatttgtcttctattctgcgttatccgttggaaccaactcagatgacagttatgagagtctggagagagaggaagagaaaggatttttctaattttaagtcaccaataatgctaaaatgaacatttttgtaaataacagcatttgtacgaggatttttaaaaatacgtaattcggtagggtagatttctaaaagagagtgtagtttattcagaaatataaatacttaaaaagctgaaaaattgggtatgtgccttttaaagcttcttgatgcttattgccgtaatacccatcaaaaaacttgttccaggttataccaaagttaacagaattaagaatgccatttttaccat

SEQ ID NO: 35789 - DNA, 1062 bp, Homo sapiens
aatggtctacatttgtatttgacacttggggtagataattttttttttttttttttgagacgggagtctcactctgtcaccgaggctggaatgtggtggcgccatctccgctcactgcaagcttcgcctcccgggttcatgccattctcctgcctcagcctcctgagtagctgagactacaggcacccgccaccacgcccagctgatttttcgtatttttagtagagatgaggtttcaccgtgttagccaggatggtctcgatctcctgacctcgtgatctgcccgcctcggcctcccaaagtgctgggacaggcgtgagccactgcgcccggccgcacttggggtagataattttttaacacctcccttctttatgtgatgaattatttttagtaataattatgaaatgaaatgaaaagtaatcagaaaagcaacagcttttgtaaatctgtcaatgactgtcaaaatcggtattctttgcgtattccttctcagtacatagtacagcaaatttgtcaatttgcgtctgtctgtagttgatcaaataaagcttctaatttcaattttgtacatttttctttcatatgaaataacagatctatagtatatatacacacatatgcacatgcattcatgtgtgtgcatatgtaaaattaagaaaacaaacaagaataaaataagaataaatttggcagtttcattaaaatttttgttttacagtaagttccagaaattgcaatgttgattgtatattttttcttttatcagttctagtggcttttaaatatctctgtaggttgaaatattttgactgggcactgtggcgcacgcctgtaatcccagtactttgggaggctgaggagtgctgatcacttgaggtcaggagtttgagactagcctggccaacatggtgaaaccttgactctactaagaaaatacaaaaataggctgggcgtagtggctcacgcctgtaatcccagcactttgggaggccgagatgggcggatcacgaggtcaggaggtcgagaccatcctggctaacacggtgaaaacccatctct

SEQ ID NO: 35790 - DNA, 1052 bp, Homo sapiens
aggtgcatgccaccatgcccagctattttttgtacagatggggtcttcatatgttcctcaggctgttcccgaactcatggctttaaatgatcctctcactttgggaggatgacatgaggttgagagtttgagaccagcctggccaacatggtgaaaccccgtctctactaaaaatacaaaaaaataagccgagtgtgctggtacgtgcctgtagtcccagctactcgggaggctaaggcaggagaatcacttgaacccaggaggcagaggttgcagtgagccgagatcacgccaccacttcagcctgggcaacagagtaagactctgtctcaaaaacaaaaaataaataaaagaattatgacatgaaataagcatatgcactatagcaccaacagttcaacagttagcggatccttcttttgtgcaattttctaaacaattaagatgaattaactcatataatcctcctactgctccagtgaagtggaggtacagttatccatcccctttcgacaggtgaggaaactagtattcggaagtgctaagttctctaaggccacgcagtggtaaatggcggagtcaggtttcaaatttagggaagctactccagaatccatgtgcttaaccattatgccctactacactactggttgtgacctgttctgcttctcagggtcatctcgaatctctcctacatttgcctcatgccctatctgtgtaaactgtgaacagtctttggttctgactgtttcatgcattccagaatactttttcttctctctggatgctgatcaatacttagtacacctctattcagtggcattctatgtaagctgtgacgcttgtaaggtactttgtgacagacctatctctttcatcaaggaagacctttttcatttttcagaattatttttccctgtgaaaacagagcattttctccttgtgaaaatcttcactgactcacaaaagtggtgttgaataccttctcttttgtgctacctctgatttgttatattcctgtcttacatttttagtaacagaactgtggagat

SEQ ID NO: 35791 - DNA, 1049 bp, Homo sapiens
cgccgtgttagccaggatggtctcgatctcctgaccttgtgatccgcccacctcagcctcccaaagtgctgggattacaggcatgagccaccgcgcccggcctttgagccaccgcgcccggcctttctggctaactttttgtattttagtagagacgggattttgccatgttggccagggtggtcttgatctcctgaccttcctcgtgatctgcctgccttggcctccgaaagtgctgggattataggcgtgagccaccgcacccggccttttgctcattttaaaatgaggtggtttgtttttttctgttgttgagctgtagaaattaaaaaacatatataatctggattttaatcccttatatataagatttgcgcaaattttctcccatttctctgtagattgtctttttactgtattgattatctcttttgatgcccagaacaccttggcgatattttaaaatctcagatttttttttgttgttgttgaacagagtctcagtcacctgggctggagtacagtggcacgatcttggctcattgcaaccctcacctcctaggttcaagcaattcatgtgcctcagcctcccaagtagttagaattacaggtgtgtgctaccacgcctggctaatttttgtatttttagtagagatggggtttcaccatgttggtcaggctggtctcaaactcctggcctcaagtgatccgcctaccttggccttacaaagtactgggattacaggcatgagccaccgtgcctggcctaaaatctcagactttatcaaattactttctatgactcagagcttaaacttctgttttttggaattgtatacagcctgatttggaactctctctctggcttttatgtatacagttggccctttgagaggaattggctccaggactctcctgctgatccccaaatgcaaggatgctgaagtcccttatataaaaatggcatagtgctgtatatgtataacacatacacccttgctctattttctgcctagcaattcaaactctagtaagggaaaaatacttga

SEQ ID NO: 35792 - DNA, 1044 bp, Homo sapiens
tcaagttggaacaagacactttttttttttgagacaaagtcttgctctgtcactcaggctggagtgcagtggtgccatctcagctcactgcagcctccacctcccaggggtaagcgattctcctgcctcagcctcccgagtagctgggattactggcgctcgccacaacaccgggtaatttttgtatttttagtagagatggggttttgccatgttggccaggccggtcttgaactcctgacctcaggtgatccgcctacctcggcctcccaaagtgctgggattacaggcgtgagccactgcgcccagcctccgagctctgttttctatttttctaattacctccttcatatcgttttggtaaatgatgaatcatatatacagtcagcaacagagatcctgatacttcagtgaatggtagcattgaaagcctcattttgtaattttgctttttaatttgtcatctttcttcttaggagaacagtcaagtttgcaatttattctgttcttccttgataaaaaggaatttgtctcatatttgtcagactgcatgtttgttttacataagatttaacaatttttagttctcctttcttttaaacaaatatttagtagagtttgtattttgtgccatgttcagtgctgggcacagacaaggtctctgtccatatggtgcttatactcttgagggaaggacagatacagaatagaggaaccacaaatggagttgtaattttatattgtgttgtagtgagatgaacactggtggggttagccttattaggaggagaaataacttttaaattgtaacaggagggaagaaggatagcataatgaacgtagaggcaagtgagtttgtaggtggtggtagcagaagtcacttctagatttttaaaactactattcatttatttttgtttttgattgttttttaagacattattgttcgggcataaaaaatgactttgttttcacttgtatattttccttgacatctttagagttcatgtctaattttaacataagtattattatttatgtatg

SEQ ID NO: 35793 - DNA, 1062 bp, Homo sapiens
tgttctggctaaaagtttatcaactttattgatttattttctcctacttgccttctttttctaatattttaagatggatgctttaattattaatttgagacttttcttattttctaatagaaatgctctaagcatttctttaactgtgtcccacaactttcagatgttatattttcatttttattcagttcacttgggattacctttttgacccatgggttattagtgtggtgtttaaatatacaagtatttgagacttttttcttactggcttctaatttaattctcttatgatctagaaacatactttaaaaaaaaaaaaattctggcctcaagtgatcctcccacctcagcctcccaaagtactgggactgtaggcatgagccatcacacccagcccttggaaacatactttgaataattttaatttttaaaatatctgatgaagtgtgttttgttacttagaatatgattttagtgaattttctgtgtgcacttgtaaggaatgtgtactcacttgtcaacacttagtgctgctctctagtcaaagccactgtcgatcttcgcatgactcacattaacatcttcccagttggacctataaattctttttttttctcgtttttcaacaggcttttcttcactgagcagccctatagattctttttttttttttttttttaacagactttccttcactgggcaaccagaatattttttaaaaagtatttagtttctagcctgtgcagtatagcagaaaccacatctctataataaataaaaaatcagctgggtgtagcggtgcttgccttgtagtcccaactacttgggagggtgaggtgggaggatctcttgaattcaggaggttgaggctgcagtgagctgtggtggtcgcaccattgcacttgagcctcagcaacagagtgagaccctcatctgtaaacaaacactcccccccccaaaaaaaaacttaataaaattatttattttggtataattttaaacttaaagaatagctgtaaattaaaaggggtgtaaagcttctttatacttctttttcag

SEQ ID NO: 35794 - DNA, 1025 bp, Homo sapiens
gaattaactctatctggtggtacttgaatatggaatgaaatctatggccagccagcatggttacctgttgtttcaaaacagcaaagttagtgcttgaaatctgtgaagttcatttaaaaaaatgaaaaaaaaaaaaaaaggttagcaaaatcactgatgttaatgaccagccaagtagctattgtaattaatgctgatgggttctgaagaccattggcaagacaggaaccctgaatagatcaaccataagtttgccaaatatggactatttatttttactagagactttgtggagaccaggacttgagacactgtttttgtatgagggtagtagccagtgttaccaaccacttgctatgtgccaggtgaactcttataagcactttgtattaactcatatgactctctcacaagatcagcaattgcaagagccttccttttttcttctcttcctcacttggtttttgtgtgggaatctcaagtaattattttgggacacacttttggcaaggggtgggaggtactatagacttagtggtaagaggagttaaacattgtagcagagtcagtgctgagtttttggtaactagtttcaagtgttaggtatcttctaataaggacatttaactctggttcatggtaattctaaatatcttattaaatcaacatatatttcatggctaatccatacatcaggtaatctaccttgccagagttgactatataataaaaaataaattatttatattttgtattgtatgagcatctaatttagttttcctcttcagatttatactcttttgaaaactcttcaaaagagtactcttttgaatactcttcaaaagagtattatgtatatttattatgtatgatgaaaggtatatgaaaggaatgtattgtgaaactaatatcggtttattacacttcctgtaagaactagcatgaccactcttttactctaaatatgccaaccgccttggctattcaggtttcagtagtagttaaaattctataagaatttcatt

SEQ ID NO: 35795 - DNA, 1022 bp, Homo sapiens
ttttcacttttgagaaaaggacccaagactgaatcctgaggaaatgacgatatttaagagacaaagaagagtccacagagtgctaagatcaaccaagaaataggaggaaaactgagagtactgtcacagaactaagagaatgtgtcaaagatctgagaatagttatcaagatcaatggctgctatgaggccaagtaaagtgttgtctgaagaaatgtcttttggttttagtaacatgttcgtaccctttgtttctaagcacaacttgttcctcccacttagaatgttctttacccatttttgtactggctgaacacccagtcttccttccagatgtttctcaaatagtccctcctctatgaagccttccccagcaaaattattttcttgccctagtttgatagctatagtaacacatataaggttctcatagatggttttgtgtacatctctgtgctctgacaagatattgaattcctgagttcaccaagtttgtatgattttttttttaggactggcatcttgtgttactcatctttttattcttaatgttccacacagtggctggcaagtaggtagtgcttgaaaatgtttgtggatttgaaagcttgattttgaatatggccttaggcaaaaagcagcgtttcaaattgcatattaaaagtcacttcaaaaccgaaatttctaagtagcgctgcctattggatgaactttatcatatactcttttctctaacaacattcaaatacaaattgcaatctattccaaaagatgcattgctattgaacataggagaaggaggtagataggtaataatctataattggccaagaatagactagtcttgtactctttagtaagtgtttggatccaaaatgatctttcaggaaagtgccacaatatttaacagtcagtcaaagagtctgttgttgcctagatgttggaataaatttgataacttctggaggattattttaagtccatgtattcatttgtttaagttaagtatattaagccacttcc

SEQ ID NO: 35796 - DNA, 1024 bp, Homo sapiens
ccgattcttttccaataactagattttaaagcatatagtattaacaagtgatatttaatgaacacttactttgttccagggaccatttcaagtgctttttatatattttaattcatttaatcctcagaacaatactgtgaattaagtactaccattaactacatgttttagatgagaaaactgaagtacagcagtgaagggtttaacaactcgcccaaggccatgcatctagttagttttggagccaggaactctgactctagaatatgcactccaaaatttcactgctatatggttcaaaaataaatgaccctgttgggaatattctaaaacaagattgtggtgatggttgtacaactctgtaaattaactaaaaatcattgaattgcacacttaaaatgggtgaattttatggtcttaaattataatttgataaagatgtttaaaaagtgggtgatctgtgttcttattaaaatggattataatgtttttcaatatttcatgtgcagtggaacttttagccctagttctcttgccactggaatatgggagtgggtgaagtaggtaatctatgccttgcctaagttggctaaggacagaaaagtttatatgtcactgttacgagctctttgggggtgagaattttttcttccttacctttggatctgttggtatgtaaaccatccatagcagggacttgataagtatttgttgaattaaatctcaagggctttatttacctgcactgtagatacttaaattgtatccccagaaatcctagctttcatagtctaattttaaaatatagaccttgtgcagtatacttaaaaggtgaaacatatacactgcctagatgcatagatattaacatatagaagggaaaaatgtagctggtgaaaacactgtgtacaaaactttgtagattaatatgattgcatattgatcaaagttgcttgaggaagccagaaggaaaattgagttcacataagtatttacttataaagatttttaaaggtattctgaa

SEQ ID NO: 35797 - DNA, 1049 bp, Homo sapiens
agctgaaagctttttattgttcataagatgtcatttgtgggtttgccatatttggccattattatatttaggtatattccttctatacttaatttattaagagtttttatcatgaaacgatgttgaattttatcaaaagctatttctacatctattgagatcatcttgtggttttcatccttctttctgttgatgtgtgtgatgtttattgatttgtatatgttgagacatccttgcattcctgagataaatcccacttgattatgatgtatcctcttactgatgtgttgttagaactcagcttgttagtattttggtgaagatttttgcaacagtgttcatcagggatactggctgtagttttccgcttgttgtcgttgttgtatccttatctagttttggtatcagggttctgctggccttgtagaatgaattaggaagaattccctcctcttttattttctgggatagtttggaaagaattggtattaattcttctttaaaggtttggtagaattcagcagtaaagccgtctggttttggacttttttgttgttgaaagaccttttactactgattctctctcatgacttgtaattggtctatttgtgttttcttttccttctgggttcaatctttataggttgtatgtgtccaggaatttattcatttcctttaaattttcaaatttattggcatattgttgttcatagtactctctaatgatcctttgtatttctatggtgtccattgtgacatatcctcttccgtttatgattttttcaaatttgagtctctttttttctttttttctgagtttcactaacgttttgttgattttgtttatcttctcaaagaactaactttctgtttgatcttttgtgtattttttagtctttttctttagggtctcactctgttgcccaggctggagtgcagtggcttgatcttggcttattgcagcctcagcttcctgagctcaggtgatcatcctgcctctgccacctgagtagctgggactacaggtatgtgccaccatgcctggctaa

SEQ ID NO: 35798 - DNA, 1121 bp, Homo sapiens
tcttgaatgcttttggaattctttgtcttttacttattacaatttgactatgttgggctccagagaggacctgtttgggttgaatctgtttggggttctttgagctccctggacctaaatgctcatctctctcccaagactcaggaaattttctgctattatttcattaaatatgatttcctcacctttacccttcttttttccatctggaatgcccatagtatgaatatttgcttgcttaatgatatctcataaatcctttaggctttccttattctttttaattcatttttgccactgcttgtgttatttcaaaagatctatcttcaagttcagaaattttttcctccatttggtatagtctgttgttgaagctctcaattatattttctatttcattcatttaattctcagctctaggatttctttttggttcttttttatgataatccacctctttcttgaatttattacttatatcataagttgttttcctgattttgttgaattgtttatctgtattctcttgtatctcactcagtttccttaagattattattttgaattctttttctggcattgcatgtattatgattgtggtctgttactagagaattatgtttctctttggaagtgacatgcttcctcgctttttcattattctgtgtctctgtattaatttctgtgaatctggtggtcgcctcttccaattttattcactaggtgtcacaaggaaagacttactcatataaatggatcttgggttgttgatttgatggagtgcattggctttggatctaggtggacacagtagtgtagttgtcataaaatttcttcaaccgtaatccatactgggggcatttgagagtttctcagtggcctaggctgagagagtttgtggtgacagtagtgcagctttgccaggcttgggctaactgggctgtctcttaggttgggcatttgttcatgcacacagtgggtcaggcagcttggagtctggctcactggggttgtagccacagggatgttactctagccaggagcacaggcatgcttgtagttgcttggctagactaaggcatgtctgctggggatggctcatagggctgtttctcagccat

SEQ ID NO: 35799 - DNA, 1055 bp, Homo sapiens
caatagtcatttacttttaaattgcctatatcatattaaaataaaacaatagctgttatttgttgatcattgccagaagtggtttgagcactttaaatttattatttcatttaattttcaccacagctcactgaaattggtgttactattattctcacttcgcagatgagaaaactaaggcttaaagaggttaagtaacttgcctattttacaactagaaatattacagccaagaaacccaggtgtgtctgatttcaaagagattgctttcaaccactgtatcatagttttctttgagcccctatggacatttgcaagtgattcttttatgtctctgaagtctatattttaaattttttttatacacagcttacagagaattaccatgaaaaatgagcgtttcactgatttgtctttattaagagcaaaaaattctttaaaaattcctcaaatacctgttccacatatctaacactgaaaaacctgttgtttcaatttttaatgctatttggactgtgggagcaaacattcctgacggttgctgtcagtgctgatacattttttatttccatgataattcttctatagatatgtgttactctttctgatgtggtgttcactagtttttaataaataggctatattgtgtgtggtttttttcattgagagaatgatggagttaaaaataatcacaataataattttaaaagaacatgctgacatttagatctacagactttctcctctaggctataaagtcttaaaagtaggtcatactttgggtttaaactctgaacagatacttgctctctatgttagcttaccttttgatcttaaagcagcatttattcttaacttcagtaaattttaaattgtccttccaaatttggaaattctgtatgaaatgaaaaatcaccagtcatttaaaggagaaaattaaagaaacaagtttggcacttttctgttctgtctccttgaagaattggaacttttctttctatcagtgatctaagctagaaatatgagacagttaaaaaaatacggaagttcatctt

SEQ ID NO: 35800 - DNA, 1021 bp, Homo sapiens
cctcacatgctttcttatacttagattttctcctccagcctatcctggcctaatacttcctagttcctgtaagtataaacattaggctcatttctctgctataggtactggtgactgaaacacttacttttgcatactgattatttttctgtagtagcatattttatataccaactattttagaaaggtcaattctgtggccaaagagagttgatgggtttggggttgtaattaaatgttactttaaaagttttagatgtagtgactttaacaaataatacaggatttgatttacatacacctataggaattttgaaaggatgattgctataagtgtggtacctgtttacttagagtgggtatcctttaacagtataaacttcctacacttacgcaagtttaacaagtgtttcttctgagatcagctaactggtgatgattcatttcacattttagttctcttagccctctgataccatccctcaccctcacccataataccctgtctgctcttctgctcccttctatattaactctattttttctttccaaatgcttagtaagtttgttcttcccttcctttcttcttccatctcttcatcttcttattgactgaagatagtaatttaaattctttaagtttggaaaataagaatatttatatttgacattacatatttttaaaatgtttttaattttcatgggtacatagtaggtgtatatttatggactacatgagatactttgatacaggcatataatgcgtaataatcacatcagggtaaatgggatatccatcacctcaaacatgtatcctttcttcatgttacaaacaaatcagtttggcaaaagctccaaactgttctacatagtggttgtactgatttacattcccaccaacagtatatgagtgttctcttttctccacatcctcaccagcatttatttcctgtcttttggataaaagccattttaactggagtgagataatttcacattgcagttttgcatttctctgatg

SEQ ID NO: 35801 - DNA, 1332 bp, Homo sapiens
catattggagccctgctgtatattatttatttcttttctcttgctccttttaggatcctctctttatccgtgacctttgggagtttgattattaagtgtcttctgctctttttttaggttaaatctgcttgttgttatataacctttttatacttgaatattgatatatttctcttgggttgagaagttctctgtaattacccctttgaataaagtttttactcccatctcgattattttttaacttcctctttaaggccaataactcttagatttgcccttttgaggctgttttctagatcttataggtatgcttcattcttttttattcctttttttcctctgactgaatattttcaaatagcctgtcttcaagctcactaattctttcttctccttgatcagtgctgctgttaagagaccctgatgcattctttagcatgtcagttgcatttttcaactgcagaatttctatgtaattattttaaattatctcaatctgattgttaaatttatgtgatttaattctgaattccttctctgtgttatcttgagtttatttgagattcctcaaaacagctattttgaattctccatctgaaaggttacatatctctgtctccagcattgttccctggtgccttacttagtttgtttggtaaggcaatgttttcctgggtggttttgatgcttggggattttttttggtgactgggaattgaagagttgggtatttattgtagtcttgtagttttggcttgtttttacccaccattcttaggaaggcttttcaggcatttgaaggaacttgggtattgttatctctgtttttggtcactgtagtcatattttcattagggggcaccccaaaccctgtaatgtggtggctctcgcacactcatagaagtaccaccttggtgatcttggataagatctgaaggaattctctggattatcaggcagagacttgttctctttccttactcccaaacttactttgtttgtttctcctaaacaagcaagagtctccctgtgctgagctgcctgaagttagaggaggaatggcacaagatgcttgtggccaccaccactgggactgtgcttggtcagacctgaagccagtacagcattgagtgttttacatggcagcaggcaagagagagagtgtgggggtgcaggaaaaactaccgtttataaaaccatcagatctcatgagaaatcgctatcatgagaacagcttgggggaaactacccccataatccaatcactttcctccctcgacacttggggattacaatttgagatgagatttgggtgtggacacagagcca

SEQ ID NO: 35802 - DNA, 1064 bp, Homo sapiens
agatggtgtatgtttctttaacatttgctatttcaccatacgatgtttgcacgcattttacaattctgctaaaatttttagacattcccttgtagtctaattgcatttcctcaaattatacactgaaatgatttgtttatgtccccacccaaatctcatcttgaattgtagctcctcatatgttgtgggaaggacctggtgggatgtatttgaatcatgggggcgggtcttttccgtgctgttcttgtgatagtgaatacgtctcatgagatctgatggttttataaatgggagttcccctgcacctgctctcttgcctgccaccatgtaagacgtgcctttgcccctccttcaccttccaccatgattgtaaggcctccccagccatgtggaactgcgagtcaattaaacctctttcctttataaatatctcagtctagggtatatgtttattagcagtgtgagaacagagtaatacacacacacacacacacacacgcacacagactcacactcacactctctctctctctcccctcatttgttatctaattctttgtgatttgaatagtatgcttggcctcttttctaagatgaattccagaatataacttgaatcttgagtttacaaattcacttttgtttttttttgtaagacagcagtttatgctttttatgtattatgtaaagggcttccattactctgttttatacaataaaagcacaggaaagaaagaatggataaaatacaacttggtgatgacatgtcaatttttaaagttaattttatttagatgaaattattaaattttaagcttttcttaagagccagtatttagggaaatgttctgaaataacaatattattagcttggtagtttttcaacaaatgataatttattgtgaaatgactaatagaattttctttttaactagtatgaaccaagggacatggtttatgcaattgtaccagtatattaccatttatattttttaacttaagcatggttaatcaggttgttttaacctgatattgtttcatggtctctgtacctcattcacttt

SEQ ID NO: 35803 - DNA, 1028 bp, Homo sapiens
cctcacctatttttctacctatttttctcttcttgctccttctctccctccctgggaatctgtgtgaatagatgagataataaaccagattttctgagttcataagttactccctgggaataatttatattgcacaaatactttccggtcactggtgtattatttggtaaattactgccctcctgcaatgctgtaagtggaaccctagtgacctgaaagagttaatgcctccctgcaagcaattaacttactcctggggcataatttacactctaagaggatctggcggaccatatgtgaagcgcttggaattctttgagagaaaggcagctctagaaatgtaaagaattaatattacaccaggtgaatttgcagacctttcttcgagcagtctatcatgtaacttcccagaaaagtcctgtaaggtaggtcattgttatcctttccagaggcattctctagccaatggtaagtcagcagataatatacccagcatgaggttaggcaatacctatttgtagaatgacttcactatttgaaaaataatgggtgaaagattgggaggtacattttagaaatctgagtaaaaaacaaaagctaaagttaagataattgtaataagtatctactttacaatcttgaatagtaggaatgtgacctaaatataatgggtcaattttctatactaactcagggacaccaacatattagaatgtggcatctgtttcaaagtggtcatctgagaagactatctatatatcctaatatgcacctgtcacttgaaacacttttataacctgcaaacacaattgtcatccatccaacaaatatcatttagccatctcccttcataaggccctgtgttggcagttgctgagggacaaagaaaaagtcatgagacagcatctctgtattcagggatggcagttctctgggttttgagggtggggtgaattttgagcaaagatcaaaccgtctgaaatcaatcctagtgaaagaggagggttaaaaccaagagaagataattt

SEQ ID NO: 35804 - DNA, 1024 bp, Homo sapiens
tcttttaaagtcagttaaagtcttgtctagagaatgcttgaggacttccctgaaggatgcctcaggatggcactaactcaccagatgtaggcacgctgggatgaacatctttctccttccggaaggctttccttctagtccagtggctctagtagtttatcatctgcatcagaatcaccagggtggttgttattgtgcagattcttgggttatatcctagacccactgagtgtgagccttttagggctgggacccaggaatcagcattgtaacaggcaacccaggttttggagccctgcctcctggcagatctctcactgtctgcagagcatctcctaaataagcatctcacttcacctacaacaaagccactgactccactgtctccacaaggcctggagggaaggaagatggctccctgtctcttcttccaaaactttcctttggagctgggcctggtgtcctcgaatgagagggacttgcaggaaagccagtgaacaagacttaggaaatgcacaaggaatgaaacatggagatatcagagcctcttctggccagggatggtggaacaccatgtagttttttctacaagcaccacgtagttttttcacgcattagtcctcaaatatttattatgtgcttaccatgtgccaggcaccactctaggcgcattctgtccaaccttgcatttcccatcgttttgtcagataggagaaatgaagctgaaatttaagtcccaaattatcaccaaataggcaggaccagcaaaataattaggagacaaatttctgcctttttctgtgtgtgtgtgtgtgtgtgtgtgtgtgtgtgtgtgttgtatgtgtgcctctgtgtgcttttgtgtcacacatactcatgtgggttagattttactaaatagcttgtgttttccaagcatatgtatatactttattcattttattacttcatatgagcatttgtttattcatttagtaaatagccattcattcattcattcatctaatatctatagtaggtcttc

SEQ ID NO: 35805 - DNA, 1049 bp, Homo sapiens
cgagttgtatcagcaggcacttttctgtaacatctgggcacttggaaacataatacttaaatacaacctgagtttaaagccttccacagacagatggctaatttgattgatctaatctttcagttaggaatagatcccatgatcctttgcttgtaattcttgagtgagcagataaataaaaaaatgggtgatggctgtgaattaggcacctgttatattgtctgtaatttattttttaagtacttcaatataaacagtgactctacgaattactttaatctctaccctgggggagcttagttaacacttgaagtaatccaggctagaaggcaccgctctggcataagaatttacagctattttcatctcttggtgattgtgccatgccagtggttagatatttggaacttcacctctgtcttaggcaggaatccagactgattagtgattatttgaagaactttactatgacgttccaagtggcagcaaatatacttagaatgatgttatcagatattcacgctagagggttcattaattagcataaatgatgttagatgcaatgtttttattggtgaaaatatgtgattaactagaaagattattcatgtccctctatttttacgtggacaaagagtaagaatccagcaactccagaaatcaagctactttcgagtggctgaatacagctagagctccattcatttctgtgtttccctcacacaacagtagactcatttgcctggccccacccggcaagatggtttgttgatttttccattagaatattgatgtatctctctcagcagatacaagcagttgcttgtattaattagggtaattagcattacctattgtaataaatccaaatctgggtggcttgacacaaaatttattttttggacttagtctaagtccaaagtggatgttcctttctaggaagcccacctcagctgtcttcctccaaagggtgacttgaagactcaagtcattctgtctttaatcccaccatcttataataccaccatctttaaaatggacctccaggg

SEQ ID NO: 35806 - DNA, 1119 bp, Homo sapiens
tctgattctttttaaaagttcccggggttgagggtgctatacatcttgactcaagaactcaccatctgggaaacaagttatgcattgagaatccccaaagaacaggctatatgtatgaacttcctagcacttaaatactaacatgctttttacaattgagttggtctgcagtttcttctggttaaatccaggcccattcatgtttcaatctggctaagtctaggctatacatatgactaaggacttaatttctccatttaagaacatctatttaagatcactttatactttaaaattactggttttgctaaatctgtgactgtatttcctaatagggtgaaataaaattttgatacattctcagaatcttcaggaattttaagctattttcagaggacataaactaaaaaccattactttaaagaccagtatttattatttatttgctaatgttggattcccactatttgattattttgatgctaacttctcaggtaaacaataatgacttaatggacagatggatgttacaccaatggcacagcaatgtactcaaatgttaaaaatacatccatagcgctatgtgattgctttacaaccactgtatttcttacgggatagaacaaaaaaatacaacaacaaagcagagccacttctcctaagtgtgtaacatggggaaaaacccaataatgcccaagtctgtcagtgtaagatgtaagaaaatatatttattttttccatgacaatactatgataaaattgttaaatacatgcatgttttaaaaacagacataagtaacatctttagagttaacagccaagcatactagttttacatttatggtgttttagtaatagattattttctatgtttttgctataatcatgttttccaaaagatacagaaactaaattctgaaattatacaatgatataaagtgtccaaatttcccattctaacagcaatttaaaatccaaattttcacaaggcaggaaatgcttcagttatcatctaagtggagttgttttattccatattactctcagaattctgtgaatcagactgaatcacacacatgtacttcatctatagttttcttcctgtataagtgtattgaa

SEQ ID NO: 35807 - DNA, 1048 bp, Homo sapiens
aaaaaaaagcactagcctccttctcctcctctcctttgctcctactgattgagctgtacaaaagccagaagaaaaaagatgacatgacattaccaattttgtagcacaatgtcttgttatcataatgcaatattaatgcaggcattatgtttctatgagatgttaagcataaagtgaaaaaatatcccatggtcaatgaatttggaaacttctggttaaacaaccttaaaaatgtgtcttttagtgtgcttccctttctgaacttttagcatgctaatatgcatcatgaacctctaagagaggcctaaaacatttgacctaagtcaaactaacttgcctgtggaatcttttgtttgcagggagggcattacccatgagtactttcaaaccgaaggtcaattttgtaagtttctgtggttcatcatccattaggtattgcttttttctaataaataggattgtttttactatagcttaagcccactttatctttgaatattattatggagaaaaacgattcaaaatcgtctgtataagaatcttgtctttacttgtatattagtctgttctcacattactataaagaaatacctgagactgggtaatttataaagaaaagaggcttaattggctcacaattctgcaggctatacaggaagcatagcagcttctgcttttggggtgaccttaggaagcttccaaacatgcagaaggcaaagaaggagcaggtgtcttacatggcaggagcaggaacaagatatatagagtgaggggaaggtgctacacactttttaaacaaccagatcttgcaagaactcactcactgtcatgagaacagcaccaaggggagagtgttaaatcattcatgagaaacctactcccatgattcattcatatcccaccaggccccactgcaacattagggattataattcaacatgaggtttgggtgggggcacagatccaaactattgatttgaaaatccttataaagcacccctcaacatttgtgctaccacctgtttatccagagcttatgacagacatc

SEQ ID NO: 35808 - DNA, 1136 bp, Homo sapiens
accatgttggccaggctggtctcaaactcctgacctcaggtgatcctcccacctcagcctcccaaaatgctgggattacaggcgtgagccaccatgcccagcctcttccagctatcttttagaaaattgtatatataataattgtacataatttagggggtatatgtgatattttggtacatgcataaaatgcgtagtaattaaatcagggtcttttaggatatctatcacctgaaacatttatcatttctttgtgttggagaaattttttcctccagcaattttgaaatacacaatatgttgttgttagctataatcaccctgtggtgctgtagaacactagcccttgttcctccaatctaactgcatgtttgtgcctgttgactgcccccttcctaacccttttcagcctcaggtaaccatcattctatcttctatttccatgagatccacttttttttttttttttagctcccacatatgagtgagaatatgtgatatttttctttctgtgcctggcttatttcacttaacataatgaccttgagttctatccatgttgctgcaaatgacaggatttcattcctttttatagctgaattgtattccactgtgtatatataccacattttctgtatcacttgtctggtgtacaacacagtttaattccatatctttgctattgtgaatagcgctgcaacaaacatgggggtgcagggatcccttttatatacttatttcttttcctttgaataaatacctaatagtgggattgctagattatatggtagttctatttttagttttttgagagacctccatactgttttctataatggctcttctaatttacattcccagcaacagtgtatgagttcccttttctctgcatcattgccagcatttgttatttttgcctttttgatactagccattctaactggggtaagatgacacctcactgtggttttgatttgcatttccttgatgattattgatgttgggcatttttgccatatacctgtgggccatttgtatgtcttcttttgataagtctatttggaacatatgtccactttttaatggaatttttgttgttattgttgagttgagttccttgcatattctggatatta

SEQ ID NO: 35809 - DNA, 1035 bp, Homo sapiens
atgggagcatgcttaccttctgctgtttgttccaggctcacctttagaacaggagacttgagcttgacctaaggatatgcattaaccactctacagactcccactcagtactgtacagggtggctgtggtcctagaagttcagtttttactgaggaaatatttccattaacagcaattattatattgaaggctttaataaaggccacaggagacattactatagcatagattgtcaaatgtaaatttactgagcgtgttttataaaaaactcacaggtgtttgaggccaaaacagattttagacttaccttgaacggataagaatctatagttcactgacacagtaaaattaactctgtgggtgggggcggggggcatagctctaatctaatatataaaatgtgtgatgaatcaacaagatttccacaattcttctgtcaagcttactacagtgaaagaatgggattggcaagtaacttctgacttactgtcagttgtacttctgctccatagacatcagtattctgccatcatttttgatgactacctcagaacataaaaaggaacgtatatcacataattccagtcacagtttttggttcctcttttctttcaagaactatatataaatgacctgttttcacttagcatcctttggactctgcagtaggttgtctgggtcaagataactctcagtcacatttatattcatattatgctaaaatagtaaaatgaaacctcattgttggacataatttagatataactaaaaagttctatgaagtgggaaattccgtgttggctctggagcagctttgtctcctctgaaccaatatatcccaaaccaatatatgcaaagcacctggtacacaactggtattttagtacatgttggttcttttggtgcaatctcagctcactgcagcttccgcctcctagattcaaacaaacagttctcctgccccagcctccagagcacctaggactccaggtgcatgctaccacacctgactagtttttatatttttagtagag

SEQ ID NO: 35810 - DNA, 1049 bp, Homo sapiens
aatcatggtcttttgaataacatttgcaactacatttatgaaatcttaagttttcagtggaagccctttctgtatatttatgtatattatttgtatattccagtaagttttaaatttgtttaattattttgagtgcattatcataaaagaagcataatgagaatacagactgcatttaagaaatggcaagagtgactctagaaagttttcagtattttgctttgtaggaaaaattttcatgataaatttacttaattaggattaggcattatgagatatttcatgttttagataagatattattactataattctgtttctccatatgtcataatattatttcatcttgtcatttcatcttcatacataatgtgttttttgtttaaataacactctgaaactaggtgaagtaatcctcatgtttttatttcttatagatcactttttaattcgggcctctgcagcattagaaaaattgaaactcctgtgtggagaagagaaagaatgttcaaatccatcaaatcttctagaactttacacacaggtactgaaagagtggtggactctggcattttatgagggcaggttgtttatttagatgattgactccaactttaggtaaaatgaaatcagtttattctatatttcaagtgtttaattttgtccaaaaaactatgaataaaacacaaaaacttaaaactttgaggtagtatgaaaagaagtaagatttattagatgtgttaataagaaaagtcaggaagaaaatcttacagataacggaattgttttcctttagagataattgaacaggacactagtgtgtgcaatgtccaatctcttgaaagtttcagagggagcaggggagtatataagggccctgactttttttttttcccctgaaatttaccttccctaggattctcaatattattctccctgctagtgtcatgcatatctatgtgatttttctattcacccacttttttttttaactttcctttccaaatcaggctgctgtgtggacaacacctttttttcttggttttctg

SEQ ID NO: 35811 - DNA, 1027 bp, Homo sapiens
aggtgaaaactgtaggaacaaattttgatactttaaaaagcttgcaatagattcaaacagaaactaccactattttgaaagttgaatttttcatatccagtgccatcatagtcacttttgttgaatcatattaggtgaacaacagacattgtgatgctcatttatttgaagtaatcttttctaatcacagaagcacattagaatccatcatttattttttcttcaatggctttaagaagttacatttttatttcttttatgttctttaggaaaattcaggaattaagtaggggatgcaaactccttatttttcagatttaaaacctgagattcaaagagctttggtgacttgcccaaagacacaaagccagtaatttatacccagatcttttttattctaggtttatttgtctttctgccaaattaatatactttatgcaccataaatatttaattatataattgcctactggaaaaactacccataagaagaaagagttcaacttttgatgaaaattctgcagcatactctctttttttctggtaatacaaagcatcttggaaataacacctttaataatttaaaattgtatggactctcaggcatgattatgcatgataatttcttagacttttagagaatataagaggtctaggatacttgactttagctatatgaattatcctagagcataccccaaaataaagggtgtgtccatggatgtaattcagggagtttataagtactctgaaattgactgcagaatttggggtgtatattctgggagaagttctattccttaaattagattctcaaagaagttatagagtggaccccaaaaaggtcaaaaacacctaaatggttctctaaaaaaattctctggtactctgtttttctttttgtaatgggcctcctttatcagtaaaatcgatattaaaaaatgctaattaaatgaagattgtgttagtcatatttggcttttgtgttactgttaaagtgagaatagaaaatgcttaatgacaaaag

SEQ ID NO: 35812 - DNA, 1072 bp, Homo sapiens
aaaaaaaaaaaaaagtcaagggccaaagtaacaatgtaggaaaaatttgatgactttaatttcatttacttctaggagtcttacatgcaagcctaatgcagagtagagaagctcaccaacttgaaggaagcatgaatgaaattacaaggaaatctagcttagaaaaattaaccctgtagcttggtttttccactctttgctcttggcaaaaggatcttacgtatgtataccaaatgtctatttgaaaattttgtttctctgaatatagctttcttttctctttaacacactggtccagtggttctagattttatgctcccataaattaagtaagacagcattctatatcatgactgaggtgttaatgacattatgcagttgtcacattttgaaatataaacttaaatgcgagcttttcactgtgtgtaaagtttctctgtatttttttaaaaaatttttaaagaccagagattttcagcaacaagaaacataaagaagtaaaaagagcgtagaaaccctgccctagaggacctgctccaccacttaaaagccatgtacctcttgaagcctgtttcctttatttccaacacaggaatttttatatttacaccctaaccatcacatgggtcacatgtgataacaatgtgcaagtttcttacaagtgttctaggaatctgtaagtcttagagttctgaggtttattcccaaaggacaggaaattgtgggttacaccaaacagttaaacagggtggcagggaatccctgtcacgtacccaggcctttgggttattttctagggtgaggggacatggccagtagtacaaagagcatgtgaacgcatggatgtgggtgtgtgaggtcatgagtgggtgtgtatgtttatgtacaacacatgtattggaggataaaagggaaaataatttgtcttcctgacttcttctctattcctggcttttcttagattgttattcctctctaaacaaagcttcaaaacagaaacccctccccttctttattatatcggaaatctgggaattcagttatccttgtcttatcctactccctgttctgt

SEQ ID NO: 35813 - DNA, 1023 bp, Homo sapiens
ccaggttcaagtgattcttgtgcctcagcctctctgagtagctgggattacaggtatgccccaccagacctggctaatttttgtatttttagtagagacggagtttcactatgttggacaggctggcctcgaactcctggcctcaggtaatccacccgcctcagcctcccaaagtgctggaattacaggtgtgagccactgctcccagccccaaacatgattttttgattgaatgcttaatgtctttctattattattatttttttttattatactttgttctggcatgcatgtgcacaacgtgcagatttgttacataggcatacatgtgccatgttggtttgctgcacccattaaaaattaattcaagatggattaaagacttaaatgttaggcctaaaaccataaaaaccctagaagaaaacctaggcaataccattcaggaaataggcatgggcaaagacttcatgactaaaacaccaaaaacaatggcaacaaaagccaaaattggcaaatgggatctaattaaactaaagagcttctgcacagcaaaagaaactaccagcagagtgaacaggcaacctacagaatgggagaaaatttttgcaatccgcccatctgacaaagggctaatatccagaatctacaaagaacttcaataaatttacaagaaaaaaaaaaaaccatcaaaaagtgggcaaaggatataaacagacacttctcaaaagaagacatttatgcagccaacagacacatgaaaaaatgctcatcatcactggtcatcagagaaatgcaaatcaaaaccacaatgagataccatttcacaccagttagaatggcgatcgttaaaaagtcaggaaacaacagatgctggagaggatgtggagaaataggaacgcttttacactgttggtgggagtgtaaattagttcaaccattgtggaagacagtgtggcaattcctcaaggatctagaactagaaataccatatgacccagtgatcccattactgggtatataccc

SEQ ID NO: 35814 - DNA, 1017 bp, Homo sapiens
tctctattatttatttattattattattattattttctgtcttttttttaagacggagtcttgctctgtcaccatgctggagtgcagtggtgagatctaggctcactgcaacctccacctcccaggttcaagcgattctcctgcctcagcctcccaagtagctgggactacaggtgcacaccaccacgcccagctaatttttgtatttttagtaaagatggcgtttcaccatgttggtcagggtggtctccatctcttaacttcgtgatctgcccgcctcagcctcccaaagtgccgggattacaggcttgagccactgcgccaggcctctctcctttttaaggcctgagataataactttcccttcaacttttttgtcagctcctgtaacttttttccttaggttttaactgttgttgtggtctgatgctaaaaaacacttcatctttaggatcaaaacgaaatgtattcttccaatataacattctgtgctcttgactttttaaaatatatctaaattgttctatgaaaccaaaaaacttcacttatgtcctgggacacactcttcctatgtctaattaattcaagtgcccttttcattagttttgacttgaaggttgtctaaatggaatcccatatggaaaagcacatccttttttgccttttggtagccagcctgagaataacatattttacattttatcaaaataattcctatgtcattactaggtttttatttgctcagaaaaactgagatttaaggaggctgaggcaggcatatcacgaggtcaggagttcaagaccagcctggccaacacagtgaaacccagctctactaaaaatacaaaaaattagccagaagtggtggcgggtgcctgtaatcctagctactagggaggctgaggcaagagaatcacttgaacctgggaggcgaaggttgcagtaagccaagatcgagccactgcataccagcctgggtgacagtgtgcgactctgtctcaaaaaaaaagaaaagaa

SEQ ID NO: 35815 - DNA, 1050 bp, Homo sapiens
tttgtattttttgtagagaagagatctcactactttgcccatgctggtcttgaactaccagccttaagcaatgctcctgccttggcctcccatagtgctaggattacaggcatgagccaccacacccagcccttggtaccagtactttatttagtctataggtgattctcatcagtcaggacagggagctaggtccacaattccttattcaaatcttctcggaggccagacatacttctcaacattccagattttagaatttttctaagggtaatgaaaaacataatactcacaaatactaatagtttagcagcatagcatgttagtattcactcttaagtgggataaagatgacatagccccatgttagctgagatcaaattttgctgccagatttatggagaaacttctgtgttttttgtttgtttgtttgagatggagtcttgctctgtcacccaggctggaatgcagtggcacaatctcggctcactacagcctctgcctcctgggttcaagcagttctcctgcctcagcctccccagtggctgggattacaggtgcgtgccaccacgcccggctactttttgtatttttagtagagacggcggggtttcaccatgttggtcaagctggcctcaaactcctgacctcgtgatctgcctgcctcggcctcccaaagtgctgggattagaggcatgagccaccacacccagccgaaacttctggttttaagagaaatgggaggccaggcgcggtggctcatgcctgtaatcccagcactttgggaggccgaggtgggcagattgcctgagctcaggagttcgagaccagcctgggcaacacggtgaaaccgtctctactgaaaatacaaaaattagccggacatggcagcgcgtgcctgtagtcccagctactggggaggctgaggcaggaggattgcttgaacctgagaggtggagattgcagtgagctgagatcaggccactgcactccagcctgagcgatagagtaagactctgtctccaaaaaaaaaaaaaaaaaagaggaaag

SEQ ID NO: 35816 - DNA, 1033 bp, Homo sapiens
gggcttttctttctttactaaacattgtaagatttgagtcaatatgattacatgctctaatgtacatcttctttacaggtgttagtaaaatggcctttcgccatttaattgagttcacatatacagcaaaattaatgatacaaggagaagaagaagccaatgatgtatggaaagcagcagagtttctacaaatgctagaagctatcaaagcccttgaagtcaggtacttaatttctttaatggggttcagatagtcatattcagtcatgttcattctgttagtgaagaacttacagtatgtgtcatgccatgaagaacagagttcttcagaagaattaagaatatttaaggatctattaaaaaattttctggatactgattgttctttcacttgactttgattttctgatcatgtgttaaaactgctaatattaaagtagcatctttggtatgtaataaaataaatctagacagctttttaaggatctggatccttataaactgttttgttggattcaagttattgtttataccaagccttatcctacaaagggtttggcttacaaagattaacataatactgtttaaaaataaggaaatagatggaaataaataaattggtttaataaggagataatcatttcaagttagaagtatgatagccaaaaatgcataccataagtctatagtagatgtgctaaatctagctctaagtgcacctagttcaaagaaaaagactattcagttacattattccttgttagaagatgagaacaaatcaattgctgaggagccattcctattcctagtattaaaatttctcctgagaagtattaagaaaacattaggccaggcccagtggattacgcctgtaatcccagcactttggaaggctgaggtggatggatagcttatgcccaggagttcacaaacagcctgggcaacatggtgaaaccctgtctctacaaaaaatacaaaaattagctgggcatggtagtgcatgcctgtggtcccagctactcaggagctgagg

SEQ ID NO: 35817 - DNA, 1077 bp, Homo sapiens
ctgaactgttgtccgttgaaacacattgattcccctccccctacttattgccacagaggagggatcttttccataactgaaggggagttttgagaagtatatttctggaaacttaaatggattatattcttattatatagttgggtacgaatgtatctattttcattgtggtaaaagttcttccttttctctttcccaggtcatgttcttcctcaaattttttccatattgtaaaatcaaacttaaatcattagaatacaagtttatgtattctaatgcatgttagaaaattgaataatataggaaacacaaggctgcatgatgaaaagtgcattgttactgtgcagttaaattttggcttctggctttctttagtttgaacaaacgttcttgtctaccccagtagtcacagatgccatctttgcaacagaaagagtggtggtggcaaaatttctagaatgttaaaaaaaaaaaaaaatccacacccatgtgccttctcaaaaccaactgaacttctataaagcatctctggttctttcaaagtttgtgttgtaaggagcaatgtagatgatgctataatactttatatttttggttataatgacaaccaccagttctttttcacttaagttaggttgagaaattttatttaatggccactgaagggccattttcaattgggaaaatttatttacatctgtggtaaactttattttgatgaaaagttgcactagtattttaccaccagatgagaaaaagatgagcagcatttaaaaattaatgtatttaaaataaagtacagagaaagacatgtatataattatcaggctttgttttgaatggaatcttttcccccaattcttaatgtaaagatcttgtgctataacttttaaagccatacaaataagagtgctaaactgtggacttaaaagtaggtgtgtaaatatttttaatcagtattacttggaaaataaaatataacaaacccatagaccaatatgctattttttttacctgttaaatattgggagttctttacattttttaagtaaactttaaaattatgtgttcatgact

SEQ ID NO: 35818 - DNA, 1041 bp, Homo sapiens
tgacatttgactctaggaagcacaggcccaaaagaagaggcccaaggagggacattcttctttccctttcctacctacagtttctcaaaccaagtgtcagatggaaagcaaggggtggtatcatcgtaattatacagttgaccatagaaaataaatttcaatctcaaagtaaactcctaggccacccccagaatcttagagtttctcaatcatagaactcatttcttgtcacagtcttggttcttagccaatgtaaaacacccaactgacagggaaaattaaacaccttttaactcccacacaccttaaatgagaatttaaagtatctttcagcaaatgtatttataattttgagtgcttttagccatgttaaggacaaattttctccttctgaatgcagtaataatttggcattacccttttggcagtgtggtacaaagtcttataatctaggctttatggagctattgaggaacaacatagatggcttcatgcaaacccaaacaatgtaatagtagttcttttctctgtagtcggtctactgcctgtagatgtttattccttttttttttttttttttttttgagacagggtctccctctgtcacccaggctggagtgcagtggtgcaatcatagctcactgcagccttgacctcctgggctcaagggattctccggcctcagcctctggagtagctgggaccacaggcacatgccatcgtgcaggtaattaagttttttgtagagatgggcatctcgctatgttgcccaggctggtgttaaagtcctgggctcaagtgttcccccctccttggcttctcaaagtgttgggattacaggcgtgagccactgtgcccagcttactgattcatttatacaaacagagtgctctcagtgtgctacagaatgactatggagctcaagttctagtggagggtgtgagccacaaggaaacaagctagacagattgtaataagtactataaaggaagtaaatagggtgatgtaatagacttgggagatgctaactttagtcaggta

SEQ ID NO: 35819 - DNA, 1035 bp, Homo sapiens
ctaattatttttatctctgaaagataagaagtctattttttccttaatataaccataagttcattaccatattgaaaagtgtagtaagtaattccagctacagtcagtattcatattttttcaattgctttcttgcttctttccttccttctttccttcctccctccctccctccctgcctccctccctccctccctctttttctttacagttggcttgttcaaagagtgatccaaacagggtccacacattgtatttgctatgtctcttttgtctctttttatctataagttcccctctctttattccttttaatatactgaagaatttcattgttgctctgtagaattaacaacattctaggtttggctgattgaatcctcttggtattgtttagccagtttctctgtcccttgtatgtgcttaaattatctcttatttggtcagtggaagccctttcaaattggcttctaaatccttttgacatggcttcagtcatctttggtagcttccttgcttttgccatgtagagcctgacaatttgaggttgtcagctaagtgaacttgagatgagtgtatgtgattgagctttgtatgtcaatccaaatatttgccagctttctattattttcctccttctccttccagtaaggagtaagattcagcattatttgcctttcgtgtactgtaaattattactatataggtagtgtggaatctaagacagtgttcaaattcaggtctaggttgacttaatttctctaaggtcttacttaataagttactttgtagggataatttcattcattttgaaattatacatattcagatcttaggttgcaagaatgggtttcctaagctttaataaaccttatatagaaacagatactcttcattaaaaaatgtttatgctgcatattaagtaaaacatcaggagaaactgatgtcctgtagctaaagatggtctgaaccatatctaaatataagattgtactatataggcttttttgggttgcaaggaacagaatcacatca

SEQ ID NO: 35820 - DNA, 1022 bp, Homo sapiens
atttgtaattattgttggagattacagccttttgagagtgcatttaaattatttttgactcattttattgttttacagtaattagataggaaatgaactctatttatattcctttttaatcttaatgagtagaagagtagtaatgtttccattcaccaaagcaaatagctgtcagattatttgtatgaggaacacactgtatttcataaatgtgtgtgtacatgtatatgtaaggttgaagttactgtttttataggtcaaaaatggtagaatagtgacaatttcatgtggttaaattaatatgcatatattagtggatttgctgtcttaattaggttttgcttaggtaaatttataaaatatttaaagaataggaaaaaggtctggactagaggaagtttcatctgatgtcaaaacccatattgataactgagggctatgtcttcgacctttaaggtcaagatggtaataagcttcatttgcccaatagcactaatacattctatgttgattgcctggagtactatgttgagaaggattctaaggcccattctgcttggaggaatgtggctatgattgagtaatcatgcctgccatgggtgagggacaggaatagctacatgaaagcagtgtactgctgactttgccttaaagggtgggaacaatctggaaatgggataaggcttatgaatcaacttctctaagaaactaattaaattagattttaatcatgaaaactattagtagttgagaatttgctaatattaatgaggcacaaagaaaataacctttttaaaaaaacagtgcataaaaagacactaacatgactaacatgaataaagccttctatagcctgacacctaagcagaaagttttcttaggttttatattttagcataggaaatatgtcatagattctactttgtgttttagctgcacacttttaaatttatttagcctgtaagggagttatattatgcaatgtgtgacttaaaattttatctagaaaatgtataatgtaa

SEQ ID NO: 35821 - DNA, 1065 bp, Homo sapiens
atgagatctgatggttttataaggagcttcccccttcactgggcactcatttctttctgcttctgccatgtgaagaacatgtttgcttccctttctgccatgattgtaagtttcctcaagtctccccagccttgcagaactgtgagtcaattaaacccctttcatttataaatcacccagtctcggccagcaatttatagcagcgtgagatcagactaatacaagtggtttctgaagtcatgtctcctgaagcttgtggactgggtggaaaaatgaaaatcagcatagtgataaaaggaggaaatggatactgagtagatactaacaatactcagtgcaacattatgttgttataatgaaggttcttactgtgtaaatgataaagttcagcctatctttctttacctgctctattttacatttagtcaatatagagactacattacattaaaaactgtccttgtctgcctagtacttgttcatgagaaatctattttggtttggattaatagattctataattcatattatttatttgctactgtggagctaaatatctcatgtttttgttaaagcagaaagttttgtttttttttttttttagaccctctaatttgatgccttacaggtcaggaagttaggaatttccccatctgattacatgctgttgagtaattccagtaaatgatgctgaatgctccttggaatcattataaaattttgtggtaaacccatttcatcttcatgtcttgttattttaaatatttttagtggtttcttcttaattaattaattaattttttctttttggtatgattagagtgtgagggcttggttcttttcccattaagatagaatctgggaatttattgatttcagatgatcatgttaggcctgattcattcaaaaagatacaatatattacagaattttctggtaaatctttagtctttggtatttaatttaagctgtgtgactctttttgaatttagtgctgtaaagaagccaatgatatattcttttgctacatagcaatgagttgttaaagccatttttagaaattag

SEQ ID NO: 35822 - DNA, 1223 bp, Homo sapiens
tgggaacaggcaaataaagtatcagtatacatggtgatgtacatctgtagcaaagctcttggagaaaatgaagactgaagaaagcaaagcaaaaactgtatagagagatttttcaaaagcagtaatccctcaattttaaaaaaggattgaaaattctaaatgtctttctgtgcatattttttgtgttaggaatcaaaagtattttataaaaggagaaagaacagcctcattttagatgtagtcctgttggattttttatgcctcctcagtaaccagaaatgttttaaaaaactaagtgtttaggatttcaagacaacattatacatggctctgaaatatctgacacaatgtaaacattgcaggcacctgcattttatgttttttttttcaacaaatgtgactaatttgaaacttttatgaacttctgagctgtccccttgcaattcaaccgcagtttgaattaatcatatcaaatcagttttaattttttaaattgtacttcagagtctatatttcaagggcacattttctcactactattttaatacattaaaggactaaataatctttcagagatgctggaaacaaatcatttgctttatatgtttcattagaataccaatgaaacatacaacttgaaaattagtaatagtatttttgaagatcccatttctaattggagatctctttaatttcgatcaacttataatgtgtagtactatattaagtgcacttgagtggaattcaacatttgactaataaaatgagttcatcatgttggcaagtgatgtggcaattatctctggtgacaaaagagtaaaatcaaatatttctgcctgttacaaatatcaaggaagacctgctactatgaaatagatgacattaatctgtcttcactgtttataatacggatggattttttttcaaatcagtgtgtgttttgaggtcttatgtaattgatgacatttgagagaaatggtggctttttttagctacctctttgttcatttaagcaccagtaaagatcatgtctttttatagaagtgtagattttctttgtgactttgctatcgtgcctaaagctctaaatataggtgaatgtgtgatgaatactcagattatttgtctctctatataattagtttggtactaagtttctcaaaaaattattaacacatgaaagacaatctctaaaccagaaaaagaagtagtacaaattttgt

SEQ ID NO: 35823 - DNA, 1095 bp, Homo sapiens
tagacaataaatgtttgaatgttatatttaagtcataatagttaaattaccacataacccagactcttacctcaatcattcctaagttatcatttgctaagttagtactctttagtgttctaatagtaaccaaatttatttagatgatcagatgaaaaaaattttgaatatctttttgatagattatagatgcccagttcatttttactgggtgcgtggtgaagaaattattcctcgtggtcatcgaagaggtcgaattgatgacttgcgataccagatagatgataaaccaaacaaccagattcgaatatccaagcaactcgcagaggtaaggatttattgcgattatgtatctattgatatctcgtgtaggatttgtcataggcaggttgagtaatagtcttagtagaataaaatgtttcaggtggatctcttgcctttcaagtttcctttttgaagacatcacctctcaaaaatctttttagctttttaaatctgctttggtatactccataaaggtcagataaccattttaacaataacgggttaaagtgtcattttgcctgaccatacagatctatatgtttctcttaatataaaaattctgaaatagtttacgattgtaatttgtgattgtaatttactagactagtcataaatcaaggaagtttaacagttatcaactgggccattttacatatttgcagttcttttggagaaaaacaaggatattttgagtattgtctatgctttcatgtcaggggttgacacactttttctgtaaagatctggatagttaatattttgggctgtacaggccgtaagtctctgttgcaagtgttcagctctgctcttaacagtgcaaagcgccatacacaatttataaatgaatatgtgtcggctgtgttccagtaaaactttacttgtaaaaacaggtggcttgctcgatttggcccatcattcgatgatagtattatcaaatcattttgtgaaatcacctcattttaagatttttaaatctaatgagtgtgagtaaaatacatactaatgttgctgtgaatttagtatgtcttttctttttctttaagtttgtgc

SEQ ID NO: 35824 - DNA, 1056 bp, Homo sapiens
ttgaaaaagattaatcatgagattgaggatactagaagggaggaaaatattatttgtgcagaaataaaatatagggttagaatagagatgataaggaaactttgaggtcttcagggattttgttacataaagtatctaagttgtaggaggtatttgataccctctaatgtctaatgtgattgttttgtttgggtaagatatattctatgtgtaaatttcagcataactttcttctacaggattctggagtgaagcagatgttactcgaccttttgtctcccaggctgtgatcacagatggaaaatacttttcctttttctgctaccagctaaatactttggcactgactacacaagctgatcaaaataaccctcgtaaaaatatatgttggggtacacaaagtaagcctctttatgaaacaattgaggataatgatgtgaaaggttttaatgatgatgttctacttcagatagttcactttctactgaatagaccaaaagaagaaaaatcacagctgttggaaaactgaaaaagcatatttgattgagaactgtgggaatatttaaattttactgaaggaacaataatgatgagatttgtaactgtcaactattaaatacattgatttttgagacaaatatttcttatgtcaacctgttattagatctcttactctgctcaaattcatcactgaaagatttaattttagttaccttttgttgatttaaaaataattgcatttgtatattgctaactgataagacaaattgagttattgagctattaaatgcacattttaatataaatgcagaaatcccaaataaaatgctaacatactgaattcagtaattaaaagaacccactgcagctgggtgcaatggctcatgcctgtaatcgcaacactttgggaggccaaggtgggtggatcgcttgagtccagcagtttgagaccagcctgggcaacatggcaaaaccccatctctagtaaaaatacaaaaattagcctgtcctggtggtgcatgcctgtaatcccagctagtctggaggctgaggcac

SEQ ID NO: 35825 - DNA, 1329 bp, Homo sapiens
ctgacctcaggtgatccacccacctcggcctcccaaagtgctgggattacaggtgtgagccactgcacctggcctatttacatcttatttcttagcaacgtttagagtttcttttatctccatgcatttcctgtgtatgcctacatttttgtgtaattggaaatggactttttctttccaattatatacttctttatagtttttaaaagtggctttatataggtgatactgatagctatatatttatcttgtaaaagaccaatttaagttgttcattagagccaataatttgtcagctgattctcatgaggtgtatataaccaatctgatttgcgttcttctgaaactgcttatcaaatagatggccattagcccctaaatggcaaaatccactggacagttttctgtattgtactcagtaaggtctgacatattttgcatgtttgaccgctccttcatttttaaaatagtttttttattgccttcagtgaaacatgctcttggttttcctcctatctcatttgctgttctgtcatatttctgtttgctgttcttcctctcacttttcttcaaatattggtgtacttttttttcttttctagactccatttttgtttaaccacactctccctagatgattttatcaaattccatggatttaaatatatttgtaagcacattcaaaattagtttgatttcaaccttgtgttttgtatctgaatgataagcatcagcattataactaaacagactgtgtggttaagattatggacagtttttccctctagttatctaattttcataattacccccagaacgtgagaacattatttttatgatcagaaagtattttaagaaactagttgagtggactctaatatggaaccatcaacatgtatcaaattccacttaattataagcaaattcattatgaaattatatttaaaaaggcatttcatgattacatttgttatttaagaaaatgttatttaaagaaatttacataagtttcattatacatgtattttagcttactcattctggaaatggaaaacttagatactaggcaagaaggctttagattttttttatgagatattttaatagaccagtacttaggtcttaatatttgtgtttttcaaaaatttatgttaaaatcctaacccccatgactatagtattaggagatagggccttttggaaggtgactggagaggggcagcaccttcaggaatagaattagtgcccttataaaatagacccaagggaactttttcatcccttacaccctgtgagaacatgatgagaaggcaccatgtatgagccaga

SEQ ID NO: 35826 - DNA, 1069 bp, Homo sapiens
tttataatggtaagatgtctgcaatggagagatattggacatgggggaaagtaacaaaacatttaagcaggaactggctttagtgggtaattgggatcagtattgaacctatacagtggaagagtgacatagcttgaatgatatgatttggaggatacaaaggcctcttgaaggaatagtttgtttctgttccataatgtctggggtctcaactggtaaaactcaaatgctgggagtgactccatacctaggggctgggatcatctggagccatcttcattcacaggtctcctattgatactggctcttggctggaatctcagctagggctagttgaccagagaacatacatgtgtcctctccatatggcctgggctttcttataggatggtggtattagggtagttggactttttacatggtggcttaagactccaaaagccaatgcgtaaaaagatctaatgggggttgcaaggccttttctgacttagcctcagaagtttcgtagcatctctattgtaatcaattcgtcaaagcaattacaagcccaccaagatccaagagaaggggtatagaccccacttcttgatggcaggaatatcagagaattttggatgcatgtttaaaccaacataagctacgtgggttgaaagtcaccaaaatcagaaaggcactgtctgtgaaaatcactgcctgtgaaaggaacttagctctaactaaaccgcggctgctgctggcaatccaagtgttgctctagagatttatctgaggttctggctcttgtttcaggaagccctcctgaaacattgataccattacattagcagggacaataaggaccctcacctcaggctcattacaggctttccattaccacctaaaagagagcagcaaaaattaggggcttcctgcaagcttacttgcttgtcatcacatcaatctactaaaatattcaatgtcaaactactcaattatcaatgtatgaaaaaatttttcaggtgtaaacactacttttagtacaattttaaggaatctccttccttaatgtaagtcttgttatataatatgg

SEQ ID NO: 35827 - DNA, 1022 bp, Homo sapiens
actgagaaattatggcagcccatcatatcttctttccaaaactgggattcaatgagtaaatataacactttccaattgacacaaagtaaacaggaaccataattattaagctctcaactgggtgtggtggctcatgcctgtaatcccagaacttttgaaggctgaggcgggaggatcacctgaggtcaggagttcgagaccagcctggccaacatggcgaaaccctgtctctactaaaaatacaaaaattagccagtgtggtggtgcacgcctgtaatcgcagctactcaggaggctgaggcaggagaatcgcttgaacccaggaggcagaggttgcagtgagccgagattgtgacactgcactccagcctgggcaacagagcaaaactccgtttcaaaaaaaacaaacaaacaaactgttaagctctctagacctaaatatgcttatgaaaaacacattttgctgctaaaaaggaatgggacaataacaaaaaaagagaattctagataaaacttgttagaacaatttgtcttgggaaattctgaaatgaaaacctttagtccttgactaaagaggtttccatctttggaaaatataccaaattcaagataggctggaatcgagttgtactgtgcatttgggtcagtatgagagtcttgtgctgataatttgttcctctcctaaacacggaaacgttttattaagtctatccaaaggacttttgcaattttctagtcaaatctcttccacgaagtgtttgataaacagccattgaccctcttcagggtcaatctggaggagtagggaaaggtgggaagtgtgggggagggtttcccatgaagaaagcatctgacctatgtcttagacatagagtagggtgccagtggatggagaaaggaatgaaggacatccctggttagttgaatagcacaacatattgagagagatgattgaaacatattgtgtttgcagaaaatccagtaattttatattgtggggacaaaacttaggaaaagatgta

SEQ ID NO: 35828 - DNA, 1028 bp, Homo sapiens
tgcttgccttttaccttccaccatgattgtaagtttcctgaggcctccccagccttttttctttataaattacccagtctcaagtagctctttatagcagtgtgaaaatggacaaatacaaaattcattaaaatacctccaaatttaatatggaattatgtttacatttaagttatcaatatcaaaagctctatcagttgtcaataaatataactgggaatgtcctagaagtaaatggttaccctttttccttcattgctgcaacaagaaacattgttctggtggaacatttcacaaaattatgaatgttttgaaagaaagaaatatgaaatcccttggattttactaatatacacagttctcataatatacaacttatttaccatgctggagaaatagcaaccataaaaacagctgcaattaaaatgttactaaagcttttgtacaaatggtagattattaaaaacaaaatgttataccgataatttaagggacaatattgagtttctgtatttttccctttaaaggctgtaggtttatgcttgactaatccttttgacagtatccctggcaataatattttttgaagtagttggtgttcaatatttgtaatttcatgtttcccaacagtctgtttttccttgtttatttaaataaaaaactgtaaaacagccacgggaaaatcgaagaaatataaaatctatcacagtttaagtaatgtgtctgtgtcaaagtaaagagttatgtctgaggacacaactgtctcattcagaggactactgtaatttaaagagaatattttattctactgaaagtcatatggattatataaatcctgcatcctgcacctagcaccgaatcccagctgttaacataatatttagctgctagtctaacgctattaacacctaggaggatctcaaaaaatatttattgaatgtataaattctggctacttaacagaaacactgtagatgtgtgtgtgtgtgtgagagagagaaagtgtgtgtgtgtgtgtgtgtaagtgt

SEQ ID NO: 35829 - DNA, 1054 bp, Homo sapiens
agcaattaaattacgtactagttagttgtctctccaaacaaggttatgattaataatatttagctttccatttttatataggatataaaaaagatgaattgttctaggccatgcagtatgtattttatagcatactcttgatcttagatctgtcactaaaaaaacaaatgaatatatgtataaattaatatgagtgttaggtccttgaataagaatgagatatatattttctccccttttggcaatctctatcacagaaatgggccaagttgtcaccacatttagttcatgggaaatttgttttcttttgaaagtgctactctagttttgtcgtatgaaataacaacaatttgtatttaattagtctagtacttcagaataggccttcaactgtttcaactatttggaaaagtcactctaatttttgttatcccagaaaatctttgtattctattaagaactaaaatataatttgccagtccttttattattactattgtttttttaaaactgcaagatatggtcatgagtatctggaaatggctcagaaaattaaaaattatagctaataatattgcattatttctcacatggttacattaagaactcacatgatactaggtgccacaagttttacagaaaaaaaaggcccctaaaacaaatttgaaagagcagtttctcagtgattattaaaagaataatacacttaaaaataattgtgtaatgataatttttaaatataaaagtgatatttaacaaattcagctaaatcacagttctatgaataatttatttcctatgtgaattcattaaacatataactcaatactcatttagtccttgcttagctaagttgaccaaattctcatgtagcaatattagaaatggctttttgttatttggtagtttggcatttagaaaaaaaatttcaaagtaacacttttcatgctatctactggccactccatgctggatttcaagaaaaaaagacaagatttccatacttgacctcttttttttaaatatatgtcagctttggattatttactctatc

SEQ ID NO: 35830 - DNA, 1032 bp, Homo sapiens
ctttcacttgcagtcagacatggagttagtggtagaaggaacagaaggggtaacctgcatggtgacagctactgaggggatggataggaaagcaggctgagtccctggggccagtggttaccaaagccaaggagagagcaagtggagcccagtgggcctggccatggactgctctggaattccgagtgtgaactttcagccaggaatgtattgtgaaagtataactctgaggttttaaaagtacacaaataagaattgtgttttgtaaaaaaaaaaaataaaaaaaaagttagaagaagaaatacgccaaaaagaagaaagtaaaaaatacatgacttctgtcttctgttaacatattaaaatttattcttttagatttttatgtgtctatatacatataaaatatatatgcatccccaaattgtattaatactcttttgagacctcacatttttttcacccaagaatataacattaatttctttcctttagaaaagacatgagactaaagaatgtttattaagttgagagtttcccaattaaggagtatgactctgtataataataaagctaatgttttattagaaattataataaaattagaaatttaatatttggcaggatgtgtgttgcctgcatatgtacaccctttattatatgactggacactcttttgtgtggtcatggatatattggcatcttttgaagtgtatcctttttgtttcaggagcttccgtctagataaatagcacgcgtgacactaataatagtaatggaatattccttaaagcacaggctccttcctctttctcctgagcctttgcacatgctgcctggaaaactcacccacaacctgctttccatcctctcctttggctcatccctgctcagccctctttgttaagatatttgctaagccagattctctgagaagcctttcctggcatcttcgtctgtatgattctgctaggtgtttctaaaaccatgtcgttacagtatattgtaatcgcccatttatgtctgtttgactgt

SEQ ID NO: 35831 - DNA, 1083 bp, Homo sapiens
tggccttatatagatagctttgagtaagtgtgtgttaaatgactgcccaagtgaatggaaaattgagaagggcctccagcactggagtatggaaaggagcactgggttcattgactctttggatttctcccttgctacgtaagtccgttccctaaaggacatggatcttgacagtgttggaatcttcagaaataattgcaataccagaagttatttaagattttaccattttcaaagtatttgtacgtaacactttcatatgtttttgtttcctagctacctcagtttccctgttggcttgagcagattagtgtaaagaggtggtgacatcaggggaaacaggtttactcagccatcttcattaccatattatcactgacttgaggctcctcccacatgcattccttaagaggttattgtgggtcacccaaattatttacagccatctatattatcaatatattgaaacacaagtgtgctctatggaataaatcttaggcttgaatgtgattatatgggcctctgttgaaatgcagattcagatctattgaaagatctgagatgggccaagatgggatggacatatttttaataagctcctaaaagtgagctgatgctgcgggactatggaccatattttgagtatcagtatcaagttgctaggacataagaggtctcggttcagctgaggcctgttggtttctactctgcctgacacattgttgacaggataacatcatcacccactggatgagtaaaagttccattaacttgcaaaaaggatagatagcatgactcatggaacctgtcttcatttaaaattagtgaagtaaactagactaaatagtcatccatttttaaaagtccaaatattaggcattctggtgagaaacattagtctttgatggttcacttgttcaagaaaatagtgggatttaagtcttaaatcattacttgtcctctttcctttataccaaggcccagaagtgccagaatcagcttctggaaaaagtaattgcactggtttaggggtgaaaaggtagtattttttatctgttgctactatgctgaaaagtgaactta

SEQ ID NO: 35832 - DNA, 1060 bp, Homo sapiens
tttttttctggggctaattattgtgctttcattttattacatctttgtgctcctgatgtattttctcagttatttaaaggtgttgaaacaagcaccttccattagttcattacttagtgcacatttttgctgctgttatcatagggagatccagttgcatgtctggtttaatctgaaatataaattgattgtttttgtactttcatggatcttttcttagaatccatctcccactgacttttatctatattttgaggtgagttttgaggcagtggttgcttttgccttagaactttatcagcaatagtagtaaagaagtagtcacatgcttcatgcttcttatttatatctttttttatttagaaggaaaccttttttaaaaaagttttttttctaaattaaataaaccttttttatttagaagaatcagagattagaatgggttcaacacctgatggtctgatggtacttagatcttactgggtcctgctaattctcatttctggtctggtaggaaccttttagagagaaataaggatcagcttgtttttgtgtggatgctcttttgttgtgtgaattgtcttggacttcattctcccttttcaaagtatcaatatttaaatataacagatttagcagtgtaactctggtgtagacttttgaaaaagaacacaatttttgtttctgtgtctgcaacctacatatgtgattgaaaatttttatatctaacaggttctacttttgatgacttattacctagccacagtgtatctgtttctatctgtagctttataactatctgtcaatcatttatccatatctatgtctctatctgtacataaacacatatacatatgtgcctgtgcatacaatcaaatgtgtatatttgaatgctttcctagcctcagcatatattagtgtgtttaactaccttgtggtgaattgtttgttgctactggtcgtctgtaaaatagcatcttgattcctcctctgataaacacaattatgttattatgaaactttcctctctcgttttacctccttagagcttgggaattag

SEQ ID NO: 35833 - DNA, 1032 bp, Homo sapiens
tttataacttacgtgtttgttcttcctttccaacatttatacctgttcttgttggcactggaataatttttaataatagatatgaaagttggcagctttgtcccttttttcaaaattagtgagcatgcttccagttgttttcagaaaggaaattactctttttctcatttaccaagcttttttttaaaaaaaatgaatattaaatctttatcaaactattgtttggcatctgttgaggtgtcatatctactttttcctttaaacaataaagtaacaaattgtattagcaaataactcaatgttgagctatgagaattatgtgttttgtcatatactttagcattaaagaccttaagttgctgaatgaattaaacaactctttgagcatttgctagaacttgcaaacaaatctgtctgagctttttagggatggttctgggtcagttgtcttatttttctgccatgattattatctcttctgtttttctgtttcttagtcattttaaaatatgtcttcttactgaaagtttctatgttggtgaaatgtccaaactttttagcaaaagtatagtatttggtccgtaattgtaaaattcttccatgtctctggttatttctcctggcccatttttattgttcatatttgttcttgttcttccgtccgttggtttgtcttccaaatagtttagccatttaaaagattctttcaaacaaatagctctctttaatgttgcattcaatttctaaatgcagtaatcttgatactacatttatgaattctttctaataatataccttaggcttcccctctgcctacttttcctggattatttggatcagttattaagtaatcatctaagtttgaacatatgaaattttctttgctctatgaaaatatatcagtattatcctccaaagtcaagattacatcattctagcttatgtccctaggaacagatttgtccttttataattgtgatctattaattaacttgtaccatctattgaaatttatttcatacttttagtgaa

SEQ ID NO: 35834 - DNA, 1053 bp, Homo sapiens
ctgctgaaattagattaaaaaatgtttggaaattcagtcaaatgaagtatctaaagtcatatcagtgttttgaattttttccccttaacccttttcacttgtaatagttttgatccagtttaaatcttaatgaatgtaagccatgttcctgcctgctctagattttctctagctgtagaggatatttccaaaataaatatcttcctagagtcttcatggtacaaaggtgaatcacagcaggactagtttgatttacttaaatgggaatgaatttactgtctagtttcaaatacttaggcttggattcaagggaaaagaggtgggtagttaggcagaaggtcttgaaatcatcttccttgcaaagttctaagtctgttgaaaacagactgttctaattagctgttcttttacctaattggggcttacaagaacttaatgaagtttgaagagcaaaagtaactcaatatgcacaacaggctattaggagtaatttttttttttaaagcaacgtctaatgagaaaggcagctaaccacatctaagttctctgtaagagatggaagtaactgagattgcctaggcaaaatcctgagattattgaggcaaaatcctcttaaagaaggctgaaagaaggtgtagaaaaagtgagtgatgatagatatattacttaagtaggtaatgacaattctacctcaccattctatccaaaagcctactactggctgttgaatcatacatgtaaacattgatgataattctgatttatagtcttttgtataggaagtgagttaggtcttggggcaacatgaactttgcgatcagtctgaataagtctcatcttgaatcattcaacaaaacgcattttatgtttttcattgtaaatgtacctccctatatatttatgaaaataaaattgatcagtgtcattggaaaataaattgaaattagtatttttagaaagggaattacagatcagaaaattcatatttgtttaggaaagaaatgattctgatagtttctttgtgaaatttaaaacttccatttaatataaaat

SEQ ID NO: 35835 - DNA, 1085 bp, Homo sapiens
ccctctggttgctcagaccataatctttggattcatccttaactcttcttttttttcatacctcaaatccagtccacccgcaaaatctgtccactctcctagaagtgtgaatccaaaatgttcatcacctccacggacgaagttctatatatcttgcttcacttgttgcaataagttcctgactgattttcctgtttttccctttgctctttgaccagttgatcctgcagagctcaccaggttccttccctgctctcatctcctgacatgagaccttgttcagtcctctccctacactgttctccaagctgttcctaggatatttcagcatattttctcttcaggggctttgcctttgttctttgctctggctgggacatttttttcctgcttgttcttatctaacatttaaacctcagcccacatagcctgcagcccatatatttttccccatctttatttttctccagagcctttattgccatctagcattgtatctatttttctatctgtttttcatcttcctcctcttactggacttcagacttcatgggtgcagggatattcgtgggtgtgtttttactcttccatctgaaatgactggagcgatgagtgcaagagatactctttaaaccagtgaataatgaaaaatgagcgacttttttgagagaagttattaatttaattaatatagttactgatttaaagaaatatatgtatatatgtatttttatatatttagttaccgatttaaacatatatttttatatatttagttacatatttagtttagtatttttatacatttagttaccgatttaaacatatatatgttagtatatatgtatatatgttatatgtacatacatacatatatatacacacacatatatacacatatatatatacctggtaaaagtacgaaccacgtgaaaaggaaatctcctgtgccttctcatctcccattgttttattctaaaaatgatgtatgtagatgcaaacatgttgtctttcttccacttaaaaaataatgcactaactgtcctacatgtggccagttcagctgttgcttactttggagatca

SEQ ID NO: 35836 - DNA, 1066 bp, Homo sapiens
tgaactgctgaactctgctagagaaaaccatgtggttatgtgaataacagttcctgcaaagctgggcttctgtctttgatacttggcaatcgttctatgtgtccttgactaatagactttctcatttcccacatcaacatgtgatatgagaattatgatctcattctcttctcctgtcatgtgaaatgtcctgggttacttgctctgagtggtttgacaaggcatgagattccagtctgctgattcccaaatatgtttgcacatgtctgtcacccacttagagtaatgctcattcttactgaagcaaagccaactgagaaacctgagaatctatatttttgtgtatccggcattaagcagatgtttgtaactaaggttcttattttccaagtgaaattaagaacacccagttataatttggtccagttttaggtgttaaccaaaaaatgactgaggcaggtctcagtcgataaagatttatttagccacggttgaggatgggagatccagggagatcaaaaatgcgtctgtgacccttttccaaaagggattttgggaacttcagtatttaaaggggaaagagcaagcaggagggaagaagaggaagggcaggcagtgaggcaaatggttacattcttatgaggttctgattagcctcagtaaatctacattttatatgtgaaaagagggagtagaggaaaaagttacgtattaatcacagggtaggcacaaggatgtctctggtcttggtccttgctctcgccctgtgaagataagctaataattgacattgtcaggatgagattcagcagaacttggttttagggctagtttacagtgggtatgtctcctgaaagatttaggggcttcaaggaatttccttgtgagggaggccatctggggagatgtgtgaccttctattgttgtggaaacctgtctcatgggtgaggctatgacacggagctgtgaaattacagctatccgtttgggaacaaaaggaaagcagtatggcctgactcagttcccaaacttaactttccctttggcatagtgagtttgggagtcc

SEQ ID NO: 35837 - DNA, 1066 bp, Homo sapiens
ataattaagaatgggcagagggattggtataaactactcctaaagttttagaactgggaaaaataagaagagaaagtctttacttagctgggattttcatgagataatgaaataaaaagagaatgttaaatgtctagcaaatttatggagtaaacttcgctgaaacatatgaagccttactagcgcttttggctttaagcctttgtgagctgattaatgggtgttctaggagattattttgcctaacttttgtaattgtgattctaggtacatgcctcctccggacacaagtactccctgaaagaggccctttgtgaccctactgtggctagccgcctttcagacactaaagctgctggggaagtcaaagccttggatgacttctataaaatgttacagcatgaaccggatcgagctttctatggactcaagcaggtggagaaggccaatgaagccatggcaattgacacattgctcatcagcgatgagctcttcaggcatcaggatgtagccacacggagccggtatgtgaggctggtggacagtgtgaaagagaatgcaggcaccgttaggatattctctagtcttcacgtttctggggaacagctcagccagttgactggggtagctgccattctccgcttccctgttcccgaactttctgaccaagagggtgattccagttctgaagaggattaatgattgaaacttaaaattgagacaatcttgtgtttcctaaactgttacagtacatttctcagcatccttgtgacagaaagctgcaagaatggcactttttgattcatacagggatttcttatgtctttggctacactagatattttgtgattggcaagacatgtatttaaacaataaactaaaaggaaataatctccacgtactaccatcttgattaaattgtgtaattttttataggaattatgagttatctgtagtacttggaaacagaaaatgtgtgtatttaaagacgatgcctatgcagtatattgtttgggatagattgcaaaatttcacactgcatgctttgaaacagttttccttagaa

SEQ ID NO: 35838 - DNA, 1027 bp, Homo sapiens
gaatttctgcttccaaatcactgggatgcttgaactataccccagattttcaaaatcagaatctctgagggtggggctataagcctgcattatatataagcaacccatatgattcttttctgtttgtttgtttttttgacaaggagtttcactcttgctacccaggctggagtgcaatggtacgatcttggctcactgcagcctccaccttctgggttcaagcaattctcgtgcctcagccttctgagtagctgggattacaggcatgtgctaccatgcccaactaatttttgtatttttagtagagatagggtttcgccatgttggccaggctggtcttgaactcccgaccacagatgatccgcctgcctcggcctcccaaggtgctgggattacaggcttgagccactgtgcctggccccatatgattcttaaacagattaaagtttgagaaacactggactaaggcataattattatattagtgtgcgtgagtgtgtgtctgtctatctgtgtttgctgcatactgtagataataggcacctcaagagcaaagtctgcatcatcttcttatcttcgtcagtggccagcccagtggtttactgtggcacagtaagtcctcaatgagcacttgttgagtaaatgtttgtatcatattgagtccagttttgtatttttctctgattattggacatttaatgagtcttttttctataactggtattttaaaaattattttaagtatattactttatactttattctctagtattcagtcttttctaatctttttttttctattttggcttatgttttatcagtgactaaattcataaataattctctaaaatgaagagattggaaaggacatatttaccaagccattgcttttgctaaataacatttaatagggttttaagtataatgcatgtgaactctttttaaagtttgatcatctttcagtggattcagaaaagaaatcctgtcatagaaaatttggaaagacatttccttttcaaagaaaata

SEQ ID NO: 35839 - DNA, 1026 bp, Homo sapiens
acagtgaactcagagaccagttctatagagttcctcaaggttatcttcatgactgctaatatcattgttataacagtgtggatatgctgaacaatagaatcttttttgattgattgccaaagagatttttctataatgctaatttaataatctgtacaatatgagaatcacttcaaataaacatttccatcaattattttttaaaatttttgtagatttgcagtaccgtgtcaccctagattcactaagacaaatatcacgaagttttttctctggaactcaagagagaaaggttcaaaggaacatcacagttcgaaaatcagaatgcactaagcactccttctacatgttggcaagtaaatcatatatcgttgctgccttattccaaatcaagaatacagtagagatgtcttatttcaagtcaatcaaattcttactgttttatttcaaaatgcacttatgatgtcataaaggaaatcttgtttgttcatttttatcataaaatcgcaggtctaattttctcatttccaaatatttgtaaaactatctctagtcttccctgtctgcattatcagacatccatatattatggaacggcaggaaaagacacagtgttctagttgacaagaaaccttattcatgtcttcatttctttcactcattcatttattccttcaacttgaaaacatttaatttctgtgggccttgtctgtcagttgtggttggtaagtgattaactgctctgggggcagactgctgggctgtatgctttctgggatccatgtaactacatatctcgccgtttgattttagagcgaaggggaaaattatctggtattttctatcatctgtaggctttgtgctacttcagttttttttttttttaattttagtggatgagggagttttggaaatcaaactattaatgtttagagatggctggtaagccagtgtgaatcatttaaaatgtattttgttgggacactgtgtatatggggaatgttcccaacagagggcaggagtttc

SEQ ID NO: 35840 - DNA, 1038 bp, Homo sapiens
atgaaactacattactatatcattatcaaccaaaatccatagtttacattagggttcactcttggtgttgttaaaatccacgctgtggaatttgacaaatgtaaaatgacatgtatccaccactatagtatcatacagtgtatattcactgccctacacatcatatgtgctctgcttattcatcctgcccgccccactagcccttggaaccactgatcctttttctgtcaacttgtttaaaaacctagggagtctataattaggtttaatgacaaattgtagtacattttgtgcatgtttactaatttatttaactagtacattgttgctaaacaagttacagttttggggggggttggtttttaggtttttttactcttagaaatagtagtgcaataaacaggcttggggtactttgttccacatattgctgattatctcctgaggctatctatacagacaggaaatggatggggtaaagagtgtgcacttggtacattttgagatatagtcccacaatcccttgaaggagggcgggagagttagaactactaatagctcatgagattgcctgtttccctaggtgtgtcccagcactgagttttatctagctttaaaattttagcatttattttttaactcttactaacttgctctctcttttacctttgactcaatactataagaactgcagaactgcttcctgtagtaatgttacctgctggttgaaagacgttcacatgaaaggagaatactttgttaatgtgactaccagaatttggaacgggactttcgcatcagtaagtatcagttttatttgttagatttatcaatagcaaggaaacataagtctgcactgacaagttcttcccctttgacaaaataagtattctggctaatgtctgcaatggccaaataacccagagcattttaccctgaaaggcagcacacttccatcgctttccaatgcccatccaatttagcagtgcctcagagtcatctgggatacttgtgaaagggtctgtttctcagactcca

SEQ ID NO: 35841 - DNA, 1033 bp, Homo sapiens
acccaatacaaagctgctgtttcatcaccatgaagttgggttaaagagtttcttcgactcccttccccaaagctgtttgctttcacttgatgatgctttcacttgatttgaatgtatgccagaaatggaagtttctatttcataagtaagataagcatctgagattgtcaggcatgatgtagccacaagacactgatgtagttaaagcggagaaactagaaaagttgtattttttagctggttggactttgcaggaagattttctctaaaattattctgacaatgtttgagatacgccatcatgagcaagtcttgtcacctttctagagctgtagaccttcacttacagaattagagaattggactagaccatctccccccttttttgtggtattaaaataactcaactgtgaactgacatttccagattcccctgatgataatgaaacctgatgagaaagccgaagtaccaacaggagttataataggaagtataattgctggaatccttttgctgttagctctggttgcaattttatggaaggtaagaaaagctttatattttaaaatacagggctcctgaaggccagccttgaatttgcttacaaaacatcaacttcaggttttatatggtaccttctctatcacaaggagaaaagaaatgcaaatttgtttataatttcttactcatgtcattaaaaacaaccagtaaggatttttcttcttttaaaccttcctttcatccagagccctgaatgttttgttcagcttcaaataagtagacgctgaaaaatgtagctttatgcaatgcagctgagctctctggatataaatttccttctagcaggtggtagatatcaggtcatcagtctgcacacctcccttcagagcctcagggattcccagaggtgcatcagaggacgtgggcagccaagggggtcagaggcaccttacaaaataagccacgggtggtaacattcttatatcatcacctttacagctcggcttcttcaaaagaaaatatgaaaagatg

SEQ ID NO: 35842 - DNA, 1038 bp, Homo sapiens
atacttatccatttatttcagttcagggtcaagagtggccagagccagccctgatagctcagagcacaggacaggaaccagccctggacaggatgccatcacattgcagggcacactcaaacatacccacactcactcagaccgtggccatgtatacatgccagttcagctcacatgtacatccttcggatgtgggaggaaactggagtacacagagaaaacccatgtgaacatgaggagaatgtgcaaactccacacagatagtatccctggccgggaattaatttcgttttttctttttcatcaacatataacaaaatgaccttgaacaagctgatattattcaaagacctgctgtacttactatgcttcatcatgatggcctgtttacttgtctgtgtttctctttagacttaagttcttcaagatcaagaactgtttcttcacctgtttgtttttacaggctaacacagtacttagcgtgtaatagatacttcatataatagatacttggtaaacatctgtggactcatttgattatggaatcatatagaaatttaaaactaatgcacagcagcatctccataagcagtatagcatatattttttttgagtcggagtctcgctctgtcacccaggttgaagtacagtggcacgatctcggctcactgcaagctctgcctctcagcctcctgagtagctgggagtacaggcgcccgccaccacgcctggctaattttttgtatttttagtagagatgggctttcactgtgttagccaggatggtctcgatttcctgacctcatgatccgcccgcctcggcctcccaaagtgctgggattgcaggtgtgagccactgcacccggccttatatatttttttcttatgaaataactgtttgggttttcaatatagccatcatggacaatgtcagagattaccaaaaaatgatgacttttatagctttatgatgcttcttatttcatactattgaataatactattgcaaactttatcttacggcaatatttactaaaa

SEQ ID NO: 35843 - DNA, 1063 bp, Homo sapiens
cattttatttcttcatatgtatgaagaaataactagcaagcaactagcaaacaactagcaagaccagcaacaaatgagtaataatgttttgtgaatcagtaacaaacagaattttggcagccatcacttataaaatattttagagtgtggtctgttactttacatgcaactttatatttatgcttcaatagcatacattttgtaatgtttccaaaacttctgatagaaatgagtaattgtatatgtgtgcttttcattttatatctggtttaccattatcagtgtttcttaactaccccctttattattgtacagtattttatcactcaactttgagcctgtaagcccaatctaagtaataggtcacacttaaatttctatttgcaccattaaagatacagacaaataaatgtataagtaaatagagacagtttggaaaattcacatcttgtgctgactggttttattttaaaattatctcttcagtttacctactgacattgtcatcatcctgatctaggttacatcatctttcacctagatttctacagtagtctttgacctgatctccctagactctttaatcctaatctgattaattttccttaggatgccaaaatagtctttgaaatgctggtattgtcaccctcttttcgtcctttggtgcttcctgttgcccttagagtaaacactaaaatcctaacatggtctttgacgtcttgcctgatttagctcctgccttcctctctaggtttatcttgtaccactgtgttttacattctgtggtctagccacaccaagcctggaacttgctactctttttcctgcttcaaggcatttggagttcctgttcactctacctggatgcattttaactaatcctgaggacttcatccggtcaccatctacctattcttcaaatggtaatcaaacaccacttgcttagtcaagtataaaagaaatgaggggcagggcatggtggctcatgcctgtaatcccagcactttgggaggctgaggcgggtggatcacgaggtcaggagttcgtgaccagcttgaccaac

SEQ ID NO: 35844 - DNA, 1062 bp, Homo sapiens
tacagaaggcacagatatggaggcctgactgtagatcagaccagaatgtcactatggttttccagctgaaatcaattggttattatctttggtacatggcagacattttcttgaaaatgaacctgtcacttcaaggaggtgttgcccatgatacacttcaagcgcagtgatagtttttcaaccgttgtgcccatctctccttcccagaacggtctttaaatactagaaagatgtcaagctcaatcacatccatggcagaattaagttctataaaaattctaacattgtgtactatgctcaatacttggttgatgggatttatctgccacaaatctcagcatcacaaaatatacccaggtaacaaacatgcacatgtacctcttgaatctaaaattaaaaattgaaattctgtaaaaaaaagaaaaaaaagactgttctagtgggattggtaatgacactaacggatgtgatttttgatactgtgtaatgcaatatattaacgtttggaatatctatatacctctatgaactagtatttttcgtatgaccagtgcatgatataaaatcatgcatgggtaaaagtttcctttaaagtacaaaatagagcaatggattttaagtaatcaagtatgaaaatattaaggctatgaatattttgctcctttttctaactacatatctgtatgataatgagttttcttcatatattgcaataaaaacaatccaccaaaacagtttgaatgcaagaacagatgttagaattcagctgtcctccattaagctagatagtagattttcaaacgagtgccaaaatgcaaatgagtgccactcttctcacttttcagttttcaaaaatagagttttttaaattaaaatctttatattattacataactggcttattttacattaaatttatattgttttcttcattttaatttattatgtgatagatatttatggatatacaggcatactttgaagatattgctggtttggttccagaccaccacagttaagcaaatgccacaataaagtgagtcatgaaattttgttttggct

SEQ ID NO: 35845 - DNA, 1034 bp, Homo sapiens
agcaataaggctgtctctttagccttcttatcattcatgtgttcactggaatagcatttttaattttcctcaataacttttcctttgcattcacaacttggctgtttggtgcaagaggcctggcttttggtctgtctaggtttttgacatgccttcttcacctagcttaatcatttctaaatttttacttaaagtgagagacatgagactcttcctttcacttgaactcttattgttgggttattaactggcctaatttcaatattgttgtctcagtgaatagagaggcccaaggaaagggtgaggtacgaggaaatggcttgtcagtggaggacacacacaacctttattaatttagtttgctatctaatatggacgcagtttgtggcaccccaaaacaattacaatagtaacatcaaagatcacggatcacagagcaccataacacatacaatgcaaaagtttgaaatattgggagaattgtcaaaatgtgacacaaagacttgaaatgagcacacaccagtagacctcaacagagggttgccagaatccttaaatttgaaaaaacaaaaacataaaaaaacaaaaaaaaagaagcaccattaatctgtgaagcacagtaaagcaaagttcataaaatgaggtatgcctgtatcttttataaacaaaaccttggagtcccagtagtttttaacagtataaaggaatctcaacatcaaaaagcttgcgaatcattctcctaagtcttctcttttctgggttaaacatcgccagggctttgatttatttcatatgagttccagttaattaatcatcttgattgccatccagtttgaatctcttttaaaatgtttttgccagaatttttcatactacagatgtggtgcaggttgtggtggggattattgcctttattccttttaatcatcgcagttctagtaaggcaactttaaatttaggttgtcatacttatgtggatttcatggagagctaaaacctcagattctctcttttgtgtgctgttatcaagtcgt

SEQ ID NO: 35846 - DNA, 1030 bp, Homo sapiens
aagataaccttaagttaaaggcttacttttgctttgactgtttactttttttttccccctctaaggggtcagttttcttttggtgagattactttcttttggtgtatggcagtgctatctctgctagattactggaaggagtagtgtctgcgattggggttatacagctttctagcatctcaagtgtctgttttgtctggactttactcacgcagcattcttgtgcaaaaatttcaaggctttagtctggagcactgggtcaaaggatatgtctctttgaagggtagacaggagttttttatgttttattcactaagtagtatttcattttacatcaaagaatagcagcctttgagaacctaccatggtggcagtttagcgtgtgggtttttttctttaagactttcactaaatatgtataatgtttcttcaagtgtttcatcctacaaaatgcctatttttattcttagatgaaacttctaatataaaaagagaagaatcatgactaaatataaatgtttgttgcaataaattttgttttaaaagcaactatagtttttttttttttacaatgtatttccctgtgtcagtttttacactacccacaagctattgaaaaaaaaaaaaatggatgaatagcctttaagattgcagcaatactgttgcttaaaattctaaggaagcagtaatgactagtgattttggaagtgtagatttcatagtgaaatggtcattccttaattgttccttttttagtactgtcatgtgtgtatgtaggagagattgattttgaaaaataccagactcaagtaatggaaaatgttaagacttcttgaagctagaaggaaagctcttctttttgtactttttgtgtaagttaatcagtaaataatcatataaaaagtgattgctttacatgtttggaagattattacattgtatttcatatttttgtctcatgacatgtatctataaacatgaactaatattaaaagttttttatgtttataaataaaacatgctcttaaat

SEQ ID NO: 35847 - DNA, 1051 bp, Homo sapiens
ttatggtgcaaacttttcttggaacaaaagaacaagagtatccacaaaataggttggcactgactatatctctgcttgactgtgaataaagtcagctgtgcagtatttatagtccatgtataataaatacatctcttaatctcctaataaattggacctttaaactacagatacattttgtggtgtctattttaaatgttttttgatgtctcaaattgagcatgtttcaatttcctatatagagagaagatttgaggtgatcatacctctgggaaatcttggtacttttagaatctattaattaacaggaatgcttgaaatcaactgcaacattgaagttttatatttgctttttatagccattctcaagttaatatggtttataaatcaccagccaacattattaaaatgttgtcttagaaatggttttatcataggtagagaagtacacgataacattgcagtcttataaacttaaacccctatgtcgtcattattaaattaatttaattacaactttataatttacgaaggtactttgagcctgaatgaattgcatttcatagtaatctctgcccagaaatcaacacttcatgattatgaggagttcaggtgaagatttcatgttcttaggaattaagactcagagaaaataaaaatcagttcattcacggggatttgtaatattcactgttttttttttttttttaaatataagtagatagatatatgcttttattgttaatcaatcaatcatttaggtcatacattatgagttaaacaaacacatgctttgtttttggctattcaaagaaaagaacactttgtatactaaccctcataataaccctattagcaggaactattattttacccattttgcaaagaaaagacaaaaatcaaggctgaaaatgattaaatagcctgctcaagatcacacaggtcatgtgctgtggctcatgcctgtaatcccagctatgcagaaaactgaggtgggaaaatcacttgaagccaggagttcgagaccagcatgagcaacatagcaagacgc

SEQ ID NO: 35848 - DNA, 1019 bp, Homo sapiens
ttatatggttccaaacataataaatgagcacttgagctagaaagtagtataatgttcacaggtggtaaagaggtataatgaaaaaactatacttcacaaaaattagtggtgttcagtgggttggagagaagaccaattagaaggttatctgtggaattacaacaacccagtgaattgagctgatggagagagatgctcctcccactaccaacactcaaacataaggcaaaaatatttataggtgatgagtaatgatgaaaaaacaaaagaacaaatgatagatgacatgaagaatgggagtagggaagaccatatttaagactctgaggtcattaaatgatgtaacatgtttactagcccaaaaatatatactaaaagagtagaaagaaaacaaaaaatttccaaatcagtagcaaggatcaagaaaacaatccaaatggaaggaaagaacaatgtcccttggaacataacaatagaacataatatgaacagtacctccttctatgtagtgtagatattaaacatagggtgggaagtacacatatcaatttcaaaatagtggtttaatctgaaattgttaaacagagagggagggaagcaatagaactgagagagcgttcaaaagccttttgttgtatctgtagagtcttttatttcttaaaaatacaatcgtataccacatgataacattttggccaatggactacacatatgacatggtcccataagattatagtactgtctttttactgtaccttttctatgtttagatatatttacatatacaaataccactgttaaattgcctacagtattcagcacagtaacatgctgtgcaggattgtagcctaggagcaatgggctacaccatgtggcctaggtgtgtcgtaggctctactattttggtttgtataagtacactctatgatgttcacacaatgatgaaatcacctaacgatgcatttctcagaataagtttctgttgttaagcaacccatgattgtatctgaagcaaatat

SEQ ID NO: 35849 - DNA, 1101 bp, Homo sapiens
caccttggtctcccaaagtgctgggattacaggcatgagccactgtgcccaggcaatggcttctttaaaatgctatttatctctcctatttaagtgcccctctctatatttaaatagtagtcctgctggtacccacctcatgcaacttagattactggatttgtatagttttaccctttaaaaatctattttgtaacttgctatactctcctagaatactatgcggattaagttcttaatgtgataaatattctattatatacatattcatttctcttccaagtgatttccttgtcttagggacccattagttacttgctattcaatgggtatcaatatattgtgaaaattaatctttagtaaattttcatttaggttttgtttgattgtttattcttttaggtttgattgctgatttacttctctgaattttagattcttctgtagtttctgacctccaggcaaaggtggatgaatggagttctgatatattagtgagataaagggctcaatagaattcatccaagagacacagctgctccagggagagccaccatcattagcaataaggaaagtaagagtacaaggctcctttgctagaacaactgggtgcttctttctttttttttttccctcttctcttcctgacctccatattctaactttacaagtgatttttttttcttttccaaagtaaaggatgagaacagaagattctttctacttccatatccaggaactgaaactcactatatttatccccaaacacctccttccattcttctcccagattggctaatgtccacatttatatgcttaatgtttcctatagctactacacatttgatcacttccaacatgaaacattggaacaaccctgaatatcactgccataaagatagccacagagattggttactgcttggtgtttgccttatttgaacacagtttgaacacttagcagtctgagtggttgcagtatggcttctgggattggccaaaactcagctgttgttacaggtgcatacaactaagttaggttttcaattttgtctgattattaagctaggttacagttcatccacaaggactcaaatatag

SEQ ID NO: 35850 - DNA, 1045 bp, Homo sapiens
atcagttcgccctgtattgcacaccggaagtaatggcaactgggataaatgtagatgttgtttggagtcaatcgtttgttgttgttcacattgaagagtgtatgtaaactgtctcctcctggctcccctctaacccaaatcacgtgttctggtgcagatcacttaatgtttctgagcttcagtttcctcatctgtaaaagtgaggttcattatttcctaggtactattttgttagttgacttttttaaaaaaataagagtagtcttaagtatccaggaaacttttagacattgtttcaggctgattttaatagtgttctctgtctacttatgtgactgttttacgggagcatgaaaagcccttatcagttgatgtgaaagaacatttatgcacgtttagttcagatcagcaatcacgcattgcaggcttacctcactaggaacttcgaatgtaaaagtgattaatacctggcctgctgctgcctggtgagggttcccgggtgttctgaagctgtggtatggtagacagctggagcgacttctctctgacccaaattaataggactaccaaagagataaattatgacagttttttaaagatggagtcttgctctgtcacctaggctgcagtgcagtgatgcgatctcggctcactgcaacctctgcctcgcgagttcaaatgattctcctgcctcagccgcccgagtaactgggattacaggcatgtgccaccatgcttggctaacttttttattttttttagtagagacggggtttcactatattggccaggctggtcttgaactcctgacctcaagcaatctacccaccttggccttccaaagtgctgggattacaggtgtgagccaccgtgcccagcctctgatattgatcttatagcttgattaaactttaatttgaatgagttttagttcacttgtcatttctgtaccttttcttatgacttatctgtcactgtgatttgactttcctcttctgctaaataaattgttatttagcaggtaaggggacagtgaaggaagggg

SEQ ID NO: 35851 - DNA, 1775 bp, Homo sapiens
tagtactgtgttctcagactgccaagccaggcactctagctgtttgtctctgtgttctgtcttgcctttcagtatggtttagtggaatgagtgctaggcacagtcgggaaatctgaattcttaagctggctttgttcaagtgatttgagctttattactactcattcctaagaactcaggaatagcctatttcctacccctaaacatcctcaaacttttgtgtctttgtatgactgtgctttcgggggagggcctgcgttcgtatggcacctgccggagtggtcaatccttcacccccacccctgcaacaccctctgttgatacttctaggcatgagattatggaaccgctggcatcattcctaagtcatcattagggcagagttaacactcaccgatccttatagtcccaaaaaaggggcaaattcttattaaagcccttgtactccaggtgtgggtctcccgatgcaacgtgaagtcagaatcagacatgtgttcgcaattcaccccttcaccaggcactttctgtgtgctgagcacttcagctaggtgtttactctggatgacaagataatgggctaggccagccctcatgagggtgacctccaattgtagactggcaacattgccaagcaccctccatgactgtgacatgattccaaaacacaacctgtgttggtactaacttgtttcagagactggttctagagtctgaattatttagtgagactttctgaggaagtgggtttggatcctttatgggatgtttttataaacagtataattctcttaatatatgtggaaataatgatgtcacaccttttgagcctgtgaaaactgcagtttcttgttgtgtctttttaaggacatttccttgcagtttattatcagttatgtatagcatctctacttggaagagatgggatactacagattcttggtcaatgtaacaaacactagtttttgaagagaaattttaacaaagggagtgttttcagaaactttaccagattccttctttttttaaaatgagtaattatggtcctcactttaaatttcaaaggtattgaaaatagtttgggcaactatttataatgcccaagattctgtttaatatgtagttatgttcttgggatatgtggatatataggtttttaattaattgttatttttaactacaggagctcttaccaaagtcaaggagagtaggcgacacgtggaggaagggaagatggaggtgcagaaggctgacggcattcaggatcgctgtaacactatttcttttgccactttggctgaaattcaccacttccatcaaattcgagtgagagactttaaatcacagatgcagcatttcttacaacaacaaataatatttttccaaaaagttacccagaagttggaagaagctcttcacaaatatgatagtgtttaatgactggacgttggattatggactttttcagttcaaggataatttctacagcagaataaaaactgctgtcaaagagctattgccagctatcagtggtggtacaaggacggttttgtgttcatctgaaacccagctgaatttataattatgtaggaaataaacagttaatatggttatataatagaaacagtaccacacattgtaactaaattatactatgtatgcctacactaccattgtaacttttggaataatgattatactatttgccttattgctttttgaagtatgggtattttagtgcatactttgtagacctcaaaacccatgaagggtctcaa

SEQ ID NO: 35852 - DNA, 1028 bp, Homo sapiens
agtggggaaggtccagatcttagagggtcctacgggctgctctgaggactttggctttttctctgaatgagatgtggggctcccaggggcgttgagcaggaaagaacatgatctgcctcgtgtgacaagggcactttgggcaaaggcagaagcagagaccacattggaggcttcgtgataaacgagacatggtggcccacaccaagacactggcagtggaggctggggacctggtggccaccatgtccccagtatagagcttggcaagcacagcaacaggtcggggagctgatggccaccatgtccccagtcttggcaagcacagcaacaggtccctcctctgtattctgtgcgtccacagcagacagccacctgcttttgatcaataatttccagtttaattaacaatcatcttggtgtgatgcaagggacattctccttagagtgactcttattatctattaagtactattttatgagttagctctcagataataattttatttatagattcttggggccacctcactgctgtcccgagatgtaacagattgactgaggtcagacgcagaaaactgccttctaagtttctgggtgcacacatctgtatgtcagcagtagattagcagccatcctggttatggcctgagaaccttgtctctctcagtgcaattacatctgcctggttcccataggggctgcctctgattagctctagcatctccaacgtgggggttgaggcccagtggttgcctctccatgcactctggggaccttataactgcccagtcagggtgctgctacatgacatttgcaaactgaatcagcaaactttagcacactgttcacaattcttttggattccttcccatgccctaatgtgcaaacactggattcgctgttctgcatggctgggcctccgtggagctcccatgctctgcctgctcaccagggctctgctgctcttttaccaccagattgcccttggcaaggcttgtattgaacctttcttctgcttccatttgttc

SEQ ID NO: 35853 - DNA, 1124 bp, Homo sapiens
tttctctcttaataaaacttgcttttactttgcacttcagactcaccctgaattctttcttgcgcgagatccaagaactctcccttgagatctggattgggacccctttcctgtaacaagcctctggagtagctgggattacagtcgtgagccactgcacccggcctcaaattgcatgttctgggaagaggcagtttgctttttcctggggctttgagtatcccctgatgcattgcccatcctctcaggggtacaaataccatgatttgagaaatcagaatacaagaagtagcagagatgaagataaagaggtaggtagagctgggatcatgagggctgtcgggtgtcaggctaagggatttggattaaattcctttagaaatgggacaccccacagaagacacatcaggaagattctgaaaagccacacttcaggaagagtattgtggcagtaggcctgggactgagcaagactagacacaggaaaagcaggtaagagatattgtagtgcatctggtagactcagtgcagctgtaagtgacaggcaaaatagcagcttaaacaaaatagatttttattatttacttaagagttaaggagtagctcggaagtcagcagtccagtgcaggaaaggtggcccatatccacttagcattatcctgttaccaatggctacacagcagaccacccacattcagaagctgaaagcaattgcaatcattttcccatgaatctacaatgtaggcagggcacagtgggagcaactcatctctgctccctatggcatcagcttaagtggcccaaaggctgctgagaactcgaccagacaactggtgtgtggaattacctacaggcttgactacttgcacacctgatggtgaatgctggctgtcacctgggacctcacaaggctgtgattggaaatatgtctgggcagctgctccatgaggctgccctacttcctcacagcatagtggctgggcgctaagaggagaatctcaagaagtaggaagcagaagctgcccatttcttaacacttagatcccggagtgggcaaagcatcacatttggccaagtaatcacagtgcctatattcaggggttggcaaagaccccagctcccaa

SEQ ID NO: 35854 - DNA, 1031 bp, Homo sapiens
catcctcatcctgtgaagtttcagtctgacaatcaaagtgcaaactgtgatggatggtatagtttttctgaaatgatactgcatcctagaaatacaattaaggaggaacagcttttccagtgctggctccacttggtcagtgcagtttcgcctttgtggttgtggagtccatcccagctgtggaccgcaaataaccctgtacgaagaggaatggagattgcctctatccacctagattcataagctgccctgaggcgatcttggcatcaaggaagggagcattgaggcacatcgcaccatcagcttcagaggatggcagccattgatttgtcccgtgggtttttttccagggaaccaatctgcccttttgaagaaaagacaaaggtagaaaggatggtggtagactacctggcaattggttatcagaatgggaaatacaacctagaaccaaacggtcatcacttcagcagggttttttgaagaatcaaatattcaatgggatacaaatgacaagaggctacagtggatgggaactgtgtgactgtaagaattgtggacaggtcttcagtgaacagttttgccttaagacacacatgagagctcagaatggagggaacacttctgagggtaattgttatggaaaagacatcctcagtgtgcacaaggaagcttctattggacaggaactttccaaatttaacccatgtggaaatgtctacactctaactccaggctttgctgtgcatcttgaaattctcaatgcaagacaaccctacaaatgtaaggaatgtggaaaaggctttaagtattttgtaagccttgataatcacatgggaatccacactggtgagaaactctgtgaatttcaggaaggtgggagagccatcacagtttcctcacatctaaagcagtgtgtaacagttcatacaggaaagaaatctaaaaagactaagaaaggtgggaaatccttcactaatttttctcaactttatacatgtgaaaaatcataaaggagagaagtcctttgaacg

SEQ ID NO: 35855 - DNA, 1057 bp, Homo sapiens
agtgctacaggatgcctgggctaaggactgtaacagaaaaatatcaacatcagagcctggcacagtggctcacaccggtaatcccagcactttgggaggccgaggcgggtggatcacttcaggtcaggagttcgagaccatcctggccaacatggtgaaacccccatctctactaaaaatacaaaaattagccgggcacggtggcacatgcctgtaatcccagctacctgggaggctgagtcagaagaatcacttgaaaacaggaggctgaggttgcaatgagccaagattgcaccactgcactccaacctgggcaacagagcgagaccccatcttaaagaccctgtctcaaaaaagagagaaaaagaaaaagaaaaatatcaggcatcacatgaaagagtattcagctgtcgttcttgtgaaaaaggaaaaggacaaaatcaaatgcattttaactgtggtaactaattcactgacttgaagtttgctttgtttgttttctttggtgcgtagagaagaatacttcatactaactcctgatcatcttacagcagacataacaacagagtgttagagactggaataaatatgaatttggctgaaatgtgccctgaaagttgtatttcatttttttaaatgtttaacaattacactgtatcaatagtatatatacgtgtacatatatataattcttaataactgcagtgtatctagcatatatataatggtggctggtacatgtttaatagcagactctggaggaggaatcctgacatacagcatttgccagctcaatgtaaatgctcatgctccctcatggtcaatttcaatctaccactggtttagtaactaggatgcaaaatttctaaaaatgtgataattggtgatgggcatgatggctcaggcctgtaatatcagcactttaagcagctgaggtgggaggatcacttgagcccaggagttagagaccagcctggggcaacatggcaaaaccctgtctccacaaaaaaaatcaaaaaattagctgggtgtagtggcacatgcctcaggtcccagc

SEQ ID NO: 35856 - DNA, 1043 bp, Homo sapiens
attttgtgctatttatcattgtttcaggtgggtgggtaaagccagtttctgttactccatcttggtgtaagtggatgttttctgtattatttttaatgtacattatgtattactacaatagtgcacgtattttggtaggttcctgttcttctaaaatatatttaataactaagattgtgtagtcttgctactcaaagtatagtccttgatactacctgggaacttgttaggcagaatctctagccccaccctataactgctgattgagaatctacattttaacaagatcaccaggtgatgaatactaatgtttgatggaactgggccattctaaaagtggatggatggtgctcattaatgtggatggcgttttgcaatctgttgtagattgactcttttgatttaacttttacaatttataacatatttctctatgacctttccagttgagtagctgaattaggtactcttaacaggggatacctaaagagtaaagaagactgtagagaaaagaaacagataaaaaaaatggcaccagtcatcctgttcatcagccattttaccttggcatggtggttgtcttagtctgttttctgttgctgtattctgctttaacagaataccacagactgggtaatttataaagaaaggaagtttatttggctcatggttctggaagctgagaaaaccaagaacatggcacaggcctctggcgagagtcatcccatggcaagaaagggagaggaaattgggcctaacttgtccttttaactggggcccacccccttgataattccctcccaagataatgtaattagtatattcatgaagatggagctttcatgacctcatcacctcttaaaggccctacttccaaataccattactttggcaattaaatttctacatacatttcgtaggggtcatctaaatcatagtagtgatcaaaataattcatgaatcctggaatatttttttccttaacaggttatcttatctattattagttccttccagaccttggcttatctggtcattgtgtt

SEQ ID NO: 35857 - DNA, 1050 bp, Homo sapiens
tttatctctttctcagccttaaacacattatggttctctatcaccctagttatgttcagtggaatttcttaagagtccactcctgttcagaagatgcttaattcacaaaccagtttcctcctaaggcacaggtatagaagaagagatttgactactcttagttcaattatttttttcactatttaattgtggtatgtttggtgctttatgcatttaaagccagcatatgtataataatttgatttttggccattagtgtaaccttgctttcatttttcctacaagaggagagatttttctgtagaggaagttttcatatagatatgctgaaacctgctctaaaacttgggctaggaagtcgtaaagggaatttaagaaattcaccaggattgtagatactagaaaacctgatgaggttggctgtggaaaacagtctggcaattcttcaaaaagttataatgtagaattgtcatatgacccagcaattctactcctagatttgttataatgtagaatttgttataatgtagaatgttataatgtagaatgtaatgtgtttgttataatgttagaattatcatatgacccagcatttctactcctagatttgtacccccaaagaattgataacaggtacctaaacaaatcttcacagcagcgctattcacaatagccaaaaggtagaaacaatccagatgtccatcagtggatgatgaatggataaataagttgtagtatatccagacagtggaatattactctgccataaaaaggaataaagtgctgatacatgcttgaaaacattatgcgtactaaaagaagttggagtcaaaagattgctttatgattccatttatgtgaaatatccagaataggtaaatccatagagaaagacagcatattggtgagggacagggactagtgagaggaggggagtaaagaataactgcttagtgagtacagagttttttgggaggtgatgaaaatactagaattagatggaggtactggttgcctaacgttatgaatgtactaaatgccactgaaata

SEQ ID NO: 35858 - DNA, 1029 bp, Homo sapiens
cttctgctgccttcctttcacctgctgctttttctccccaaggcaggaatcatctccagcttttctgttttagagactgacctaaaaaaattctctgacctaccttgtctgattttaggtcacaaggcactcatttgaaaagagatcctgagtcataccttggaggaagaaatgctatacggaaaggtgcaaaaaaaaaaaaaatcataatgggcagatcttgctgggttttcccactcagtctattagtaatagattgtaaccaaccacatttctttgcagttgtcagtcatgtctatccaataaagcctccataaaaggcacaagaggacagggtttggggagcttttggatagatgaacacatagagacttacaggaaggtggaaggtaaacaaaaaccgcaactacacttgcaccaacctaatagaaaaaatcctatgtcttgggtataatttaaataagatgtataaccttttaattttgtacatgtgttctatttacagaggtaaagaattcagaagaacagtataataaaatagtaattcccaatgaagaaagtgtggttatctattataagattagacagcagcttgccaaattgggtaaagaaattgaagaatatattcacaaaccaaaatactgcttaccttttctacaaccaggtcgtttggtaaaggtatgtcattgtttcttcataaaatacttgaataattcaatatttaaacatatttttgttaaagattctaatttattttttattctgataaaatgcttcctgctacaatagttgatctatattaatcatattattttacctgtttcacatggcactaacttaggggcttatgcaaaggccttttaatcaccactggtttttgttttggggactataaattgaagtagatagttttggaattaacatataaaatatttctagttatgaaatgctaactataactgttcatataactattcatataactatatgaaaaataaggcaattttaagttctggatgaattcattag

SEQ ID NO: 35859 - DNA, 1934 bp, Homo sapiens
ttgaagagaaaaagacatttatttctatcttttataattatataattacctttaccagtgttctttattttattatgtagtttaaaataaatgtctagtattacttgattttagcctgcagaacttctttttgtgtttcttgtaaggtggatctgccagaaacagattttctcagtttttagtctatctgaaaatgtctttattttgccttcatttttgaaaggtaactttgctggatataggattcttggttaacagttgtttgtttttttctttgaatatgtcaactcattgctttctggcctccattgtttctgctgagaagtttttgctgttagtcttgttgaagttcccttgtaagagattaatctttttttctcttgctgctttaagattttctctttttgatttggctttccacatttttattatgataaatgtatctgcatagaaagtgaccaaacttctttgcctttatcctacttgtactttattgaattttatggctatgtagatgaatttttttttccagtaaattttgagaagttttcagccactatttctgtttttgttttgtcatttttagagacagggtctcactctgttacctaggttagagtgcagtggtgcaatcatggcttactgcagcctcaaactcctgagctcaagcaatccttccacctcagcctcctgagtagctgggactacaggtgtgcaccaccatgcctggctaactttaaacaatttttgtagagaccaggtctcattacattgcccaggctggtttcaaacttctaggctcaagcaatcctcccgccttggtctctcaaagtcctgggattacatttgtgaaccactgtgcccaggccattatttctttgaatatttttctacttctttttctaaacctctcccctggaacttccattatgggtatgttgcacttaatggtgtcctatatttctctgaggcttggttcatttttatttgtttgttcttgctctgttcttgggattgcataatctccatcaatagtctatcttcagattcactgttgatattatctgctagttcagatctactgttgggctcctctagtaattttcctcacttcggtaaatagactttgaaactctaaaatttgcttttggtttctttttgtactttctgtttcttcatcgatatgttctgtttgatacaacattgttattgtaccttttacttcattaattgtgatttcccttgattctttgaatatatttatagtggcaacttttaagtctctttagcctaacatctggtcactattacaggcaaattctgttgcctacatttttccctgttctatgggtcataactttcctgtttctttgcatgtctcttttttgataatatattgtagtaactctaggtattcccctccctgcctccacctcttgcaggccactgttgttatttccttgtttatttgtttagtgtcgggctggattatttgattgtaagtctctgtcctgtctacctcttaccccctatagtatgtagccttttagtttgtttctggggtagagttgggggtcacagccttggttatgcccacagtcaccctgagatgacaatggtttggacaggggtctctgtgactttacctttctctgggcatacccaggagctctgttagcaggagggctcctcccactatcatttttaaaaccaggttctcttctgcaaactatctgctgtacaatttagcctatatctccaatgaatacagatctaccagttgcatttcaccacaacctctgctgtttctgaaagttatcttagtcttgaatttcctcaggctctgttacaaataaaatctggtcctttgggaagatattaagagttgtctgttttaaggcatatttcttcacccaggcaaagtctctgagtca

SEQ ID NO: 35860 - DNA, 1051 bp, Homo sapiens
tttttaaaaagtctatactttacaagtcagtagtgccctccctaggcatcaacaccaaggaaataatctgaaaacagtttaaacatagatgctcaatacaagattacttttgatggcaagaagttacaacaatgtaaatatacaataatgaatttagcaataagttgtgccacgttcaggactatgatcaaattgtgacttgtagatttattaacaaatcataatacatctgtaaatcatagtatagcgttgaaaaagagttttcaaaaataaatgcaatggaaaaatgccctataatttaaattggcaaaagacaaaattatatatgtagtatactttttatgtccatgtgcatagaaaaaaagggaaacactgatttggtttggtcttactaattttgactataagatgaaaatgaattttacatatttttttcaggaagttcagaaacgttttcctgacggcatccccttattagaccctattgatgatatgggcattcaagatcaagggctgaaaaaagtcattcagaaagtagaagcttttgagcatcgaatgtattctcatccacttcacaatgatccaaatttggaaactgtgtatacgctttgtgaaaaaaaagcacaggtatggcagaaatttggtttttatagtagaattctatatgtttcactgaataaatatgtgtttgtcattttcttatcctgttggtttaattggctaaaacaggaaaatgtgagctatcttttaaataaactgtcagctctgaacctgtcagctctcatcagcaagacaagataaagttcattttgctatagtttgatatttcacataggatgttctgttttttcttcttttttaaatttgagatataatttacacagcatagcattcacccttttaaaatgtccaactcactggtttttagtgtattcacagatacttgcaaccatcaccactatgtaacttcagaacattcttctcaccctctgaaggaactttatacccattagcagccactctctgtttctcccatcctccagcccttggc

SEQ ID NO: 35861 - DNA, 1022 bp, Homo sapiens
caaagtgctgggattacaggcatgagccaccacacccagctcgctccaacacttctaagtgaagtctttccccctataaatagctgtttttctccttacacatctacccaagaatagaggtttcccccatcagtgaaactctgaccatggacccagaaattatttcaccgtgagaattctgggatgccccagttgtggttctgtacctaaccttgtgctctaggctttggcttctctagtgacaaacaggcatggcctgagtgtgcttcctatgtgcccatactgcgtttccctgggtcagggtactcggtgtagctctgtgaagacttccatttctgtagagctcaagaaagtggacaccctgaatttctcagaccttgggtaaacttgaattccacagctgacatgcccagaaatccggactggcttttcccctcccaccttgccagcaaaagtttcctatatgcgtaagttcaacaaagctaaaaagtagtgtctttctggtggctctactttgattctgggcaaagcaaacacttgacatgacttcctttaaaagaaagtctattactttagctttccctaaatgccactgaaaagttgaatgtctgaagcttctcaatactgttctattagaactagatacaggggacacagctcatgcttcagcgccaaggctaatagtaaaaaggctgtataggttccttcctttgcagattccactcttctctcctccccatacatgccatttgccaaccttatctattaaacccattctaggtaaggcattcagttagttacttctcttttaagagtaggaacttaacagagctgtatgtccaatacagtgtgtggtaccagacaggctcggcagcaacattattacttttaattccccttctaggtggaattgcccattcacagtcagtcctatttggaccacatagccctgccttctccttgcatacccacatctccctgcactgactagatgacttacaccaggcatcacccagagacct

SEQ ID NO: 35862 - DNA, 1035 bp, Homo sapiens
accctaaatggaagcactctgtatagaaggaagctcaagattgcaattaaaatgttggcagcatcattggaaggcagagaaactatcaccttggaacaaagattgggctaaaataatccagaatgaggaaaattgtttaaaagaattatctacaccatgaagaaattcatcagcattttgtgtaaaagatggaaggtcagaagtaacgtacctttcatttatactgtgttcagatgtagcatttctcaatgggtatgttattgataattaggcagtactgtgttatatacaatttttccacattggcagccacctcgcatccccagcacctcctccaaagtgccagcagcactctcagtcatggtaaaactaaaaaagtcctgagaaacgctgctctaatgtttcagagtgcatgtgaataagttatttcctttaatcagcataatgattcaaaatatttgtaacattttcactcttcagatgatgaactgagaccgaaaatgaattgctggctttttcacctgtctagtgaagggtgctgctgggcctcaaattcgaatagactgattcctaattcagttccttctctaaaacattgtgctatctttcaatggaggcagagatttatacttgatttcatcaactaatatatatatgcacctgaacttttgttgttatttatattctagctatgttctaaggaacatagattttgttaaacagaacacactttgtttcgctgagggccttgatggacacttagcggtaggagctaaggggaactgggctaatttgtctgatagagggagaaggtcatggagctcccagggaaaataaggaaggaagagaggacaggacagagagcctagaggtagaggaccttgggaagcctggaactatgtaacatgacccacccacatactctcactctgcatcccaaggtattacttgtacaaagtattactcaagaaatgcttaaagtgtgaattgttttgtataaaatgacaaagggctgagtattacacctgggttgag

SEQ ID NO: 35863 - DNA, 1060 bp, Homo sapiens
gactactaggcatcagccatctccagctttttccacttgtcgattggattatgcaagtcatgagtggtatttaaaagaggtggactgtatgctaaattgatttatccttgcttatgtgtacagattaatggtataatccatgaggggtgatagattaagatcctgaagtgaaaaaatacatatatagtgtcaggtatattaaccaatggttagttgccttttatttttccagtgtaaagtatagcagatccttcaataatgtcatttagttgaacattttggacaattttgctaaaaagttgatgaggataaaaatctcttctggcagaggctactgtctgtatggagtttgcatactccccccatctctgggtggattttctctcagtactctggtttccccctgacaccccaaagatgtgcacgttaggttcattgtcatgtctgcaaggacccagactgagagaatgtgggtgtttgttaatgcaccctgcaacgggatgacatcctacccagggctagttcaagtctggcaccctgaattgttgggacaggctctggccacctgtgaccctgaactggaataagtgggtaaataatcatcttattaatgtttcttaaatgtatgttacagctcacattttttcagtgtttagtgttagaagtgtttggggtctctagaagtttggtgatgtttttgtgaccagaaatatgccatagaaactttcccacttgtttacatcaattggcctatggtaaagttggttttaaagtcaaagtttctcttattgtgtaacttgccattgacatctactcatgttacttaaataagcgttttgtttgtttgtttgttttttgtttttttgagatggagccttgctctgtcacccaggccggagtacagtgccctgatctcggctcactgcaacctccgcctcccaagttcaaacgattctcctgcctcagcctcccagttagccgggattacaggcacatgccaccacacctggctaatttttgtatttttagtagaggcagggtttcaccatgttggccaggc

SEQ ID NO: 35864 - DNA, 1042 bp, Homo sapiens
cacgtggtcccctcactcatggagcttacagttcataagagaggaacagtttgcaaactgcattaaccatgttaaaggaaaaatacaagtgctgtgaaagaatggaactgggagttcttaattgaaattgggaaagtctctgaggagttgaggaaaatctagagagtgggtagaaattaggtaaaaagtagacagagaaggaagcagcctgtccagaagccctgagtaggaaagatcttggggttattgaggcagtgaagaaggggggttgcaggtctgatgacaggaattgaggtgagaccacgaggtgcagggccacttaggttgggctaaacattttggattttagtctaagcccggggggaaccactagagcattttaatggaggaagtaaccctggctgcactgtgaaatctgggtaagattcaaagttaaagaagcctcgttaggagcctgttgctagttcagagcaggtttaagagcagcttgacctggatgggcgtgtgaatggaagacatattttttagaagattatttgacaatattatcaaaagtcttcatttgtgtacatttttaacccagcatttccatttctaggtgtttattctaaagaaataatttaggccaaatgtggtgtaatcccagcactttgggaggccgaggtgggtggatcacctgaggtcaggagttcgagaccagcctgaccaacatggtgaaacctcatctctactaaaaacacaaaattagccaggcgtggtggcacatgcctgtaatactagctacttggaaggctgaggcaggagaatcacttgaacctgggaggcggaggttgccagtgagcctattgcaccattgcactccagtctgggcaacaagagctaaactccatctcaaaaaaaaaaaaaaaaaagaaagaaaaaagaaaaaaataatctcatagtccttaaacataaataaggtaaaacgaaatttaaaaaagaatctcagatgtgtgtaaaagttcagctactagaatgctcatccctattatttatgataaaa

SEQ ID NO: 35865 - DNA, 1028 bp, Homo sapiens
aaacatcaaagaaatttgcaaaaagataggtggtaaattcatgtgagagagagacttctagtagtggaaatgcatgttaagactcactttctaactttgaagaacaaatgattgaatggaaaaatggttgagatagtgaccacaagaggagtttgggtttttttttaagatctggagttattaaggtacataaattcgttaaaaagtacatttaaagcaaaaacattttacagtaaaacctgatgcccaacagtagttgttggctctatgttaaaatacctttaaattaactattaatttttgttaacttaaaacaataatcagttactagctcacgaatctgcagattgggcagggctcagcaggggtggcttatctctgttccttgtgacattctctgaagatgaaaggtccaagactgcttcttcactcacatgcctattgcttcagctgggatactggaacacttggggggctgttggcatctcttcctcctagcacgaagactgggttgcaaagagtattgtttcgagaggcaagtctcaacatgcaggctcttctcaagcctccacttcattgtgtttgctaatgccttattgtccaaagctagttgcatgcccaaacccagaattgatgtgatagggaactacacaagaatgtaaatactgggaggtatggttcatgggggccatcaaaatgaaagtttacaacaagtataaacagaactgtcttccttccccacaccccacccccaaaacccactttgggcatatatgctagacaaagttacccctcattctttttaacagttacatagcctttcattagctggataaatcatggtttatttaatgaatgatatactaatgaacatttataatctttttaaccttttgttactgaaaacagtgcttcaaaagtatttttatacgtatgtcatcttgtacatctgtgagcatgtatctgtgaacatatccataggctggatacctagcaggtcaaaatgacgtgtgcatgcataattggct

SEQ ID NO: 35866 - DNA, 1032 bp, Homo sapiens
acgtggaacattctgtattcatctgctatttgtgatgctccgggtgtttcaactagaaccttcagacccaatgttatggagaaaaactttaaagaattttgaggtagtttttaataaatgcttagagtaaaattgttagcatattcttaggatatattcttaaaatttatccttcactaaatttaggcagtgaccattttaaaggtgtgaaggtatgtaagaattagttgatgcttataaatagttctcatgagatatttactaaactttttcttctagcttgaaaaaaacaaacactgacctgctgtaagaatgttgtccttagtaaaaactataatgtgttcttatttttgaagctcttaaatcaactttatgaaaaacatgcaaattaaagataaataattcagcctctagaactcttcatatgtataattatggcacaaatatcattgttactgtctttttccaatgttaggttgagagtttgttccagaaatatcacagtaggcgtagctcaaggatcaaagctccatctcgtaacaccatccagaagtttgtttcacgcatgtcaaattctcatacattgtcatcatctagtacttctacgtctagttcagaaaacaggttagtactttttaaggatttcaaacattaatccagtgttacttttaattttaggggtaattttttatatctacttgttaagttgctctaaaatgatttaattattgaatcttggctttcaagttaaaatcaagggtgaagatactaaaagttcgctgggcatggtggctcgtgcctgtaatcccagcaccttgggagactaaggcagaaggattgcttgagcccaggagttcaagaccagcctgggcaacatagggataccccaactctacagaagtaaaataattagctgggagtggtgatacctgtagtcccagttactcgagaggccaaggcaggaggatcgcttgaacccaggagttcaagtctccagtgacctatgatcgcaccactgcctaggtgacagaa

SEQ ID NO: 35867 - DNA, 1063 bp, Homo sapiens
tttcacaattctaataagattgtttccaagtctctcatgtgcaagctttaaaggatgcactcttgccattttatgtactggaagatcattggtcagatgaatactgtgtctgacaaaaatgtaaactgtataaactgaggaacctcagctaatcagtattactttgtagatcaccatgcccaccacatttcaaactcaaactatctgtagatttcaaaatccattgtgtttgagtttgtttgcagttccctcagcttgctggtaattgtggtgttttgttttttgttttgttttcaatgcaaatgtgatgtaatattcttattttctttggatcaaagctggactggaaattgtatcgtgtaattatttttgtgttcttaatgttatttggtactcaagttgtaaataacgtctactactgtttattccagtttctactacctcaggtgtcctatagatttttcttctaccaaagttcactttcacaatgaaattatatttgctgtgtgactatgattcctaagatttccagggcttaagggctaacttctattagcaccttactgtgtaagcaaatgttacaaaaaaaaaaaaaaaaaatctctgggttaagaaaatttggcttaaatgtatcctttgttattttaaatatattgagatattttaattaaaatttttaccccattgaaccgattttatagtatttgtacctattttggtgtttttgtctttatagtaaataaaagtttttgaacaaatgttgttacttttatttattttgaaataatttcatacttatataaaagttgcaagaataccacagagaacttctgtatacccttcacccaaagaccccagtcaggtttcaccagctgcccatttatgtcctttatagcaagaggatccaaaccaggatcacatgttgctctcagttgtcatgtttcttcagtctcattgaatccagggccattccttagttcttccttgaccttaatggccttaattttttaaagatttcagattattgttttatagaagctcttcaaattgagtttgtctggtg

SEQ ID NO: 35868 - DNA, 1081 bp, Homo sapiens
taactttttttggccttagtttcttcattatactgatggaaatatatatggagggtttttgtaaattgtgaagtgtaatacagatgtaaagatttttttggggttttttgttttgagacagagtctcgctctgtcactcatgctggagtgcaatggcacaatctcagttcattgcaacctccgcctcccaggtccaagcgattttcctgcctcagcctctcaagtagctgggattacaggtgcccaccaccacgcccagctaatttttgaatttttagtagagatggggtttccccatgttggtcaggctggtctccaactcctgatctcaggtgatccacccacctcaacaaatttaaatatggctttaaaatatagtttgaaaactgaattaagaattaaagggggccaggtgcagtggctcatgcctgtaatcccaacagtttgggaggccaaggcaggaggaacacttgagattaggagttcgagactagcctgagaaacataacaagactgtctctctacaaaacataaaaaaaattagctgagcatggtgacatgcgcctgtagtcctagctacttggaaggctgaggcaggaggactgcttgagcctaggaagtcgagatggcagtgagcggtgattgcaccactgcactccagcctgggttgcagagtgacaccctgcctcaaaaatgaataagaattaaagagatgaggccggatgcctcggtatttttggcgctgcgatcgcgacactgcactccagcttggggtgacaagactgtgtcaaaaaaaaaaaaaagaacctctgacatacaaaatactatttaaaaaaggggtgagggggcagggcatggtggcttatgcctattatcctaatactttgggagcctgaggcacgaggctcactggagcccaggagtttgaaaccagcctagggaacatttaaaaaaaaggtgggggggcggtgcgggggcagggaatacatctcttttcaaactcctgacctcaggtgttctacccacctcggcctcccaaagtgctggaattacaggtgtgagccaccatgccaggccgaga

SEQ ID NO: 35869 - DNA, 1155 bp, Homo sapiens
tggatgtggggagggtagctggttgtagctcaagtgctgcagactcttgcaattgagttttagtctgaacaagtataactggggaaaacgattaaaaaacaaaacaccgtggtcgggcgtggtggctcacacctgtaatcccagcactttgggaggcacaggtgggcagatcacttgaggtcaagaattcgagaccagcctagctaacatggcccaaaccccgtctctactaaaaatacaaaaattagctaggtgcggtggcatgagaatcacttgaacccgggaggtagaggttgcagggagccgagatcgtgccactgcagtccagcctgggtgaaggagtgagactctgtctcaaaaacaaaacaaaacaaaaaacactaaaagtctgaaaattattctaagggcacatagcaaatgaagaaacatttatttaagaaaatctgaaaacttcgtgtttctgtactattcttctgataacctgctttactttctccttatgaacattttttcaaagccttttcatatatctggaacgctttttttttttcatataaataagactcgaatggctcatgactacaatttcaggaatgtgaattttgcaatatcgttatatattaggactcactaaggaatgttgatttaacttatataaataaaaatagaatagttttttacaggtacatttacagacattcaaggagagtgcaaattattaaaattgtctatttttaagatgtgctaagaataaatttttgaagcagatgctagaaatggacttttttgatagattatatgccactagtgatttctttaatagtctgcaaagtggaaaatagcggcgtattctgataaaaagttgtaatacaatttttttggtcaagttattttgttaggggagctttttgatgggccttccctccagcatgatctagtgtgtaaacataaaacaactactgcctgggtgcggtggctcacgcctataatcccagcactttgggaggccgaggcgggcggatcacctgaggtcaggagtttgagaccagcctgaccaacatggagaaaccccgtctctactaaaaatacaaaattatcccggtgtggtggtgcataccttaatcccagctacttgggaggctgaggctggagaat

SEQ ID NO: 35870 - DNA, 1085 bp, Homo sapiens
attttccccagtcctgcctggatgcatatgggtttcctgctttcctcttttgtcattttctctgaaataaatgtaagacttcttgtaatttttaagtgatttcatagctaacataaagcacagtaataaaaattagcatctgggccgggtgcggtggctcatgcctgtaatcccagcactttgggaggccgaagcagggggatcacctgaggttgggagttcgagaccagctggaccaacgtggaaaaaccctgtctctactaaaagtacaaaactagctgggcttggtggcgcgtgcctgtaatcctagctactcgggaggctgagcaggagaatcgcttgaacctgggaggcagaggttgtagtgagctgagatcgtgtcattgcacttcagcctgggcaacaagagtgagaccctgtctcaaaaaaaaaaaaaaaatctggaaagatacacaaaacattaaaaaaagcttgtaaatacttgtcttcatttaaatgttaacttgaagttaagattggtaatttaaaaaattaaaaaaaaaatagagacagggtctcactatcttgcccaggctggtcttgaactactgagctcaggagatgcttctgccttggcctcccaaagtgtgattacagatgtgagccattgagcctggctgataattgttaacgtgcgttgaaattctcaatgctttttggacctgactcttgattaatttatataggccctcataatgatgatgattttactcttagaatttggaacaccagttctaaattctgaattcttctaattaaaaattagctttagaaaatagttgacaatttaaactttttttttttttttttgagatggagtctcgctctgtcgcccaagctggaatgcagtggtgtgatctctgctcactgtaacctctgccccccaggttcaaacgattctcctgcctcagcctcctgagtagttgggattacaggttcctgctatcacacccagctgatttttgtatttttagtagagatggggtttcatcatattgtccaggctggtcttgaactcctgacctcaggtgatcaacctgactcgg

SEQ ID NO: 35871 - DNA, 1033 bp, Homo sapiens
aaattaaccggttgtggtggtgggtgcctgtaatcccagctgctcacgaggctgaggcaggagaatcgctggaacccaggaggtgaaggttgcagtgagccaagatcgtgccactgcaccccagcctgggcgacagaacaagactccatctcaaaaaaaaaaaaaaaaaaaaaaaaaaaaaaaaaaaaaggagttgtctgtcttctcaacccttactgtcattatatattggccaatgggcaagaggtgccagctttgttctaatcttgcattttgattacaagagaacctggctatgttttcatgtgatttgtggctctttaatttttgagaactggctttttgctcatgttttccccattaggttgtccttatttgtattgatttatagagctctattttcctttcctttccttttcctttttcctttttctttctctttccctttccctttccttttctttttttgatggagtcttactctgtctcgtccaggctctggagtacagttgtgtcatctcggctcactgcaactgcaacctgcctcccaggttcaggcaattctcctgtctcagcctcccgagtagctggaactacaggcgtgtgccaccacacatggctaattttgtattttttgtagagatggggtttcactgtgttggccggactggtctggtctcgaactcctgacctcaggtgatctgcccacctcagtaccccaaagtgctgggattacaggcgtgagccaccatgcctggcctttttcaaacatttattgatcattttcatgcattttctttttagattactgagacgacttgttaaaattttcccttcccttcccatcccgttgcatcgcatcgcgtcccgtcccgtcccgtcccgtcccgtcccttctcacatgcaatggcgtgatctcggttcactgcaacctccccgcctcccaggttcaagcgattctcttgcctcagcctcccgagtagctgggattacaggcatgtgccaccacacctggctcatttttttgtgtttt

SEQ ID NO: 35872 - DNA, 1031 bp, Homo sapiens
tacaaaaattagctgggcatggtgctgctcacctgtaatcccagctacttgggaggctgagacaggagaatcacctgaaccctggaggcggaggttccagtgagctgagatcgtaccacttcactccacctgggtgatagagcaagactgcatttcaaaaaaaaaaaatctgattttcctcttctctgatcttgaccttatgctaaggagggattatttcttagactgatgcaaagacctccattctcttgagtttttcttttcttttttttttttgttttaaatgaaagcaagtttattaagaaagtaaaggaataagagaatggctactccataggcagagtagcctgttttttaaccctgacttttttcttagttatggataaggaaacttaaacacactcttgttttctctgaccagcaattagtatagatagtaactagtttaatggttagcaaagtaagctgagagtaaggtttatgagtaattcatgtttaatacaggctgaatgtcctttatctgaaatgcttgggaccagaagtgttttggattttggatttttttcagattttacgtttattatttcagcatcctgtttctgaaaatccaaaatccaagtgcttcaatgagtaggcagagcgtgacactggcactcaaaaagtttcagattttgtagcttttcagattagggttattcaacctgtagctaagagttggtcatatttgattcatcagttacaacatgtatgattctgagattggttttaaatgatttatttttaaaatgtgaaatgtttattccaactttcttccagccgtctttaaatcctgagtatgagagagaaccaaatcacaataagtctttagctgcaggtgtgtggggtaagtaattttttatctatatttgaggggcacaaaatgttgatatttataggtttcactttttgtgttttttaaaatagagagcaggctagaataaaactttctttttaaagtatttgtatttgatgtgcttagctacaaaaaaggt

SEQ ID NO: 35873 - DNA, 1030 bp, Homo sapiens
atcacagctcactacagcctcaacctgggctcaagggattctcctatgtcagccccccaagtagctaagactacaggtgcacatcactgtgtctggctaattgaaaaaatttttttttgtagagacaaagtttcactatattgcccaggctggtcttggactcctggactcaagcggtcctcccaccctggtctcccaaagtgctgggattacaggcatgagccaccacacccagcctacttcctggatctgataccttcatatttataaaaatttttatttcttcttatatcttcagctttccacattggatcattttccttctgcctaaagtacattctttagaattagtaaggatcttttgaattattctatttttatcaaagttgcatttctgccttctaccatatctggcattttcaagtcctgatccctttgaggctctatgtggtagattaggtcctcctcagctgttaggttcctttgtgtacactctaaattgaaactttttatttacttctctagaactgtgtgttgaaatcattttcttgctgatgactctactcctattttatatagttgtgtttggtttcctcccttacagtaattttaatataagaatctagaagaagataaacttgtgtgcttagccacattgaactagaagtctctgttagccatgtttaaacttacttagttgtagtatagtgatagaactgccccctgctttaacacctggattcctctcagatgagattacctttcacattttgtagcactgatcattcctcagattcctgggctttactcaatttagattttgagttacatgctaagattttctctcacattttattaatgtcaagaattttttttatacttcatccatgccattatcatctgtttaccaaaaataattggaaatcttacattgttgagtacaatcctaatattatttactattctttgtttgagattttttttttttttttttttttttgagatggagtcttgctctgtcgcccaggct

SEQ ID NO: 35874 - DNA, 1049 bp, Homo sapiens
ttttggggggtggtaggagggacagagtctctgttgctcaggctggagtacagtggctcgtttgtggctcactggtgccttgacctcctgggctcaagcagtcctcccatcttagtctcctgattgtctaggactacaggtgcttgccactgggccagctaattttttactttttgtagagacgaggatcttgctatgttgtccaggctggtctcaaactcctggtgtcaagtgatcctctctcctcagcttcccagttcctgggattacaggcatgatccaccacacctggaccaagagtaatttttaagaaaacaattaagaaaattgcaattttcttaatttgatacttgtgatagttaccttgtaggattgaaattaactaatgaggatttgtattgtataatgtcttcttttggggatgatggacattttattactattaacactgattggggggaaaggaggaacaagagagaaaggtatgtattgttactgtactgactgtgagtacctggtagttcaggtattttctttctcatttgatcaaggttttgaaactcccagaacagggagttctctgaccagtctagtgtcaaaggacacccatagcacttatattattatacctgaaattgctttgggtactgtattggaacccctcatatactattttttttttttttttttttttttttgagacggagtctcgctctgtcgcccaggctggagtgcagtggcgggatctcggctcactgcaagctccgcctcccgggttcacgccattctcctgcctcagcctcccaagtagctgggactacaggctgggcatgtagccactacgcctggctaatttttttgtatttttagtagagacggggtttcaccgttttagccgggatggtctcgatctcctgacctcgtgatccgcccgcctcggcctcccaaagtgctgggattacaggcgtgagccactattttttatttatgatctcagacagaatttttgagctttgagggaaggactagcattcctagctgcttaattc

SEQ ID NO: 35875 - DNA, 1074 bp, Homo sapiens
cctcccggaatagctgggattacaggcacccgccacaacacctggctaattttttgtatttttaatagagacgaggtttcaccatgttggccaggctggtctcgaactcctgacctcaggtgatccaccgccttggcctcccaaagtgctgggattacaggcgtgagccactgcgcctggccagtgataggttttttaaggataatgcttttcaaatattaaaatatgaaatattcaatactaaggcacatagatcattcttagttttattgtcaagttttagccactttatcagggtatcgaggtagcctcaacatcaaagggatacagttgtcaacttgtttaagcagacaccaaattagtggaagtaaatgctaaagaaattcagagggtttggggatagagatcattatgacttgggtaccagtcagaggtttctttctttctttccttttaaaatagttaattgtataaatatttattttttagagacatggtctcactgtatctcaggctggtcttgaactcctagcctcaagtaatcctcatgccctggcctcttgaattgctgggattacaggcatgaaccatcacacctggccctagtcagaaagatttaattgggacctaaattaaatcttgaaagggttagacgtaaataagggcaagcgtgctagaaaaagaaaggatgtaaagacatggttagaatggtgtatatacctagtttgttttaagggtgttgagtgggatattttgacacaagcaggcaatttactcactgaagttaaagatcatattgaaaaggcaggactttagagatgtcttatacttggtttgtgatagagtaggaactgtgacccaggtcttctaacttctaatcctagattttctctactgaggaatttgaatttgtgaccatggcacaaacacagttaaggagtttgttctttagaaagtgagaagccaccgaaaatatttatcagaggatggtagttgtgaaactggtatcaggatgatttggcaatagtttgaaggagagtgggaaggaataattgaaatgaaaaagcaaagtac

SEQ ID NO: 35876 - DNA, 1035 bp, Homo sapiens
gttgctaaatattttactttattgatgttattgtaagtaggttgttttcttaatttccttttcagataatttgttgatagtacctagacatgcaatagatttttgtatgttgactttgtttttttttttttgagatagagtctcgctctgtcactcaggctggagggcactggcgcgatctcagctcactgcaacctctgcccctggggcctaagtgatcctcctaagtactgggactacagatatgtgccaccatgcccagctaatttttgtattttttgtagagatgagatttcaccatgttgcccaggctggttttaaactcctgggctcaagtgatccacctgcctcggcctcccaaagtgttgggattataggcatgagccaccatgcctggcctctatgttgactttgtatcctgcaactttgctgaattcattcattagtctgaacagctttttttgtgtgtggaatctttggggatttctatatgtaaggtcatcatctgtggcttcttccgctctaatttggatgccatttatttgtttttcttgcctagttgctcttgctagaacttctgtttttgaataggagtggtgagagtaggcatccttgtctcattcctaaccttagaggaaaagctgtctgtttttcactcttgaatataatattaactgtggatttgtcatatatggccttcattatgttgaggtgcatcccttctatacctgacactaagaatttttatcttaaaaaggactgaattttgttaaatgcgtttcctgcatctattgagatggtcatacagtttttgtccttcattttgttgatttggtatatcacattgatttgtatatgttatctcaattttttgaagtgttacttatacgtttataaaagttgtgagccaagaaaaatttgtgctgaggtttttatgaaaacatttactgccaaactatattttctatactttctgtatttctgtgtgagtatatttagacacacgtatatttggattatcagtgtgccaaacat

SEQ ID NO: 35877 - DNA, 1049 bp, Homo sapiens
gacatgatgtaatcctattcctattccagagaaggaattcagtattctatgagataattttaacaaagaaatacaaataattaaaaagatcaagcagggcaggtgcagtagctcatgcctataatcccagcactttgggaggctaagacaggtggattgcttgaggtcagaagttcgagaccatcctgggcaacatggtaaaaccctgtctctactaaaaatacaaaaaattagctgggtgcagtggcacatgcccatagtcccagctactcagaaggctgaggtgggtggatcacttgagtctgggagacagatgttgcagtgagctgagattgcaccactgcactcaaaatattttttgaaaagcagaaattctggagttgacaaatgcagttgacacactgaacaatgcatcagagtctattaacagcaaaaatgatcaagcagaagaattagtgagcttgaagatgggctatttaaaaatatacggtcaaaggagacaaaagaaatgagaataaagaagaatgaagtatgtttacaagatctagaatgtagcctcataagggcaaatctgagactctgaactcaaaaaggagataaagagagagatggggtagaaagtttattcaaagaggtaatagagaacttcccaaagcttagagaaagttatcagtatttaagtacaataaggttatacaacaactaagcaggtttaacccaaataagactacctgaagacatttaataatcaaactcccaaaggtcaaggataaagaaaggatcctaaaagcagcaagagaaaagaaacaaataacatacaatggagctcaatacatctggcagccaacttttcagtaaaaaccttacaggtcaggagacagtggcatgacatatttaacatgctgaaagaaaaaatacatatattagaatagtatatctggcaaaaatgtccttcaaacataaaggagaaatactttcccaggcaaaatacctgagggacttcattgatctcagacctgttgtatgaaaaatgctaaagggagttttta

SEQ ID NO: 35878 - DNA, 1025 bp, Homo sapiens
cttttaaaattcatatggaaccaaaaaagagctcaagttgccaaagcaatcctaagcttaaagaacaaacctggaggcataatgttacccgacttcaaactacacccacagggctgtagtaaccaaaacagtatggtactggtacaaaaacaggcacataaaccaatggaacagaatagagagcccagaaataatgccacacacctacaaccatctgatctttgacacagctggcaaaaacaagcaatggggaaaggactccctattctacaaatgatgctgggataactggctaggtatatgtggaagactgaaactggacccctttcttacatcatatataaaagccaactcaagaatataacgctgtaaatgcaaaatctaaaactataataccctggaagatgacctaggcaataccattctggacataggaactggcaaatattttatgacaaagacaccaaaagcaatttcaaccaaagcaaaaattgagaaatgggatctaattaaactaaagagcttctgcacagcaagagaaactatcaacagagtaaacagacaatctacaaaatatgagaaaatatttgcaaactgtgcttctgacaaaggtctactatccagaatctgtaaggaaaattaaaattaaacaaattttataagcaaaacccaaacacatgaacagatgtttttcaaaagaagacatacatgcagccaacaagcatatgaaaaaatgctgtacgtcagtaataattagagaaatgcaaatcagaaccacagcgtgatatcttatattagtcagaatggctattattttaaaaatcaaaaaattacagatgctggaggggttatagagaagagggaacacctatacactgctggtaggagtgtaaattagttcacccattgtggaaatcagtgtggcaattcctcaaagaacttagaactacttttaaacccagccatcacattattgggtatatacaccaaggaatataaatcgttctaccataaaacatatgcac

SEQ ID NO: 35879 - DNA, 1030 bp, Homo sapiens
tcattatactgtagcttttatatcctgttgagagatatccttgattattattatacctctgcttaaaatattttcccactgctttctggataatgtttaaataaacattttattatttaaaaaataaatgtttaaataagtatttaatattctagcctaccttattctatcatactacatatcagccttgttctctgtttccaattgctaacagttttccaaaggccctctatttcatgcttccatgtgtttaattgtattctcccctctgcctagaatgtctctccttctgcttctctcctggctaactcctatacgtccttagaaactacagctctttttgaaagcttctataactgcttattgatatagctgtccctctcttcagcgttcccctaaatttgtcctcccataatgtgtcagcttatagcatttattttactatgttttaatatttttttttctttttgcctctcaactaaactgccttctctgaggtaaaggactgtattctgcacatctccataaccccatgacctcataaacataactggcacataggagatgttcaatatatatttattgaatgaatcgataattgtgatttcattacttgttttacagatcatccgtaagatttgtctactgcattgtcttgttgaatttttaaataggactatgaattattttgttagtaatattaataaaagatgtttataaaaacaagttagtatcttggaatacaagttacttaatgaatttcttaagatatcttttttaaacatataacatttttgcttatttagttgtgaaagaatatggtttctataatagtgtgttatttaaaagcagttctatttagctatttagttgaaaatgattctttggtgaaaaattaactctgtaaatatgtattaagaggaatgcctgctctgttttgattctatgttttaatatttttactcttggcaatatttaatgaaaatgtgtctcattaaccttgaagttactagtcattattttgtgactg

SEQ ID NO: 35880 - DNA, 1048 bp, Homo sapiens
gtcttcaccccagaatgcgacgtgcaccagtgaacagaggtcaggcaaggcgaaaagttgtttgtcatctgccaagctgtttgtaacaaccagataaaagtatattcctattttcagatttaaaatgtaaacatacatctctagtcccaaccagtctctttattttggaatgttaatgtagaaatgtccccttgccggcagctagcccaatcttcttttcacagtcacccgttccagaggttatgtttatagctagaaccagtgtattttggcttttgcctttatttattctttatgagaactgggaactatggtgacccagcaaaagcctgggtgaccatggaagtagtctgtattagcgcctggacaccagagaaaagggaaaatgtgatcctcattcagccctggttgatagagatcatgcctttaaatggtcagtctcaaagacattcagttgtcacaagtgcagatttaccagttggcagttcagattgttactgtacagtgagtgtgagggtctttagaactggttttagtaatgtagcatatatacaggaatcttaggggatgtgtcatactgttttcaatagtcagggatagcatattggttaatcccaggcacttctgacacatatggttctgattgtgtaggcagaatgggcatgacaaggagggaaccttatcagctctttaaactaagtctgggttacattatacagaccatccaattctttgccctcctattcccattttctcattccccagtttattcattcttaccattttaatgaaaatggtaagctctgctgtcaacaacagatctcagctcttggatccttttattggatcttactatttagtatggaccacttttctttttgaggtatcaactctttaatttaggtcttttatatataaaaccattgattttgttttcaggttagttttctgccttagctgttttctttcttagcattttaaaagtgtgaagtcaatctattttattaaaagttcaatacatctaaattcacaagtaagagatgttatg

SEQ ID NO: 35881 - DNA, 1047 bp, Homo sapiens
gagatgaaaattaaagggctaatactgtctgactttaagaattactttaaaactatagttatctagacagtatgatactggcattaggatactgggtaaataaatcaatggaaaaaacaaaagtccaaaaagtagatactgtacaaccagttggtttttaacaatgacatcaaaacaacacaattaggaatggaaagtctttttagcaaatggttctggaataacttaatatccatatggggaaaaattgatccctacctcacgtcatacacaaatattaatttaagatggattatagactagacataaaagccaaactattgtgcttctagaagaaaaaaacaatggaatatctttgcaattttgaggtagacaggagacagaacaatctgtaaaggaaaaatacagattaatcagatttaatcagaattaaattctaatgctcattataagagaacattaggaaatcaaaagactaggagaaaataatcatagtacatatatctgacaaaggaattgtatctaggctatataaagaacacctcaactcagtgttataaaaaagaagctaacaaatattgggcagaaatcttgaacaagcactctgtaagacacgttttaagtatatgaaaatatacttagcaacactagtaatcagtggaaccacagtgagataccactacacacccattaaaatggcttaaatttaaaagattgacaacagccatcactggagcacccacaacttttatacagtgctggttggggtgaaaatgatacaatcatgtttgaaaactgacagtttgttataaaatcaaacatacatataccctgtgatcaaacagtaattctcccggccaccttgaaaactgaagggatcaatttttagtcacactttctgggagctctggccaacagtaggtctaacaccttggcatactatgcaaggcttcctgatttgggcccagcccgactttctagctttgtctccttaggctaccctactcttctgtaccctactctaccctactcttcaaggaactccct

SEQ ID NO: 35882 - DNA, 1041 bp, Homo sapiens
cttctgtcttttttcttaatctggctaaaagtttgttgattatgtgtatcttttaaaaatgacttttcttgttgttggtcttttgtattcttcatattgttttcttcaaatttcatttgtttctgctttgatttttattatttcttttcttctactaattttgggtttggtttccttttgcttttgtaattctttaactttcattgtcaggttagttgaagtttttctacttttttggtgtaggctcttatagctataaatttttctctttgtactgctttctctgtatcccataggttttggtatgttgtgtttccattttcatttgtttcaagaaatttttcaatttcccttttaaattcttcattgacccactgatctttcaaggagcatattaatttccatgtgtttgtatagtttccaaaattcctctagctattgatttctagttttattccattgtggtcagagaagatactcgagataatttcaactgttttgaaatttttaagagctgttttgtggcctaacgtatagtctgtccttgagaatgatccatgtgcttaacgagaagcatgtgcattctgcagctgtttgatgaaatattctgtaaatatctattaggcccatttggtctgtagtgcagattaagtccagtgtttctttgttgattttctgtctggatgttctttccagtacttaaagtgggatgttgaagtctccagttatttatttattatttatttatttatttaaaatggggtctcactctgtcacccaggctgcagtgcagtggcatgatcttggctcactgcaacctccacctcctaggcttaagcgatcctcccacctcagccccccaagtagctgggaccacaggtgctcgccactacacacagctaggttttttttgtttgtttttttgtctttttttttgagacagagtctcactctgttgcccaggctggagtgcaggggcatgatctcaggtcactccaagctctgcctcctgggtttacaccattctcctgcctcagcctc

SEQ ID NO: 35883 - DNA, 1099 bp, Homo sapiens
agggcagaaatcagtgttaagcttaggaaatctttcatagagtgtctcaggcttctgtgtaatatttcacatttgtttgtttcattttttgagtagtaaatatttctactgtggggtgcttcatgtctattatagcataaaatcaggacagaactgtttatgtaacattagtatgtaatcatacagctttttcaaacttatatacatatctgtatattatttaaatgcaaagtatgtatgtatatatttatatgtatataatgtattttatttttattggctatttttataaaaactttttttaactagaaatttaataatttcttccatttatatatacatgcaggaaatactaaagaatgaaaaacacagagaagaaatcaaaataaaaagccaagatttttatgaaaaagaaaaactccttagtaaagagaccagtgaggaactcctgcctccaccagttcaaactcaaattaaaggccatgcctctgctccatactttggaaaggaagaaccctcagtggctcccagcagcactggtaaaacctttcagccaggatcctggatgccacgagatggcaagagccacaatcaatgaatgcattatggtcaaatcttttcatgtatatggatgtgactattttaacaaataaaagaagtgaaaagttatttaccttgtattttctgaatgtacaatagtttcctattctattaatcttgagttcatttttagtatgcacaagaaatgtgagattatgtactgtagaaacctaacttcttttagacttaaatccttcatttgacttagtcattgttatttatgaatttgcttagatttgtttttccctctttggattactcccttgagaaggatcctgtagctgtgaatgcttagtacattttggatctttatgatcatttgggaaccactcatagatagaactgggtacaaataatgagggtaaatatttttccctctttggattactcccttgagaaggatcctgtagctgtgaatgcttagtacattttggatctctatgatcatttgggaaccactcatagatagaactgggtacaaataatgagggtaaaatag

SEQ ID NO: 35884 - DNA, 1035 bp, Homo sapiens
ctaaaatcacttttatcatatgaagattttggataaatcattattaaggaaactaaggacagctgtggcatggaatcagcgggctttcagtttgaatcccagttactcacaaatgtaaagtggtattttcattcctcttttgttaaaatgctttttttaaatgtaggaagtttacattttgtcctagatcacattggcttctgttcccacaggaaatgttatatgctatatgtcagttttcatttcattaaaagtgaaagtaaacatggtatgcatcagccaaacagtaactaatcccgacataatttcagtattaaatgaggcttggaatatgtatttgaatgggcatgatagtttgggaaactctaattcagagatgtcccacttataacagtgatgttggagaatagggttaccagttatggcctatatttgctctgtcatatcacgttcttacagtatgtaattatatttggagaaatatcctttgagccatagtattttggagtcaagtattaggctataatttagacattgttttagtagaataaagtaactttataagattgttccagatctttgttctatatctctgtcttttatccttcccccttgcagaagtcattcctatttaccttatttaaaaaacgagagaaagtataactcaggctgaaataaagcaccagactaaaaagagatgcccattttcattcaatatttatatttgccagaataaagggagacaaataattattttgcctttaaggccttgattctggatgatagattaagtagacagactgttgaccacatgtgacttaaggaatattgttaattattttaccaatctttggatcaaggtttgcttgaagtaagtaagctgtgctgtggataaacctttggatgataaagagtgagctgtattgccttcaatattgtttgcatcagaacattactaagtggtatcgattttgaaaaataaaattcaactttctgagaacatagaccagattcaagtatttttatctttttttc

SEQ ID NO: 35885 - DNA, 1071 bp, Homo sapiens
aaagcagttaagtgaatggtcaaggtttttgggggggactttaactttttactttatacctattttatggttgggtttttcttaaaactagaggcatatatttttgtaataaagaaacttacaaaaattatccttgagtttttaatttatattgttttggtgtgttcgcatatgtgtgtgtgtgtgtgcttgagtgtgtgtgagggtcctttctgaaggaaggagatacattttaaaaggaatggccttttaaatggcctatttttctatttacttttgggagaaaagaatatcgcccagcattccacataacattctggtaaacacattcttacactcttttcatattcataacttaaagttttgtgtgttttttttttttgtgggggtggcaaagcagtaaaagaacattattagaattaagatgggtacaaatttcagtcagataatttattggtttttgaatattttgatttttctttacagactagagatcactaaataaagacgattctgaatgcacattgaaaattggatgcttgtttattgatagtacatttcattgaatgctttttcaaggttaatatagaataattttatgtcagatcctaccctttttctgccttttgattaatgaaatacacaatacattttgaaaccagttgcataggtattttttattgttcttttgtgtgagttgagatgtttgatttatgtaagtgatttttgaaagtatttcagtatttgataggtccttagtgttgttctgaaggaagttaaattttcagttttaggaatacttggaatttgttatcatacttagttctctgaaggataatattgctccattgagaaaatctaaaatgttcaagagacagtgacaataatggaaggtgaaaatggcggatttgggttaagcaaacattttcattctttttaaagtctttaatttcttgcaactcagttgtgttacaagtacaccctgggattgaaaaggctatcctcattattttttttccactttgcattgagtttcatctattttgcggttgtgagactgatgcctgcctt

SEQ ID NO: 35886 - DNA, 1025 bp, Homo sapiens
tagataaaaacctggttgtcttttcagtttttgctttcagtgccctgtgttcctctaagaatatgctttgtacttgcttttcagttctttaaaaataggacatttccttattttttttcatctagaaaagatccctaaagcaagcttcagagacaatacggtgcaaaattccttgtcattttgaactttcagctgactgaaagattgactttcagctgatagtaaactgttgcttgagtatgctaaatgttttatgtctgcggaattcgcttaactaattttgtgtcagctaatgtatgtgtgtatatatgtctacaaatatatatatgtgatgatgtccacaggtgaacagaaaaggagacaaattaacccaggtgtaatttgaatgttgtaaccacatgcatatttcagtgacccctctgtacagatccacagttcatttcttcttaaaatatgctgaaagaggaaaggtatttttgtaaataaaatactcttgcattatagttgttatctactagtggagctatggagatttcagagataaaaagataacttcaatttcagtttttcccattttcctggtaagaaaactgaggcccaaactcgttgagtaaattgtttagagtggcataggaaatggcaaagccgtgttgcttatttttcctactgtttgggccgtgtcttagtttggtagtctctgaaatcaagcatattcttgaatgtaacttgaactctttggaggggttatttggctaacatttattgaatgttaataaatgtattcctagatagcattttagtttcaggctaaattctaatggctgcagtgcagtagtggttctagcatgctcagttcatgctagtgtaaaacatttgtggatatttggaaatcgtagtaatgtttgagattaaagttcagaaaaaggattgttaactacaaaactgtattacagctgtgtgattatacagcaagtccttgaataacattgtgtcactatgtcattgatgagaaaataaaaaagtca

SEQ ID NO: 35887 - DNA, 1051 bp, Homo sapiens
aggcacgtgccaccacgcctggctaattttttgtatttttagtagagacggggtttcaccatgttggccaggctggtctggaactcttgccctcaggtgatccatccaccttggcctcccagagtgttgggattacaggtgtgagccactgtgcctggccaggattttgtattcttgatgccatttttacagttctttttcccttcttcccccaaataccacttgtgtaatttttgtctgatatacgttcagcccagtgaactagccagtcttttcacgattgtggtttatacttttctctagacagtggtgaagctgatgagtgaaatgaccaatggctgctttgtgatgatggcagggtagaatcaagtgagacttgagggcagcaggtgcggaagactgtgaactcaacttgcctcacagctccagtttgttctttctttctttcctttcttccctcattttctttcttcttttcctctgtcctttcctttcttggggatggggtgagggaagggaggagaaaggagtgtgtggtagaaaagaagacaaatcagaagagataagtaatacctactgagagtatattccatttccctcattccctccagttgtccccctcttcctccaatcaccctttagggaaataaagttgaggtcagaaggacctatgtgttacagctgctgcttagctgctatttttagcatggccctacatcaggctggcaccaggccacgacggcacagggtcagcacgttgtgggactgctggtaaatgtcaaaaacttaactttcagatatcaaacaaaactaaatttcagacatattctgtgctgtggtactctatttgcttttattttttctgaaataggatgtacatgtttttagaagtgattgatctttaatagtagccatacataaatcttggaatatgtaatgtatagtttattttaggtaggagaaagatttaagaattgtcttgtcaggtcagacgtgtaatccagctcaatacttttcattttgcggtgccaccaagaggtgtgaaatttgc

SEQ ID NO: 35888 - DNA, 1064 bp, Homo sapiens
cttgcagtgagctgagatcatgccactgccctccagcctgggcaacagagtgagactgtctcaaaaaaacaaaaaacaaaagcaagatttaaaaaagaatgtagtttgtatttttaaaatagcatacgtaggatgagtcttggtggtagtgggttaagccatggtggattaagctctgaaaaaccaaaaaattcatgtagccgtatttagatatagagagttctcacccctacctccattcaggtatttgtacttcattgggctgcttatttaatattcttgtataaaaacttttcacatctagattttcccccttcatacttcctgttaaagataggaaacattatagttcagaatgtaatctgtaaaaagttcagtatatgacagtctattttagggtcgtttcagggatttattggctttaccacatttaaactgctagtttaaaaatttatgagttgctgttttcctcttcgatcctttacaattgtgcaacaattaattttctcttcctcttttgtttcccttgtcttagaattgagctttgaacccaactctttcaggaagccttatttaataatcctaaaacattctatgtcttagattcatactgtttcttcttaaaaatctgtaatagtaaaccagatccatttagataatctggcttcctttctagattgaggggcattctgtctctccagtgaatgtgggtagaacaatcccttctgtaagggattgttgtggagactgaccctcgcctgattcacggtcttttccaaatttgagaacacagctgtggaactcatcgttaatgtaaaaatcggagaaaatgagggacagttttttttaatgagaaatcagaatatcctttgtaggattgtagatttctaagcatctttgatgaaggaagcatcagttgtctaatcaaattgaatcaaaatatggagtgctaacagatgtaaaaatactctaccatacactgttatggagtagtcattttgaatttatcattgtttagcaggtatttctagtcttgtttttttggggtgagaattacagagcat

SEQ ID NO: 35889 - DNA, 1028 bp, Homo sapiens
ctaatttccttcatttattcttctagttttctgtatttttcaaaaactctgtaatcatatattgatttcataattagagaaaggaaacattgttttaaaaaaatctgtctcattaccattaaaacacaaatttctctatccacagatatatttttgttaatagtttattataattgttgcctgatctagtgcagctaaacagagcatgttttttattcatcgaggtgtatcatgccttaatgtcctaatttctcccttgtttttgaccctagtgactaatgaatttttgtcttcacttggaactctagaatttgcctgaaaatggaaaagggacagctaaaatcaattctatgttattcatgtgtagaatggacagttgtgggctgacctcatcacttagggtttagtttccaggcttccctgaatatgtaccatggcaagtggaagatggaagaagatagaacaactcttagatttatgtttgtgaattccttatgtcatatgactgcactaagatctacattcccttcttttggaaactttcattaataaatgaagagagttggttagcatttcccccaatttaaagatttacaaataaattattcagaaaaataatttcaaataaaattttaagggcttattatgaactcaaatcttacttgtggttttttcaattgtatttttgggtattctcataaatccttgccttggaaagttgtggtgatatgacccagactacctattccacattctatttttgctatcacagtttaatattttcagtgaagtttagactggattagccatcacatcaagcatttcccccctttctgacctgttagtgtcctttctgcacttctaatttgtaccatagagcgccattaaaaaaattttatatgctatgtttgtacacacatgcatgtgtaagagtggactttgtgtatgtataagagtgttaatcagcttgcaaactttagacaggcagggctcagctcttagaatctatattgcagccaggatggtgt

SEQ ID NO: 35890 - DNA, 1053 bp, Homo sapiens
tggattgtgttggcagccctgtagatagattcagcagatgctgtagacattctcttactaccgaattatagcttaaagacctaactcttagagcaagccttaaaatgtgctttccccgctttgttttaggaaactcttctgtttgctgatgaggaaaggttatctttccaggcagcatccaggaatggtcttttgaatgtcttcatgccttcttgtgacctcattcctgctgccatcgtacttatccctgctcagattaactgcctgcgtgttcaactttattccatagttggatctacctgtagcatttgcagctttctgtgtagactgggcacaagttaaaagcttaggaagtctatataactcaccataattttagcactttaacttattaaggtacatgttttggttatctgatttatagaagtaccatgtaaaaatccacctatgctgtacaattgctgaaatactgagtaagctctgcattttatgaccaagttataggatgaataattactctctggagtgaatggttcaaaatgaaataactgtatgccttaggtgtgacgtgacacgagatgtatttaagccccaaaagtatgtaattatcacactactcttgcatagacacacaagtacatttttgcttatggcaagagttttatgtgcaaaagaaaactcactttctggtaagcgaaggaacagtccattatttttgaggggttcataagttgtttggtattagaggctccatttcaatccccctgcatttctttagggtctaatttaaattcatacatcacttgattctagagtaaaccattatcataccctggattttgaatattaaggacagttgagggagtttctcaaagcaccattttatgacttatagtctgcctctgtattcagtgacttattatatattccattcttagactgcattttgatcatcaactgtattaaggcaatatatgttgtactttattttactttctactgaaagtaagagctattttgtagtctatttagatttttaattttataatctgg

SEQ ID NO: 35891 - DNA, 1049 bp, Homo sapiens
ctggccaacacggtgaaaccccgtctctactaaaaatacaaaaattagccagatgtggtggcaggtgcttgtagtcccagctgtttgggaggctgaggcaggagaatcagttgaacccaggaggcagaggttgcagtgagctgagattgcaccactgcactccagcctgggcgacagagcgggactctgtctcaaaaaaaaaaaattatatatatatattttatcaatcagcttcttggatagggaatggctgacaccttgaattttgaaaaatgtttgggaatggcagtttctatggtgtgacacagaaatatagcagtccttgatatagttgctgtaataagaatggaacattctaaactttgtttccgatttgacagctcttttatttttgaggtatctcagatatattttgtatgatccttccatttcaccctcccttgtgtgcttttattttaatccattgaagactttgtctcacagtaaacagtgtgattatgttctcttctaccacttagcggttttcagtacttaggtttgtctaatgggctcatcactgaaagatggagtcaattccctttgctgacttactagagagtgtgtgcaaatagcattaggttggcatagtgtactgaaaagttctgtcagaccaccatatttggcagtaagtttggtaaatgtgtctaaaatgggcacatctgcccaataccttagttcctcttctgtaaagcaccttaaacctccaaatgtatcgtctatcaggtgtctttttttttaagatggtctcattctgtcacccaggctggcagtgattttggctcactgcaacctccacctcccaggctcaagtgatcctcccaccagtagctgggactacaggcgccgggcaccatgcctagctaatttttgtatttttaatggagagtgggtttcaccatgttgcccagtctggttttgaactcctgggctctcagcgatctgcccgccttggcctctcaaagtgctgggattacaagcgtgaaccaccacacccagcctaagtgtcattt

SEQ ID NO: 35892 - DNA, 1114 bp, Homo sapiens
cctctgtttccacatttatgaagtacatttaaaagttgtttgtggctgggcatagtggctcacacctgtaatcccaacattttgggaggccaagatgagacgtataacttgagaacaggagtttgagaccagcctctgtaacatagggaggcctccatctctacaaaaaattaaaaaaataattagccaggtgtggtggcacatacctgtagtcccagctacttgggaggctgaggcagggggatcacttgatgccaaaaggtcgagactgtagtaagcagtgataatgccactgtactccagcctgggtgacagagaaagcacctgtctcaaaaaccaaaagtttctacctacacggtaggattgttgtgaggattcagtgagatttcatgtttaaatagcccagtgcccagcacatgataaagaactcaaaacatgttagctgctgtattttatataaaacataattattagtaattcatagtagataaaccaataattctccacacttaagatagatattttaaaatttagaaacattttactcagttgaaataatttaaaagtattcatattaattggtgtaataagttaggacttattttaggactactgccaaatgactatgcaaaataattggcatagttattctagataattgaaatgtcttgcttgatgtaaacagtagaaaacaagagagaaaaacctctgagcagtctgcctttggttttcccttatgttagcccttgaatttttaaataaattcttttaaaataacgtttgggctttggctcagtaggaggcttaccttttaaattatcagtttgccttttgggtaaaaatctatggattttctattatggggtgttagtagatgaaacaactcttactgctggccagctatcaagaaaggacatatatctgggatgtcatcagataattttattttgatcacattgcttgcacaagaagcaagtcagtcagctctctgatggagatctggtaaggggaggagaagcaaatgagaatgtccttcaccttggaagtgtagtttctgctttgacatctagcagctgtatgaacttctgtagctcacttaagcttaccacttacc

SEQ ID NO: 35893 - DNA, 1030 bp, Homo sapiens
tggtggtttatgatgatcctgactgacggggcattagtttttccccttgtatacctcctcaagcacagctctgtatacttacgtgagaaccacccaccatgcgaaaataaaatgcatccctgccatacctcagaaactgtcagtctagtaggggagatgttaagatttgcaatattactaaaaatgatttttttatctaatgatgttagttttttagatcaagagttaagtggtgtaaatggttcttcctcttcccacagatatttcactggacatctgagatgtcagattttaccaaaaaacaaactacaaaacagaggctatagcataaatcagattatggaacattccaacttaaaactcaaatggctttccaattgtatttagaattaaataacttctgagataacttctaagaccctaagtgagatcataaccattttttcttttgcatcctctgtacaaaagaacttgaactacatcgaacaaattatgaaacatccttatcattgcactgttatttttgatttttgaaaaagtttcaaagaacactcagatttgtattctattttaaatttgcaaataccctatgaaatcctcccctcccattatttaaaagctgtataaaaataatagaagcaatgaaaccacattttgaaacatgtgcaagatactgggaaatgggaaaagtcattctataccattgtgttaaccaaccatagtcactattttagtgtttttcctccttgtatttcctatgcattaaatgcaggttttcattatttgtacatttttatatctagctctttttggtttgacattgtatgataagcatttttctgttatatacaagttatgtgtaaacataaataattcagtggatttatattttatttgaccattgtcttattttggacatttaaatttgtttccaagttttcattttatgcatgaggctcagatggagtgtctttgtgcatgtggagtaagcactgcccttcactctgcccgtattttctttcgcctttaa

SEQ ID NO: 35894 - DNA, 1039 bp, Homo sapiens
tagtaaaactagatgttcaaaagtttattgggtaatgatgtttaaataattggctaatttctttacctaaattgcttttattttaaagagaagcacgtcagaattttattaggcatattagctagtgcatggcgtggtgatttgttaggttttgggtattgtaagagagttttatttgtttagaagtagttggcaagatatttatcttttgattttttttcctaaaggtgagttttatataggaatctgtacctcgggatcacgtggctttgtgtaccaggcgtccagggagcaattaggagggcaatctgttaagtcttttgcctcagggcagaaccattaggtgtgctgtgtatgtgcctcaaggggtgtaaataactaagctattcatgtactcatcagtttcctttcaaggcatctgtgaaacctttaatctgtggaagaatcagagaaagttgacctattgtattattatcctccctcacctgaatattttgataaagtatattttagaatttacagattggacattaagcacatgaactttaaattccactttccattttgatgtgaatgttctaaaagttccctatgatttaaatgtaagcagatctttaatgtctacagaagagattttttttttttgttgatttattatctttcggagtgaataaattccatttactgatggctgagatttctcactgtcatactacagaaatgagcagcattccagtttgtttcctatattaattttggggcattattgaaaagaaataatcattcgtttccctttctaccattgcgcataaatgccatttaaatgtggagaaatctcttccaccttaaaaaaaaagccctcctttgacactgagcctttctaccccattcttaccctctgccctattttttttttttcatatccaaatttcttcaaagagtgatcacattcactttatttcttcaccttgtacttcattcttttaactttggtctgccccagcactccactgaacctgctaaagatgccagtgttgct

SEQ ID NO: 35895 - DNA, 1055 bp, Homo sapiens
atgaatattttttagcattagaatgtgttatgtcatttgaattaattttgactacactttggcttgggagaggaattattttaaatagacattggtactttttgaacttgatagctaaagattctaaaatgcatgttttatactaagttttaaccagtcaggaaaattttatgtaactagtgatagtttatttttttgtatgaattttgtttaggctgcaatgtttagcttttgttaactcctcactcttgctgtcttaagttcattactatgtttaatggcctacttgccaagatatttagcatgtaaaaagcagggttttgattaaaaaaaaaaaaggcttcatattgaagctgagacttacaataacaagttgagtggcaagcctggtatgctgtgtcttattgccagaatcttagtaaatgtaatgtttaaaaaaaaaagatattaaaggatagtaagctacaataattaaaactgtgtgatgaaggcacatgtatagatctagatcagtgaaataaaatatgaagacaggaacctggagactgcagaacacacagaacatgataaaagtagcattttaaatcagtgagggaatttattcaaagggtgttgggataactgggtagccatctggaaaaaaataaagttggatctataatttatacctccaccagaatgaaatttaaatggatcaaactttaaaaggcaaagtcacaaaagaaatagaactaagcaggggagaaaacttgtatagtttagaatgaaagttttttttttcttgacataaaaccctgaaacaataaaaaaaacaagattcataagttagattgtataaaaaataaaagattttgcatacttaaaactaccgcaagccactttgggaggctgaggctggcggatcacgaggtcaggagatcggagaccagcctggccatcatggtgaaaccccgtctctactaaaaacaaaaaattagccgggcgtggcggcatgtacctgtaatcccagctactcaggagactgaggcaggagaatctcttgaacctgtgaagca

SEQ ID NO: 35896 - DNA, 1057 bp, Homo sapiens
gtctttggacgactagttttgagttgaaaactatatgaagacaaataatttaataccacaaagaagtgaggatccttttttctagtgtgtactgaaaacagctcttttaggaatttttcatttccattggtttttgtcttgtgatatatgtcttttcatgagggataaattttatttgcactcactgtttatggagtatcgagtaaaaactagaacaaagcagaacgaaccttcctatacaatgccttcccacaaaaacaaatacctccctcaaaaaatttctgctctgaacatgaaaatgcttatctgcagcttgacattattagtatgtctgagtcctagggtaggtaggagatccaggtattatcattcaaaaggaactgaaagtgtgagcactctttgaaaaagcactattagcaatgtaaatgccaagttacatctgataggcaaactcttaagcctgtttgtgtgatatttaaggtgagaaaatagttttgcctattctttatgactttgaatagccttaggactatttcattctgtttattactctgtcttcatactagatttcttttttttcttttttgacacggagtttcgctcctgtcacccaggctggagtgcagtggcgtgatcacagcttactgtaacctccacctcccaggttcaagtgattctcttgcctcagcatcccgagtagctgggattacaggcacccgccaccacgcccagctaatttttgtatttttagtagagacggggtttcgccctgttggccaggctggtctcgaactcctgacctcaggtgatccgcctgcctcggcctcccaaagtgctggcattacaggcatgagccactgcacccagcccacagacagtcattagtaagtattctcttgtaagttttcctaacaattaacatctgtgtacattggttttcttgctaaacttaactctaatttttgccagtactaatatgtagtatccactcatagtttttaggacttcaaaatctgagtgtattgggtatatggtatcagcgtcagcattcatatga

SEQ ID NO: 35897 - DNA, 1043 bp, Homo sapiens
acacaaagctcaaagtaacattatgtgtgtcatggcttcatattaaaggatgaataaaagtacatgcttgcctcagtggtgagcagttgtccatagttttttttgttctgtgacatgtggctacttggctatggaaaactaacacacagtatattacctctttgatcatcagagtgatatatttttccctgttgttcagctgtaactccatatagtcacccttttgaatgccacaagaagggctctttttccctttagtaattgaggtattcatgcagtgtggagtgaatagatccctccaacacagtgcattatatagtagttttttgtgtggatacatgtaatacaatccgttcaaaacaaatgtaaaatttactaaggcttttcatgtggaagtagaatgcatatatctttcttgatataacaaatgaatttggttgtagctaacgtgttgtactagtaaaggtccacctgctaaactttttcttttttgttgaggtatagacagtagagtgataccgatacatgaggaaaatgagaactggaatgcaggccaaaagctggtcctttccagatgaatgcaaccaagactaagtagcatcatgttcatctgatagacaagtgtggctggtgatggctggtcctgcatgctgtgtcatgcatgccgattctctccacacatagctgtcagtcatttggtgacaaaatagccagaaaatgcatctttaatattttggattagaaagagacaatcctttctacctcaacttttctctgatattttttcaaaggaattgagtagtctgctgccccttggcatggtactctgatcaacatttataatcttaagatgcatttttatttatgatgagggactcacctagagttacatagcaattagtaataaaattgactagattttaatgatgccaacggttctttctttaataatttcttcagttttccaaaataacagcagcaaagtcgtgatgccttatgtgtagaaagaaaaaatttgggctgggcgcagtggctcatgccca

SEQ ID NO: 35898 - DNA, 1045 bp, Homo sapiens
tgtatcctgaagtacaaatatactgtacttttcttgatgctttaagaatcctgcagcttggccgggcgcggtagctcatgcctgtaatcctagcactttgggaggctgaggcaggcggatcacgaggtcaggagttcgagaccatcctggccaacatggtgaaaccctgtctctattaaaaatacaaaaaattagctgggcatggtggtgggtgcctgtaatcctggctactcgggaggctgaggcaggagaattgctttaacctgggaggtggaggttgcagccagccgagattgcaccactgcacatgagcccaggcgacagtgcaagactcagtctcaaaaaaaaaaaaaaaaaaaaaaagaatcctgcagcttgacagaaaagctgggaaagcgagaaagtcttcagtgattcaaggtctaaatgcatttggaaattatcacgtggaccaaaaaatcttgaatctcagaatacaattttgacagatttattatgtgttgtgtgtctgtttgctctgtctttgtgttggtcttcctgtgcaactgtcagtgttgtcagtagaggttatagcaggccacagatatatcttgatgaggacatgctgggcagagaataatttcttagccatgtgctgtatatgcatgagccttgatgtacaaaagagtgcatgtagtttttgatctgggaataaaaaaagcaggttctctgaccaatctagggaatttctgtaatgagaacgtgtcattaatgacatttcctgagggcatctgcagcatgagacagaatagaatttttctttcttttttccatttgctgtagagtccctttcttcatcttcattccatatcttctttccttttctctgtcagcctgcctgcctatctgcctgccagccagtcgtctgcctgtctacgtatacatcacaccttcgcaaaagtattcatgggcagctactgtgctgtaatgatattgtgacatttcagagtaatctaccatatttgttttttaaagttcatttttttctgtgctatttattttgact

SEQ ID NO: 35899 - DNA, 1054 bp, Homo sapiens
atgatccacccgcctcagcctcccaaagtgctgggaccacaggcgtgagccactgcacccggcctctcaatacctttttaataggtattcagtttttcactattatgaacaattctacaataaacattattggtgtattcatcttgcccagttacattctgagggcaaatttctagaagtagaattgcttatataattttattttacatatagttatgctttataggaatatattgagaaatgtttaatttttttatagtcagcgctcccagaaagctgataatttgtgcctttaaaaacctacttttaggccgggcgtggtggcgcatgtctgtaatcccagctgctcaggatgctgaggcaggagaatcacttgaactcggggggcggaggttgcagtgagctgagatggcgccattgcactccagcctgggtgacagagcgaaactatctcaaaaaaaaaaaaaaaatgtacttttagacggaatgtactgtgcatccagtagggcaaaaatcattcagattgctagacttgagggttcttgggtctggttttttgtaaattttttgtcttcttctttaggtcttttccagatatgcggcttttaatctacagggggcttggaaacaatataaccaaccttattatatgatgtataaaatagaagcaagcaacccctgagtcaaagtatatggaatgttctagtgctaggggtgggataggaacattgttggctggttgaattttgcataggtaaggactttgttttagtttggggaatatttatattgatgctctgtttgattaaattatttctattacagagcagccatttattgatgaatataggagacaaagccatataaatggagataaaaggcaagctcttatgattaaaagaaaattcccatcctttaggttgcaccagtactcccaggaagtgctagtgcagtgtctgcctcctcactccttccttgtctggcacatcccgcttggagtgctcctttttgggagagtgtgcccttgtctctgggcatgtgccctgggctgtca

SEQ ID NO: 35900 - DNA, 1035 bp, Homo sapiens
gtctcaaactcctgacctcaggtgatccacccgcctcagcctcccaaagggctgggattacaggtgtgagccactgcgcctggctgtgtatgttttttttttttttttttttaaagataatcagtgtctattatttgaaaaatgtgttttatttgaaaacactgagtttgtctaattatggattaaatcctaatatgtgacttcgttgagaaaattactaacattggcattccagtttgtctcacatactgaaatctcctctttatttaccagaacagattccatctctgtcttttgactgaagtgaaaacataagaccttcttttgccttttccacaatctgtcaacacctactgagttggacagaaggtttaagcacagtgaggcttcatcttcgtgttcctgagggaccagaatcctctggttacaaagccctcagagctaaattcttagtggggacacatgtacagtatcagtgtacattcagggttggtgtttctttggctatctgagtaactttgaacattacaaaaagaaatgaaaaacaatcaaaatctcttgtcctaaacactgtaattggtttctccaatttctacttcccacgtctgaatgaacttgtaagaagaaaatacttcctctgtaggtggcctggtcaggttggcctgatacctggagtgaaaagattggaacagagtaaagagcacaaatctgggaccctggaaaactgccctctggtcctggttttgctgtttaatgattgttataactaaacaaggcagtttgcagatctggctttagttttcctacctgtacactcgggggtatagatgatctccagaattacggaatcacagggttggaagtagctttgtgcaaccttcctgaggggcatggacgtgatctttgaagcagtcttgacaggtcgccattacatctccatttgtctgtgttcagcctttgcttggcgtccactctagaggtggggaaccgttggttttcaaggtagttttgagcaacttaatattaggtagcttt

SEQ ID NO: 35901 - DNA, 1287 bp, Homo sapiens
ttagggtcttctgcatctcagggttggaggcttctccctgctttggcagaatttctcttccctccagtcttggccttctccattaacacacaggtactttgaactttatgtctgcaggtctgtgtcattttgctatctctttggggaaccacctgcctaaccttatgaggtcctgttcaaaactgtggttctgctcttttcagcaactgatcattattgcatatcactgtcttttaacatctactaaagctgaaaacatttgtatacttaatatattaatagtatattacttgtttatcagtatgatggtttacataaatgtgaagcctagaaattttatagggacctggtgtagtaatccctaacagatattgaaagaaaggtaaaaattagttgaaaggactagatcatcctcattcctcactcatttttccttaaagaatatattaaaaggcaaagttgtctacagtcagtatcaaaattttgttttaacaatgttttcaacattttacatctttctggtaattttatgaagtctctgaagactaaaatctgtcataattagtcagaagtaatatttccgagtaggtatttactttcaaaaagcctaagtctttaaaggtggcatatgatactataatttatctcagaaatcttttatttatttatttatttatttatttatttatttattttgagacagagtcttgctctgtcacccaggctggagtgcagtgacatgatctcggctctctgcagcctctgcctcccgggttcaagcgattctcctgcctcagcctcctgagtagctgggattacaggtgcctgccaccatgcctgcctaatttttgtatttttagtagagacggtgttttgccatgttggccaggctggtctcgaactcctgacttcaggtgatccacccacctcagcctcccaaagtgctgggattacaggcgtgagccattgcacccggcctctcagaaatcttaaaaaggatttagtttcatttaaaaataacaaacacagttccccaaatctgaaatttagttattgaaactggaccatgttgtccatggaaaacatatcttactttataccagattttaaaattaacactggtgtaagtgcagcctaaaattcctctgagccccacttttacataagaaaaattattgaatatgataaaggtagcatttccaatcagtgagaaaagataggttattcaatttgtgttgggactagtggatatatatctaggaaaaaaagtacagactctaaatattg

SEQ ID NO: 35902 - DNA, 1049 bp, Homo sapiens
gcagtccattttcatttcagaattgctaccagaaagaaattgtaaaagttttcaagcatgattttgtaaagcaaaagatcaaaaaaggagagaaattatgtggaaaattggcaagattaattatatctctattaagaccacctttgcgcaagatagttttgggttattactgctgattttcagcctttaaagaaaaatgtgggttcttggtagcaacttacaaggatggtgtttagagctatagttcccccttctccaccataccctgttttcttgatggttaattttacttttaaaaacatttgtatttcttgactatttattaattagatcattttgcttagtcatacctaagagttttgttagtcttcggtttcttagttgtatgagtcagagtcaggaatgcaaatttattagctttttgtggagagggatatgtgggatggtgagagctgcgggtgggtaagcatggagtgcaataccagttcatagacaaggatctaaaaggagccattaagctccatggaaaacattgttacttgatcaggccagtaaaggaagactattttgagtagctactgaagttatctgatagttaatttaattgatttgagtaactctttcagggaccccagatttgtaaaagtggcactgttgtgacttttgataaagggagttttagcctttcatgagaggaagccttggacttatttgtccttcatgttgagaagcttccgtatgatcttcatggtttccttaggcacaatcactgtgatttcacctatgtatagcagcccaactaaggtgaagtcagcatatagaccaggaagatacaaaactacgaaaactcaggaccagccttggcaaaaggcaacatgtgtagccctaaattaccccggtactctagtgctcagccccacattgacaattgcacagaatttaagtgttctgagtttgtgaatagtattgtaataatggatgtatttcctttttttttttttttttttcagacggagtctcactctgttgccaggctggagtgcagtggt

SEQ ID NO: 35903 - DNA, 1677 bp, Homo sapiens
ggcgtagtggcacatgcttgtaatcccagctactcgggaggctgaggcaggagaattgcttgaacccgggaggtggaggttgcagtgagccgagattgtgtcattgcactccagcctgggcaacaagagcaaactccgtctcgaagaaaaaaaaaataaaagcgcatacctttgttagcatctgcctgtagactaatggaaattaggttggaactgtagttgcagaaatgaaaaggactttgagttcacaaaggagttcactgcctatatctgttagaagatcctgcctcaatatatattatctacattaaacaggtttaggagattattaaatgaaaatcactcaagcgtgccaactaaaattattcaagttcagtttcaaagtggatttttttagtataaatagatgcaggttcccaaagaagccttcaaatgggtagaaatgctgttttttcttttcctatgggtactgtttttaggtatggttagaggacacagtttcagaactgtagaacacagtaattagaaaggctgcctaaggggctgtgtggattgtgtgagtagagtctgaaacataaatgaaaagcaaaagctaatcaaaagaggttcatgttagcatgtgcttttcttggtgctccatcattactgtagctaatcggatccttaccactgaagtgcatacttttaaatttgtacagttaaggacttttgttttgaaatactataagcgaatgcatgtctttttctatatttaaataactgatatactcaagagttttggagaatgggtagattgtttatctgtgaatttttaaagcagattgtacatatcacagttttgcttcataagcaaactgtgtggtttttcttattaggaagcttcaagaaagaccttgaaaccaagtgaaaaccattgaggatatcacaggatggtagagttttagaattcgaaggtactttattggtgatctaatcagtccatcaatttacatatgaataactgaggcagtgagaaattaagtggtttgcagaggtctaaatatctagtagtgggagaatcaaaaccaggactacaggcttttaacttgcagtccagtccttttatcagcaccaaatatggtgatttgaatgtagattatgctaaaggaatggggaatgataactgctttgttcatagcactcataaaacctatccagggattttgaaaggctcaataattttaacacaaagaaggattcaatacagaactagtctatgatttatttatttatttatttatttttttgaggcgaaatcttgctctgtcgcccaggctggagtgcaatgttgtgatcttggctcactgcaacctccgcttcccgggttcaagtgattctcctgcctcagcgtccgaagtagttgggattacaggtgcctgccaccacacccggctacttttttgtatttttagtagaaattttcaagacctggttggtctcgaactcctgacctcagttgatccaccagcctcggcctcccaaagtgccgggattacaggtgtgagccactgtgcccggcctactctatgatttttatttaaatgaaaccttctagtgactatctagatgagtgaggggtcaagacacagaaacaaatgtttccaagggaagtggtagatggcgatagaaatatggatg

SEQ ID NO: 35904 - DNA, 1035 bp, Homo sapiens
ctgtattggttaaaagtttgactactggctgggcgcagtagctcacccctgaaatcccagcactttgggagaccgaggcaggcagatcacaaggtcaggagatagagaccatcctggctaatgcggtgaaacactgtctctactaaaaataaaaaaaattagccgggcgtggtggtgggcgcctgtagtcccagctactcgggaggctgaggcaggagaatggcctgaactcgggaggcggagcttgcagtgagccaagatggcaccactgcactccagcctgggcgacagagtgagactccgtctcaaaaaaaacaaaacaaaaaaacaaaaaaaactttgactacttcacctaccctcttaattcttcattaaagaatgaggcttaattaaggcatagcttgtgttgacatgggtataaagtcaatgcttagtttgcctgaagaaagtttcgggttttcttttttctgtttttgttttttttcttttttggtctttcttgggactgggctaaaactgtagtgggtttttctcctttctgtttttttgaactacattagccattcacagaacagaagcaaatagccatttttaaaattcatgtcttcaaatgttaatttgatgctttgaggcataaatgacctttctagccagcccagacttgtcaaacaaaggactgataggaacaagctgctgtttgttctaatacaacaggctgtttttcatagagaatttcaaaacaattttgcttccctcttctctaaaacattaaattaaacttcggcttgtgctaggtttgaatttagaaacaattgtgtatacacaaccgttaaatggaatcctgaccacctgtgcaaaacgaactgcaggattcagcttgtaagccaagccacagagtacgtaagagtgttaaaagaaagagagaaagaagaccaaaaacagtagatgagcagagtgaggcattgttacatagcttcatcttgttatccttgcatattaattgaaactggtgaaatgaactgaatccgtgttgtg

SEQ ID NO: 35905 - DNA, 1059 bp, Homo sapiens
taaatgacacagcccatcttgtagcctagggccaggtacggatgcggagtgtgcaagggttctgtgactgcccaggcttattcctgtagttaagactcaatttctatatgcccatggtttgagtatatcacaggttagccttctcacatttactgcaattatggtttagcgaacttatctgtttgactgagttagaggcaacatggtatagcagagtccgatgaactgccaccttacagtgtttggtctaggtgctgctgctgtccacacagaaagcctatcactgagacagtaagtattacgagggaagaagactttatttgggtgctgctactgaagagataggagatcagtctcaagtccacctttctgatggactaaaattaagggtttatgtagcagagaagaaatgtaaccatgtgtgggaaaataggaattagcgaggggtaaggaagaggagttggtcaacagaaagcaggtggtcagttagccaatcatggtgggtgtggggtctgatgtctcattattcagatgtggtgatctggttaagtttcagttccttgagactgtttgggaggtctgatggttggtttcttgagaaaggaactcaagataagaaaattttaactttctcaagttctaagactgggagggtcaatttctgtgtttattcaaaagaaactgtaaacgtcagttctgtgggacagttgggccagtttcggtcccaccctttttattgatcaattcatcattcatagggaatctgtcttgtcagtctttctggctgcttcatgcttaggaggggtgttttgggcagctccataccatggatgaggaatcaaagtttaatctaatacatagttttcttctgaagcacaatctttctctctctagtccttcacttctatcaaagacagatcacagcaggaccaacctacctgcaaaataagcttcagtcccatatacttggcctgattagtcatgtgaaatgcaacaagaatcattgtctacacaggctctcctaaattggctttgctggaacctatcacaaggccattt

SEQ ID NO: 35906 - DNA, 1073 bp, Homo sapiens
tcatttttcagaggtcttctagttctctcctctctgctgtaaagaaagacatttttttgagtctgagtcgctaaagtttgttgtcttgccttttccctctcagtgccaatggttgatgtcaggattttgcccgtaagacaggtcgaccaaggcctttgtaagccaccgatttaatgtttcctagctttaacagcaaacactaaaactgtaggagatggccttctctaggtccccaaaagtggctgaattaatcacctctgcagtgtagacatctgctgcctaaattctgcctgaataggttgaatttgagaaatcaattttaacaaaaagggacactgctacataaatataaatttaaaagcattatttggaaaacggtgttactgtggcagttgggtcacagttaagatgaagatgttaactttgtaaacaaaagaccttcactctttcttgttttgaatttgttttccagcaaaataaaataaaataaagcactaagtcttcaattagaagtcaaagctgtgaatagctccatgcaccagacacagcataagccaattataaacgtgtcttcatagcccagtttaaaatctgcataatgatatggtgatatctaacacctataagtaactgtatccatggtgtgagacagatacctcattcggtatggcgtatatatgctttattagatacactggagaggtgtctgtctgatgcctcaggatcatgaatacttttaattattaagatctagaatgtgccaccctgcttaacattctctccaaacagaattctaccgctcccaccatttttatccccagcaaagattctgattcagtgggtctgaagtggtatctcagcatctgttttttacaatatctctggcattttgatatgcccttacttttgagaactactggggcaagcaagtttgatgttgggataaatcacaactaaatcagaaccaaatcaagcagtagacaggggacgccaaagacttagatagtggtccttcatgtccatgaattctcctttgctttctgcctgtgacattacattaccaaggtaggcgg

SEQ ID NO: 35907 - DNA, 1061 bp, Homo sapiens
cagcagcagataatggtgaaaacttattgaattaacatagtaaagagagaaatactctgctaagtttacttgtctcatatttttctaaagtctttgaaagacattttttccagcatggcctacacagctttataaacatcatgtatttacaatgaaacacttttgtgaatttgattttttagagaacctataaactcatctccagagataatagtctctgaacctaaaaaatagaaatatctcaattctaaagtaatctgcatttgacttagcacaaatcaggaaagttctggaaataagagtgatccttgtatttagtttgtcacaaatttgtatgtataattgaaattgagattgaattaaaaagtaggcaaaaagagtcttaattaatccttttagcacagagtttttatctagcctgtgtgttattatttttctttctatttctaggtgctcctgatccaacagcaggtgctagtatagatgatgaaaactgctggcacttagatgaagagcaggttcaagaacaggttaaactgttcctttcccagggcgggtaccacggatcagggaagcagcttaatttgctctttgcaaaggtatgattgtctatttctaaagaaatattctaaatatatacatatatagggactatctgaatatgatcatgtctacaataggataaagacttttaaaaattaaagaacagggtcttagctgaccaatagaaacttttgtattgtaatgcaagctattttttccttaggtgatcttagacaagatatgggatatttttgtctctctcagttcctatcaataaaatggtgataatttatacaattttgaaaaacctcttacaataataaaagcaaaataattaacagtgttattcaaaatgccatttttttcaagtttttccctttctagttaattttcccaagagaacttagttttataatccctaaaatgtgctttaattatttagtttaataatgtcagtatctgtaagttaatttcaaaagcttgagttttagagtcatatagatctcagtttgaatcca

SEQ ID NO: 35908 - DNA, 1023 bp, Homo sapiens
accttagtgcaaagtggttgaactaaccactgtggtttcctttcagaatttattttaaaagtctatgttgccgttctcaaagcagcattcagggagcacacaggggaagtcagctctgccaccacgcctgtcagaatttactaagaaatgaattttgacagcttaagtgtaattttgcttttaaaattggctttcaggagcccaaagaatagtaaacttccagttactttaatttttttcttttgcctatgatgcgtatgaaatgggtaactattctttttattaataatcactttctaggaattaatatctgttgccactcattagaggcaacaatgtgtatagttagagagctgtggttcagaatcctcccacacctctcacccctgatacagagcaccattttctggaaacctggcatatttgtgtccctaacccttcttaggtccaggggtagtttccatagttaagctgtggtgtcatctgtgcatttacaaatcaagatgctctgatgccacacattgagagaggatgttgctcaaatgcagcaaggttttacgctatagagggttcctttctctgaggcacttgtattgtgaatgctgtctgcccctgagttctgggtttttcatctagctgtgggacagttaggggtttgtttatgaggtgaaatctgtaacggatgctataccctgaagaatcttttttgattaaggattatattcctttctatatcatttacttgaaattcttatttgtatatgttataactttatgtgacattttaacaatatgctttacaagaagtgttagttcattttttaggaacgtaaaatgtgtatgctctcttcccacagccggaccatatagtggtttaggtgaaataatccatcgggagagcgttccaatgcacacatttgccaagtatctcttcacctctctcctacctcacgatgctgaattggcatacaaaattgcactgagagcaatgcggtatgtattcacagcccagctgggcagagg

SEQ ID NO: 35909 - DNA, 1027 bp, Homo sapiens
tgagggaagtgttccttttaaaagtcatgcttctaggctgagcatggtagttcatgcctgtaattccagcactttggaggccaaagcaggagaattgcttgagcctatgagtttgaggttatagtgcactatgatatcattacccactacaataaaacacgaagttcagatggtcattcactagggtgtgtgatattttggagtatagaccttaagtgattatgacatatcaaaataatgtggtcttatgtttcttttttttttattgcagatttcattgaatatacttctattaacagcctgctatatatcaggcattctgataggtgttggagatacaaaaaatgaataaagcaaaaatagttcctgccctcacaaacaagtaaataagtgattcatctatagtgtgattagtactgatagaaatatgccattttgtgtgtacattattactaccttccttttgaagattaggcttttttgttagactcttgaagttatggaccttttggatggaaaatacatgtcatatatgccatctctcctcctctatgaccaatatccgtgatccctcatagcattcctgatgaatttagcctcagagttttttttgagagggagtctcgctcttgttgctcaggctggagtgcagtggcgtgatctcggctcactgcaacctctgcctcttgggttcaagcgattctcctgcctcagcctcctaagtagctgggattataggcatgcgccaacatgcccggctaatttttttgtatttttagtagagatggggtttcaccatgttggccaggctggtcttgaactcctgagctcgtggtccacccacctcagcctcccaaaatgctgggattacaggcttgagccactgcgcccggccagcctcagagttcttaatacagcattatcagccctaatagccctagtctgccaattgaaattggcattgtcattattagcctatttcctatactctagtacctatttgagttataagtttataacttttaaa

SEQ ID NO: 35910 - DNA, 1029 bp, Homo sapiens
tcacatagtattctctttctgggtaaactaaatgcttctctttagcccacattggctacagacatgtactgttcgtatatgtcatggattactgcatatctccatttggatatctcataaacactcaaattcagcatgtccaaaattgaacccatcaccccttcctcaagtttacttcagtatttctcattcactctattgctccagtcagaaacttggttgtcttccttgactccttattctttcttgaccttatagccttattaccatggtctcttaatttaatgactcaagtaactcttcctgcactttttctgtacctaccgctataacttttggtcatgctagcattatgtcttgcctgtgctgttgcaacaaattcctaataggcctctctacctaggagagtaatttggttaacaacaacaacaacaacaacaacaacaaaaaacccaaaacaataatttggttaattactgtttcagagtaacctttcaggcatgtaggtttgaccctctgatcacaggcttaaaactttgaaagtgttctctacttctgttgccctttttatgaagcccaagtctaacatggcttatggtggaccctgaacaaactaacctgcctcttcagtcttattcttgctgcttatttgaggcacactatactccagacaagctgaactttcttggaacactccacttctaactaacctagctaactgctgtatctccttttgattcctagcctaagatgggtcccctgctttatgagtggcgagtcccctttgtttgctctgtcaaaaaactcattgtattgtattatatgtttgtgtctggtcagactcaagttcctttatattccccactgcctagcacaggcactctgcacactttataaattatctgtttgctgaatcagtgactaaatgaacttccagcttctctttcactgctctgtctattcaagttttgacattctaaaaaattgacttgtgttgttcatcctccaggcatcaagaatatgacatga

SEQ ID NO: 35911 - DNA, 1033 bp, Homo sapiens
aaggttgaaaaactagctgttgggtactctgctcactacctgggtgatgggatcatttgtataccaaacctcggtgacatgcaatttactcatgtaacaaacctgcatatgaaccccaaaccttaaataaaagttaaaaaaaaatgcctctgcagaccaaatatttctcttggtttctgatctactttttaggtactatcccatgtatttcctgccagtatcttaaacttaccaaaaacagaatccattgcctttatccccatatttctgtatttgtattctgtctgttggttagtggagacaccatatatctggtttctcaaatagaaatcttattgataatgccagcttccctcattccttgaggatgtttgctcctggcccacccacactctcagcaaaatgaccttgcttgtcatttcaccaccaagaaatataaacaaccagtaaagaactacaagtcagccacatctacccaactaccagcatctgtgcctatatgactgccttccttcctttgctgtggacacattttttctgttcctgttttgtgcctctttcctccacttgtactctggatcttgtctcctttcacctgcccagtcacaacttcagtggtctctctgtgctgcatcaacagttattttctttactgagtcatttccatcaatatggaaatgctgttatttctcccatccgaaaaaaaaaaaatcctcttaggctaggtgtggtggctcacacctataatcccagcactttgggaggctgaggcaggcagatcgcttgagcccaggagtttgagaccagcctgggcaacatggtgaaactccctctttacaaaaaataccaaaggttagcagggcatggtagcacatgcctgtggtcctacctactgaggaggctgaggtaggaagattgcttgagccggggaggcggagattgcagtgagccgagatccagccactgcctcaaagaaaaaacaaaaacctcttgactactctctttgaggcattgctcctgttttacttgatct

SEQ ID NO: 35912 - DNA, 2083 bp, Homo sapiens
aatagcttaaaactaagcaccaggtatatgaaaaaggaactggaaattttaattgtccagaaatcataggaatactgggaacctgtagttatgggaaatggctgtttttctgaagttgaaaccagtttcaattacaaaaccctctgaaattttgctaagcctatagttatctccctaagaaccataaaaaaagataattttattgttaatttcattccagtttagcttcctcattttacatgttgggagtcatgccctttaatatgcctggcactgcacggtggcagtagcagacttgggcttacccagaaccctaagtctctgacgctataggatagcgaaagaggtaggcaatcgtaacagacactgtataggataaatagggaagagaatgagagaaccaaaataaaaataatttaagaaacaattgttttactgtacatgtgaataacaagaaatggtacggggaatgtgaataacacgaaatggtatggggaatgtgtgactagtgaagcatattttaacttttttattactggaggaacagagctaaaggcctaaagaaggccttacagtatataacagtaaatagaagagtaacatctttatacaataaactgttagaaatgataagtgtaaagttgtgcgtctctgcggctcctgaacttgaagattattatgaatagattggaccagcattatatattaaaaactttgatacttagaactttccaactttaaaattcagaatcataaatggtgacaacagtagtagtattgaaccaaaaatagtcaagtaaataatgtctcagtaaagcaaaagcattatcttctcaaatacaaaaaatacaaaattcatttcttttcttgaccttgaaaatttctgttttccaaatacctaggaaaaatgaataccttctgcgttgaatccatgtagcaatctgaaaaaagaaatcaaaatggaatggtactgaaaagctaatttgtagcacataacggtatatagttctataccattaatactaaaacatgaatacagcatgcttacagagcccacccactcctaatactagttattaaagaaacgttactggctgggcgcagtggcttatgcctgtaatcccagcactttgggaggctgaggcgggtggattacctgaggtcagtagttcgagaacagtctggccaacatggtgaaaccccgtctctactaaaaatacaaaaattagcctggcatggtggcacatgcctgtaatcccagctactcgggtggttgaggcaggagatttgcctgaacccaggaggcggaggttgcagtgagctgagattgtgccactggagtccagcctgggtgacagagcaagactctgtctcaaaaaaaaaaaaaaaagaaatgttattgtctgactaaatttataagatatgtattggttaaaaccatgccatgttggtgcctctttcattagagcctttatgtcgtaatgaatttgactaaaattatcttagactttcattatcccaggcctaagaactcactggcatttgtttcaaggtaactgaacaagaagctgtttggaattggcagaagtcagatgaaaaaccaatcttacatgccccttcttcctctcttgagctgttgtttatattcaaattaaatacacattgtttctctctgtagatacctatgtacttaatagattctagttagtaaactgcacatgcccaataactttgaggaaatttagtgaaaatgaagaaaaagagaaaatatttctctttagacctgaggttatgtttaggctggcccatagaaacaggtccagataaatttctaaaaaagcaaagtagatatttatgaatagtattcaatgcctaggattaacatctaaaatgactcagtagtactgctagccagccaataaaatataaactccatttgtcttagttatatagaactgtgtttccagcttagaaaaagtcaaaccaatgacttttagaacaatctactctcattttttattcagcctctagaacatggaagctttaaaagtgaattggctaaataggcaagaccttctgaaag

SEQ ID NO: 35913 - DNA, 1679 bp, Homo sapiens
gttctcctgcctcagcctccctagtagctgggattataggtgcccaccaccatgctcagctaatttttgtgtttttagtagaaatggggtttcaccatgttggccaggctggtctcaaactcctgacctcaggtgatctgcctgcctcggcctccaaaagtgctgggattacaggtgtgagccactgcccagccagagaaggacctttaaaagcaataagcataactgctgttccttagtgggttttgtacagacatgtatttttgtttttcagctaaggagacaccagagggtgatggttgacagtagttggtacctcacagctgggcactgatcaggtagggggtgtcaatattgtttaggataatgtataacttttcttattagggggagattagtcacggggaactcttgtatataccaaacaggcaagagacttattgcagtttatcagtgccattttactaaaaactcccggtgagacagaaatactcaagtttttcggacaggtcttcctctcacaggtctgcctcccctgtctattgtcttcttacatactttatacttcacccatttattatttgtttcccatttatttgtctccccactataaaatatgcttcacaagtcttggatttttttttgtctttttagttaatcgatgtatctcaagtgcctagactagtgtctggcatttgcaggtgttcagtatatatttattgaattaataaatatggaaaagcctaatgataaagcaagaaaatatcagaaaggggattggagagcgcaggattagaaaaaagggtgttagatattcccagtgaaaagtattattaaattttgttggcttgatatgctccatttcagtataggaagatactgaatggactgttcatacattcattcatttttttcagccattcagcacactatttactcttgcagtgttttttgtagatatttctgtctttactctgataaaatttgtattccatattgttgttcttggacctctgtctcttaccttttctgtcttctgtctgagaaatcataatttctgttactgtttagttgatcatacatttactgaacatccttcacactgtgctaggtaatggcatttatagatgagtaaaacatcattctttcctttaaacagttcatgatttggagatgagatagaagtaaacaaggaagtaagtacagcaatagaagtgtgtactatgcagaacagtagcatggaggaaggagcgctttactgtctacagcagttaaagatttcctcaggaggtgatgtctaccatgaacagcaactttagtgatctctgtgtccgttagcggccattttaaaaagcatacataaaagtagacagaattttatgatgaacccccatctagccatcatccagctttaacaattatcaacttcatttcgtcttacctcccacatacttctctagttacattgatagaagatctagaagcttggtcagattcaggtttgtttgtttgtttttttggcaagcagcccttaagattttggtttctcaaaataataaacttcatttctttaagttttctaatatactcacttttctattttgattattgtagaactcttccccggtcttcacagaaattaatttctttcttgtctttggcatattgtatttctctag

SEQ ID NO: 35914 - DNA, 1033 bp, Homo sapiens
ttctgcagcatatagctggggtgtatgagaaatactggctggctggctacccattctggggagaaaccgtagcccttggctgggagttagggtgagagagagccctgtgttcttggctgttatgtccctggagtagagcttcctcacattgtggggtagggctgggtttgtggctcaaaagccacagattcttactgttccttccaagatttagtaatatttgtcacatagatgtttctgtatttgctgtatgcggttaagacattttccagagactttgagctttttataattttcaccagttagggttgtatccctgaggagagggtctgtggagctacttatgtcatcattccagaaatattctttctcttctaattcttttaaactggaagttaggcccagtcttgattagattaatgttgaccgtttttgatgtttcagaggcgaggctgtgggctgcgtatttcatcatatcaggaggcacttaaggtcaagttgtgttgttgttgttgataactgaatttactctgttggttaagctggcgactgacgatggatttctttattttaaagatttgtttcttcattacaattagcaagtaatctgtggagtgatacttggacacattgggaacattctgttccccaacaactgttctttcatttaatggttttagcatgggttatttacccatgcctgaataaattatttcactgtgggaacctttttattttggaacactcttcttcggtttttactctaattttggcacctttttgttttttgttttttttttaaagtcaatctacttaaagtgttggcatttagtagacttgctggggttattgtatgtgtgaaatgccctaaaactaatgacaaacacagataatacaaatattctgaagaacattgttatgtatggctgaaactgaagtcactgcaggtctgataaatctgttagtagcaggtaaagatgctgagttttcttttgtttacttgtttcttttaaggagaatttttgtttccaac

SEQ ID NO: 35915 - DNA, 1018 bp, Homo sapiens
gaatggcttcagctacatggtataggattagatgacccagcccttaagatcctttctgacttaggttttagatttttgtttaataggtcagtttggcttttttccccatagcatttcattttgtatgtttcttaaaatgatttggagatgcaccattggtggcacgtaagatgatgttggagagtactttactaacaagtcaaagcaattcttttgcagttttcttttcttccttctgattttgtcaaggataaagttaggtgttacttactgtatggtttaatacttttataacacttattaatctcctttttaaaacgaagacagaagacattatgcttagtcttgggcacgtaatggtacttactcagaatttagaaactttgaagtttgtgtgtgtatctcccctccctcaatttattatcttctatttatggaacaatgaaagagagtttcctttaggaataaattgatttaagcaaaaataatttgattatgaattttaaggatgagtatggggtatacttagaaaagatagaaaggcagaacatgaaggattagatgaatgggagtaattcagaacatgaaagctttttgtctccatttattttactgttaattttttattacttgtaatacatattcaagtatgttaacttatcattgccaggtttccatggatctcaatagtgccagcactgttgttcttcaggtgttaacacaggccaccagtcaggatactgctgtgttaaaaccagctgaggagcagttgaagcagtgggagacacagccaggtttctattcagtgttgctggtaagttgttctaaaattgtttgcttttctttttaataaaatgagacaacattaatttgttttaaaaccctagttttattggtagtttagtgaaatagattcagatgtttggctgctgatgcctttgccattatcttattactttatgacttcttaagggtgttaaataaatatttattgataaatataaaaataagctaggta

SEQ ID NO: 35916 - DNA, 1057 bp, Homo sapiens
agatgtccacaacagtcatatgtttaacaaatattgtctatagactatatgccaaatcctgtttagacttcttgtagactcttttcgcttttagtatttgttgcatatcactgtgatataactttctgtaactggcagtttgattttgtaaatcccttgttcattaacctccactggcttatctttagcatcctttgttattcactaccccatgtgagagactatagcatttatatttgtgttgtattttactggtggtctgtttgttatcttcttcttccatgtgattgtaagcacctttatttggacatacacatgtgtgcacacacaagtgtgtgtttgtgtgtttggggatttgctctcctgagaagatatcttagtctactcacttttaaggagctactgattgttttatgttagtcagtttcaatttagtaaaacattgttgagcctgtgggcagacactgtcctgggtactatgcatggaaagatgaataagaatgttcatattgtgtagttactatgttttctaaaaatagtcatttttctctggccatccttgtgggcgtagcagaaggaagaataaaagcccttccaggagagaataagacaaattaacaaacagaatatgaagagtattattagagagcagattagctgatgagctggtggacattgttctgaatgtacaaaaaaaaatcgccagggaaattatcagaataaatttgtcagaagatataggaaaaatgataatgagtgtgttactccttgactactttattttacacatgtatgttgcttgaaaaatacttcaactgtgacatttagtttttaaatgttatccatgattcattgctaaaacgactattcttttactataaaagtgagttcagttcatatattagggttaattttatataatatggcacagagggctactgtgtctgttactcagtgtaaatcttggtattgctttttaaataatgaattcataatgcaaaatatgcaaaaataaaaccagcaatattatttttgtaaaaattttgatgttgtcttg

SEQ ID NO: 35917 - DNA, 1045 bp, Homo sapiens
tatttaacattttaatttcatgattttttcctgtttaggtataagccattgcgacgcagggtgatttggctcatcggtcagtggatttctgtgaaattcaagtctgacttaagacccatgctttatgaagcaatctgtaacttgcttcaagatcaagatttagtggtatgtttcttaagtgccttaaaagagttagtttttaaagtttcatctgtgcaaatcatcaagttcacaacagtttatgtcttttctttatgatgtttatggcctttcactgcactagttattccttggtgagcagtttgatttgagggtagaaaatcttttgattcttgtttgcccttcccattactagtcattgaaaaaaaaattaagctctactattataaagtaatttataatttcttagaaaaaaaggcagttttaaaaaatccctttatagcttacatattctttttaaaaatcaggatagactttggcattgaaatagcatcataatttatttcatctttactgttgattctttgtccctcattttgagaattttttttaagcctttggaattattgggctcttttaaggaatttttctttctttatggtattcatatattattgttgattttgttactgagaacttgatagtaagctcttcattgctttttcccccttcaaagcagtaggtttgctgctttattataaaattactgaaatagtagtagtaattttacaggcgtatgattttaagaagtttaaattgtaaagaatagttttctttcttttttcctactggtgctttactgtatgcctgggtgaatatattagtgacttaatatacatgttcgctgtcttttcctgattttcaatttgttttaggtaaaattaagtgattttttttttctcccctgagttgtgctaagatcttttttaatcatttctcagtctccctccctttacccccccaaattttatttttagtttgaacccacctggtttttgcctgtcagcagaggtttggactgtacttcccttttttacatatgctg

SEQ ID NO: 35918 - DNA, 1057 bp, Homo sapiens
tttcaattaagttttctttgggaaatagagaaattgcttggagtttttcttttttctgttttgttttgggagactgagtctctcttttttgcctcggttgcagtgcagtgatactatcacggctcattgtagcctcaatgtcctgggcttagctgatcctcccacctcagcctcccaggtatctgggactatatgcaccacaacgcctggctgatttttctgttttttgtagagatggtatgttgccacattgcccaggctggtcttgaacacctggactcaaacgattcacccacctcagcctcccaaagtgttgggattataggcgtgagccactgcactgggccccgaaattgcttgggtcttagacttgttttataatgagtctattaaaaaaggaaagagaaaaatgaattatttcagccagcaccttaaaaacagaacattaattctaccagatatcaacaagtgtaactggagagaaagggattcatggccagataagtttggaagactctgaaataaatattcaaatgggcctcttagttaggcaactggtcagagtctttaaaaatgtgcatttgtggcatgcgtggtgactcacgcctataatcccagcactttgggaggccaaggtgggctgatcacgaggtcaggagtttgagaccagcctggccagcacgatgaaaccccatctctactaaaaatacaaaaattagctgggcatggtggcatgcgcctgtagtcccagttacttgggaggccgaggcaggagaatcgcttgaacctgggaggcaaaggttgcagtgagccgagattgccccactgcactccagcctgagcgacagagagactgtgtctcaaaaaaaaaaagaaaaaaaaaaagaagtacgtttgcattatgactagcccacatgactaatacattaatattcatagaatatactttgaggaaatgttgctttaggttcagcctttgccctttatatcttctggtggctacatctcacgtttacttgttttgcatatgttttatactgtaactattattttgcaa

SEQ ID NO: 35919 - DNA, 1019 bp, Homo sapiens
agtagaatgatttgtattccttttggtatatacccagtaatgagattgctgggtcaagtggtatttctggttctagatccttgaggaattgccacactgtcttccacaatcattgaactaatttacattctcaccaacagtgtaaaagcattcctatttatcctcagcctcgccagcatctactgtttcttgactttttaataatcgccattctgtctggcatgagatggtatctcattgtggttctgatttgcatttctctaatgatcaatgatgttgagttttttttcatatgtttgttgggtgcataaatgttatttttcttattaatagttttgttttggctaggcacagtggctcatgcctgtaatctcagcactttgggaggccgaggcaggcagatcacttaaagccaggagtttgagaccaacccgggcaacacggcaaaaccccatctctactaaaaaacaatacagaaaactaactgggtatggtggtgcatgcctataatcctagctactccggaggctgaggcttaagaatcacttgaatccaggagacagaggttgcagtgagccaaaatcgtaccactgcactccagcctgggtgacacagtaagactctgtctcaaaaaaaaaaaaaaaaggtttgtctttataattcataaagatatgagtgatatagtcacaattagagtataattttgaatttttgtctgtgtagtttaaaaagaatatatatatatgtgtgtgtatatatattttttagtggcagagtttagcttctattgtccaggcaggccttgatctcctgggctcaagtgatcctcccacctcagcctcctgagtagctgggactacaggcatggaccaccatacccagctgtgtagttaacctttaccagggaattttatccatccagatgttttcttgttacattttaccattattttctttaagattgatgaattcctttcagcagtttttgtaagacaggcctgtggtgatgaattccctca

SEQ ID NO: 35920 - DNA, 1057 bp, Homo sapiens
tttctattattattattattattattattttttttactatttctacccttttttctctccctcttgaaggtcaatgactcttacatttcctttttttttttttttttttttaagatggagtttcactcttgttgcccaggctgcagtgcattggaacgatctcggcccactgcaacctccgccgcctgggttcaagcaattcttctgcctcagcctcccgagtagctgggattacagggatgcaccaccacacccagctaattttgtatttttagtagagacacggtttagccatgttggtcaggctggtctcaaactcctgacctaaggtgatccgcccacctcagcctcccaaagtgctgggattacaggcgtgagccaccgcaccccgctacatttgctcttttgatgctgtcccatagatctcgtaagccttattcatttgttttcaatttttctcctcctttgattgtgttttgtttatttttctcttttgattgattgattgattgattgagacagggtcttgctgtgttgcccaggctgaagtgcagtggcacaatcatggctcactgcagcctcaacctcctggggtcaagcaatcctcctacctcagtctcccagttagctgggactacaggtgcataccaccacacctggctaatttttgtattttttgtagagatggggttttgccatgttgcccagtctggtcagacccctgagctcaagctatccacccacctcagcctcccaaagtgctaggattacagatgtgagccaccacacccaggctgactgtattttcaaatattctgtcttctacgttactcatttttttcttctgcttgatcagttttgctgttgagaccctctaatgcatttttcagtttgtccattgtagttttcaactctagtatttccgtttgattttttgaaaataaaaatacaaaaaattagcagggtgtggtggtgcacacctgtaatcccagctactcgggaggctgaggctggagactcacttgaacccaggagacagaggttgcagtgggtcgag

SEQ ID NO: 35921 - DNA, 1042 bp, Homo sapiens
tcttcaactcctgacctcaggtgatccacccacctcggcctcccagagtgctgggattacaggtatgagccactgcacccggccttattaaaccttttaaatgtgtaatcaagactaataaaggctaattacccacccaaagtcaagtaccaaactgaaattcaagtccagtctatcttactcttaatgtcttctctgccaggctattgagtacctcaagtaatgctcttttgcctaatttttctattccacaatctggttttactatttctgagtcatttttgttagtctgattagaaaatgagatcatattcctagatatttcattattaaagtaaggtacttcttccaaccacttaaaaccacatatctcgtttttatttaagttgttcataaaagggacaacatatcattcttctgtcctttctctagaaatcaagtgcatttattaagaaagtatttattgagactctccactgcattatagatacttatccggaagagatgacatagaaaatacattggaagtattatttggtgtttacaactctaaaatgctagcttattcacaggacacaatacctttaaactataatatcttgattttatagtacacaatcattgtgtatatgtatatttgtttgtttatttatttatttatttatttatttatttatttatttatttttgaggctttgaggcagggtcttactctggttgcccaggctggagtgcaatggcatgatcttggctcactgcagccttgacctcccaagcttaggtgattctcacacctcagcctcccaagtagctgggactacaggattgcgctaccacacccggctagttttttgtgtttttagtagagatgggatttcgccatgttgctcaggctggtcttgaactcctgcactcaagcagtccgcctgcctgggcctcccaatatgctgggattgcaggtgggagccactgtgccaggcctttcacattctttcatagttagttatgaagtttggtcactgcacattgttcattttttgtt

SEQ ID NO: 35922 - DNA, 1050 bp, Homo sapiens
atatatggaaatgtggtagtatcttcttggggtgtaaagctttactgttttttttgagatggagtttcacactgtcgcccaggctggagtgcagtagcatgatctcggctcactgcaagctctgcctcccggcttgtagctgggactacaggtacctgccaccacgcccggctactttaaagctttactcttaatttctctgtctcatttttttatccattgtatgagggtaatcatagtaccctactttatagggctcctgtgaggattaaaaagagataatacttgaagaatgttgagaacactctctgagtcatagaagcactctatcaataaatagatctgatccagcagtagcaaaaggagttaatcctatattctgtttatcctaatttctctgcttcactaacctttctgactgtatactcctttttaaagttgtgagttagattttatatagggaatttttctgaattactgagtagctatattatactacatagtagaaatatgtgtgatctgtgagctgatggatgaattatgagcagtggttattgtagtgagaaagaactgctgatgcttctttggcgggtcaaaataatggagattaaatggtagaagttctgtcaaatccaagctataagatgtttcaaaggccagctgtgaaaaggttagcaatttgggtgccaagaagcagttaaccatattccaattacaaaaataggcatgattctggagttatttttcacacagtggtcaatttgactagtctcatgcctgacatagatagtattgtgtggagccttgatgcccctgcagtattgtacatatacctctcagccgtattgggtggtcttcagcactggtggcttaacattgagagttcccttaggggttatttaggttaatccttatttggtaataaactttccttctgtaacatctctgatggggatgttcattcaacttctgtttggatacttggctaataaaaagtccctggtccttaaggcatcccattttattgtaggacttctttctaactatagc

SEQ ID NO: 35923 - DNA, 1066 bp, Homo sapiens
gctgagtttcttacaggatcaagttaatggggctctattctgtgctgactcagacaccagctttctctcttgtctccctggattcttcatcattctgcaaacatgccatacacttatggcttgactaataatatttctgctccttggtgtgtcaagcccttatcctccttcgcaaatatctacctctaaaattgcattccaggcttataggaagaattcattccatctttccctgtttcttcatggcactttgtctttactgctaatatacaatatttagttgcttatattcagtctagtgacggtaagaggatttgagacagtgcaaaagaaagcacatgctcattataacagaaaactattaacataggattgaagggatttaaataagaaaccttgatttgggaaacctgtggcatcaggatataaaacttagctatatgctttctaattaccaggataaaaaaaagaaacattaggaattacatgggtcttattttcaagtagaagaaagtaggtttatcaggtgttaaacttaagacaaattcaatttaacagagtttgattaagcaaagaattgttcacaaattgggcagcccccagaaccagaattggttcacagtgtcttcagggctgtacctggtcagataatatttatgagcagaaacgggaaagtgaggtacagaaaagggaaatagggtactgaaacagctggattggttacagctcagcatttgccttatttggacacatgttcaacagttggccacctatgattggctaaaactctgattagtacaagaaaagattacaatctctacacttccagttaggttacactttactgtgtacgaagagaccttcaggctgaacttaaaatgtgtgaggaagaaactttaggctaaatgtaatttaacacaggagagggagactcataatatttcttctcactgagttgtcatgccctgagcccagaagtgcattttttattaatatttatataagtgactatacaaggactgtccgttttaacaataaagaattagttgtttctgatacactaatg

SEQ ID NO: 35924 - DNA, 1061 bp, Homo sapiens
tacccagaaggtacaagtgctatcaggacaagttcctcatagcacagtcatgtcatttggaacacaaggtagattgttacataattaatatgtttgtgatatttaaattattgcatgtataaaattctgtagatgtgaaaattatggggaaaaataagtattttaagagtttatgtcatttttaaataacatataaagtgtatacatgcattactttgtcagctgatggttcattgtttcagaagtggcgtataaataaattactaactgaaatgcccaagtaaaatgctctaaaatgttttagtgtggccctttttatagtgagatatcttttcataattcaaaaattttgttaaattttaaattatctagtctttttctcacattttggtgtgaaaaactaagaacatagaattattcatgttcttagtgattttaaggacttatttttaagtgtattatagacatttttatttaaaacatgttttttaaaaaattattatagctgtatgttgatgtctcatcttgaggaaccaaaagtaacagaagatgaagaaccacccacagaacaagataagaggaaaaagatggtaagttataaaagtagcttgtaaaaattaagaaccatatattatcattttctgtaggttcagaaatatctatggtctatttgtccatccagctatatgtctatccatctatcccatgttacagaattaatgtaaggtgtaccctaaaacagatacattttattcctagtacagaaagttgaggttaacttttcatctgaaataactgttgcttatcttagtgcagagcagatgatttagtgttttacttatggaaggtatgtgtgacctgcaaaccttatttaagttgaaatgtttattcttctgttttgaggagatgtactgaaatttccttgcattccctattattttatagatcttcacatgaacttttgctgatctgcatcacaggcttttataaaaatgcccttaagttaaccactaacttgttgtaaaaaccactaattctcaccagaggaatctgataagggg

SEQ ID NO: 35925 - DNA, 1075 bp, Homo sapiens
ttttcttttatactctagctttgattctgtgctagtaggtatcagtattgcaggtggcaaatcctagttacccttttaatttatcttcatttaaagacaaaaagctcctttcaagtgatatttctttatcagtattactcagtcctgaagactgatccaagaagaatttctttttgttgacttaattattttcatttgaaacactaactcattagtgttatcagaaattctcaaacatgctcatttttcagttatagtaaagtactcatccttctaattcctgacagatttcattatagtgccataccaaatattactgaaatagctaccttgcaaaagaagtaaaaagcttatctcagggaaagagtttgcttcatttttaaaactcacaagtttaaataggcttggtaaatagctcagaaaaataattcatgtatcttgaatttctaagtgctcaattaagacataaagtgtaattattggtttacagaattctattcattaacagaactatatagcaaatatattaagtttaggacaaacaactcagccaggcctctggcctctgggtgaactgtggctcctgaaacaaggtaatgatcatttatactccaaaaacatattccttttctatttattttctattccagagacttctcccaaccctctcacaaaggcccatgtgactaacaataacatttgaaagcttccttataagttggtccctcctctctctcctactagtcattttagagaatccacattattgcatacaatttttaaaaagatacaatttttcttgaaaaatcctcgctttaatctttattttacccatttctttattcagttagtgtttattgagttctgtttcatgccataatgctgtaccacattctgagattagaacagagtacccaccttcatgaaatttcacagttgattaggaacacagacttgccgacatgctgtaagaaaataggggttccaatggaagtgcacattctaaagcagttggcctgcaggggaaggagattgtgtatgaaataaaatgatgctgtcactgtataatttgata

SEQ ID NO: 35926 - DNA, 1250 bp, Homo sapiens
aattccctgtctggtaaatccagcagccatatcatattggagtctggttttgatgctttgatgcttgcttgatctgtgttttttttttttttttttttgagacggagtctcaccctgttgcccaggctggagtgcagtctcaccctgttgcccaggctggagtgcagtggcctgatctcggctcactgaaacctctgtctcccgggttcaagagattctcctgcctcagcctccccagcagctgggattacaggcgcctgccaccacgcctggctaatttttgtatttttaatagagatggggtttcaccatgttggccaggctggtctcgaactcctgacctcgtgatcctcccacctcagcctcccaaagtgctgggattacaggcacgagccaccgtgcccagcccttgatctgtcttcttacttgctttttagcataccttgtaatttttattgaaagttggacatgtattgggtaatagggactgagataaataggcatttagtgtgaggatttatgttcatttgtctaggagctgggctttgtttagccctgttggtgtggtggtaaggcacaagggagaggagtgttctcaatcttaacgattaaatctcaagtctcttagtgggcttgagtctctggcctgggaccttcacttgtgcttcgttttggaaagctttcctatccccctcaggtgagacaggaagaggagaaatggctggagcgagaggagtgcctttccccatggctctagaacaagcctaaagcctggttaagtctttcccccgaagagtttattttcttttatcatttttattatgaagaaagctctggacgtatttcataagaatcactcttcccctcctgcaagaactatgatggcatctttctctgatcttcacaatgagaaactggtgggattcctagaggtaatgttcacaaaaccaagaggctttccccaagactgttcccagaagtgagcctaccagtttagagatccaacacttctgctccaggtaagttgatctcagctttgtctctggatttgctggagacagtttgcaaactctggagacagtttgccctgtaatgagtccaagtcattggttttcagtttgtccagctttttcttataaaagcaaagagtgacaacttccaagctttttatatgatgaaactcatacaggaagtccaacgtctccatgtggccttccattatataaataacctaacccgagcatcggcag

SEQ ID NO: 35927 - DNA, 1010 bp, Homo sapiens
ttccaaagaggtagtagaagaaaagaaggtaaaatatttcattcataattttcttgtcttgattacatattgatgtttgggtatattgagttagagaagacgttattaaagttactcccacccatttctttttactttttaaatgtggctactagaaaatttaaacttacagatggggcttacgtcgtatttctattgggcagtgctattgagaccaaggaagacagtgatgggcactgtactggaactggccgccttgaggtctgaagtggaacttcgtgtcatcatgaggaagagagagcccatgcacgctgcagcagtgtctatgatggcagtgtttcaggtgtcatgaagtctagacatagcggcagatgcgtgatggagtagctggaatcaggagaagttatggacattttgtttacgggagtcattcatatatgctaattgcccatcttctaagtagagaagtatttgagaaaactactggaaacaaaactaaaggagtgacttagataattggggagaggaaggatccaactcatgaaggaagaggaaggagagagtagcagagtgagtgagggttttaggtgtgctcaggtgtgtcaaagtcccttgtaccaatcttggaagatgccaaagtttgaaaagacagacaatactgtcaaagattagagaaagtcattagtaggctagacagtcacacaaagggtaagaacataggttattaaagatgagagctacaggcatcctttcagctctggaaaaagtattactcttaaaaatgagaatagaaattcttggcttccgctaagtgaaacaattcttatcatggatagcctctagaggtagcatagacctcaccttttctaacagtatttccctctggatagatagcagtgttagtaagaactttgaaggtcagcttgtgtatatgaatctcaagataaattgctctgatgaatacttgggtatatatgtatgcatctcactctcacctatcttccatcgcc

SEQ ID NO: 35928 - DNA, 1023 bp, Homo sapiens
cttaacttgagctatttcttataaatctctatattaaaaatagaactcaagctcaaacaatcacaaacactcaacaaacttatcattatataactggcgactttccagtaggatacaccaagtaaggcaactttgtaactgtaaccaaccaaataatttcttctttattatgtttgcattcactctaaaagtctgttcataatgcttcctcaatggagccctcagaacatttctggtttggagctgctgaattcatgaattgctgtttatttacataaattctttaaaatttgattgcaccttagtttacctttttaacataattagccacctctctgaaatcagctgtggccatgtgattttctttggccagtgaaatgcaagtgaagtgacatgtgttacttctggacaaaagctttaagagtcagtacatgctcactattttctcttttacttccacaacaacaacatgcaataatgtcccagagactggctgctctgtcagctaaggtcccaaagtgaggatggtctagaatgtacctctcagaaacccacaataaacatgtactgtgagtgaaaaattagccttgttaggttaagcctctgagatttagtttccttgcttttatcgcttcattgcaatcattgtacactgtctaatttcttcacatattttctctaaatcctgaggaaaaaaatgttgtgtgcccagattttcacatagcttctcctattaaggcctatgtatatttccattgacttcattaactgtattcactgtaaaataaaaggatattttacagatgttttcttaaaattaggtcttcccttccctctcatgcaaggtgtccttactttcattgaaatacctcttaggatttcttataataatacatattctctctataaaaacagagagagagagaacttttatcaaacttcatcattacaaatacacagcatcctttattttaataatctgtataattaaatttatacatttcattatctgttcagagtgaa

SEQ ID NO: 35929 - DNA, 1024 bp, Homo sapiens
ccaatgtgtattgagtaatatacgccaaaatctatgaaggaaactgataggattgggagctggaagaagacaaaaatttggccactgtgcccatggagtagccattgttttattcctttacggccctaacaaacttgctttcacttactctggggacttgccccagattctttcttgtgcgaggtccatttaaaagaaaaagaaaaattcaataacctttctgaagattgcagagtcacagagtgttagaactggaaaggaacactatgcctggttcttcttcactgccactagaattgagacccactgccctaaataatttcctagtattccagatgaatgccctggtctggttcagaaaacttatcatactacatggcttgtaagttggagagaggcagtataatatattggaaagaaagttagaaatgtcagtagtttgatattggagtcctaactcccctggtgatttagctgtatgctcttgtgcaacatgcttaattcagctgtcttggtttcttctgtgtgtttactaccttgtccacagaaactaagaaataaatctcattttttttcctgttaaaaacgaattaaagtttactaaccaagcacagtggctcacgcctataatcacagcactttggatgccgaggtgggtgcatcacttgagatcaggagttcaagatctgcctggccaacatggcgaaaccccgtctctactaaaaaatacaaaaattagctgggtgtggtggcatgtgcctgtagtcccagctactcaggacgttgaggcaggagaatcgcgtgaacccgggaggcagaggctgcagtgagccaagatcgcgccagtgcactccagcatgggcaaaagaatgagactctgtctcaaaaataaaaataaataaagtttacgaacatgatcagtgacaataccatgaccttaggctttctaattcatagtcttatgtggctgagctttccaaatggcagttacccgttcttttttttttttttttttttttttttt

SEQ ID NO: 35930 - DNA, 1056 bp, Homo sapiens
gtacttttttcaaattcacttattcttttttattatgtcctgttcttgccttatcgactatatttctttttttaaatctcttaacacgctcatttttaaaagttccttatatatttctcggttatatagtcttcaaaagtgaattcttctggttatatgtctgcttatacttgttcgttggcagttgattttctggcatgtttcgtaatttataattgtgagtttatctttagtgggcattgtttctgtatgtcttggctgttctgaattatggaagcaattctgtggggccagttttgtgtttgattttctgtgatcttatggcttttaccagtaaaagacttgttttaatgttattttctctgttcagggtttccaagctccttgagaagtgctaattcagcctcacagccacaaatcgtgcagatttggagtgctagttctcctggtgactctctttctatcctttgtccagagtgactggcttctactgtactgtattcctcagaccaaacagccttcctagcttgctgctatacatagagtgtagaattttgactcctatatctctctaccataaacatcagggttttaaaccttttatctagcattttaatctaattagcactggagaaatacttcctgcatcagcatggtcctccatattgactaaagaatttgtgggctatataaaaacttttctagttgtttcttaaaatatatggtttgatgactgatatggaagttagcatatgttagaaatccaaaactgtcaaatttggaatgtgtataaatgcacatttgaagccatattctgagactagaattacaaattcttttgacacaacaatgacatttataaaaatttatgtttctttaagaattagaaattaaaagaattctgtaacatacatgtctgtatatttaaagtaacttccatatgctcttaatcactggtgttttctgataaccttaatatctaaacttttcccatgacataatgtggactttgtgtcaggcatatgaaaaataagaataagatttagagaataagat

SEQ ID NO: 35931 - DNA, 1065 bp, Homo sapiens
aaatatatactaacccagaagaagccaaagccctcgtattcttcagtcactgagaatatcttgaagtgcccccacccctatcccataaggtaccaagtcctgtagtgctttatctttttcagtgtctattgtgtcccttcttttttccccatttctgtggccacctgttagttcacagatgtatcccctcaggccatcagctgttgtagtacgtcctaatcggtctccttgagttcagtctctcacctcttctcttcaatttattctctagatccaggctaatcctcctcctaaaacgctcctctgatcttgtcacttctttgctttaaaacttctaaagatttcctattgcctaaagcagtgtttcttcaaatttgaaactagatttcctgtatcagaatcatgtgggtgggatgtcctcggacctgaagaaccaaaacctctggggaggtaaggataggaaatccaaatttttaacaagcaccactgcatctcccaggagattgttgaacatgcaacatatgaggcctacctgcctagaatagcgattctcaacctgggctgcacatggaaatcacctgggaagctttaaaaatttgctgatgcttgagttccatccctagagtttctgatttaattggtctgggatgctgcctgggcattggggtatttttaaaagcttcccaagtgtgcatctgtatcagaaaagattatacttggctatatttaacagaaaattcaaagtagcaattgctaaagacaccagggtttattctcgcccagaaaaaaaaaaaaaaaaaaagtcctaggttgggcaattcggaactggtacagtggctccatgaaaccagatggttctgcacccattctttgtttatggcttctatcctcaacctcgctttatgaggcaagatgagcacagaatctcagccatcagtccatgttccagcatagaaggaggaagaaaagaggaaggtcaaaaggccaccatgtccagatggatcagctctccttaatcagtttcaaacaaaacttccagaactgtatcatatggtcacacctaat

SEQ ID NO: 35932 - DNA, 1031 bp, Homo sapiens
tctggagatggggataaactgcaacatgatctatggtcaagatcataatgagctcattaagggaaattggacttggaactcattatcccatataaacaatgttatacatagtacttaggtcataaacagtatttaacccataatttccaaaattataaaccttttcatcatatataacagtatttcctatgggaaaatagattcatgcccaactccagaagtcatctttctttctgggaacgtattcatagtgctcttctaggtgcggtagatacaacagctttgaacaaaataaagtccttgtattcatggtgtgtgtggtggtggtggcgggggtggggctggtgactgagaagaaacaaacaaaagagagtatttcagatagtgataaatgcagtgaggaaaataaaacaagatgatattattaaggaatgacatatgcagcgtgggtagttatcttctgatagggtggtcaaaaaggcacctctgagaaggtaacatttgaactgaatatctgactctgagaagggaccagtcctatgataatttcagagaaaagcatttgaggcagcaacaacagcaaggtaaagatccttgaagactgcattatcggtttggaattatcttcagctggcagtaacataagccagacatcagtgacttaaacatataaaggtggctttttctcacataattaaacacccaaagtggtagggatggcaaacattggttcatgattgaagaacatcatgactgagatttctgtagttctctggggcttttcctcaaggtctcaatattgatgttgcagctccagaaattgtatctatgttccaggcaagtagaaagggcagagagcacagacataagcccattaaatgtggcccttcttaaaagagtttctcagaagcctcacacagcaacttcctgaatgtctcagcagccagggcggtgtcatgcaacttccctgactgcaagtttcatgatctgatttgcatacatctctctccataccagctgtctgctgagaa

SEQ ID NO: 35933 - DNA, 1044 bp, Homo sapiens
aagagcagctgattcaggtacccaggaaagtcctttttgggaagatgacatttggggtgagatctgaatggtaaaggagccagccatgcgaagatctggggcagagcatgccaggcagaaggaggagtgaatgcaaagaccctgaggcaggaacgaacttggctagttccagagcctgacagactggagtgtggtgagaggcaggaaagcaggacaagacaaggtcaggaaggagttagcaaccagcctgtcagggcctcgctaggtcacaagaaagagtggatttgatttaaaatgcagtgaaaagccactggaggatgagatttatgtttttaagatgtgtaagaaaagactgtacagggcaatagaggaattcgtcccttgggtaatagttgcttgttttagaggtaagcaactgtttagaggtaagaccagcagaatttgcagaagggttgcagcttggaggggcagtgatgaggatgagggaaaggggagaatcagaaacaagtcggtctgagtaactgatttgatggtggtgctgtgccatgaaacagggaggtctaggtgaggtaccctttggcagatgagagagcaaaaaatcaaaagctgtgtttgaacataataacttggtgattcctttcagcatccattaatacccattaaaagataatgtccattaggacaaatctggagctcaaaagaaaggtcagggctataaatttaaatatggaaggcactggcatagaggtggtatttaaaactttcggactggatgagttcatgtagggagatgatgtagatagaaaacaaaggagagctaggggctgggcactgaggtgctctcttaaaacctaggaagaaaaggaagatccagcaaaggcgactgagtaggggccagggatttagggtgatagggccctgggtgtcaagagaaaaactgtctcagatggaaggtgagacagttttgccaatgctgctgaaatgtccagtaagataaggacagagggaccagtgaattttgtgagagaggttcttggtgacctt

SEQ ID NO: 35934 - DNA, 1044 bp, Homo sapiens
atgtgttttctgattttaaaaaattatgaatttttttaaaggttaggtttataatgtaacaaaaatatatttaaaaattttaatagatgagccaaccaaatatttatttatgttagatttaagtgttccttaaactcccaactcagtcttgtaggctttaatcaatttcaaatacttatataccctataatataaactataatttagcaatgctaaattttgtataagaactaaagttcatttttaatgtacctttcataagtgtctttaaaaaattgtttacctaatattaagaaaagtcaaagtttgcattttccaaaattgtgttcactcttacaattaagggttattcttaaaagatttccttggctgtagtatgggcctgatgaccaaacatggcattgatagctagatttaggaatctgatctatcatgagaatactggagagccactgaagtttttacaggcaaatgatatattgagattgtatttagtatggagaatggattgatagaggagtgttttgggctattatacaaaataccatagactggatgacttaacagacatttaaagcttagtttttatggtaatttcttacataggaacatatatatccacttacttatgtaaacaatttttctctttttataaatcagtataatttgcaaaattaaaatcacataatttgtatattcactgtagaggaaaaagttatattcaagtgcattgcaagtctactaagaaaattaaataaatttaaaaagtacgttaaatacttttctacttagaaaagtaaattaaataagaagtctccaaaggtggcttgaatattttaggtaaacatgagtattgtggacattgttggattcttttaggtaaaataattggcaaagtgtgcctttgtaaatggtgcagacagcacacatttatttataactgttctgttcccccacattttcattattcacattctctactctccctccttcatcctatctgtcctacctacaaagagaaacaaaagaaaaataaggtcagga

SEQ ID NO: 35935 - DNA, 1033 bp, Homo sapiens
cagattgtattataacaggatagttagattgctaatgtcatttcttataaaatgatttttcatgatttgaattttctaaaaacaagcctaacttctaccttttatgactcatgtgttttattctttttcttgtgagattatttgttaggtccaggaaattcagtcaatttccaattttagaattaatggcttaatgtcagtactgactcaacttatgaatggatcatgtttgtaattttatttgtatgttatttagaataggtaaaatttccctccagaaacaggctataattgatgttaatttttccccaatttgaaaaatttaatttgggatctgttagaactctactagtaaaaaaacaggtatcgagaaagaaatatgtaacttacatttgtatacatatacaaatgtgtgtatatatgtaaaatacatggaataccgttagaactacacagaaggcctcatatacttaattgctgaatatatgctgacaataacttcaatgctgagaacttcctgaggaaggaaaatcactttaatacttttattcacttttttttttttttttttttactataagttctgggatacatgtacagaacatgcaggtttgttacataggtatacacgtgtcatggtggtttgctgcacccatcaacccgtcacctacattaggtatttcttctaatgctatccctcccctagcctcccacccctctacaggccccattgtgtgatgttcccctccctgtgtccatgtgttatcattgttcaactcccacttaaaagtgagaacatgctgtgtttggttttctgttcttgtgttagtttgctgagaatggtggtttccagcttcatccatgtccctgcaaagaacatgaactcatcttttttttttttttcgctatgccatttttttttcttttcttttccattctttttttttttaattatactttaagttctaggatacatgtgcacaacgtgcaggtttgttacatatgtatacatgtgccatgttggtgtgctgca

SEQ ID NO: 35936 - DNA, 1054 bp, Homo sapiens
atgaataaaatgcaaaaattattagcatttatagtaaacaaaacacaaaacatctctatctgtctaaacaaagcttttgtctaccccgactgttggggctaagtgcctgtgttaccctatgaactgcccttggtttgatttctaatcataccaccattgtgtgatagatatcaggataaagctgaaatgccaggtcagactccagattttctggttagattttcagttttacttttggctgttttgaccatgttttatgatgggtacctagtcaacataagtaactcattaggatcagctctactttttaatgctgttgatataacatcagtctttctggcttaaaatttcttataaaatttttgaatgagtattttgcatatataactgtgttttaaagttatactgtaaacacttgtatttcttcataactttaagtactttggtccaactctttatctgcagagtttgaaatattaatgaatttcatcaaaatatataattagttgataaactgtgagtgctcttggtatgttatcatcatacaaataactatacattatagtataatcccgtttcagttatctattgctgtgtaaaaatgacctcaaactcagtaactaaaacaagcagctcataatttttttaggtcagagatttggataaggtacaaattggatggttcataatgttctgcaatatctgggaccttagttggggctcctcaaatggttaggagctgcctagaatactccgtggatgtttcaacccgtagggtcatatgtctcaagccttgactctgcctgttggaccaaatgcttagttctccatgtgtggcttttccatgtgctacctttggttttttcacaacatggtggtctcggtttctaagaagacatattcctaaagtatcaactctaatgtcctagcagttatcaagcctcttcttatttttttttttcactcaccaccatactaataaggatcaagcctcttcttgcatcagaatttttttgtgtggccaaatcagatatatatatatataaaaccaatc

SEQ ID NO: 35937 - DNA, 1083 bp, Homo sapiens
attttctaagatttgaaagagatcttacaaagattaggggtcatctacattagacttctaatcttttcattaaaaatacatatgatctttcatatggaaggagtaagattgtaagtttaaaggctatatacaagtgtgtttagatttctccttttctttctaaattacaatatatttaaagatatggatatagtctttttattcgtaagtaatggtgtagcagattataaagggcacatagaacattagctctcagattaaatgttatcttttgatagatacctttcaggatcacttagactaaaataaggtaggttctctgttagcctccctcatagaatttctaagtatgtatgcatttctttgttgactcgcttattccttaccttttcagctaggttataatgaaagaaaataagcaattcactttgaagcatttagtgaccagagttaggatatgggaattttgtaatttttagtttttttaaaactgttacatttctcacttgcatagcatatatttaatctaagcagtgccccaaacacaaaaactaatcactgtgcttttgaaatctgtatctccatggaaacaatggaaaaacttgcctttttaatctcttttgttagactgagatctcattttgtcattaatagattctgtaaatagcaagaataggaatagtggtagtggtggaggtgaaagcaataataataagagaagcaaatttctgtttagtactatcttgggccaagtactatgctaagtatgctaaataatttccatagaatcttagttctttcttacaacaaccttactattcttttcatttctaggtgagtgaactgaggcttacattggttaacttagttgtccaatgcggtactgctagtaataggtagaacagagcttcgaacacagagtggagttttattgactaacttttgttagatatttgcatgatataagtatacattttcaaaatgtgtgtataaactacagtacattttggcactttttgaaatatggtgaacctacatctctgctacagctgatgatactgtaagtctaaaaattgtatgaaa

SEQ ID NO: 35938 - DNA, 1049 bp, Homo sapiens
tgtggggggtgggaggataataaattttgaataagattgatggttaattggagatagagttggtttcctgtcttggctctgtcaggttctttaataaactatataatccttttcattaaatcatgtctctaagtcttttccagatttctttaagtttcatatcaaaaccagtaccaaactgaacatagtcacatagagatgacaggtttggacatattctctaatcagctttaaagagataaggtgttaggtcctctttcaaagttctaagcagacaattcctgctctatgactggtgccagaaattagaggagaagggtcaggctgagcttgtaaatcaagaaaaaattttaaagccttttcatgaaacatatccctgaggtgcctagtacctctcaagttgcactgggttatttcacatttcttcagactatctttttaatactggatcaaatcagactagagtccctcaggcttgataggttgtgaaagtatatagtttttgagtacttttcatctgggtaatatatagtattaaactagcttggtcttagttggtataagaaacaaaaaccctctttgagtgttagctctgtgttctacttaataccatgtaaaattttcttattgagcaaactggttctcttttccaaagcagttaactttctttaggtactgttgagttattttttttttcttggaacccagaagtatcagacctatttttcttcgtagtctactcttaatctatgtgctaatttttactttatttacataaagtgaaagtatatttgcacttgactcattggatgcatctcaggccagccatcattttctagttcttcttactttgggcatagccactaataaattgattatctggttttctaagctaaaaaccaattaaagtataaaagtgagggagcgtatactctaaaagggtgaattttatggaaagtgaagtatatctcaataatttaataaataaataaacaagcaaaagagaagccagaaaaggcactgacctgtggacctttctagcccagtat

SEQ ID NO: 35939 - DNA, 1052 bp, Homo sapiens
ctatatttttagtaactgcaatttgtcctcctattactaatatctgtgtcattcctgacccagtaaaaatagattgcttaattcatacaggtaaatattagttgggggtcattactgtctctttatttaaaaaaaaaagctgtatttcttacattataaaagtaacatttattctttgcaaaaatatcagaaatgtagaaaggcataaaggttaaaaagaaagattaccccataatacttcgccaaagataaccagttaactttgtgatatttattttttctggatttgtttcttttcatgctataaacacacgtgtttttttccccataatgtcattttgttataattttgtttataatattcctttttaaaagaatgtttatattgaaattgaccaagaattcttaagggggcaacttgctttaggagtatgtcttcttaattatcttacatcacacaacgtgagatatagaggatgatggatgtaaagaccgtacaaatgcagttgagacatgaaaaattcccactatttcagctctggggtttagactatgtgggagcaatgatagccagggactacatttccattgctgatgagaattctttatctctcgttctttaaaaaaaaaaaaaatcatttaaaaagtcattaaaataaatcctgagctcatgttgtagtctgttacctctttctcagctggccactaaaaattctgcaaggaaagattacattcaggttaggtatttggagcctacattgaaataattacaaatttgtccactcttggaaagtagaagaggtgaagggtatgtgtatgtgtgtgcgcacatatgcacgtgtgcatgcgcacacacacgtgttttattgttttgttttgtttggatatttagattgtctccagagaggaactaatatcatcattaaaagtttgattataaccagtgttcccatttgggaatggagttgttaacttttccagactgctgtcaagaccttattttaagtaagatgttttccttttatgtgacattttctgaggttttgccaaaa

SEQ ID NO: 35940 - DNA, 1028 bp, Homo sapiens
tgcccagtcagtatgatattagctgtgtgtttgttgtaagtagctgttattattttgagatacgttccatcaatacctagtctactgagagtttttagcatgaagggctattgaattttatcgaaggccttttctgcatctattgagataatcatgtggtttttgtcattggttctgtttatgtgatggattacgtttattgattcgcctatgttgaaccagccatgcatcccagggatttagctgacttgatcgtggtggataagctttttgatgtgctgctggatttggtttgccagtatcttattgaggattttcacatcaatgttcatcagggatattggcctgaaattttctttttctgttgtgtctctgcaggttttggtatcaggatgatgctggcctgataaaatgagttagggaggagtccttctttttctattttgtggaatagtttcagaaggaatggtaccacctcgtctttgtagctctggtagaattcggctgtgaatccttctggtcctggcctttttttggttggtacgctattaattactgccttaaattcagaacttgttattggtctattcagggatttgacttctttctggtttagtctttggagggtgtatgtgtccaggaatttatctatttcttctagattttctagtttatttgcatagaggtatttatattattctctgatggtagtttgtatttctgtgcaaccagtaacgatatcccctttatcattttttattgtgtctatttgattcttctcttttttcttctttattagtctggctagtggtctattttgttgatattttcaaaaaaatccagctcctggattcattgattttttgaagggttttttgtgtctctatctctttcagttctactctgatcttagttatttcttgtcttctgctagcttttgaatttgtttgctcttgcttctctagttcttttattgtaatgttatggtgtcgattttagatctttccagctttctcctgtgggtattt

SEQ ID NO: 35941 - DNA, 1042 bp, Homo sapiens
tagcacttagctatcatcttctctgggaagcctgtgacttctccagtctggactggatttctgaagcactttgatcataactctgaggtagttatatatcaatactgaatttacaggtagccttcaaattttatgtatccaaattttgaagaagctgtttttttgaacgttgtatattgacacccttacagtgcattatcatttttacttcctggtcctcttattaaatgtttccatagtaaccattttatttatggcacttgccgcagtttctaattatatatttattcatgtgattgatgaatgtttctctccactgctaagactgtaaacaagtaagaaccagaatcacgccttttttgtttcattgcttggtgtacagtgctttgcctaagtatttaatgactgcatattaaagcttttatgctggtctttagctattttgttgcatatgaatatttttgcaagttcttttttaattaaacgagtaaggagaaatgtaaaaatccagaaatatcgaaatgctgatattagtgttaccggacaagtgtcttataaacttaatataacggagacagatataaattagtaggtgtgaaaatctttcctcttaatcagttatttattgttttaagacagccaatagttggccgggtgtggtggctgatgcctgtaatcctggcactttgggaggctgaggcgggcagatcatcaggtcaggagttctagaccagcctgaccaacatggtgaaaccccgccagtctctactaaaaatacaaaaaaattagccgggcgtggtggcgcacacctataatctcagctattcaggaggctgaggcaggagaatcacttgaacccaggaggcagaggttgcagtgagctgagattgtgccactgtacttcagcatgggcaacagagcaagactccgtctcaaaaaaaaaaaaaaaaaaagccaatagtttattcagtttgaagaaaaaaattgaaactaaaaaacatacatagaatgttacaaaaatatttaaaattttgtctaaatg

SEQ ID NO: 35942 - DNA, 1030 bp, Homo sapiens
accaaatttccaaactataaaggacacttatagaaatagtcatgtctactaaataacatgtacctaatggtaatctcactgccctgtgtcagaataacttgagacattttctgaaatattatgaatttgttataaattagtgagatgaattcattcagcaaaaattgagtgcttgttatgtcaggcacgtaaccttgctcaaggacctcatagtctatagctgcattatccagtataaacagtcactagccacgtgtctactgagcatttgatagatggctagtccaaactgagatatgctgaaagtgtaaaatacaagatttcaaagacttaattttttttaaaagaatgtaagttatctcaattttttatattgttgagatgatattctggatattttgagtttaatcaaacattaaaatgaaattcacctgttttctttatactttgtttaatgttactagacactttaaaattacctatgtggcttgtgttatatttcattggaaagtgctactctgtgacttttaaaaggcagcagatgtattctgtagagaaagcagtagttctattaaccaaccgggttttgttttaaattagaagaaccagttaccattttgaaatacaatttttttttttttttttttttgagacggagtctcactctgtcccccaggccagagtgcagtggcgcaatttcggctcactgcagcgtctgcctcctaggttcaagcgattctcttgccccagcctcccgagtagctgggattacaggcacacatcaccatgcccggctaagtttttatgtttttagtggagacggggtttcaccatgttggccaggctgttcttgaactgatgtcaggtgatccacctgccttggcctcccaaaatgctgggattagaggcataagccaccatgcccagcctgaaatactattttttagtgattggacttactaatgtctatttcatattgtttagaatccctcttaagaagtacaaacagttagtggctcttaatatgtat

SEQ ID NO: 35943 - DNA, 1027 bp, Homo sapiens
agtacaaaatagctacaatcagatactctcactgaatgtaaatgaacagaacttaatattttaaggagaaaaaaatgtcctgtacatttccatgtataaacatatttatattgtagttcttggcaatacaaaatctttgaagttttgcagaacagttaacagacatggaattttaataagaataggttaaaactgtataaacaaatgattgattgtttttaatagaccttacttttttgaacagttttaggttcacagcaaaattaagaggaagatacagagattttccatataccctctgccccaacacatgcatagcctccccattatcaacgtcccccaccagagtggtccatttgttccattgatgaacctacattgacacccagagtccatagtttacattagggttcacccttggtgttgtatattctataggtttggagaaatgtataatggcatgtatccaccatcatattatcatatagagtagttttactgccttcaaaatcctctgctctgactgttcaaccactgatcttttcaccatctccatagttttgcctcttccagaatgtgatatagctaaaatcatacagtatgtagtctgtccagattggctcctttcggtaatatgcatttaagtttcctccatgcctcaccacagcttgatagctcatttctttttagcactgaataatactccattgtctggatgtaccacagttgatccattcacgtactgaaagacatcttggttgcttccaagttttggcagttatgtataaaagctgctataatcatctgtgtacaggtgtttgtgtagtcatttcagctccttttggtaaataccaaggagcacaattgctggatcatatggtaacagaatgtttagttttgtaacagccaaactgcctttcgaagtggctatactctttttgcattcccaccagcaatgaatgagtgttcctgtcactccacatctgtgccaccatttggtattgtcagtgttccagatttgggccat

SEQ ID NO: 35944 - DNA, 1074 bp, Homo sapiens
caggcaaagagagagagcttgtgcggggaaactcccatttttaaaaccatcagatctcagccaggcgtagtggctcatgcctgtaatcctagcactttgggaggccaaggcgggtggatcacttgagttcaggagttcgagaccatcctgcccaacgtggtgaaataccatctctactaaaaatacagaaattagccaggagtggtggcgtgtgcttgtaatcccagctacctgggaagctgaggcaggagaatcacttgaacctgggaggctgaggttgcagtgagccaagactgtgccactgcactccaggctgcctgggtgacagagtaatactccatcccccaaaaaataaaaataaaaccatcagatctcatgagacttattcaccgtcatgagaacagcacaggaaagacccacccccatgattcaattatctcccaccaggcccctcccacaacacatgggaattacgggagctacaagatgagatttgggtggggacacagagtcaaaccatatcagtagccatacaatagagcatcttgaaagccaggctaaggttttatttaaccttttttgaaaaattattttttaaaatggacaaaaaaattaattaagaaaaaaaaaaacaggcctggcacagtggctcatacccagaatcccaacactttgggaggctgtgacagaaggattacttgaggccaggagttcaagaccagcctgggaaacataacgagactcccatctctacaaacaatttaaaaagtagttgagcatgctggcacacacctgtagtcccagctactcaggaagctgaaactggaggattgtttaagcccaggagtttgaggctgcattgagttttgcctgggcactccagcatgggctacagaacaagacctgtcactgaaaaaaattaaataaaaaacagcaggcagttggcttttgagcactctttgtgttagaaagactgatatgagcacattgtgtgggatgctttgtagaaaatggaacagttagaagacctttgaagtagtgtagaaattaaaagatagaatatgctaactccgc

SEQ ID NO: 35945 - DNA, 1052 bp, Homo sapiens
aaaagactatgctgtttcatgcatatttataattattgttagtcattgtgaattgcagcttttaatattaaaaatattcaagtagattgctcaggaagttcttgtgggtacaatattctctgagcccttgttcaaagatgtttttcaatacttcaagtttagtttggctagatttaaaatcttctgtttacatttttatttccttatgttttttgaaaatgctactcctttattgctcagctctgtatgttgtttttgagaggattgaggccagtctaattctcttgccttgtaagttatttcataatttttcctggaggtcctggtgattttttttctttatgtttcaaaattggtctttgggtgtgatttccctgattccaagtagaccctttcaatatgggtctgcaacctccacctcctggtttcaagtgattcttctgcctcagcctcccgagtagctgggattacaggaaactgccacaatgcctggccaattataccaaactcttagtgtcctctgaagacatcttgagctttcacacttgtggtattttgctagctctgttcaacttacttagaataagttcccccaacccctttcctctttgccttttcaaatcctacttatcaaaaaactgcagttatgattaaaatgacacataggacacacaggaaaacatattcaacagaaagccaatgggttcaattatttctttttttctctaatttcaaaaatgtttaagaatttatatctgggcgcagtggctaacacctgtaatcccagcactttgggagcccgaggcggcagatcacttgaggccagaagtttgagaccagcctggccaacatggtgtaaccctgtttctgctaaaaatacaaaatttagccaggcttagtgccgcttgcctgtaatcccagctactggggaggctgaggcaggacaatcacttgaatctgggaggtagaggttgcagtgagccaagatggtgctgctgcactccaacctgggtgacagagcgagactccgtctccaaaaaaaaaaaaaaaat

SEQ ID NO: 35946 - DNA, 1032 bp, Homo sapiens
tttaaaaaaaaaaaaagggacccctgcctttcggggtccaattactataaagaacctcaagattttcgatatcaactgaaaaaaatgaaggaaaaataaatcattgcagtatacgttctttttatttgtattgaaatcgttaacatgttctgttgttgatctttggagggtacatcatccagttcctatccaaaggaacaatcacagccatggtttttcttttaaaagatgctagagaattttctccgtctctgtctccacccctctcagtgtgtctacgtttgggtcaagagcatatttgcaaccaatggatacacgccagtacttatactgcctaaagccaaagaatgaatttgcagaaaaagcaggcatcattaagggagtaacagtaattggaaaattggatatagtatggaaaacaaatctaggtgaaaggggaaggttacagaccagccaacttcaaagaatggtgagtctggaaaaaacttcgctggggttttggtgtgtgaaagacaggtagttagaacaacttaattttttctacatccagcagtaaaaaattggagcactataaaaggcattactactactggagcagaaaagattaatagtgtcactgataggtaggtcgaagactggtgttgccatgaatgaaaaatggtcaaatgttaatttatccttaatacacgtgttctttatcacacagaaattaaaataactgttattaagtgtctctcctttggtaacacatgctcactcttcttctgatttccaaacacattaaggttttctattttgcaatgtcctgaaactcttggacttacttcattcacctactcagttcctaccatttttaagatgttaaaaatctgaggcatctcctcagaaggtgagttctactaaagttatcttataagcattggttgcatattttacctaatttcttctctgagagtagggatagctaccaggcttctttttcttatgcttgtaagaatatacgacaggattctcctccctttatgctgaata

SEQ ID NO: 35947 - DNA, 1045 bp, Homo sapiens
accttgttagaagctaccataaatatattaactaatttgttacataagggcatatcttacagttaatcatcatatatggtagtccttaacccagggcttccttgacttaatcacagaatctgctctgtttcaaaatcagtatcttccaaaagagttcatattagacaacatggaggaccccctgtgttctcctgtttttcctgtttcctctgacacttgggagttcattttagtgttatggagtaactaggcttttgcctaactgacttacagtttccattgggttttcttgttggcagagctgctatatccccttcccaaggccagcttccagctaggatcattgattggggtgttcagccaacttcttgggaataagtggactgagaatctggagtttggattatagttgctgttcaattcactttgtgaccttaaaaaaatcactcactcccttggacctctttcaagttatgtacctatgtatgtatgtattttagagacaaggtctcactctgtcatccaggctgaagtgcagtggggcatgatcatggctcactgcggtctcaaactctggtttcaaacaatcctccctgcctcagccttctgagtagctgggactacaggcgctcaccaccatgcccagctaatttgaaaaaattgtttgtagagataggatcttgctatgttgccgaggctagtctagaattcctggccacaaatgatcctcccatctcaacctctgaaagtgctgggattacaggagtgtactatcatgcctggcccaggttccttatattgtaaaatgaaaaggactagactaaataatagctaaggccttaaaaaaaaaacaaaaagcaaaaaacctctatattgccatagcaaaccaggagaattcctcctcctacctcagattgtacagcatgtgacccaagcaaagcctaatgtatattatagaataagagggatgagtgacatggtcaaagaaacaaacgagaaggttgactcaacaatatttagccgaaacaatagctgtaatagccta

SEQ ID NO: 35948 - DNA, 1044 bp, Homo sapiens
gccagacaaaccttcctgatttacagcccccaatctccattctcattgaagtctcatccatcagattatttccaagggctgatgcattttccaatgtatgtttttaaattcttcgattcagaaattagaagaacaaattatcaaaatcaggctctctgtactgatttcaaccaatagatttttttctccaaatgttttttctagattgcatagtaccttatacatatgtattgaaatacattgatgtgatttagatcaccattccctccccatcttcctcctgaaataacacctccaaggtacccatacttcattattttgaagcatttcatctcccatcccaccccacccaatctgttaagtccttgtaattctttttccattacctggccaacccatttacaaaggtcaactgctgactattgttctcacagacatacctattcctgcatgaccttcaaccaggacccatcccttaatgcctccaccatagagatagtgcccttaggattcaaagtgttctggggaagattgtatgactccactgacatgcccaactgcaaagtcatgcatgtagcctgaactggaccccagtgttctctgtggtccaactccattccccttattgatttccctccaagttcccaccacctctctcatctgtcagcagatgatctctcctctttattaagaaaattaagatcattgaagctggctgcagtggctcacacctgtaatcccagaactttgggaggctgaggtgggaggatcgctcaagtccaggaatttgaaaccaacctatttgatatagcaagacctcatctctacaaaaaataaacagaattagccaggtgtggtggtagaagcctatagccccagctactctggaagctgagatgggagagttgcttgagcctaggagaggtggaagctgcagtgagccgagatcatgctactacactccagcctgaatgacagagtgagattatctcaaaaaaaaaaaaatcattgagaatgagtaccttcatctttctttctgtgtac

SEQ ID NO: 35949 - DNA, 1599 bp, Homo sapiens
ctttttatgaaagtttcatatgaatgtaacttgattttttactattataatctagataatatgatataagagggctaagaatttttaaattgaatcatatatatgatataatttgatccttcttgtatcttgaagttttgtacttgggatttctggactgataaatgaatcatcacattcttctggtaaatattttcttggagctctgtgtcaactttgatcctttgtctcccaggaaggtgtgacctctcctttgcctgcatacctcaaggccaggggaatatgcctcagtgatgcatttatctttgtatatcaggccgcatgattcccaactttctgccacacttaaattacgttcctccatttcagttttgtcttttctgtctaaagttcagtcaaagagtatcaaaaaattatgtttcagctagactggtgtaatgtataagtttttgtatcttgtattagaggatttcgtagcttttattagaggctcatttccacctcagcatacaagatcgttagtcttttggcatgtgtgccaattagaatactaaagcaagtccaagcacatttttctcttctcacgtttctaataagtgttagggactttgcctcttttacttaccacgtccccaaaagtgtcaggtagacatgtcacaaatggctctgtagagagccatgggaagagagaggaggtggatgtggaacataaagggttcagaaactccagaagaggagtgggttttggatagaagcatttgaggacagctgctccaaagccttatgtgtatgatgaaacttaaccacggggaagagactcttcagtagcctgttctgtctggtgatttttattttaagtgaacctttggatctatctttaactctctttattgtgagtctaaattccaattctgcagcagatcagtaaactcacagtatttttcctgtggaaatctattcaataaggaaaccaagacaggataataaaatttaaaaaaaaaacaactttgaattcccctgcctaggtcttccagttgttttccagcgcatacctcaggtatgactttgctagccggggacaaaattagcaccttccgattctctagtccaaatgaactttgtgctaaataaaaaattattatactacataataaagttacagatagcaggaaatgcaagagctaggagattcctagattatatctgccaagcaaataccttaaacatccacctgaaatcctactaccccctcttctgagataatttgcccagcccttctcttcccacacactcactcaatgtcacccccttctaatccccaaaactgtttttgtggtctttgtagcctatagtagttttctcacatctttccccctagacttttctgtttttcagtttcagacaaaaaaactcttcagctttttccagtgtgtctccttaacagtaactttaccacttgaaatcttatttcatagaaaaactaaattggtgtggaaaggctgcacacaataaagttatattattatccatgaaaatgaactcatatttctttcatactttaacgttaaaaccgaaatgcatgagagcaaaagcaccatg

SEQ ID NO: 35950 - DNA, 1450 bp, Homo sapiens
tttaattaattgaaagcaaggatcgactaggcttttcttgtaactgatccattacgaagaaaaaaggagtaaggactaagaatagggagagataattaaacaacattaacaacctgtaagacgtttaataggacttctgtacagttcagaacagacgatgggaggggaagtaaaacgcttaaaacgattttcaagggaatcacagtgattgtgataaaaagctgtgcttttcgagtagtatggtctttacatttttgtgttgtcccaaatgtttttggtcggttctgcataaatagtgataggttctgcctacatctgtgggggcaggattcatgaagcatggcagacattccaccagtcagagctatgaacacttctgaaccaatggggactagttttgatagcagtaaacccaaagtttttttcagtggtgttttagtctttttctgtttactttttttcccggtatttttgcggtacagggaggtgaaatacaatactgtacttttgaatatatattgaataaatttggtaatcctgttggtaggtatatcctaaatatatattgatgtttagattgcctatgctgtctcacgtaatgaccggaaacccgaggagagagttgattttctttagttcaaagagaaaaaataagttttaaagatcaggatcaaattatttcacaatttgttctttgctacttcagcttcattaagtacatctccaaaggcagtcctttatttattactgtagttttgattttttttttcctccccggggcatggtctcaggagattctttttttttttcattgttggtaagatttgtgaaccatggaataattcttgttaagtcaaactagctttatcaaagaatttaaagtgcataactcatctactttatgattttggaacgtatcattaggctgcaaaagaggttattcttgggcatctgaaagaggtgaacaaaataaatggcattgaacttcagtttccttatatggcttatacttggcttcaaaagcaacaaaaccttaatagagcaagtcccttacagagaattatcgctttatgaagatggttatttattagtaaattttgtataaaaaaagtattgtagcacttgaaaatgactatttaagcctctatttttagatttagttcttgattttttttctcaggagaagagtagtatgtttcgatgcagacaacacgttttatgaagtgaggtgttcacctttgtgtttcttttttttctcctcaacaaggcataatttacttcgtagttttcttggaattctgttagtttatcaccgaattaacttaaattttaggttttatactattgtgaaactataagtattttcgaagctttgtttaaactgtgacaaaggtttgaaaagaggttaatagaggagtcatccgttaaaatatttttaaatggcttcaaa

SEQ ID NO: 35951 - DNA, 1052 bp, Homo sapiens
ttttgaaattatctttctttgatttcatgaaataagcacaatagtactctatcactctatttttgtcacttcaaattttgttccagacaccattgaatgaaggtcttgccaggctttaagtgatagtgtggaagacgatagaaaaggagaatatctaaaaattcactttgtggaagacgatagaaaaggagaatatctaaaaattcacttaataagactctacttatctggaggttatttattatagctttaaaagcatattgaatgtagtagaaaaactagaaaataaaaaatgacatctccttaatcacaacaggtatgacagagtctggggacttcacttttagggccattattattcagagcccatttacttatgtacataatgagctgtttttggttctttggtatcccagaaggcgtgagaaaggtacgtttacagcattgtgaagttatgacctgtggtgttacagtgaagcaatagaaaaatggaaagatgactgaataacttagaaaataatctgggacaacttactttgaggctaagtgccttgtacatttcatttccctgtaggaggattcactctgttataatatggtataattacaagaaatagtaatagtcctaaggcagctgttctcagactttttggtttgactcaaaacagaaattaaaaaaaattaatttatttgaaaataagctattgcatgttagtgtaacattgttttaataaaaatataattgttttctaaaataaatagcaaaaatagtggcaatgttttatatttttgcaagtctcttatgtttggcttaatagaaaacagctcgattctcatatctgcttcttcactccatctgttacagtatgttcttttggctaaagtatatgaagaaaatccagccttatacaggtatttggttggaaaagggaggaagattttctttcttttctttctttttttttttttttttgagatggagtttgctcttgttgcccagactggagtgcagtggtgcagtctcggctcaccgcagcctctgcctcccgggt

SEQ ID NO: 35952 - DNA, 1032 bp, Homo sapiens
ttcctaggtatgttctgaagaatacagtttctttagaataatactatttcccaaagatttttaataggtgttagagaaaaaaagagttttgggctcatctaagtgaggaaattctgagttgatagacctggttttccatcttctctttggcggacgccagtttgttatagatgattatttttttagtttagaaataactggatacagcttaatttacaaaaaaagtttacatcaatatttgagccaagaagtttcagagaaagatttatccttaaagtagtgtgtaattcttcatgatctcaagttttaaaaaatagacttaaggctgggtgcagtggctcatgcctgtaatcccagcactttgggaggctgaggcaggcggatcacttgaggtcaggagttcgagaccagcttggccaacatggtgaaactctgtgtctactaaaaatacaaaaattagccgggtgtggttgcgcatgcctgtaattccgcctactcgggaggcttgaactcaggaggcggaggctgtggcgagctgaggtcacgccagtgcactccagcctgggtgacagagcgagactccgtctccaaaaaaaaaaaaaaaaatagactttaagttttttgagtagtttcaggtttacagaaaaattgattaagaagtgtaaaaaattcccaaaccctccttctccatttcccctattattaacatcttgcattcatgcagtatatttgttagaattgataagccaatagtgatacattattattagctaaagtctattgtttatattaggcttcactctttgtgttgtacattctgtgggttttgacaaatgtatacatgtccctgattgttgctgataatggcaacaatctgttcagtagttatagcttatggatgagcgaaatgaattacaggaatgttagaagggatgagaaggaggaattgggaatactctctaatcaggcacttgcattacctaagatcagattacttttttactgacagcatatgtgggaataatgtattac

SEQ ID NO: 35953 - DNA, 1036 bp, Homo sapiens
gctgagatgggcagctcacttgaactcaagagttcaagaccagcctgggcaacatgatgaaacatcgtctctacaaaaatacaaaaatcaggtgggtgtggtggtgtgtgcctgtagtctcagctactcaggaggctaagatggaggtattgcttgatcccaggaagtcaaggctgcagtgagctgagattacaccactgcactccagcctgggtgacagagcaagactcagtctcataaatgaatgaatgaatgaatgaatgaatggaatcatatagtacatgacttttgggattggctttttacttggaagattccagagttgttgcttatagctataatttgttcatttttattgagtagtactccatggcatccatgtgctaccaatttgttgaatcatttcatgttgaaggtcatctggattgttgtcaatttttggctattagaaataaacctgctgtgaatattcatgtagaggtttttctgtgaacatcccagttttcactgggataaaagtataagagtatgattgctgcggtgtatcggatagaaactgccaaagagtgttttccatagtggttgtactattttgcattcccaccagcagtgtatgagagatctagtttttccacatcctagccagcaattggttgttactttttttttttttttttactattttaaaaactattcttatagataaggagtatatctcatcatggtatttcatgttagccttttcctaatggctaatatgtggaacatctttaactgtgctattcaacatctatattctcttcatatctgttgcccattttctaactggattttttttttgtaagtattgaattttgagagttctttatatggatccgtttttggatatatagtttgcaggtattttctcccattccataccttatcttttaattctaacagcatcttttgcagaacaaaagcttttaattttgatgaaatcccatttattattcttttatggattgtgcttctgttgtgaagtccaggacttttt

SEQ ID NO: 35954 - DNA, 1033 bp, Homo sapiens
ttcccttaatttacaatctgttaaactagtgtgtaaaaaaactccatccctttgtctttatatgtttacagttaggttctaggcttagataattataatttttttttcagcttcatggctggaggacatttgaaagttggtacaggatattaaccatcactggcctttggcaagtctattcattttgacaacgaaaatgttatcatgtattttcaaaatgactcttttgacaaccactgactgtcttaattccctaaacctccctatccatatgtgtttaatttccattaaaagggaaaaattttaaacatttgattaaaaaccttcttaaaacattccaattttaggtccacaattccttctgtgtaattctgaaattcagaaattcctgaaaattgaacttttctctttttttgctgtcttcactttgctcccagttaaaagggctacctgaagagggcaagtggccttaattatgcacaagcaagtgttctggcactatagtctcacccctgggcatgaacttttttccctaattcatttggttgataaaatgtgacttacgctgaactgtgatgtgaggctgatactggtgtttatttatatcgttttcccatcagagttaatatttgtaaattatacttccctgcagcagtattttccaaaatgaaaaattctcaattctgaaacacatctactggcctgaagagtttggataagagattgtagatctgtattgccaatgtatatgtattaattgtaattattaagagcaggagtttttaatttgtggttgatccatggacttgtaagttaacattagctagcagttaaagttagtgaaaatgctgtttttgagggggttgggagtctaataaagagcatctagacttatttccattaggaaattccagctttattttgtaatactaagtatgactattgatgacttttttttgtcagttctcttattctgtagtctacttcttttacatttgaggtagagaatgtgtggtgatgaattttaggtatc

SEQ ID NO: 35955 - DNA, 1049 bp, Homo sapiens
gcctcccaaagtgctgggattacatgcgtgagccaccacatccagccatattttttaatttttgcaatggagtctcactctgtcacccaggctgtagtacagtggcgcaatctcggctcactgtaacctccgcctcccaggttcaagcgattgtcttgcctcagcctcctgaatagctggaattatgggtgcccggcatcacgcctggctaatttttgcatttttagtagaaacgggctttcaccatgttggccaggctggttgtgaactcttggcttcaagtgatccacctgctttggtctcccacagtgctgggattacaggtgtgggccactgcgcccggctagattgtctattgaatttagatgttttaagaactgtttttcttgaaatgatggggacaaaagtgtgattggagtggatttaggaacacttgatagaataattgaagtcagtgcatgtggacaacttgtttgaggaatttttctgtaaaaggcagcagagtaatgggttggtagctgtagagagagatgtggtttcaggagagattcttttttaagatgagagacaaaatatacctgcttggtatagcatattgctgtgtgtggtcacaatcagtttagagtattttagcctgtttctctttgtaaggatagacttaatattccccatcataattagggttctttctagttaatttgactgcctttttctgtttccatttagggctccctaagtcatgcataatgaattcatggaggaaaagaagttgttacaagttactaggagaaacaaaggtgattgggaagtactctggcatagacataaacatgaggaagtgaactggtggaatacctgtggggaaattaatcctgctacaggatcgtatcttatggggaagagtttagaatccagtcaagactgtatgagaggctgggcacagtggcttacacctataatcccagcactttgggaagctgaggtgcttggatcacttgaggccaggagtttgagaccatctggcgaacatggtgaagcccccatctcca

SEQ ID NO: 35956 - DNA, 1088 bp, Homo sapiens
attgctcagaggaccgagaacatgcaggaatgtgaaatgtttatggagaattgtctttcaacccagtgtactctcgatcacagtaatttgccttcctctcatatacaaaatttgatcactcttttccaaaagtcttattccattagagtatgaggcttgatgatctgtctcatcaaaataagatctagatacagataaggatcctcaaagccatttgtaattagaaaaatgcaaaataaaaaccagatactgcaattacataggccaaaattaagaaaacagtaccaagtgttggtgagaatgtaattggaattctatttgctgggagtgttaaataataaaaccactttgtaagacaatagttttgagtagaattaaattacttatagactatgactcagcagtttcattcccatatatttacctatgagaacagaagcatgtgttcttataacgcttgtacacaaatgtacttttattcaggacaggctgtcttggtcaggatgttgactgggaaggggcaagtgtgaaccttgtagggtgatggaaatgttccatgtcttgattcctgctggttatatgattgtatttctctaccatctatactcttagaatgtgttcattatgtaaattgtatctaaaaatataaaaatggaaaattttgcaaatgtaaggattccttggtaacttcagtgtatatgtctaccacttaattgcacagtaatacatttttagacatgtttaggctaactatagtttgatataaaattttaacactgttcatattgaaataatacccagctttcttcttgatcagaattaggctgatgggaccagacattgatgttgatcttctagttataagtatgatctagccatcaacatcttttccttatttcttgtatatgttgtaggcatatcacattttatatatatttagtttttgactgttgtccttataaatgctcttacacagcgtttataattttttcattacttaagttcaaaaactttttttttactcttcttaccttcctatctttattctttttcatattattattttaattgtttactatttatgtact

SEQ ID NO: 35957 - DNA, 1028 bp, Homo sapiens
agtggtgtatttaacccattttaccttaagagagctgagataattttaatcaacctgtagtattcaaccctaatatgtatgtttgtataggtctattgtgttgaaaaaaaattaataaagcacacatattaggttgcatattaggtcgatgtggctggatgttagaaatttgaattttgttgcatttttgatttgataatagactgcttaaaagaaaggttagtacatttaagcaaatgtaatattttgaaattattaaaatgtaatttcatgaaattattaaaatttaataatataagctattactgtttcgcttatatttaagctctagtgttttctccttttaggtttttatatcatttcagtctaatatttaagtttatcataatatgctaggtacagttttcagattcattagctgttgtgcactgtttggaaggaggcaggaaatttgtggcatactttgttattcatcatatcatcaagctgtatttctttaaaagcacttgcttttaggattttggcttttaggctgtgatagtttctgattttttatgtagttcttatcagtgtttttcatttggtaagttagcatggtttaggaataaaaagaaatggcctctattctttgcttctctgtttattggtctggttattaaactggggacttaatctaaatttgttagttcatctgtaagattgttaaacacatgaaatggatcagtctaggaagtatataattctaagggatttaatatttgtatttatcaagaaattcagttttttcttttacagtctatgataaaactggaatgttaatttgttctgggtcttaatttgctcttctctttcttttctcgagttttggtttactgtatgtatgctttttattttattttattttattttactttaagttctgggatacatgtgctgaacgtgcaggtttattacataggtatacacgtgccatggtggtttgctgcacctatcaacccgtcatctaggttttaagcttcacatgcatt

SEQ ID NO: 35958 - DNA, 1061 bp, Homo sapiens
aagaaaaaccgtgtagctattaattctcttatatgaacataatgaataaaatgccagggattacaaggcagagaaaccagaaagagtagctcagatccttctgtctaatatggcaatactagcgaggttaaccaaggtatttctttttagttgagtcaaaaagcccaggaagagtgaattgaaagtttgtggtcaaagcagaaagcagttcttttaacttgagaaaatctgatgactggggacaaactagtggaaaagccttttcacattaaactaaaagaagttaaattgattaagaggatattacagattgatggggaagttatggtatgttgctcttgtgttttaaatttctaaaattgccattttgctttgtagttgacgttttgagcccagctgttttaataaatcactttatttaagataatgaaagaaggaaaaccatgttttacactgtccatgtttagactggtgatttctggccactgccaagtgttttgataaatgtagactgttaactggagtgtgcactcatttgtgccctaccatagcgtaggcattattatttgttgtgttatatctggtccaaatcatacatgtgttatcctctggaagctatcatcatttgagtttgcaatttccggttagttttgaccagaactcgaatgttttattctgtagtatggtaatcattgcctttggagtgcaggaacagtaagggactcctgttgacttaaattcaacaactgggacagtgggatgttgacacctgcctggcagagaccaccagggactcacctgcagttaaacagtttgtgtttattacttcatggtgagcaaaaactcatattattgggattcatgagggtcgcagaaggtgtaaaaaaaaaatacaggatttgggcttttgcttggtgattgggaaggtttcagaaaataacggtttgccgtggatgggatgctgtcaagaagtggggtaattctatgattgggtatcttaatgttatctatagagaagttgattagagtagaactaaagctgtaatcagtaaacaatacat

SEQ ID NO: 35959 - DNA, 1076 bp, Homo sapiens
tgtaaactagttcaaccattgtggaagtcagtgtggcgattccttagggatctagaatagaaataccatttgacccagcaatcccattactgggtatatacccaaaggatgataaatcatgctgctattaagacacatgcacacgtatgtttattgtggcactcttcacaatagcaaagacttggaaccaacgcaaatgtccaacaatgatagactggattaagaaaatgtggcacatatacaccatggaatactgtgcagccataaaaaatgatgaattcatgtcctttgtagggacatgggtgaagctgaaaaccatcattctcagaaaactatcacagggacagggaaccaaacactgcatgttctcactcataggtgggaattgaacaatgagaacacttgggcacagggaggggaacatcacacaccagggcctgtcgtggggttgggggagcggggaggggatagcgttaggagatatacctatacctaatgttaaatgacgagttaatgggtgcagcacacctgcatggcacatgtatacatatgtaacaaacctgcacgttgtgcacatgtaccctaaaacttaaagtataataaaaaaaaaaaaaagaatgagccctggttgtacccaacatttaacagatctggaagaagagaaaatgcaaaagctactgagaaggaacactactaatgggggagaagctagtcaaatgaaaatgtttgttttccttattgcattttagcttctcatgaaaaaggactgtgccttaaatatctgtggtatatagcatagtgtctgatactaacacatttgctgaataactttgaagataggtaatttcagcttgggataggttgagtttgaggcatgtgaacaaaatctaatgggcatttgaaaattcttagcagcagctaaggagggaggtgggaactggagatacagatttagaacctacaaatgtatgtggtaggaactgaagtcagactaaacacattgctagcaattttcaaaagtagaaaaccagtgtttcaaaactgtttgcttagggcaaaattactactatgtgtct

SEQ ID NO: 35960 - DNA, 1045 bp, Homo sapiens
gtttacaaagtgatgaagatacattgaaacaagtaggttattataaaaggcaaatctttgaaggggctctcataaaagtagccactcataacagaagcgactgttttctgtctgttgggaaaatatcttgtgagagtcttagattttaataaaagactgaatttcttacatgaacttaacttaaattctggtattttatgtaggctccctgatggattttctcagctgttaaacctaacccagttgtatctgaatgatgcttttcttgagttcttgccagcaaattttggcaggtaaattatggtttcttctaaaacgttttattattagctcttataaagtttacaaaactataagctgctttggtagtactactcattacagtttcataggctctttttaaattattcccaagcattgtgacttttatactttgtttggtggctttgacttaatttttccaagtaaacaataatcagtgagagtttgaaagaaaaaaaaagttttcttaggtggccaaaacagggcgtttcaatggggttaatttctgtatgcttgagatactgaatgctatattcttagcattctaaaatgatttaataattgatttatctgtcttctcccctggaatcaaaattcttaagaaaagagaatctgtttctgggggcgacctcatcatctccctgccaccctcaagtctctgagtaattttttaaacaaacagatgaatgtataatagatatgcagttattactgagtttaaattaactactagagaaaatgctagccaactaaatgttaattttgtagccatcttttatctaaaaatcattgatgtacttgtcagattcctcttctgtatctggcatttgcatcacttaatctgctcattttctctctagttttagtggaatgtacatcaatgaagtgccagaggatttctcctccttcttttgtttcattatttcttctcagagcagcactttagagttgcattattgttcttgaatctaccaagagttaatttttgtgagcatttttggta

SEQ ID NO: 35961 - DNA, 1045 bp, Homo sapiens
tcttcacctgtgaacttaatattacacttggatctacacactggatcaggataatctgttgaactctgactataaatactactcttaaattcttttctttattttgcccgacaagggggagtataccttttactactgggcacagatgtttttatagattatggtatgacgaccttttagactaacgagcaaattgtttttagtatatgttgtactctctgcgtgtgtgtgtgtgtgtgtgtttattgtgttacacttaaagtaactattttttatgtatcttctttctgacaccagtgaaaatctctgtggtttgaaattatttataaattaattcttagtacatagaaacactgaagaaaaaatgtaaatcagtcatttcaatcataagtcttaatttataaattataccacgggcaagttaaataggttcttgaacttcagtttccttatcttgaaatgatgataatagttcttttggagcacagccacattcattcactacaaaacactctggaaccaagcatttcacataagggatgcttaacttacgctagtattctgtcctctcatgtaaaagaacaattatctagtatattgcatagctgattataacattatttagaggatgcttacccttacttcctattttccagaaatcatcttcagagacaaagaaaagtaggaaattgagacataagtttcagtgagtaagacaaacaaaaaacttagctattgatgcattcaagtatttgctgtaattccccacatggcactgcttacagcataagcagggtttgcacttctatttttaacttaatttctaattcatgaaattattgttcacataaaacagtaatcactattgacagcttaatattaagtatactatattttgttatggaaacatacttccatattttattgtattgcttaatttggagattatgggtgaatttaaatacatggaagagaggttgtttgtaaacctattctcaaagctttaactatagaacctccagtgaatgaagctctttacattagt

SEQ ID NO: 35962 - DNA, 1026 bp, Homo sapiens
gatttggaagaacaggtgtagtggtcaaagaggtggaaaagtcctgggtatgactatggttgtgaatcatttagctgatgtgcatagggacattgggattgaggacatcaaggaattataaagttgtagtgttggggtggtgggcttatcatcccacattgacatcattcaggatattagcaggtcttaggtggagagaaaatctgtagctaaaatattagagtcctcagtaagtctatacctgggtgatcagtttgagtagcctctagaatggatagaaagggatattacctgatatcctgaatcttcaaagatgtgagatttatactaaagagtagaaagtgtaagtgacgagaatttgacaagaatgagaagcatggtataagttaacttaccttgggcttctgaataaattctggtgtaaagttgctttagaaataatctaacactaattggaatctctgggccaagctggtgattgaaattactgccctggaacaagggagagggaattatatgaattaaaaaatagactttgttggaaactgctgggctgtccttgcctttccaatcataccacaaaagtatgtcagtaggaatttgaatcacattccacatttgttttgaacaaaaacaaatacactacttcattgagtacgtgttaagcaatttaaaaaagcaattataagggaaaaaaaatcttgaatggagtaatgaaaacaaagaaaaggctaaatcaaagaatttcattcccattggtaagatttggtttcatgacatccttaatttgggtatgagattttaaaaggttaagcaagccccaaataagggcttaataaaaatgataattagaagtttttgtattatgttatttttgcagaaatattcgaattgaccatatttgggtattccaggagtttctggggttctttaaagctcattttgggtacttgtaatctctctgttttgagtaaaggatagtcattttcttttaaatttgtgattttattttgtattgcacaacta

SEQ ID NO: 35963 - DNA, 1034 bp, Homo sapiens
aatgcatggttatttggaccagaaaaaagtgccatagaagaccaataactgtttagttgaggctagtctggaacctttcattagagcaatatttggttattgcacttcatttttatttactaagaaatgcaatttgggaatttttaatctgttatgctttgtttatcaaccttgattttaattaagacttttataagactagcttaaaacaccaaccaacattatttttgcaaaagtgagttggactcactttccattcttgctagtcagagtaagtaggcagcacttttaaaaatatgtgaactcaaatattgcacttctttcaagatgttatcaattggttattgtactgtatagttttaataattttgattgaaaccctttaacaactctttgtaaattttaactcattttagttgattttcagtactatttacataggaattgatttttatggatatagtagaagaaatgtgctgtattttgataaaattcacttattgtatgtgtgttgtaatctaaaaaaaaaaagaatgacaaacagcttctttaagacaagtctcggtgttccctttattcttagtttgtttttaaatattaattttggcattctaaaatagctaacatttcttttattgatttcagattttcacaggcacattctacttttaatcagaaatatatttaataagtataattgtgaagttttcaactactttaccttgaaccacatataccaattataattttggaaaaggaattaagcctcacggaacaatggatcttcagcaaaccttaacttcattgtctgcacattacattgaagtattataaatgcaacagatgttatatgcactggcattttatcctactctagttagttaaaattttatagtattcttgcaacacataaagttgcgtaagaaactttaccaagaggagtattatagccaagttttctttgaaagtattggaaaactaaaattaaatgacaaggactttgaattagaattttgctgtaataaagtttcaaa

SEQ ID NO: 35964 - DNA, 1100 bp, Homo sapiens
aggtgaaaaccttaaaagcagccagaggaaaaaggacatgcaagaagaataaagacaaaggtaatggcagactttttgcctgaaagaatgcaagtgagaagacaatatattaacatctttaaactaatgaaagaagaaaactgtcaacctagaattctgtatgtaccaaagactatctttgaaaaaataaagagaaaaaaaattttttatgacataaaaacttgaagaatttattaccatcaagcttacactataagaaatattaaaggaagtactttatgcagaaagaaaatgatattagattgaaatctggatttacacaaaggaatgaagagcaccagaattggtaattacatgggtaaacattttaaaaattttttattatttaaatgtcttcaatatattacaaaggtaatagcagatttcttgcctgaaagaatgcaagtaagaagacaatatattaacatctttaaactaatgaaagaagaacactgtcaacctagaattctgtatgtaccaaagactatctttgaaaaaataaagagaaaaaaaattttttatgacataaaaaaacttgaagaatttatcaccatcaagctcacactataagaaatgttaaaggaagtactttaggcagaaagaaaatgatactagattgaaatctggatttacacaaaggaatgaagagcaccagaactggtaattacatgggtaaatatttttaaaatttttcattatttaaatatcttcaaatcttacctgttagaacaaaagtaacaatcaatgtagggtgggatctataacatatgtaaatgtaaaatgacagcaataatacaaaggtcaggaggggagagatgtaagtatattataaggttcttacatgtgaagtactgcatcattcaaaggtaaactgtggtaagttaaacatacatactgtaaaccataaaaaaccactaaaataacaaaatccaaagagttatagctaataatgtaacaaaggagataaaatgaaatcataaaataatccaaaagagggcatatagagaggaaaaagtgaagacagcgacaatagggacaaagggataacaaatagtaagatg

SEQ ID NO: 35965 - DNA, 1062 bp, Homo sapiens
taataaagtggttaagtttataagttctgaaatcatacactttgtgaattcaaataaaattattttttagttctgtggtctagaataagacatgtagagattacatgacttatactttcctcatctttaatgtagggatagtaatagactctgcctcataaaattgctttgaggattaaattaaataatgcatgcctaaggttttggcctgatttctgactcaataactattagttcctgttgttgttgttgttgaaataaaaatttaattagaaaaaaattttaggccaggcacggtggctcatgcctgtaatcccaacactttgggaggccaaggtgagtagattgcctgaggtcaggagttcaagaccagcctggctaacatggtgaaaccccgtctctactaaaaatacaacaactagctggacatggtggtgcatgcttgtagtcccagctacttgggaggctgaggcagaagaatcactggaacccgggaggcagaggctgtagcgagccaagatcgagccactgcactccagcctgcgtgacagagcaagactctatctcaaaaaaaaaaaaagaaaagaaaaaaattttaagtgacttatactgagagtgcttcagatcaaaacccatgtaaaaagagacccaaaggaaaattaatagctttaaatgaatttctaagaaaacaatatgttagaaaaaagtataattttaacttgtgaagttttataaagattaaataagcacaatgaagggattattaaaggtaaaatcagaaattattaaaacaagaaaaatatccagtagaattagtcaatgataaagaataaaaattggtttctaacagaccataaagtaagcaaacttacaccaaccatgatcaagtgaagtagatgggggaaggagaagaaatatgtttgaaatgacaaatagcacagaactgtgtactatgtagctctttatagtactaactttgaaacaaacagcataatttctaaaaaaaaaaaatactaattaccaaaattacctcagaaagaagaagaaatcctaaaagactat

SEQ ID NO: 35966 - DNA, 1097 bp, Homo sapiens
aggttagaagggagtggggtgatatatttaaaatagtgggggagaaaaaagctgccatccaaaaataccatatctggcaaaactattcttcaaaaaataaaggagaaattaagatttttcctagataaacaaaacctgaagtagtttatcaccacttaacctatcctataagaaatgctgaagggagttcttcaaggtgaatcaaaaagataataaagagcaacacaaaaccatatgaaaatattgaactccctggtaaaggtaaatatatagataaatatagaatcctacagtattataatgtaggcatgtaaatcacttttaaatgtggtaaagaatttaaaaacccaaagcataaaaagtaattataaaattatgttcatgaatatgcaatacaaaaaggtaatttgtatcattaacaacgttaagtggggagggtagagatgtaaaaaagtagagttttaatacatggctgaagttaggctgtttttagtttcaaatagattgttagaactttaagatgttttatgtaattgcaatggtaaccacaaagaaaacatttatagaataatacacaaagggaaatgagaagggagtgaaaacatgtcagtacaaaaaaaaaaattaatgaaacacaaaagaaagcagcaagggaagaaaggtgggacaaaaaaagctgcaagacacacagaaaacagtttacaaaatggcaatagtaagttcttccctatcagtaattactttaaatgtaaacggattaaacacattaattaaaagacataaattggctgaatggatattaaaaaaacaagatccaactatatgctatctacaagagactcattttaaatctatgggcacatacaggctaaaagtgaaagggtaaaaaaagatacgccgtgtaaacaggaacctaatgagaaccatacttaaagcttaagacttcaaatagactttaagataaaaactgtcaaaagagacaaagaagaacattatataatgataaaagtgttaattcactagaaaccattataaatgactagttataattttattataactttattattgattataaattatttatacttattatt

SEQ ID NO: 35967 - DNA, 1058 bp, Homo sapiens
gaaatgaagtagatttcaactaggggtatttggaaatgtggttttagttttcagtagtgcttacttaacatttacattccttcacaaaaggatccgtcagtttaggaaatgttgcttcagagatgactgtcaggctcttgaagatttcagaggcaaaagagttattcctgttggaattgctagggctttagtaggttattataatcacagattgtttttggttaaaaaggacagaaacagtgttacccaaggtacatcgagaagagacattattattaaaaagaaagatttcactgcgttgaaaaataaagattgtagtacagccaggcctcatgggaactagtactgggaaccagaagggtatcagcaatcaagatgactatctgcttctttctctgcagtggttattatcagttcagtttgtttctatctactccatttctttgcatacctattatgtactcatcatctggcttacagcttgctgtaagtcaccttccagcccaatagagagaacctgattgattgatctagctcatttggtcgagcctgacttccaaaattagaggttgctggtcagccagggaaatgggcccttgagactggtgactaatcatttatggctagagaagcttataggatcttttgagggtttcacatgaggaaaccgtgctaaggcctgtgccaaagcaatatagaatgtcttggtagcacatgtaggaggctgtacctaatgattgcggtatcttaagatggtttaccagaagacttggaaatttgagccttgaagaagagtggaattagcattcaaaatgggagttagcgaggacatcgtaaccaaatggaacagcatatatgaagacccatatgtttgtgatgtgttgctggaaccacaggtatcatttttgggtgcatttccatgacgaggcaagaacagaatagtacctttaaggaaatttgatatgtggagtgacacaatgaaatttagtgtttagaaagatcactgtgggagctttggtggaagaccattaataaggatttgaggttgggtgctgtgt

SEQ ID NO: 35968 - DNA, 3047 bp, Homo sapiens
atactgagaaactgcatgggaaaaaagaaatcaggtaaaaggtttattaaactggaatattaattatatcagaaaattaataccaccaataacactgggtcttttattgtgttagcttattactgaattggaaggaagaattttatcagtgttgcttggttgaaacctgctttattcccatagaatctttcatatatctgagaagccctactgtattttgttataaatgttcaagatgatgggcgtgtagatgtcccttttattgtttattttacttgatagagatgaataaatgcacagtcagatgtacctttttagtgtttttaatattacaacttggacagttttactgtttttgaacagaaaaatttaagcatacttttattgcaatttagttataagtaagtaaatattttgaaacactaacctacagttggtattggtgaaacattcagatatacgtttttcattagttgtattaaatacggcagagatgaatttatggaacctcgagaatttcacagtgagctgttaaaatactgattatgcactacaagcaaagaaatagtgcattattgtactaaaaaagatagcagagtgagtgtgaaataaccaaagaaaagtattccagtggagtaagttctgtaagaggagatgtgctgtggtgctgtaagcaagcagtgttctgttgacctcactgaatgcatcctttccttgatgttgaacaaacagcatcatgacataagtgagaaaaaccatagaaaaaaatttaagaagttttttcagtttctttgaattgctgttttttagtgtagacagtaatgtgagaagatcctaagttgtaaaagtaacatttgatgtgtaacagtttcatgcatattaagccttagcctttgttaataaaacatgccatttcaaaataaaatatgctttcattatacttgtccaaatatgacctctttttgttgttgcgtgcatttcagatttctttttataaatgttaacacgtagaaaaagatacggtcaaacataacaagggtgtcagcctaatcatcagtcataactttatgtccacattttctggtagatggattttgactattaatttggttttgtatgttttctctatgtgatatttgtgcattattagatgactagactggccaaggcagacctgttacacttgcctgagttaggcattgtttgccatgccactaaacctgccgtcaagtgaaaccttcattggggaaatgagatcggagtctgaaccgcagaagatggacgccctgtctctgttttttattgttttactttaatttcatttctttttctttattttgtccctttttttgtttttgtttttgtttttgttttgttaaatctctttcactttaacttgtgagctggttttcccagttctttgtaaatggtatttcattaagggttcataacgtgttgcaaattatattgggagatgattagtagagctcaaccttaagataaagcaaattttcatgtggtaaattaggatacagtgttgtgaagctcattgtgagtcttaatttgtgtgtatggactcataaggtacattttattcttgaaacattaaaacactgataagtatctcaggaacactttctgatctcagcgcaacatttttctagtttttttcccccctagtctacatctctcataaaaactgatagcttctaatttttgtccttccccctggaattttaggcatacaaaatcatcaaggaaaataagtaaatataacaatctgggagtaaagaagagcctttcatttttatgatggttatttatcatataacttatttccttgacttatgaagactttttgttgcctatgtggggaatggatatttgagaaacttaagtatttgcatgtaggtttttgttagcttgaattttttgttgaatatttttcagaggttactagcttctaaatggattctgagattaggactataatactgtgagagatgttttcctcagttgactttgaggagtatagtttgggaaaaatgctaaatgcttatttgttttatacttttataagctctgttatttggagggtaaatttggtagaattctatcttggaaattaagcaatggagctttttcttaaagtacttttgccattacctttaggtaattagaataagtatatagagtaattagaatggtaattgaaagttaatttattaaaaaatgtgcttatagtggatttatacatttatagtagtatactatatttatagtagtatactcttttgaaaggcagtgggagagtttgacaacctactgatacttaagctgaaagtgaaagacttcataatactaagtagtcaacttttggccagtgttgaataccctttttgtttgtatagtctttctacaatgtcttcaataggtagttttacttattaaaggacaagtaatattaaatttgggacattactagattagaactctgagtttccttaggtgcatacattaaggtagtgacgatggagtttctgcctcaaaacctcaatttatcaagaatgttcaggttttacaaaccttttgagataataccaatttataacagataaaacaggtgaaatcaatataaatagtatagtgtatatgtgggtatatataaatacatgtgttaataccaataactaatacatataaagcagattattgttatttgatgttttcagtaaggcctacctgccttttgttgatgcatgttaagaaatctgttctccagaattttcactgaaataataaagataactttgtttttgaaagtaataaagtaatataaacttagatgctgcaaaggtagaaaatagtaggttttatttgcttcctataaataaggcatagccattatttaaatcaagttttaaattccaacttgagttccatccatgtttaaagatatattcagataatattgtttagggatttatctctgcacatgtggttgttttaaatatttttacaactgaaaccaggcatggtgcttgtgg

SEQ ID NO: 35969 - DNA, 1598 bp, Homo sapiens
gtttagcatgattttgtgcattgtcttttaaaacacttttggagaattaataatagaaatgctttaccagctaccacatgagtgttcttctaaatatatccacatgtagtcaactatttaagaattttttttttttttttttgcctaaggggataaggaaaaataatgtgaaagttgcagtccttatcagaagtaattgattagaattcagcaatgaatatgccaaatcgtacttatttcagagtaagtttttcatttttttaggttgtagggagtttttttcctactgagtgttattagattattttaatgttactattgttattaggcaattaaaatgtttttaagcaagctttaaggcattaacctcccccttcagataagtatacataaattggttctaaaagttaataagaagttttctgaaaccagggaactttttttttcctgaaacatttttagtagtttcccaaggcatattttttggaactgagttcttttaggcatctctgatgttggtgagatgctttattaactgaatggatgtaggcttccttttacgttgaagttgattacatggagtaagtttttgttttctatttgaaattaaatggaatctgttggagggttatcaaaattgtttgcatcacaaataggtagtttcagtaacaggataggggcactcattaagaaatttcaattcgcacatatttgttttttctttttcttttttttgactaatttggttatttgccatttctggggattaaactttaaaaaatgttcttcttttctgtatctgatgttctgtgtgctattagtgatgcagccaacacgaacggttgtcatgtgtaacacaactttcgatcaccgcgaaaacaccgtcctgggaaagcgtccatgcttgatatcgtttggttcatgaacattaagtttccagtacaggtgacccatagctcaaagtgttaaataattgtctacattattcaatttttaaaataatattccattaatgagattgttaatatttgaagttttgctcacttttatttttcctagtagagcaggataaaaggaaagacttaagttcttatttatttctttatacagatctgatagatagattcatttattattattattttttaactgcaagggtaattgtaaaatcatagtgtaaagtttgtgtggtgtttctgctttttgtaatgtttggaacttgcctctgcaggtaaaatcccagaggaatccaaagccctctctttattggctcctgctccaaccatgacaagtctgatgcctggtgcaggattgcttccaataccgaccccaaatcctttgactactgtaagtactataagctggcttatgaaagaggtgaatgttcaactgtgtgaccagttgaatagagagcttcagattatttgcatttggatcttcttcttttttttttttttaatagagaggattcgaaatcactgcttaaactttttttttcactttatcagtgacttaacgctgcgttttggatttactcctgaagtaataggggattcatttaaatttgagaaccccaatagattattcactagaaaatc

SEQ ID NO: 35970 - DNA, 1682 bp, Homo sapiens
tattttcctgtcacagtggcgctgtcattaggactgtgcttccttttatatattctttttgtttgttatgacagacagcacacattcacaggaactactcaaccacgtaaccactactccctgtcatgatgtgttatgaccagattacatgcaagtcaacagggaaaaatcttctatactgatttgaggcataaaatgactagcaaaagccacatctgaaaatatacgaaataactgttaaattctttgtttctgtctctgttctagacaatgaaatatccggtaaagtttccagtaaatgtatttcagattatgtaactaaagtattatttaagagaaatttttaaaatattgttaaatactgttaggatagattttaaattttcttgtttgaaagatcgtaaattaagttttgatattctaacaattttttttctttaggagtagatcccataatagatcacgttcaagacagaaagacagacgtagatctaagagcccacataaaaaacgctctaaatcaagggagagacggaagtcaaggagtcgttcgcattcacggtgagttttagagaaattaacaataatttttttttcctcagagttctgttagtgctaagggataatattttaattggcttcatttgttaaaaatctgttgtggtttaggtttttaatgagagaaattaaaccttttttattgttttagtaatctaggattaatattgattgccagtgatctgaatctgatgtcagtgtgactcatgaggtttccaaactactcagttcagcttgcgtagtatgaatagctttgtttagcagcttcttgtacacctgagctatataaaaatgtatatgtaaatgtctgtaggtactataaattgtcttgtgttggtaattgttgaagagagagaggtctttttggaggaggtagaactattttagttatgaatttatttatttttgtttttaaagggacaagagaaaagacactcgagaaaagatcaaggaaaaggaaagagtgaaagagaaagacagggaaaaggagagagagagggaaaaggaacgtgaaaaagaaaaggaacggggtaaaaacaaagaccgggacaaggaacgggaaaaggaccgggaaaaagacaaggaaaaggacagagagagagaacgggaaaaagagcatgagaaggatcgagacaaagagaaggaaaaggaacaggacaaagaaaaggaacgagaaaaagacagatccaaagagatagatgaaaaaagaaagaaggataaaaaatccagaacaccacccaggagttacaatgcatcgcgaagatctcgtagttccagcaggtttgataatgcttaaaatttttacaaagggatttgctgatgacaattggaaacaaaattttttacggagggagaaaaggttactgtacgcaagtggaacctgtaaagtaatataagaacattttctcctaatttcagagtaaacatttctctagcagagtggggaaagagatgatactgggcaacattatttgaagagttttagctattctttgtaaccactattttaatagaataataataattgttattttcttagagggtgggatggcagggaaaggtactttttttaaaaagcacattaagaatttgcgtcttaggctttttcctgaactttttttgaa

SEQ ID NO: 35971 - DNA, 1076 bp, Homo sapiens
ttaaccaagaagagaagagagatccaaataagctcaattagaagggaaacaggagctattacaatcaatactacagaaataccaaagatcattcaaggctactatgaatacctttacacacacaaactagaaaatctacaggagatggataaattcctggaaatatacaaacttcctagattaaatcaggaaaaaatagaaactctgaacagaacagtaacaagtcgtaagattgagtcagtaataaaaaaaaatttgccaacaaaaaaagttgaggaccagatagatccacagctgaattctattagacattcaaagaagaatttgtaccagtcctattgaaactattccagaagacagagaaagaggttatccttcctaaatcattctgtgaagccagcatcatcctaataccaaaaccagaaaaggacataaaaaaaaaggaaaactgtagaccaatatccccgaggaacatagatgcaaaaatcttccacaaaatactagctaactgaatccaacagcatatcaaaaagataatacatcatgatcaactgggtttcataccagagaagcagggctggcttaacatacataaatcaataaatgtgacacattgcgtaaacaaagttaaaaacaaaaatcatatgatcatttcaatagcagaaaaatcatttgacaaaatccagtatccctttatgataaaaaccctcaacaaaattggcatagaagacatacgtcaaagtaatacaagccatctatgacaaacccacagctaacattatgttgaatggagaaaagttgaaagcattccccctgagacctggaacaagacaaggatgcccactttcaccattctattcaatataattctgaaagttctagccagagcaatcagacaagataaataaataaagggcatccaaattggaaaagaggaagtcaaactattgctgtttgctgatatgattgtatacctagaaaaccctaaagactcatctgaaaggctcctagatatgacaaatgaattcagtaaaatctaaggatacagaatcaatgtacataataaatgagtagca

SEQ ID NO: 35972 - DNA, 1022 bp, Homo sapiens
ccatttttctctagttgctttgtttcttcattcaacttactgagagagaaatctctttggctcagcttagtttagagattgaatttccctgagacaggtacctacaccttgtggaattattattgttccagaacggtagtattccatctggtatggttggcctccaaaggatacaagtaggaatggtcaaacctaaaagaagctggaatccaaactgacactatacagtctcccaaatagggttctggaagagatgaccatgagggcacagttctgatgagttatgattctttgttttggacagctacatttgaagtagttttttttttttttttgtaaatggaaattagataagatgtcatgtataggatattcttaggtctttgaaatgtacttgtccattgtcattgccagactctgactgtggtgggtatggcccactcttttaattttgggaggtaatttatcaaggggtaataccctgatgacagtgtcagagtattagaactaagtggaaccttatgaatattccactagaaggattagaggtggggtcagtggatgagcttcttgtggggtgggggcttggaggttgggggaactggtctgtgtgcccagagtcaaacagaaagtgttgagcgtgtgtctgtttctttttgaaggtgggatgggaaggggagacactgggtctttaatccacatgatgtcacctgtgcccaggcaagattagaaccactctaaaccaaactctttcattttgcagatgataaaactaaggcccagagggatgaagagctgtacttcaagtcatttttctgagtcattggacaactctagattatgatctaagtttctgttactctgtctgttgtttgcataggcacactgattcttatagacagttatctaaaacgtggcattataaattttgttcttgaagactgtgaagtggatggggaaaaagttattccagttatttctcagaatgaagtgcaaagacgatgcctaggccaatgttattt

SEQ ID NO: 35973 - DNA, 1027 bp, Homo sapiens
ttattgtttttagagcccaacatttataagggatgccactgatgataggcagacatcagaaattgaactgtgacagcaacatagcaacatatatcttaaatcccaattataggctctgattttaacccttcttacagaagccttgagcttctctaagtgctaaaaattctcttcaattgctaggcttaaaaaagtgacattctgttcctacttgtcatttcggtttatgtagtaataacaaaaacacggtgataaagcataaacctaatataatttttccaggaagctaggattgtaaggaagaatatagcatttattaccaatattcatagagatattttttaattctgttttaacaccatgtataagaaaatcattgtaccctctacttcctacttaactccaattcatgtttcacttatttctcagcttcagtggatgatgttggatgtgtcaagagcactttatgaaaccatttatcatgattgtgtaagaatagggcaaataactccagagtgctgtagccccaagcagctccgctcgctgacagaagcaaatgtcagattcaagatagacatcaggtttctctgtaatgctgggctatataactttaaaagcttattgttatcaatgtgattgaaaatttaaatgacttaaaataacctttaaataagatgtctttcttagctgtttgtctaagtcattcctgttgattttctttttggatatatgccctctgcttccaaatgtaatataacatccattggttttcctagcacacttaactggccataatattataggattaagatttggggttatgaatgttagtgctttgtatactgaatttctggccaagtcaactgcctcttcgtagcctgtgtccccattctctcctaaacacttgggatgtttttctaaagtttggctccaggatcactgattgggacattatttaaatattttatacttcttaaacaaatcttcaaatgtttaaagaaatggtgaggtaggagagccctctcta

SEQ ID NO: 35974 - DNA, 1030 bp, Homo sapiens
ttcatcatacagctaaaatagacaacctcaaaagcataagtaatagtataatgtaacataagttatgaattttgagtatcattgttttgctataatttaattataagctactgtaatttttattagtatgtttagccaactgccatgtaagttcctgaaaatttaatgagcatcatgagctggtgcaaactggctccagtatatcagtgggttagcccaaatacacacatggaatactctaatacagcagtactccagaacatcactgggttaacacaaatacataacatggaatactccactttaatacatcagtattctaatacatcactgggttaacccaaatacatgtggtaaaacctaggctccaaactggcacattgtcacttctgttcatatcccgttgatcaaaacaagtctcatggcagagctcaaagtaactggatgggcaagcacgctctgactctaggaggaggaactgcagtcacatggcaaagggtgtggctacatggagggtgaagaattggggccagtgattcagtgaattactgctgttacatacttgccgtgtcacatagtagagcaaaatctatattatgttaactgcacttaatcccatctttgaagtgtttacatcatactgctgtgggagtacccatggctataagttctgttagcagatttgattgagaatctttttttttttgaaaaaagtacgtctcatacagtgtaatagctgctattcaggaaagatttaggggtaaaaaatgaagtctgaatttttactctccatgttgtgaggctttctcaggaattatagatgcagattttcatttcctagtggattgctactttatcgtttgatttttttatacttttccccctgaggaccttcgtctgatattatatactcagtctttttctcccatgtgttaactttgtgtgtcttaagtagcattgatatcttcataaaatttgtcaaaattccttttttgatagtttttaattcacttctaatttgggacagcaa

SEQ ID NO: 35975 - DNA, 1050 bp, Homo sapiens
accacatatgtgtcccagaattcattgttcaacaattatatattgaatacttgtgttttaagaaacactgtaccagacattcagcctccattgttaaatgaatcagataaagtccttgccctcatcgtgcttacagattagggaaggaagcagacattaaataaacacatgctgtgataagtgctgtcaaggaattggtgtgctgcgataaagaataggggctacagatgggatggccaggggagactcctctgaggagtaatgtttaataatgtcctgatgctaaagtttagtgtctgggacatagaagtggtacagaataatcctcctttaagcagtcagaagggagagtggtatccatcaaacatccttcaccccagtcgtttttatgaggcaaccaaaagtggtttggttctaaaggactgtggttgctgtggagtaagtagatctctccagtagcttcataaaaggtctgggagcccagaggtagagatggagtggtcaaagagactgggagcttgaagatgaggacagagctacagaaggtactgttttgcaattcttgattcagaggagaaatgagataagggaaatgttcaggtgcacagaggagataggagaaaattaaagatttaactgttgaagtttcttttgaatacaaattaattatcaaataaaaattaagaaatgaagtttagaggaaagaataatttgcttcatcaataaaaccattttaatagaacaaataacttttcattttattggtaggtggctttattcagaattatgttaagattgtttttaagcaggaaacaaacaagattcagctcaaagatgagagaatcacacaaaattaaatatggaaattctaggttgctgggatatgctttctgtgattatgtttggttagtggccaacaagtgaatgcatcatttcttttttttagggaatttatgaatagactgagttctgtcaacttatttacattgaaattgtaggttttaatgaaaatctagggacctaggttcaattatatttgtttcaatatta

SEQ ID NO: 35976 - DNA, 1052 bp, Homo sapiens
tcttgtcagtcattagactagatcggttttcttcttcctacaaattttatatactaaaaaattttgaaaaaagacatttttctttgggaaaaatagggaatgtcagatccctttggagatggtttattaagaattcagtatcttttcagtacctattggttatgatagcttaattttaaattactactttttcaagtgtcttaactcccctagggtttttgccaacgccaaagaaatatctcacattaatgccattttttgatgtgcaaagactaaattgagtaaaaaacttttcagagtagatggattacagtaaataaaacggctacataaaaaatgaatttggtgtcttagtccattcaggttcctataacagaatactatagactgggtgacttataaacaacagaaaatgtattttgcacaattctggaacttgggaagttcaaggttaaggtgccagcagattcatcgtctcgttagggcccatgttctggttcatggatggctgacttcttgctgtgtcttcacttggtggaagggcaggcaagggacctccctgagatagcttttataagggcattaatcctattatgaggggatccgctttcatgacccaatcaccccctccacaaagccctgcctcctaatactatcgcattgggggttaggatttcaatatgaattttggcggaacacagacattcagtctattgttcttagtaatggccatctcttcattctctatggtaatgattgtgagtgtcctaggctaagagtttattaagaatgtacagtgaatgctgcacaattttattttgattctccccagggcaagaattttacatatgtaggtgtaaaaattacaggaacccaaggacatatataaaatgtctctagtgaaagtcatcttttgtttttgtgtagctgcaaaagatgctacaggttacactgcactctcaggtatattatataaagtatgcttcttgcgtttttgcactctctctcacactctcactcatgtgctctgtctctcgctcgcttgctctctc

SEQ ID NO: 35977 - DNA, 1035 bp, Homo sapiens
gagccacagctgtgtgttcctcatccctgggttgggctgccgttcagagaagaggtcacttggtgggtataccagtttgctaagtctgctgtaacaaagtaccaccaacaagggggccttaaaaacagaaatgaattttctcatagttctggaggctggaagttcaagatcaaggtgcgagcagggttggtttcattatgagtccttgcttctcagtttgtggttggctctcttctctctttatcttaacatatccctctttatcttccatgcctggctgtcctaatttcctcttcttataagaacacctgtcatattggattagatacttaacctaaatacctctctaaagaccctatctccaaatacagtgaattctgagttctgggggttaggatgtcaacatgattttgggatatggtggtaggggggagcagaatgtaattcagctaataacagtgggaaaatgttagctcatagactgatggaaaccaagggcaggggtgtgtgctgtggtaatgaacagtgggttctacaccctggaacccaggttgatttcttttggtagtatttgctcaggagtgctttatgaaagacttaccatgaagacagagcctgtattaccattgatgacagtaacagctaccgtttgagtgcctgtttgtaccagactctttacacgtcaactctggtccccacaaggatgaggatgtcgctggtaggtccgttttagagaagactgaaattcaaaataattaaattacttttctgagtgtgcaacaccaacctagattcaaacacagctctgcaaagctagtcctagtttcgctgcactgtgtggcctctgtgtcttgcttgcttttatttgcggaaagagtgcgggacttggagttggaagatgaggttcgtgccttagcttaaccatcgaagtctgactaccttggggcaaatttaactctgtctgaactttggtttcttgactagtcacatgatattggtgataatatctctatcactggaagtataagcattaca

SEQ ID NO: 35978 - DNA, 1026 bp, Homo sapiens
tttggttttccagatggagaaatattgtgttttttaaaactctgcccgcaataggcagtgtctgttttataatatatattataccatgtcaaggtcagactatttagacttttattcttctattacttgataagtggacaaaagagaagggcactttagtagcatcttgaccttgttagatggctgggatttttctcactgatcattttccttctcttttcatctttcttccttagatgtgggtctatagacgcacgttacatcttccgtagcccagggaattccctggacttggccactaaattcttattctacttttgttatataaaataataggctgattttttgggggaaaaatctaggttatggagtcttttttattcacaaataggtatcttccttctgtgagaagcattggttggttggtttgccaggaatgtaattctttctcttgtggacccgccgtctgggttgtcagtggtcttaactttcccttattgtgtgagaacggccaagctctggcattgctcccaggaggtgcttccccaaaagggatttattctatgagtcatttgaatctaataattaaaacaacatgtagcttttaaaaaaatttgttctttatgtatcatatgtagagagaacagtatgcacattatgtgtgtaaaatttgatgaattttctcaaagtgaatatgcccgtgtaaccagcacccatattaagaaagcagttattccagaagcatcctcatctccttcaagtgagtgcctcttccctgagatgaacactaacctctaacactgtggattagtttcgctactctttgaactctatataaatgtcatcatacgggatgtcccattgtgtcttgcttcatctaccaaatgctgcgtccatgaggatcatccttgttgtgtgtggcaatagtttattctttctcatttctgcatggttatgccattctattattatttacctattgtgattgtgacaaattatgacaaacttagtggcttaaggcagtac

SEQ ID NO: 35979 - DNA, 1763 bp, Homo sapiens
caggaggtaagcgacgagcaaatgagcattatcacctgagctctgcctcctgtcagatcagtggcattagattatcataggagtgtgaaccctattatgaactgcgcatacgagggatctaggttgtgtgctccttatgagaatctaatcctgcccctacccccagtccgtggaaaaattgtcttccatgaaactggtccctggtgccaaaaaggttggggactgttgaaatagatcatttggcagaggggtggaggctgatttaaggggacccatacaatatagtggagaagggtttggagactgttccaatggttctggtgagagatagtgaccttagttaggaagtggtgtgcacagggaggggaacatagtggccaggatagatttaggaagaaaagtcagcagaacttggtggttgcatgtaagggatgaagatgaagaagagtcaagtatgttttaaacttatagtgaaaaatacatttatatcacaacctggtacacatgctaccaacacacacataactaactggtcataaaatatgttgctgaaacaaactttcatgaaacaatattttaccttatggtagcatactctgatattttctcttccattctatttcaatttctgcaaaatgctattctatttcagtttctgcaaaatgactctgcattgattccactaatgggtcaagacccacggtctgaaagtcacctgcacaggcttctccaggttatcctgcaatggacaggatgtttcttcctcattagatttctttgtggtccagtgtatccagacacctttcactcagtggaggggagagaggaggagggcagtaaaaagtatagtttccaagttcagtgcactatagaaacatttgaggcaaaattgtgctgagcacttcttgagccaactgatggccacatggtgagacagttaaagagctgcacacaaggatggttatttgtgttgcagatgtcatttatgtggcttttttggagggaggggagagggctatcgttttttttcctactccctttgctgccagaatgcctgttctcattagaatacagagttggtagagttttgggtgccggaagagcctcagaggtcaggagtccacaggtccctggtccaaaactagtgactacttggtgttgcctgtggtcatgggtcactgtcaactccttgtgactcacttggatcactctttataatgttgcagtggaaagccccctgcagctgtggtgtttgcttctgggactctgggttgggttcatgttgaaaaccattgttggttttctctgatcaaataactcaggtttttaagctctaaaatgggggataataccatatactgggtttgattgtttcatgaggattaaatgagacaacatgcagaaagtatagtgtctgaggcacaggaaacatttaaaataaatggctactgttattttcttcctgtaactaaaatattatggacattggcctactttgctcattttaatttgcactaggaaagatatggagcctttctcactttcatatatagaatgagctaaaattaaagttcttctgttggtgtgtgctgaaatttttaacagtatagaaatttccatggaaaataaaaatgcatttgaattcaggaagaaggatactaaaatacatccaagttgagatggttccgtaggtagcttcttaaggacctcagttttgaatttgcttagggtgaacaaagctgttcaacagtgctggctttatg

SEQ ID NO: 35980 - DNA, 1031 bp, Homo sapiens
tctctttagtcccctttaatctgggatgtttccacagtctttgtcttttatgacatttgacatttttgaataattttttaatggcttatttttaagggaatatttctcatatttgtttgctctctcctcatggcgagattcaggtttttgcattccaggcaagaatacgacactggtgatgtcaagtcctcttaaggaatgaggtctggaggcccatcacatccatctgcccctctctgtgatgttaattgtgatcatccagtcaaagtgttgcctgatttctccactgtagttaccactttctctcccacaatctatgagcaacctgggaggtacttttaagcaatgcaaatacgcttttcatcaaaattttccccaagaatccattgatgattcttgcctggatcactcttttctatgtttgaaaatggtgatttttccaacttcagcactctccataaatatgtgtgtatttgttagcagcatggattcccacatttctatttttaccccggtgtagacctttatgtttaacatgcttattagaattttttttttttttttttttttttttttttgctggtgggcccttctttgttttggcctttggctcagcttagaagtctgtacaagttacttttgcatgggtggtagggttgtatgatatggaaatagattttaaacaccttttattgatgaagatgcaaatgatatataaatcaatgtattgtgtcttataattttatgcattggtaataaattatgttggatatttggaaataatgcagtaatggatgcagattttgttcaggtctagcctctagtcctgcttttgccattagatagctgtataaacttggacaagtccgtttctcaaattctctcatctcatttgtacttgtaagatgaaaagaggcattaaacagtctataaagtccctttcttctctggaatttcctgattcttctttcagaataattttgaatgtgtgaaataattatctttaaagaaatttctttcaggatagttta

SEQ ID NO: 35981 - DNA, 1021 bp, Homo sapiens
tcatttaaataagccctcttatcgcaattaatattattgtttggtttatgatccttaaaaatatattccctttcagcatttcttggggttctaatttagctttcttatacatgttagatgatttgcaatttagattttaatttgatttctattctttcaaatatcatttttcttgtatttcatttttatttaaagcatgattctctctgtattcatggaagctgggcataaacaaactgctagaaaaatcaagctattaagtgagctgagaacataaaacattttaataggaatttcatataactaaactaagtatttgagagcccaaccagagaattatggctctttgaaaacaaactttatgggacttagtgttcttagtctaccctctattacagttcttaaaaaaactatagcatttctatcgttgactttaaatctttgtcacttcttgcatatgtaaagggttaaatgtgtctctgcttaatgacttgggggccatatctgtttgaagactgagttttggtctctgtaggtctttagagtttagagtctatttttttctattgagagtcttagtgtgagtgtctctcttctaatttgggagtgtggaggattgttttatttttccagttgtgatcctcataaatcaccccaacactttcagcgtcatgaccttaattctctaggacatgcaatatacctttcccaattaagtggactcatggtctggctcaagagtgatattctcagaatggaagagcacttcttcctgacccctcttagaatgaccactgtgtaattctgcttgcctacttttctgctaagatttttattcagtggtttggaggctgctatcatccttagcatataggctctttgctttgctttattaactgttcttcaaaactcagcagatgatgaaaaagactggtatgtttgagggtgagaaacttaggactgaattctagtactgacgtttcttggctctgtaattttggacatctgtcccttaacctcg

SEQ ID NO: 35982 - DNA, 1038 bp, Homo sapiens
ctaagtacagtcatgcgtcacttaacaaggacatgttctgagaaatgtgttgctaggtgatttcattgttgtgtgaacatcattgagtgtacttacacaaacctagatggtatagcctattgctcctagtctacaaacctgtacagcatgttattgtactgaatacgtagtcatttgcaacacaatggcaagtatttgtgtatctaaacatagaaaacatacctgaaaaatacaatataaaagatattttatatctgtatagggcacatatgaatggagcttgcaggattggaagttgctgtgggtgagtcaatgagtgagtggtgagtgaatgtgaaggcctcctacattacagtgcactactgtagactttacaaataatgtacacttaggctacactgaatttataaacaatatttttctttattcagtgataaattaaccttagcttactgtaacctttttactttatagactttttaattttaaaaacttttaaattctttcgcaatatcacttagcttaaaacatgcattatgtggctgtagcaaaatattgttttctttaagcttttttctatttagaaatgtattttttaactttttaaccttttttgttaaaaactaagacacacacacacacacacacacacacacacacacacacacacacacacacacaggcctagtcctacacagagtcaggatcatcaaggtgtcattaggcaaaaggatgtcttcagcgctattacgatcttatgggaccaccatcatatatgtgtcccatcattggctgaaatgtcagtatgtagcacatgactgcatgtgaaaaatatctggccgtgtaaatcagaggggaacccatatccttgtaccaaacatcaccatggacaatattacaaaatctcaatatacgcttttttgaaatgtgttcaaccaaacgttttctttcccccttgtttttctcagttggtatttggaattgtttttgtttctgtaaaccatttaattgcaataattcttaaaatttaaatttgac

SEQ ID NO: 35983 - DNA, 1027 bp, Homo sapiens
catatgttgtggttaagagcactgaagcacactactggaagcactgaagtctattaaatttctgtttgaatgttggcccaccacttattggctttattttcttgggcatgctgttttcttctaagctttattttgccatcaataagatatattacttacctcccaggaatgtggtaaaactaaataagatgtgtgcatgtaaattacttaaagcagtgtgaagcagaaagtaaaaacaccacaagttcctaataagttgtggctgctgttactgttgtatttgtagacagctgagcctcctcttctccttcccttgcatcatatggctttcccaaattctacatttgtgactctggagcaggttaaaacttttctgaggcttagattcattttctgtaatatgaagatactaaaaattacctgacaggattattacaatgactctaccaatggtaggcaaatatctaactgtcttagtcagttctggctgctctaacaaaatggcatagactgtgtggtgtgaacagcagacatttgttgcccacagttctggagactcagaagtctaaaatcaaggtgccagcagatttggtttctggggagggctctcttcctggtttgcagacagttgccttcttgctatatggtgagaagaaatctcatgtcttttctgtttttaataagggcattaatcccatcatgagggccccaccttcataaccgaatttaatcctaattacctcccaaaggccccatctctaaatgttaataccatcactttgtggattagggcatcaacatatgaactttggggagggggatacacacattcataccacagggctagctctggcgaggcaaatgggtacttaataaaaatagctttattatgttcacaattcatatattcctgcattctcttatttactcatttctttaagctgagttttccatgcctagtttttgagtttgtattatgagccatacgtaaggccttgtacttttgacttaattcttggtttctagc

SEQ ID NO: 35984 - DNA, 1032 bp, Homo sapiens
gggattcagagatgtggcaaattgttctctgactttaaaagctatcattcaattattgggaaatggcattcaggaccgaaggagcaaaaagctcatcttaagatgtgttttaaaaacctgtcataaaagagttaggtggcccctggtttagttgcttttccatcatcaggaaaccctttaatctttcagtgaatgacatatgatagggttttaaaaaccaagccaccttgctgttccattttctccttgttgccatctcatcttcctgactcatcagatttggtgctgatctgcttgcaaagtaggaaaggcagagggcctggcacctgtgtattcagttgaaatagccaatttcagaagagtttgtacattttgacctttctgaacttctttggatccttttgaagagggaagtaattctaacctggaggcattcccagtaattattttggagaataaactgatatgtgtatccctattattgtggtctatcttttgagtaaaaaaatagaatttataatattttaatatgactacttggtctttgtagaaaataatttttttttttttttgagatggagtctggctctgtcacccaggctggagtgcagtggcgcgatctcggctcgctgcaagctccgcctcccaggttcacgccgttctcctgcctcagcctcctgagtagctgggactataggcgtccgccaccgcgtccaccaccgcgcccggctaattttttgtatttttagtagagatggggtttcaccatggttttgatctcctgacctcgtgatccgcctacctctgccccccaaagtggtgggattacaggtgtgagccaccgcactgggcctgtagaaaataatttaaacaatatttaaattgatcatgtaggtggtcattttagaaaaactagaaaatacagataagaaaaaatgcatttaaaattaccccatattttatcacttagggaaaagatagtttacaaagcagaaaactgagcttttacttctatcttttgatgcattaaat

SEQ ID NO: 35985 - DNA, 1031 bp, Homo sapiens
tctaaccatgtaggatagttggcacaaatgtttttctatatacttttagactttttttctaaattcttatttgataattattgatttttggcatgtgttttctttccagctgggaagtactttctgcacagaccagttatgtattagttgagtgctctgcttgcccacaaaatttgctgcatcttgaaacagaaaaagccaggagagctaagtgttagacagtttttagtggtcatgtgtagttgtttaaggtactgaggcatttcctcagtttcagtaattcattttatgaaatttcaaaaggtaacatttttccttcaactgttggtgatatttgtttaggttcaggaaagcttttacattttatgtgcaggaaatcactctaaacaacacatttaataggttccagtagtcaacagagatgctatattcatttagggaatataacagattttctttgttttgccttaacacttggggctttataagatttccccagaaaccaggactgtagccattcttagccaagttatgatttatagagtgatttattgatcatggaagatttcccagagttcctcaggatatatcattaatgtaactttgtatatgctgtcctgctggagtggaggctccctaggggtaagaagtttggttccctgcactgtgcctagcatgtaacaggtgttccataaatatttgtagaatattgttttgtgtgatttttaaatcatgtgtctcccttattgcctagcactctcattgactaaccctataattgatcaagtaattattgaattcctacattaaattgctccaacttttaataagaacatgctatgttcctaatataatggtgaatgttgagtcctccatttcatgagctttcagcctagtacaattttttttttttgcatttaagtcttttatgagaacagatgagtgatggattcactactgattaatgtttgaccagtcttctatataaaggaatacaatttaattctcatccatttgggctttttgtcaag

SEQ ID NO: 35986 - DNA, 1132 bp, Homo sapiens
gaaaaacacagggataagacaaattacttgttggggagaggacaattgaagggttcatttgccagtttgcaaagtcagaaagaagtacgagttgctctttgctgctgtttctttcacgctcaatccgggctttcctccacagctcattaaggcaaaatctagtttatcaaaatccaaacagttccactttcaataatggcaaataaataccatctctactacattacctgttaaattggcctttgtgggtaaacctagaaacctcccagctgtttataacattgtttctctgagaatgtggtctggtttctcaaacttatagatgcaccttcagagcacagctttgtatgttgtggagattagctggggaaataggggttggtcaggactaggggtcataccagccttaattctttttccatgttgagtgcttctggaaagatgcagagggacactctgggcaagagtgctcttctgtgctagaaggccattgcccgctcagtagtggtgtctccttggtgaatgatgattcccctgaagtgaaggacttcatgctcttgcccagaattaaaactggctgggtgactgggagaagcatcagctaacccaaagtctgtgtgtattagctgtgttctccagagagaatcaatagaggatggatggatggataagaggggattgattagggaaatgtgtttacatgattatggagcttgagaagtcctacaacaagctgtctacaagctagaaaccctggaatgacagtagcatggttcagcacaatacaagtctgaaagcctcagatgcagggaaactaatggtgtaattatcagtctgaggcagaaggcctgagaaccttgggggccattagggtaagtcctggattccaaagggtggagagtctggagttctgatgttcaagggcaggagaagacacatgtcccacctctaggaaatggagaggaggaaatcacctttcctcagtcttttttgttctgtctgggccaccatctgattgggtagtgcctgccgacattgagagaaaatcttcttcacttagttcatggactcatatgtcaatcagtctcctctggacacaccctcaaagacacactcagaaataatgctttac

SEQ ID NO: 35987 - DNA, 1046 bp, Homo sapiens
gaggaagagtaacaccctcttgtagaaaataacatcctttagagcatgtgttctcagtaggcacaagattggttcttccagtgtgaaacaaatattaaatggtacagtgatttgtggaccttcaaaaacccacaacacataaacagatacaactggcaggttggggaaattagtaacaaaaagtctattaaagttctttatagagataatagtgaaaaataaaggttggggaacactgatttagagccttttcagttttttagtataatacctgataattaaaagttatagatattctaaaagacaaaaacatgtgaccaaaagacagtagacagacaatataatgtgcatttgcaattttgctccagagattggagttagaacatatggacttaaaaatacataattaatgttaacttatattaatcagttaacaaaataggtaaaagaaaaacagatggaaatttggaaaatttcatcagagaattgaaatttgtgaagagagaaacaaatagaaaactgaaaagcatagtatctgaaattaagaactctctggatgggtttaaagttaattaaacacagtggaagacaggattagtaaactggaaaacaggttaatagaaaataaactgaaccagagaggaaataatatatacacgtattccacttgcaaactgtttgcaaagtaccatctttttccatatccttgccaaaaatatgtattttaacaatgtttatattttgccaatttctgtgtaaagtgatatctcattgttaatttaatttgaatttcactaacaacgttttaccttttcattgtattttgctagttagttattcttttctgagaaataccaattcatattttgccattatgtatctggggtcatttgtatcaatttgtaattgttttctgaggtaatcttttgtcatttctgttacagataaattttctagatctatatataaaacatttgtgatgaatatactgttttattttacaacaaatctggatttatttgtatacaagatacctcagagatatt

SEQ ID NO: 35988 - DNA, 1069 bp, Homo sapiens
gctgggggcgcggccaccaagctgtccagggacaaggccctgccgcctcctcccagccggaccctggaagggtccacaaaggtgtcaggttcaagtcctccaataggcccattttttaaaagtgcttttaagtttccgcttttttcaggaggggagggcaagagcagctttttctattcaaattcttttccttgtatgtagataccaaaaggaaactcggcactgggcatgttcggatgtgaatggttttgctgataagcaacagcctccggaaccaaagcctcaaaatagtcgtctcccccgcccctcgcagaagcggcgagtggtatctgccaaacagatgacaaagtacctccgactgaatcccacagacagcgctttgagcagaacgcacggctcaactcatgtaattactgtttatagctggccgagcctgactaggagagggcagacccgagaggaaatcagtttcccggacctttgagaggaggctgtgtgttaattaaaggctaggacgggacgggtacttctcagacatgctccaagttgttcttgagatcacagttcccatcacattttctctggagggagtgagtagataattgggattttttttttatttttggccttgtctttcttccttttttttacctctccccattttagtcatatggccttgaacccacagtgaattgaagagagaaagaaatggatatgtctgaccccaatttttggactgtgctctcaaactttactttgcctcatttgaggagtgggaacaggcttcggcgaacacaaaggtaaaaacgcggggatctctgcctggagagggaatgctttcacttcccaggggcccacaggcggagctgcctgagcccctcaggagctggggttttgtgtattgggtgacactttgaaaagtttatgccccgctaggggagggggtactgtttcaggtatttcttcgtccttgtggtttcctgggtaaccctgataaatgtgcttctcataggttttctccttttgaaatgtggataataagacatttccttgtgagaggtgggggaga

SEQ ID NO: 35989 - DNA, 1063 bp, Homo sapiens
tgttggggtcaaggaatcatttgaattcctgtgtggagatggcccatagaagaggaagcttggaataggactctatctgaataatttgggaaagtccttcttccgttggttgaaatggaaatagctggtgtctcacacagatggaaactggaggccctggaccccagcctcaccctccatacacacccatctctagtgtgagtaagcatgttatgttaatctgagctgtcttcactacctgtaactagtcatttgggagtgacatcatggtaactgagtaatccttttgaaacttacatagtagagccaagatattaaaatggtcctggggctacctagatgaaagtagatacaaagtgtgcataaaattgtctactaaaagtagagtcagtctctatcagtaggaacttggtttttgtgataatgtggtacattttgtaactagatagatctcaaaagttcatacattgtagttctggtactgtccttatttccaggcagatagaaaaaaagaaaagaaaaaaattccactaggaacttggttgtaaattctgaaaatgttgatcttaaaccttattaatacaataaaaggacctgtgggaattttagctacattaatgtctattggacatgcctatttgagaaggtaattatactaatatcacaactgacatatcatggttttattttaaagaaaaaagaccatagcagagaatttaggctttgatcagtacttgaaggtaaaatagattggtaagaagaataggcagtcattactgtatatctcttatctgaagcaccccattgcttactttattatagaatcctgggaatttttacattctgctttgtggtcctacatttatcagtgactgattttgtcagagtttgggggctcttagcaaactgtaattgcaggcagtagtacaagcaaaatgcagatcttgacatctggtaggccaaccaccatttttattctgaagttcttgaataagcttttagctgttcaaagtaagtaccagcaccttgtgcccctggaaagtttctaacctgacatggaagt

SEQ ID NO: 35990 - DNA, 1050 bp, Homo sapiens
attaatatcagttcctggtgggtggagattatcagtctttaaattgctactctttgctgctttcctctgcatagatacagagaatctgtcagctccctggctagtccagcagaaagccctgggcatttcccagagttgatggcagaggagggtcgtctcttgtcgcctttttagcctgatttattgcccttgaattttttaataaggacatattttaagttctgtctagggactgagggcttggatcattcatgcagtgaactttgaataagttggaaagattggctgggccctgttatcataatggatggtgactatttgacatttacagtggtatgctccatttgcactaaaataaatgaatttgtatttagacatgatttgcaaaatttttccctatcacacttaaagtagaggttatttgcattcaaagttaaacactgaaaaactgcgtacagacttagtgaagatttgtaaaatacatgttaattggcataacaccattaaacctgattgtgctgatctgttagctggagaaagagcaggaatcatcttgttcccatatccctacaatctaaattgttagagtttctaaagatgggggacttctctgaagtgaatattcctgtcaggcctgttgaccttactgcctagtgacctattcataggtcaggatggcagttctccctgctgggtcagtttttattccaccttctttcgtgagagaactaatttgtacagctcttacaggtggagaactagatcactggtgtcctttactgcctctgatatatgtggaaatgaatcagtggaaaattcagttactcatcgtgacctacttctgtcacttgcgttgaaggggtgcttatttgtcaaaagcaatctgccccccttccaaaaactcttgctccatggctgctttaactcatttaatctatagattctttcagaatgtttgcagttgcctaaatctttctgtgaattatcctgctgtacctgtaatccattttagattaagcctctggaggccaatgaaaaaatctgactttg

SEQ ID NO: 35991 - DNA, 1032 bp, Homo sapiens
gtaagtatgtttaagagctttgatttaagaaagtttctttgtcacatggataaggatccagaattgatttcatgaagtgagtttggagttggatatacacatctgtatctatcagtagatgtttagctctttacattgtgttcacctataatctgttctagcagatagctcaaagccctgtgcataacaagaacttaataattattaaagtagaaaaaaactattttcagtttgctgtataacagggatgagattagacactgagaactcaaagtacactttttgtgtatctagatatataactggagtttatcccttaccatcacttacagttataaattatttagagaaagagagaaatggaatattgtctgcctattgttatactccatttagttttacttatcgggacaggagacagaatgattaaaatgatcattatccaaactttaatatctagcctgtagaattttccttctctacaaatattttacttagcattgttgactggtttgaatgtctgaaatagattagggccatgaaattcattatgcactaaataatatgagatttaaaaatgttatttgctctaatgtacaataagaaaattgtaacgggattcttaaatgtttaggtagtctaaatgttacatatgagaactgcaattaaatgtaacatcgttacatataattgcataatcgtggactatgagcacatttaatatatttgaaattattttatgtggagcttccataagtaaaaacgactaaagcttgcccaggtgttcaagttttgcccttaattctctctcacactgatgaaccatattctccctcagtcttctccatctcaattaatgccaccatatacccatttgcttctaaaatcttgaagtcttctttgtgttcttttcccctttattccactcagttccatttttcagcaaatcccgttggctccgctgccaaaacataacagctcttcaatcaccctatctaaatcaccatctctcttaccttgtctgtgctggta

SEQ ID NO: 35992 - DNA, 1029 bp, Homo sapiens
atctgggattacagacgtgtgtcaccatgctcagctaatttttgtatttttagtagagataaggtttcaccatgttggccaggctggtcttgaactcctaacctcaggtgatctgtctgcctcggcctcccaaagtgctgggattacaggcgtgagccaccgcacctggccttgaggctagtttttaatctatttgttaacatttgaaatatgacttctccaggtaatttaataaacaaattgcaccgcgctgagtggatcacctgaggtcaggagttcgagagcagcctggccaacatggtgaaaccttatctctactaaaaatacaaaaattagctgggcatggtggcacacacctgtagtcccagctacttgggaggctgaggcaggagaatcgctcgaacccaggaggcagaggttgcagtgagccgagatggcgccattgcactacagtctgagcgacagaacaagactccatctcaagaaataaaaaataaatgattacagactctgattgttctacatttgtttccctttcttgtcagcgtctaaactaacataccttagacttgtcctttgaaggttaggaattgggagttctggagctgggctgccaggttgtcaccctaagccagcactgcatgctgtgtgaaccttgaccatccaaattgacgcacctctttgtgcctcagttacttccataaaaatgagataataatagtatctatttatagaattgttttgaggattctatgtttatctttgtaattgcttaacatagtgtttaacagatgttagctgctgttgctgttttatttaaatactactaatttttgcccctttccttgagatcccttccaactagatgcattttagttcacctccaagtccataaatctaagatgctagtcatattggatattgacatcatttgaatgagacgaagaaaggacatagtttgtgctaagctcctttttattctggaatttcccctataggtaaactgagaaagttattggcaatgtcgtt

SEQ ID NO: 35993 - DNA, 1081 bp, Homo sapiens
agaagattatttaaaaggtggaataagggcaccttgtcaagattagttacaaaacaattttataaaagcagtttctaaacaaaatttgcatttgataattgctatcaggtgcaagtttctttggctctggtgtacagaaaagcaagtctttccttataggaaaagtcattttctctttttatatcctaaactattttataatgcttgctttctcatgtaatgtgatgacaattgagatttttagcagctttttcatttttctttaatacatggaaagatggagtgaaatgaaaatttttagcagaattcaagaaagagacccatgataatgtgcataaaagtattagagcctgaatataaatgagaaattagtaataactgaaagattgaaaggagagtgttgggggggggtcatgtggggagtataatactaaacattcaattttctagaagtgttggtcttgtattctcatttaaatattcctatgaagcgagaattcaatagctcctatgagttgcatgttgaattcatatggaaagtagttataaggacaaattttatatgttagaacctgtgagactagtttcttttgcctccgtttgtatttctttgaaaagcttttgcagtgacaaattgtgtgaaggcaagaaatgatagttctgttctattcttaccataattgaattctttagttcttttctttttttttccttttaacaccctccacctccacctgacttagccagtttttcatgttatgctgtgtttattgcatttagaaggttattcctcaccaacccccaccccaggtctaggaaccacatgcagttttgttttgtggacttggcacacctcgttaatgggcagcagggtagacagagggtgcgaggacagcctgcatgccaattgtgtgtctgtgtcctgctgagccttgctgccctctctgtttttaaaaggaaattgtccttagactctggccaagagtacgttctgtgagagattcctccctgtacgatagtgtcttacttttccactttgcttgtatgttcttggaaataaagctgtgatatttaacttttt

SEQ ID NO: 35994 - DNA, 1082 bp, Homo sapiens
caatagattctttgataaatttgatgtcagtcttctctggtttctaggtgatgcatctttgtctacaacaagagacattctgattagtaagaatttcttctctgagttagaaaaaaaattagaaattctgaaattcaacaacaaatgctgacttacatctgctaagtagcacccaaaaaggggagaattttttacctatggcaaataagagtgccaaatgtgacatcatttacatatccatgttttgattagtaaaaaccaaacagatgttagcagtacagctggctcttgcatatatgtgtatctttgttgctaacagatttccatggggaaggatgtagcactggtctgaagtctcagataggagaagataacatggtgtgatagcttgaaatgaggagcataattgcatgatggattatatctgaatgttttgaggtcttgagtttatagcattcgatatcaaagcagtccttaggctttcaatagaggaggacacatggagggggacaaagtgaactagaaatgggctttatttcaattgcttgggtatagtgtacctaaaatgtcaagttgtttaacagaatatcagactactttataaatgtgttattccttcttaccaatttatgtaatattttatttttactatgaaaattccatgcagtatacaaacagtacgtggaattgtagtagaaacattgttaaaatataactttgaattaaaaacaaaacatggtatacattgttatataatggataacatagtgtatacattgttaaaatatatccttgcaattaaaaacaaaacaaatcagctgcaaacctttgtttaattatgtatgcagaactttctcccaatggctttataccacctaaggcatggctgtgattttcaggaataccctctctggactgtttcttgcttggaggtgtttgcgatgtatttgtatttgtctgtctatctattctcagttggtagattatgtaatgcctatagattattctgtcctgtcacagtttgattcattttgaagttataactgtgaatttattacagcgtattgcaggagacgtaattt

SEQ ID NO: 35995 - DNA, 1051 bp, Homo sapiens
ggcagtcatgaggatctccttaagcagtctcttgtgaagtgatcggtaactgaattttgctttttgggtggtcttcaattatgtctgctttatctgttaggtttcactagctattacattcatgcaactccagaaatttacctccaatttatatgtgacttacaacattttcttatgtctggtaaatatttgaaaggattgaattacaaagagacggataaggccatgaagctaagacaaagttttgggtatgtgcatgtaaatgcaatttttctcaggaagaaatacaccatgatcagataactcaaaagttttataaccttgataaatagatttaccttcgtttctgttgtttttgaagaagttaaatgtctgctttaaatgtttccctgagtttcaagttttcttatttcagactcataattatatcattttgattaaaatggagcacagactggagttattacttgcttaaaagccaaaaacttgagggtatccagcataagaattgtgtgttttggtctgtggatagcagctgcttgaagtccataaaaacaagaaacctgaagttgattcagatgaatctgaagtcttgtacctgaattatgtcaaggttagcagtaaatgccatttaaaaagactgagtacaaattgccaaattcctttgaatgccaaaccatatttctcaggaaagttggccactgccaaatttataacatttgtgtttctgttacctgaattccaagggcagaggggtgattgagggggtaagggaaaggcacaggtgaattttattttcagatgtctaataggacagtgtgacattgcccagagatagtctctcaaaggtagtgagtgccagcagaacttctcgaatgcgaagttgagaaattttacttatttacttattttcccattgaaaaaaaaaaaaaaaactttaaatgttttctgagttaaaaaggcctctgactggtagtcctgacacagcttcttgagagtctccgagagagcctcttctcagtacaattcctaagaagataggaagaaaaaa

SEQ ID NO: 35996 - DNA, 1061 bp, Homo sapiens
ttaagagtggagttggttctccacacttatacactgtgctacagcaagcttcacaaccaaaacccattacttattcaggtataaaaatcaaaagctgaactgtaatgagaatttaaatgtaaactgttggaggatggtgctctgttaatttgtgtttgctccataccccaccctatataattgataatatttgcatctttttgtttttagtactattattttttggtttatcaaactttgtaacatggtgctttattgtggacttttcaaagaacaccttgccaaatttggtaattcctagcaattgtcatttcctgttggaatttcttaaagtggaatctaatggaaaagtaattcttgaccttgtgtatttagtaaaattaaaggcatagttgattttaggattgtcataaaaattaatattttgttttaaaagactttttagactttcaatgctaattgatcctattgttggaagtagatgatataaactttaaagctttttgggtagaactttcacattcaccatgtctaaatattttaaagaggaaatggattgactcgcagacattttgtactaaggaatagaaaatctttgaattgctatttaaaaaaaaaaaaatccctgtaaaatttaccattttaaactccagttgcaaaatcctgatcagctatgatgattcatacatttgagcgataaagcttttttcaatattacaaattcagtggggagtcactcaatacattacaaaaagagtacttacacttcctagtacccatgtgtatttttttttctttttaaagcaatctggtgtgccttttgagaaaagttccagtgttctcacagatcctgacttggtgtagcacagtgcttttcagaaacttggtccaacacctgaatgagtaatgtgtaaaacatataatgttttgtagctcaggatactgcaggtaaactaacactttttgccgaaaaaacattgaaaagacaaaggaaagcaaggaagttttgcttttttaaaaaattttttcaagcttaatgaagaaagagctggaaatccttt

SEQ ID NO: 35997 - DNA, 1028 bp, Homo sapiens
cccataatcccaacacttttggaggccaaggtgagaagatcgcttgagcccaggagtttgaggacagcctgggcaacatagaccctgtctctaccaaagaaaaaaatttgtttttaatttaaataaatgcgagattactattgtatgtttcctttttattatacttgttttactttggaaaattttactgtgtttaagacataataagaccatatttggaatctgctcattaataaattataattgttggcatataaactgttcaaatttacctagcaatataaagatttcaggtacagtgtatacttgccctagtaagcagtactttcaaactcttcaataaacaaaacaaaactttgcatcatttatttatacataaaccataaaccaagtacataccattcttaattgaaataagtccaaattcctctacttaccaattctgcttgatatttgaaagttaaaatgtttcttctaaaatgttctaaaattcacatttttaaaattttggacttactgaaacttagtaaggttttactgtgaatactttcaaaactgtaaacagaaaaacatatatagctatataataacttttaaataacaagtctatttttaaattactaatttaaaggttttttttctcccttttgctagccagtctcagttggagggctgatagtaaaccttattggtatctgtgcctttagccatgcccatagccatgcccatggagcttctcaaggaagctgtcactcatctgatcacagccattcacaccatatgcatggacacagtgaccatgggcatggtcacagccacggatctgcgggtggaggcatgaatgctaacatgaggggtgagtccttgcaaaatattatcctacttttcaactgtgttctaaatcaaccctctgtgtttatttgtattaagttttgggcttctggtatgatatgatttttaaaaagcaatctgtgactaaaagaaaggtctgaagctatcactatagaaaatattcttacctgaataca

SEQ ID NO: 35998 - DNA, 1034 bp, Homo sapiens
aaactaccaaaacctcttgaaaaggtacctatgctggtgccagtgccagtgtctgagccagtgccagagccagaacctgagccagaacctgagcctgttaaagaagaaaaactttcgcctgagcctattttggtaaacttattcttaccattgtagagtctgttgattatttcttgtcccttatttcactgatacatgcaagagcattcaaatgaatagtaatattaataccatttattgagtgcttagcatgaggcaagctctgcctaacattttacatgcattaactcacataatctttacacgtactctctgaggtattgtcacctctactatttaaatcatggctttagagaggttatgtcagggtcacacaggtaagtggcccatatgggattcaagctcaggctgtctggcttcagaatctatgcttttaattgtcaactgtcttatattccttcgttaatgatattaagtagtagctgtctgagccaaaggctttgttatccaactacaagccatctctgcagaatttattggcgtaaacatagaatgttctcttgaatttttttactgctgcatatggctactaaataataagcctgtaacattggaatatgcaaaggagtaaaacaggaagaaggcaacttttcagggagtggttaagaagatgaattaacacttagcctcaaaaataataactttttattaaatataaggtatgtaaatgtattctatgatagacctacctgtgaaggaaaggtaggtcatgtagaggaggctgctttgatgaaattgcaatgaactgtattctgaagctctgtttttttaaacttagttaaaaccagttgggaaaattatctgaaaaaaacttgttgagacagagtctggctctgttgcccaggctggagtgcagtggcgtgatcttggctcactgcaacctctgcctcccaggttcaagcaattttcctgcctcagcctccctagtagctgggattacagacgcacgccaccacgcccagctaattttcata

SEQ ID NO: 35999 - DNA, 1002 bp, Homo sapiens
agagtcttgctctgtcacccaggctggagcacaatggcacgatcttggctcactgcaacctctacctcctgggttcaagcaattctcttgcctcagcctcctgagtagctgggattacaggtgccagccaccacacccagctaatttttttattatttttttatttttttatttttagtagagatggagtttcacgatgttggccaggctggtctcgaactcctgacctcgtgatctgcctgcctcggccttccaaagtgctgggattacaagcgtgagccaccatgcccgaccttatttctttactttgtctactaaattcagagtcctttgaggatgccatgaagtcaatgccttgtagagtttgacttcaagaaggtgctcaataaatgtttgaacaatgggataaagggagcttgaaggaaatggttaatggcgatgaagttagttaatccttagtagtcaggatagaatttgtgttgagtagtgagaagcagtttatattatgaaataaagactaaagactgaattgtcatttatttggactaacttcacatgttgctgataaaaattaattacttctcagtttcctttgcagcaaagtctagaatgtgaatttatttgcttccaactttaaactgactcactctaagttggcatttcactgtttttttttttgcccaggctggagtagaatggcgcaatcatagctcactgtatcctcaaactcctgggctcaagtgatcctcctgcctgggcctcctgagtagttaggactgtaggcagctgccttcatgcccagctaattttttgtagagatgagttattgctatattgcccaggctagtctggaactcatggtctcaaaggatcctcccacctcagccacccaaagtactgggattactggcttgagctgttatgcccaacctcattctttttaattgaggaattaaatgatcacttttttcttttttaacagagacagggttttgctatgtt

SEQ ID NO: 36000 - DNA, 1054 bp, Homo sapiens
caaggttgatactgcctctccaagcccaatggaaacatctggatgtgcccctgcagaagaagacctgtgtcaggctttctctgatgtaattcttgcagtaaatgatgtggatgcagaagatggagctgatccaaacctttgtagtgaatatgtgaaagatatttatgcttatctgagacaacttgaggtaagtattatcattcgttttttttctaaactgcatctaactttatgaaagtattttccatcaatagtttataataatacaagcaggacgtgggcagcatttcttaagagatcgcactttcaaattctccttcatggaatacctataataaaaagtcactaaataaaccaatggagtctatttgtcactttgtgcaggaaagttcgaagttagggtggatactactatcgctttctaaaggaaaatccacagattgaatttgatatgtatatatgcgatctccaccacgtttggaatggttaagtcccaaactctgcattttaggtgataacgggtcaggaagtggatgaggatgtagaatatactcaaagactacagccacccctaacacaaggcattttgtgttagtgtggctgatgtgcatccagttgttggtgaaattatttgtgcccaaaaggagtacactcaaaagctacttttttggttcacttcaatttgatcccacttttgaaactttctattaatggcatttgccctttccctacaaatacaagcactctttatggcagcataaacatagtaacataaattatactgttaccacatttacgtagtttttttgttgttgttgttttgtttttttgagatggagtctcacactgtcgcccaggctagagggcagtggtgcggtctcagctcactgcagtctctgtctcctgggttcaagcaattctcctgcctcggcctcccaagtagttggggttgcaggcacacaccaccatgcctggctaattttttgtatttttatttggttttggtttttttgagacagggtcttgctctgttgcccaggctggagtgcagtgg

SEQ ID NO: 36001 - DNA, 1036 bp, Homo sapiens
gttttgtttttttgagacagggcctcactctgttgctcaggctggagtgcagtggcgtgatcctagctcactaccaccttcacctcccaggttcaagtgatccacctcagcctcccaggtagctgggactacaggtgcccaccaccgtgcctggctaatttttgtattttttgtagagatggggttttgccatgttgcccaggctggtcgcgaactgctgagctcaaagggatccacctgcgttggccttccaaagtgctgagattacaggtgtgaaccaccacaccctgccaaattaagggtttatatagcagggaagatatgtacccatgtatgggaagacaggaattagggaggggtaaggaagaggagttagtcaataggaagcaggttaggcaatcatgatgggtgaggggtctgatgtcttattgtctagagggtgtgatcttataagtttcagttccttgatactatctgggagtcctgatggtttcctgagaagggaactcaggtaagacagttgtaactttctcaagctttaagactgggagggtcagtttctatgtttattcaaaagaaatcataaacatcagttctgtgggacaattgggccagtttcactgttgacaccaaaaaacagaagggtcaggccggtgcggtggctcacgcctgtaatcccagcactttgggaggccgaggcaggcggatcgtctgagatcagaagttcaagaccagcctggccaacatggtaaaaccctatctctactaaaaatgcaaaaattagccgggcgtggtggcaggtacctgtaatcccagctactcgggaggctgaggcaggaaaatcgcttgaacccaggaggcgaaggttgcagtgagctgagattgtgccactacactccagcctgggcaacagagtgagactctgtctcaaaaaaaaaaaaaaaaaaaaacagaaaggtcaaataggctgaggcagtgttttattagcacattttaaagtttataactgttaaaaaaaattaattgggatgcaact

SEQ ID NO: 36002 - DNA, 1892 bp, Homo sapiens
gggagtaaagtcaattgggcagaggatcctgcccttaaggaaattgttctgcagcttgagaagaatgttgacatgatgtaataagaattcatttctgacatattttacatttctggcaatctcaactcttatttggaatacttctgtgcatttgtctgtccaccgtaattttagaaaagcatatccataacgtttacagttgtagtacagttgtggttagttatttgtagtgggattgaaagtaatttttttctttttatatttctatatttagtttgtttttttgttgttgttgttttttgagatggagtctcgctttgttgcccagactggagggcagtggcgcgatctcggctcactgcaacctctgcctcccgggttcaagcagttctgcctcagcctcccaagtagctgtgactaaaggtgcacgccgccatgcccagctaattttttgtattttagtagagacggggtttcaccgtgttgcccaggctgctctcagaactcctgagctcaggcagtccaccgcctcggcctaccgaagtgctaggattacagacgtaagccaccgagcctggtctagtttgcattttttttctatcagttttataagttaagaaataaaaggaattaatgttactctgtcttatttttttttaattcgtgccctttacaaacagtagtactcttagtaattataaaatagaacttgtcactttttatagcatcgcaatccgtttttgaaaaactctaatttgaacactttattaatttggagctgttgaacatttttacagctaatgtagtattttcaacatttttttttccccttgagatagaggctcgctctgttacccaggctggcatgcactagtgctatttcagctcactgcaacctccacctcctgggttcaagcaatcctcatgcctaagccccctgagtagctgagattacaggtgtggcccaccatgcccagctaattttttgtattttcagttgagacggtggtttcaccatgttggtcaggcaggtctcgagctcctgacctcaaattatctgaccacctcagcctcccagactgctaagattacaggcatgagccactgcacccggcctcaacattctttttagaaggacttgaaacttgaaatgatgctagcatttgttttcttttctttttctttttttttttttttttttttgagacggagtctggctcttttgcccaggttagagggcagtatggcacgatctcagctcactgcaacctccacctcctgggttcaagcaattatcctgcctcagcctccctagtagctgggacctgtacaggcacgtgccaccatgcctggctaattttgtgtttttgatagagatgggattttgccacgttgcccaggctggtcctcaaactcttgagctcaagcagtccacccaccttggcctcccaaagtgctggaattacaggtgtgagccacctcacctggccaagttccttcttaaggatcaattctgagagagaaattgtattagcttttcttaaaatcatgctgaataataaccccaagtctcagtggcttataacagacatttctgttttgggtctgtccttcagctgataattctaggactcaggctgagggaacaaccacaatctgaaatgttctcatggcacagggcaggagcttatgacgtcaagtccaattataccagtatgattaaagtttctgtttgaaagaggctgacattgacaaaacccaacgtcattgaggcaggaaagtatacttctcccattgcaggggagtggtggatttcagagttggagaaagtgggtattttactgaaagaatataatttattaaactcagctatcttggtcataaatatgacc

SEQ ID NO: 36003 - DNA, 1090 bp, Homo sapiens
atttgcttctgtgcccacataaaatgcataatatgtactacaaatatataaatatattgcagataaacccacctcagtcttattcgttacatagcaatttatagattagttgaaaatagtactttgttcattagattcttagcattgtatattcagaagatttcatattgacaggtccatttaaggtcctctgtaccactatctggaattttacggacaaaaatgttaatacttttcaaacatctgttccaaaaacagtattccaaaaatatgtattccaggccaggcatggtggctcacgcctgtaatcccagcactttgggaggccgttcgaaaccagcctggccaacatggtgaaaccctgtctctactaaaaatataaaaattagccgggtgtggtggcgggcacctgtaatcccagctacttgggaggcggaggcaggagaatcacttgaacccttgaggcggaggttgcagtgagccatgattgcggcactgtactccagtctgagtgacacagcaagactctgtctaaaaaaaaaaaaaaaaaagtattcctatgggtataggaaaaagactaaaataaagtgctatcaaatgttttaatttgggccgggcatggtggcccatgcctgtaatcccagcactttgggaagccgaagcaggtggatcatttgaggtcaggagttcaagaccagcctgggtaaaatggggaaactccatatctactaaaaatacaaaaattagcggggtgtggtggcgcaggcctgtaatcctggctactcaggaggctgaggcaggagaattgcttgaacctgggaggcggaggttgcagtgaacagagattacgccactacattccagcctgggtgacagaggagactccatctcaaaaaaaaaaaaagtcttttatttgttttacgtgggtcttgggattatagtgttttcttctttgtgctcttctgtgttcttccaaatgttttacacagaatttgtgttacttttgtagtcaaaaaaagtattctttaattttctaattttcaaaatgattgttttttcttccctgttaggtattaatatagtagggaaa

SEQ ID NO: 36004 - DNA, 1080 bp, Homo sapiens
aaattagctgggcgtagtggcaggtgcctgtaatcccagctactcgggaggctgaggcaggagaatcacttgaacctaggaggcgaaggttgcagtgagccgagatcgcaccactgcactccagcctgggtgacagaattgagactccatctcaaaaataaaaaaaaataaatataaataaaaattagccaggcctggtgatgtgccgtataatcccagctacttgggaggctgagacaggaggatcacttgagcccaagaagttttggttacagtgagctattacaccactgccttccagcttgggcaacagagcaagaccctgtctcaaaaaaaaaaaaaaaaaaagaagaagaaaatatactgggaaaaggatatgggtcagtgatagaaaaagttctcaggccaagcttttattttattagttttttatttatttatttatttttgagacagagtctctgttgcccaggctggagtgcagtggcgtgatcttggctcactgcaacctccgcctcctgggttcaagtgattctactgtctcaaactcctaagtagctgagattacaggtgcccgccaccatgcctggctaatttttgtatttttagtagagatggggtttcgccatgttggccaggctggtcttgaactcctgatctcaggtgatccacccgcctcagcctcccaaaatgctgggattacaggtgtagggcaagcttttagaactataaattactggctgggcacagtggctcatgcgtgtaatcccagtactttgggaggccaaggtgggtggatcacttgaggccaggagttcgagaccagcctgggaaacatggcaaaactccatctctactaaaaatacaaaaattagctgggcatggtgatgcacacctataattccagctacttgggaggctgaggctcaataacagcttgagccagagaggtgggagttgcagtgagctgagatcacgccactgtactccagcctgggcgacagagggagactgtcttaaaatgaaaaaaaaaacgctgtaaattattatatttatttatttattaggtttgcattgtct

SEQ ID NO: 36005 - DNA, 1028 bp, Homo sapiens
cttgttggattttattcagcagcatctatcatgtagataaattcccaggtgtagcattacagcttctgactaatatagctgccattcagacaattaatgttcaaagagttttctaaagtgataaaaccaaagaaaagcatgtggaaaagcagaagcttagaaagttgtggtcactgaatgcactccctggtttttatttgtcagtgaaatctttatgcattcattgttaatattttaattccatggctttgtaggctgtgctgtgtctgaaggggtaacacctagggaaacatgaggccccttatgggaccccccaaatggaacaacttcactttctcttttatgtattgagccctgtgttaacatttcacttaagaagagcaccagtgctttaaaaaaaaaaaaaggtaaaatattaccattttgatagactgtaaagagttagattcctgttgaagtgttaaggaaatttaactttgtgaaacttttaaaataaagtttataaatgtagctaatctttgaaaaaccaatgcagtaacactgatttgtaaatgttgtggtcaatccctaggtgcattaaagtttcagtcacctgccgtgtgtgtgtgtgcccttttatgtttgccttcctagcattcctgtgttcactgtgcatgttcttgaaaatattttcacttgtcagaaaataaactggaaagtcattgaaaacccgtaggtcacgatgctcaggtgactcactgtttctccttcccccattattcgcaataattcaaagtccaggccactatattagtttcctaggactgccatgacaatgtactacaaactgagtggctcaaaacaactgaagtgtgttgtctcacagacctgcagcctagaagtctggaagcagggtgtcagctgggacatgctccctcaaaaacctgtaggggagtcctcttctagtttctggtggtttgctggccatgtttgatgttccttggcttgtagatgcatctctccaatcctccattctcgcatggccttct

SEQ ID NO: 36006 - DNA, 1074 bp, Homo sapiens
ttaaaaatgaaccactttgggaggccgaggcgggcggatcacgaggtcaggagatcgagaccatcccggctaaaacggtgaaaccccgtctctactaaaaatacaaaaaattagccgggcgtagtggcgggcgcctgtagtcccagctacttgggaggctgaggcaggagaatggcgtgaacccgggaggcggagcttgcagtgagccgagatcccgccactgcactccagcctgggcgacagagcgagactccgtctcaaaaaaaaaaaagaacgattattaaattagttctcctctatactgtactatggaattgactttttaaaaattcagtttatggctgggcatggtggctcatgcctgtaatcccagcactttgggaggctgaggtgggtggatcacctgaggtcaggagtttgacaccagcttggttaacatggtgaaaccccgtttctactaaaaatgcaaaaattagcctggcctggtggcatgtgccagtaatctcagctactcaggaggctgaggtgggagaattgcttgaacctgggaggtggaggttgcattgagccgagatcacgccattgcattccaggctggatgacagagcaagactcctgtctcaaaaaaaaaaaaaatcagtttacattttaaaaatgactcatttatgccaccaatatagtcacccttcagtatctgtgagaggttgcttccaggacccccatgatactaaaatctgaggatgctgaagtccttgttataaaatagctttgtatttgcatatggcctaaatgctcttgtatacttttttttttaattgtttttttgagacagaatctcactccatcatctaggctggagtgcagtgatgcaattttggcccactgcaaactctgcctcctgggctcaagcgattctcctgcctcagcctcctgagtagctgggattacaggcacccggcacaatcccagttaatttttgtatttttagtagagacagggtttcaccatgttggccaggctggtctcgaactcctgacctcaagtgatccgcccgtcttgggctcccaaagagct

SEQ ID NO: 36007 - DNA, 1059 bp, Homo sapiens
aacagaacacttcaaagtccttccctgtgtcctctccttttctctggagaccactgtcctgacgtatgatcattacctgcttttatcattttatcatcttgtatatcctaaacatttcagtttagttttacctgttttatttatttatttttgagacagactctcactttgttgcccaggctggagtgcagtggcacaatcttggctcactgcaacctccacttcctggattcaagcaattctcctgcctcagcctcccaagtagatgggattacaggtaaccaccacaatgcacaaccaatttttatgcttttagtagagacggggtttcgccatgttggccaggctggtctcaaattcctgacctcaggtgacccgcccacctcctaaagtgctgggattataggtgtgagccaccacatctggccagttttacctgttttaaaactttatgtaaatataataatgcgatatgtattttttcatttttttcagcattacctgtaactgcatgtattcatagttcatcagttttggcttcatagcactgtagaaatataacatgagccatatatgtaattttatactttcattaaaaataaaaagataattttttttttttaagacagagttttgctctttttgcccaggctggagtgcaatggcacggtctcggcttactgcaacctccacctcctgggttcaagtgattctcctgcctcagcctcccaagtagctgggattacaagcacacaccaccacgcccaactagtttttgtattttcagtagagatggggtttcaccaggatagccaggccggtctcgaactcctgacctcaggtgatccacccgcctcggcctcccagagtgctgggattacaggcgtgagccaccgtgcctggccaaaagaagaaattaattttaatatatttcacttaatcttgtatatctaaaacattacttcatcacgtgattgatgtaaaaaatgaatgattcaggaaatattttacattctttcttcatattatatctttgaaatccattgtgcatttttaaat

SEQ ID NO: 36008 - DNA, 1045 bp, Homo sapiens
agattctggattccttgcatttccatatggattttaagatcagcatgtcaattttggaaaaaaatgccagctaggattttgaagggttatattgaatctgtaggtcaattttggatgtattgtcatctttacaattacaagtcttctgattcatgaacgtaagattcttttgatttatgtaggtcttgttaaacttcttttaatagtgttttatagttttcagagtgtaagttagtatgtttaaaagctaagcaagtgattcaaatgtgcaggttggagttgagaaacctactttagtaaccatgagtcatactgattatattaatatctgaaatgtttctgagttactgatcttttttcccttgtttttccttttttcttacactaactcaggagttcccattcctgaatgagtcactcctttggagttagacctctagtatctgtctaccattatttagaagactgaaggttttccctgcagacgtaggttttcacagtgctcgttgttgccatttagacatgtccatggtagatagggactgagggttggtactcctatcctaccacacccctatccctcttagttctcttactacttactctttgaaaaatgatgtcactgtcaagacagctggaaggagagcctcttgttcccattagcagacatccagggtagaggcctgatatttccctcaacttcaagtgcctcccaggccaatataccatttaatatcctatcaccactgggagaactgttaagagtaggaagtttctttgttacagggccctttctagtagtatgcaagactcctgaaacagagaaacctgccagaccaaatcaatcattagtcaatttgctatttatagcttgattagatccatgtcttcatcatttttggtaagatagagatctatggacagaaatttacattcagtgtaaaaaggcttgccaagcatatgttttgaacaagattacaagcatgattggctatttcaaagctgtgaatacttttgagagtagcatttttcaggccctttagaa

SEQ ID NO: 36009 - DNA, 1051 bp, Homo sapiens
cttcttgacctttttattccttctctgacttcagggagtcagggtggggaaggtgggaccaacatgatggtgtagacccatcttactctcaggtgaggaagaatcacggtaggtatttggagaagagcacctgagctgctctaaaggagagctgccctgtttgttttcctgttggcatcccacaggggtttaggatgttttcattaactctccaaggagtgttagatgttgtttgtcacaaagaattttttcacaagtgacataatcagaacacttctaatgagtacaattaagctttgaataaaaatttatcctcataattacctcttgtgaagatcttttaaaataatatttcattttgctatttcggaaataaattctttcttgattggaataagaatcttaataaaatttccctgcatattccctaaattaataattcatactccttaagcatgttcagtgtgagtgcttgtcctttttgaatgtaatttcaagagtaagtctgagttactttgttgtttttttcttttttttgagatggaatctgtcacccaggctggagtacagtggtgcaatctcggcacactgcaacctccatctcccgggttcaagtgattcttctgcctcagccaccaagtagctgggattacgggcgtgcgtcaccatgcctggctaatttttgtatttttagtagagatggggtttcaccttgtttgccaggctggtctcgaactcccgacttcaggtgatccctcctgcctcagcctcccaaagtgctgggattacaggcatgagctaccgcacctggcctagagaaatctttgatttgtgttttcatcctgctttcttctgtccttaatttcttagagatatcctcaagttacttaagggaaaattgttacaaagacactttgctgtttagaattatgcctagctggttttctcaagtactcattctttaaaagtgagatgtagtggtgtgaccctgtagtcccagctactcgggaggctagggtaggaggattgcatgagtccaggagttcaagtc

SEQ ID NO: 36010 - DNA, 1050 bp, Homo sapiens
gggattacaggcgtgagccaccgcgcctggccttaaaaacattttaaatggcagttaaactcaccatgaagaggacaatgtacataatgcaattgaagcaacaacatatgaagacctatttgtaggttcacatatgaacaggcaaagactatgttacaagtgctgctggctaccagtaattattaaacacatgctgatttcagagatgttaaatgtgaaaatgtattggtcttaaaaatgatgaaatatggaaatattaagagtaaaaaaatgcactctaggttagcattattttaaaatatgtatgctagtctataaggagattatttgtattctgtttttcagtatgaagtgagagtgtttacaaaatattgcagataaaattccaacagaaatatacattgaaaggattctgttctttaacatcatagatatgtaaattttgagagaaacataaacttttttaatatataggattttatttaaagaccttatttctattttaggaaacccaagaaaacatataacgtctttgaaggaagctgtggatatgacctgccatggagagccatctctttataattccctaagcatggctatgcagactctaaagttagtattatacattatgtataattgaattagaagttttttaaatgagttaagttgaagtgatgtgttaatatggggcccataaacccagctataacaaaattgttaagtacgagaattatgtagtgttatttatgatgtttagtgtggtgttggttagtaatttttattttacattttagtaagatattgttaaaggttttataaaaatataatttaaaactgtcggcagtatcaatagtacaaaaataggttgatgaaaaaatattttattaaaatgagatttaatatagtataataattgtaagttggttgtacctttattaacatttattattttattttgaaagtaatggccaaaaccacaattccttttgcaccaatgtcatatatctgtaaattaatagatatggcaagttcagctatatggaatagagc

SEQ ID NO: 36011 - DNA, 1064 bp, Homo sapiens
taatacttaattaaaaccaggtaccacgatctcatgatctaagaatcaggtcactgggcttgggttcaggttctgcaactagcaagtaatgtgaattttgacacattattgaccctctctgggtaacagttttctcttctataaaatacaagcattgactcagtagcatcaccttcagctttaacacctaataactctaagtttgtacatgacatttacacaataagaatacaaagaggccaggtgctgtggctcatgcctgtaatcccagcactttgggaggccgaggcaggtggatcatctgagctcaggagctcgagaccagcctggccaacatggtgaaaccctgtctctactaaaaatacaaacatttgccaggcgtgggtggcaggcagctgtaatcccagctactcgggaggccgaggcaggagaatcgcttgaacccaggaggcagaggttgcagtgagtggatattgcgccaccaaactccagcctgggcaacagagcaagactgcatctccaaaaaaaaaaaaaaaaaaaaaaaaaagaatactatacaaagaaacagctgggcatagtggctcacgcctgtaatcctagtactttgggaggctgaggtgggcggatcacctgaggtcaggagtttgagactggcctggccaacatggtgaaaccccgtctctactaaaaatattaaaaaattagccgggcatggtgatgggtgcctgtaatcccagctacttgggaggctgaggcaggagaattgcttgaacccaggagacggaggttgcagtgagctgacaacggtgccactgcactccagcctgggtgacagattgagactctgtctcaaaaaaaaaaaagaaacataaaaggaatgacaactctgaagcaaaacctaaatttgttgcaaaatttgctgacaaatataactaccacctccagcttcggtgtatatatgtatgcacacacacacacacacacacatatatatatatatatatattttttttttttttttttttgagacagggtcttgctctatcacctaggctggagtgcag

SEQ ID NO: 36012 - DNA, 1033 bp, Homo sapiens
aagattgacacagtcttgaagtcaatattcaagttctcatattattaagagcatatcctggtgtgtggtgataactaatggatatacaatgaaatgtaggtttaacatattttatgatttttgttatggtgaggtataattcatcttttggtttaatttctcagttataacattaaattttgcacattgggcattgtggaatttagttgtcttaagggtttttttttaaaagatgataaattagtaagtaaataaataaagcaatggaaggtctttgaaagtttagccagtgaaaaataattttatagcattcacattctataattaaacataaatgtaatactgctaataatagttgtttttgtgtgctattttccattagtttgtgatgatgattttactggtcattaaatagttagagcatatttaactgctttctctgcaggaatgtaaaatataaagtgcttgtgtttttcaaaatttccatggagtccagcacagtaatacatattgaatatcaaagacatgtgcaagtcaataatacaaataccgttttataatacgtagcccaaagatgttttgtaaatattatattgctgttatggattttgaaaatgagttgacatttctttctaccctcttggaatcacattgtaggtaaaacttagcagatgcttggaaaatacccatatttcacataggtattattatgcctttgatatgattgccatgctaaacctcaaaatataactatttacatctcatttgctatttgtttccttgtttttagtatacatctatttaaaaatgtgtttatttcagtttaactgtagaagttttaagaacaaaaggcccttgtgttgttgaagaaaatgaccccatatttgagcgcggttctacaactacatactccagctttaggaaaaactattactctaaaccatggtcaaataaaggtaactaattttcatttaaaaatgtgtaagttctctatttgaaatgaattgactgtttctgaattaaatcagttctc

SEQ ID NO: 36013 - DNA, 1028 bp, Homo sapiens
ttggcctcccaaagttctggaatgacaggtgtgagccacttgtcctagcctctttttttcttaattcatcttgctaagtgtttattaatctaaacatctttttaatgaaccaacttttcttaatgtaattttttttttttttttttttttttttttttgagatggagtcttgttctgtagcccaggctggagtgcagtggtgacatctgggctcactgcaagctccgcctcctgggttcatgcccttctcctgcctcagcctcccgagtagctgggactacaggcacccgccaccacgcccagctaattttttgtatttttagttgagacggagtttcactgtgttagccaggatgatcctatctcctgaccttgtgatccgcctgcctcggcctcccaaagtgctggaattatgggcgtgagccactgcgcctggcttcttaatgtaagttttaggtttccaattgttggtgtgtttttattgatttttttttgttactgtttagcacttccttccatttactttgtgtttgtttttctagcttctttatttatttattatactttaagttttagggtacatgtgcacaacgtgcagatttgttacatatatgtacatgtgccatgttggtgtgctgcacccattgactcgtcatttaacattaggtatatctcctaatgctatccctccgccctccccccaccccacaacaggccccggtgtgtgatgttccccttcctgtgtccatgtgttctcattgttcaattcccttttctagcttcttaagatgaaaacttagagcactgattttaaagccttcttttttaaagtagacatttaaagctatacatttcgttttttttgacacagagtcttgctctgtcgcccaggctggagtgcagtggcggatctcggctcactgcaagctccgcctcccgggttcatgccattctcctgcctcagcctcccgagtagctgggactacaggcgcccaccaccatgcccagctaatttttttgtattttta

SEQ ID NO: 36014 - DNA, 1051 bp, Homo sapiens
agtgtagtagcgtgatcacagctcaccacaaccttgaactcttgggctcaaatgattctatcacctcagcatctcgagtagctgggactacagtcatgggacaccatgactggctaattttaaaaacattttttagtagagatgttttccaggctggtctcaaactcctgggctcaagcaatcctcgcacctcagcatgagccactgtgtctggccctagctttttctaatttaggggaaaaacaaccttgtaatgactgttaaagtcccagttggttttggaaaacaaagagttgattctaaaattgtcatgtacacaagaacaaaggctcaagaatggtaaagacagttttaaaaaacaccaactttgcagagggactgtgctagtagactaattttcgagctagagtaactaaagcagcatggtattggtgtagggttagatgaattgactcagtggaactgaatatagagtttaggaagagacatttaggaatctgttatatggcagaggtagctttagaaattagcgggcaaagatagaactaacttcattagattgagctgagatttgaaaaacataatatttgatccttgtgttaccatatccgctaacttcctgatggattgaagactacatgtataaaacaaatctttacaacttttagaagaaatgtagaaaaatatctttgtaatgtgaaggcctcaggtaagacatttctattaagacgtagaaaacacagactttaaaagataagattgataagtttgatggtagtaaaattaaatacttctgttaacaaatcctccataaagaaaataaaaggcaagttactgatcgggagattttatgtgtaatatctagacaataaaaatatatagagaactcttgctgataagtcaggaaaacataaacacctagtagaaaaaatgaacaagaaaaaaagaaaaaggtatggctaaatgtgaatatgtgttgaaatggtcagtgcgtggctatcagttatattattgttagttgaaatttattttgtgacagagtcttgctctg

SEQ ID NO: 36015 - DNA, 1038 bp, Homo sapiens
tgacctctagttccatctatgtcactgtgaatgacaggatttcattcttttttatggttaaataatattccattgtgtatatataccacactttctcactttctttattcatttgttgctggacacttaggttgatattatgtgttggctattgtgaataccactgcagtaaacatgagagttcagatatctctttgatacagtgatttcctttcttttggacatacacctggcagtaggatggctcaatcaaatggtagttctatttttagttttttgaggaactttcatacttttttccataatggcattcctactttatattcccacgaacagcctatgagttttcccatttctccacatcctgaccagtatttgtaattttttgtctttttaacagtagccattttaacggcagtaggatatctcagtgcagttttgatttgcgtttccgtgatgattaatgatgttgaacattttgtcagacacctgttggccatttgtatgtcttttgagaactgtctgttctcttttgcctattctttaatcagattatttgtttttttgctattgagttgtttttgttccttatatattctggttattaacttttgtgagatggatagttgggaattttttctcccattctgtaggttgtctcttcactttgttgattgttccctgtgctatgcattgaaaagtctttccatattgcttttattttaagattaaggccaatttttacttcacattaattttaggttcccttagccattttttcagtttttaaaactggatattttattgaaatgttttttactaaaatgcattagacttatattacaaatgctatattggattaggttgatgattgatctcagagcaatttaactctgataatgtctaggaaacattacagatgaatttgtttacatcattcacttctcctaattactaattatgggattattttctatgtataatccctttttgatctcaaagaattatagaattttaccactgaaaataaccttatat

SEQ ID NO: 36016 - DNA, 1077 bp, Homo sapiens
acaagatacaaacacccaacacctgtcccttgagccccatctctatgccgtctggcctggtcactctcaggtctgccttgcacccctggcgaactctttttattttgttaaaactgaaattctatacccattaaacagtaactctccattcctcccaccccctaaccttttggcaaccacttttctacatcttgtctctttaatttgactcctcatgtaagtggaatcatacagtatttttttgtgtgaccattttatttcatttagcataatgttttcacagttcatctatgttgtagcttatgtcagagtgttcttcattttcgaggttcaataatattccattgtgtgtgtgtatcatgttttgtttattcctttatcatcaatggacacttgggttgcttccaccttttggctgttagaaataatgctggtatgaacatagttgtataaatacctctttgaatctctgcttttactttttgcgggatatacccagaagtggaattgctggatcgtatggtaattcttttaattctttttttttttttttgagatggagtctctgttgcctaggctggagtagagtacagtggcgcaatcttggctcactgtaacctccatctcccaggttcaagcaattcttctgcctcagcctcccaagaagctgggattacaggcacctgccaccacacccagctaatttttttgtatttttagtagaggtggggtttcaccatgttggccaggctggtctcaaactcctgacctcaaatgatccatctgcctgggcctcccaaagtgctgggattacaggtgtgagccactgcacccggcctcgatcttatgttaattctatacttaacttttcaagcaacctttatactgtttttcatagggctgttatcattttacatccctatcaacagtgtacaagcattgcagtttcgctacatcctcaccagtcgtagctatgttgtaactttggctagtaatcatcctaagggttgtgaactagagaaacgtgttgaacatatttagcttccttacacttttgcctgttagtctgccattcca

SEQ ID NO: 36017 - DNA, 1059 bp, Homo sapiens
aagactgcagtgagtggagattgcaccattgcactccagcctaggcaacagagcaagactctgtctcaaagccaaaaaaccaaaaaaccaaaaaaaaaaaaaaaaaaaaaaagaaccagaaccaaaccatgggaataaaagtaacttaaaaatttcaagacatcagatacaggactgtgactccatattgccagttaatatagtggaatgttaagatgatacccaagacagtcaaagcctcccataattcaatatcgcacactgttttctggttgtaccaaaaaataaacaactggaaaatgatttttacccttaaaagcatgtacacttaaaaaatgggatgaggtgggatttccttcttcttaaaaatgtttctagagttactaaaaaacttgcatttgtgaaatagttgagaaaaatattcctctggaatgtacaagaagggagacaggtactattggtaagacatagtatatgatattaatcagacttggctttttttctctctgggcttcatcagaggctggactttccttggtttttgtttctctgttttctgtaggtaaatctgatttcttggttagccactttggtttgttttccctttgttccccgtttttctcttgtttgcactttttttgtctggagatttatcctttcctgctgccttttttggctttgtttccacttttgcaggagcaggtttagctgacagtcatactaatctcatcttgggctctttccttcaccgcccttctgctgagctgatcttcctcttgggcatcttgtggtcaggagtgtgcatgctgggtgcctgtgagccgcaccatgctgagagccttctcaaagctgggctgcctggctgctaccactcctcccatcctgtcttatcattaagtatgatgttaccatggatttttcataaacgtcctttaccaggctaaagaagttactttctattcctagtttgttgaatgtttctttcattaaagggtgttggaatttgtcatatgctttttctgcatttatggagatgatcatgtgaattttgtttttcat

SEQ ID NO: 36018 - DNA, 1059 bp, Homo sapiens
accggaagtgtttcaaatttcagatttttttgaattttagaataattgcattatacttacatttgtattatacttaacagttccacatcccaaacctgaaaagccaaaatctgaaatgcttcaatgagcatttcctttgagtgtcatgtcagcactcaaaaagtttagaattttggagcatttcggattttcagctttgggatgctcagcctgtacaaaattgtaggatacacatacactgtattcagatagaagacattttttattttccataatcagatttatcagtctttttgtgtatggcttctggagattatgttatacattgaaagtcctttgagacttaaatttcctagttaatgttaatattactgatttgttgcgaatttgatttggtgtaaggaatagggccaagttaattttcctcatatgacttttaccgtttactgaataattcatcttatttccactgataggaaattctgcttttatcagtaagacagtaaatcttcatatttgtttggatatattcctaaaacttccttttcttttatgttgattcacctatttgttctggggccagtatcatcatactgtttgaatttttgtagttttctttattcttttttttttttttgagatggagtttctctcctattgcccaggctggagtgcaatagcgtgatctcagctcactgcaacctccacctcccagattcaagtgattctcctgcctcagcctcccgagtagctgggattacaggcagccgccaccacgcccagctaattttgtaattttagtagagacggggtttctccatgttggttaggctggtctcgaactccggacctcagatgatccgcctgcctcggccttgcaaagtgatgggatattacaggtgtgggccaccacgcccggccgaatttttgtagctttatgatgcactttggtatcttatagggacagtatctctcccaaacccatacaattttcttcttttttcaagtttctcctcattacttatatgttctcaaattaatatgaattttagaattaac

SEQ ID NO: 36019 - DNA, 1090 bp, Homo sapiens
agccacatttagattccatttggcaggttgtccattaaaatatttaagtagataagtggcatgatcctatggatatggtagaatcatcagtgtggtggcaatgtggaggatggattgatatagggaaaagactagacctaggtgacagtggagagttgagtcttgagatgaaggagtcaaagttagagttgtatgtaggaggggggcataaatacctgaggagcaaagattatagagttaataactgagtggaaggggaaaatggatgactttggagtttccaactgggcagaatatttagttaggtggaactgccattaatacaaagaaggctttggtgatgggttttgtatgaatcaccttttgctaggttgcgctttgtgtaacaaataatcaaaaaatctcagtaactcacaacagtaaatattagtctctcacttgattttgttttgtttcttaatctctcactcgtgttggtggcctttggttagctgctgctgtgactgttccactgcagggtaggttcaggtctgctccatgtgtcttcccattcctggactgaggctgaagagcagccctgaattaaacatgcccttctcatggccgaaggcacaggagcaagaggctgaacacaaattggatttaaaatccttgctggcatgtgatgaaattaatgtgtgctcacattagacaaagcaagtccatgagggtgggggagaatgggatgaatgatccagtttagctgtgtttcctgattacaaataaaagcaactataataagtaataataatggcaggaattttatagtgtacccaccatttttctaaaggctttatgtggttttactcatgtatttatcataatgatcctgtgcagtaggtacaattgttatttctgttttatagatgggaaaactgtggtatatagggtccaagaaatttgtctgagataacacagagcctgaatttgaagccaggtggtctggctcataactcttgagtccagggtcttaactgttgctctataatgcttctcactcacccagctctacctaggtgggttctatggttgaaaagatggggtgggaaac

SEQ ID NO: 36020 - DNA, 1033 bp, Homo sapiens
cttaggttgttagttttttattactaatctaggactgatgacttttcaaaaaccaagtgtgagtttataaacttgttagaagtaattgttttgtattatataaattaatatgtgaactgtgattaaagtttgcatttatatcctaagactgctgtctgctaatggatgttaatagtgatacgtactagaagttgaaggttgtattggggtatcttgtaatgagtgtaattagttttgaagaaatctcttaaattctctctccaatgaaatttctgcctttcagagtagaatgcatgattattgccaatgatgccaccgtcaaaggaggtgcctactacccagtgactgtgaaaaaacaattacgggcccaagaaattgccatgcaaaacaggctcccctgcatctacttaggcaagtcaccagagtggtaaaataaactattattagctggtaaaatgcaagatagtttggaaggctgtatgtattacatttgggatgggtattttataaacctgttgatttctcctgtaattataaaggaaacacaggttctttgctgaaaactctgggggaaagtaaacaagaactgttcatagtactagtgcataatactcatacattttgacgcatgccagtttttttctctatgtgttgtgtggttttttttttttgttctctagatcctgtttttcttttaactttatggatcatactatgaaaaaaatagtagcaagtatttatagatctcttgagtgccaggtactgagttaaatgtgcaagtattatataatttgagcagatgtaatttaaagtaaatttaatttccagtgaaagtaaacttatatttgaaattaaaacacatttaaatcaaagaacctgaaagcaaagcagtttaaaatgggcctttcctccgggcgcggtggctcacgcctgtaatcccagcactttgggaggccgaggcaggcggatcatgaggtcaggagatggagaccatcctggctaacacactgaaacctcgtctctactaaaaaaa

SEQ ID NO: 36021 - DNA, 1007 bp, Homo sapiens
tatttaatgttactagccttgcccattgtaaattcatttacctagttatttcaaagagtatgtctattggcaatcatacccgtatcgttttctgtatctttgctgctataaaaatgtggacagattactatagaccttccaggtttcaacattttcttttgctctcaaggagaaaagatagttaaactaggtacttacttttatgttctcttctgtttcatctttccttcatggcagattttaagaccccttaatcgtttctggagtttaaagagttgatgtgtgggtgtctggtggtctttctttgagtctcatgtcatgagaatgccttctctgggccttctccatatctgaggcctgatgacatgatgatctttgcaatgttcttcttttattttcccagtggtgcagtttaaatgtgtcccccaaaagtttatgtgttggaaatgtgattgccattgtggtgatgttaaatggtggcacctttgggaggtaattaggtcatgagagctctgccctcatggatggattaatgctatcattgtgggagtttggccttcgtttgctctctgtctcacacacacttgccctctcttgccctcccaccttctgctgttccaccatgggatgactgtcagatgccagtgccatgctcttggatttcccagcttccagaaccgtgaaaagtaaatttcttttttaaattctttctttctttccttctttccttcttccttccttccttccttccttccttccttccttccttccttccttccttccttccttcctttctttctttctctttctttttgtagaggtgaagtcttgctgctcaggctggtcttgaactcctggcttaagttatcctcccacctcagcttcccaaagcattgggattataagcatgagccactatgccaggccaaatttcttttctttataaattactcagtcttgggtattctgttatagcagcagcaaacagtctaagacaccaattatgg

SEQ ID NO: 36022 - DNA, 1027 bp, Homo sapiens
atgagccaatgtggcctctcgttgttttatttgtttatttatttttcgggacaggtctctttatgttgcccaggctggtcttgaactcctgggttcaagcaatcctcttgcctcagcctcctgagtagctgggattacaggcgtgtgctaccctgcttggcttgttttaaaaatgcatttcaaagcaggcacggtggctcacacctgtaatctcagaggctgaggtgggcagatcacgaggtcaggagatcgagaccatcctggctaacatggtgaaatcccgtctctactaaaaatacaaaaaattagccgggcatggtggtgggtgcctgtagtcccagctactcgggaggctgaggcagtagaatcgcttggacccgggaggtggaggtcgcagtgagccaagatcacgccactgcactccagcctgggcgacagagtgagactctgtctcaaaaaaaaaaaaatgaatttcaacctgtgatggagatggatagggcctaggagaaacaaaatcactgtttgatttctttgaggctctctgacaaaaagattgaggaggaaacagaacatactggataagactgactttttggattctttgtgcatttcaatctatccagttggcataggtaagcatgactactatcaaatcagtggtattgatcagtcagtatagttgataacgttcttaaattcttgacagctattgaattgagatgtatattttgtggcttttattttttaatggtggctcttcaggtaggggcaggaaaaatgggatgtgggcagtaatatctgctttctactttgaattgaaaaagaagtaaggtgacagatttaaaaaattattatatttttaatggcttttctatcaagcagttggaccttttttctccctccaagttatattacatttatcacagcatttctatgaattggatagtattctacaattttgcagggaggaactgaggtctagagttcacctagcttttcagaattagataaaaaatctcttagctct

SEQ ID NO: 36023 - DNA, 1047 bp, Homo sapiens
gtttccttggttgttgaggaactgtggagaaatgtgtcggaagtgcccttagccatatggtaaaattcccggaagtagatatgctaataatttgtcagctattcccttgtgagacttttctagatctctcttccatccttcttcccctactcaaatggtgtcttagtcatttccagctgctataccaaattatcatagactactgggtgtcttaaaaaacagacatttatttctcataactctggaggctggaagtccccagagataagggtacgagcatggcctggttcttgatcagggccctgttcttgactatgttctcacatggtgaccaaagagatctcctgtctcttccttataagggcactaatcccatggggagggggggccctacctcatgacttcatcccaccaaattactccccaaaggcctctgcctccgcataccatcactctggggagcagggcttcagcagatgagttcggaggagacacaaacattcagtctgtagtagatggtatgatggcatttagtttcatttctctcacctttgtcttactacatttctttcttcctttctttttctttttctttttttttgagacggagttttgctcttgttgcccaggtggagtgcaatggtgtgatctcggcttaccgcaacctgtgcctcccgggttcaagccattctcctgcctcagcctcccgagtagctgcgattacaggcatgcaccaccgtgcctggctaatcttgtatttttagtagagacggggtttctccatgttggtcaggctggtctcaaactcccaacctcaggtgatccgcccacctcagcctcccaaagtgctgggattacaggcgtgagctaccacacccagcccctgctttctttctttctttttttttttttttttttgagatggagtcttgctttgtcgcccaggctggagtgcagtggcgtgatctcggctcagggcaacctccgcctcccaggttaagtgattctcctgcttcagcctcctgagtagctgggtttacaggcatg

SEQ ID NO: 36024 - DNA, 1031 bp, Homo sapiens
actccagggcataccagtcatacttgataccttagattggagcctgtgtcttttgactctgagccctgtctctacccagctttctcattgcatccctgaacctctgccggtacattcgaacagtccttgaagctctaagtctagcaaccagcccttggagcctttcctgcttttcttgcatgcagcatggtgctgttgcttgtatagtgaagtataaaatcagaacccagaatgacttcagggcattaaccaggcatgtcaaatgaaattctagtgagattttctgtgtagtgtgaaattttgtgaaagtgacaacttcactgtgaattgttttcctataagtaactttaatacaaaaattcttttgcaatataatttctcaaggccattgttgtttttcctcttaggtcattgctagaatcgtggatggaagcagattcactgagttcaaagccttttatggagacacattagttacaggtataaaggtgaagaattgaaaatacgaacattttctgctgctttgaaaatcaggaatctcttgtttcaagactttgatacacttgacatgggctttgttgttgagagcactacaaatgtgtgagccacttttaaaaggaactgctttataaacataatttgtagcttaatggcttcatggatccaaatagtttaaaatgttaatagctagatgctgtggtgtgggtccctatctgtgactttgtgacattagttgtataaaaaggttcttatagtaaaattagtagaaaatacttgtagttctttttgtttttctggataacaataattattttgaaagtttcagcactgtttcctttgttctttactgtccaattcaacgaggaagttttatattgtgtttagcttcccagaaggatatagagtgagttaaaccttctcacagcctctgtgtaggtcttaagctgattcatgcagacactagattgagaattcagtatatcacgtcaggaaaaacaaaataaggatgtttataaaagttaattttttaa

SEQ ID NO: 36025 - DNA, 1089 bp, Homo sapiens
taaagattcaggctgggcgtggtggctcatgcctataatcccagtactttgggaggccaaggtgggaggatcacttgagcccaggagttccagaccagcctggcaacatagcgaaaccccatctctacaaaaaatacaaaaactagctgggtgtgggggtgagtgtctgtagtctcagctactcaggaggctgaggtaagagggaggatcacttgaagcctgagaatttgaggctgcagtgagccatgactgtgctactgtgttccagcctaggcaacagagtgagaccttgtctcaaaaaaaaattcagttttctggcttatcagtatgttgatactctctcttatctgttaatttttcttcaataattattttgatattaaaaatgatatttttatagtatccctagtgtctggtacatactagacactcagatatattaaatgaataaatggataatacactaagccaattatttaatcaaatcaatcaagacaaatggataactctacatgtatcgtgaccctttctagaagcaaaagaaaccagagtctaggaccttaggaacaagaagattgtgacatgagctgttttataccatagacaaaatctctttgcattttaaacttggatctgatattaaagaatgtgtaaatatgcctctttcttgtgaattgaagcccttggaaaagcacaagacataaatcttctttgaactttcttttgaggatttgctcgaatatttgggtacccagtaggtatcgttggaaacaacggagttctcttttctgaatctgcaaaaaaggcaagtactgttaaaaatatttcaagattttctgttttaatttaacataacgttgaaggtcaaataatgagttaaaatttattgcataaaaatgcttaactagatgcctcagcaaccagaacactgtgtgcgcgggcatgtgtgtgtgtgtgtgtgtgtgtgtgtgtgtgtgtgtgcgcgcgtgtgtatatatgtgcatgtatgttagtatttgaaacagtttttatggtggtttacattaacatgctgtgacgaaccatctggagcactattaaaaatgtact

SEQ ID NO: 36026 - DNA, 1034 bp, Homo sapiens
tgatgggtacagcaaaccaccatggcacgtgtatacctatgtaacaaacctccacattttgcacatgtatcccagaacttaaagtataattttaaaaaagttaaaaaaaaacctaggtgtgatattatgtgtttacaacaaagcttaccaagtattctaaaataacagaaagaaataatttatgtacaataacaacattaatgataatatatccatggataatacgttttggttaatcaaatattctagctaattgagagttgccaataatccctcgtgggattattatttttcaaagttgtagaatccaataatacagtcatttcttttacacaaacacctaaaatttatctagaattaacttagaatttcctaaaccaaatttatacattagcccaagatatacttaaattatttatagaagacatgaacttacaaatctgttgtttcttctcccacccaaatagaataatatcttcaaagacagtctttttttaaaaaaggacatattgttccccttaggtagatactggcattttattgaaatatagttcaagagacatgcattcaggcaagatgagtgcacaccgtgctacctacttggaacccaaactcagaacagtagaattgaatcttccttggaagactcaggaggaagatcatctctctgtgcctcagggtcctcatgatgaacctattggtaattatactgtaaacatgagggtgtgcggattagtagcgatttcttatcactgaatcattagtgagcaaactatttattttgaggtggtgtcctcaatactaatatgattgtgcttcaatatagaacaaggaatatccctggatgttatagtccttctgaaaaagagtcattgattgcagatattgttttaaaaaaaaaaaaaaacactcaaaactgctacagagaaaaaagaaagtgtgaaaaaagagaccatggctatcttctaggttattcgaagaaaatacctgagtttgcaagtatgcactagctcactgcatttgcactgtcctga

SEQ ID NO: 36027 - DNA, 1067 bp, Homo sapiens
gctgactggcgcgcagtgctgggaaagctgatggtggaggaagggaagggctggcttcttcccgttggcaaatggcagactgtgggcaggacggggcagtccaggaaacaagatgaaacacagcccacttgtctgtcatgcagacatgtttgtgagtatagcttttggtacagccacataatgtatgctaattgctatattccttcttttttttttttttttccacgggaaatggctcggtgagaaagctctgaaaccaaagaggcaatgcagaaatgccaaaatgcagacattacaaaagagagaggaggaacaaagggaaacaggggatccaaatttacatcatggtttagcgttctgctaaatcagcacctccctggtccatgcaagtcatatggaaaataattgagcagaatttcctatttgggttgattttcactgcatctatctcataggttgcaatttgttaattggattttttttaaaacaagaagcaaaaattttacccccaaggactagaaagttagcaagttaagttgaaactccaaagtaattatcagagcttccagaaaatattaataagacagtatgagctggttctctctctactactgttctgaacaagacacttctcagttgaccacaagactcagatgcaaactggggaaagcacacaactgagcccacttaaaagaatcatccatctgtaagaaaactcattcagaatattttgtatgtgccaagctgtgtacctctagtgttccgttagatatccttttgcaactgtcattctttaaatcaaataaaaacagaccaagatattaaaggaatgctttgtctaatgaagcaagagtgcacagacattttatattgaaagagaatggaccagaaatgagaaatatattttactttgtcattggagtcaaaagaagtattgataagtagactttctttcccccagtaacccttcattttttttaaataaaaaagtaacattctttagagcagttttgtagttacgaaacaggaacttttataatgaatttgattagatgtgacggaaggaa

SEQ ID NO: 36028 - DNA, 1081 bp, Homo sapiens
gcacagactttgcaccaataaaagaagactttggccaagaaaagaaaactgatgatgttgaagccatgagttctcaaccagcactggctctggatgaaaggaaattaggagatgtttctcccacacaaatagatgtcagtcagtttggatcttttaaagaagacactaagatgtccatttctgaaggtactgtctcagacaagtcagctactcctgttgatgagggcgtagcagaagacacgtactctcatatggagggtgtggcctcagtgtccacagcctcagtggctacgagctcatttccagagccaacaacagatgatgtgtctccatctctgcatgctgaggttggctccccacattccacagaagtagatgactccctttcagtgtctgttgtgcaaacacctaccacattccaggaaacagaaatgtctccatctaaagaagaatgcccaagaccgatgtcaatttctccaccagatttctcccctaaaactgcaaagtccaggacacccgttcaagatcacagatctgaacagtcctcaatgtctattgaatttggccaagaatctcctgagcaatcccttgctatggacttcagtcgacagtctccagatcaccctacagtgggtgcaggcgtgcttcacatcactgaaaatgggccaactgaagtggactacagtccttctgacatgcaggactccagtttatcacataagataccacctatggaggagccgtcctacacccaagataatgatctttctgagctcatctcagtatctcaggtagaggcctccccgtccacctcttctgctcataccccttctcagatcgcttctcctctccaagaagatactctatccgatgttgctcctcccagagatatgtccttatatgcctcactcacctctgaaaaagtgcaaagtctggaaggagagaagctctctccaaaatctgatatctctccactcaccccacgagagtcctctcctttatattcacctactttttcagattctacctctgcagtcaaagagaaaacagcaacttgccacagttcctcttctccaccaat

SEQ ID NO: 36029 - DNA, 1784 bp, Homo sapiens
aggcatgctcccagcatttgtccacccacttagtccactctgagtcgattaacctgcatgcagcaacacccaagtccaccccaattaactgaagcaaataccaaagcagttgggagtacatatggtagacaatttgccttaggaagtgacttgaatgtacaaagatacttgatgcacttattttttaatgtgagacagcaagtttataaaacatccatataggattatagatacttaaaggaacacgtgggtgagcgtgtgtgggggtactagaagctgatctgattggtccaacagtttgatgctgagtcatgcgtgttgaatcccacttcagtgcacctgtggcctctcagtcaaacaagttgtgcctttcacagcttctttactactgcaagttcaagactgaaatggcttctatgatcagaactgggaaaacagtgaatcttatggtggaagaggttctcagcaagtgtacagtatttaccttcctttgtcttacattggctttttaaattttccattaatttcaacataattatgggaacaagtgtacagaagaattttttttttaagatatgtgagaacttttcatagatgaactttttaacaaatgttttcatttacaggaaattgcaaagaaaattctcaagtgatagtctttttttttaagtgtttcgtaagacaaaaattgaataatgttttttgaagttctggcaagattgaagtctgatattgcagtaatgatatttattaaaaacccataactaccaggaataatgatacctcccaccccttgattcccataacataaaagtgctacttgagagtgggggagaatggcatggtaggctacttttcagggccttgacaagtacatcacccagtggtatcctacatacttctttcaagatcttcaaccatgaggtaaaagagccaagttcaaagaaccctagcacaaatttgctttgggattttcttttctggaaaaaaaaaataaaagaaatagtacattgaaaacaaatgaattctcaactcctacggttcatgtagagtttagagaaaatttccatcattgtcatcattgaactgtgaacctgggaagccagatcatgattaacactgacatcaagtttcaagttgcagatcaatgcacccagtgttcagatgaggcaaacttctccgtgacaactgtgctgtgctctgtcacattacatttcctgcagactctaagatctacggagtagagaacaatgacctcattttattttctatgttagttatttatttcaaaattaacattttagttgatttttgtctgataagtctatgttttgcactgctaactatgatgagggtttaaaaaaatgcttcttcagggtcctttcactgaggacctatgcagtctacttaatgctgtgaattacatttttcaaatgtttaattttttaaagaaaattaatattctatttttgttaggcttctctagaaatgcagcttttatttattaccccatttctttcaagtccttggaaaataacatattaagggtacaagaaattaacacatgatggaaaagtcattgtgacgccaatgaatttcattgagtataaactcatctacttcaaatttattttataacacaacctaagatactcaagataattatttaatggttagctcttaagttgaattggtctacataatgcgtgggaagaaaaccagatttttagccttcttgccaaatccagacctctggttgatttttctttgacagaagatgcaag

SEQ ID NO: 36030 - DNA, 1043 bp, Homo sapiens
tttgattaactattggaaagcacattttggctcgtaagtgtacatttaaagcacgtttttgaacttgtgtaagcaaataaattaggaagtaggatcaaagcagggtaggtgcctataaatgaaggcttatctaaccaggtacatttctcagcattgagacactcactcagtcttggttttgcttgtgtcttcttaatattcagattataatccatatccagtcaaatatgttggaaaacctgataaagactctaaaaaatgctgcagaaggaaatttatcaaaatttgtgaaaagacatgtgttctcggaggaagtggtgagtatgcaagtgctgcagaaatcatttaaaagtgaaaggacactcttaaaaatgtccactaatttctcaattctaaagcttaccttaaagaaattgccaaatatggcagcttctctgttgttcctgttttaagacttccatgtatatgtgcaaagatttttttttcttccaacagaatatatcctctgaaattctaggaaacttttcccttttaccttattcttttctccacattgtattcatgggccctggctctctttttcttctagatgacgattttacacctttttccttttccctcaagccttcaataccttctcctcacttttcactctcagttgatcactgtatttcttgtttcttggagaaaatagaagtaatcagaaaagcatgactgctacatagagagcctctggccccttgccctatatacccatgatgactggatacatctctcacaccagcctcttcagtcatgcactggatcccatcctctctgacccactccacagcatcagtccagaagttgactcactcttttggctatcatcagtatccccttccctgtgggtcattcttgtcagcaaacagtaggatatagtatctctcatcttaaaaaataaaaagaatcttctgtacaaatgaaaagacagaccatatgtttagataagaagacctagcctcataaaaactcagtttttttcaagttactgtgataatgta

SEQ ID NO: 36031 - DNA, 1043 bp, Homo sapiens
cttccattttatagctgcaaattactgggttgatgtcaggtagggtgaggagtatgttccggttatagctggtagcaagatggctgcatgcatcatgaggctttggcctaaaaagcttgtcattatataaaaaagctatagagagcagagaaaatgtcatttccaatttagaagatcataatcgatttttaacacattggtccttaggtgatacagaattcaacaaaaacggggcttataaaaagccagggttcataaaattacaaagattatagacaaaaatagataacatataagacttaccagctgggcaaggtagctcaagtttgtaatcccagcacttagggaggccgaggcaggcagatcacctgaggtcaggggttctagaccagcctggccagcatggtgaaaccccatctctactaaaaatacaaaaaaattagccaggcgtggtggcgggcatctgtaatttcagctactcaggaggttgagacgggagaattgcttgaacctgggagacggaggttacagtgagcctagactgcgccattgcactctagcctaggcgacaagagcgaaactatgtttcaaataataataataataataagacttaccatttgccaggtcctgtgcaaagcactttatctcatttgatccctgggaaaccccataaagtactattatgccatttctcagataaagaaactgaagctcagagacgtttagttgcttgcctgtggatataacactagagagcgggagagcacagtatttgaacccaggaggtctgatgctggaggtcatgtttttaaccttatctctgtattgcctgcccaagtgctggctgtgtgcatgtattctcaataatccctggccaacttcctgctttgctgtcagtagcagagctgaagaacttacaatagacggcagagggcgtccagagtcactatttttaaaaggtgctagttttcaaaagcatttctggaattcagagagaacagaggtccacatagcaggctagacaggaaaggtagctgtag

SEQ ID NO: 36032 - DNA, 1881 bp, Homo sapiens
caggggagcgtttgcctcgcctgttaagctgtggcgtttgagggcccttgagtgctgcagtcggctgccccgggacggctgcctttcactggttctgggcgctggccggcgctgcccgagatgggccagtctttgtcccgccctgggcccctctgcccgggtctcctgcgtccgcacacagcgcccatcgtccttacatgcagcttgccgttctcttcctcccggcggttctttctccttggggcctcttggcctcacgacatgtttacataatgtttgtgactgtacgagttttgcgtgggcttgtgggttttgcccttctacctccactcccatgcgtacaagcaacagggaacagctgctgaggagcagattggccaccacaatcaagctattttcggaatgactttctttaaaaatgatcgcgtgttgcttactgattttaaaaatcaactggattttgcaaggattgcttagagtttaagtctgttatcttaatcgctaatcaggatggtctatcagtagatgtaaatgtagaaatttgaaattggaggctatctacaaattgattttgacagctgtattaagaagcttaataactgtcctttgaaacagtaatgacttaaatgatgaatgtgtaagtggtactttttttaccctaaagaaaagatacttttaaaattgcaagatgtatggtgtaataggtgtttggaaatgaaggttgtaaaatggctgtcctgacgtactactcacttttagaataacaaaagttcctgcagctttttaagtttccctgttatatcaaagctttcatgttagagtggtgaagaagctatgtttagtggaaaaggggaaagttccgttttttgggaaaggatctgttttccactttcaccttacctggcaccgtagttgttcctagagaaggctgtgccaggatgaaaattagcaaccacaaaagggaaacaatagtttgtaggtgcagatatcttttttagtctctagctatgcagtgcataaatttatactagcttggcagtacgatttttacttcatgcaatttaacgtgagcctaatgaagtactagtgttctgttttctttttcctaaaaggggccgccacccttgatgtggctgcatctttctcctagtcaggaattattaaattcctcccactgaaatatctataaaaatcttgtttgcacttctacctcaactctcagtggctttattaccattatataatgtgagcagaataagatttttgtaaaaatacatgattctagttgtaagcttttccaatatcaacatttcttattgtattcattgtttttatgactgtagttttgcttatttataattttaaagccattccatgaactcagtttttctaaatgttgtaaatgagctactacattgaaatgtaaacatctgtatttagaagaatttcttgaattttaaccatgttggattctgcaaatgtttttttaagaaaagaaacctggttataaagtgacgtcaaaccaagtgacataggtaatgaaataaatgaatttatcaaatataaactgcagagaggagcacagcagtaagtgggggagttctttttattggccagggtataaattgtgatattttttcctgagattgatatttgaatacatattggtgctaaaaagatatcttcccccctcaaaacagtttggtttaccagcaaaaggatgagaaagctgagagaatcaaagaaactgatgaggttttcaaaaacaatggcgaacaatgccatcctcaaagaggaaggatcagaaacagtgaaattcccctggaggttgaggatttttcttagttgaccctattcagccattgccatggtaaatctgtt

SEQ ID NO: 36033 - DNA, 1031 bp, Homo sapiens
tcgagcctgaatctgaatctagatctgcttgactgcaaagctcatcatgctgttttatttgtatacttttatatcatatacatattcagaattttatactataactaactatagatcacagaccacatttttaagatagctaaactgagctgggaataatgaatgggtaagttgcaaagttaaacaagacagggcttaactttccacattttagaaaaagaaaatctttacctggatgagatataattggtaacaactatataaaaccgggttctaaagtgaatgcaccaaatatctgtgggtgcaattcttaatgatcttaacacaaataggtgagagaaaaccaaagaaatctcaaatttgattaaatttggggaataagagaaatgaaaaggcccgtaagtgctaaaattgaaatatacgtttagtaaaactcctggtaaagtaaatgaaggttttactggggaaacaagcaaaaaaatatgtgtttcacataaggagaatagaactgcctacaaggtgtaggaagttaaatttatactgaaaattagagaaaaattcatatttgagttgcattttatagatgactccgaagccattagtaaaataatttattagtggagcccctttatcctagatgcatatgtttctaccacaaatgaaaaagttaatgctaggaaggataagattccaccacttttgtttttactaagaaaggaattaaggaagagaagtatttcagcaaatcatgaatatactaaataaatgcaaataaattattaggaataggtggtatccaacaagattttaaagataagaatataaaagtacagaactattgattattatgctaccatttgaaattgtgtttttgaaaaatatttaatgaaattaaatatatattttgactggagcatagcagaactaggaaatgatgagagagctagcaaaccatgaaggacttttgtgccatttattagtgctgggattatctcttgtcgagagatttacatactagtggagaaagagat

SEQ ID NO: 36034 - DNA, 1027 bp, Homo sapiens
aacacatggactattctccatttttagtttcaaaaggaatgtttacctatcatttttaaatctgtaggcatctaaaaaaaaaaattttgcccctccccaacctccactctttatgggtatgcactattaaaaatttgcacatgtcctttctaacatttttcagttgcttagaaatacatattgctctgcagcttgcgttttgcacttagtatatcattcaaattctttccttgttgatacagaagtttgacgtattctttttagtgggtatattgatagacatatcataatatttttatggaggaatgtttttaccaattttctatagatagaacaaagttacaatgagcatatgttaaattttaaactttgtttctaggtctcacgctgttgcatgtgtcaatcagtttatcatcagtaggactcaagctctaatgttgcacattgattcttttattgaggtaagacttgttcttgtctccctcccaaccccccagctttttttttttgagaaggttaggtgatgctaactgcatgtagttttgctttaaaacaagaatcatttataattctaaactcaatatttaattaaattatttctgatagtattaaaactggatatgggatagactaacttttgttagctgagaaggcacttttactaatttttctacttgtatcattctacaaacactgattttggtggcggggtatgtttagtatcttgactactttaaaaatttttccttcaatatactgttcaaattgcatatggaaaccaagtccctcagctcatgcagtttttgaaatgtgaaaaattggtgaggttagattaagttcatttggtagaatctgaaggcacagactacaaggacagtattttccattggtttccattgtaaaattagaggcatcaggaaaaatagactctttaggcattttgaactttctgataaaagtggaaagaaaagagcataattttctggccaggaaccataagcaccacaatttcttctcaaaatctctg

SEQ ID NO: 36035 - DNA, 2039 bp, Homo sapiens
tgtttttctaaatacttttgattcaagattggttgaatccatagatacagagggccaactgtatatatattactttccggcaggatctcagaatgtgcccagtaaagtccattcacaacattgaccaggatgggagcatgaaatgaatctcttcaatttgagggaaaaatatgaacacataatactcaatctgtcctttaaagataatgtttcttgtagaaacgcttcctctgagtaaacctgacctgattggctggcaaactaacaacaatgaatggcttccaaaagagagggttggggtggggggaggggaacctgctactgtagaaactagtagagcaagctcataaatgatcaggatcctgttgagcgcagtttcaagcattcatcataatcttcagtatacccagaaagtttagcatgtgtactttattcttcctagtgcctatcttcagttgccacagcactgcagtctggattccttccgtactgtgaacctgtgtatcagcgttgtgtaaacctagtacagaagactcttgcacaagccatggtaatttttttaaaatgtcttcctcttcttgacatggtggacatttttctaaagataggtataatgtatacagactttttaagtagttaattaaaaccaaacttacaaaaaacattgtgtctaatttcagctaaacaatgctcaaccagatcaatatgaagctccagataaagattttatgatagtggctcttgatttactgagtggcctggctgaaggacttggaggcaacattgaacagctggtagcccgaagtaacatcctgacactaatgtatcagtgcatgcaggtgagacttgaaaggtgaaaatgaattgaagcctgtttctctgtgtcacattggggttaatttcttcttatttcttgtaggataaaatgccagaagttcgacagagttcttttgccctgttaggtgacctcacaaaagcttgctttcagcatgttaagccttgtataggtatgaatattttctactgctatgaatatggttttttaaagttaacatttacatcagctttgtttttttattattaaactgaaattgcatggaatcccaacatttataaatgtacactttattggttaaagtaaacttgctgtgattgaaacaggcaagatggcaggaacccctaatatttccttgagcttgccatcatctcagctttttaggtactcctgtgactggaggaaagcttagtaatatactttagagtaaaggacatgcccaccagggaagccttggtaccatggactagttaatagattcttttttgagtagccacctttttggtagaggtacacagaaatagtaataatcaggttttcttctctagcaaaccagcatactttttcagatattgcagaaaacttccaacaaatgtcactttaactgagactgggcctgggggctcacacctgtaatgccagcactttgggaagccaaggcaggcagatcacttgaggtcaggagtgcgagattcgagactagcatagcatttgtcttggccttctgtgacaatgataagaaattccttgaatgttgtacccggaattgttcttaaacctatgggttataaatgagttatgggatttttttcccccttttctgcatctcagcatgttgggtaacaattattttaatacagccgggcacggcggctcagacctgtaatgccagcactttggaaggccaaggcgggcaggtcacgaagtcaggagatcaagaccatcctggctaacacggtgaaaccccgcttctactaaaaatacaaaaacttagccaggcgtggtggcttgtgcctgtagttctagctacttgggaaactgaggcaggaaaatcgcttgaacccgggaggcagagtctgcagtgagctgatactgtaccactacactccagcctgggcaacagagcaagactccgtctcaaaaaaaattattttaatacttcatttaaaccttaatttaaaatattaattgaatgttttgtcat

SEQ ID NO: 36036 - DNA, 1060 bp, Homo sapiens
cataaggcctggcgcggtggctcacgcctgtaatcccagcacttcgggaggctgaggcgggcagatcacctgaggtcaggagtttgagaccagcctggttgacatggtgaaaccccgtctctactaaaaatacaaaaattagctggcgtggtagcgggtgcctataatcccaactatttgggaggctgagtcaggagaatcacttgaacctgggaggcagaggtttcagtgagctgagattgcaccactgcactccagcctggtgacggagcgaaactttgtctcaaaataaataaataaaatataaatttttaggtgccttgatatttttgtaattgctttaattttaattatttgtatttctatatttatatgacatgtcagagttaatacgggaagcaaaatatttcacattgatattttaacgttcaattttttcttttttgtttttttctttttgggatgatctctaggtatagagatgcagccttatattcctatggtgttgcaccagcttgtagaaatcattaacagacccaacacaccaaagacgttgttagagaatacaggtaccatatgactgaactgtttcagtgaagagaaaatttgttgccttttaattttaatatgcgtagagaaaccaaagcaaaactagcttttaaaatcgagcttattttgtatttaattgctatttcggattttcagtaatgaaatagactgttgcagctacattctataaccagttttcagtggttatatattcagtggtataaccagaaaaacacttttttcccctattccagtgttttaatacttcctgcaatggatcccagcaaagataactattgaaccacctgaattttgcttttaaattaattcggagagtaactgggagctgggaagtaatttttttttttaatctgtccaaatgtagtcaaaaagattcagtggcaaattggttaacagtggcatttgtagtttgtatttcatcatataattttcttcgaattgggaatttaggcagtatgttatgggattttttttttaatttatttttttt

SEQ ID NO: 36037 - DNA, 1048 bp, Homo sapiens
ttctcaacattgcttcaactattccttttttctttcttttttcctgcaagaagacatcggcactcatagtgatggggtaaaattgatttcattttggagcatgaatttatagtctctgctgtaacaaggacttttcatttcacgtgctttgaaagaaaactcagttgggttttggcccactgtttttgtttttcactgtatgtttcactgagtacctaccatgtgcccatcacttttttttttcttttttttttttttttttttttttttttttttttttttgagacagagactctttcgcccaggctggagtgcagtggcgcaatctgagttcactgtaatctccgcctcttgggttcaagcaattctcctgcccgagcctcccaagtagctggcattacaggcacatgccaccatgcctggctaatttttgtatttttagtagagatggggtttcaccatgttggccgggctggtctcgaactcctgaccttgtgatgcacccacctcggcctcccaaagtgctgggatttacaggcgtaagccactgagcccagtgcctaggactatattttaaaataagcaatgaaagattctgttttaatttgggatggactatattcatttggactcttgctccttgagctcttctgtacttaaatgggactagcagttctcatctctgagcttcggttttgtcattgagttatgttgaggattaaatactatactgtatgtgatgccagaacttagtatgttgcctggcacactaagttgactcagtaaaggttaggaactgggccagtacaataaatatcagggttttgacattcatctttagattttcaacatgaattaagacatatctgactggaagccagaagatgtgctgaatgagcatgtacagaagatgtacaccaagttgaattacactttagattgaattggaggagtttttttggcttgcttgcttgcttgtttactccaagctaaaatttaaatctggaaagatttcaccatccaagctgtctaacctagaaggtagtag

SEQ ID NO: 36038 - DNA, 1029 bp, Homo sapiens
tgcaacaaaaatgttaagccataacagcctttttatattttagtttgtcacctttgcattgcagaataaatactgaataaccatttttataagcagttgctcctctttgcatggttctattctctaaaagtgttgaatgatacagccattgcactgaagtttgagctgtgtgcgtgtgaatttatactgtttcaaaaatttcaaatgcatggtagcatgtagaaaggtttttgttactatgtgtgtgtgtgtgttttgttttgttttgttctgttttttaacgttctttcacctttcctctactttggctttgcaaatttcagtctgtagagcctgaaattaaattattttatagtgcctgatatttttaatattataagttggattcaaagggtatacagcattttgttttctagtaccattgcttcactgggagctcaaaatttgcctccctgttagtctttaataactgagtagagtagcttttttattcttagattatagtgatattctgtagtgcttcaaatacttagaattctaatatgagagatagtttaatattctggaatagagagtattttaaattgaaatgaccaaattcgatttaaaacaaacacataacaatcttcagtaaagttatttgaacctgtggttgacaattctgtattgactaaaggcaatattgtcacctgtctcattaaaaattagtttccagttaggcagatgaataacactattaaaaatgcacccagttttgtagtcacttgactttttttttttatttaaatgaaatttaatttgaaaatagaaaataaaattaggtaaatatgactggcaacctgaatttgagttgggattctttgtgtatttttcccccttgaggttattgtttcttcctaatttatatttcagatacatagtgtagaacaggaatttgcagaagccatttaagttatcttttgaggtaagctctgatttagcatttattctgataaaatctaatacatcatgggatatatataaagcaac

SEQ ID NO: 36039 - DNA, 1044 bp, Homo sapiens
ctggtgtattaaatgtgcaatagcattttatctaaaaatgtatataccttaattaaaaaatactttattgctaatgctaacagggaagaagtgagcacatgcagttggaaaaaagatactgatagacttgcttgacacgattgccacaaaccttcaatttgtaaaaatgcagtattttcaaagtgcagtaaagcaatgctcaataaaagaaagtacagtaaaatgaagtgtgcctgtattttacctccagctccctagcagttttcaaggccagagtggcactggagagctgtcattgcatgtctattgagttctcatcaaagcgtatctgtaggttcttcactaaaggggctgttcttcaaagaaaaaaatctttaggattagtaaaatgttttttggtgtgtttcagagaagtcaagataaagtgagactgtatcaaaaatatgaatgttatattgtgcattgacttgtccagggttgtctattaaatgtccataagagctaaattaaaaggaaaatgtagacagggtgggaagttatagtatttatttatttttgaggtggtttagagttgagagggaggttaggcatgttattggtgtttgcaggatagtacctcctgacccttctcttacccctccaaagaactttttgaaaaaaaggaaacttggtaaaaccaattttttaatcagtaatgtgattatacaatatacaatctatcttctgcctatttttcaaatcttggactcaccaaaagtgaatgctcgccacatgcagtggctcacacctgtaatcccagcactttgggaggccaaggtgggaggattgcttgaggctaggagttgggagactggcttgagcaacatagcgagaccctgtttctacataaactttttttaaaaaactgaatgctatccaggttttttatttttagtgtctaatttactgttactcttaaaaagttcaccgaaggagaagtttcaaacccttatctttttgtttttttagagacaggttctcactttggccaggctggtcttgaac

SEQ ID NO: 36040 - DNA, 1053 bp, Homo sapiens
tttattgagcgttttttgcgtgaagtggtgctgaattttgttgaaggccttttctgcatgtattgagataatcatgtggtttttgtcattgattctgtttatgtgatggattacatttattgatttgcgtatgttgaaccagccttgcatcccagggatgaagctgagttgatagtggtggataagctttttgatgtgttgctggattcggtttgcctgtattttattgaggattttcgcactgatgttcatcagagatattggcctgaaattttcttttgtgtgtgtgtgtctttgccaggttttgatattaggatgatgctggcctcataaaatgagttagggaggagtccctctttttctattgtttggaatagtttcagaatgaatggtaccagctcctctttgtacctctggtagattttggctgtgaatccgtcttgtcctgagctgtttttggttggtaggctattaattactgcctcaatttcagagcttgttatcgatctgtccagggattctacctcttcctggtttagacctgggagggtgtatgtgtatgtgtccaggaatttatcaatttctttttttttttttttttttttttttttttttgagacggagtctcgctctgtcgcccaggctggagtgcagtggcgcgatctcggctcactgcaagctccgcctcccgggttcacgccattctcctgcctcagcctcccgagtagctgggactacaggcgcccgctaccacgcccggctaattttttgtatttttagtagagacggggtttcaccgtgttagccaggatggtctcgatctcctgacctcgtgatccgcccgcctcggcctcccaaagtgctgggattacaggcgtgagccaccgcgcccggccgaatttatcaatttctaatagattttctagtttatttgcatagtggtgtttctagtattctctgatggtagtttgtaattctattggatcagtggtgatatcccctttatcattttttattgtgtctatttgattcttctctcttttcttgtttgtt

SEQ ID NO: 36041 - DNA, 1050 bp, Homo sapiens
agctactcaggaggctgaggcaggagaatctcttgaaccggggaggtggaggtttcagtgaacaaagatcacgccactgcattccagcctgggcaacaagagtgaaactcagtcttaaaaaaaaaaaaaaaaaaaaaaagctgggggcagtggctcacgcctgtaatcccagcactttaggaggccaaagcgggcggatcacttgagattgggagtttgagaccagcctgaccaacatggagaaaccccatttctgctaaaaatacaaaattagccaggcgtggtggtacatgcctgtaatcccagctactcgggaggctgaggcaggagaatctcttgaacccaggaggcagaggttgtggtgagccgagattgtggcattgcactccagtctgggcaacaagagtgaaacgctgtctcaattaaaaaaaaaattgtagacacaaggtctcatgttgcacaggctggtctcaaattcctagtctcaagccatcttcctgcttcggcttcccaaagtggtgggattacaggcatgagccaccacacctggcccaacttcccttttaataatgactataaagattgtcacttttttatgatgaggccattcagtttctataattctaccttaagaatttatagcattcctaactaagcataatatgttatttagaaagttgttttgacttaataatttagtattgtgtagctgtttcttatgaaagatgtttcttgctttcagaaaatatacatgtttctggtggggcatggtggctcatgcctgtaatcccagtgctttgggaggccagggtggagggataacttgaggctgggagtttgggaccagcctgggcaacgtagggagaccccatctctacaaaaagtttttaaaaaaattagtcagtgtgagatcgcaccattgcattccggcccaggcctacaacagcaagactggtggcacatacctgtagtcctaactactcaggaggctgaggcaggaggaggattgcttgaggccaggaggttgaggctgcagtgagccatgattgc

SEQ ID NO: 36042 - DNA, 1002 bp, Homo sapiens
aatatgttgaaatcctgtctctactaaaaatacaaaacttagccaggtgtggtggtgcacgcctataatcccagttatttgggaggctaaggcaccagaattgcttgaaatgggaagcagaggttgtggtgagccgagattgtgccactgcactccagcctgggtgacagagtgagactctgtctcaaaaaaaaaaaaaaaaaaaaaaaaaaagagagaatgtacttacttacacatacctagatggtgtagactgctacagacctggctatatggtttagtctgttgcttgtaagctacaaacctgtacagcctgttactgtactgaatactgtaggcagttataacaaaatggtatttgtgtctttaaacatagaaaagatatagtaaaaatcagtataaaagattaaaaatgctgcatctgagtagaacacttatgttgaatggagattgcaggactggaagttgctctggttgagttagtgaatgagtagtgagtaaatgtgaaggcctaggacattactgtacactactgtagattttataagcactgtagatttaggttacattaaattttattaaaaattgttttcttccttcaataataaattaaccttagcttattgtaacttctttagaaacttaaaaaaattttaaacattttgactcttttgggatgacatcttaaagtagaaacacattgtacagttgtacaatagtattttctttatatccttactcgatcagctttttttctgttttaaaatttttatttttttttaactttttaaatctttttcctaaaaactaagacacaaacgcacacagtaaacatgtgcctacataggcttagtatcattaggattgctcttttatctccacatcttgtactactggaaggtcttcaggggcagtagcatgcatagaactatcatctctggctggacttggtggctcacacttgtaatcccagcactttgggagggcgaggtgggcagatca

SEQ ID NO: 36043 - DNA, 1082 bp, Homo sapiens
caaagtgctggaattacaggtgtgagccaccgtgcctggcctctcagagcttttgatatatttattgtgaaggcaaggcaagcagtggtttcctctctggggatatcagagtaacttggaaattttttccaaacaactttctcatctctttcaacccccattacccaggcagtactggaggatctatttgttttgaagtttgaaaaggttctccaggtgatctaacacatcctcacttttggttgagaactgctgaaatagagtatataggctttcccagatttctttgatgacagccatctcttttggggattgtatattattatttcttttttcttttttttctttttctttttttttttttgagatggagtctcactctgtcgcccaagctggagtgcaatggcgtgatctcggctcactgcaacccctgcctcccgggttcaagcgattctcctgcctcagcctgccaagtagctgggattacaggcacgcgccaccacgcctggctaattttttgtattttgagtagagacgaggtttcaccacgtttgtcaggctgatctcaaactcctgaccttgtgatctgcccacctctgcctcccatagtgctgggattataggtgtgagccaccgtgcccggtgtatattattatttcaaggattagaaagacattttgaaaatctatgggctagattataaagcatttgaaagtaaactgtagtttttgctttgccaactgattgtttttcagtttttaaaactctttgttttttttgtaacattattctcttctgggtctcctaattttctgatcacgattatagattttaatgtgtaatggctccaaattcggctgggtgcggtggctcacgcctgtatcccagcacttttggaggctgaggcaggtggatcatgaggtcaggagatcgagactttcctggctaacacggtgaaacccgtctctactaaaaatacaaaaaattagccagcatggtggtgggcacctgtagtccaagctactcgggtggctgaagcaggagaatgatgtgaacctgggaggcggagcttccagtgagcc

SEQ ID NO: 36044 - DNA, 1028 bp, Homo sapiens
taagtaccccattcccttccctgctcagcatacttacagtcctccagatttctttaatctatttattagttactatatcatgttcttgcaagatacatgtttcactccataagtaaaaataatttagtgcattaaagaagttaaaatatgatatggcattccagaaaatgggtaagagatctgtgaagtttgggaaccatatttcctcagtgcagttcatagacctaaggcttgaaacctaaatcatctttaatttcttcttcccaaatttcattaaatttttaatcttactgattcaattgtattagtatttttcccttcagactttcttttcatgttttctctagctgcctaattaatttgcagatttcatactggtacagcagacgtttcttctccaatctattttacatgttatagcacactcatcttttgcctatacagttatgaacttataattgtaccacttacaaatctttaaattttcacgttgacagaatgaaagtgggattctggacttggtttcagagcctttaaggatctcgagctgaccagattttagtcttaactttcttctttttttttttttttgtttcaaccacaagtgtttattgatatattttaatggaacaataaggcacaaccgtggattaaaacagtttgctatacagccaaaagaggggaaagctataaccttaggaactttagatatgcaaatcaaggagcctctgaagtacctctctatagatcagtgtcagacattcttccgttttcacttgatcacaaagtctgactgatacttcatgaagaatttctcattcatttatatttgagccatccagcccagctacttccctgttctctacccttttccatcactttgcagtggtattttttttagcaatccccttcctaaataattatgtacacatcttcaatagttttccaaagcaaggaaacaagcacgcaagcagtgaatcagagaaagtcagccaagggcagatgtttggataaatagactcataggg

SEQ ID NO: 36045 - DNA, 1045 bp, Homo sapiens
tcaattgattagtaagtaaatgtttaaaatatatctagttcatctgttagtggctatattgtaaagaatcatggccttaaattatttttataatgtataggtttcattactgttcatgtagggagcttatagtattttttaaccaggtttttaaaacagttttccttatcaataatttcccaatatgatattaagccacttagggtggttttttgtttttgttttttaaccaatggcaatagtagagcagaaagccactgcttaaaccactgtaccatcatcaccttctttcaaacttcttggcaggaaaaaatgttagaattcactttgcctgaaatgccagaggctcttggcatgcctcttcatagcctgaaggcttttgagatgctagtaattgtgggagacaggcccttttcagagcttcctcttcctggagcttcatctgcaggtgtcatacagcccactgtgagggcaaacagataagtactttaccccaatgactggagtgttttggcctaaagccagagaataaactctttggaactttaacacttccttttatgttcaaactgcatcttttttaaaaaaagaagaaagtagaaatgttctaacatcttgattaatttgattctctagaaggattgggttattattattatgccttttctggaacatttcttcagattatgcataagtttagaaaaatataatgtttctcatctaccagtaaggaagctgtatttcaaaatgtgcaattttaaatgacttttaagtggatagaaagtcacctggggggccaggcccggtggctcatgcctgtaaacccagcattttgggaggccgaggagggtggattacttgaggtcaggagttcaagaccagcctggccaacattgtgaaaccctatctctactaaaaatacaaaaattagccaggtgtggtggtacacacctgtaatcccggctacttgagaggctgaggctggagaattgcttgaacctggaaggccgaagttgcagtgagccgagacgatgccactgaactc

SEQ ID NO: 36046 - DNA, 1028 bp, Homo sapiens
gaaggataattattttaaatagaaaacagcgtatctatattatttcctgtagagctgagagacatgctttaaacttcaatacatggctacaacatttttcagaaatcaccaaagccaaaaagtaacttctgattcagaatgttaaacggtttcactggcattctctgtcttattaaccagaaagcgtttataagatgagtaatattgaattttacctatttttaagttgtgtcacaattacaaattctattataatttaattatactaaaaattatactaaaaacttttctaaggtgctaataccttttgcagaatcatgcattaaaaataacaagggttgtgggaaaaacagttgaagcagcccactcaaaagctatgtaattttgttaacagaagacttaacagaaactttaacatcagttttattaaaaattctaacagagtttaagagacctagtaaatgaataataaataccaaaataaaagtaaggattttatctttaaagaaatgttgattgtagcttaatgatagggggtgtgaggaaaatgaggataaatgcagggtgctgagttgtggagatgagagcaaaatgcagaaatattgaagaatagcacaataaacactgaggcaaaacaaccaaccaaactgagccaagtgaagaatgtagagtgaatggttatcatgtactgtgatactcctccatagtttgtggaagttactcatattgatgtactttgcattcatcaggtattgcttggtgatgcaaagaaaacatgaaggtgcagcaaaaattgcttatgcaccaacatgagtttttcattaatgatgctattcccctgtttaccacttgcttgtgaaatgaggcacattacaaatccaaaaggtagcaaaacaaactatcttataaagagacttgctccaggttgctgtaagattcttaatttttcaaaatatgacatcctcaagagttaataactactttttgtcaatacaataatcactaataatattcttagaacttgaaaa

SEQ ID NO: 36047 - DNA, 1024 bp, Homo sapiens
cacatagaaaaacaatggaattcattgtaatatattttatctgctatataaaaatattattttaacacattcaatatgaaaattaatgagattttacattccttttgtgtgtatgctgtgtcttcaaaatttgctctgtatgttgtagcacatctcaatttggactagtcacatttcacgtgctattggccactgtagtagatagcataattctaaaattagagaaaaccacttgagaaaagagctgtttttgccttttcctaaaaaaaattaaaaaggcagtcacattatgttggcctagaggttatgttgccataggagaaatgtcccacagtagttgatctcaagactttttccaagcttgtaagtttcagactagctgttgatcagtatctgttcaccccaatgtcctgcaccaccttggtctgcgtatatacacagctgcatttttagcatcctgctgagttttttcaacctattgtccatcataatgagtcatcaaaaagctgtactctggaaaaaatagttaaatgggtagggggttacaaattgtaaaacactttttgcagtaaaatgacagttttattaaaatgtgtatctctaagtttatattcatgcaatgaagaattgactagtgtatgaatgcaagtagggttttgtttttgcctttttttcatgttcctcaaataactgaggacagttatctttcttgttcacagctttgtatctagtacctaatccagggtcagacacatagtagacactaaataaatatatatttgcctaatacttttataagcaggaaaaggtttttgtttttttttaaatgaagacaaatacgcctattttttaagaaagcaaaacacctcaggaagtgttgctactgaattattggtacagttaggaatttggaaggaaaagaatctgttcaccaaagtaaaagataaatgaattggagttatattttttatatttgttttatgtttaattagaaaattgggaagacaacagaattgagtcgctc

SEQ ID NO: 36048 - DNA, 1006 bp, Homo sapiens
tgaaattgtaattgcaaaggtctgcttggcgtttttcaggacgatacctggcggattgttgatggacctgggaaagtgatgtggcttcagggattacaaacctgccattctgcattatctgttctttccaaacactattttaacttgtatgatgtctttcaaacttagacatatttgagagctgactacaaacattaaatcgcacttttaaagtgagtcattgaaataaatagtactgaaatgattctctatgttgtaaatgatcaactacaatattcaggaagcacatttattcagattctcagtaaaaatgaagtttttgtaggattaatttttaaattatttccagtgtctatgttgaaaaaaagggttatagtgtaatatcaggcctaaagtttcagaagagcaagcacaaagtaatttagctttccatacatttttagagtcagagataactttgaaatttcataagtttgatattcagtggatacaaatagaacatgaattctaagttttgggtaatgttaactcagaacacttaatcaaattgagctatgtgccataaggtaatcagaccagagtccaagttgtatgcaaaaaatctataatttgattctcataaacatattaataaagtataagtgatgttttatatgatttttaaaaaaaattctcaagtgcaatgtgttttaaaataagcttgcaaatgacagcagagacatttacttctgcagttagttaactttataggagttgtgatttttttgatgaattaatgctgtagatttaatttatttttatatggaattgcataatgtgtgccttttaaaacaataacaaaaaccagagatgtgcctatacaatttgtgttcattaatgtgcctcactttttttctcagtctgaatcttctgttcagaatcttacagtgatcaagcatttttataagatatttgcaatttttgtaaatatttttggcctgcaactgggaaggggattcagagtcat

SEQ ID NO: 36049 - DNA, 1083 bp, Homo sapiens
agtgaaaattgaactctacatatgtgaagtgtatgaaacctctagaaagtatgctgggtttgtctttacaatcttagaaattcctttgagtttcttagagaagatttctttggaaaccagatacatacatgaccatttcaaagtgatttttgtacttaatagtttggagaggttagtaaccagtactttttttttttttttgtagccatagatattttcttcagttaaataacaagatttatttaagcctttactatgttggatcctgagaatataaaattttaagaagtttaaagtccctaggtgggctttaagcctagcagtggcgataattgtcttttcttaaaaaaatcttctttcacagtgtaatatacatagtacaatagtagaagcattttcaaaatctagagatgggaatgatttggcatagggaaagggggtaattgcagaatttaggaaaggcaaacaggaggtaatgacttgaataagattttaaaggatgaataggaatagggatggaggttgggggacggtgaggtggttgggtgtgatagactttccttgagtgccttcagtgagctagatactgttgtagatactgggtttatagcaataaacagaagtccttatggagcttacattctagggagaggagatggatgataaaatgtatttatctcttatagtaataagtgttatgaagagaaataaaccaggatagaaagaaattgatgagtgagtgtggaagttgctattttactttgggtagttgagaaagaccactttgatcaggtgacataagagtagagatctgcagtgagggaaagagccatgtagatgttccggaaggagaggaacagcatgtgcaaaggcccttgggtcatagcctgcttggcctgttcaaagaatagccaaggtttattggctaaagaagagggatggtagcagatgcagtcaggagtggcatattaagggcaggacagtttgtgtagggctcttgtaagttaaggtaagggcttcagactttactatcgagtcctatagaagtctatatacagattcatttgattgttccatacactg

SEQ ID NO: 36050 - DNA, 1087 bp, Homo sapiens
aatatctctggtattgaagaggcaagtatcaaattttgttactttaaaaaacaagatttggctgggaaaagttaacgttaatgcattaaatgggttgttttttttttttttaacttagggacttcaaagtccctaagatgtgtttctaccataaattaataaatatcagggagctcattaagtctgaatgctattagaatacatattccattccaggcaaaatttcacctgtgcttcacagtgaaatactagttagccagacttagtttaataaaacatttgtttttaaagagactggtcagcattgctaatttaaatttttcttttcttaataggtgaatatgtttacaaaccaaggaacagtgatccactttaacaaccctaaagttcaggcatctctggcagcgaacactttcaccattacaggccatgctgagacaaagcagctgacagaaatgctacccagcatcttaaaccagcttggtgcggatagtctgactagtttaaggagactggccgaagctctgcccaaacaatgtgagtttcctagtaatggttttaccagggaattactcatttagcagctgatttctgatctcagggctcagaatggatatgagtatttttaagtttggaaatgcaagctttaaaaataacagatttgtaactgattttaagcaactgtccttgctcaagtttgcagtaattgatgtagcgtgccatgattgttacacttgattttgtggaatgttttctacttacttgatttggatcagatactttattaactagaaatgatgaaaatgttaatttggtgctttgccaataactacttgtaagtttggaattgaaaaaaaaattagtgtaaattatgaaattacttcagtttcatctatatagttcgtattaccagtaatcttttaaaaatggcttgccagtattctggcatttttaattacagtgtgatagggattttattcggggcagaaaatagtgtagctgaatatacatctgaggatgtggcagtgttatgctgttttctgtgcttaaaattttgaagaataggaatgcaggaggaagtcagagg

SEQ ID NO: 36051 - DNA, 1077 bp, Homo sapiens
tggacatagatcttacttagaatgagaaaaataatgcagtattaggtaattgagaattatgtttatagacttgacttggcttgtttctgtttgggatcccaaggatgtgtaggtatctaaccttaaatattgaataaataagtatatatatatagtaccctaaatataactattacctgcagagcactaatgacccttgctccctactttgaaactcatgaatttacaagaaggtgtggagttgttcaggtatcttgggatatatatatgcattctaaaatctgtagcagcataactcctttgggaatcatgagacatttttgtctcttacctgttattggataaatttacgttcttctaaaatatttattgggcaggagaatcactggactcataaatattcccactttgcatagacaggtatccttaggaatccaggaaaattttaacattgtgtgtcattgtattctttggttctgctcccccactattgaccaatgtatgagatgggaagaggggggcatttttttcacttttttttttttttgcattcttgttcttggggctatgacacagtatttatcatcattggcaaatgaatgtctttccttcatccccttttaatatctgataattatttgtagatttggcttttttaagaatttctactcttttccttttcctagatcttgtggagaattttgatgaggcttccaagaatgaggcaaactgaattgagtcaacttctgaagataaaacctgaagaagttactgggagctgctattttatattatgactgctttttaagaaatttttgtttatggatctgataaaatctagatctctaatatttttaagcccaagccccttggacactgcagctcttttcagtttttgcttatacacaattcattctttgcagctaattaagccgaagaagcctgggaatcaagtttgaaacaaagattaataaagttctttgcctagtatacagttttatttttttatttcattgacaccgatctgtacacagtaaaaaaaattgcttatagaaagctaatcatggcatgtaatat

SEQ ID NO: 36052 - DNA, 1064 bp, Homo sapiens
tcgtggtgttactaatgtaaagttttcaggctttttggaatagatgatgagcagcacctctggaatcatttacctgataacattgaatctcttttgcaattgagtcgttctggaaaaatgttttggcttgattgcatgttatttaaaagttttatcctattctgccactttagtgttgaatttaatttcaggactgctttattacagttttctttcctactgtttaaaccttttaaagtaaatttaattttaagcttctacattagaatattagctttgtgtttcttacttcttggcatttttaggctttcaggaaatcaaatccgtaactataattgttatagattaaatgtcatcttaaacttggtttcaggaaacttgtatttgcagtttcaccttaatatttcctgttgccaaaaaatggacactcaaagccagcatgatcctttttggtttggctactgtaaggctgtgctagatttattcctaagtgttgtaaaatggttggctaggtgtgagaacctttgtgtacagctgaatagatggtgcgatatgatagccttcactttaattattcctgcttcctatagattgccttttctgggttagaattaaatggcttattggtctctaatctatatacttccacacagactttttaaagaaagcagagtgaaaatcaactatgtgtacaagcttataatatgtatataaaatattttatttttcagaattaaggcagagtcactgtaattatttctaataccaattccaaaatagtgactcttggacaatagtgcaattatatggaattatggctggttataagcctgtagctattcagacatatcctatacttggtgaaaaaatcacccaagatacactgtactggaacaactataaggtgagtgtgggacgtaatgagggagaagggatttgtgtttatgccaatttctctagcatatgttatactctggatgctctaacagagaattattaactgaaaaccatctatcagcagcttatagtttgggcagataatttgatatctattttttcttgga

SEQ ID NO: 36053 - DNA, 1050 bp, Homo sapiens
gcacagaacagatgatcaatcaatgccaaatgaattaaattttaaaatttgaatctcatatgtgtaaagatgtttattgaagtattgcttgtaatagtagaaatcttgaaaaacccatgtctattagtagtggactggtatagtaaattacagtgtgcccttataatggatggtaagtctattgctcctatgaaagctaatatgtgttactaagtgaaaagaagcaagatgtggaacagcctacatggtatgattatctttttgttattttaaaagtacaagtacgtggttattgtatgctggtgtagacatgataactttttttttctggtagaaatcacagtaaactcaatagctgaagagacagagtggggtgtggctttctaaccatatgtttatttcagtggcaacaagaatagtctgggtgatgagatatgtaccttttttgctttctttgtaattttatgttaaatacaacttaagaaatgttactaagaacaaagagaaacggtctgtaagaaattatgtaatgcataaataggtcttaccagtggtaactctgttaacacactattattttttattaagacccctgttcagattaaggaatttggtgcagtttcaaaagtagacttttctcctcagcctccatataattatgctgtcacagcttcctcaagagtaagtataatattaaatttctttatttttcttttgtatagtttactactgatcttgagccatctggtgaaatactgtttttcatcttgtagattcacatttatggccgatactcccaagaacctataaaaaccttttctcgatttaaagacacagcatactgtgctacttttcgacaagatggtagattgcttgtggctggcagtgaagatggtggagttcaactttttgatataagtgggagggctcccctcaggcagtttgaaggccatacaaagtaagagacagttggtttctgtgtgttctggttttattttgttgtaagctctttttttctctggactttggttaaaaagatagagatcagtt

SEQ ID NO: 36054 - DNA, 1106 bp, Homo sapiens
ctccgttccttatctcctgactgtcttcctgggaatctgcttattaaattgttcatgtcagttggatggttaccctcctttatttctctcgtctttaaccttgtcttcttcacattgtagccaatctccctattctcttccctgtagctgccaccatctagtcctttctgggaaatccctttatataatatgaatataatatttgcgaaaactgtaatgattacaataacttaagtttcaggcagtatagccacaccaccaataataataatgtagaaagtggttgtgtttttatttgttactgaaagttcatcatttgttactactttcatttattcagtaaaaagttaaaagtgccaactgcatgtcaggtattgcactaggtgctggaaatacaacaagaagagagctcatagataaggtagaagaaaggtaaatcatgatgatagtgtataagcctttgaaagagtgtcatgtgtaagtttattattgtatcaatcagagcaataatgaactgttgctgttggacatggaaatgatgctattacactgaaaatagtatttatcaatatggaatttgtctttttttgtgtgtgtgtgtgacagagtttcactctgtcaccaggctggagtgtgctggcgcgatcatcttagctcactgcaatctctgcctcctgagttcaagtgattctcctgcctcagcctcccaagtagctgggattataggcacgcaccaccatgcccagctaattctgatttttagtagagatggggtttcactatgttggctggtctcgaattcctgacctcaagggatccacccaccttggcctcccaaagtgctgagattacaggcatgagccaccacactgggccaaaatttgtttttggtatgtatactagttagcaggattatagacctcccaaagttatactcaggtatgaagaagaatgtagtttcttcaggtctttctgagagccatttgatcctcctgatcccctgtctgctgggtagcagaagatgacaaaatgactctgctctagggatgttgtctgatgcaatgatctaaataatttgtttaggtcttgcatgctcatttacttag

SEQ ID NO: 36055 - DNA, 1026 bp, Homo sapiens
attgtgctgacttttatagtagccatttccttgcttttctttacagtgttacaacgtatgtatatatgcctaagtaataattttaacttttactcttcttgaacttcatattaattgaaacatatcctgtgtattttgtgacttgatttttcccttttgacattatattcattacttccttctgtgttaatctgtaattcattttgattgttagaatattgttgtatgattgcactgcaatttattccattgatgaacattaagattactttgaattttgaccatttatattttttgcatggtttcttgctagggtttataggtaggaatggaattgttgtggactggatttgcgttagtttctctgactttattagataatgttgctgtgttttccaaaggggttgtaacagtttacatttcctctagcagtgattgtgagttctggagaccttggttaattatttaacctattttattattttttaatagacattttaagaacaggtttaggttcatggcaaaattgagtggaagatacagatatttcccatatattccctgcccctacacatgcacagcctcccctattatcaatacgccccacagagtggcacatttggttatgatcgattagcctacatttgagaggttaatttattctttaatcttccaagctaagcctttggctaattgaaaggtatggccagatcttgtgtggatatggtaatggttctaaattgaccagtaacaaaaccactttcctttagtaacacttaaactgtctgaccttccttgcccttgtgcttcagatgcctggaagctttgacctgtgctgtttttgcagatagtaaccatagagttaggacaggattgaatactcttaggaaccttggatctttattgtgacagactcatttcatgggcaaagaaactgatgcccggcagagtgagaagcacaaactccacactcccttcctatctggggcagttggactcctgttatgcagtaaggaatggcttatt

SEQ ID NO: 36056 - DNA, 1034 bp, Homo sapiens
agatcatatctgttttccacagtaatcacctaataaaccactggctgccagctaatttgttctactacaggtagccccattaaagtgagaggcatcttttcagattaaaaggagaatgaaatgttgaggtaaagtactatgtttaaaattcagtactgtttcattctttatgtaaacctttaaagtatgtagtatatgtcaatggtttccaatagacttcttctctaggtggaaaaagaaagatggctttattagtatctgtttttatgatcttatgtatttattgcacgtaggtgactttcaaggatcattttgccagttggatttgtaagatcaggggcagtgatcctaagggctgggatcctggggctggtgtctttgaagctctgtgtgggttttgatttgtgttgtttcagttttcagggcagatggtccccaagcttctcccgagtgcagctcagtgaagaagcctccttgcattacattcactcatcggaaacgctgaccctgaccctgaaccacacagccgagcatttgttggaggcagatattaaactcttccggaaatacttttgggatagagcctttcttgtcaaggtttgtacatagtgattctagcatgtgataatgcatgcttcagagaatgcaggcatcaatttcttattatgagaacagtgttttttgggggtaggactttttttaatgaaaccttgggggacatgaaattggaaactgcattagatcagtagaatgaagattattatatattttataggagtttgtataatattttcattttcttttctgagccagtcttttccatagttgggttttaatactttaatattggatattttcattaatttattgattgtattataattattatctaaagcagttacatttagggctatcttacatgtataatatctacttctggattatcatattgctcaaatgtagttaagcatttgttccagtgcagaatccagtacagaatccagtacagattctgcttgaatggaaacaggtaa

SEQ ID NO: 36057 - DNA, 1034 bp, Homo sapiens
tctagatacctcaataatttattggagtggactttataatcacaaaggccaaatggagatggctctccagtttctatgagattttcatcttatgaaaaacacttgatacaagaatcagttagagtggaatggccttatgttccaagtttccacatccctctttttccttcctttcttgaggtgtatggctgatgtgagcagagagaccgagaaggaagggctgagagattctttatggcttccgaagaccttaattcttacttgcctgacaaagggattctattgtattcttatctaaattttttgtgatgcatattacttggttagatattattttaaatataagcaggtggtaattattttataggttgtccacactgaagctttacaactttggatgataaatattatgagattacatatagattttgtataaaaagtattcctgctttattgaatcttatctaaaagtctgtttttatatgacagctatagatggtgactttgatttgagtgactgatctgtactcactgaactacagcccatactcagtcttctccaaggggacatgtttagtctccgggtttgggcattgcttagttatctgtagtcctgtagaacaatgacagtaaaaccttgctgtggaaacctgagtttgctttacaatatataagagctctccaggtgaacccagtcagaagccatactttcagagttgtaaagggttcatactttcgcactacatttcaattgacagtgatggcctgacagtttctaataaatattaaatgttaaaatggaaggtggtgctaaatatccaaactgtaaagacagaatattaggaaattaaataataggcaaactcgtagccgtatcttttaatcactttttagttatttcctcataacaatccaaatgctgataatttcactccacagcttggctaaaattaataagcagctaggaaatttaagtttttcaaggtatattcaaaattacttataaggataaaaattaagtttgaatatattct

SEQ ID NO: 36058 - DNA, 1023 bp, Homo sapiens
attggcatggctgtacgtgaagcaagttgttagaattctaccctgacagctctgtaaagttcactttggtgggagtatggggaatggatgggagaggcctagtggaagatggggaccagccatggggctgctgaaagcaacgcagaagagaatctgccctacagcagtgtgacaagatgggagagttgaggacacatgagtgaggtcctgaaagtgtaggatctgattggctgtcagtggtaagggagaaggacggtgtctccattcctggggtgtagcactgggtgggatgggccttccaggaagcagaattgtgacaaaatatacgttcagttttagacaagttgaatttgacaggtgtttggggcagccaagttaatatacgtggctgccagtttgactgaaattaaccaataagcacaagaatttggacagaaatccaagccctctgactccaaataattaatgggtatactttagagcccttgaatctagacaatgcttttgtatttgtctacccttgaaagagtactagaaactgtatgcatattccagcagagggcaatattcaactaaagtggaaacattcaattagtttttgtccattcatgagtctggaggagactcaactgaaagaacaaaacattttgagcataagagcttcctcttaaaaaaaaaaaaccaaacaaaccctaaagcaaacttcctctttaaaatctattagaagattcttagtagattatgcttttctgtcccctctgggacaatgtgtagtaggggggaaactctaagcttatatctgtagctgctattaattaaaagactataataattctagcctggacattaactttgctgtctctgtgagtgtgataaatggttttattattgcctacgatccagttatgtttctatagttttatgattctagttgtactcccagaataatggcacattatttcaaatgaatggccaaaaagtcttcttattttaatatgctcctattaataagctaattattag

SEQ ID NO: 36059 - DNA, 1034 bp, Homo sapiens
atgtgattacaagagtaaatgtgggagatgtcctctgagaataaaataacctgtgtacagctttcaggtgtgtttcagcttgggatagattcattactcacttttagctgttaaataatattaagtataagactagttttctgtttacatgtgatgatacttgtaacatgttttcattgatgctttccaaggttgtttttctagttcacaaaaataaacattagtgtagcatatatgtaattttttaaaaatccacctgactttatctcttccagcgtgtcaaaagcctggtggttcaacacaatgaacatgaagaccagcacagcctagatttgggtatgaaataacgcttttacctatactcgtaggggcatcccagatccaggtttagagtggacaagaagcaagtaaattttaacataaaatattccttcctggtaaccttatctatttcctgaaacgcatccagataaattttatttgtaggatcatttgtaatactatgactctagaggttgagactccatttacaatctaaaaaacaaggcaatcaaagcttttcctgaacagttttactctgagccagaagctggctctggacttgtcatatgttcccttgttatttctgtgaagtaggcactaccagtctcaggttcaggtgaagcagttgaagcactggtggagagtagatggtggaaccgagactcataacttcattccacctggccctagaatctccaagcttaccaaaatcccattttgatgcccagtggggtccccttggagctgagcctatgtgatctacactgctgagctcaggaaaagaccagatgtttgttctgggatttgagtctgatgtgagtgtcctttcagaggaaccaggtgttcctccacccttggcaaggtagaggtatttcctccctctgacctgggaattctcatctgattacaatattctgtttcacaactccctgaggaccccttcctaaatctcctcccaggtactctctatttcttcaaggctaatttggacc

SEQ ID NO: 36060 - DNA, 1095 bp, Homo sapiens
tccatctcaaaaaataaaaaaaataaaaaaataaaaaataaatgaagaggatcttaagcatggcatcttagaagctgtgacccctgtgagtggaagctgaccctcttggctgttatttaataacacatgtgtatctagactgaaaccgcaagaatgtttcgtgaaacatgggagggggggaccttagcagaactcttctgaaaaatacgttttcaatcctaatttttggcagatctctctctacaccccaggctacagagcttctgtgtagtcctttctttttttcttttctctttttttggggagttggggggttatctctttaccacaaactaaagcttcccagtgaatcattttgaagtaaaggggctggagacagtgaaatatcccaagaagaccactgggaaggcaaagttatttgtataaattccaactcaaattttattctttttgttcaaggaaattttcttactgtggttgttgaggtttcaaaaccaaggttgagaatcacggtcagagatccctgagggagctcagcaatgctgaaatcacccctaacgtactaggttttcagtagttttgggaattagagaaatggagttctacttttatctcaactgattacaaaaggtattaatgaaagtccatttgtattaggttcacagattttcaatgattatcaccagtgagatcacagatctgtgggaaataggcaaactttggggggaaaaagtgttgaaagaatttcctaaccacttcaatttatgagatgattaaacctttaaaagttaattatttttgaacattaagaagaatcaagtgactgtaatttgctgtcacagggtcatttgttggactttgaagtgtacagaatgggatgaagggagtgggttgatatttacactgatgtcttaagggcattatgaggatgcctgatgcttggcattagtactaacctacctttagtacattctaaattacctttttctttcattttacaactttctgaagtgtaacaagggagggaaaaatggcagtactttctctgaactctaaattttccttctccaaaataagatccttgaccccaaataa

SEQ ID NO: 36061 - DNA, 1060 bp, Homo sapiens
gactaatatcaggaaaaatcctaagagaaccttagaagaggaatgggcgaggagatgaatgctagtttacctctggaaatgtcctgcccaccccattttttttagagacagagtctcacccaggctggagtgcagtgacaagaacatagctcactgcagcttctaactgctgagctcaagtgatcctcctgcctcagcctcctgagtagcttgcgtatacagacatgcaccaccacatgcagctaatttgtttcattttttttgtagaaacaaggtcttgctgtgttgtccaggctggtctcaaactcctgggcttaagcattcctcctaccttggcctcccaaagtgctgggattataggcatgagccactgcacccagctcagaaatgttcactttcattctgagggtagtttttctttctttcttctgggtaacactaagaccattggtgaaaaggactttctataaacttcagaacttggtgaaggtccctttgaatgaggaaatttgggagattgtatatgcagcagctgggctttgctctctgtcaggaccgtgtttgcgttctggttcaaccacttaataacctgggcaggttaatcactttccctgggccttagctttcttgtctacaaaacaaatatagtaatgactcatgcagttatggagagtaagtttggcagatggttaaaaacaattctgtatgctcttgggtaaaacgtttccagttaatacatttatacatatattatcagatatggtcgacttactgataacctaccattttgcataaaattacacagctttacttaagaggcacattttaaaaatatgactttttcagattcttattttaggtctaaggatggttattcttaaaaatctagaaattacagatagtaaagagttgaaaataaaaactgcttatattttgtcacctagaaatagcagttgacatcttagtttatcttttaggtctttgagtcttgagtatcttgaaagttgttgtactcttaaacaaaatgagataatgtatctactgttctgtgaatgttttc

SEQ ID NO: 36062 - DNA, 1046 bp, Homo sapiens
tcttctgttttgaaagtgactacattaaactttgctggagatttacctatacctacagccacacacaaacatgcacacttaaagacagctttctattaagttattaatagcatatatctttggctatcataatacaggtatttttataaaactttcatacttagactaaatcttagtcttttgatttttattcagtttatttgaactgtggtttgcttcattaatactagtaatgttttttctttaaagatatcctagctctacttctaactgatgtgctgctctttttacaagaaaaagaccagaaatacatctttgcagccgttgtaagtatatgactgtgtgatgtatttaaaaaataggtttaaccacacattttcttgaaaaatacctaaaattcctagtgaaatataatagtcacagggaagtatatgcttctgttatgtttccattattacttgtgattgcagtgtttagagacaagcatctcattaggttaaattagcatagtaagtgttgcgtcatcacaaccagggctggtactcagctggttcagcagtgtagccaactgtgagaatattgcagtccttcagtagtggttggtgaacaggcattgccctgagcctcccaaatgtccccacgccatctagctatcttggtctttcctccagactcctctcttccccgccccttcggcccccaaaccccttcccttagatccagcaactaaaatgtgaatgctgggcacagccaatctcttccagcacctggctttctccatgcccattggccctgctctcccacttactaaccccgtgactgccatcgtgtgccttctgccagacaagggataccatcctgatgcctaatgttgacagaagattctttcttatttttactatagtagcttctaaagacagtgtatgaaactatttttgtagtgtgttagagtaatctaattgctagcatatagataataagaaggcttgaagaagtctctatgttcccaatcaatttgaactgtattacaaatttcatgaaaacct

SEQ ID NO: 36063 - DNA, 1026 bp, Homo sapiens
atattttcttaaaaatattttgtttctccaatgttgcctaataataaacccatgttatctgtaaatattttttaagatagaactttaaagaactttactttccagttttggaagttatttcatgaacaaaattcttggatgttcaaacattaaatccaaattgatattttatttgtagtggaagagatggttggcttaagaactttttctgtactcctctatgggacaccagccaagactacagaatatttgaatttccttaaacaatagtctctgtgggacaattgctatgtaatcggccctatgagatgctcaacagcattactctgaaaggcaaaaacaaagaaacaacaataaaaaaacccaacattttattcttgtggctttttttctcctagctttaacattttagaactatatattgaatgcatctatatgttatttgcctttttcattaacagaggaaacatcttatggtataaaaatctgaaatcctaatctcccttttcagttgtatttttctgtatgcctcaatatttgcaggtttcccaaaagttctcttcagttcagttaaagcattatgattttgttatgcataggctaaaatgtaagtcaagccaaattttatgttaataatatagatactgggaaaaaagtaacttgattaagtttgagttctctttccttttactacatattagaatttggtgccaaggaaactattttcaaaattcaaagcattgtatttagaatacctcatcttgataatttttttttaaaagacagctgtgttaaactttgacaagttttttatgtaagggaagaaaatagaaaatttccaaatgaaaacctatgccatacttagtatttaaataagtcttaagaagtgagaggatgataatttctcatgttttaaaatatttcataattcagaaattgacaccttacttgtgtaatctatatggaaagaagctttgcccaaagaactttaggcaattttcctggaaattgaaactggtattagac

SEQ ID NO: 36064 - DNA, 1051 bp, Homo sapiens
aagatcatgccactgtattccagcctgggcaatggagtgagaccctgtctcaaaaaaaaaaaaaaaaaaaaagttttaaaggaagcagacatattggaagcaattccaaatgtagataggtaatatggattgtatatgatatctgcagtaaataatttttaaatatgtttgcttgcaggatgccatggcttttaataagtttaatgttcttcactggcacatagttgatgaccagtctttcccatatcagagcatcacttttcctgagttaagcaataaagtgagtaaattgtattgtactctgtctacaaaaacattgggtatagtttcattacaagtttgtagcttaaatgtttgttcttatggatagaatcaaagtgtaaaaatcagatgtttatggtttttaatttttttggctgtgacttagcattttacatccataaaactttttttgttattgttataacggttactgtaattgttactgtgaatataaacaatcttggggaagtgtaaatcgaaatttaacaaggtagaagccctgaataattctcaaattacatatggttaagataatatatttatcaagttgtccaacagtgtatttgttttaaacataattgtttggaaatccataaatgactatttttctctctgagaaactacatgaagtagggaattttagaggtgagagtgttttcttagaaaataatggtagtctcagttaacagtgttcaaattgactgtatcatggaccaatggatctgggagggaccctcagtgtcccctagtttaatacccctgtaatacaaagaaggtacctgacatccagagaaatgatgtgccttgtgtaaagttgtggttaggaagggacagagccaggactctaaattctgtcctccggccataattccaaaactttctccaatgttaggtatgtaggctaaaatgtgctaacagcacttgtgtttttgtttccttttgttttactttttattatggcaaatttcaaacatatacagatacagaatagtttaatgaactcccatgt

SEQ ID NO: 36065 - DNA, 1050 bp, Homo sapiens
aacacgtgctgtgaaccgtgggtcagggctggggataaagtttgcaaccatttttttggggggtgggggaagaggaggggccatcttttttgtgccacaaccattagcatctcccaaggtcctgctaaccacgggcaagaaatgttgccctaggataaagatggaggaaacaaatcttgatgaaatattgcctctgtgtataagctttgaacttctgaacttaattcaatgattttaatttaggtactcagaaacagaaacaacttttcattggtggagaagcttgtctatggggagaatatgtggatgcaactaacctcactccaagattatggtatgggatttacctgataacatttaagaattaaggtgccttagctttccttctctgtctaaacacaaaagtgctaaacataaatttaaactgcttgcggggggatgtgtgatttaaattttaggcctcgggcaagtgctgttggtgagagactctggagttccaaagatgtcagagatatggatgacgcctatgacagactgacaaggcaccgctgcaggatggtcgagtaagaaatctattaagtccagtgtgatttttaaccttcttattcagtgttagtttcttttgctataaatagaaatgtatgttacctaacaaatagtaattagaagaaaccaggaattatttttttgtaagtaataatacctgtaaagatatattcagacttgtgactgttttatagatacaaaaaatgttggtgtaacttagaactccatcttgagttgctttaattttcttcccttattttcagtaatgctgtgatttagtgattctaatttaagtttctaagatgacatgaatatcaatctaaaatatctttatgaatgatatcaatctaaatcaatctaaaatatctttattcatgttatctacagacgtggaatagctgcacaacctctttatgctggatattgtaaccatgagaacatgtaaaaaatggaggggaaaaaggccacagcaatctgtactacaatcaactttattttgaaatc

SEQ ID NO: 36066 - DNA, 1049 bp, Homo sapiens
cagggtgaaaaaaaaaaaaacttttcagaggctagctgtggtggcctgtaatcccagcactttgggaggctgaggtgggtggatacgttgagagcccaggagtccaagaccagcaggcaacatggcgaaaccccatctctaccaaaaaaaaaaaaaaaaaaaataagctaggcatggtggtgcgtgcctgtagtcccagctactcaggagcctgaggtgggaggatgtcttgagcccaagaagtccaagctgcagtgagccaagatcacgccactgcactctggcgtgggcaactgggcaagaccctgtctcaaaagaaaaagaaattcttaagtatttgtgtgggtgttttccccacatatttatactgtaaccatcagctttttactctgtaaaacatattttgttagcttctttaagatgacattattcaaccatagttttttggagatggttgaaaaagataagcgaaaacgaccactactcatcactgttaacattttggacgtaaacattcttatgttgtgtttgacttactagggcttgcgtttcaagaaagcccatgtaacacatcctgaactgaaagccaccttttgcctaccaatacttggtgtaaagaagaatccctcatccccactgtatacaactttgggtgttattaccaaaggtactgtcattgaagtaaatgtgagcgaattgggccttgtgacacaaggaggcaaagttatttggggtaagtgaatttttgaatacagggctgctgtgttctgcagtactaatagaaatactattcaagttgatgtattaataaaatatacagcaaatttttttaatgcagtagagctaaaacactgtaaatcagatgtaaatatttagtaaaaaatactttatagaaaaagttgttataaatacaattgttttaaaatttagcttactggttttagttacataaggtgtaatacattctgctagatttatttttatcctttttagccaggcacagcagctcacgcatgtaaatcccagcactttgggaggctgaggcgggt

SEQ ID NO: 36067 - DNA, 1048 bp, Homo sapiens
atttcttatttattgaaagtggtaattagaaatattttaggcatggctgggcgcagtggctcacacctataatcacagcactttgggaggccaaggcaggcggatcatttgagctcaggagttcgagcccagcctgggcaacatggcaaaaccacatctctacaaaatacaaaaacaaaaaaattagccaggcagtggcgtgtgcctgtggtcccagctacccggaagactgagtgaggagaatcgcttgagcccaggaggcagaggttgcagtgagccagatcacgccaccacactgcagcctggggaataagagtgaaaccctgtattaagacaaaaagaaaaaaaaggcaaaagttatattctttaaaattaatttttattagctaacaaccctcccttttcccttttttggttttgttttccttaggaaaatatgcccaggttaccaacaatcctgaaaatgatggatgtataaatgcagtcttactggtttgacagcaatttcatatataattattgaggactacacaccaattgaagaaactgccattactgtgatgtttctgaatactaccaaacagccatacatgtctgcaatgaagagatttattaaattgtaaacattaaagtggtccagttttataaatggtctttattttgaaatacgctttgaccccatgttcataaaactgaatgattgaaaaaaagcaaatatacaaatatcctacttcatcaatatctgcatttgtgagtgggtattcagcaatttcctgaaaaaaccaccagtgttcattgaaaatgcctttcaaaaaggttaatacacaattatgtgtctgagaatttaactgaagtatcttcaaaatctcgttaatcattaatcctaaaaaaggtaggtagcattaatacagatgttaagtttatagtgtttgtttacactagaagtatgtgagaagacactaaaagttcagaaatcttagagaaatcttttcacctgtgaaatccagtacagcaaaggtctagtgaattcacattctaaacatttttt

SEQ ID NO: 36068 - DNA, 1120 bp, Homo sapiens
agtggggtcactactttagttagttgcatagcaagcttggggctttttttttttcatggtaaggggaagctatgagagataatgtctggctgtccagttgctagggataagaaatttaagttctattgatatgcagaggatacattactttaaaaattttatttcagtctctaggcttggttcttgttcatgctcacagtcgctggatagctgatccttctcctcaaaacagtacagcagatacttctaaggtttcattaggactggatgaaaatgtgtccaagagaattgaaccaagtgtttccctctggcagttttatctctctaagtaagttaattgaaatctactttgtgatatattaatcataacactctatgctaatgtaagtttagattgtgtcctttacatttctgaataagattttaatttgctttcttttatttagaatgatcagcatggatattgaacaagttattaccctaagtttagctctccttctggctgtcaagtacatcttctttgaacaaacagagacagaatctacactctcattaaaaaaccctatcacatctcctgtagtgacacaaaagaaagtcccagacaattgttgtagacgtgaacctatgctggtcagaaataaccagaaatgtgattcagtagaggaagagacagggataaaccgagaaagaaaaggtaacttgttattctcttcgctttcaatccttcattgctttgtcaaaaagtagtctgttttcaaaattatgtgccgtgttgtgagatttcttttgatttcttgaacagttgaggttataaaacccttagtggctgaaacagataccccaaacagagctacatttgtggttggtaactcctccttactcgatacttcatcagtactggtgacacaggaacctgaaattgaacttcccagggaacctcggcctaatgaagaatgtctacagatacttgggaatgcagaggtgaggatgataacataaactccaatgtggcatttttcattacaaaggagctttttcaaggaagaaaaatctagtatctgctgaacactacagctaagttctgggcacggtgtaacatgactaacagatactatcttct

SEQ ID NO: 36069 - DNA, 1038 bp, Homo sapiens
aacacagagacaagtttcaaagatagaagaaagtttgtttttgttttgttttgtaagcttgatacccatgaggaagtttgcttttctttctgacatttgaacaggaccttctgcctacatgaccatatgaatctactcatgctttcatgcaaataatcatgttccatccatgtctgcttaatatggttctttcttttaaatatatgttaatacgtttattggtaaaatgcaattttttgccagctttattgaggtatacttgacaaaattttattttattattattattattattattattattattgttttggagacagagtgtcactctgtcacccaggctggagtacagtggcaccatcttggctcacagcaacctccacctcccaggttcaagcgattcttgtgtatcagcctcccgagtagctgggattacaggcatgcgccaccatgtctggctaatttttgtgtttttagcagagatgggatttcactatgttggccaggctggtctcaaactcctggcctcaagtggtctgcctgccttggcctcccaaagtgctgggattacaggtatgagccactgcatgcccggcctgcattcttcaatcatatgctttttagctaaacttagtcattgttctttaaatacagttcccaactctgggttcctattcttgtcatctgacatgtctccccctctccaggtgttcacacctttagggcaaatgctagcatctctatgaaacctacctcaattccgccaaacagaagtaacctttcttttctgaagcatccattatatagagactgtgcatttttaatggcagtcgtaccttgttgcttatatcacatttacatgaatatctccattattagacatcgggctcttagatggctaagtccatgtcttgagagggccttggatttcataggtgctcagtaaacttactaagagaatgaatgaatttgcattgataatacataaaccagctaatgtttatcttactattcttttgaaaaattaggctaatatta

SEQ ID NO: 36070 - DNA, 2069 bp, Homo sapiens
tactttgtcattttctaccataggtcgaagatcaatttacaagacctccaaggagcttgcaccaagaagacagcctgaatagcccgacagttctgaactggaacatgggcattgggttctaaaggactaacataaaatctgtgaattaaaaaagctcaatgcattgtcttgtggaggatgaatagatgtgatcactgagacagccacttggtttttggctctttcagagaggtctcaggttctttccatgcagactcctcagatctgaacacagtttagtgctttacatgctgtgctctttgaagagatttcaacaagaatattgtatgttaaagcatcagagatggtaatctacagctcacctctgaaggcaaatataagctgggaaaaaagttttgatgaaattcttgaagttcatggtgatcagtgcaattgaccttctccctcactcctgccagttgaaaatggatttttaaattatactgtagctgatgaaactcctgattttgtagttaatttattaagtctgggatgtagaacttcaagaagtaagagctaagttctaagttcatgtttgtaaattaatacttcatttggtgctggtctattttgattttggggggtaatcagcattattcttcagaaggggacctgttttcttcaagggaagaaacactcttattcccaaactacagaataatgtgttaaacatgctaaatagttctatcaggaaaacaaatcactgtatttatctccgcaggctatttgttcagagaggccttttgtttaaatataaatgtttaaatataaatgtttgtctggattggctataacatgtctttcagcattaggcttttaagaaacacagggttttgtattctttactaaagatatcagagctcttaatgttgcttagatgagggtgactgtcaagtacaagcaagactgggaccttagaaatcattgtagaaacacagttttgaaagaaaaataccatgtctctaagccaactttaattgcttaaaagacatttttatttagttgaaaaatctagttttttttgtaaactgtatcaaatctgtatatgttgtaataaaacttatgctagtttattggaagtgttcaagaaataaaaatcaacttgtgtactgataaaatactctagcctgggccagagaagataatgttctttaatgttgtccaggaaaccctggcttgcttgccgagcctaatgaaagggaaagtcagctttcagagccagtgaaggagccacgtgaatggccctagaactgtgcctagttcctgtggccaggaggttggtgactgaaacattcacacagggctctttgatggacccacgaacgctcttagctttctcagggggtcagcagagttattgaatcttaattttttttaatgtacaagttttgtataaataataaagaactccttattttgtattacatctaatgcttcaagtgttgctcttggaaagctgatgatgtctcttgtagaagatggactctgaaaaacattccaggaaaccatggcagcatggagagcctcttagtgattgtgtctgcattgttattgtggaagatttaccttttctgttgtacgtaaagcttaaattgcttttgttgtgactttttagccagtgactttttctgagcttttcatggaagtggcagtgaaaaatatgttgagtgttcattttagtgactgtaattaatatcttgctggattaatgttttgtacaattactaaattgtatacattttgttatagaatacttttttctagtttcagtaaataatgaaaaggaagttaataccaataagtgtaagcagtaaccttttttctttggattaaccctagccctgaggtctggaagcttgtaaagtctggtcatagtagtaacctgtaattcatgctaggactcacatgaccatttattctcaaattctacaacattgattgatagcagtattctattacattaaaatgagctctcttagagggtttgattagttcagatttatcatctcaactagacatcttttggatag

SEQ ID NO: 36071 - DNA, 1114 bp, Homo sapiens
taaaagtaggagggccttgtgccagctgctaagcatacaaggtgtgtatgtgtgtgcgcgccagctaactaagcatacggggtgtgtgtgtgtgtgtgtgtgtgtgtgtctgtgtgtgtgtgtgttggaaggaaagcatcgggaagtaatccaaactagaagggctatggtcatctaccctgtgttgattatggaagtcctttgctttcatgtcacttgcaaatttgaagtgggctggagtggaggtgggggggttgcagttggggcaattctgtctccactctaaaatcagctgggattgtactcagtagaatccttggacacaataaagcaaatagagtattagccctgcgtgatgtgtgatgttctcctgtagccctgaagctcacgaaggaattaacagaggagcctctaccttcctgcccatttcactgtctagacttgggctataacctcaaagggctcttacaatgaaatcaagctttggtgcacttcctcagtcctttctgatctaagacataacctgtgagctctcgttcttaaaactccatcctctaataacaaaaggtactcagatctgtatggagagctcgcctacctcaggccaatcctctttcaacacacctggatgcttttacccagtggtcccaaacctttttttggcactagtgatcggtttcatggaagacaatttttctacagatggggtggggttgggaggatgattttgggatgaaacagttccacctcaggtcaggcattagattctcatgagtgcaactaaatccctcacatgcgcagttcacaatatggttcttgctcctatgagaatttaatgctgctgctgatctgacaggaggcagagctcagcctaatgctcgctctcctgctgctcacctcctgctgtgcagcctgcttcctaacaggacatggaccagtaccttattcaactgtacaacagttaaataactgaagcttgctggtatagccaagagaatggtaattttaaatggaaagttattgggggaaaagccatctttaacttgctcaggacagcatttaactatgccagtagaactcaaaccttgaacaccccatcagaaaaagttctgga

SEQ ID NO: 36072 - DNA, 1083 bp, Homo sapiens
tctcttcctgttactgtgagaaattcttttattaatattttaaaggcatactatataaagcagtgtggtggtatattaggtatcagtagaatcctcttgatagttatttagtaaacgtgttttgcttcctgtttttttctaacctttttattgtttcacttctactataatttcacatccttttcttcttagtcaaataagttgaaaaaatatatttttatagaacatgttgctatggtgatagtttatgaaaatatactttatccctgtttaagatctttattaagatcttgctatatgataatctgactggggtgctataaaagtaagatataaaccacttcttctgtagattcattgttttctagcatttttctgtctaggtattctgacaataattatgtgtagagagtgaataaatatttaaaattgtgtgtgacataggaggttttcagtaaataataactgatgaatgaaataagtttaacttggttgatgattgaagagaagttgtgggaactgcaattaacaaggcccaagaaaaaaatcactaacatgattaaaattggtcagacaccaaagaaccaaataacatcatagccttttgtaagtagcaattatcatttgccaaaggcctacaaaatgtcaaacattgttttaggttcatttgatttattcgctcttcacaaaaatcctgcaaggtagacattattcttactttacatatgaggaaattaacattcaaagaagttaattgcccagatcatcgctagtgaatagtctagtccagactttggaccttaggcgcttgcaatacataacttttaatacatatagaattgattttagattttagaaaagtcactcaggcataatggcacatatctgtagtcctagctgctcagggtgctgaggtggcaggctagcttgaccccagaggtttgaggctgtagtgagctgtgatcatgccagtgcactccagtgtaggtgacaaagtgagaccctgtctcaaaaaaaaaaaaattccaaaaaactattatcccaaattttttaaatgattaaacatttgagaatctgtcagag

SEQ ID NO: 36073 - DNA, 1034 bp, Homo sapiens
acaatatctgaaatcaaaatgatgttactagatggacttaatagcaaaatggaaatgacagaggaattggtctgtcagttcgaagatagagcaatacaaaataaccaatatgaagaagagtaagggaaaaaattaaaaacaacaacaacaacagaaaaggaaagtcaggtacctgtggaacaacagcaaaggagtaataacaggagtaacaggtaattgaacctccaaagggagatgagagagattataggaagaggaagaaacaatagtaatagccacaactttctcaaaataggaaaacatacatagaggaacaacaatttgagtgatcatggccttagcagaaataatggagtctagaaaacaatggagcaacatctttaaagtactgaaagaaaaaagctgtcaattcaattctatatctgatgaagatatcttttgagaatgaagataaaataaaactggcatcttaggtgtagttgtgtatttggcatactgattaagaatgcgggctccggagacagaatctagatttgagtttcagcctgagtacctcttgtgatcatgggtgaattatataaattctctaacctcaatttccttatgtgttaaagacacttaaatgaaatatctaaactaatgagtagcaatgagaggatgcttcttaagcacttagtatctgcttggcatatggtaaattgttggaaaacattagttaccatttatatatgcatgtttttagctttcatagtaaatataaccaacctttatagaatttcgtattttatatttttatctgtttcatttttgttcaactgtagagaggttggctgtatcttgaaaagggaagagtgagactccgtctcttaaaaaaaagaaaaaagaaaagggaagaaaccactgacagtattgtaaaagagaaatcacttttactactgctttgacttcagcaaaaacaagatttaggaagctcttattttcagaaaaggaaatgagaggggaaatttttctctcttagaaaataaaaaacctca

SEQ ID NO: 36074 - DNA, 1026 bp, Homo sapiens
ttcagctgagttcacacagaagcaggactgctgggctagaagctctagcaagcattgtctgcctggctacctgtggcaagggtagatggagtggccagccaaattctggctgaagcaggaccactgggctggaggctgttgctgagccccatccagcaaggagtagtggagaaatcttactgctttcaggcactgcagtggcggcctctattgaggctataacactggtgctgatctgctccggggcgcaaagcttgtagaggtgcccttgggcttcagaattgcctccaccaaacatctcagtggctctgcctcagtctagaagcatgggggtggggggcacagggtggtcagggggaatctcccattcccagtcttgcacaggtttctgtggaaagtgtgaatccccctgggggctctcactcaccgtttgcggtgttggttaggttctcctggctctgtgctcagcccagacaagctggtgcccaccttcattcctccgtgctctctgtgtttccctgctgccttgatagatctcaacgttgtttctcagatgatcagcttgcagggtcagtgttcagtagcccttttgcttattctctgtgagagcaatgcgcatgagctgcttctagtctgccatcttggcccccctaacctaacccatttttagatgttacattccatcacttctacttctgctataatctatttgttagaagcaggtcacttaattacacattatggcattagtttgttgtgccttttgtgcttttcctagcatctgtgaagtattattgaaagtattttagtagtgttaggaaatgtgtattttataataattattttagtagtgttagaaaatgtatattttatttgcagttcaaattttgttttttttatttttttatttttatttatttattttttttgagacggagtcttgctctgtcgcccaggttggagtgcactggcgcaatctcggctcactgcaagctctgcctcccgggttcatgccattctcctgcc

SEQ ID NO: 36075 - DNA, 1027 bp, Homo sapiens
tctctgtcacccagactggaatgcagtggcactatcatggtttactgcagcctagacctactaggcttcagagatactcccacttcagcctcccacgtttaattttttttttatagagacaggcgtcttactctcttgcccaggctggtctcaaacccctgggctcaagcaatcctcctgccttggctccccaaagggctgggattataggcataagccaccacaccctacttgcataaatatttctaaggaatttggagagtcaaataaatgaagtttactatgagctttcccctttttgtaggttacccatttattcttttaaattagtgatagaatacatatgaagaaattatagaagagctgtaaagtagcatcagtagaacagagatctaaggaaatatttgagatttttatctaaaatttcatttgaacagggttatgttgctaaggagttttaaacccctgccatacactattagagctgtaagaaaactaaaaagtcaggagcagtggatcaagaaacaatatcaaggttagaactcagaagaaacttaggagcagtttggcaaaggggacaattgaaaggatcatttttccaggacaggaaaataataatagcttatacaactctttttgattttattagatattttgcttccaatagtgtggagcgtagtgtgaagataaatagcacagtatctcaatttcttatttgtagtgtagccctatcctattatcctggcttctgttgtaatttttttttttttttaaagacacaggcttcatcaccctgtctcttaaaaactcttctctgttgtccaggctggagtgcagtggcataaccgtggctgactgcggcttcgaactcctgggcttaagcaatcctcctgcctcagcctcccgagtagctgggactacaggcacatgtcaacacacctggctatttttttgtgtagacagggtctcactatgttgcccaggctggtcttgagttcctaacctgaaatgatccttccatcttggc

SEQ ID NO: 36076 - DNA, 1046 bp, Homo sapiens
tatgcaactcatcatccaaatagaaacttaaaaacttggaggctcggcgcagtggctcatgcctataatcccagcactttaggagacagaggcgggcagattacctgaggtcaggagtttgagatcagcctgaacaacatggagaaaccccgtctctacaaaaaatacaaaattagccaggcgtggtggtgcatgcctgtaatcccagctgcccagctactcgggaggctgaggcaggagaatcgcttgaacctgggaggcggaggttgccgtgagccgatatcgcaccattgcactccagcctgggcaacaagactgaaactctgtcttctgtctcaaaaaaaaaccaaaaaacaaaaacaaaaacttggggcttggggaattgacctttgaattgacactgtaggtaatatgtttatatcagaatattattcatcctgtcgaaagaagataatttccacttattgttctataagaatgaatttaatgtctttaggatgaagtagagtatagatttttaaatttccctctgtcccattcttcttcactagaaccaattaaatgaataaaaaaaggagaaaggcagtagaagagaatacatgcatggttctcacaaggcaggccttctgtctctggtaaaaaacttgagttttagtgtatatactcttggtttaggatctgtggaatttcattatttctgttctttctctcagtgacacatgtaaatgagaaaatcattcaaatccagtctaaaataatttttaaagttttttcctcttgttttgcaaaaatattaaaagctaaagctaaaaattcaaagttgcacctatactttcatttttgtcatacaaaaattgtggccatatggtttcagtgtatgttttcatgtatctgtatgtaaaataattgaagaacatggaaaaataatctgttaaagtcttgaattgtgattttttattttcttgaaatttcaaaaagtatttttgcaataaatgaaaatgaaaaaggaaattttaaagtagatcatataagatgtattggtttga

SEQ ID NO: 36077 - DNA, 1029 bp, Homo sapiens
cgttttaaaacttttttattgatgcataacggatgtacatggtcctcctgccccaccccaccccccacccccacaacatgttttttggagttttttctggtttttgtttgtttgtgttttggagacaaagtctcgctctgtcccccaggctggagtgcggtagcgcaatctcggctcactgcaacctctgcctcccgggttcaagcaattctcctgcctcagcctccctagtagctgggactacaggcgcatgccgtcatgcctggctaatttttttgtattttagtagagacagggtttcaccatgttgcccaggctggtgtcgaacccctgagctcagtcaatctgcccgcctcggcctcccaaagtgctaggattacgggcatgagccaccacgcctggccacagatggttttaaaagcagtgtttatctttatgctttttcagataagtttataccatggatagcacaaaggagaagtgtgacagttacaaagatgatcttctgcttaggatgggacttaatgataataaagcaggaatggaaggattagataaagagaaaattaacaaaattataatggaagccacgaaggtatgtttcttgtttcttttgatgtgtgtaatttaatgaccttttaactttctgtttcaaagaaaatcatttgaatatcatttgtatttaatatttcaatattttaatatatattatttttaaactacaaaagggtatggaataatctcccttctattctgttgctcctaccatccaggtttctatttcacatgcatataataggcatttaaaaccaaaataatgtatatgttcctgttcacctttttttttaaccccagtgggagaaattgtttaggtatttggatttttttttttcagttaatataacttggagctctttctgtataggtaaataaagatcttcattctttgtatgcctgtgtgtgtggatataatgtaatttattgaaccatccaaaaagtttatggataaatatatgtcatttgtagtct

SEQ ID NO: 36078 - DNA, 1035 bp, Homo sapiens
caatagataactgatgatccaacccactaaggcctttgatacccactgtggatcctacctaggacatactgttcttttctgaatgcaaacctgtattcatctcagagagcttgtgctgtgctaagtactgctcacaacaatcctgtgatttagttaactactaataaattcatcttacaaataaagaaactgagatgtagaaagattaaataattttagggtcacctagctagtaagtagtagagctaagttttaaatttaatcttctgtttcctgagtatgtgctcttagccaccaggttatactacagtgatgctttccttcagacatttttcttatgctttgttttgttttcctccataggggtccagattttatggaaatgagctcaagaaagaaaagcaagtcaaccaacgaattgaaaatatgatgcaacaaaaagctcaaatcaccagccaacagctaagaaaagcacaattacaggtattaattaaattgttaaataaagtggaagctggtagaatagtaattgacagttaaaatgtattgtcaagtcataactgaaaacaagatgaaatgtaaatgttcattatattgtaaagcatacatattcagcaaatgaacatactttactttgctaagtgttgctctgctcatttacataaagactccacacatagacattgtcacctctattatacagaagagtaaatgaagtcttaattaagttgagtaacttgcccagcttgataggacaggtagttagcagaactaggatttaatccaaagcctatgttctttttattgtatacatcgcagctagaaaaggccacgggataaatgtggaatgttttctgcaatgctgattttgcaaaaaaaatttgaggaatatgttaactaattaaattggagagtaacttaaaacataatcatgttatagtaaaataaaaagtcacactatagattagaatgccaaatgtacatgaacttttaagacaaaacacaagacttctaaaaccttggaaggtttttgcc

SEQ ID NO: 36079 - DNA, 1049 bp, Homo sapiens
cggtgtttcaccatgttagccaggatggtctccatatcctgacctcatgatccgcccaccttggcctcccaaagtgctgggattacaggcctgagccaccgcgcccgactcataaatttcatatagctatctttttctagcacaaaatatatttttattggttttgcatgtaataacttgagtattagtttttccttgggagacttcaatcctgtccaagattacattgcaggagagaacccagacggccacaaggtaagagacaaaagaaatactaactagcaacatagcaatccagaacaatctggtaaaaggaaaaacaaatttacatatgttgataacccatgaggccatcactgtctcttaacataataactgttattcatcatgaggaccctgaactatcttgtaaaagccatattgtgattaggtaaatcttttctttctacaccaaagcatgagaatgaataatgcattttaggaagatctatataacaattaaaatgaactgtttaatgaatatatttgaatatagctatttcaaattatcttaattaggactcctagaaattgtgaaacatctttttgaaaaatagtaatttgttttgtgaataacataaaaaggatacaccatctaattatcattattttaaatatactgtaaccagaatctttgattttttgctttatgtggataatctacgcaaaagacattttcaaagagtaaacatccaccctaaattatattctgtatcttttcttagagatagatatagaaccactataaaaacaatctgggctgggcatgatggctcacgcctgtaatcccagcactttgggaggccgaagctcgtggactacctgaggtcaggagttcgagaccagcctgaccaatatggtgaaacccccatctctactaaaaatacaaaaattagccaggcatggtgttgcgtgcctctaatcccagctactcgggaggctgagacaggagaatcgcttgaacccaggaggcggaggttgcagtgagccaagatcacgccattgcactc

SEQ ID NO: 36080 - DNA, 1031 bp, Homo sapiens
cgtgaataaacaaagtttccagacatcacaaccattccaagttttaaagaagaagatgaatgagaatttggaaatatcagagaattcagatgactgtcagatacttacctgtcctgtttgctttagggctcaagggtgcatcagtctggaagccttgaataaacatgtagatgaatgtcttgatggaccttcaatcagtgaaaactttaaaatgttctcgtgttcacatgtttctgctaccaaagttaacaagaaagaaaatgttcctgcttcttcactttgtgagaagcaagattatgaagcccatccaaaaattaaagaaatatcttcagtagattgtatagctttagtagatactatagataactcatctaaagcagaaagcatagatgctttaagtaataagcatagcaaggaagaatgttctagtctcccaagcaagtcttttaatattgaacactgtcatcagaattcttcttctactgtttcattggaaaacgaagatgttggatcatttagacaagaataccgccagccttacttatgtgaagtgaaaacaggccaagctctagtttgtcctgtttgtaacgtagaacaaaagacttcagatctaaccctgttcaatgtgcatgtggatgtttgcttaaataaaagttttatccaagaattaagaaaggataaatttaacccagttaatcaacccaaagaaagctccagaagtactggtaagtgtgtaattgttttaaactgcatgattttctaggaatatgtattattaaaattaatgagattgttgttaaatctgaaacatatactattaaatgggtagtttgtgtatgccgccatttagggaaatgttggttacattgccataggttagaattaactcaagcctgtagattgtgaatttggggaaaactttggtttgatcttgatttagcacagaatgaactcaaaggtttaaggagctgagtgatctaatcaaacaaattccttcagagaacatctgtgaaggcacagtggtaaattaa

SEQ ID NO: 36081 - DNA, 1048 bp, Homo sapiens
atcaatgagttcttctcaaaaaataattagttaggccaggcacaatggctcacacctgtaatgccagccctttgggaggccgaatgggcagatcacttgaggtcaggagtttgagaccagcctcgccaacatggtgagaccctgtctctactaaaacgataaaaaaaaaaaaaaaattagccaggcttggtggcacacgcctgtaatcccagctactcagatggctgaggcaggagaactacttgaacctgggaggtcaaagctgcagtcagccaagatcttgccactgtactccagcctgaagagcgagactctgtctcaataatataataatagttattatttaattgcaacatgaagttggaagccattttctgttacttctttaaggagctaaatcttttatatttttgttttctctccccttgcgtttcatattttagcttatgatctaaatatatattttgtatattataatattttaggaatagcttaattaagaactcacagactttgacaaagtggtaactagacttttaattactagattcttcaaattaggcttaatgcctgctagcatgccaatccaatcccatgactgatgttattatacactatggcaaatacaaagttgtagtattatggttcttgatggtgtgatttacttatgtaaattatgtacaaatttaagttcaatgaaacactgatttaatgtactgaaaggtaaatagtaccatagtgaattattttctgtcttgccttaggtttatttttattatcttcaatattagaataaatgctaaattattttcatttaaggatttatgtagttgaatattatcatttagtaatatttaatcatttgaaataaaatttaaagctttaattgatctaatagagatggttttctacttttccactcttcctccctcttatgccttcacttttgttttctgtgcccagaattttcttcacattctttactacctgttttgtctattatatccaacccattttctttttattataattttgatttggggcattt

SEQ ID NO: 36082 - DNA, 1035 bp, Homo sapiens
atgctaatattttatatcattctgctatgctgctgctctgttattttctgggtggagatactgcaatgtaggtgatcattaatacatatataggtcaggtaccaagaattagctctctgttacaaccagatgctgtttggtcattagccaaatatgggaaattattgaacttctcctttccaacaggccttgctggtatcaaagagcctgagagaggcaagaaataaatttcagtttgaggcaagtgatagaagacaaaccaataagttaattttggagagaactgagattagagttaactattcattgatttgaaaaatattcactgggtgcctactatatgcaaggcactgggtatagagccatgaataaaactgaagagctgtaaaatcagaacaacagatgacttatgaagcattccaagtcatggagacctgagaactctttggggaagaaatgaaaattacctggaagtagtcattttatataccagctcaagcttgcgtctttccttttcctctttctttcttactttcaaaaaatgttcctaaaataggactctttcatctgaggtatcaatgaagcctgttagaggcatcacaggagaagaatcagttcctcccagtatgagattatagggaggaagaaaggaggaatgtgacctcttccctttgtggtccttggccactagatcctagggatttttaaagggactaagcaactaaagcaagagaagtaaacacaagtggaattccaaaatctaattacaaaaatatatacaaaacaaaacctttaattgctttgtctcaagatctgtaacaaggaataagaagacagcaaaaacaaagaaaaccgttgttcctattgtgggttattttgctcaagggaggaagtgggtttcaaggtaccatgcattggctgcgcgcggtggctcacgcctgtaaccctagaattttgggaggccgaggtaggtggataacctgaggtcacgttatccccatctctgccgaaaatacaaaaaattagccaggcatg

SEQ ID NO: 36083 - DNA, 1076 bp, Homo sapiens
ccccgctcccctcgcgcgggaggattgctgtgtggagaggacgcggcactaggctccggggaatccggcgggagcccgcgtgacttgaacgagatggtgtcgattacccagccaggggctgccctcggaaataggttgctttggccgatcgtgagtggatggagccagattaacaccaaccacgtggcttcatgtgcagagttcagagtcctaaacatgtgccaggaagcatttcctttaaaacaaacagaaagttggcctgctgtctctccaaggtggccctgtcagtgaacccaaggccgaagaccacaggttaatctttgcccaggctggccttggtggcagaggtaccaggtttgggttaaggtggtgataccttcagcagggtgttttgtttgtgtgtgtgtgtggttttggatggtgcgtaaggccactgacttgcttaactgaaaaagggctcctcaacttgtgtaggttctttcccctcctccccgctggcgtgtcaaagatgggaggttatctttcctgtgttacccttgcagtgagggggaggcctgaggactacagcctctgtactctaatgcattcagcagttgactgagacccagctttttgccttttggtaaaccacacagacagcagagcctcttgggttcaagagggaacgctgtgctcattcagtgtttgcagtgccaacctcaggtgggacccagctttttgccttttggtaaaccacagatacagcagagcccgttgggttcaaggaggaatgctgtgctcattcagtgtttgcagtgccaacctcaggttggtggaagtactttaatgtgaccagctctcagaatatatggtggcttcactgtgtcaaatgataagataaccacaaacttctgcaaactaggtgaatctacatgaacaaatgatttcttgctatcacatgattgatgtcggccctcatgagcaataaatagtgcaaaatttccgtgaatgtggtacatgaatgcagcatttctgtcagtccctgcatgtgcatctgtgatgctgcttgattttcacggaataaatctgtgttttaa

SEQ ID NO: 36084 - DNA, 1020 bp, Homo sapiens
ggactaaaaaaattcacagccacgtaaacagaaaaagcacataagccatttcatgctacaccatggtgctaattcaatgaaagattagcttgagtagaagtcaggaaagctatatcaagaatgagttaattgtaaatgggggaaaaagcatgaacagtgtatattgtgaagaattaatgaaaataattgcgttcagtagcaaaattcaagttaacctaaatgcctagcaattggggagtagttcaaataaattataaataaaatatttatattaggaatatgatgcagactttaaaaagaatgaggtagctctatatgtaattatataagaatatgtccaagatctgttaagtgaaaagattgtttacagaaaaacatgtatgcaatgattcatgagtattttatcttaacgtgtacatatatatgtaaaaattcaggaaatagtcttaaaaattgcattaaattgttagtggatttctactgtagatgagagtaggacttgggtgggtaataggaaggagaacccacttctcactctatagttctatgctgtttaaatttttagatgtattacgttttcctatattgctcttatgatatgaattgctatgtgagattttaacttttaaaatacattaaatttaatttataaatataaaaatataaaatgtttcatatttttataaaatgtaaagtttaatttagttaatttggtaaacatttttcttcctgggactgttactgaactttactttcctagtattttattatatgaattggtacagtaggtgtggcatgggcacagatgggcactagtctgtttggcatgctttgtttggcatgctttgtagttgcgagagaaatttaagaatgccagtcttggccgggcacggtggctcatgcctgtaatcccaacattttgggaggccaagccgggcggatcatgaggtcaagagattgagaccatcctggccaacatggtgaaaccccagctctactaaaaatataaaaattagccaa

SEQ ID NO: 36085 - DNA, 1048 bp, Homo sapiens
ttttcaattaaaataaaatagagatgagatctcactatgttgcttaggctggtcttgaactcctggcctcaggcagtcctcccaccttggcctcccaaagtgctggaattacaggcatcagctactgtgccttaaagtattattaagaatttgtacttctctatgatgtagactttattctgttctcttcacccaagaaaattttggtgcatctttattcttggttaggcctccataccaccttcaattcatcaattatctttttggttttgccactattatgactggtttcaaagaatgcttggctttttgttgaaacatcaaaaggtatgagtagcaaacagcactgagatctcttccttcctgtgtgaacctccccaccggaagctgcctcatgctgtgatgcttaaaagtcataaaacggtatcattattcaaggcatagagtgactttagggaagctggtgggggagaacatttgtacaaggttgtcacagaatgatttctttgtgtcttccatttttagggtgatatagaatgtagagcgatcttccattgccttctcagtctgaacacctttgtttttctttaacagagtcaaatccccatttcatatatggggatactgaggctcagaaatttatctcacttatccatggtggagttagtggtagatttgggattaggataaaggtcttctgactgtttgacagtgctctttagttccatgagtctctatacaccatgttgagtagtaaaagtagaaagctcaaatgagtctctataaatcatgttgagtagtaaaagtagaaagctcaataaagaaaaaatataaacatgaatattaaacttatttggtagattcagttcaagtttgcttttggttaaatgctgcaaatggtttgggggaattagccattcatatgttcttgtccttgatctttcatttttgctgagaaacttgaacccattttggtgcaagaacaggaattcaggaattaacatttctagtcatttctgcactctgtactccgtcctacttggcttaa

SEQ ID NO: 36086 - DNA, 1029 bp, Homo sapiens
ctatctagaatatatgatgtttaatattttagtcacctgcatttatcataactgagcatttgatccatgccaaacactgttttaagcacaatagtgtttttttaatgtaatatataatagtgacatttttacacactttgattgctgtgtaaatgtttattggtatttctttctttcttttttttttttttgagatggaggcttgctctgtcacccaggctggagtgcagtggcacaatctcagctcgctgcaacctccgcctcccaggttcaagcagttttcctgcctcaacctcctgagtagctgggattacaggtgcccaccaccacgcccagctaatttttggatttttagtcgagacagggtttcaccatgttggccaggctggtctcaaactcctgaccttgtgatctgcccaccttggcttcccaaagtgctgggattacaggcgtgagccaccgcgtctattggtactccatattgtcagtttgaatggggggatgtggatgcggatcttacacttaggatcactgtaagaaaaaagtttatctttatagtattatttattaattgaagttggcttttatttgtacattggtatgcaaattcaagtttgtagatgttgcaaagtggatattggagtctagccattctaacacttcatcataaggcagcttccctcctccacttcaccacccctccaggcagatctgcatgcagtggtgctcaggcacatgtatgtgcttttttttatgcagcgaggttagagaatggggggcagggtcttttcctacatggggtaggggtgcattggccagacactgcatctgtctgttctccactctgtcctggcacagctcacctccagaacacagagcccaaagctgtcctgaagcagtgggtcagaaaacatgtttgaatactcagacacatggaatatgtccagtccttttcaaaattcaaaatggtagaaccatattgggaagccatgactggggacaaggaataagctttatcaggccctagtc

SEQ ID NO: 36087 - DNA, 1032 bp, Homo sapiens
acaggatgtgcagatcgtggattgcagatctgggctttgttcacagtgaaacaaacaatgctgcctgtgctgctctagtcacttaaccggacatctccctgatgctgtcaacttcagtcccttttaactggtctcctgctgcttcccttgtccccacttgctctgttctcaacatggcagccagggtgatccatttaaatcttaagtcagatcgcgtcacttctcttccccacactcacggtggctctcgtcgcacccagagtaaaagccaaagtcctcatgaagatccacagggccccgcccgcccctcaccacccctctggcctcatctcctgctcagcccagccactctgagcacactggcctccttgctgttcctctcacccctataaagctccccaaggcccctccttccctgtgtgtctccatgtctgatttctcacctctttgaagtctgctgaagtgtcactgaccaccctatttacaattgtaacctgtcccccagccctaaccctggcccttctgacccctctgaccctgtcctaccttttgttgtcatgactgattaccttctgccatgatgtgtcatttgctgttgtttcttgtcagatcctccacactgctccccccaccccataggtggctctttttttggaattaattaatttagtgattttttttctttttatttggtaggctctttaaggcaggaatcagcttctgttttgtttaacgatgtgtctcaaatgtctagaacagtgcctggtacaaagaagaagctcagtcaatatttgtcgaatgatttgtaatttatttgctcttactagtacggcctagttaacttttccccactaccaagtggattttgtttatgagaaagaaaggttgatcctgtcacagcctaaattccaaatatagttgccccttggtatcctcggggaattggctccaggagcccccacagatgctccagtccatgctataatgtgatgtagtatttgcatataacctatgcacatcttcccatatatg

SEQ ID NO: 36088 - DNA, 1050 bp, Homo sapiens
tgtactggccaccacctatggcccttgaagtggggagaggttggtgttttggtgattagactttgaaatattttatgattccatgtactcagcatatcctaagtttctggctcactgaaaaaacttagcaaggcattgttaagttatgggcttcttacagtttggaactcccggataaggaaaaaacaaacattctaactgtctcacaatagtaagagcaaaaagcctgtgcagtccccaccatggacattgtgattgtgcatgacatacatattcaaatttagaacggagagatgcttcagcattctcttggaccaattgtttttcagaatgcagggttgaataaacaagtatctacatatttccactcttctgaatgccacatatttgcataatgctggacttttcaatgtttttgtagttcttcttcattgaatgcatccaaattgtgggaatgtggcagatggtgttatatccatttgacagatgaggaaactgaggctcaataacttgacttgcctgaggtcatgtcacacttctgtagcagagacagaaacagagccaagccctcctcattccaaacctcaggcaggagctgtggtgaaaagcagggagtcggtttgcatcttggctctttcatatgccagcattgtgaccttgggctgttactgaacttcaaagcctcagttttctcctttgtgaaatagggagactcccttctcttagggtttttagggttaaatgaaaatttacaaccgtccctaaaccttgcaagcactcagtaaatggcagctactgatgtggtttatgttggttttggcatactgctatttgcacaactgggtgttagttgagcttacctggtgtatctccttaaggcccattggatctgagtatctggcattctaggcccataattcagaatcagtggaagagacaatgttgatacatctctgaggcttggttacctgggagctggcttgatgtctggggttctagatagtgcccccaacaggagagttgttacggggtgggatgaggggctttgcc

SEQ ID NO: 36089 - DNA, 1025 bp, Homo sapiens
cgtttttgtctgcagatgtcaaataggcaaggcacagctgaataagacatggaaatgtagcttgttacaagtatagtgtgtggaggaatttctaatctctttctgtccaatcagctatgcagtaagagctcagttttcatcctctagccctgaatagaatgggggcatcatcagcaatctattctggagcatacatttttaaagtgctttgaagagaaaaattttcatctactaagtagtgaagaactcctgattaataatcgcatttcttttaatttgtttaaattgagatgattaggagaaaacaaagatgggggaaagattcaggattttagagagttattacatcctgattcgggtgattatccgtactctccacctcggacacactgtgagctttatttacgtacattttgaggcagacaagattagctagatcccaggtgtccattaccctgtgaccttttaccaatacaggtaagaaatcttaaactcaagcagaaacctgtacacagctgatctctttaggagtctataaatctggggcatgtgctgtgagatgtgtgcaagccttgttgggtcactctctgttaggagaaggccccccagttaaggcaaaggacaacccaacctattcccaaattgacctgtgtagcagaatcagctttggtcttaataatgcaaggaatcaaagagcctttggtgttgaatgaagtatgctataccttagccagaagcctcacttctgacctgtgcttgatatcctgtgtattgtgacttgattatccatacatttgacttttcaagactccctgaggctgggataattagaatagcctggtaaagccatttaagagttttttaaataacaatttagggactgtagtagggttcctgttgccactgttctccaacagcacccagcatttgagaatcagttagtaccgatccgatccagtgatatataagcaaaaattctgattgtgggaaaacagaagagaaggcagtgttggctgttcaagcca

SEQ ID NO: 36090 - DNA, 1078 bp, Homo sapiens
atgtatatttttctgctattgtgaataacatctttattctattgtgttgtttattcttgacatgtagaaaacttatcaattttatattcattttataactagtcaccaggatgaactcttagttctaataaatttttagttgatcctcttgagtcataactaccattgacacttctgatttttttttaaatctttaattttgtcaaggaatagattcacatagccttaataatatagtaagctttaaggacttaaaaattatttgggcttgcctctgcttctggggaaatggaatgcatgttcttttccctattcttccgtaaatacaactaaaagcctccaatattatatataaacaaacataacactcttaaaagtgaagagaaaaaagtcagactaagtagtgaaccttgggacccaaggaatgacatagtggtgagttctttgagttttctttttgtttatatttttctgacctggagctggagaggctggccacccagaaatgccaatgggtacaggctctgatatggtttggctctgtgtccccacccgaatctcatcttgaattgaacttccataattcttgcatgttgtgggagggacccagtgggagataatttgaatcatgggggcggtttcccccatactgttcttgtggtagtgaataagtctcatgagatggtttataaggggtttccacttttgcttctttctcattctctcttgctgccaccgtgtaagaagtgccttttgccttccaccatgattgtgaggcctccccagccacatggaactgtgagtccattaaacctgtttttcttcccagtctcaggtatgtctgtatcatcagcgtgaaaactgattaatacaggctctagtgaaagcctgctctctgtagccaaaggaccaagaaagaaacaggctagcaagacagaaataatttcagacagtaactgctctactctagccaaacaccacacacacacacacacacacacacacaaacgaaaaaaactgtaatgcctccacctaggcagcaaagcctgaatggcgagcctggacttccaccctcctg

SEQ ID NO: 36091 - DNA, 1065 bp, Homo sapiens
cccatatcccatacccgccacgttcatgtttaattaaaaacagctaccctctgtggagtactgactacagctgacatccttcttagggacgttacaatactatcttatttatttctcacaacagccctttgagtagatgtcatcctcattttactggttataaaacagagacccagaatggttaagtcacaagttgagaaagaggtggaattgggactgggtgcggtggctcatgcctgtaatcccagcactttgggaggccaaagcagggggatcacttgaggccaggagtttgagaccagcctgaccaacatggtgaaaccctgtctctactaaaaatacaaaattagctgggtatggtggtgcacacctgtagtcacagctacttgggaggctgaggcaccagaattgcctgaacctggaaggcagaggttgcagggaactgagattgtgccactgcactccagtctgagcaacagagtgagactctctctcaaaaaaaaaaagaggtggaattgggagttgaccacaggcctgtctctccgaagtgcaggctttctctaacaccccctatagaaaggaagccatctagactcccagcacctcttacagtagagaagtaaccccactgtgctccctagtacagtatggatttacctatttttgataattcatcaaaatatagaagcaaagtctgtgccctatcgccttggtagctcaggcccagcacagggaggtatttagtgagcatttatgcacggactgtggtattctctcatttactttcgctaacagatgataaggcaggctctgaaaagatccctgctcatgaatacactaattaatcagatgttacaagagatattgctagtaaacctaaacagaaagacagaaaactgagcagtggttctaccgtaagcagaccagaaagctctataaagcctgaaagtcagatttcttatgagtcagcaagtaattttctgccctactatctatctatctatctatatctaataatttttagtggctttgcctttatttttatagaacataccagcatagcag

SEQ ID NO: 36092 - DNA, 1033 bp, Homo sapiens
cgtcaccttccctgttctcttctgctacagttacttaattataggactactgtttaatgaaaaaatgtattaaagcttgtaagtggcattaacatattcaggtggatagttaattcccagtggagaataccaaatgagtattagataatccagtagggatgagaatttgtaaattttgaatttttgaattctttagaactgactttaaaatgttaacataaaagcattcttatttgttagaaataaaggaccttgttcacaaagtctcattatttagttcgatttttggaggagatatttggacatttagtaagagagattaggaataaaaatgccttttaaatgtataaagtaaaataataattttagcttttctgaaagggaaacttgctgctcttgacatttctctaaaacaattatttgtaacggtaggagactggtatatatattattagattgttacatgatttctttttcctaaagccttgttttctctcaggtggaagaactcagtaaaatactccaacgtgggagaaatgaagataataaaaagtctgatgtagaagtacaaacagagaaccatgctccttggtcaatctcaggtatttagcttatagtgaggatatgctaacactgttacattcaaatcatgctaatgttgcgttttcttttaatttaaaataaacaaagatcaaggtaaatgagaattgttaatactgttgacgtctctccatatgataatggtattttcggataatcaatttgttcttctggaggaaaaagtagaaatgtattgtcattcctgtgatttctataatgttgctaatgttttcagtggcacactcactgagtaatttttggcaggcagttagccatctacttccatatctgccttccttgtgaccaggggcatttgttttcttgttgatgtgttctaattagaattatgtatagtatcagtctctcacccttgtgggaatggtgagcccaccaccatggccttatgaatggcattatgttataaggcaaaata

SEQ ID NO: 36093 - DNA, 1049 bp, Homo sapiens
tagctgggattacaggcatgcaccaacacgtctggctaatttttttgtaatcttagtagagacggggcttctccatgtggtcaggctcgtctcgaactcctgacctcagctgatcctcctgcctctgcctcccaaagtgctgagattacaggcatgagccaccgcacccggccaggaaaatattaaaaaaaaaaaaaaaatccattgctgacaactgtggagtgagataacatatttattaggattaatagtttaaatggcctgcaagacaatggttaagaaagcgatagttacatttaatttaaaaaagtattatgtaggctttcagatggtacttgtaaagactaaggggaaccccaaaaatgcttatgatgatgcaatgttaaattgaaagaaggaaaatataaaaagttaacagtgttctttatttctactctctaaacaggtaagtttggtggtttataggttataaaggaggcttgtttgttttattgatattttatgaactgtggcaactatttgatatcttactcttgaaattttatctcatggtttcctgtcctgtcctttcctgtcctatctctgtcctgtcttgtccttctgtcctgtcctgttctgtccttctgtcctgtcctgttcttttttgagacagggtcttgctctgtcacccaggttgagtgcagtggtgccatcatggctcactgcatcctcgacctcctgagctcaagtgatctgcctacctcagcctcccaaagtgctgggattataggcgtgagccactgtgccagccagtttttcttttcttaaccaaagaaaaattacttgatactaaattgtaaagttcacataaggaattaggattctgttagattttttctgttctcctatttgatttgcttctgttctatttttttgtgaacaatacttaggaatagaagagtatgtgactaaaatactaaaaatcagttttctgtttgctttcaagatctctgttttaatggcttgtgcttgttactagtggtttgattgtttgaaaggctaggttgtag

SEQ ID NO: 36094 - DNA, 1689 bp, Homo sapiens
gtttgaacttggtgtgaatgaccatcttagtgattcttactgcaatgacaatagggagttaaatgacataagtttctttttcatgggaaaggatataaaaatgtatctgcatgtggtcagtgtagaatattcccagccagaggtgcagttttctggatccctcccacagacattgtgtggaagcacacctattaaccgataaggggcgaaatttcaccagaatagagaagcatcctctttgcccttttcacaggggtggggatgaggttaggggtggggttataccttctttgctcacccagctgcttctatatatcttagcctggatatgcctaaacttaagccaaaacaaaaactcatagacaggtagtttatttgcaaaatgatactagggatcaggagtaaggaatgagagtaaagcaggggaggaagaaaagccactgcaagcatgcactgtcaacagaggaaggaccaacaagcacatgaaaggtctcagtgttactagtcaccagaattcaaatgaaaaccaccacgagatacctactagatgcctattagaatggctacattaaaaagactgcagcaacaaatgttggtgagggtgtggaacagtcagagctctcatcaattgttggtaggggtgtaaattggtacaactttggaaaggtctggcactttcttaaaaaactaaacacacactttctatgacccagcaatttcattcctagatatttgcccagcagaaatgaaaatatctgtatataaacagacttgtttaagaatgttcatggcctggcgtggtggctcacgcctgtaatcccagcactttgggaggctgaggcgggcggatcacgaggtcaggagatcgagaccatcctggctaacatggtgaaaccccgtctctactaaaaatacaaaaaattagctgggcgtggtgcaggcgcctgtagtctcagctacttgggaggctgaggcaggagaatggcatgaacccaggaggtggagcttgcagtgagcagagatcgcgccactgcactccagcctgggtgacagagcaagactctgtctcaaaaaaaaaaaaaaaaaaaaagagtgttcacagcaagcagcattatgtgttatagtcagaaactggaaacaggccaggcacggtggctcatgcctgtaatcctagcactttgagaacctcagataggaagatcgcttgaggccaggagttcgagaccagcctggggaacatagcaagaccctgttttcacaaaaaataaagacattagccaggcatggtggcacacatctgtagtcctagctacttaggaggctgaggtgggaggatcacttgagcccaggagttcaaggctgcagtgacctataatcacccaccctgggtgatacagtaagaccttgtttctaaacaaaacaaaacaaaacaaaaactggaaacagcccattaacagaagaatggataaaaaaactgtggtatgttcatgcaatggaatattgcccagccataaaaaggaatagagtattgatataataatatgggtaaatattaaagcatgctgggtgaaaaaagccttacgcaaaataatatggtattttcctatttaaagttctagaataggcagaactaatctgcaatgaagaaaaatcaaaatagtgatctgtgcagatgtgggcgtacaagta

SEQ ID NO: 36095 - DNA, 2007 bp, Homo sapiens
tataaaattgtgcagctgcaatggaaagcagtttggtggttcttcaaaaagttaaacagagaattaccatatgatttagcaattccactcctaagtatatgcccccaaagaattaaaagcagagactcaaatagatacttgtacaccaacgtccacggaagtgttaatttgcaaaagccaaaaggcataaacaattcaaatgtcaaaacagacgaatggatgtatacacatacaatggaatattattcatctttttaaagacaagaaatttgggtatctcctacatcatcctttcaaggatgaaccttgaaaacattatgctaactaaactaaccacaaaaggaaaaatattgtatgattccattaatatgaagtacttacaacaaacaaattcatggagacagaaagtaaaatagaggtttccagggtctgggggaatagtagattgggaagttattgtttaatgagaacagagtttcagtttagggtgataaaaaaaattctggagatggatggtgggaatggttgcatgacagtgagaatatacttagtgccactcaactgtacacttaaaatggcaaattttatgttctgtatattttaccacaataaaattaaatctcttaaaagttagttacagccgggctcagtggctcacgcctgtaatcctagcactttgggaggctgaggtgggcggatcacgaggtcaggagatcgagaccatcctggctaacacggtgaaaccccgtctctactaaaactacaaaaaattagccaggtgtggtggtgggcacctttagtcccagctactcaggaggctgaggcagaagaatagcttgaactgggaggtggaggctgcagtgaactgagtttgtgccactacattccagcctgggcgacagagcaaggctctttctcaaaaaaaaaaaaaagttagttactactgttcaagaataaattgtgccttatttgccaatatacgtcatttgaggaggatgacaaaaattgaagagcttgatggaattcagttttgaaaagtgagatctatctgtgtttcctacaaactttattttttttgagacagggtctctttctgtcacccaggctggagtgcagtggcacaatcacagctcattgcagccttagtctcctgggctcaggtgattctcccacctcagcctcccgagtagctgggactacaggtgtgtgccaccatgcctggctcttttaaaatttgttgtcagggtctctccatgttacctaggtggtattgaactcctgagctcgagcaatcctatctgccttggcctccaaaaatgttgggattacaggcgtgagccacagcacccggccctacaaacttttaagaagataaatgcttgtagaaatttaattacattttgcttctatgaattcctgatgaaaactttctgaaatctgtcataaatacataatcaaaagaaaaaataaatatctttaatattttcacatccctgagctttctgactccttccttagtgctatggcaagctccagtccaggcaagttgcagcttctggactttatttattataggccactattttgtccaagcctcaagaaatcactcttgcagtgtattgctacaggtatccttgccaggacactgagttttctgatcaaggaagggtgctcccaggtcaataaattcaccattatccagctttctattccactcacccaccctagtgcaacatcctcaagatccactttcacaagcttatccaggttcctgcctgtatacattacccaggtgaatggtttggctctgtgtccccacccaaatctcatctcgaattgtaatccccatgtgctgagggtggggcctgtaatccccatgtgttgagggagggaggtgactggattatgggggaggtttcccccatgctgttctcgtgataatgagtgggttctcacgagatctgatgattttataagcatccagcatttcccctgcttacacttctc

SEQ ID NO: 36096 - DNA, 1076 bp, Homo sapiens
ctttgcttcctctttgccttccaccatgattgtaagtttcctgaggcctctgcagctatgcagaactgtgagtcagttaaacctctttcttttataaattacccagtcttaggtatttctttatagcagtgtgagaacagtctaataccccaggtccttcagtttctttagtaaactatttcctactgcagcagggatacatttccccacctgcttgagccaaaacctgactccagttatcatggagtcagttaattggagatggaaggagaccttgaggaagacagacatcactttgcaaagcaagattcaggtgaggtattttcagggtctcctggcaagatgaggctgatgtccccagcaaggagaagaaggctgactttgctctcctagaggatgaaaattaatctagtgactcaatattctcagacttgtctatcctatcccagctcttaagattttaagcttttcctatcagggttctaactttgaaataggagatctgtgaaggcttggcgttctgtctcctctatgactttgtcaactgttgtcttaatcttcaagacagtattccctgtgcctgcaggagatcaaattcttttaaccattgctctatttcaccgtgggcttgagttgatagttgtctaacatgaccctgtcattttcttattttgagactttcaaagcagttaacaaaagccagtgaattccccattcctttacaattataattgcctccatattgtccaaggaccatagttaccacttgacccagagcctctcccttccacctgtacctcatcccaatccaccacaggtgagaaccttaattgtgttgctgctggatctgcacttaccactcaagctgtgatgggaatgatgagaaaaacgttcttctcttacagtgaccgtcctggctacctgcaaagtatgcttagaattctagattcctttgaagtctgggtaaagatctcccaagggctggctgatggggacatggggattcttaatcctgttcacctacaacgtgccatccaaagggaacctcagaagtagtaattgcccacctttatggg

SEQ ID NO: 36097 - DNA, 1081 bp, Homo sapiens
tggaatgcagggagcccaagaattctgggacttgctgagttggaaaataaacttttgcatctccaatatagttggcaagtcagctatattgggccttctgtcctggaaggttccacagttcatcctcacagggttagatacctctcctggctttagatttgcctttccttgccacagagcttcagcaagccccactacctggggccgatctgtagtcatggaagcacacacagcataatattgaccagaggatcacttcatcgcaaaggaggcttgggaataggacaatgaccatgggatccactggtcatatcagatactgtatcacctagatggagccagcctcataaagcattggaatggttactaaaggcacagctggagctccagctggaggcaatgctctgaaagaacagggtaccatcctgcaggatgcactgtatacattaaactggggttctccatgtggtgctatgtcctcaacaggaagaatacatgggtctgagaaccaagaagtggaagcaggagtggacccacttatcatttccaatgacctcctggggaactttgtgcttcttgtctctacaactctgggctctatgagattagaggttttggtcctcaaatgaggtgcagcttggcaggagacacagcaagtgtcccattgaactatatactatggctgccaccagggcattttggactctttctatgaagagaccagcaggtgaaaagaagaaatcattgacttccatcagcagaaagaggtgaggctgcctgtacacaatgggacagggaggaaggaatgtgtatggatcccaggtgatccctgtggtcaagtttttctgtagtcttgcccaatctgtgatgtgactgccaacagctaagaccttctggaataaagataatgaagataataaagagggggaggggaatttagattggatagtgcaggtaggagaagatgactatgggttgcgatctcaagacaactggcggcactaggggctatagttcctcccattaacttctctcttctaagtatttcctcaagaagagggcccacaggagccatggggaa

SEQ ID NO: 36098 - DNA, 1034 bp, Homo sapiens
cttctgaatgtgtgaaccctgaaagagtccatctaaagctaagttctccccaggggtagagcccaatgctgggcatacagtagggactcaatggatatttatcaaatgaatgaatacaggtggaattcagatccgtttggcctctcttttctgtgactggggaccactgaacctgagtcactaagtgataactcacaacacaaattttcttcttgttccaagcagccaggacccaggttctaggtatctaaaaatgctgtgcctgacttgagttcgcaatgacattttttatcaactgaaaatgtttacttctgtgcaaccagccaaagctgggggtaagcagcccagtggggtgcgctgattctatcttagattacgctgtgcacaatggactctttgtaaagtccttatggcggggagtggccaggcaggcatctcctgcacccagctctggagactcacttgccacaaagctgaagaaggacggggcagttttaatatacctggcttagaaaagccacagactgttggacttacatgtgggtgtgtaagccccacacagaagcagctttttctccagcattgttaacaaagctcatttagaggaatgcaagtctggggcacggcctggatgggcagcatgacgcacacaccacataagctccagacgctcactgatccccttcacagaggctgagcctgcccacccaaccctgccctcgccctcaccctcacctccgcagccggacctgggatagcactgcttttcttgagaggactgagtcttagcattgaggatgggaaggggagtgtaagggctcttccaggagagaatctcctgcttatttgcatggaggaagaagggagcctttcccagtgcctacacgtctgagtcccaattgtgagagaaaatgaattgcttaaagttgcagttctcaaccagaggtgattcccctcccaggggatatttgcaacacttggagggatttttcatggtaatgacttgggaggggaataagggaggtggtgctatg

SEQ ID NO: 36099 - DNA, 1063 bp, Homo sapiens
cctcactgctgacgtcaagctagcctttcattttatttatacccatgacactgtgacacaggatctaattttccattgtattttttcctctgttgggaaccaagtgatgacaagtaaatttgtgcctgagcctggaaaatattttaaatttgaagacagggacgatacgagagtctaagtctatctccatcctgcccctctccccttgaattactaaattaactatggaacagggcaaaggagtaacactctgacagggcatggcagcctgagaagtcagagctggaagcatccagttgcctgctcttcacttgtgtcaggctgttccttcctggcacgggggctggagggaggccagggagcagcgaggctgcacggcagccctggcacagagcctcggctgccgtctggggatgaaactgggctctggcaccaggagcgtggttccagctccctgacccagaactgcctgtgcaggggctgctctgccacttgtgccctggtgggaccccactcctcctgcccctctgaggcagggcagattcaggagcagagctggatctggatggaatggcaagtcagggatgctggggcgaaggcaagtcatatcccttctgcagaagcagcctttagggatgtgcctgtgatggggaagagaatggcatgtgtgttcagcaagtgacagagtgggctttaccgcagctccttcctctgctgccagaccagtggcctcagctccatcaacagcctccctccattactccccatggcttcaggtccagacacagcatttctaacatgggtccctcctcccactctgaaatggaagctccacctcgtccctgcagacctgccatgttttcagtagggcctcttttcaccagctttgcaatcatgtttttcagcctctaactccagagaaatcttgacttccttgtactcagttcagaagacgtttgttattcaggattctgatgcagaggtctgataagagaggcctcaggccttctgagttagtaaaaccaacagagtctggggattcaaaaaatccaagaagcacaag

SEQ ID NO: 36100 - DNA, 1050 bp, Homo sapiens
gaacagtaaggggggaactgccccatgattcaattacctctcaccaggtccctcccacaacacatgggaattatggaagctacaattcaagatgagatttgggtagggacacagccaaaccatatcagggtggttatgggaagctgagaaaccagggtagttatgggaatctgagaaaccaaacctgtaagtcagggaaaccctcagaagctgtagccttcaggagtggacagggagggagccaaagcagtaagtcccttcatgacattgtcctccctttcatcaagctcctgctggtttccacatctggaaaccagagggaaaaggaatctgttgattggggttttccagggtgctgagcagggtggagagtgggtctggaggggcaaatgaaaaatatcctgagcatatcccaaaggctcttcgtaacaggcaataagagatgttcagtgtcactggagctacctcggtatagataaactaaaattgtgatgggcagtttgatgattgtctaaaataatggcattttaaaatggccacttaattcactgtttacagttcctgtttgatgactaatgatattaaaatatgtccagttatcttggttggagacctcgaacttattgctgtaaacatatccttctcttcagttcattctgtcccctgactgctgatacactttttttatcacttcctctgtcccctgcctgctgtccttctccctatcctgaactcaaagcccaagggtggaatgggggagaaagacctgagcctcataagagactcaggaccctgtcttatcagtttattccattttttttctcagtttttactttcccactttctataaccttctctccacagactcaaaaagtgaaaaaaaaaaggattttgctatgtgcttgtaaggttatattttcaataaagaatgtgtacatttagaacatatttaaaaatattaaaatgtgtccaggaatttatttttaaagataggtgttacctttaccctacagtggaagtcttggtagttatgttttagtagaaaacacc

SEQ ID NO: 36101 - DNA, 1028 bp, Homo sapiens
acttgtcccaacaccaaattcacgcaaggtgtatgccgatgagcctcctgtaaaatatccagagcttctaatttggggtaagatgaattaagcactccattctctctctccaacttaatgcaattataaaacctggcgagaatgcatggagcaattatttaagaaccttgaaaagtaaatagtaacaggtagattgggagggcagccagaaatggaagaactaccaaactggtggtgtgtttacaattttcccctcactggtatccctcagcctgtatccagtgctctccaagagacctccctgagtccttagttctggcagaaggcacaggaaaagaaaggtggccaaatatcagtagcaaacgtgcttaaagagaagttaacagttattagctcaacatatttcatctacatcagcatgttttaaagtatgtttcaaaggacaatagttgtgcagaatgttaggctcaaatgaacaaaaaagcaaaatagtggagatccagtgctgtttgggattaggctctttgtaaaccactaaaagaagctagatatatttctaatttggtaaaataataggtatgatttggagatccagtttattatggctaaaatttattagtgagactttaagacatcagctccttctgttagaagttttatatcaaaatgtcagtcaaatttctttttctttttttaatttatttatgtatttattttttgaggcggagtctccctctgtcgcccaggctggagtgcagtggcacagtcttggctcactgaaagctccatctcccgggttcacgccattctcctgcctcagcctgtagctgcgactacaggcacccacgacctcgcctggctaattttttgtatttttagtagagacagggtttcaccatattagccaggatggtcttgatctcctgaccttgtgatccgcctgtctcggcctccctaagagctgggattacaggtgtgagccactgcgcccggccaaatttctttttcttattagatttaacattcta

SEQ ID NO: 36102 - DNA, 1033 bp, Homo sapiens
gataaaaatattttgaaggactttgtagttaaatcactaaacttgtttcatcttgacataaaaatggatgctccactaggatgcacttgtagctttgtatgtctcctggccctatctctgcaccatcaccatttctaaagcattgcctgtcttacacaaaggccccaaggcccgtaagaaatagtaatgattttaaacaggattccaggagagtggagcccatgaatctgcattgttgcttacagaattacagcaagattgggaacatgagagttgtttttttgtttgtttgtttgtttgtttgttttattttattattattattatactttaagttttagggtacatgtgcacaatgtgcaggtttgttacatacgtatacatgtgccatgttggtgtgctgcacccattaactcgtcatttagcattaggtatatctcctaatgctatccctcccccctccccccaccccacaacagtccccggagtgtgatgttccccttcctgtgtccatgtgttcttgttgttcagttcccacctatgagtgagaacatgcggtatttggttttttgtccttgcgatagtttgctgagaatgatggtttccagtttcatccatgtccctacaaaggacatgaactcttcattttttatggctgcatagtattccatggtgtatatatgccacattttcttaatccagtctatcgttgttggacatttgggttggttccaagtctttgctattgtgaatagtgccacaataaacatacgtgtgcatgtgtctttacagcagcatgatttacaatcctttgggtatatacccagtaatggggtggctgggtcaaatggtatttctagttctagatccctgaggaatcgccacactgacttccacaatggttgaactagtttacagtcccaccaacagtgtaaaagtggaacatgagagttgtaactgaaaagcttgtgaggcagtcttctaagatcaggggctcccatgtatgcagtggagtaggccagaattgctccca

SEQ ID NO: 36103 - DNA, 1010 bp, Homo sapiens
ttcggcttactgcaacctctgcctcccaggttcaagcgattctcctgcctcagcctcccaagcagctgggattacaggcgcccgccaccatgcccagctaattttttgtatttttagtagagatggggtttcaccatgttggctaggctggttttgaactcctgacttcaggtgatctgcccacctcggcctcccaaagtgctgggattacaggcgagagccaccgcatctggcccaatcattaactttttaatcagcgttctggcagttgcactgctttggaaagagggtgtctatttcaataacaaaaactggcttgggagtggagctgggtgaagggctggcagcccagtgacgcagcaggttctggtgctggtcctctcccagtagagttgctcttggggctgtgcccctaggctactggtgtcagcacccacaccttgcaggatactgacttacttagacaaaagaagagtaagagaagtccacactcaacatgagcctgtcactttgacctgaacacagcagtgaaacactgaaggaacttgttcacaggctcagggactcaaagcctccagttggttttcattgtgccaggcctgctgagtggacccatggttgaggaggctgcctccccaagaggagcagaacaggcatccttgccctcctgagaaccccccacagagggccaggaacctcagatgagcagtcattagagggctctttgagttttctgctggctggtttggtgagaggcccaagcgccctgcatgagttctttacactgctgtgttggggtggggtaggagaatcaggcctacagaggagaagaagactggtgctttggagagtgttcatagcaccagcactaagagttaagcttggggaaaggagaagaaaggagaaagggaaattattatggtcttgcaaagtataatgtaaagaaagtttgcttttcttgtttgttttttgtaactgaaaaggctcccatggcccttgggtcactgcaa

SEQ ID NO: 36104 - DNA, 1090 bp, Homo sapiens
aagatgaggcctgaactatcttagagcctcagttcccctaaatgcagaatctgaggcagaaggcatatgtgttgttatacttcacttctctcattttataggtagggaaattcggacacagaagttaatttttctaagtttactcaggagtgacaggacttggaataaaattgtttcatggaattgcttcaataagggtaaggataatgtgagaaataatttctcatagcaattgcttaaaagtgctgctggcaatataaaatgaaacaaaaaaaggaccagacctctcaatgtcattttggctgtaagctaagaaactagaatttcttgttttctatattatttaggttcattacatttattattaattatctgcaggaaatttttaccaaattatattcacaaattatgtttgtttccaaagaaatctttctctagaatctatagagtgtactcgataatcaaacagatgcctacttaggaggtaagttggcttgggcatgattgctttagttaagtttctaatttactaaggactgatttgggtctataaacataagtgagtttcttttagatttgagtaagactgttacgacccttgccatgatatgaatttttcaaaatcatgatttattgaataattcctagtgattattaagcacgtatcacagttataaaagtttcgctaaatacacttgtcttagagtcttgttgagagatttttaatggcttttcctagctcctttttaaaaaaagtggggcatttagaaactgtagtactcttccaggtgagtgaatttgttagtatttattaaattcatatgattatagtaactctgagaattatggagtaggggaaaaattgaactcaggggagggcctctcagcttggggcatttcttgtttaatcaaattgtctagtgtaagtgtatagtcttgactgaaccaagcagagctattgaagagtattttaattacattttatagagcagcacaatatttattctttttcttctgaggaaatatagttttgaacataaatttctttattgcattttcttccaacaacttggtctttggatttagattt

SEQ ID NO: 36105 - DNA, 1056 bp, Homo sapiens
gatcatagcaaagattggaaataaaagtaaatgtaaaagtaaatgctgaatacttagtaggcgtcaatatcatttatcgttacttaattctttttcagttttgttgtcttctcccaggttagagactatggcttcctcaacactacagttgctaaagctaatttgaaacattaattatgtaataattcagagatatcagttctttaccttcctaaatctagtgtcattcttggtatattgtgtacatgctttaatgctttgtcatctaatactgcattaggagagtgaactcagttcacttgagaaaatgattttatcaaattgcctgttaacttctagccaggattaaatttctagaatctagaaggaaacaagtgcactttagtcactgtagttgaaagtagaaaattggaagaatgattttagtctctttggaactaagttataccttatttatttattggcttttaaaagtatttaaggtgaattttagcacactcaagataattagatgtgtgtatttgtaaagtgagagttggactcgtacttctgtggcactgagagaatgacgttgatagcgtgaatgttggctaagcaggattcatctttctgatcctacattctatctccctccttttttctttttgagttaattttgttttgtaattacgaaaacatttcatggttccaaagtagaggctataaaacaatgtaaaattaagtctagcttcgaagtctatcatttttattagtttttggattactcttccttttaaaaaacataaacacacattcatttttatctgccttttgcaccaaagcttaacatttgtttacactcctctgcaccttgcttttttcactcagcccatagcacttttatatctccttataccattttacaactgcataatgatactcagctgcatagtactttatcatgtagattgtcatggtttattcagtcatcttctatttatatatatttaggttgcttccagtcgattaattagtgtgatgcttccatgtggttacaaatagaattttgctgatatt

SEQ ID NO: 36106 - DNA, 1034 bp, Homo sapiens
ctgtaaagatatggtttttcctcctaagtcctgggtcttttcctggcagacactgcttttcttcttgggcttcagatcaagagacatcacgtttccttttcgggaagaagcccttaaggtagtgcgcctctggtttagctacatcattgcctgtgaggaggagagggccaacagaatttttgccaaacagtacatgtattaagactcgctttcctgtgtatactctgttttcaaatcaaatatgtaagatacaacagtgttttgaaaaatataaatggaaacatggagtagaatacatttgctcttaggaagtatttttttatttacaattttttgttggatgaattcataaattgaatgtaaatctttctttttctattttgttttctgattccacagtccatgcagtaacactgtttctaaatatcttcggatgcttggcttggttttgtgttgattctgcaagagcggttgattttggattgagtatcctgtggttcttgctttttactccttgttcatttgtctgttggtacagaccactttatggagctttcaggtaaaatgtgtgtactttaaaatacactctttaaaacctgtgaagtaaataattcgtagtatacattaaagggaaaattgatgcattttcattaaaaaattcttgtattgttgtgtaacataccttcaggaaagttcaatatagcatgcctgtgtattcattggattttgtaagtcataaaattccatttttttctcccatttgataaaagaccaaacatgaaaattgatggaaaaataagaacagtcttagaagttaatatttataaaatattctcttccatatgttatacttcaaggaaaattttgctgtttgcccaccccacctcccaaatcaaaatcccaattggtgcttatggtttttttttttttaaattaacctaagtaaggtaaatatacatgcaatatttaaaatgagccatttgcacctagcaacttggattattttctttataaatccattttaggttttttca

SEQ ID NO: 36107 - DNA, 1238 bp, Homo sapiens
gcatgggctaaaaccaggaaaacttccttgtcttattactttacctaatagtttcttaatatttcagtgccccttgcagaaaaaatattacatgctaaataaatattctccatatttttgggggatgacattcagtgaattatttcagtggtgacccactgaaaattaataatggtacttatgattaaaaacgcatttaatactaactgcagtagttctttcaagaatctttagagataaggattgcacattggaaaagtaaaccatgtttcattcctttttccctatttatattgaaagaaataggccagcagagacttagggattttaaattggcttgctttttagctgtttcagtcaccagtgaagagcctatgtgcattttgtagtagataatgtaaaatttgtcatctttttcttttcttttttttagaatagctgatattttgataacaatctctaatttgcatgggcaccacatttcttatattaaaagaattagtgttttggcttctgtactgcttatggttgtaggattcaggggttaatggaatcacagaaatgatattctgcaagaatttcttttaaataaaaagtttgggggtgcaatataagaagtttatataatatgcagtacattatccaaaagagaaggtagttaatgcagtagaaagtagtggtaataattcctttttaaaaaaatttcggtagtcatatagtaacattttgctatatgaaaactttggtatattctgtggttacaactaagattgtgtctggcagctcttttttggggatgtgtgtgtgtgatttttaacagaggtattaaaggctagcctaactgttgtctaaaaagattgtacagtatttaagggattttccttttagcttttcatctccagtggcattaaacataaaaagaccctggcattttttcacatacttgaatccctaaatgcacctgtctttcactttttgagacagactgaatatatctaaaatttccagcaataaaaaaaaaagcatttaacttgcaccaagcaagaaaatataaatacagttaactgcattaagataatcacgttaaaattgttactatgcagcacagaacttcattcttatagtattcttgggttcaacctttgaatcaattttaccactgattaaataaatgactcaaagacatctgtaagtcatgctgctgtgttttgaaagtctttaactaaattaagattgca

SEQ ID NO: 36108 - DNA, 1033 bp, Homo sapiens
ccctaacatagaattcatcccattgactgtcctttaccatcactgccttaattcaggctttcgtctcttgtgaataaaatcatagtggtttcccctaaacataggcatttggactgcctacctgtaggtgttcaatttttcaggatgtttggctagaaaaagctaaaaagctgctaatagcaatgtgttacttgattgacttttctttcccatgtggttttggtttcactacttcctctttttgtgtgcttttatctgtgtcctgtgtaccttagtaaaattggcagttcttgtctgcaagacttatcttgcacaactgttcagggtaaggagaggaagttgcaaggaagaagatagtagtagggggagcagtgggatggctctgccaaatgactcagctgctagtgagggcctctgaaataaagttattggttcttactgctttgaagagtaaagtttgctttgataccctacccttcattgtttgagagttgaaaaagattgtttgaaactactgaaataatatccacataaaatatccacgttagtaaggaccgttgtaagtggttgtttggttaagcaaaaactttaagggggtgtaggtgtaatttgaatgcagcatgttccagaaagatcagtgtggaaagtggacctagtagcagaattgctagataacaactaaggatgggaagcgggggaagcacatgggaggattccccagcttctgctaaaattcaaccagggtccattctctgtgtggattaacttttggggaatacaataacagctgaaaaagcaatggaaattttctaatttttcttgggttattcaaatcatgattatttggaaaactgtgtgtggtttttttaaactgatatgggtaactttgtcagcttttattagaaaccaaaacatgaatctaatttcaactgtcataggccctagatcaggggaagaaactgcctttttttggtatgaaataataaatgcttcatgggatacagagagttgagagttgagaagggcatttagt

SEQ ID NO: 36109 - DNA, 1048 bp, Homo sapiens
aatggtgaaggaggacgaggcacctctggcgctctcggacgcggagcagccgccgcccgccaccgagctggagtctccggccgaagagtgcagctgggccggactgttttctttccaggacctgcgcgccgtgcaccagcagctgtgctcggtgaactcgcagttggagccgtgcctgccggtgttccccgaggaaccttcgggcatgtggactgtgctgtttgggggcgcccccgagatgaccgagcaggaaatcgacactctgtgttaccagctccaggtctacctgggccacggcctggacacctgcggctggaagatcctctcccaggtgctcttcaccgagaccgatgatcccgaggagtattacgaaagcctcagcgagctgcggcagaagggctacgaagaagtgcttcagcgggccaggaagcgcatccaggaggtgagtgagtgagctcctagtctgggctctactggtcgcttttggtttactggccaaaccaaaggctggagcctcggtgtcgggtgtgcgcagtaggacggttgtttttctggacaagcggaaaccaagaggggttcctgatctaccttgcccttcatccctctcggtggctgcttaattgactctctgaaggaccttcgtctttatttcctcccccatttatcaaaagtagtaagtgcgctctgtgtactactcagtactggtaatgcgcaattaaagccactaagaaaagtgttctgtaagcatgggctacctgagcatttttctacccctaaagctcttccagcaataactgcccagatgtcaactcttctttgtccttgtcacctttatttaaaatagtttgtcttacggagcaaagttgatctgttttgattcttctttgtgcagtgtggcaacctacgcaaattttaaattcatttttaaacgagtgacctaagtgaaaaagcacctagtgactatcggatgcaaatttatttttaaaaggttttttagaagtgttttgtttctttttttttggactacctcaggtctttacagatggct

SEQ ID NO: 36110 - DNA, 1029 bp, Homo sapiens
ggaaactagagaagtttttaaaattaatttattcttactattgcaagaatttaaaggacttagaagatgtgtccttttaatgtgaagttgtaagtaaaatttttataaattgataagtgtaaattcctcaaaggacagtgtttttaaaacgagaaattttcttttagtacttcaaaggaaaatttcttaaaacataaataaattcctcagtaagaggtttttacttggggatggtgaattccctgtaagaggggctatggatggattttaatggggcgtcctgccgagttttatatctgtgggcatgtgtgcattttagagagaaaggcaataatgtgagtcacaggaatgttttggtttcacagtgcgtttaaaagttatgtttatgctataatgtacattatacttcttaggggctaaatccaagtgaaaggtgaaatttgttactggtatgtttgaatttggacttttacaagagtttactattggaagcagtatttatacagtagacactgaatcagtccttaaatgaatgcaggtgccaccaagacctctttgaacagttttcagcagtagccttggttgttggtcagagctgaggtttgtattagtgtatgtgcgttggtggcccatactgcagcttaggtttgacctggattttataaataatggtttctgtataaggacagctattctcaagatgattaactgtggtgctttagatagtaaaccttaattatgatggtaggcttgattaagatctaatcatcagtgttcattttggaatttattatgtttataaagatgtgctcaattctaacttctcttctgttgaaaccacggtttggaagtagcatgtgttttcaaaattatccgtgtaagccacataataaatagcctgttgagtgagtggagtcagaaacacctaggttgaaaataggactaaccacttctgatgacctgcttagttatttaacctcttttaaaaaggaaggtgggggaaataaaggatgtcttaagatttgagta

SEQ ID NO: 36111 - DNA, 1066 bp, Homo sapiens
atttaactgaaggggcaaggggcaaggagctctaggaggaagttttgtttaacaggtgtcctcccaaggatacctttgggtccttagaaaataacttttctaattttcttgaaaacctaagattagttttaaaactcaagccctgctgaaaccccaactatatacattagagaaatgacagtactttaggagtcttgggacgccacctgtctttcactgggccagcaagccatgacccatgattacatataaataaatggtggaagcaggctgctatttatagggaaggatataatatgattccaatgaagagagctgctctgtctggcagttcttgactgcattgactggaagtattgaaaaataggatattacatgttgaggacatatgggagctgtagactttcaagacagaagatatgtcaacattgtagcttgatgccttgtctaaccatgttatactcccatgaaaatattgcaaactgctcttttactgtaaaatacagttaaagaataatgaaactaagtgaatttgtgggattcttaaagtattgatgaaagacttgaaagttggaaacatttacaatattttgatgctaatcattttcttcaatcctgtacccaaatgtacttttagacagttttttgcatcactgaaaaagatgtaagtatagaaaaatggatatatgcttctagtttagggcttctataaaacaaaaacatggagactggtagcaggatgtcacccttcttggtaattaatttgtgtaatggtttctctgcttgccacttaacatcacaagatgcccagtccaccagagatttctttcttttttctttttttccttttttttttttttgagacaggcttgctctgtcacccaggctggagtgcagtggtgtgatctcggctcactgcagcctccactgcccggcttctagcgattctcctgcctcagcctcctgagtaactgggattacaagcatgtgccaccacacccagctaacttttgtatttttagtagagatggggtttcaccatgttggccaggctggtctcgaactc

SEQ ID NO: 36112 - DNA, 1071 bp, Homo sapiens
tataggaaacggtttacacgaaagtctaatgcttagtaaattgtatcttttgaaatgaagttataaaatgcattccctgtattttaagattatttgccaatacttagattaaaatagtttgaccaattgaaattaaaattgtttttaaggtagtctagtattggaaaaacatgaaactttataggaaagaaggcagattaataaattagcagtgttaggtgagatggcttgggcttctctgcaagagtattaagtttaggtgctgcataatagctttgtaaagtactattctgtctgaggacaaaaagcatggtggaaataatagataaaaatgttaatgtttggatagagtaactgatattctgtcctcagttattgtacatatttgtgtacagtggtattgtgacttaattaataatcatataatgacttgatgtttttgtgttggcagaaaatagtatctaaactttgtattacatttactttattgaccctgtaagaagagcccaaagaagcctagtgtttgagggttcgcttactgttgaattgtggcatttgatcacttgtaaatgactcagggggattttactattgaaagatgttggcaccatttttttcccctcattcttttaacacttttgctattcctgaaacctggtagaaaaccattatctcgaagaaagtgttagttttcaagcgaagtataagataaagggcttctttgtatgtacatattcttggaagaagggaattattgcctttgacctaaaaggaagaggctgaggcacaaaatatatttgaagagtttacttgggccaaagtaaggacagctgccgagaagactcagacccaagtatccttgaatatgcacggtctttgttacaaacaggttttttgattttttttttcttttcaggcaggatgtgctctgtcacccaggctagtgtgcagtagcgtgatctcaactcactgcaacctccatctcccgggctcaagtgatcctgcagcctcaacttcctgactagctgggtcaacaggtgtgcgccactacgcctggctgatttttcactt

SEQ ID NO: 36113 - DNA, 1022 bp, Homo sapiens
tgtgtcagccctggttgtgagcttcatttcacgttccaatctgcaccaaccaggtaaacattgcaggctgggcgcggtggctcatgcctgtaatcccagcactttgggaggctgaggtgggtggatcacctgaggtcaggagttcgagaccagccaacatggtgaaaccctgtctctactaaaaatacaaaaaattagccaggcatggtggcacgcgcctgtaatcccagctactcgggaggctgaggcaggagaatcgcttgaacccagaaggtggaggttgcagtgagccaagatggcaccattgcactccagcctggacaacaagagtgaaactccgtctcaaaaaaaaaaaaaaaaaaacattgcagtgatttcagcaggtcttatagaacagttttaggggagaatgaaaagtaaataagatttcagaagagcacatttttgaggaatattaggagtattttatatattacttttaggtgtatagtgcagtacttttgagactcggaatttgcaaacctgcaagtttttgaaaatgctatgcaattcagacttaattgaaagtctgatttcattttaattcaccagtatgctaggcacattgttagacttaggatacaaagatgagcaaggcatagtccctgctcctcctagtcttttagagaaggcaaaccaggtgaacagatgagtgttctgccggccaaaaacagcaagagcagggagtgaggaaaggcttctctgaagagatgacacttgtactggcttttaacatctgaatagaaattggccagattgatggtgttggggtaattacaagcaggacagaatagtttttagcaaagacactgaagcagaaaacagcatggtttgtcagagcattctacattgtaagacatgctgcagggcggggaccaagttatgggaaattttacataccacattaacaagcctgagctttgtctgtagtataagttaagcaaaggggtagtatgaacagattcacattttagcaagataag

SEQ ID NO: 36114 - DNA, 1041 bp, Homo sapiens
acacggagcatccatgaagctcttagaagaattaaagaagcatccccagagtcagaggacgaagaggaggctttaccttgcacagactgggagaactaacaagtaaacggccttattgtctttagtagcattcagtaatacaggttttatatcggatgatgaggtttggggtattttttattgagcctgaggcatatcgtttgttttataacccaattttagcatggatcacaaatttatgaacttcaggttttacttaattctgtagtttctagaaacttaagataactttttaatgattattgctatgtaaatactatttttaaaaatgtcctcctcattaaaaatttctgctatacagctgtaattgcaagtaaagtgacagtctcattcttgccctaaaaaaacagaaaagggcctggcacagtggctcacacctgtagttctagcactttgggaggctgaagcaggcagatcacttgaggtcaggagttcaagactagcctggccaacatggtgaaacctcttctctactaaaaatataaaaattagccgggcgtggtggcgggcatctgtaatcccagctactcgagaggctgaggcaagagaatcacttgaacccaggaggcggaggttgcagtgagctgagatcgtgccactgccctgggcaacagagtgagactcagtcttaaaaaaaaaaaaaaaaaaaaaaaaggctttccaggttcagtggttcgcttctgtagtcccagttactcagaggttgaggcatgaggatctcttgagcccaggcgttcaaatccggcctgggcaatatagcaataccccgtctgtaaaaagaaatcaatacgtcaattttttttttaatgcaaagccttttctgacaaagtatttcagtaacaaactgttatgcacactgaattttgatgtcatgttagctgacctcaaaggagttttctaagatcattctggaaaaattgttgcattgtctgattatttaactttctaaacccttaaaaaaaactacttattgtcacagtt

SEQ ID NO: 36115 - DNA, 1042 bp, Homo sapiens
catgtagatcattggactcagtgtgcagtaccctgtacatataattctgcataagacagatcttggcctttctgtggagggagttaagaactaaaataccaaaaatcactttatttcttttaagacaattatctggcctaaacccagaaagcagtactggagcaaaagcccagtgtatatgaattggtattcctagagaaaaaaagaaatgctcacacctttgttattttaaagtgttttcttgaaaataattagggagaaaattttctggcaacaggttatgtaagacaacaactttttttattatttcaaaacaaaacaggcacatgccaccatgccccagctaatttttatattttttatagagacagggttttgccatgttgcccacgctggtcttgaactcctggactcaagcaatctgccagcctcggcctgctaaagtgctaggattataggcgtgagcctctgtgcccagcctgacaaaatcttttatttatttaaatgttagtaatacgtttattgatgagactaggagcttctctgcagcatcttcataatacattggttttagttcccacactattcccacatcttatctgggaagattagaaatacagatgtaatatggaagcttcaacagcatgggggtggtgatagtgtcctatttgcccttggtaaaatattaaagcgtatttcttaacccaaagagtgattggttatatgaatatatttgaaaaagttaaagcaaatttgcaaacctttacaaaatcatgtatcaattttatgctatccagtttttacgtacccatgtgtcaacatttcatatatccagttctttgggtgctggttcactttttttcatttattcaaattcagaaaaatacggacggatctaatgttaaattaaccagaaaccctggaacattcatatcttgagagggaatttgctactcttttacttttgggatttcattataaaataggctcattttatacatatgtcctgtggtctgtcttccagagtgtgctgtaatcataa

SEQ ID NO: 36116 - DNA, 1060 bp, Homo sapiens
gaacagctgtaagacatttcaaaaccattgcagacacattgttaaaatgcagccatttgataatgaaagcagaaaccttaagttttacctaattattgcactaaatgtaaatgataacataaaattaagtgtgcattttaaacagattctatttcccacttactgcttagcatagaaaaagagctatggttagaggagtgaccagcaagatttatttcagatggaaaaggggtgagaaagtggaagcaccttactgttagagcatgttgcatctatttagtgctactgaacaattcagtagttatttctgaactttgctgcaaagtgctctttagttaaagcacattaagaagggtcactgcttaattgctttgtaaaatgaagcaatggtattttttatccgatatagtgtaatttaaaagttttcctacaaagtgagtttatattgttgcctaaactatgttatgtaagcaaagggtttggaaaggcgggagggagtctagattcggcgagagtgtgcgtttgtgtgtgtgaatgtatgaaaagtttccccattgggttattcttaagatgtgtttattgtaaagttttctacgttttgcccacagtaaatgtacaacttcgcaattgtaggatttaattgattgaattccaaatttatactgtctcttcccttctgcagagacattatgccactgtaaggtgcatgtacagaaaatacctctgaggttgacttgttaaataactgatgaatgttatttcacactgaatctcaaagcagtcatttgttttgcgggttaggggaaagttttgttttttgctggtgttttttgttgtttttaattaggcacactaagagtggctaaatttgggggaattggtggataggaaagaccttgaaaagtgatgtgtagatgaaaacacaaggtatggatgttggttacagagttcagttttaacaagggaaatttggggattttttttttttttacttgcatgttctatgggtagctatcaaagggtgtaacaaattattccagcttttcccaatactaattat

SEQ ID NO: 36117 - DNA, 1050 bp, Homo sapiens
gccttagaacttctgaacgggcagtgcgggtaggccctgcttagcccttcccggaggacacctgtgagtttagggggtttcggagaggaacgcagcagtgtaggcccaggtcggcggcggggcacgggaaacttttccgaaacggtagcgttttgttttgcgtgggaggttccagcagtatctcttggttattccaaatttatgggcggcatctgggctgctgtacattttgaagaatcttaggaccgcttactttgcttactcgttttctattcctcgcgtactgcctcgtccaccactccaggaccaaaagaggaagatagtcttgggacccttgcatggtgtttcaaagggtggtgaagaactaaggtacgtagctggattaattaaaaaatttaaaaggcatttatcttttaagccttaattaaatggcatgaaattgcttcagcttttcactttataggaaaatgcacaggttaagactgttgtgtgcgtttcttttcttgttcagcctttgtagaaaagctcttcgtctctcaaggtgagaacacgaaaggcttatatgtctcaaaacttatggattctctaaattacttgtcttatctctttcaactctttgtttaaagtagcagatatttttcattagggtgaacagagaagaaacaaagggaaactgtaaaacacaagctaaataacacatgtgcagtgtatgattttgtgaagaaagagattgtaactgattactaaatctgtgtttttatattacaggtaacatagtaacttttgtaaatatcttcatattgtatggttcagtaccaccaggcttctaacacgtactgattaacagccataaggctattaatttatactgattaatagccagtaatagtgacgttactttgttggtgtgaatagccctaattatgtctgttctggaaatgtcctgtaacaggttccatgtgaaataggccgtttatgagttgtttaagaaatgcccatttggagccatgtgactagattatttttttgaacacttgggtgtaatttaat

SEQ ID NO: 36118 - DNA, 1947 bp, Homo sapiens
tgccttttttatattacctattgagtgtttttttctttggtaatttatttttaactagctacttttctgtatttctaaaattatttctactctgttaacagaacttatctctatggtcaaatacatcagataatccaccagttgatttttcttttcttagatatcttcttgaagccctgcatcctcccattctaatttgaactgttagcttcccatcactgtcatctcgggtaatttactttgtttctgccctacatcagatctccctttttctagattccaggttttctttttcttttttgataacttaaatgtctaagaatgtttctagttgcctttgcattgatagtacagctaggtatagaattacagcctgagagcatttccgtcagagatttgaagtcatgagtccatgtcctgtgctattgagaagtccaaagccattttgatttcttgccgtttgtttataacattttccctctttgaatattttataaacttcctttttttgtgtgatattctgaaacttcaatataatataccttgacatgtaacttttttactgtgctttgtaccctttagatcctttcagtctggggattggtgtctttcagtctttggcattttttttgttttatttattaggtaatgtcctgtattttttctgttctttctggaccttctgttacaatgttagatcacatagtttaatactttttgttttctcttctgttgtcttgcctccttcctgcccctaccaccttttccttttcgttctttctaatacatttcctcaaagttatcttttaaatttctgctgggtagttttgctttcaattttataatttcccagagcctgtttattttatttttgtgagatagggtcttgccttgtgtcccagggtggagtgcagtggcatgaacatggttcactacagccttgacctcctggactcaagcaatcctcccacctcagcctcctgtgtagctgggaccataggcaaacactactgtgcctggctaatttttttgattttttttttttatagagacagggtctcactttgttgtccaggctagtcttgaactcctgagctcaagtagtcttcccaccccggcctcccagagtgctgggattgtaggtgtgagccaccacatccggcccctttctttttaaatagcatattcttgttttatatatgcaatgtcttttcattaatctgagttttttttttgagtgttcatttgttcctgacatcgtttctgtttattcccaggttttatttttcttctggtgatccatggatgcctattttaagtgagaatatcaggagtctaattagaaactctaaaagtatgtgggtagggcctgtcaactagttggcttcatgttaagttgattagttagctaccttgacattttcttgatggactcccaagtattattatgttctcttgttactacgttacatagtttctctctcattttgttttttcataagagttttctaattgcttgctttgagaaagtgggctgaggggtcctatttttctttgtagactttacctgatcctcattttcagtttattactttatcctatcctttgcaagactacagccttgatatattggtcactgcaaagaataaatatctactctcctccctggatcagtgaaggattctgattgctttgtacaatttttccctattcctgtggaacatagccctcttttattggaagtcttttatataaattatgtagactttgaggggaatctcagaatcttataaattgttaagacaatataaaatccattccttatttgatcagacctgtaagatccaaattctaggaatcaggatgtcatgtgatggtttatacctttgtataaattagtttgagaataaatgtaataatctgtgggattttattaatgtcaggtga

SEQ ID NO: 36119 - DNA, 1095 bp, Homo sapiens
ttaaagaatatttttggagtgccattatgcatggtcagcttgttattacatatatgatctaaatcgtatatgatttttagccaaggatatttcatattatacattcctcctctctatttttttaagaactataacaacagtgagccatctcctggaatatttctctaaattaaagcaccagaaatgttgtttcaacatatatgtgcatttctctttttgtctcatctgaactctcaatgtttgttctagggtaaagtaatatgatttgataatgtgaatccccaagttaatgggtagataatgacgaaaattctttcacataaaaactcattaaatctccattatagtagtccttgggaaagaaaaagtgtttccatgcatgtaaaaaatggagaggaacaagaatatggaatttcatattttccagtcattgtaaattttttaacatgtgactgtttctacattaacaaggtcattcagatgaaagaactttataaatataataacatttcacttgggcattgtgaaggaattttttttttggagacagagtcttgctctgttgcccaggctggagtgcagttgcgcgatctcggctcattgcaacctctgcctccagggttcaagcgattctcctgcctcagcctccggagtagctgagactacaggtgcatgccaccacacctggctaattttttgtattttagtagagacagggtttaaccgttgttgctcaggctggtcttgaactcctgagctccggcagtccgcccaccttggcctcccaaagtgctaggattacaggcgtgagctaccttgcccagccaagaaatttattttgctattcaacaaatactgagtacctacggtgaattctaggattatgttgatctgatctgcctgattctctacatcaggggttggcagaagggccagatagtaaatatttaggcacgtgggctatgtaggtcctctgttgcatattcttttttcttttctttttaacaatgactaaaagtagaaattatttagcttgctgcctatacttggcctaaatagttcgccaaccctgctctaggtcagtaaaacttaatc

SEQ ID NO: 36120 - DNA, 1031 bp, Homo sapiens
acagaaagctaattgttgacttaagccattttattttacgattttactttttgaatacactgactctaaacatattttaatccacatgttaagccatctcaaataatttcttttaaacttccatagaattttatagaaagttgaagttacactgtgtgatattggaaagacacttgtccatttgttgaacagacattcattatgtgccaggctttgagctggaaagtacaagtcaagtaacaagtcactgtctttgaataacttacatctgttctaggagagaaataaatgatttatttcagtggaccttctgcattctgaattattctgtaaaataaagaataattcatacctacttgaatttttaatagctatttgaatcaaaatattaaaaatggaagggcccttaaagatcatgtaattcacatgaatttttttttctttttcttttggttatttttaatagttaaggaaactggtgatcaatggatttagtaacttgcctggagtatagtttgttggtctcagaacctgtacttattactcaaaacttttaactcctaattttatttttctgaattcctgctcataagttctattttgaagcttgatatattcttttttttttttttgagacagagtctcgctctatcacgaggctggagtgcagtagcatgatcacaggtcactgcaacctccacctccctggtttaagcgattctcatgcctcagcctcctgattaactgggattacaggtgtgtgccacctcacctggctaatttttgtatttttagtagagacagggtttcgccatgttggccaggctggtcttgaactcctggcctcaagtgatacatccaccttggcctcccaaagtgctaggattacaggtgtgaaccaccaagcccagctgatatatattctgtaattttgatggtaaaacattgtaacagaaaattttcaggttttaaaaaatcccggtactactttttctgtagttaaaaaatgagaaaattgctcatttgggaaa

SEQ ID NO: 36121 - DNA, 1051 bp, Homo sapiens
cagagcttttaaattatttcccctgtatttaatttggctttttattcctgttgttttaaagtatatgatgctataattccagattatttgagagtgtataacttaatgggataacttgctcagaaatgtttttggtcacatagttttgtttatctggaaacttgtgagatttaaaaattttcggctggatatggtggttcctacctataatactggtgatttgggaggctgaggtgggggaattgcttgagcccaggagcttgaggctggagtaagctatgactgtgctactgcactccagcctaggccacagagcgagactccatctctttaaagaaaaaaaaaaagatttaaaaattttatttggggtaattggagccttagcagtatgttactgatctttccactggaatcttattttatattttcagtactcatcagatcacattgaaataacatactgagtatttgttcattcttatttctttagtgtgtcattttaaaaacacagatctatggcctttgggcccatactattttgcatcatgggatggatgagcattaatttagttattaggaaggaagtttttttgttcttcagctaaagtttatttatttatttattttttcttaaatagttgtgtggagtttgacttgaatgtaaacaatattgttggaataagaaacacattccttctcagaacttatgcataccgtaagtttgttgtttgtttattaaaaattagcctttttttctttattcatttttaaagatgtttggcataaatagtgacatctctttagttgtgtttaagtatagtgtatcttattttatttgtatatgttgctacactaaaatcatatactgtcagttataggtgaatcaagtggcattttaataattgataatttttaaaaggtaactaaggtaagttttagacataagacacaaagtgaacagacacagtgtttaatatacacggagacagtgttctttgttttggtatggagctgggaaatgatgtaaactttcaaagaaactataacgtct

SEQ ID NO: 36122 - DNA, 1065 bp, Homo sapiens
aaactctgtctcaaaaaaaaaaagtaatgaaaaaggtaagatcatcaattggctagaaataataacattaatgaatattcatggaatgtttaccatattcctaggcatacagagctttctggtagacattttaaaattgtctttgcagagcctggccaacgtggcgaaaccctgtctctactaaaatacaaaaaactagctggatgtggtggtgcacacttgtcatcccagctagtggggtggctgaggcatgagaatcacttgaattcgggaggtggaggctgcagtgagcccaaatcgtgccactgtactccagcctgggtgacagagcgagaccctgtctcaaaaaaaaaaattaataaataagtaaataaagttgttcttgcgctttcaaaattaatgattcttagtgtgattgaagacctgctatttaaaatttaaatttttggtacatctatatggaaagtttatgggtataaatttgtggggtctctaccagcaagctgttatggaaactatgggcaaagtaaaattttgtagattagctgtattcaaggcattacctattaatcatgtattctgataatgagcttttgttttgtttttactttgcctttgagagagaaatttaaaagactgaacctgtagtccagaattctgaagttaaaatagttgttatagtcagatttttccagaatttacattgcttgaagtaagataaacattttaaaaactactaaactcattgagactaatatcaggatattgttaataaataacttctgcagtacactaattgcttctctgatgactagtgtttataaatcttttaaagttgtaacataaagaatttacttaatgataaccctgcctccaaaaatttccaaattactgagttctaaaagcttttttgtccattgaaagatcctcaaccagtggctagtatttgtttttgtctcctagcattctagttatggtaccagaatgagataaaggttttttattctaattctctataatcttctcttcatcctttgttttattatatttttagtatactagagt

SEQ ID NO: 36123 - DNA, 1034 bp, Homo sapiens
ctaaatcatacattaaaagtgaattaatatgctttgttattgagtttatgtagttgttatacatagtgtattcctaattcttaaatccttcctaattcttaaatttgaaaatgtattacttgtattttaccatactcatgacattatattttacagttatttcttatattgtgaatgttaggcactttacctttttatattgttcttttcatattaaaacaatgtaaaattactgttaattaatgagattggatttgtttaaaacgattggtgaaggatgacacaaatatggtgataacatgaggatataatttctttgtatgaaattttattaatagcagattgtgcccttagttttctgacttttgctgagcattctttaaaaatgtactaatgaggttaaagatttttctttcatttttatttgattttttttgttgttatttgcagtatatcagttttcctgaacgatttcaattttggtattgttagtggaaattaaataataaagggacaattatgaaagaactatttttatctcctagtgtcattgaactgtatttttaaaattgtagtttttgattgctacatccatcttaataatgtctattcagtatctgtagagcaatccttgtcttgcttattgtgtgtgtatgtctgatgttggacaaattatgtatgtccctttattgatagcctattattctaaaaccatgtgaggaacattgatttacatagggatatatgtagtttattaataaaaccttagtttgtcaacttaaatatattttaaatacaaacttagggataagaattaatttcatgaaatatttgaaaattgttgaattttagcataaacccttatggtcttatacctgggatgtagctgacaaattattgcattgtaaaatgagtcacgtgaatcacggaagctttaaactttttctttttatagccctacctgaacccatccttccatccctccaaaaaatttacccagtaagtgtttcttataaattattataatacatttt

SEQ ID NO: 36124 - DNA, 1034 bp, Homo sapiens
tggaacaaacaagtcagcttgtttgctattattaataataaccatccgggcgtggtggctcacgcctgtaatcccagcactttgggaggctaaggtgggtggatcacgaggtcaggagttaaagaccagcctggccaagatagtgaaaccccgtctctactaaaaatacaaaaattagctgggcatggtggcaggtgcctgtaatcccagctactcaggagggtgaggaggagaattgcttgaacctgggaggcggaggttgcagtgagcccagattgcgccactgtactccagcctcggcgacagagcgagactctgtctcaaaaaaaaaaaaaaaaaaaaaaatgtatatatatatatatatatatatatatatatatatataatagccatcgtttatttagtatccattatatatgtcagcatactgtacattttatacacaatttaaaaaatcctgaacaaataaacttgcaaggtattattcctctttcactaatgaagaaactgttttagaaatgttacatgattgatacaagtggtactaacaatttttccattatactctttcttgggggaaggcaaaattacagtagtattcactaacattttatctaatttctgttgcttattacattttatttgtatacatctgattgttcatatacagatatacctttaagggcagcagttacggcagaatttcagcttgtataaataagtttaagataagttaacaacaacgaaaaaacaactttgttactttacaaaggaaaccgcggagttcttttaaatttctagcttctctaatacaaaatagggtttatttttaaaataagagaaaacagttttggaatggaataaatttgttcagtatactatgctttttagtcattttcatattttcaaaatttataacattttaaatatttttaaaattggtatatttcagttcagttgtgatatgaaagggataaaaggctataaacatcattgtctctaaaaactgtattatagtatagaattactgctta

SEQ ID NO: 36125 - DNA, 1031 bp, Homo sapiens
agagcagaggagaaggcacctgtaggaagtggatcagggagtaggggacctgtgatcccttggcagtgttgagaaggggaagtctgtcaactcagcttttataacctttcccttactgttgtctgggatcctcatatccttgcccaaccacaatttacaaccaagagaatctgaaaactcatttacactaaaatgtgagcagctgaccattcactctggggttgcattgccatttgacaaaggtcaaggccttcagaaaaggatgtgatttgtctgcagtaaacttcagcctgttctgactacagacagtaaggtggacaccagggaaagaggtcagaataaatagagtggagggacacatgagggaatatggaaaatggaggcctggaaaaagcatccaatttattttttattggatgacaagggtaacaggaagtcagcaaaacttctggatttaggaaaaacacgtatcgacgaaaaagcatcaaactctgtaaaatatctgaagagattggttctgagccaaatatgagtgaccaatggcctgtgacacggcctgcaggagatcctgagaacatgtggccaaggtggttgggggacagcttaattttacacattttagggagacatgagacctcaatcaaatacatgtaagatgcacattggtttggtccagaaaggtgggaaaactgaagggcatgggggcttctaggttataggtaggtttaagttttttctgattggcaattggttgaaagagttaagttattctcttaagacttggaatcagtggaaaggaatgtctgcattatgataaggggatgttgagaccaaagttttatcatgcagatgaagcctccaggtagccagctggagagagaatagattgtaagtgtttcttattagactgaaagagttgttctatcagtaattccaaaagggaggggggtgtagtgtagtgaggcatgttccatctccccacctccaccatcacggcctgagtgagtttttcaggttagctttggaatgcc

SEQ ID NO: 36126 - DNA, 1032 bp, Homo sapiens
aagtcagaaaaaaaagagacaaggtccctgcacttgtgacacttactttctagttaattgaaacagccaataatcacaaacaagataatttcagataaaaataaatgctctaaaggaaatacaaaaatagttttggaggtgatttgtgttttgcaaaaggataatctatgttcttttaaaaaagtgtatttagtttagaagtcttgggaaacataatatgtttaataatttttatttgatttaagtctcccgaataacactgtttctctatttcagatgaacaagattatctccaagatgtacaaaatgcatatgattctaaccactgctcagtttcttcagagttggcttcctcacagcgaacttcattgctcccaaaagaccaagagtgcgttaatagttgtgcctcatcagaaacaagctatggaacaaatgagagttccctgaatgaaaaaacactcaagggacttacttctatacaaaatgaaaaaaatgtaacaggacttgatcttctttcttctgtggatggtggtacttcagatgaaatccagccgttatatatgggacgatgtagtaaacctatctgtgatctgataagtgacatgggtaacttagttcatgcaaccaatagtgaagaagatattaaaaaattattgccagatgattttaagtctaatgcagattccttgattggattggatttatcttcagtgtcagatactccctgtgtttcttcaacagaccatgatagtgatactgtcagagaacaacagaatgatatcagttctgaattacaaaatagagaaatcggaggaatcaaagaattgggtataaaagtagatacaacactttcagattcctataattacagtggaacagaaaatttaaaagataaaaagatctttaatcagttagaatcaattgttgattttaacatgtcatctgctttgactcgacaaagttccaaaatgtttcatgccaaagacaagctacaacacaagagccagccatgtggattactaaaagatgttg

SEQ ID NO: 36127 - DNA, 1072 bp, Homo sapiens
tttttcagccacatatgactgtaaataaattttgcaaatttatgttcagtaggacttgaaacatgagcttacagatttttattagcatccctgtcaatcttaggttaaggtcatgggcttatataactgagctgtattttgatactcatgatacaattgactatatttcctgtggcttttagataaattgaaatttggtaactgaaataagcaggaaccctgatttagtagcaataaagacagttttaaagtaagtgacatgtgacctaattaaaaaggaagtaatcattaataattaataatcctcactactccataatgtatctgtcagcttttcattctatttgaaactaaattcttatccactacatttcagcatttagtgcatcttttattttagtgttatttattaattggctccctatgataatcctttttcttactttatataaatcttatacaattcaatttaaggttttcataaggagaactttgggaacacaaggaatttgaaaagttatgttaaatgcaaaaacaattgttcttagttttttgactaatagaagttgacattaatagttatattcttttatcatctaagattcctcagacaaatattggtacttttcaaccaatggattgcatggcttgggacaggcagaaattattattctattgttatgtttgccaaatgaagatactattcctaaggacatcttcagactatttatcaccatatataaggatgctctaaaaggtatggcattttattttgaactgttcagactggggaatggataaattagttaaaggcatttatggttttggctgtgctagctatactaaagatttatttctgtgaagagattgctgatttctgaaaatagcttaataattattttgtctccttaaaactagcattttatgtgattagtgtctatgcagatttttgtattttaaaaatggaaatatatccttatatccattttttttttttttttttttttgagacagtgtctccaccccggctggagtgcagtggcacaatcttggttcactgcaacctctgctt

SEQ ID NO: 36128 - DNA, 1031 bp, Homo sapiens
ctcatgcctgtaatcccagcactttgggaggccgaggtgggtggatcacctgaggtcagaagtttgagatcagcctggtcaacatggtgaaaccctgtctctactaaaaatacaaaaattagccaggtgttgtggcacatgcctataatcccagctacttgggaggctgaggcaggagaattacttgaacccaggaagtggaggttgcaatgagtcgagattgcaccgctgcactccagcctgggcaacagagtgagaccttgtctcaaaaacaaaaaaaaaattatctctcactttcccctaagaactgattgagtgatatttatacataatgtttgtttgtaaaatgagagttgaaggtaataaattcaataatttggggttttttttgttgatagtaaccagttttcctttcttatgtatagcatatcctgctcctctaacaagcatcagaggccgaaaacctctttttggagaaataggacacactattatgaacttacttgttgtgagtaattgaactattttattaggtatttttatactgttactttaaaactgtatttagcaaagtttatacatttatattttcctactttaatttgccatatttggtataatgaccattcatttacaataaatcctaattattttaacattagtgctcagtttttgacgaattgctttttagaacgtactatctcctcatgtacgtgtacctgattctaagtgccttttgattcattctcctgcagttcttggatatttaggtaatgtaagaactctatacagacctcttaaagttgttgaaacttttgtaaatgtattagtaaagtcagtcagtcttgtgattttgagcaaattatggccttagttttctcatttataataggaagtgttggattagatgatatctaaagttcccttccacctatactttttgtaattttgtgtttccctgttaccatagaaaaatgtttcagtggactcacttttatttatccatgcctagtttgaagaccttttctatt

SEQ ID NO: 36129 - DNA, 1024 bp, Homo sapiens
cttcgttttggcttttctacaatgcttgttaatgaggtgttaataaagtctcttcactttggttggtccacatgaccaaattccccaacattatttgacttctattacctctgttctgttccccatgctgtaacactgtgctatgtttaagcctcatctagtctcactctgttattgtgtccccagttctagtccaaagacttcaaagtcttccatgcagttttctagtgcccccctcttaagtgtcctgactgcagattctaggcttcaccaaactctttatctcttgagttctcagccaatagggccattgtagacttagtgggtcaccttgaagaaattatccccaggcagagagctcagggcagagagtaagggctctctgcctgggaataatttcctcatggtgacccactaagcttacctgagttctctgcctggagataaccatgggcttaacctcttcagtttccctctagggatctcagtattgcactgcctattgtccagaacctgaaaacagttatctcatacattttgtctagtcttagggtggttgtcatgacagggctatctggtaccagttatttcatcatagccagaagcagaaattctctttgttttaaccttaaaaaaaaaattcttaactttgcaaaatacttgtcttatttcctagtggaaaacaaccattaagatgattagcaaatgatttaaaacttgtatcttacacagaacatattttgatagcaaattttatggcttagatatacacattggtatttggcaaaagaaatgtgaaacttagtctcatttctagatggcttaatggtacaaataactccagagaccatgaatggcttgcggctagctttacgagaacagaaagactttaaaattacatgtgggaaagttgatgcagtagacctgagagaatacgtggatatctgctgggtagatgctgaagaaaaaggaaacaaagggtaggaatttttttattctaaaatataattgatttgaaggaaag

SEQ ID NO: 36130 - DNA, 1087 bp, Homo sapiens
ctcccaaagtgttgagattgtaggcatgagccaccacgcctggccccagtattattttaatttgtatttctcttaacaaggagtgatgatcatcttgcatgtaaaaacaatttgtttttctttgaactgaaagttctctttctgacatccaggtaactttccaacatccaatatagattttcaaatcagagaattcattagaatggttaagctaaacgtgggtgagttcatatgctgagggtttgcttttctccagccaggatatattttactcatagttcttactggaaaaggggttttgtttttatctcactattaaaagtcctcttttcaaggaagcactcactatttgttattggagtaagcactgtaaatttttttagccaattgtattaaaatgtaatttgcaccaatgttagagtctaatattaaatattattgcaacaacaaatttgaaatatttcaagtagatttttttaataccatggggtttttaatttaagtaatgtcggcagttattcaaagcctcatccctctaatttgtttatgtgttcatttagaggaaacgtaaagtatgacatagtggcaattttatctttatgatatatgaggaggaacaattataatttatgtagtagacagataaaagatacaggagaatgtagaatttttttataaatatatcaaatattttatttaacatgcttgaactgtattttaaaatatttcacttattttatattcacattccgagttaaacaagattgctcattttcttatcaagaattttttttttttctaggttgaatttcaggcaggatctgaaggccaacttctgcctcagcattatctaaatgatcttgatagtgctctgatacctgtgatccatggtgggacctccaactctagtttaccattagaaatagaattagtgtttttcattatagaacatcttttttagtgaaagaatgtgccatattacatattgcaacctaatttgttaaaactaactccagcactaaagctgaaatgccacaaacactaaaagtataaatatgtctgatttttgaaacacataagctttgct

SEQ ID NO: 36131 - DNA, 1100 bp, Homo sapiens
tgccaataatgattttaatgaaggctcttttcagatgtaaccttatgaaggaaatatctgctttgtgtatatgccagttagaatactggtttctaaagtctgtcaaattgtatttcagtggcacaaaaaccagttttgaggtcttagacttataattctttgaataaaactgataacttatttgtataattggagtggagacctacctccataattagataaactctttttggattataatcagaattttgccttttttcttctcaaattattacatatgtatgtattatatatccacatatatagttttccctgattaaatggatattaaaataattgcgggtgcttcaggactttttgcttctatatttaagtatattgtttttatagcaagaacatattctgaatgttttataaatctttaataatttatatgtaggtaatatttttgtatcacaatgcattatttttttcctcctttccttccaaactataccactgtatttaccacttctaagagtgactgacgacgggccagatgacccttgaagtagtcattatgtagcaataaatgaagcctgaaacaggtttttttacttccactttaatccttagaaatttcttggcaacttcgcatattttcattgacaccagtgtataagtataaatttaaatgaactaattacttttgcatattttaaattctttatatggtagttattttttataacaggatattaacataagttaaatcctatgtatttgaaattgttacagagctttcctctttacttcaaacagcaaaaaagtggggggcatattgtagtcctgtcatttaagttatgtaaaaaatttaatcattattttgatgctttaaacattctcatgtgtaatatatgtttttgtatcaaaaacactcatatatttcaagaaaaagaaattatgttaaatagccctgttttaagaaaaatatttatgaagcatctcaacttgaagatcaagtcaaagttataactcaggatctgaggtctcaagctaggagagactgagaattttaatcagtttgggcatatagtttggactgaatcacatctgtagta

SEQ ID NO: 36132 - DNA, 1050 bp, Homo sapiens
tgtagattttcaaacatgagcaatgaatatccataatttctaatttgaggagtgagaagataaaagtacgatttttattcccagaaagcttcagcaaatacttattaagcctttcattatgtatgtactttgctggtattagaaagaaattcagaatttgtatgtcaacagcttaagatctgtgtaacttagggaaagtcatttaacttcttgacatctgtttgctaatctaaaaaatagggagaatgtgtacggaccttgtatactgcctggcatgggataatcgctcactgagtgttacttttctttcctttttttttatcttcctcaaaaggatactgaacatggtgcctcctgtagttctgtgccctgttttcttagcattaactgaagttcttttatttggacaggtactgctcacatgatagaggctgatgtccttcttccaagtgatggatcagaacacagccagccaattatggcccatccccctgaaacaaacagtgataatactctacaggagtggctgactgaagttatgaaaagcaataaaggcatcaagctggatttcaaaaggtatttgtataaacacgttcaattttctgggaaaaaagtaatagctgtgcctgactacctattttttttaatgttatccaaactgaaaatggaattgtagactctaatatatttcaggactgaacctaaatgaacctaagacccactgagttatttactaaaattgttttttggagacccttaaaggcaaaagttagattaatttttataaaggaatttatcataagtgaccatcgtgacaacagaaaggtaaattaaaaatgctacatatgttaaaaagtaacccaggagagagagagctgggagaaattcattgagctagttaatgcataccctatttgatttatgttattatatttgtaaagggaattatttagaattctccaataaccaaagtgtttcttaaaaataatgcttggaggcagccgggcacagtggcttcagcctgtaattccagcactttgggaggctgag

SEQ ID NO: 36133 - DNA, 1059 bp, Homo sapiens
ttgaacttgggaagcagaggttgcaatgagccaagatcacaccacttcactccagcctgggcgaaagagcaagactcttatctcaaaaaaaaaaaaagaaaatcaaactgattgattaagtgaagttccatatgtttctttgtccttagtgttgtgttcattttcatttgaatttaatttctttcgaagtagctttcataatttgtttttctgattataaaactaatatatgttcattcagaagacaaaaaaaaaaggataaattcataagttgaattctgtaacccagagaaaatgactgttaaacattttggcacattatttccgtgtgtgtatatcacttttttccatttgtgaacttgcattcctgctgcaaaatcacttttctattctgtggtttttttttttttaactttacaattccccatttttaaaaactttattgcagaacatttcaaacatacacaaaattatacagaatagtgtcatgaactcctgtcactctattagccagcttcagcatttctcaggaccattctcatttttctacactccctccccttttctctctcccttgattattggctttgaagcaaatcctagggagcatcagtttatcctctaatatttcagtaggtacccttaaaaacaaaataagtacatgacattgtcatataagtgtatcataatttatccattccatttttattatattcatttttccagtattataaatactgttatgatgaatatccatatacagaaatactcatgtgcgtttctgatgatttccttaagataaattcctgaaaatggaattaactggatcagaaggtatgaatgtttataaagctcttgattgcttgctagaaatggtaatatcaatttatacttctaccagtatagtctaggagggttctttgaacctttgctcacattgagggtgatcatttaaataatctttgccagtcacatagatgaaaaattttgcatcaaatctcttcattttgatcttaatccttttctgaccatgtgttcaaacttgaataattaaaagtc

SEQ ID NO: 36134 - DNA, 1056 bp, Homo sapiens
acacattcatttttttgttttctgcttaattttataaaataacaatggcgaaattcaataaaatatcaaaatatttcataatgacattgtcaaaagtgaatttttgtttgtcaagcagcattcattgactggtgatattcctaaatgtttgttcatcacatgagatttaaaagcttgaatttggcatatcaaagataatttaggtgtcttatgtgggttttaccaaatttaatgcctgcttttgtcttattttaatttgaatttctctagttagcattgtaaataattttctctatgtttactgaccgtgtgtaatttttcaatctttgcacttttttttgtatcctttgatcattttcactttatttgcatattggactaagcgaagtcaaaagttaaatctgcatttctgtggagttcctacagctaatttatatctatggacagaatgaagtagaggaaattcaaaagttagcaggggtcaaacagtgtggactcttgtgactcagggtttgagttggaaaactagctcttccctttagtgactttgagtaagttatctactgtattgtccttcagtgtcctttatattgggggtattaagagtgcttacctcatggggttgttgtgaggattaaataagttaatataggtaaagcgcctgaaatagtacctgctgtagaaggctctctgtaagaggaagtttttttttttatattttaattaaattttctgtggctgggcgcagtggcttatgcttgtaatcccagcagtttgggaggccaagtcaggcggatcacaagatcaggagttcgagaccagcctgaccaacatggtgaaaccccatctctactaaaaatacaaaaattagccaggcatggctaaagttttttgtaggtacataatagatgtatatatttatgggttacatgagatactttcatacaggcatacaatgcataataattacatcagggtaaatggggtatccatctcctcaagcatttatcctttgtgttacaaacaacccaattatactcttttagttattttaaa

SEQ ID NO: 36135 - DNA, 2225 bp, Homo sapiens
ataaacaaataatatttactagttctcaaggaaactgacttttcaggtgaatcaggtgaacatcacaaatgacactcaattttgcgttcaaagaaatgagagcttcctgagcactggcatagccaaggaaggctgtatgaaggaggtggggtaggctggtacatttgcagaatagaaggctttgagttggtaatggggaggggggaagggtatgttgtgtgtgtatggaaatgatatgaggtctgaggcacacaggctggaaatattagagaagtgtgaagacagaagggagatttctctgattagagggaactttcatgttgagaattgagaaagaaagggtgaaggcctatgaaatccagcaaactggtatggattcctgtagaaggcagtaaggtttctgggaaaaggaatggcatgatagaagggaagagatgagtgtactgcctagatgggacagttgaattttaaaaataaatatttccctaaaggaaaaagcggatacagagaaaagaatcagatcaaggagcttagagaatgccaatagttgggaataggagcaagaatacaaacagaaggggaggaattaaagagctaggtggagaaccaggacaaggtagggatgtgtagttataatttgtcacacgtggtataaccaatgatgtgagctaattttttacattattgactctgttatagtttactgaaactgtatgacattcagaaagatacttggttaaaaactagccttagctcattgatatcatttgaaaaagacatgtggaagaatgtcctgtggtaccacagtgactttagctatctgacctttgaaataaatgcttgaacacataagtgcttcctcaaagatagatgtgtatgctgcagatttaaagaaaacattgaaatcttaatgttggggaataagaataacctctactatgtttactttcagtgttagaaataccttattattatgtctttttggccacagagagccttacatcatctgaggtttaaccaaaagtattatctaacatgattctttatgcggaggcatagtaccacctgaatgtcacttatggtgacacgtgtttgaaattaccatagtagcattttcattttgtgttcatctcttattaaattaatttatatagtagaaatcacttattactttatgttattgtactttgactttcaagtttttaatggaaaatatttagcagagttttggtgccaaaatgaagtgataactgtgagactatataattatcagaggaattgttatgcaaattaggtatctgtgttatgactgaagtccaacttctttctaatgtcatttgaattaaacattagtataaaggtttcaatttttttttttttaaagaatgagagtaaaagaaacaacaggtcttactcattaatttggttaagaggaagtgcttcacacatacgaaatgttattaagtggtcggtacttgatggtaccaatttcgtgattgcagtgttacagttctatcaaagtttaataagctcaattctgtgggttcatatgaagtcatttcaatataattcttagatatttagagccaagtaaatgtggaatggcataccaaacagtgggtagcatatagatatgaataacatggtgcctaaattaggtgggaaggtgggactgggtagaaagagggcattccaggaagtgtggtcacaggatgagaaaagggaattgggaacatcgagttgactggagtgttaggaaaatatgggtcaagagtagcctgcaacagaatgtagtgcagaagagctgttcagtgagtatttgctgaatgattatgtttaaggccagagaggaagactggagctgtttcattgaggatgctggctgggcactagtgggaggagcttatactttatttagatgtttctcaaatttggcctaccaaccttttaatttactactttgtgttagaattttcttatttaaatttgttaaattataattttaaaatttacaaagttaatacatgtttgttgtaaaagtgaaaaaagtctattttaaaggaaaaaataattcttgctaacctcctcacccatttcacttaaattagttttattataatgtgacttaaatatttataaactgaaaacttagtgctctaggttttatacctattttaacaggaataaagtccaagcaaaatttgagattaaagtaaatgtatgaa

SEQ ID NO: 36136 - DNA, 1022 bp, Homo sapiens
tggaggtgtgagagagcgtgcttttcttaggaagcagaaactagtttggctgggttactctgccagcatgagcaggcaacctgaggcaggacagacgtgttttggagagaaagggtgtataaagctggaaaccatcattctcagcaaactgtcgcaaggacaaaaaaccaaacaccgcatgttctcactcataggtgggaattgaacaatgagaacacttggacacaggaaggggaacctcacacaccggggggcctgttgtggggtggtgggggggacggatagcattaggagatatacctaatgtaaatgacaagttaatgggtgcagcataccaacatggcacatgtatacatatgtaacaaacctgcacgttgtgcacatgtaccctagaacttaaagtataataaaaatatacaaataaataaaaaataaaaagagaatcaagagtgaaacggtggagtgagaaagcggcattacacagggcctggataaagagtttcctgtgacagagactgagctgagatggctggtgatggggaccgtagcctagtgaccctttgtgtacccagcacctatcaaagtagctcacacataataggtgcttaataaatgcttggtaaatgaatgattaaataagtgatgtttagaataaagagaataatgggtatctcctatttgtttttcttaacaaaactgatttgggttttttaaacatagaagggttgttgtaaggctgggcgtggtggctcatacctgtaatcccagcactatgggaggacgagatgggtggatcacctgaggtcaggagttccagaccagcctggccaacatggtgaaaccccacctctactaaaggtacaaaaattagttgggtgtggtgtcagcacctgtaatcctagctacttgggaggctgaggcaggagaatggcttgaacccgggaggtggaggttgcagtgattcaagattgcaccactgcactccagcctgggcaacagagtacaacactgtctccaaaaaa

SEQ ID NO: 36137 - DNA, 1038 bp, Homo sapiens
gaatgaagttggacccttacttcatgtcatatttgagtttggaagataaaatggaccaaagacctgatatgagttaacactgttatactcttagaagaaaacataggtgtaaatctttgtaaccttgaatgaggcaatgatttcttaactatgacatcaaaaacacaagtgagaaaagcaaaaatagatacattggacttcatcaaagtaaaagcttttattcttcaaagaacaccatcaagaaagtgaaaagacaatccactgaatagaagaatttttgtaaatcatatatccagtaagggacttgtatctagaatatatatatatatataaactcttacaagtcaatggtaaaaagataactcagaaaatggacaaatgatccatacaggtttttctccaaaggatatatgcaaacaaccaagaagcacgtgaaaatatgctcaacatcattaagcatcaggtaaattcaaatcaatgccacagttagataacacttcatactcactaggatggctataactaggaaaaaaaaaggtgttggctgggatgcagacaacttgaaatcctcatacattgccaataggactataaaatggtacagccattttggaaaacagtctggtagtacctcatgacattcactgtgtgatccagcaattccactagatgttacttaagacaaggaaaatatgatgtccacataaaaacttatacaaatgttcataagagcattagtcacaatagccaaaaagtagaaacaactctaatgtccatcaactgaagaatggatacctaaaatgtgttatatgcatacaatagaagatttttcaaccataaaaaggaatgaagtacagatacatgttgcaacatgatgaaccttgaaaatattatggtagttgaaagacatcagtcacaaaaagtctcgttttgtctgattccatttatatgaaatgtccagaataggcaaatccatagagagaaagtagattagtggttgcctagggctcttgggttgttggggggaatggagagtga

SEQ ID NO: 36138 - DNA, 1044 bp, Homo sapiens
tcagttcatggggctgtgatttctattccaccttcctgcctttttgtaaactttactttgatgtttgtattgcacagggtttgtgtatttataaaagtttcaaaactctagtaaagtcagaatctaattcatttaaaaagtggccggtatgcagtgcaagaatgacttattttggaatttcaaaatatagtttactaacggaacttataactcacttggaagccattccttgttgctgttttagtgtttgtttacacaagaatgtacctaaagattagtttgaagggtgaagagtagaaatgatctggtaacaaaccaacttcaggaaagctgaatgctttaaaccaatgttttatagattagttggctggctctgtgtacacaccatcaaacatatgtctgttctttattattagattactctaaataagcttctactgtgtacaccacatagtgggtgatgtcctgggtacagattgtgccaattatgtgaaattcataaaatgagaaggaacactggatgttgtgggaagtggttagcataggctgtatggttttgtggaacgtgccctggaatatgtaccaataggtgtttttatggtgataatgatagaggatctcaagtgagctgattctggtataaaatagacatttcttcttcttctttttttttttgaaacaagatctcactgtgtcacccatgctggaatgcagtggtgcgaccacagctcactacagcttcagcctccagccttctgagtagttgggacaacaggcacgtgccaccatgcccagctatttttttttttttttttgcatttttttgtagagacaaggtgttgccatgttgcccaggctggtctccagctcctgggttcaagagatcctcccaccttggactcccagtgtgttgggattacgggtgtgagccactgtgcttagcctaaaataaacatttcttttgatggcaaaatgttaaattcaaatcctgtaaatagtgctagtcacaggaacccataataactttgctcaagaactgttttg

SEQ ID NO: 36139 - DNA, 1032 bp, Homo sapiens
aaattatttgtgaaatgactttaaaggaatatattaaatccagatagtaaatggtgaaatctattttttgtgtgtgtactgagagttaaaataaactttgaattttttaagttacagaatgatagattacagtatgacttttccaaagaaatcacaacgagtgtgatgcatacataaacataaatgcacagaagaaggttggaaagggtagacaccaagctggtctcagtagtaacatctgggaaggagagctgagagtagggcagggctcagaggtgcttgaatacacagctaaagctgtagataaaacagatatagaggtctttaaaaagcataaagaacatcaaggtcaaaaaatgattcttgtatcaaagtaaaagatacaaaagaccgtagaaagatgttttaattgaacagcgtatgaaaattttaggtcatttcatttccaagtccaacacatagtttatattaataattacatctagaaataattttatgtgatttactttattgtattcattaatgaaaataagtagcaataatctgaactgttatctttactaatgaaaatattggtttgatctcagacaacaatagaaaaatgaagaataaagcccagcatggtgacatgcacctatagtcccagcctcctcaagaagctgaggcaagaggatcacttgagcctaggagcttgaggctgtagtgtgctatgattgtgtctgtgaatagtcactgcactgcagcctgggcagcacactgagaccctatctcttaaaaaaaaaaaaagaaagaaaagaaaaaaaagatcttgtaaaggtaaactacaagggtgaagccatttataagactcttctaaagtatgtgcttcagtgcactattataataataaatgttttcccaattttgatcttatagttcaaatttaacttttatactcaaggttttattctggacatatgttcttaaaatctatgtttaaagttttgttttctgtcgtacaaacagagtactgaaatttttcatgctatctta

SEQ ID NO: 36140 - DNA, 1056 bp, Homo sapiens
gtttagatttcagacagagagatcaaaggtaaagatgtaaatttgttgtgagacatttttgtgtacgtgattgggtgtggatgagatcatcttgacagacagtatggtggagaagattaatgttctgagactgaaccttaaaactgccaagatttcatagttgagtaagaagttaaggttgaaaaccaacaaaggaggtgtagccagagaggcaggagagaaaaacaggacattacagtgtcatgggagcgaggggaaagagtgcttcaagaagaaaagtagtggtcaacagtgctgaaaggtcaggtgagttgaagcctgaaaagtcacctttggtcttagcaaaatagctgtcactaatgaccttagcaggagctgctttcgtggagtggtggggccacactgcagttaaaagagggctaaagagtgagttagaggtcaggaagtagagggggttagtacaggtgatactgcaaaggttggccaggaagaagacaggagagatccagtgagggacttgttttttgtttttaaatggtagacttgaacgtacttcaatgggatatccagtgggatatgttatttccaagaatttattattctaaaaataaataaattaattaattaatcacctttggaggatcctagaatgaatcctaatgatacttaaaatcaaaatatcattagtcacatggaggttgaaaactgaaaaataaagatccaagcaggtatcctatcttttcaaataggtaacggggaagtttctctttatagaaatgttccagccaataaaccaagcaggaatgacaagaattagagtatcaccctttttgcaacccctgatgtaataacagatttaagtaataatcagaaatggctgctaatgtcaccaaagcagagacaaccagacattaggtaaaagtttgtgacaacttatgatgtcttctggccaaaaaaaatcaaactgaatagtcgggcatggtggctcatgcttgtaatcccagcactttgggaggccaaggtgggtggatcacctgaggtcaggagttcaagacc

SEQ ID NO: 36141 - DNA, 1037 bp, Homo sapiens
gttttgcctgtaatcccagccacttgggaggctgaggcaggagaatcgcttgaacccaggaggtagaggttgcagtgagccatgatcgtgctgctgcactccagcctaggcaacagagcaagactccatctcaaaaaaaaaaaaaaaaaaaaaaagcttaatactgagtcacaaatgttcatgaccgtatttaagagaatgaaggctaaatgacacatccatctttttggtaggttgcattatcatttgaaatatttgttgcccctccctgagttcaccttcctgcagaaagatgataacttacctggctgttaaggtctagcacactcaatttgcttgctctatgcctagagcattgtgaggaaaagtgacatatgtcactttggaggagaaacattaagaacaagcacctggtttgctgcatcttttattcctctactataagaccagctacagccaaaataagacctgctctatgagtctgggtctatgtgtggagcagatttgcagctgacccataataggcgtatgatgtgagccggaaataaacctctgtttatttggggttgtttgttcctgcatcattactttagcttatcctgactgttgcattttccatccaaataacagcagcatcataaacatttatataatttgtataacagtttgcttaggcttcttatgtacctatttaccctttcccaaaatccaaatttactcagtttcatcttcttgacaacagaatcccaacttcattccagctgcaatatgcccaaccccagcatgtgtccaactacagttcaattattctaagccaatcacagcaactcagttctcccttgaaagtcattggcctaggggttagcatatgagtcagttctgaacaatgagccttaaggagaatctgcctaagatttcaggagtatctttcttttctgataagagcagcatgcaaagtcagaaagccttttttgtcctcttcccatcactttcagctttaaaagccataatagaagaatgtggtgctcgagctctga

SEQ ID NO: 36142 - DNA, 1098 bp, Homo sapiens
tctgcagctccaaggaggaccggtcggcctggcccacggccgtggcagtgccaagtgctgacgatacccaggccaaggcccaggagaaacttgcgttgctcaaagccctttcacataagactggggaccatgtccgaagtgaaaacagctgtctgttgttcccatttttcatcagcacttccggatccgccccacacgatataatttgattcaactggtaactcccgttgccagatgaaatgtctctgatggacacttgccacgctttggtaatgcagaagctgtcgtgtttgcgaagtgtgctttgggggcatcactcgataaattaagcttttgaagagttgaagatatttgtgccggaaactgtggagaagcaacagcctgacagtgcctatttctcctcggctgttatttcaaaatgcaagacgtaaaccacatcccaagttatttttttagtgcttaggtcctctgggggaggggagaatgccccaggcaattgatttgagacaatatattgcacacatttataattttgaatttggtgaggagtggaatataaatttggaactcaaattaatcgttaatgtagtttctgtttataatgtgccaatacatttgaagatatttgtgttgccattgcctaccataatgtactgcttaaaatctctttttacctcatcaagaacaagacaatgttttgtgcacattaatttttgcacagactactttaaaagtttaatgcatgccattctattttccattatttatttacaaggagaaaccacacatatgttaaagtttgggagtgtattttaggaaatgattccttttctcatttttggctttagatattcttttttctttaaataagggtggaatataatgctgacaacatcaggcccttgtaatgcctcctctattcctctgcacagactgtgtccccacattggcttcctgcctgccagcctctgtgcctttccttgtgctgtccccagcctgggggctgggaatgtccttatccatttcttttgtgcctgttgaagttctgcttgtcccaccaggctcagatcagatacctcgaaggagccttttataatt

SEQ ID NO: 36143 - DNA, 1029 bp, Homo sapiens
ggctttctctagcccattccttcaaactcttccagcatctgtccattacccagttccaaagccacttccacattttcaggtattcgttatagcagtaacctcacttctcagtactaattttctgtctttgttttgtgctacctgagactaggtgatttataatgaacagaaatgtatctctcacagttctagaggctggcatctggtgagggccttcttgctgcattataatatagtggaaagtatcacatgggtgggaaagagagtgaagtaggccaaactcattctattcccaagataaaggcattcattcattcatgagtgcagagtactcatgatgtagtcacctcttagaggtctcacctctcaacactgttgcattggagtttaagtttccaacatatgaactttaggggacatatcaaatcatagcatggagagaccaagataaatgagaaagagctggatcaagctcttagggaaggacactgacacaggcttcgaagacctgtcagtacagatattggacagagtgggatcatgtggacacagccagtggctgctggagagctttgtcatgtggcagcactgatcattcatggcctggggccagcagatggagggaacctgtgaataacagtatggccgaaatattaggctctttctcatattagagaattaagttgaaggcttcatgcctctgcttctcactggatttccccaaaacaagtgatttagtgttatatttttttcagttaatttatccagatggttcataggttagaaatatcattttagagttccagtactctaaaatagttaaatgctgagctctttccactctgggtaatggagaaagtccaagattgtatgtatctaggaggggcccatggcacttggtgaagcccgtagagccaacctttactccagagctgtcagctcctctgctccccaggcttcttagtcacattcaccacctaatgcatcccccttagctctcattttaccctgatccctcccttaatcctt

SEQ ID NO: 36144 - DNA, 1055 bp, Homo sapiens
aatagaaaaatggcggatataaatagaaccatatcaaattccattaagcattaattcatggaaaatgcaaatcaaaaggtaaatattgtcaaaccatataaaaaagaaatatctaaccatatgccatatatgaaacacattttcaattaaaagacacaaataaattgaaagtaaaggaatggaaaaagatattccacgtaaaaaaaattcatgagagactggagtggctctactgataaaatagactgtaagaccaaaaaaaaaaaaaaacttattaacagcaaagagcggtgttttataatgaaaacacaggcaattcttcaggaatatataataattataaatatatgcatctaacaacagagccctaaatacacgaagcaaaaactgacagaattgaaaggacaaatagacatttcagcaataataattgttaactttaataccccactctaaataattgatgaaataactatacaaaaaatgaaaaggatataaaagagcttgaacaacactatcaaccaacttgacctaatagacatatatagaatactccatctgatgaaagtgtatacatttggggtttttttagacagagtctgtctgtgatccaggctagagtgcagtggtgtgatcatagctcactgtaatcttgaactcctgggctcaagtgatcagcctcccaagtagctaggactactggactgactaattctttttttaatttttgtagagacagggtctcactatgttgcccaggctggtctcaaactcctggtctcaagcgatcctcccgctttggccttccaaagtgctgagattataagtgtaagttacagcacctggccagaatatacattatttaaggaagacatgaaaatatctccaagatacaccatacattaagccataaaataagtcttactagattttaaaagtctgaaattatgaaaggtatgtttcgagaacacagttagaaattaataatagaaataaacttgaaaagtctcaaatatttagaaattaaacaacaaattgttaaataactcatgggt

SEQ ID NO: 36145 - DNA, 1027 bp, Homo sapiens
gacttggggggttgccagggatgctggtcttaaaaggtgataatttaggccgggcgcggtggctcacgcctgtaatcccagcactttgggaggtcgaggcgggcagatctcctgagctcaggagttcgagaccaccctgggcaacatggtgaaaccccttctctactaaaatacaaaaaattagctgggcgtggtggcacgcgcctgtaatcccagctattcgggaggctgaggcccgagaatcgcttgagccctggcggcagaggttgcagtgagccaagatcgcccactgcactccaggttgggctacagagtgagactccgtctcaacaacgaccacaacaacaacaaaaaaggtggtggcttaatacagccatgctccccttaagaactggtatagttatgagaaatggttgggccgtttcgtggttgtgtgaacatcatagtgtacttgcacaaacctacacagctgggccgtatgggatagcctgttactcctagtctacagacctgtacagtataactactaaatactgtaggcagttgtaaaaggatggtgtgtatctaaacacagaaaagatactgtaaaaatatagtgtaaaagaaaacatggtacagctgaatagggcacttacgcatggagcttgcagggctgtcggtagctattaagtgagtcagtgagtggtatgtgagtgtgaaggcctacgatattatttagggtattactgtacactactgtagactttataaatgcggtatgcttagtctaagtttattaaaaataaggtaataaccttagcttactgtgcttttttaactttataaacttttaaattaattttaactccttgaccttttttttttttttttgagacggagtttattctctctgtctctcatttttgagacagagttttgctcttgtcacccaggctggagtgcagtggcgcaatctcagctcactgcaacgtccacctcttgagttcaagcgattctcctgcctcagcttcccaggtggtgcgcgcct

SEQ ID NO: 36146 - DNA, 1029 bp, Homo sapiens
gtgctgggattacaggcgtgagccaccatacccggcccactcttttgtaataacacttagcttaaaatgctaatgtgttgtatagctatataaaaatattttctttattcccttacattattctatagctttttcctgtaaaaattttttttgttgttataaactaagacacacacattgtgcctacaccgggtcaggagcatcaatatcactcttttcttcctccacatcttgtcctactggaaggttttcaggggcagtaacatgaatggagctgtcatctcctataataactgcttttttctggaatacttataattgtctagtattatgtacagtacatcattgtaagcattatgcttgtatatgactggcatcccaggtttgtttacaccagcattaccacagacatgagtaatgtgttacactacaagttatgagggctacaaagtcaataggaatttttcagctccattataatcatctgagaccagtatcatgtgtgcagtcgctgttgacctaaatgttatgtagcatgtgactagctgatgaatctttgattatggctgaatgttctcattcattgcaggaaaaaaatatcctccaaatcactaggtagtatgtaagtgaccaaaacttttttccattttatgttggagccaaatcattagtgttaggataaattacttctttatgtatgtgctctaaaatgaaaagttatttctgaatattaaagcatatgtattaagagtataaaaacaagatacagattttggtgtgaaatatatcttatgattcaagtcataatttaaatagaattgaagatgatgtgaaatcactgggctggaagtagcttataccttgattagtaagaggaagcccgggatcatcctgtgatggtaaacacttttatatgttttacttataactttgccaggaaatttcaacaaacttcatattaaaggacatgatttctgtatacttagtaatctgctatgcaaattgttgcattgaaatggcagacgaagc

SEQ ID NO: 36147 - DNA, 1032 bp, Homo sapiens
ttgctcactttcctttagtgatggagtcttccctccttgtgattattcatatcaaaatgagttcctttcccaaaccaataacaatctgagtggatgcatttgattactgtttttctaacattctgatttttctattcctttacagagcgaatggtcacagttggtcgctgggcaaagggaatgagtgcagactatgaagaaattttggatgtacctaaaccgcaaaaacccaaaacaaaaatacctaaagttgttaatttttgataacagctagcactatcatgagttactacctcattgttactttctaaaccaggcccgcttcacgagttagagttgagctcccctgtagccaggactatgctgtagatatcagtatgatctgggtgtggccaaaaacaattttctttattctgtctatcaaatagtacttctaccactgtttggagaaaattgaagaaaagaataagatgattaaatgaattctctaaaagaacatattttaagagacagaacttagacataaccaagtagttgtatacctgattgtaacaatcatcttttataaaagcaaaattatgcataaatgtaaaacacccctaaacaaagggaacaaatgaatttttggttatattgttttcttggctcaaagtatcaatttattattataatagaaatttataagttgctagaaagtctatatttttaaagtacggaataaaaatatgttttctattaagcaatagaaatatttttgtgtataatttttctgaatacttgattctcgattgaaatatccattgttcgttaatatccatgtaacaatcccattggaaacaagattttttttgaatcctagatgagaataaacagggatttggtttttgttttagttttgacataaaggattccaagttactgaagttaaaattgaaatatctcagtttaacagcagctcttttttgcccttgattttcaagagagaacttctagccaaaattcagtttttgttacttaaccagaatgatggca

SEQ ID NO: 36148 - DNA, 1050 bp, Homo sapiens
cactggcccacaccagtccacgagagtcaataagccatggtcctgctctcttgcagaatttgcttagtgtactacaaagaatactcaggtcaagagatccgctttccacttcctgctctgcctccaactaattagtgtaagacaagtttcttagaagtgctttagtccttcaccctcttatctctaaaatgagaggcttgaattggataaacttgaaggttccctttgtttttaaatcctctcatgcttgtccaggatgttttcagactctttctggatcaggttgttatgtgggatggaatctggatcctgtaaagaccttgtcatcccttagaggatggaggcctaggccctgagcttatgatctagtgggagaaataaaactaacaaatgttaaaaaattaaagaagagttaaatgttcaagtgtaagctatgataagtacaaaaagaatgcagggaagctagagaggagtgttaattggaatggtcaggaaaacttcattgccaagggggaatttgagttgacatcgttttttcctgggctgggtggactgcagggctgacaagagtggtggttctcctgcttttgagtttgcttgtctctaaaaaagcatccttcaacagtgaagcacaaaacatatttttctgccttaaattaaaacaaagtagaagaaacatctagttctgtggaagtctttaaagggaaatcaaaatccaaaaaactctatatttaatttttcaaggctaatcttgactgagaagattgatactgaaaaaaaatcaccactaccaaatatagagcaaaaaacccagcgtacttccgtatcgataataaaaaaatggtattagaaattacctaaaatgtaagtaaattcctcaaattataagtattattgaaagtgacatatctctttatcttaactaattgggaaagagaccagataatttatttagattttataacataggtgcacacgaatttttgactcacctcttttaatgtcaaaggagatgtattttgcattgttattagaattttactaaatttt

SEQ ID NO: 36149 - DNA, 1050 bp, Homo sapiens
gaagctgtagtgtctagggttatatctctcctaatcagctgctcgttccttcagtgtaagatccatagcttatttatctttgcagcactttcccaggggatgattttgaatgaatgacatactggaaggtgtattataaagaacaatgaaattttactctgtagaaaggctttttgtgaacataaccaatgtgacattattgctctacaatgggcattttatgaaataatgaagaaaaaattcagaatatacatacatgcatctgctccaaggtatattaaaaatgaaattttaattgccgtttatcccaaaggaccaaaagtgtcttattggacacaagatctttttaaataaaagtcgatccaccttccatactggaacttttacatataagatgatgtagtttagtgttcttttaaaaaataataaacgaatgtttcaggaaacctgtgatagactgaatcaggtggaactgatttaatgttatggataattacataattagtgatgtaaaaaataaaccatactatctacttgatggactggagctgctgtgaaggaggtacataattatataatcagcatcctcctcctgtgctgattctaggtaatactttttctgacttgtctgagaagggatctcctgtcttatatttcttgatgttatttaagtgaagagagctgagtgttcagtaattctcaattcatgagctaggtctatgtgagagcatccactgaacccaatgactttcaaactttttaaatataaacccataataagaaatacattttacattaagacctagaacactccacacatgcatacctgaaaccaaggttcatgaaacaattcttactctttctgatctattctactcaatctaccctgcgctattttgttttttaaaaatgctggtcaaggcccagcaattgatttcagaacttactaatggctcatgagtcacattttgaaaatacaacctttgacccttagtggttgctaacatcagcagaagggatttggaaggtaacatatgggtctgccagggg

SEQ ID NO: 36150 - DNA, 1058 bp, Homo sapiens
gtaatgtttctttttttttttaactgaactaaaatggttagaaattcattcactttcatgaaatagaaaccatatcaggaaatatggaagactggtgttttagtaaatagagatatatttataatttttccagataattccaatcatggttgtcttagaaactatgtttgtaaactagataaacaactatagtagaaaattaaaaaatactggggggaaggttccaacatggccgaataggagcagctccattctgcagctcccagcgtgagcgacacagaagatgggtgatttctgcatttccaactgaggtaccgggttcatctcactggggcttgtcagacagtgggtgcagcccatggagcagggcgaggcatcgcctcacccgggaagcacaaggggttggggaattccctttcctagcaaagggaagctgtgacagatggtacctggaaaaatgggagactccaaccctaatactgtgcttttccaagggtcttagcaaacggcacaccaggagattatatcctgtgcctggctcgtagaatcccacccctacggagcctcactcactgctagcacagtagtctgagatcaaactgcaaggcagcagtgaggctgggggaggggcatccaccattgctgaggcttgcgtaggtaaacaaagtggccgggaagctcgaactgggtggagcccactgcagctcaaggaggcctgcctgcctctgtagactccacttctgggggaagggcatagctgaacaaaaggtagcagaaacttgtgcagacttaaacatgcctgtctgacagctttgaagagagtagtggtcctcccagcacagagtttgagatctgagaacggacagactgcctcctcaagtgggtccctgacccctgagtagcctaactgggagacacctcccagtaggggccaactgacccctcatacaactgggtgcccctctgacacgaagcttccagaggaaggatcaggcagcaacgtctgccgttctgcaatatttgctgttctgcagcctccactgccaggccaacagggt

SEQ ID NO: 36151 - DNA, 1049 bp, Homo sapiens
attcaggtttctttcactattagaattctcttcattctgtgttctgtaacatggtatcagaaacttttttatcttaattttttattttaaatactttaaaatactccttaaagtagatagaacagtataatgaacacccagggacccatctaacaatctcagccatcaccactccatgccagtcatgctccttctatacttccatccacttacccctctcctgtattattttcaaacaaatcccagacattagactctctttattaacatgatccctctgtcatctgtattattagcaccatgaggtcttaaaaattttatttagtttttaacaagcctcaaattgcctcactgtttctgtgctttccatttttttattgaaattttttgagataaccataggttcacatttagtaataagaaataacaatcccatctaccctttacccaatatcccccagtagtaacttcttctaaaactatagtataatatcagaaccaggatgttgacattgatataatccactgaccttattcagatttccccagttttacttgtactcattgtgtgtgtctgtgtgtgtgtatttggttctgtacagttttatcacatgtgtaggcttacatatccaccaccatggtcaagatacagaatagttccatcaccacaaagatatctcatgttgccgttttataactagctctctgccctccagtcccccaacactaatctgcggtttttgacttcaaaagtgttgtcacttcaaaaatgttatataagtggaatcatacggtatataacttttggagattgacttttatcacttagcataattccctggagattcatccaggttgttgtgtatctcaattgtttgttcctttttattcctaaatagtatggtatggatgtaccacagtctgtttaaccatgacctgttgaaggacacctcattgtttcaattttttggctattctgaataaagctgctatgaacattcatgcacaggtttttcaatgctctgggataaatcctcgagtgcagttgg

SEQ ID NO: 36152 - DNA, 1069 bp, Homo sapiens
ctcagtctccctggagtctttaggcatctcttttacacaacatccgataactgacttttaactgtttctattttaaataatacaaatcaattaaaacacacagctgtttaacaaaacttctcagtgttggtataggtctcagtgggtatttcctgatggctgataatgacatcaatttagtgcacctggtagtatctgtgtgaactggaagtggtttaattcttaaatgacgagaaaattaagaaggctttatggattgctgctgctgctgcttcagaatcactgccagcttcctttgcaggcttccttcatggtggagctttatttaaatgggactacagatatcatgtgattgttttctctgtaattcactgctaatttattgaatctgagtttctaagtattagctgtgggtattaataagtcatttagggggcaggtttatggcagcacaataaatgtatctaccttgcaggctttttgtagaaacgttcctatgttttagcagtattcagtgattctgccacactttattgtctcaggagtgtgagatatactctgtttgttatatccttactttggtatcttcgagtaataatgacagttctgtttgtctctgtctctactagcaattatttttagattatcagtctgtacatgcattgtgacttttaatgtttattaaatgttgatgctatgggtaccatacatggtcagggtactttccatattcatttttttttttttttttttcagacagagtcttgctctgtcacccaggctggagtgcagtgacatgatctcggctcactgcaaccctcgcctcccaggtcaagtgattcttatgcctcagcttcccaagtagctgcgattatagtcatgcgccaccatgcgtgtatttttagtagagaaaaggtttctccccattagcttggctggtcttgaattcttgaccttgagtgatccgccagccttggcctcccaaagtgctgggattacaggcgtgagccaccgcgcccagccaatattcgtttttttatccattcggaaatgtttactgtcattcata

SEQ ID NO: 36153 - DNA, 1034 bp, Homo sapiens
gcagctccatttatttaaaatactaagctttcttgattcagttacctttgcacctttgtcaaaatcaattgaccatatttgagtgggtctatttctggactctctgttctgtttcattgatctatttttctgttcttccaccaataccacattgccttgcttattgtagctttatattaaatcttgataaaccctgtctctaaagaatgagtcttccaactttgttctttttcaagaaggaacctttaactttctgtgtaaatttttgaatcagcttctgaatacccacgaaaaatactgctgagattttaactgggattgtgttggatctgtgggttgatttggaaagaattaacatcttaatgagtcttctaatgtgtgaataaggtataactctccattcttgtatgtcttctgtgctttctttcattagtatgttattgttttaagcatgcagatcctgtatacatttccttaaatttttatgtaaatatttcaatttgggatgctattatgtttaatatctgttaaattttcaaattctagttgtttattgctcgtatatagaaatacaattaatttttgtatattgtccataggttctgagaccttgctaaactcacttagtagttctaggagctttgttatagtttggggaggggttttctatattgacaattgaagacagttttgcttcttcctttctaacctttctccttttttcttgccacattgcactggctaagacttatagaatgatgttgaatagcaatgatatgagggccatgatggttaattttttgtgtcagttggccaggctatggtatctagatagttgttcaaacattattctagctgtttctctgaaggtatttttaaaattagattaatattcagatcagtagattttgagtaaagcatattgatgggtgggtctcatctgatcagctgaaggccttaacagaaaaaaaaactgacctcccctgagcaagaaggaattctgctagcgtcttttggactcttaaaaacaactc

SEQ ID NO: 36154 - DNA, 1034 bp, Homo sapiens
tccagtgtttggttgtttaccctccctgcacagttccacagtggggcagccattgggtcaaagccaggaaataaaagacgaaaaaccaggtgacttacccccaaagaggttatttgaattttggctagtctttccagtctgctactatcgttaacttttcagagtcatagggtagttgctttttaaattttgtttttttagttttaatcggtgggagagataggctgtggtgggtttactccatgttggctggcactagaagtcttgtgtccttatgtttaagtgctatatatattttttatctcatattgttgtacttaaaaattccactctagtttttgtctgtaagccaggggagtttaatctgtttacctttattatgatgactgatatgtttcaattttttccttttatcttatttgtgtttctgtttgttctgtctttttgatttcctcttatgacattctgctccaatcttaaggaaatgatgtgactcttgtgactgctttttaaatctctaaaatggagataaaaggatctaaccagtgtgttatcttaaaaatgaagtaagataaatatttaacacttttattgcggtcccaggtataatcaatttaatttaataatattcattgagcacctatgaggtactcaataacagaataggtaaaaattgctgcttttatggagcttatattctagtgggggagacaacaataaacaaaagaagtaaattatattgtatgatagaacatgaaaagagctatggaaataaataaaacatggaagaggatagggagaacaccataagggtaaaagtgacaattttaaactggcaattcagttatttttgcatgtgggaagtagtactgctttattttttgtatgttttatttgtgtagtgttttatataacaccttccaaagcactttaacctcatattttgcttttattcttatacattgattcaacaataggggccagacttatactagactctggggtacaatgaagagcaaaagcagacatgagtg

SEQ ID NO: 36155 - DNA, 1054 bp, Homo sapiens
tttttttccttgcctatgctggactcttaatttccatttaaattgtataagcagcttgtgaaatttcacaaaataataccgggactttggtattataataagttggatctagaggtcaattcgaggagagtggtcatttttacaaaattaactcttccaatctatgaatatggtacatcctccattgattagtttttaatgttttcttttaatattgttttatagtattctacttatagaactggcgcgtcttttgttgcattttcttagcttcttgttttgtctagggccaccagtacattgttgggtggaagtggatatgggtattcttatctcatttccttcagagggagaaccttcaatattttaagtgtgaggtttgcattagattttctgctagatattttttatccaattaaagaagttttatcctattcctagttgagtcagtgtgtttgagatgttgatgttttaaaaagatcaaatgctttattggcatcttttgagataatcaaatgatttttctgttatactcctttaattgattttcaaatgttaaatcaacttgtattctggggaaaaaatacaacttcgttgtaatatagtatccctttaatgtattgctggatttcatttgctaacattttgcttgggacattttcattcatattcataagagaaattagcctgcaattttttttcttataatgtccttgtcaattttagagatcaagcatatgttaccttcataaaatgagctgggaagggatcttttttttttcctttcctctgcaggagtttatgttttgctgatgttatttcttctttaaatgtttgggaaaattaatcagtgaagccatctgggtttggagttttcttcttggaaagatttttaataaaaaacttgatttcttccatagatattaatctgacttatttgaaggtcgtcttttttaaaaaaatttttcctggctacttttaatattaacttcatggtttttttctactgttatatattgctgtagactgaatgtttgtcttccaccaaaaatcg

SEQ ID NO: 36156 - DNA, 1046 bp, Homo sapiens
cctgcatattttctatgctcatttcccccatagggtcatctgcccccacattctgttcccaaatctctgcatggttgtttttttccttgtcgttctgatctttgattaagtttcaccttattttagtccatttaggctgtcataacaaaaataccatagactgggtggctcaagaaccaacacttatttctcccagttctgaaggctacaggatccaggatgagggcactggaagatccagtgtctggtgaggacccgtttcctatttcatagatgccatcttctcactgtatccccacatgataggaaaagagtgagagttacacctcttagggtgtaaccctaagagggatacacacattcagtccattgtattacctcttccttcaggccttccctttccaagtctaatgtcaccacaatccctccagaatcatgttaccctgttgtgtttcctttgtagggcttataattatctggattatcttatttattcgttctgtgtgtttattggctgtctcctgcactgaaatctaagttccatgggatcaggaacattgtttatctaagagatgcagtggtctctataactatagctagaagtattctggcagacacataaaaaagatgattgattaatatatgttgaattgctaaatattagtttaaggcaggtaagggaaaccagattcaagttggacaggaggacttggcataggcccaacacatcagggctttgagcccagggcccagttagggatgggaatgaaggttgggaagagagctgtagagaggaagctgatgccttgctggaagaatcaggcgactggtcagagtcacctggagatggcactcagggagaaacaaatgccaggtggtgctaaaaatgccagatacatgcaataacctatcactagtggataactcatccctcaccaccaccaccccaaatctccatacccagtgtcaccaatacaagaggaattgtcccttccagttcttgtgagtggatatgtgcataagcatacagacatgaatgtttggag

SEQ ID NO: 36157 - DNA, 1050 bp, Homo sapiens
ttcacaaatagggaggtctggcatgctgaacctgcattcccacatgggacagttggctggagcagagtagccagcatggccttggatgggtgcactcggcagtttctcacgggccccgtcatctgctggtgtatttagctggcattatccccttaggtcacctgctttgtcttcataggtatttgagtttgcagtgttggtataatggttaatccacaatacaaataatcaataaatgtatcatcaataatagtgtttttgttggtagaacttgtgcacagattacccactacatagaaacctcctagggctccccattgcttgccaaatgatgtccacgtccctaacttgggtatggtctgacctatatcttatatccaattactaccttataaaagaaacagagttacatttcaggcttttaacttataaaaacagccctgtaggcttgggagagacagaaggagagaaatgaggaaaaagaaaaacaaaaactcagagacggaaagagagagagagacaaacagaagtagaacaatttaaatagtgcaggccatctcctcccatccctggttctactcgtggaacatgtgcccactggcactggatacatgtaggcttgaaacaacatgttgacaaaatttgtgtaaagaaatatgcaaatgattttgagtctcttaccattgacaaagaggtgaataaaatgaattgtttaggttgtcaaactactgagctttgtgaacatccttgaagaaaaactgaagaataatgataggccaaagagaaacactggccaacagagagggaactgataaaatgcaactacagtttatattgtgtaaacaaaaatgggtgccctgctatactcgaccatactgctttatcaatgaatagtcctttctcaccaacttcttctgatgtttggattataaattgtttttaaaaatagaaaataaacctgtatattaattcaataacttggaatttgagacaaacctttattttaaaggagtaaaccagataaattattttagccttttcaaagtaact

SEQ ID NO: 36158 - DNA, 1285 bp, Homo sapiens
gccagaaaatagaaatctgaaaactgatggacaaataagcttccttcctattctaagacttgattctccttatgctgctgaccagtaagttgctgaaggctattctattaatagaagggtataggaagtacttaacaattattgtttctgcggcacttcatgtgcacaaaggtgtttgaagctactcctctggatttttacagggcttctctatggaagcattttcacatttttattcctaaatctggtagttctttacagtaatcctgtgatctcaagcccttgctttaacttttgtattgttagtagtgacatctagtggttctgttgcaagtatcttgcattctagaccattggagctgaaagtgattttagtgaccaccaggtctcattttgtaaattattaaaaataaactgaaaactcacatgtattcctacattcaaatcaactctatataataataaataaaacctatagctgtgtaatgctttcttggattactttgaagcttttcaaatacccagaagtcactgttggttataaccatgaggcagaaatttaacaaagcatgccctgataaattaaaaggaaatcatagttcagtatagctacagcctttggtgcattgttatttacaggtacatgccagaacctcaggctttcgcatggtgcctggtgtttggtagcactcactaaatctttgttgaatgtttgaatatgtgggtgatcacgaagccctggagaagaatcacagaagatgtgggacttgaaggacagagaatttgataagaggctagaaagctaagcttttaagttaggggccatggaaggccaaaaagggaaccatgagtaggacccaacagggcacctttcaaggttttaacagagaaagttgactatgtgtagttgttggaggactcatttggaagtggtaaattggatggattagaaggaagagaaactggatagaggccaagaagctaatgtagtggtgaagtgatgaatttctaagttaggaaggtgacagagtaaagagaaagaaatcagtgtcagagacattttgagaaccagaacttgatgtgaagagaatgagaagacacttgttatgacttggttatggcttacattctatactgggagtccctgtccaggcctggaccgtcttccttggtctctgttctgcaggtatcagggattgaacttgctttcttctttcaagaagtgccacccaccctatcctgtgagcagatttctttctcccgaccagcagcagagtgagatgta

SEQ ID NO: 36159 - DNA, 1076 bp, Homo sapiens
gaaaacagaaaaatcagaaaatattgagctacagaaagaagaaaatgaaaatcatcaataatctaaacaccatttgtaatcactactaatgttttaatctctatccttccagacatttttttttaatgcagtcacttttttttttaaatggaaataaaatgataatgacaagtaaattatgacttttttcatggctggaaaacagtccattccaaaagagttaagattggatttgaagcccagctctgacacttactctccaagtgagcttattcaagccctttgtgtcttagattcctcagctgtgaagttagaataaggacattatctattacatggtgttgaagtgaagattaaacacaatacacatacataacacagaagttattaagagagctattactattattttaaaccacaatttagcaaattcttcattgatgtccatttaagtttttctcaaattttttgaataataaacacataatcaagtgttgattctaaaaaaggaaaaacaaaacaaaacaaacccaaactttgtgtgttttttctttcgtaggaatttgcactgtccactttgggtgctgccctgtcatttgctctttttccatccatccagggaaggctctgcagcaaaagtgaagcctttccccaagcccgttctgccgcctgacaaaagagggcgccattgtactgttcatagacgatgccttgcgtcagtaaacgtgggaaaagttctttaggagtaatgctgtttttataaccattttcagattcatccttaccaattacaacaagttgtccatccagagttggtttagtttgcgccgagtcgagatcatttccaacaattcaatccaagcagtctttaacccaactggcgtatatgctccctctggttactcctaccgctgccaacgcgtgggcagcctgcagcaggaccaggccctcttgctgcccagcgacacggatgatgggtcgagcctgtgggaggtcacttttattgatttccaggtaataaactaaaacctatgctcaatgcacctgcgtttttggtaccaaaagagctcagtgtt

SEQ ID NO: 36160 - DNA, 1055 bp, Homo sapiens
tatatgtaccacattttctttattcagttcaccactgatagacacctaggttgattccacgtttttgctattgtgatagtgttgtgatgaatatacaagtacaggtgtctttttggtagaacaatttattttccattgggtatatgcccatttgctgggccaaatgatagttcaactcttagttctttgagaaatctccaaattgctttccacaatggctgaactatatatattaattttggaatagagatttaacattatacacaattgtagtagctggttcaatagtctctgtgaacctatcttcacgtcttacactagaatttgatgtctgcagtgcaggccttttggaagggagggaggggatgtaaagtgggggagggcaaggacatcctgtgcatagtaggatatttagcagcatccttgacctctaccactagatacccaatacctaggagcatcccctcctccagttgtgatgaacaaaaatgttctcaggcactgcaaatgtcctctgggagacaaaaaccactcccagttgggaaccactgacataagtcctttgcctgtggattcacagctgtgaggaccctaaagtggctatgtggcagtctcaacttccagttgaatggaattgttgttttgtctcttggtggaagcattcctctttctttgtaactaagaaatcaaaaccagccaagccaaaagttgcaagtatgggaagcaaaacctttgctagtgaatcatcagggtattagtgagagggttacttctatttccatcccttaagtctcagattcatgaagcctggttatgggagtcaggttgctataacttttggccagttctacttacaatctcatttcttctcctgctaaatattatagatcacttacaaacttacaatttagcaaggatcttttgtttgtaaaattaagacaacccctcccccacctcttccagctcacctatgtaaagaaaaattagtctcagggtatctcatggatctcaaggtctggatcccaagacccagctaggtcttcttgaatgactgg

SEQ ID NO: 36161 - DNA, 1101 bp, Homo sapiens
actgtcttttgagcagagaggtggcgcgaaagctcaccaacttcctgggtccagtattctcaggaggccatctcttctgctgaggatggcttcctgcaatgggctgtgggtttgttttatctctgacccaaaatagcatttgtattcagttctctcaatggagagagtggagagagcaaatttcatttcttcattatgcaaaaagacacatgtatttataatgaacaactccatttggctttttacttttaggtgggcatagacttcaattgatgccagatcctcctttttccttggagaatcatgcttgtactttcttaaattacatttatctacccttctgcattttctttactctgatattctttttggaaacttttttttttttcaaacctccaaaccacaaagtgaaacaacagggaacatgttcttacaactgggaagtcaacatgacagacatgtttggatgtctgttatatagcttgctgtagacccatctattaataaataactgaacgtggccgggcgcggtggctcacgcctgtaatcccagcactttgggaggctgagtcgggtggatcatgaggtcaagagatcgagacccttctggacaacatggtgaaaccccgtctctactaaaaatacaaaaattagctgggcatggtggtgcgtgcctggttcaagagattcttgaaccagggagttggaggttgcagtgagctgagatcgtgccactgcactccagtctggtgacagagcgagagactgtctcaaaaaaaaaaaaaaaaattgaacgtatatgaagactataagtaggaaacttacccaccaagaattaaaaaagaatgaaaaggctttctgaatccaagctttaacttattttcaaagcactaatgtaggccagtggacatttgtcacatgcaagatgtattaggcattgtgagaccagattatggagaatgtgggaagctaagactgacagttgccaggttagcatcttcatgttccctgaacagaggaagagatgttgaggttgtcatgacatcactcacagaaggctcttgcatcactttcctcgtctccctttcattactagtaaga

SEQ ID NO: 36162 - DNA, 1029 bp, Homo sapiens
acctggcgaaagaagtgcacagagctatagaagcaaagccaaaagatcctacacagcattctctacagttccgctccctacagagggagggaaagggaaaaaaatatagagaaagaaaaaaaggaaaagtcttacctgcatgaaaatgattatgaaaattagaagggcaagtatcttcagatgagaaggaacagtgcaagaattctgacaccatgaaaaatctgaatgtagtgacatcaccaaaggattgcactagctctccagcaatggtccctaaccaaaatggaaactcagaaataacagataaagaatctaaatcatggattggaagggagctcaatgagatccaagataaggttgaaaatcaacagaaaaaaacttctaaaggaagagataaacatcttaacaagaaatcaattagagcttctggaattaaaatactcacttaaagaatttcataatacagttgaaaattttgatagactggaccaagcagaagaaagaattttggaacttgaagactggtcctttgcaccaactcagtcagataaaattaaagaaaaaatatttttaaaaagtgatgtaagtctttgagaaatatgggattttgtaaagtgaccaaacatacaaactgttggcattcctgagagaaaaatacgcttaaatacatagttcacagaccctataaagcaaccacataatagaaactacaaagcaaccagctaataacttcatgataggatcaaaatcgcacatatcaatattaaccttgaatgtaaatggtctaaataacccacttaaaaggcagagtggcaagttgaataaaaaaacaagacccatctatctgctgtctccaagagactcatctcacacataatgacacccataggctcaaaatcaagggctgaagaatgacctaccacacaaatgaaaaacaaaaaagagcagaggccacgatttttatatcggataaaagagtctttaaaccaataacagtaaaaaaaggacaaacaagggtattatataata

SEQ ID NO: 36163 - DNA, 1055 bp, Homo sapiens
tacttagaagaagaagtttatcagatttctagatgacaaggtcagagagataataaacatgttgggtcacaggaacagaatcactattcaacgtaaccttaacaagccaatataaaacataaaattgaacctcagcaaacacatcagacaacatcaacaaaaattacaaacaaaggatagagtaaaagtgacttagtaataacatacatagaaaaacaactaaacaaggtttagttgatattaaactcaaataggaatttttagaatgatgtagctgccaaaaacataacaaaataccctcaacacaacccctatcactctcactatcactaaaaacaataattaaaactgaatgtgatatttccttgaaattatagaagtgcagtatttaggatgaagtaatagtctttgtctattttttaattgtttataatacaactagactaccagttgggactcagtgaactatgctttgagtggcagagattaactgtagagaattttgtggagattaatcaaactagtgagggtatcagaaatcatcttataagaactgttttgactgcaagcatatagtcttaagaagaggcctgtcgtgtgtaagaggatttatacttaatctgtatggaccctactggtattactaggaaaaatgggtagaattcaagggtgacagatctgaaataattttaaataaatccaaggacaagtatttgtggaaagccttctttgggacaggcatagacttttcaaatcctcagcagacatatccagaagtcagcaatagggcataggagatcagagttggaaacttttttcttgtaacttgttccagaatcagaactggctgttttgtttcccacacatctcatatgattgcagaatataagcttggttaactaccatttgatgggagactggaaataaaagtcttagttttgttttagagtagtcttaaaacaacagctccttatctggcaatgctgtcacatggcagaagctccctaagcatacctctttcatggtccaaccctgtttctttatctggtaacttt

SEQ ID NO: 36164 - DNA, 1072 bp, Homo sapiens
ttgtttagcatttcattacaaataagggtttcagtcatatttcaatttaagaaatgttacaacataaagtaagtatactttaaaggataaagtaagtatcctactctgtatcttactatattttagaagttttatttattttttagtggaaaatccattctaagtttcagacagccttcccaccattatttaattgacgtttctcaaatatatgaaaatgaggtaaaaccagtttgccaaaataaacatccagagttctttttaaaaacagcagtccaaaatcctatattattgccatgtgtccctgtggtttcagggactctgaattcaaagggctatttccagatgaaatatcagaattgtagcatttattgtgtattctgccaaagattttgtcaaaaatagtaatgactttcaggtctgtgggaatatgggttgcagatgtgttgtttgaatgcctgaaaaggaaatcatagtattctttattttggtgataaaagtatttgtgtacatgtgccattttgatactgaacactatataatttttgtgatctttttggaatgtgaggactaagtaatgtaagtggtgaagaaatcccattaaaagtatacgttttctagctaagccatatattaaattttataatttgaaaaacaaaaatatcagtgtttagttatactgttttttgtttgtggacccattttctttcttgcttcatatttttctgcctttatttaaaatgtttgcttcaataataaatattttaaagtcattatatcttaacttttttgttcagaaaaggaacaacttagcataagaacagagcagaagtaggcatggcatagtggctcatgcctgtaatcccagcactttggaaggccaatgtgggaggatcacttgaggccaggagttcaagaccagcctggacaatatagtgggacccttctctctaccaaaaagaaaaaagtaaattagctgggcatggtgggacatgcctgtagtcccagctacttaggaggctgaggtgggagaataactttagctggggagtttgaggctgcagtgagataa

SEQ ID NO: 36165 - DNA, 1026 bp, Homo sapiens
tttatgttttatgtaattattgacaattacataaaaaaatggtggtttaaaaatctactatctctgtttgttccatctttattttatttacttgttcctctctgttttattttgggttaagtattttttattattcttttatctttttagttatcttgttatctataactcatctttatgctatttttatgtttgctttagggtttatagcatacatctttaccttatcacagtctacattgaagtgatatactacttcacagatattatggcaccatactttcatttctgcttttatgagcttatgctattgtggtcatacattttacttctacatatcttatacacttcacagttattgttacattgattttttttacttttaacagttaacttacttttttaacttttcattttgaaataactttagagtcgaaaagtttcaacagtaatacacagaggtcctgtgtacccttcactcagctttcccgatgataacaatatataactgtagtacattattgaaagcaggaaattgactttggtacaatattattaactaaactacagactgtacacagattttatcagtttttatgtgcactgtttttattgttcttgttgttgtttcggcatatagttatgtgaatttggttccacatatggattcatgtaactaccaccatagtcagggtacagaactcttttattacctcaaagaaacctctttattcccttgtgttaccccctttatattcagactatccatccaatataatccctggtagccaccgatctgtttgtcactgtagttttgtcactttgagaatattagtggaattgtacaatatatatccttttgagattggctgcttttcactgaccctaatacttttgagatccaccaaatcgttgaatgtatcagtagatcattttctttattgttgagtagtctattcttacctcatggaatgccatggatgcaccacactttgtttattcatttattcactgaaaaaaaccttt

SEQ ID NO: 36166 - DNA, 1049 bp, Homo sapiens
aaaccaccgatgtaagtctaagagctcaagggccgaagaacctggagtctgatgtccaagggcaggaagcatccagcacaggagaaagatgaaagccagaagactcagcaagcagcttatcccacctttctcgcctgctttgttctagccgcactggcagcccattgagggtaggtcttcctctgccagtccactgactcagatgtcagtctctggcaacacccttaaagacacaccgagatacaatattttgccagctatctaggcattcttcaatcaagttgacacgtaatattaatcatcacagcatgtaaaacagtttaagaattgctaatgaatatccctgtgaaaaacaaatttttaaaatatagtacagtatttgatatagtcctttttgtctttatgcatatatttaaaatttcttaatttagttttattctttcccacccctttctgtttctcaatttcattttggattcatctcaattctagctggtattgattaattatttacttttgggtatgtgaacaattacaaaaaatcagaactacctaaaaaggtatattcagagatgtgccactgcactcttaccctactacactcttctcatttccagacattttacattacatttccatccaacccttttatgtagccaagctcattagtttctggtttatgtgtcccgtatttcttttgtacaaatgagtatgcacattttcttatattctttcttaaatgaagggtagtacgctataaacacaattcttttgcattttgcttttttacatagcaatgtattctggaaatcactccatatcagctcataaggaacttctccttttttgtgtgtacaagtacataatatgccatttagggatatgtcaactttcaacaaccctccaatgtatgggtatttgagttgtttccagtatttcattatgtaaacaacactgcaatgaataacctatgtatttttgtattgttgaaggtttatcttttcaggtgaattcctacatgtgtgattggtagatcaaaaagtaagtat

SEQ ID NO: 36167 - DNA, 1032 bp, Homo sapiens
gtaaagaatattgaagccaaaaactaagttgtcaattatcatactggaaaataaatagtaatgcggtcatcatttaaaagtcagctggatgcacagaaaggatcaatctgtaaagaaactttcatagtttaatatgtctgatgtcaatataaatcctacttatttctccagctttgacttggataaccacatcttctgtggctggctgtgcagtaggcaaatggaagtacccttgattctgacttttctctggaagtgaatccagagagaaaataagcagcttttctattcttcctcatctttaggcaccctagaggaggttgctgatgttaataatcaactatatcacttttgaagacttagtttaatatatgttgatcgtttccttactgtttgccttattgggggaacccattcttctccagaaaaggacagatcctctcttggatttatatatatatatattatgcagaaacgtttcttctagaacttctatatataaaagaattataggccaggcacggtggctcatgcctgtaatcccaacactttgggaggccaaggcaggtggatcatttgaaatcaggagttcaagaccagcctggccaacatagtgaaaccctgtctctactaaaaatgcaaaaaaaaaaaaaaagcaattagccaggcatggtggtgcacacctgtagtcctagctactcaggaggctgaggcagaagaatcgcttgaacctgggaggtggaggttgcaataagcttgagatcgcactactgcactccagcctgggtgacacagcaagacttcatctcaaaaaaaaaaaaaaaaaagaattctagctatcaacaacaatcaccgagtgatagacagcacagttatttacagcactatggagatctagggtttagttttagttctaccaatacctttgctcacgaatacaggcgttttatacgaacatctctaaatctcacttttttaatctgtgaaatttaaggagaaaattaggtaatctgcaaaattctatcagctcta

SEQ ID NO: 36168 - DNA, 1050 bp, Homo sapiens
atgttaatgcaaccaaaaggtttgttttcacacttttatctcctagctaagaagcctctgctctgatctcctcccttagactcaactttctgagtgttaaagccatgtgttctgtattagcttgccacaagctggtcgctccataaagactgtagaaaatgctggcttttgttctcaggccctgaaacaacagaattcttccttaatcattttcaggaaaacaacaatagcataaaccttatctctaaaagtagacagatgtacattcctttaagctacattgtcacaacaatgatttttcaagtacttcaggctctaaaatcagttttacattacgtgactgatataattaaggagcaaaatcagattggtatgctgtggggaaggcattggagaggttaaattagggaacgaatagaattatccagcctgacttccttatttgatattttcttgtgctttattaataaaactggcactggaaaacttttaaacaacatttttcgtctctctgtgggtaaaatttaaatcaaagcctgtctgtagccacaaagactattattaaagaattcatcctgatgtgttttaaattatttatttaattgaaaaatacacatgaaataacaaggtacttatgtttaaatagagtaaccaaaatctgcacaaaattcaaaaaatgtttaaaagtttatattcatttttatctctctaattcatttacatgtatgtaacttgtaaatataatggactcattattttgctttccttcccacctaagcatgtggctagattcttatttatttcctacttaagacgttattatattcagaattcatttagtgcgtagaaggttaaaagcatttagccatatagaagcctttcttaaaccacacataatgccaatagttttccaaaatttctaatttatttttcaaaaaattttttagtgtatatgtgtgtgtgtgtgtgtgtgtgtatttttttttttttttgaggtggagtttcgctcttgttgcccaggctggagtgcaatggtgccatctcagctca

SEQ ID NO: 36169 - DNA, 1075 bp, Homo sapiens
gtggcacagtttcaacaaactttccccaaactatagagccagccaaattatggtctaggcaagaagtcaaccctgtaagacaagaaattgaaagtgaaacaacatcagaggaacaaattcaagaagaaaagtcatttgaatcccctcaaaactctcctgcaacagaacaaacaatctttgattcacagacatttactgaaactgaactcaaaaccacagattattctgtactaacaacaaagaaaacttacagtgatgataaagaaatgaaggaggaagacacttctttagttaacatgtctactccagatccagatgcaaatggcttggaatcttacacaactctccctgaagctactgaaaagtcacattttttcttagctactgcattagtaactgaatctataccagctgaacatgtagtcacagattcaccaatcaaaaaggaagaaagtacaaaacattttccgaaaggcatgagaccaacaattcaagagtcagatactgagctcttattctctggactgggatcaggagaagaagttttacctactctaccaacagagtcagtgaattttactgaagtggaacaaatcaataacacattatatccccacacttctcaagtggaaagtacctcaagtgacaaaattgaagactttaacagaatggaaaatgtggcaaaagaagttggaccactcgtatctcaaacagacatctttgaaggtagtgggtcagtaaccagcacaacattaatagaaattttaagtgacactggagcagaaggacccacggtggcacctctccctttctccacggacatcggacatcctcaaaatcagactgtcaggtgggcagaagaaatccagactagtagaccacaaaccataactgaacaagactctaacaagaattcttcaacagcagaaattaacgaaacaacaacctcatctactgattttctggctagagcttatggttttgaaatggccaaagaatttgttacatcagcaccaaaaccatctgacttgtattatgaaccttctggagaaggatctggagaagtggatattgt

SEQ ID NO: 36170 - DNA, 1032 bp, Homo sapiens
tgaaataataccaacattgggccaatttgaaaggactcaggaggagtatgaagacaaaaaacatgctggtccttcttttcagccagaattctcttcaggagctgaggaggcattagtagaccatactccctatctaagtattgctactacccaccttatggatcagagtgtaacagaggtgcctgatgtgatggaaggatccaatcccccatattacactgatacaacattagcagtttcaacatttgcgaagttgtcttctcagacaccatcatctcccctcactatctactcaggcagtgaagcctctggacacacagagatcccccagcccagtgctctgccaggaatagacgtcggctcatctgtaatgtccccacaggattcttttaaggaaattcatgtaaatattgaagcgactttcaaaccatcaagtgaggaataccttcacataactgagcctccctctttatctcctgacacaaaattagaaccttcagaagatgatggtaaacctgagttattagaagaaatggaagcttctcccacagaacttattgctgtggaaggaactgagattctccaagatttccaaaacaaaaccgatggtcaagtttctggagaagcaatcaagatgtttcccaccattaaaacacctgaggctggaactgttattacaactgccgatgaaattgaattagaaggtgctacacagtggccacactctacttctgcttctgccacctatggggtcgaggcaggtgtggtgccttggctaagtccacagacttctgagaggcccacgctttcttcttctccagaaataaaccctgaaactcaagcagctttaatcagagggcaggattccacgatagcagcatcagaacagcaagtggcagcgagaattcttgattccaatgatcaggcaacagtaaaccctgtggaatttaatactgaggttgcaacaccaccattttcccttctggagacttctaatgaaacagatttcctgattggcattaatgaagagtc

SEQ ID NO: 36171 - DNA, 1035 bp, Homo sapiens
aacaaactaactgtgactcacgctgcagacattgcatttgtgtgcttaggtgtttatctatgatctgacctctcctaaggattttaggtggatgttgcacatttggctttggttctgatgcaatttcaccattgatgtaaatcatcggataattttaaaagacagagtggaaaagaagaaactaccgtaggtgaacattttagacagaaagaaaattcagattatggatagaatggcttgcaacagaatagaatgcagtcaggttggtaaatactggttcaccgaggtctgtcttcttgcaaagtgttctctttgtgttttcactcacaaaactgagagaacatatcccagacaatcttttattttttatttttatttttttatttttgccacatggagtacataattacgattttgggggacatattccaagttctcttttgttaagtggtgtagccgttaattcataatgtaagaatggatatatatcaccacctagtggtcgtattgtattttgtgtttcaaaaccacattcacagaactacacccagatacacacaagaataatactatctgtaaatcaagttcctgtagttttgaatagtttcttaattctagtataaattgcatgatactgtgatcctgaaagttaaatgtgaaatgagaggatttttcaaatgcagcatgaagctaacacatgtagtcaaatacttagtaaaatcctagcaactaaggcaaatattaggacctatctgtcctgtgttttcactttatacacaatagtagaacgctggagaaagttttctttggctagtttccttgggaggtgaacagagagggcttttgcagggttttttagatgtttttttttttttcactgtgaactaaattagcaatgtttggaggaaaacagagtaagtgaagagcagtgactgaaccgttcaagagaaaaactcccaaattatagtttgaagttcagtaagttctcccaacaattaaaataatgtattgtgaatggcttgactacacacatgt

SEQ ID NO: 36172 - DNA, 1005 bp, Homo sapiens
aagactttgagacacatatattttctactcacagtttaacagtctttttctgtaccaccaaaataatttcagctatatgaaacaacagaaattgttgagtctattccaattagattgtgatataataccgtcgttgctcttacgttactttttgactagcaagtagttaccttctccctccatttttacagcaatacgagaattggagacccaaccagccagacagcttcttttctgctggagaagactgtgttgtaatcatttggcatgagaatggccagtggaatgatgttccctgcaattaccatctcacctatacgtgcaagaaaggaacaggtaatgatcaccctgttaataatgtgtacttaatcttcatttcaattataaagataattcaggaatttgtgtctcaaattcattgtttgagacacaaactggatatgtccatgtatgtcatctctcgttgctctggaatatttcactcttccaaaacaattgaaaagtttgttttcaacaatgttctcaccttagatttcaggtccttaagataacaatgtgacattaacgtaggaatgctgcctggtaatatctttaagaagaacaactgccagtccaaaggccaatagacctttttatttttatttatttatttatttatttatttatttatttatttattattattattgttttttgagatggagtctcgctctgtcaccaggctggactacagtggtgtgatcttggctcacggcaacctccgcctctgggttcaagcaattctcctgcctcagcctcccaagtagctgggactacaggcgtgcaccatcacacccagctaatttttgtatttttagtagagatggggtttcaccgtgttagccaggatggtctcaatctcttgaccttgtaatctgccagcctcagcctcccaaagtgctgggattacaggcttgagccaccgctcctgaccgacttctttttttattttgatgagaacattac

SEQ ID NO: 36173 - DNA, 1194 bp, Homo sapiens
aaaatccctgaagataaaacccttctagtgctccttgatacataagtcccagataattatgcaattgtaaatctgtgcctcaccaactcagccatgttgggaaactcaaacttttaaatatactttcctcattaaggcagtggttcttaaatgaggatgattttacaacacaatggggcatttggcaatgtgagacatttttgatcgttccaacttgggggcaaaattaccagtggtgctgaggttgagaagccttgtgtcaaggggatatgttaatatatgctcaaaggagtcgttcatattggaaggttagcagatttgctgtgtgtggataaaatatttagcttaattgtcatcagagtttctcagagtaatactatagaacactaggatgattggaaagagtgtcatagtttagagggggaataacttatccaagctactaatgcggaaaggttgcggtgcatgtgatgaagcaaatcagtatgaatgaattcatgatactgtaaacgctttctgatgtactactcaaactgatagaaaatattttcatgaaactacatgatttctgttaaatgaatgggatttttaaaatgccattaatttctgtttttattttgcagatatgaagagcattttaagaggtgcagcctctggaagtggatcaaactagaactcatatgccatactagatatgtttgtcaataaacttatgacgtgaatgcttaatgcctcttttttgaaatagggaatgtaataattggccatttgcctactttattatttgggtaacattccagtattactctctgtgatttagcttatttaatggtgttaaactgaggttatattaaatttttgattcccaggtcaggattttgttggtaatttatataataaaagggaaatacaaatcgatcttaggtttatttctatgatttttttttttatcgttaacttggaaaaaatacttttgctcttgccctttgacatagtaaattttttttcccatgattgattaatcatcaagaaaacttaatttattcaaattgaagttgtggttaatcagatatttaggagcttcatttttgttttttttcctctaggtctgtaacctaaaacagaagtgtttgcctcagtaagtgttttggtgaccagtattggtcttatttagaatgaataaaagaatatttg

SEQ ID NO: 36174 - DNA, 1025 bp, Homo sapiens
ggaggctgagacaggagaatggcgtgaacctgggaggcagagtttgcagtgagccgagatcatgccactgcactccagcctgggcgacagagcgagactctgtctcaaaaaaaaagaaaagaaaaagtaataagttagagatgtacttgttcatccattttacctcagtggtaacatcttgcataactatagtgcagtatcaaaaccaggacattgacatcgctgtaatccacctattttgttcacatttcaccagttttacatatattcatttgtgtgtgtgcatgtatgtgtgtgtgatatatttagtatttagttctatgcagtattgtaacatgtaaatttgtataatcattaccatactagagatacagaagagtttcttcaccactagaatctctcatgctgtgttttataaccagagtgtctccttcctctttccttattccctggtaactgctaatttgttcttttttttttttttttttttttttcctgtggtcatttaaagaagattatgcgggctgggtgcaatggctcattcctgtaatctcagcactttgtgaggctgaggcagttggatcgcttgagcccaggagttcaagaccagcctgggcaacatggcgaaaccttgtctctacaaaaaaaacaaaaattagctgttcgtggtgttgcacaccatagtcccagctattcaggaggctgaggtgggaggatcacctgagcctatgaggttgaggctgcagtgagttatgattgtgccattgcactccagcctgggtgacagaatgataacctgcctcaaaatggaatcaaatagtatgtaaccttttgggattggcatttgtcactcagcataatttgtcaagttcgtgtaagttgaagtatcaatattttgcccttttttcattgctgaatagtagtccatggtgtagatgtgccacagtttgtttaaccgttcagccattggggaacatttgggtcatttctagttttgggtattataaaaaaaagctgctataaac

SEQ ID NO: 36175 - DNA, 1044 bp, Homo sapiens
tggatctgtaggtttatgtttttctccaaatacggatgttttcagccattatttttgaataccctttcaattccatgctcttttctttgggactccagtgatacggagttagatcttacgttactgtcttacagatcctcaagacttttaacttctttttagtcatttttcttcctgttgttcagatggggtaaattctattgatctgttggtcctcaagttcacagattctgtcttctgtcatctgctattgagcccattaagttgaaaaaaataatttttaaattgacaaaaattgtgtatgtgtgttgtgtacaacagatattttgatatatgtatacattgtggaatgactaaactgagctaattaacctgcgttaccttacgtactcagcattttttttgtgtgtgctgaaaacacaatcgtagcaatttaaagtatgcagtaaattattattataaactatggacaccatgtttgtaccatagatctcttgaacttattcctcttaactgaaatttatctcctttgatcaacatttcctcacctatctagtaagttttgttttttttttgtgttttttttttttttggttgttattgtagcttgttttatcatcatttggttggttttacaacctttttcttagctgaaattttctattttttaaatctgttttaaaagaatttgtaattgattgttgaagtgtttttaatgatagctgattgaaaattaaaaacctttccaacatctaatacacatcaacattaacatgtttattttctttttctcatccaagttgtgactttcttggttcttggtatgatgggtgagttttgattgtatgttgggcattttggcttctagataatttttaaataatcacttttcccctaaatatgattaatatatgtttactatagaaaatttggagactattagaaaatatgaagaaaaaccaatccttacttttactaccaaaggtaataatcactgttaagtttttgtatattatatatatctaaaatacatctgtatatatc

SEQ ID NO: 36176 - DNA, 1034 bp, Homo sapiens
tgaagccattaaagacattcttcatttctgttatgttgcttttgatttctaacatttctttttatcctttcttagaatttccgtttctctgcttacattgtctatgtatttgcatattgtctacctttttcataaagcacctagcatattaatcatagttttaaaaaattcccagtctggtaactccagaattcctgacatgtctgtttttgatacttgctctgtctcttcaagctgttttttgccttttattatgtcttgtaattttttattgaaaggtatacatgatgtactaggtaaaaggaactgctgcaaataggcctttagtgatgtagttataagggaggcattgtgtagttctagtattaggtcccagttttttggtgaacctgtgctcctggactgtgaacataaccattgtttctcagtcccccacccttatccctgtcacctttaggtgggacagaatggttagaaaggactggaatttggtatttcccttccctcttgtgaaaggctgaagtgaactggagttgtttacagtacttctttacccacaggtaggttaggctctggtaaattagtttctgttcaaggcaggccttgttaagaactgattgctctggcgtatttcaaaattgttcttttttccttccccctaccagaagcacaaagggatttttctctgatatttactgtaagggcatagtagagctcctggaggtaaaattcacaagagtgtcagggcctcacatgactggatcctcctggagtttttaattgtcatttgttggcactgagtctccagcaatttgtcattatagttgaggctttcttaccctggcactggttcccaaggaagtttctgcttgtgggtttctgctctgatgacttgagatttttctctatctgcctacctgtctctcaattttggggaaccgtggtttgccctgtgacctcacttctctgaaggatctaactacagctattggtttttcagtttgcttagctttttacttgttaggatggagtgg

SEQ ID NO: 36177 - DNA, 1027 bp, Homo sapiens
aacatctgaacttcacttatccttctgctttttgcattattgctctgcatgtttattatacactttttttttttttttgacatggagtctcactctgttgcccaggccggagtacagtgctacaatctcggctcactgcaacctccgactcctgggttcatgcagttctcctgcctcagcctcccaagtggctgggattacaggtgtgtgcccccatacccagctaatttttgtgtttttagtagagatgaggtttcaccatgttggggaggctggtcttgaactcctgacctcaagtgatccacccgcatctgcctcccaaagtgctgggattgtaggcattagccatcgtgccggcctattgtacacattttaatattcattagatattactgctttgtacagtcaatgtttgtttacacatgtatttactctttatgatgctcttcactttatgctgcatttccattctttcctgtaggttaggaactttttaacttttttttttggcctgtgtaacttcttttagtcctttttttttttttttttttttttggtaaacgtcagttgtcaaatatactttgtatttatctgaaaatgtacttgtttttgtttttgaaggatattgtttctgtgcattagattctagattcacagttactttctttcagaaatttgaagatattccattctctctgctttccagtatttttgttgcaaagttagcaaaaattttttatctgtttctttgaatataatgtctttctgttttgactacttttaagatttagttttgccaaagaacgaaactggaggcatcatgctacccaacttcaagctataccacagagctcctgtaaccaaaataacatggtactggtacaagaacagagacatacaccgatggaacggaatagagaacctggaaataagacctcacacctacaactatctgatttttgacaaacttgacaaaaacaagcaatggggaaaggactattaaatggtgctgggataactggctagc

SEQ ID NO: 36178 - DNA, 1025 bp, Homo sapiens
accttaatcacaaaacttttgaatactgcagtttgctatgcagtctttccttagcttcttatctgtgtagcttcacaattcagtagatatcgctggagggaaatagttaagcctgtggttcagttctctgtttcttttttatgaccagaatcctggcccttcaagtctcttaatatttgtctcaccagctttgtgagactgttgaaagttctgctggattgttttcctcctgagaattcatgcaaaagacccagacagaagacctgggtcttttgcatgaattctcagcctcttgctttgtgaccacaatatgcaaataaatagtttgagagaaaaagtggcagagtggctgctgaatggcaccttctttaggattctatttgttttgaaatgttggttccttaagttctgattgcctccatattgagctcttggatgatttaaacagactgatctttttattttttattttttgtgttttatttgtcttttctagcagttcttgattggagattattctgctgcaagtaatgtgacaagtattataactattattaaaaaacaaaataatgaacaatataggaaaaagtctttactccctcatacctccataatctcactgttcttggtagtaaccattgctgttgtgtatatatatgtataatgtacatgcatttgtataacacataagtatacgtttacctatgtgtaacatacagtaatgttagcataatgacattttggtcagtcctataggattataatgccatatttttattgtgtcttttctgtatttagatatgtttagatacacaaataccactgtgtgaaaattgcctatagtattcagtatagcaatatgctgtacaggttggtagcctagaaacaatatgctataccatgtgtagtaggccatggcagttagatttgtgtatgtatactttatgatgtctgcacaatgatgaaattgcctgaagataaatttcttagaatgtatccctgtcgttaagcaatgcataagatta

SEQ ID NO: 36179 - DNA, 1048 bp, Homo sapiens
ttcagacgtagtgatttcttatcttcatgtgctgaatggtatgatactataattgttgaagttctaagaaaaacccaactataagaattgatactgttttgaggatttaaagaacacagatacaagagattgaaaatgtgctgtaggtactaatactagcctcctgctagtaggtattgtgctagccttccctcccttttcctcctctctttcaacatttgatcagtgcataacatttcttggagaggtgtggttttttttcttcccttcgttatctgtttactagggtgatgggagttaaaggtagtaaaaacttcacaatcatggttgagtgcatttcagtgtaaactttgtattctcaaccttttgtatgttagtcttttagtgaattttgggtggacagagtgtatgatagtgctgtttctttagaaatgctctctcgaaactaaaacctcttggattctgtaaatatgttacctgttgaaaaaggaaacagcatttctgcccttactttgaactaacttgatctgagataaatacatacacacatgcacgcatgtgcacacacacatacatatgcactctagttatctggttatatacaaatatacccaagaatacctaatataaacacgccctcttctccccttcctcaagtttaagtgatgtgtagttggtctaaggggtactacagctgttttgcttagcctagtggttgttcaagtgaatttaccagtgacccaattttagtctctatcatagtgatttgaaaaaaaaggccaagtaaagtcacttagtatgagataaattttctttactttcctcttcactttaagaaatcagttgcttttttaatttttttatttttttttaacctttagcagactgtattagttcattctcatgatgctaacaaagacaaacccgagatggggtcacttataaaggaaagaggcttaattgactcatagttccgcagggctggggaggcctcaggaaacttacaatcatggcggaaggggaagcaaacatgtccttcttcacatgg

SEQ ID NO: 36180 - DNA, 1061 bp, Homo sapiens
agtaaaagtaatctgctggtaacttcaatttagttttctttttataaaaggaactctattgatgttagcactgttttaatggttttctgttgtgtagtagacagttttcatttgggattgtcaagttagttgtaaataattgtatagtttcaatgaaatgcctgtctgtattcacactaggatattttctcattgcacaaatttccatatttttctctgatcaagtgagacagattataaaacacaaaggcccctctaaggcccttcggatgtgttccagcaatatgcagcagccccccacccccttttttatttcccctgtgacagggtctctctctgttgcccagtctagagtgcagtggcacaatcttgtctcacttcaggcttgacttcccgggcttaagctatcctcccatctcagcctctcgagtagctgggatcataggtatgtgccaccatgcctggctaatttttgtattttttgtagagatggcgttttgccatattgcctgggttggtcatgaactcctgggttccagcagtcccctcctcagcctcccaaattgctggtttataaagttgggagctactgcgcctggccacagcacacatttataaaaaatgttcatgtgattccaaatttaaaatagagtgatttctgtgactttttttaattgttcacttttttaacatgcagtttcatcttagatgtatgatattgtatgtaaattgatttgtatttctaaaaaaatgaaattaagggactccatatctacctgtaagatttctcaacaaaaatttacaaagctagctgggaagacatgtatgtacttcttgaatttcctcctgctattccttttccccatcttccttagagaggcaaagaagaagagagagggagatttacttttaaaataggagaacattaaatgctttattattaatgtgttacattaagcagttttaagtcatagtatctcaagtacatactatcctttatattgcccccaacacccaaaatatacacacattgggaaaagaatgggggctctttgggggtt

SEQ ID NO: 36181 - DNA, 1045 bp, Homo sapiens
agccacagtgcccggcctatttgtgcttatttttgttcttttttttgccgtccttttcttcctcataagtgaagttatatcagtctgatcatgaaacctcaactggttacacatgtttggttttagattctttatctttcaaatatatatataattttccagtaaacttggaagaattcatttatattatacatatattatcacatggttctacattttgaatctcgtccttgtttttgtttccatcatataatacgttatcatggtatcaattaccaggtgcatttttaataacaggtcagcatttgaatggcttttatatttcagagacaatactcagtatcaaatatattgtacattataactttggaattctccctttcctttcggatttttctagtgagatggagtggctttctgttgtcttttacagccttcaaagctactgtttttaaattatgccacagacctgataatattctgaagagtattgctcctggaagactgcagtggagaatattgttttttcctattaattctcttacctgcctattctggcaaccaaatcttgatccatagaagtaaaacatactgagtagaggtgggaaaagttgaggaaatggtgtgatacagtccatactcatagtcatatagttatttagtgaaagagctaggattaggactcctaattcctagattagtattctgtattctacagtaaaagagatatttactccatataggcaaacagtattcgtactgaagcatcttactatgatagttttcctataaaatttgttagttacaacttttagtttgggtttccctctccttgctgtaccaccatcttctccatcctgattacttcaagaaattgcactatagttgaacttttcttgagctcttggaattctggatcaaatttaacaagataacctttaaagaaaagtgaaaattactcaatgtatacagaaaaataataataacaacccaaaccagaataaggagacatgacctcacatcagtacaagggatcaaggaaaaa

SEQ ID NO: 36182 - DNA, 1049 bp, Homo sapiens
agaagaaattttaaactaaaatgacattctgtcagctatttcagtgtggaaccaaaaatatgtagtttagtgaatttattgaattttggatatgtttcttttttggaacttgtaccaccaagtacttgaggtacttttgttttaagtcatacaaggttgaaaaggagctaaacttaatttccttaatacattagtttgcattttctttgtgtcatgtgctcttttgaggatctggtgggattttctctcctgagaagtacaaataagcacttgcatgcacagtcttgcatgaaattcctatcatattctagaagaaatttagagagtatcttggattcttgtcagtaagatttgttgtatcaacttagaaacactttcattttagcccatattatacaatcaatttctgtaatttttatgtttacttatgtattaagccttgaagattcagtttaaggagatttatttttttctttttactgaacatgaagttacttcataagtgccttgattggatgattggaactattagtaatttacccctcaaattatatctaataatctaagcattcattgtgctttcctaaaaacaatcaagtcctgatcttttctggatcatttgaacttaaatggagaaaaggcagagcatctatgtattatgagtcactgccaatcaaagatatcagaaatacttctctaaaattaatgtcatatttaatatatgataatttgcttctataattcctttcaggagcatacctattgaataaaatatagtgtatgtgtattgatttttgataatgtatacacatatttcagttgttttgaatctacctttataaaaagcttttggtactattttattacagttattactttttaatttttttttttttaagatgcaggatcttgctgtgttgtccaggctggtatcaaactcctgggctcaagtgatcctcctggatagctgggattatatgcatgtaccactgtgcctagcacagtcattactgtttaatgattaattgaaaacattgattaagcacaga

SEQ ID NO: 36183 - DNA, 1094 bp, Homo sapiens
cactaatcccaataaacttttttgggattttcattttgaagaacagcttttaaaacctactgcttaactcttaggaaatatttaatcttatttgaaactgtaacatgccctatactttgagatttgtggagagttaagctaggctttctcttttttttgcctttacaagggtaactttataacctccatttcttggcttttttctttttagtaatccctgtataattggaagaagttaggcaaattttgacattctcaaggtttaaagaaagtttagtacaatatttatttactaaccaaagtgtctcctgttctctttgtgcgaatatctgataagctgagtgattaacatactgttctactgggagtggataatggttgatatttaggtgactaaatagtccctgtaacccaaagtctggctcttccccagggaaatttaagtatacacacaatcgccatgtcttcataacattgtaacattttgtaagctatcaaaaatcagattggatttttgctaataagagcaagttgtattttgtgtgaaacttgagccattaaaatgacatttgcaggtttaatataatcatagctaacatctctcaagcactttttatgtatcagtgggcagtgtgatttagtgatttacatatactgtcagccctttctattcatgggttctgcatcagtggactctaccaaccatgggtcgaaaaaatacaataaaaagatacagtataacaactatgtacatagcattcacattgtattaggtattacaagtaatctagagatgatttacggcatacaggggggcatgcatagattttatgcagatactatgtcattttctatacgggacttgagcatcttgggcttcgttagctgccaggacagagaggtggagggtcttggaatcagtcccccacagatactgagggataactagtttgtaatacttattacaacctgtagtgtagactttatacttacatattagaaagatgaggcttagagggacggatttgtgcaaggccacacaagtagtatatggcaagagagaaagagaacctgatactagaaggtggatggtc

SEQ ID NO: 36184 - DNA, 1030 bp, Homo sapiens
gaattaggagcataatctttgagaaaagtcttggttgcttaccattcgggctttgtgatgagttgaaatgtcctgaatgagaactgttctcaaatgctttcaagaccaacaaaaagtacgatacccacactgacctggaactctttaaaccattaagatatatcactttttcgcagttcagtccatattttttgcaaaatgttctgcttagtttttctgctaagaaattactgtttctgaacaaggttaagtgtcgtatgctttcattgtagttttttttcccctaacatatactgttttcctaattagactataaattcctccacagctgggaccttgttttgttttctcgccttccccataacaaatatcatttaagtgaatgttgtaaacagttacttcatttaaattgcccttaaaatgctttatgacaaagacgttatttgtagtaatacctataatggtaaaaagtttgttgcagtcttacagacgataagattgatcaattgttatatatgcttagtggaattttatctagctgttctaaagagccattagactagtctttctaatggaaaatgtttattgtctaagttaaaacagcatttgaggccaggcacagtggctcactcctgttattgcagcactatgggaggctgaggtgggaggatcactagagcacaagagttggagactagcctaggcaatatagtgagacctcttctctacaaaaaatttaaaaattagctgagtgtgatggggtgtgcccgtagttccagctactcaggagactgaggtgggaggatcacttgggtccaagaggtagatgttgcagtaaaccaagatcatgccactgcactgcagcctgggcaacagagcaagatcctgtctcaaaaaattaaaaagcattttatagactgcatgtttgtgtcccccctccctccgcaccagaattcatatattgaagccttaatctccaatgacatgatattagtaggtggggcctttggggggtgattaaataataagg

SEQ ID NO: 36185 - DNA, 1035 bp, Homo sapiens
tccaagtgccaatcagccccagccctgcttagcttcccagatcagatgagaacaggcatattcagggtggtatggctatagaccttttagattatttttaattattccattttttctacctcataagcttgacagatgtcttttagtatctttttactgttcacctcaggtattaaaacatggaaccttggtttatcatctttaagataatttggtattatacttcttccaggacaatgtaaggacctgcgaacacatcaacttcatttactgccacacctcatgttatatacattgtatattcttaatatgtatttcctaaattctcaagacattttttatacaatatgaatttacatttcatattgtataaaacatttactttttctattgtgtttcgtggttcctggaatctgagcttccatctaagaccttatttcttcttgaaggacatactttaatatttcttcgaatatctactggtaacaattcattcagattttctgtcctgacactgtcttattttactttcattttctaagaacgtttttgctgaattagcagctattttatcattttgaagatatattttattccttctggcttccattatgtcctctaagacataatgtccattttgtttttttctcttcaaaggtaatctttttttggatggctacttttaagaggtttgtcttaagtttggtgtgcccacatgtgttttgtgtttgtttttttgtgtgtgtggtttttttctgcttcgagattgataatgtttcttgaatctggctgtgatgtccttaggctgtttgagaaaattcttagctctgtttgatcagacattgcttctgctttcactctcctttctcctcttcttttgatactccacttacatttgtatttgacaattcactttgtcccttgtattttccatttattttcttgtctgtttcatcctgaatatttcttcttaactttcagttcactattttctcttagtagtctcgaatttgttaaatctctcttgaagcattt

SEQ ID NO: 36186 - DNA, 1063 bp, Homo sapiens
ttccacatgtaatagaaaatgaataggataataaatgtggacatgtatatttaaaaagagggaatattggaggtacataggttcacagaaattctgaaacccacctgggcacagattggcagttgcttggtcaagtttcaaggcctagaattctcttagctctgccttctgggatcttggatctactcactgagtcaccctttctttttcttgtttacacttctgcctgctttctgcctatagaagcttggatgtcccacaagcttctttccatttggttctctctgtgcctttcagtccaggctggccatgtttctgctaatagacttctcttaaaaactttgtggctcacttgtgaattttgagttcactccatcagacaaaagcaacaaccacacatctcgtcccacataaactctgcctcaagcttttgctgatgaaaatacccttaaactttttaaaaacctgtgatgttattcagagattttctgagacacatcgtttgtctgatgaaaatactctgaggcacaacttaagatctttctgagctattaaaggactttataactacagcctcaactttatgttttactggcagtgccctagatttgctttttgctcagagatattccccaattttagcacatttgtcatctgcacaggctgggaatcttcaaatccagcaagttttgacttgtttttgtttgtttgtttgtaatagagtctgttttttgctgtgttggccaggtgatcttggactcctggcttcaagcattcctcccacctcagcctcccaaagttctgggattttaggtataagccaccatgcccagccatggctcctttttgtttaacagtccttactttgatggtctctcttctcacacattttactatcagcaacaagaaaaaatacacatgaaatatttaacacttggccggcaatctcctttgctagatcaatgagttaattaggcattttttctactttgtacatatctgtggataacaaatttgctaaactttctgccattatgtaacaaggatctccttccctctagtt

SEQ ID NO: 36187 - DNA, 1020 bp, Homo sapiens
tttagattataacatttgctctgagtattttacattacagcctttggggggaaaagtacaaatgagatctgagaacagtggtactcatctttgaggaattatggaaaacgtaatagaacactaaacatgggaaaacatcggccttcaggttgaaaagtggaaatctcaatccctgaattttttttttttttttactaagtaacttttttgcccattggtgtcatttaaccaaaagaagaagaaattccaaaaaaaaaaaaaatcaactgaaacaaaagaatagactgaatttgccaaaagagtgcttaaatggagacctaagtcttcaaagctaaggtgatgagaaaagaacaggtcttaaatttcttcagagcttcaagaggcaaagcttgaaagaagaaaaaattttattcttaggtaagatgtaggggtagaatggtggcccctgcaaaaggtaagccttcctcctaatcctagaatcgtggatggtaccttatttggataaaaaggtctttgcagatgtaattaagaaccttgagatgaggagatcatcctggattatctggtggactgtaaagtcaatgacatgtattcatatatgacagaagagaagacatggagaagaggagggagtagttgtgaccgtggaggcagagaatggagtaatgtgatcataaatcaaggaatgctgacagccactaaagctggagaaggccaaggacagatattcaatcctcccgtagaagtacagccctgctaatgcattgattttggacttctggcctcagaactgtaagagaataaatttctattgttttaagccttcagtttgtggtagtttgttacagaaaccctgtaaagttaatacacagagttcaaagagaatccggtaatatctctaaaagactcgtgtattagtcaggattctccagagaagcaaagccaatagaatgatacatgttgttaaagcaaattaaaatggagaccatgcctgaagaatctctgtgcagagaaacccag

SEQ ID NO: 36188 - DNA, 1086 bp, Homo sapiens
tgataagccgaggtaacttctataataagcagcagtcctatatcttacgtatcacaaatataaagcttttaaaatgtaatgttaaaatgttcaacactttaagaaaggaaaagaaaaaaagaggccaggcatggtggctcatgtctgcaatcctagcactttgggaggccaaggtaagaggattgcttgaggccaggagttcaagaacaacttggccaacacagcgagattttgtctcttaaaaagaaagaaagcaagaaaaaaagagtccaggtagatgtgtagttgaaaatggcctaggctgttcatgtttaatgctgtgatgcttagctggcacataaagcatctattgaggtataggagaatgaaatggagctaagaattatttttgttattgttgtttgatgatattggatgttaaattgtgacatttaaaattattacagcagttaatagcctagccatcagtgactagcttgacttgattagagctttgattatgggggaaagaaagagactgaagtgaagccgatctgaattcaaattccagttaggaagatgttacagagttcaggaggggttatgcaatgcggaaataacgatgacaatagaaaagaaaaagagaggacagaaaagagaagggctgtagagggagaatattacaacaattgattgaattgtgaggagagaaagggaggacagaaaagaatcaaagataaattcaaggttacgtttccagtctgggcgcacagaagtagagatgtcagggtccagattagtaaagacaaggtaggtttactcataactggtctgaagggtgaggaaaaggacacctagatagaggtgaccaaatgacaggaaaatactatcccgctgaaggaggaataagagatctaaggtacaacctaaggaccaagttaataaaattgtattgtgttagggatttttgttaaataactagattttagctgttattgtcacaaaaagaagtaactatgtgagattatagatacgttaatctgcttcactgtaatagccattgcattatctatgtttctatagttatctatatgtgttccacaacat

SEQ ID NO: 36189 - DNA, 1050 bp, Homo sapiens
tccactttttttttttttttttttttttttgagatggagtctcgctctgtcgcccaggctggagagcagcggcatgatctctgctcactgcaacctccgcctcctggattcaagccattctcctgcctcagcttcccgagtagctgggactacaggcgtgcaccaccatgcccagctaatttttgtatttttagtagagacggtgctttatcatgttggccagcatggtcttgatctcttgaccgcatgatccacccgcctcagcctcccaaagtgctgggattacaggcgtgagccacggcacccagcgagtaatctacttttaaaaaaaactatacatgtatactgaatatacaagtgataagaaagaggaataaaatcggcctttattctgcttgctaaatgtctactattcaagttttaagaattacacacactggtagctattgtttctattcatttcagagcttctaattgctgctatggggtctcaatgagaaagaagggaagtggggaggaggcaatgaaaatgcatgagattttcaggaatgccaacaatgtgaagttggaatcctactctaactactttcattcattcttccaaaggtgacggtggtctgttgtgttcaaaaggagctggaagaggaaaagcagttttaagatagcccaagggacggcaacttaatgcctccctaaggagaaaccacatgggctgtgctggtggagaggataataatagcaataataaaaataaaaaagagtgtagaggtggggtggcaagggtggggaaggagtcctgataacttggaatgaggtgggaggaagaggtggaggtaacctttgcaggtgtttaaggaggatttgtaagggatgcaaaaataaggacaactgaagctgtgaggcgggatacaggaacatatccagtgagctcccaggaataatggagagcacacattgcatcatcaggatcactgagacccgaatcctctggggaagtcatgtcttttttgtactagatgttttgaagcttgagctggggcggggggtgag

SEQ ID NO: 36190 - DNA, 1055 bp, Homo sapiens
ggccaggattccacgcccaagtgcatttagtaggtcagtacagtaattttaaatgtctttctttcaatcttttgccatcttcaattatacctttccaccctactatttgtgtaattttcttctgtctgaagtctctttactgttgttctctattgcacagcatgacaaattacccatcaagccatatcttttcagcccagaaatgcgcaataacacggagtcatggcattatcgcatgttgtgcactttatttcctcacagttcattcaagtgtgtcactttattttcctggcttccttttgtcatcatggagattaaccattttatccttcctaaactttagaaacaattagaatttcattacagtggaagctgagagtgaatgcttgctcagtactatatagagtatacttttcatattatcagtggcaaaattaaagtcatgaatcctgagtctttttcaaaggagagactttagaggttattatacagctgagtaaccctggctctgggcaagagaattatttgaggttgtggtcaccaaacacattaaccataagaaaccatttagtctgacatcgagtacctgattcttatattctcctgggaattatgaaactctctgggacccatgtgttctgtacacaaaatctttttcttccctcttagcttcagctaaataccaatagtattcaatgagatacaatagatattgcaagtatgtgctagaaaatcaattggtattgatgctctaatcagcagggctgcagctggtatgtagacacaccactggaaatggtgattaagatcatattcaaaagcattaaaaaaaaacttcaaaacgtttagatcactgttcagatagattgctgttttgctgggatagtagatgatttgggaagccagtgatactactagatgctgctagattaatttataagatttttaaataacaatctattttatgtgttgaatttataatatattttaattatatacttatagtttataggacagttattgttggtaaacaaacaagcaaaaagttcaaagct

SEQ ID NO: 36191 - DNA, 1058 bp, Homo sapiens
aatcctgggttttcttttctttaaaacctctctcagtgattccaatgtgcagccaggtcccactcaaagaaagggggaaaaaagccttaataatgggctgactgaattgtccttctgtgggtagatttgctcatcaaatcacagtgcacaaatagggtaagcttgacattaattgtggagctgttgctatataggaagcactatggtagacagtagggaggataaaatccctgcttaacacagaaccaacaaacagccaggcgcggtggctcatgcctgtaatcccagcactttgggaggctgaggcaggcacatcacctaaggtcagaagttcaagaccagccttgccaacatggtgaaacccccatctttactaaaaatacaaaaattagccgggcttggtggcaggcaccagtaatcccagctactctggaggctgaggcaggagaattgcttgaacccgggaggcggaggttgcagtgagccgagatcgcaccaatgcactccagcctgggcgacagagcaagagtccatctcgggaaaaaacaaacaaacaacaaacgaaaaacataggtgaaactcctcccctttggaaaagatcaatttcccaaaagtggtattctatttctttgaaaattgacaagtgtggcaacatatatcacctgaaattttttttttttaatctgtgttttaacaggaggatctttccaagagcaatgtgggatgaagtggttgttgtggttgctgagggacttaaactggcttttttggtgaaaagggatgtagcaagtcagggaggcagagggagtaagttgcagtggaaagactggtattcaagacatgactatagtgagtcaggagaatagggtgcaaccatcttaaaagggctctgagtaaatagggagtttggatttaattcagttagccaagagggaagatgaggagagtagcagaatcaaaactgtgctttaggatgagtaatgtggatccataaattaaacaggaagaacaagggataccacaaagtttgcagttaatcagaagtgaggtgaaaaagg

SEQ ID NO: 36192 - DNA, 1083 bp, Homo sapiens
aaaaaattgttggtagtcataatagaaatacaaagatgtaattttaaagttaattttgtgtactattccctgatggttccacttgtggataagtgggactctcatggaatcaaagctttcctaactctgcatctctcttttgtcttctcttttagaattcctaataattgctagtattgactgtgatttgagttttaatttctctctttcttctcaatctgccagatatattaagaaacaagaattcctggcaacaggaagtaaataatgagagagaaaaaagataaagacacagataaaatgcaactaggataatctaacccaggatgacttgctattataataatagtattaaatggcctcatgtataaagtgaaacatagacattttgagataatactattaccttatttttccccttttatgttagaaggaaaacaaaataacattctaaaagttctccataaactaagtcacctcaaatattttagaaggaggtaagatagaccaccaggtactgtggctcatgcctgtaatcccagcactttgggaggctaaggtgggcagatctcttgagaccagcagtttgagaccagcatagccaacatggagaaaccctgtctctactaaaaaaattagccaggcttggtggtatgcacctgtagtcccagctacgcaggaagctcaagcaggagaatcacttgaacccaggagaaggaggttgctgtgagccgagatcgtggcactgcactccagcctgggtgacagagcgagactttctctcaaaaaagaaggtaggagataaattataaaaaataaagcattgtgcattagagctgataagcccaatattaatctgaaacccaattattaagtaacaaaatcaaagaaaatgctggtttagtggtgagacagtaaattccttctttcttgagttgactcatagtttcctaggtggtagccaggaggtggtggtaagatgggagtagaataaggtgatagataactgttcccttaaggctaagcagggaagtcagcagtctagtggtttccatacaaattaatgaaactcacttataccag

SEQ ID NO: 36193 - DNA, 1024 bp, Homo sapiens
ttctctgaaggagccactgtatggtatggtaatccttttgttaggataattaggatgatattttcctgtaatccatgtcatggaccagcaattcagtgtagctcatcttttggtgtaacactgtttttgcatagatgtacttgtgtaattatttggaggtaaaatagtacatttttcattcttcaagtaatgtttaactgaaagaaggcataatagaaagaagtgttttagatatgtcttacaagtgatcagtataattttgagaacatatgtgaaagaattgattttcatttatatttccaatctgcgattataaagcttttgttacggttatagttagaatcattagttttatttaactaatttcaacagtgttgatgagcaggaatgaaatgaagagagcttgttccttctctggcagactagtaagctaaggttggagagtgttctggaaaaagtgggacttgattgggactttgaaaaatggtggaagagagggagtggaaaaaggtagagaggactgggactagcttagattaaaggtgcagaagcatgaataatacaagtgttttgtcccagacacgtattagattaacctggctggaaatgttgaaagaagagaaagagatagctggaagtgcagaggtttgattgttttttaaattgatagataattcacatatgaaaaacaatcacctttcaaagtacacatttccatggcgtttaatatatatatatatttttttttttttttttttgagacggagtctcgctctgtcgcccaggctggagtgcagtggcgcgatctcggctcactgcaagctccgcctcccgggttcacgccattctcctgcctcagcctcccgagtagctgggactacaggcgcccgccactgcgcccggctaattttttgtatttttagtagagacggggtttcaccgtgttagccaggatggtctcgatctcctgacctcgtgatccgcccgcctcggcctcccaaagtgctgggattacaggcgtgag

SEQ ID NO: 36194 - DNA, 1027 bp, Homo sapiens
atgaaactaatttttgggggggtctgagtcttacctgaatgtgttaggggaagttctgcctccgaaaaggaaatgaataatggtagtgttaatggtgcttttttaaaaaaactgaataatttaagaatatatgatgtaatttatatgtataagtcacctgacttaaaacgtgtaacattttccaaagattccagaagaaatggaagaatttaccgttatcctactgaatggcactggaggagctaaagtgggaaatagaacaactgcaactctgaggattagaagaaatgatgaccccatttattttgcaggtggtattgctgtcttatttgaatgagtttacatatttcttaaatagtatatataaatgtatatatgcacgtgcatatatacatttatatgcacgtgcgtatatacatttatatacatatatatttagcaatttttttcattgaacattttcaataaagcacaattgatgcttgtttaaagattttgtaattcattcgaggattgttatttaattgttcgaagttttgactaatacttcaaaaattttttgaagcaaaaagaaaataagtactgttttattatctttttccccctttcagatttctcggtatttttttttcttttgtgcagaaaacacttctccatgtgatttcttcaaataaacagtctagttggttcagggctagattatgtattagaaggacctgagtattatgcctaatggatggccatacactataataactaatttttaagggaaatattaattaaaatttcttcgttttgccactttaacgctttcttcagaactgtctttggccacctgaggcatcttttggttttgtttatgaaacggttgttgtgtaactctttcttgaatccttgttgtcagctatatatgggttaatttacctaatgcaggaattgcaggaatcttgtaagccttttgtattttattgatttgtattctttctttcttcttctttttttttttttttttgagatggaatattgc

SEQ ID NO: 36195 - DNA, 1033 bp, Homo sapiens
ttattttttttaagagatagagtcttggtgtgttgcccaggctggagtgcagtgacaccatcatagctgactgcagcctcgaagtcctgggctccagggacccttctgtctcagtctcctgaataactgggactacaggcatgtgccactgcactcggcatagtcactttttaaatatcctctatttgtaagactctctgtgggccttcaaagatggatagtatatgacccctgcctgcagcagtcttgtagtctggagaagaacttatataaaataaaattgtgctgctatcattaatgtatttataagcctctaagtaactggctttaatctctcttttaatagattttaatattaagtattttgtaggttataagacatcatggaactctgtctccagtgactttgcattggaacatagactctgatcctgatggtgatctcgccttcacctctggcaacatcacatttgagattgggcagacgagcgccaatatcactgtggagatattgcctgacgaagacccagaactggataaggcattctctgtgtcagtcctcagtgtttccagtggttctttgggagctcatattaatgccacgttaacagttttggctagtgatgatccatatgggatattcattttttctgagaaaaacagacctgttaaagttgaggaagcaacccagaacatcacactatcaataataaggttgaaaggcctcatgggaaaagtccttgtctcatatgcaacactagatgatatggaaaaaccaccttattttccacctaatttagcgagagcaactcaaggaagagactatataccagcttctggatttgctctttttggagctaatcagagtgaggcaacaatagctatttcaattttggatgatgatgagccagaaaggtccgaatctgtctttatcgaactactcaactctactttagtagcgaaagtacagagtcgttcaagtaagtatcccttagtgtgttattattattattagctctcagaatcctgaaac

SEQ ID NO: 36196 - DNA, 1046 bp, Homo sapiens
tgattttagaatctctgctttttagcctcttgtctgatggatgcaaaccctgattttatatgctttcctggacagtgttgttcttttcactctacagagaattacactctccctaccctttccccatccaggcagctaccataagtgtcctagactaaggtagcacctctgaaatttaaaaggtaaagaacaaagtattaaaaacaaaaatcaaaaccaaaccaaaacactaatcaggagcaggattagttaatattttaagactagcccaggagcagggttagtaatattttaagactgaaaccaaaaagccaaccaggagcagagttagttaatattttaaggtattggtaacatactaagtttggtggatagaataaaaataaaaagggaagataagtttactttgatattaatctctcttgacttcaccaaactttttccccatctttcccatgtgtctctacttctgtttgtgtccatgtctctctgtgtctcttttgcacacctctgttttctctgtacctttccttgcacttctttcatttatttttcatttttttttgctctttctactccttccaactgtccccattttcctttcctcctgaaatagtgatattatagaatagagatgccaaatatgttttaactaattaaaataatagaaacaaaatagtaatctcagttgtttattattttatactgttctcagttgattaaatttctataaatcagtggctcttgttagccaaaagtgtccttattcagacgtgataagcattgtctctttattttcttaaacatcttttgagtaatgttgataatacctgtacattatgaattatataatttcaaagggactgtctttaaatcctatatcaaaaatatttttaatcatttatatgtattttaagatatgcttctatgttttttaagattcagaaggtttgactgcacaagttattattgatgccaatgatggggcccgaggtgtaattgaatggcaacaaagcaggtaaggccaaggctgcatgagagccctc

SEQ ID NO: 36197 - DNA, 1045 bp, Homo sapiens
ttcaagcaattctcctgcctcagcctcctgagtagctgggattacaggtggccaccaccatgctaattttttttgtatttttactgtattttatatttttagtgtattttaccatgttggccaggctggtctctcaatctcctggcctcaagtgatcagcccgcctcggcctcacatagtgctgggattacaggcgtgagccaatgcacccagccccctcttaatttttactttttaaacttaatgttgccaatttaaataaaaagatataaaccaaaatataaggagacaaaattcaatgtaaaatagcttattctttacattcacaactatattgtatttctttccaaacattctatagaaactcacagtgtatataaatataatacattctgcttttacctttttgaccagattcttcattttgctgatggagaaaggtataaaaatgtcaatatcatgattcttgatgatgacattccagaaggagatgaaaaatttcagctgattttaacaaatccttctcctggactagagctagggaaaaatacaataggtaattaataatttcttataaacagcttcctctccttcatgctgggttccttaatatgggggaagatgtaaaggaatgagaaagtcttggtggttttctgtgcttaaaatgagaatgattttaagttagagcatttcagaattcctgtgtctgtgtaacagtgcctctcacgtgtgtatgttggtgtatatatgcatgtatgtaaaagacaaagtaggttgatactacagataatattatttcctcagttattgtaggattatttaatttgtagatgtctttcctttggaatttgaattttgttctggtttcctacttagcaatagaaggaattacaaaggtagtaattctacctttgtagaattactttgtacctttgtacaaaggagtaaaggaactcctttagtgtcatctactctgtagtatttccgcatagtgttgaggtatactgatacttcagacagattatgggagacgtaattcttggtt

SEQ ID NO: 36198 - DNA, 1046 bp, Homo sapiens
taaaaggatccaagagagtaaacatatggtattgattacattcttgcaagtgctaaattcctagtcataaagggttttgtatttcaacatttccttcaggtcttcaggtggaatggaggaagcttcgtgttgcatcaaaaactccctgtccgaggtgtgctgaccgtggccttgttcaacaagggaggctctgtgttcttagccatttcccaggctaatgccaggctaaactcccttttattcagatggtctggcagtgggtttattaactttcaagaggtgcctgtcagtgggacaacagaagttgaggctttgtcttcagccaatgatatttacctaatatttgccgaaaatgtctttctaggtgagaagataaagtatttgtagtgtatatataattattgaaatcatctagcattcatatggtatattttatatgaaaatgctcttgcaataattttttactaatccatagaatatttcttgatagataagtattaattgtcagctgtaaatggatttttgagaaatatttaagcattatacccctaatcttgtgttctgactactacctgaaagttatatgaaaacaaaattggaagtaggtaggtaaagttgaaagatacatgaatattttatacgcaggatgcaaacaagtaactttttatatgtatttacttgatgtgccatgaataatttatagtattagtaaataatgttcagaactttttataagactctttcagaatattcttggaaggaaaatttgctttctgctgctgagtagaactttcatgggtaaaattgcaacattcctaaaaaaattaaaaaaaattgtccttgttctttctttaacattatatcatggttaatgactaataatgtattcccgtcatgcagtaaatgcaaaaagacttttgaagtacttcctattaacttgtatttttattggactaaatggattctgaggaaatttgtttcttgatatttttattatagttttattatgtaattttgtcatttttttctgtaacttttgcattaag

SEQ ID NO: 36199 - DNA, 1047 bp, Homo sapiens
gattgtttccatctctctactttgccatcacaaaattgactttcatttggttgtttgaaagctgatgttattgttaaggttactatgttctgctcatgttcatttggggcagagagagatattttatgagattctcaaagtaaagaagacatttcccaaaagactctagaaaatggcttatgtctcattgtccagaactgggtaacaagcccactcactcattcattcattaattcatgcagcagttatttaacaaatgcctgttaggtaccagatactgtttcagatgctacagtcatgttagaaaataagacggtaaaattctttattttcatggtccttaaattctagagagggcaaggggagaaaggcagtaaacacagacataagaaaatatgtactatatctgatggtgatgagtgtactatgaagaaatgttaggcaaggaaggcagatggagaatgcaagggagggagtggaggttgtatgtggggaaatctaaaataggatgatcagtaagggctgtttggaggaaatgacagaatgacaaagactggtgggggatgagggtgtgagctatgtaatatctggggtaggaacatttaaagcagaaggacccatcagcaagagcaaaggccctgcagtgtagccctgcccatctggagcaacaaggaggccactgtggctgatgtctgcatgtgataggggatgaggttcaacaggtgcagggccagggctctgtgtcagggatccccatgaccacccacagtttcgatgagtcactaagaagactcgcaggacctagcatttagtcatatccatggctatgatttattacggcaaagaatacaaaataaaatcattgaagggaaaaagctcatggggtgtaaagtccagaggaagccagggcaagcttctaagattccccctcccacccccatccattgacacaggacacacttaattccccagcattgagttgtcacaagatgtataaaatgttgccaaccagggaagcatactagggactcagtgcccaggatttta

SEQ ID NO: 36200 - DNA, 1028 bp, Homo sapiens
tccccatatactcagcaacttttccggccccatatgtcaccattcccttcatttaatcacttataggttgtcagtaattcacatagatcacttttaattaataaaccaattgctgaaatgcccattgtctactgtcctgtggatggaaggctagactgacagcttgcctgcaagggctggacttcctgatgctccaaaattgaaatataacaaataaggatttggctattgaatttcaatttcataagaaaatgggacctgtaagagggagagaacaaactttcactgtagcccaatgagctcgtccttggaaaaaaaatgggcagctgtgtttgtaaggagtgttggattggcaaaagagtaactgtgaatatctctcaagcagcagaaaattacacatgaatatgtaatttattttttataaaatgtctcttagcttataagtttagattacaagttcagcatttagtattcaaatcttcaattgatgaaacttcacaataacgtttttcatcaaacttctggacttgggcactggacagtgtgtttataatctacttttactgttagagaaaatgaagacctacactagtattcataaataatttttgttcattttattgtaactgcggtcataaactctagtgttttaaacctagtgttaagcacacttgttctgggaaataatatcgttacagctacaaattttcaatttgtcttagagtctaaagggaagatttaggttacccaattcctactgtattgttgaatatgtaaagcatgcgtgcttgagctttaattcattagatgtccatggctattttgattgttgatgataatagtagctgcatgatgctcagccctttgtgacttttttccttgcttatatcctgtctttcctatcacaaaagtttcttggtaacatgaagtttatcttttaaccttaataagatatacaatattgtgcacacaataaacattctgttagcattattcggtgacacagattagattcacagctgaggtac

SEQ ID NO: 36201 - DNA, 1046 bp, Homo sapiens
aaaaggtaagtagtacaattagctaatctacagcccatctcagactactggtaacagttactcttatcatttaatattctaaatctcaattttctaattttgccttttatataattcgccaactttcaacctttcaactctaggtagggtataaataccagaatagaatttgggaattgaaggaaggactaaaatggtttatcggcattttttagcatgaggaattaaagtcatattttaaagccttggaagttgaagctttgtttgatgggaataatattaatctaaaaaaagacttcttttgcagaagtatcattacagaagtaaactaccatctatattaaggatagaggaattgattatgattggtttctgtagaaattgaaatacttttctttcttttttatttttctttctttctttttctttctttccctttttctttctttccaaagtcttgctgtgtcacccaggacagagtgcagtggcacaatcatagctcactgcaactttgaatgcctggactaaagggatcctctcacctcatacttctaaatagctatgactgcaggcatgtgccatcatgtctggctaattttttaaaattagtttttagtagagacaaggtctcactcactatgttgcccaggttggtattgagagatatttcttttgaatcttgatgatttagtttgaaatttaattagtgtcatgacactcactatttctttgaataaatcatcttaacctaacactgtaaatctcaaggccgcctgcttacttacctatctctgagtgcactaggtctattactgtatatgtatgtattcagccgtgattcccaaaggttcattttatgacagcatctttctgatttcctcacagtttattatcttcccattgcccaagtttagtaactttatattagttttggcttcgtacaggcaccactcattgggagcaacacagaaatctgtttcaaaacatcatttcaggaaaaagagaatattttagcgttgaggatctttaaaagtattgcagtactt

SEQ ID NO: 36202 - DNA, 1048 bp, Homo sapiens
agcagacttaaacttccctgcctgacggctctgaagagagcagtggatctcccagcacagcgttcaagctctactaagggtcagactgcctcctcaagtggatccctgacccccgtgtatcctgactgggagacacctcccagtacaggctgacagacaactcatacaggagagctctggctggcatctggcaggtgccccgctgggtcgaagcttccagaggaaagaacaggcagcaatctttgctgttctgcagcctctgctggtgatatccaggcaaacagggtctggagtggacctccagcaaactccagcagacctgcagcagagggacctgactgttagaaggaaaactaacagaaaggagcagcacatccactcagagacctcatccaaaggtcaccaacatcaaagaccaaaggtaggtaaatccacaaagagggggagaaaccagagcaaaaatgctgaaaattccaaaaaccagaacgctgcttctcctccaatggatcacaacttcttgctagcaagggaacaaaactggacagagaatgagtttgatgattgacagaagtaagcttcagaaggtggataataataaactcctccgagctaagggagcatattctaacccaatgcaaggaagctaggaaccttgaaaaaaggttagatgaattgctaactagaataaccagtttagagaagaacataaatgacctgatggagctgaaaaacacagcacaagaacttcgtgaagcatacacaaatatcaatagctgaatcagtcaagcagaagaaatgatatgatagattgaagatcagcttaatgaagtaaagcaagaagacgagattagagaaaaaaaaaataaaaaggaatgaacaaagcctccaagaaatatgggactatgtgaaaagactacgtttgattggtgtacctgaaagtgacagggagaatggaaccaagttggaaaacattcttcaggatattatccaggagagcttccccaacctagcaagactggccaacattcaaatccaggaaatacagagt

SEQ ID NO: 36203 - DNA, 1053 bp, Homo sapiens
atactatctcacaccagttagaatggcgatcattaaaaagtcagaaaacaacagatgctggagaggatgtggagaaataggaatgcttttacactgttggtgggagtgtacattagttcaaccattgtggaagacagtgtgacgattcctcaaggatctaggactagaaataccatttgacccagcaatcccattattgggcatataccgaaaggattataaatcattctactgtaaatacacatgcacacatatgtttattgtggaactattcacaatagcaaaggcttggcaccaacccaaatgtccatcagtgatagactagataaagaaaatgtgacacatacaccatggaatgctatacagccataaaaatggatgagttcatgtcctttgcagggtcatggatgaagctggaaactgtcattctcagcaaactaacacaagaacagaaaaccaggcaccacgtgttctcactcataagtggtagttgaacaatgagaactcatggacacagggaggggaacatcacacacttggggcctgtcggggtgggcactaggggaggggtagcattaggagaaatacctaatataggtgacgggttgatgggtgcagcaaaccaccatggcatatgtatacctatgtaacaaaactgcatattctgcacatgcaccctagaacttaaaatataataataataaaaataaagaacgaatgataggcagtatagaaaatggtattggtgatgcagtcttggattacggaaatggaagagcgtattgagaacatgatcaactcctaaaaactttcaaattcatttttaaattaatctaacctcttttcttctgtaggtgaaccagcttttcctcaaatctgctctaactcatgttccattttagcatttaattaccgctccctggggatctgccacatcatacaaatctgtgtgtaccggatgggcctgtgagcagaggagctaggcgggaaggcacaagtgacctggtgctttaagctgacacctggctattcactcttaggaaaataaagata

SEQ ID NO: 36204 - DNA, 1036 bp, Homo sapiens
tttaagttgaatttattaaactatttgactcaatttaggtatgctcaatggcatggtgaaaatattattacattcatgactgagtgaccattcaacattcaattgtgaaattaaaccaaaaaactgagccagacccgcatctcaggtcaagaccattattcatccagcagttcgaccacttccatctcatctatcatatgtacaatattaagattgcgcaatgagaaataccaagcaagatgcatacatgcacacaaagcgtgtaaataataacctaaagcactaacctcatagtaagaaccaagtatatacagagaaaaaaatctcttcctctgtagtactgcataggctgagaataagggaccccagtttgcaaagtctctgtggaggaaatggaatctgacctggttgttgaagaatgtataagatttgaagacttggaatgtgacacattctaggcaaggaaaagaacaagaacaaagacatctaagttatagtgatcctggctgctttcacttgagtaaggcttgcagatcccacagagaaataggtaagttttgactgcaggtgaggcagcttcccattgtctgagaaccatgaggagttacagagtcaccaatggagttagtccaaaaagtcacaatatgaaaggagtatttttaaggattgatctggcaatgaaggattaaaggaaaaatggactaaagaaggtaagagactctaattagggagagtagagaggttgggtggactgcttttaccatcatccgattaggatgggttctgagcttagacagtggtaatggcaatgagaattcaaaggaaggaataaggactaataaaaatatcttattttgccttattaaatttctgcacttttcttgtctgtctttaaatcaataaaaaagccacattgcaaattttatttactaaacattaatgtaatatttattacatattacaggaggtagagattatgaggtaggtactaatattattctcattttacagattaggaaattgtgacataaagagt

SEQ ID NO: 36205 - DNA, 1083 bp, Homo sapiens
cagggcagcctttcctataggctagttgtgtgcagtctagaactgcctttctggcagagccctattcagataccatctttcgggaacatacactctgtgttctgccaggatgggggaggagcttggtttcaggcactatgttttggttgtaagggcgaatgttattgccaaactgaaacatgtcaaatatcaacaaccaagtgggttttgtggtcacatttcatctgtagatgatggcatgtgcaagtgattttatggggtttgatgtggaaactatgagaaattccacaactccagagtgcacctctaagccccaaccccccgtttattctcgctcttctgcaagacagagatcaaggttgaatgaaaatcttgagtacaaattctcaatttttgcatttttaaaaacttttaaagtatagatttctttacaaaaaatgctcagagaaaaaaattaaaaagccaggcatggtggtgcacgctgtagtcccagctgctctggaggttgagaaaggagaattgcttgagcccaggagttggaggctgcagtgagctgtgatcacgccactgcactccagcctgggcaataaagaccttgtctcttaaaaaaagaaaggaaaaaaaaaaaccttagttaaccatatttgggaattaaatgcttttctactgtctgttttttgggtttatcccatttgtgatcccttctgtcaattgtcaccattatcttgctcacctaagccacctttcttcttttatggactccaaactcttccctgtggtcttaacctgacccctttctccatagtctgttctctcagcagcaggagtggtccttttaaagactaaattgactctaatcattttccctaaaactttttggtgtcttcctattgcacataacagagggactctgacctccatctccctcaggatcagtctctgcccattctctgatctcatcttctaccacctccccgttcacccagcacagccacagtgggcacagttctttaaatatgcccagcttcttcttgtcctacatcctgtgttctagttaatacctaagcctggaaagttctgccc

SEQ ID NO: 36206 - DNA, 1068 bp, Homo sapiens
ccgtatgtcaggatatgtaaataatttcaaatttctcacccttagtagtctcccacccatataaataagcttacagtgaatagtggccagattttagcagtgagttttcctatgtagtccattcctaatcaaagactgcattacaggattcatggttctgtctggtatacttagtattgtaacatcctctgctttcactctttggggaagcttaacctctgtctgctcaatgatgtattcttttcttcatacctggataatgttttggagtacattttaataaaaccagatcatgagggtaaacaccaatgtgagaagcttcattgtgcatctcatctttagttgataattgatggaatattttgtatttcatggatcctacctcagtacatggccaagaaactgctggactccacctgtgcaatttttgaaaagaaattgaatgatgcgttccaggaagggtttgcatttgctcattatttctggcttaatcaaattaaaggagaagaatgaaaaacagctaactccagagcacctgtaaccagtgttgccggaaattatgaccctgttagcttgacattgtgtggtgaaggggtctaattattggactgttaataatattatttaagccctcattaaatgtgctaccatttaataggattttctgatcacaaatcttcattagagtcttagaaagtttttttttaatcttgtatttttccataaattcatcccattgaataactcaagggaggtgaactttggccagtgggtcacagcaaaggataaagattgggtgatgtatatcagggatgggcggaatttgtaatagtttccagctgtctcagcagtattaatgaaagtattagaaaataaatatggaaaaatgattagagattcgaaagaagagacatcaagtatgcaatgtgggactttaaaaaaaaaatacaagatcttgctctattggtcaggctggagtgcagtggtatgatcatagattattgcagcctcaaattcctgggcagtcaagcgatcctcctgcctcagcttcctgagtagttgggacta

SEQ ID NO: 36207 - DNA, 1037 bp, Homo sapiens
tagaaaataaataccttttctttttctaaaggaactagggcatatggattaaggtaaaggaagatgagaaacaacatccaaaaatacacattttttaaaaaatagtcaactaataagttcatgttttataaaaatataagtaataaattatttttaacatgaacgtaattgtgatttcaaaatttcaaaattatagcaatgtccttaaaatagtgttgaatttaaaatcttcactttacaaaatgtctgtgaccatattatctattatgctgttagtaactagagatttttaagtaaagatagcttttttgggtagtaatattttcatcaaaattgcagtgcagtaagaaaaaaaattcagtctctaccttgaaagtttagggttggaacataatcttagtgagtatatctataaaactgttagcctcaattatctctgaattgattttgtttgttcaaagacacaactgtgaagaatcattattctttctactgtgttttcagatgaaccctgacagatctttcatgacagataatactaaaaattacatgttcatctgtgggaaccagaaggaaggtcatatcttgcttctacctcctagaatagctccatggtatttcaggccatcgaagaggatttttatgctggagaggcagcaaatatgtattgatccttaaataacaatctaatttcttctttcttcctattactttagtaggtataaaatccagtagtgaggtatgccgaaaatggggtggtctttagactcctggttagtactttgaacattttcattttaaataatgattctcttgcaaactggtcattcctgtgatacatatttccctttcacagcttctgaatataacttggagtgatactggtacaatgctgcctttctctcccaccttccaaatgtatttgcatatgtgcagactattcctccttctaactgctacttctctgttttttgcttcttcggcctttcaccttctcacacccccatttcctaactccccaaggccatcattctcac

SEQ ID NO: 36208 - DNA, 1049 bp, Homo sapiens
ctgaaaatctaatcttttatgaaaattacttcttagatgctttcagaaatgttgcttcttaccaatgtgatacataaaactaatctcgtttgacagtggtgatgacaagttttttaaatcagttttcctatgtattcctgttacagttttggttgtttatttgaaccttgaaacaccagagcaaaaggaggatgatgttaacctagtatgatatggttattgtattagctaagtagtagctatgtcttatttaatattaaaaaacagcgagtaattcgtgtgttttctgtccgttctacaaataaacctggtaatggagttttttcagagaaccataacatctgaaacacattcgatgggtttaccaaagaaagtaattatggctgtaaaatctgtgtgactatttttaagtgaagttcttcaggaaaagggggtagacagcataatgagaattctatttttaacttaggtcacttttttcatggactgacaatgctgtgactttttcagacagacaatgagccatctagcttttgaactctttcgtattctgtaaacattaggaagcaccagtgtgtctcctaatgtaaacacactgatccagacctcatgaggtatattcatgatcatttactttgtttattcaaaggtcattaaaagatgtgatttagatttgttttcttaatatttctgtggaaactaaaaagctaatctacaatgttgttttacatacaggtttacctgaaaggaaaataaagtttattttagcttttggcaatttttattgatataaaacatataaagtgagtcacacaaaagttgaccttgaaacttctcatttttcatgttagtggttttaatactattgcatttgaaatttttaacttttaataaaattgggttaaattgtatccctccttttctttatatatttattccgcctctgttatcttatctttctgcatctttagaagattataagcttttggaatcagaaacaatgtcatagacttttcttttttttgtcttcccaggaagttgattaaagt

SEQ ID NO: 36209 - DNA, 1069 bp, Homo sapiens
gtctgtgtataaaatatttattgcagctttattaacactagcatgaaatagtaaacaactcaggtgtccatcagaagtagaatggatacattttcctgtattcattcaatggaatactatacgacaataaaaaaagtgaaatattgctacatgcaacagtatgggttaatctcacagatacttgttaagagaaaccgggcaggaaatagcacatactacatggttccatttatatgaagttcatgaataggcaaaattaatgatgatgatgcaagtatacatgaatactttaggtttcagggtaatgagagagccttgcaaggtgttagaaaagttctataccatgatctggtttgtgggtctatactttatatgggtctgtgtgtaaactttaactataatttaaggtgagtgcaccctactgtgtgtatgttaaacttccatctaaaaaatttttaaggtgatgataaagggaaatcccaggtagaaattgttttaacaacttttctgttatgaccttataaaactattcgatcttgcaaatcatgtagtacatgtattcctcttgatgactataaaattaaaaatgaatggggaattagtaagaaacattatagatatagatgttagaggtaataaatggaagagcaagttccagaataagttactgaaaggacaggtggtgggaaaaatagaaagaggacatcaccttcccactacagggaaattctctaggggctttttgcataacagagtgcccttgcacataatggctagatttggttagagtctaatgcaagtattctgaaatgcttttgaatgataagccagaaagaagcaaaaaaaataaaattatagaatgttagagctgtaagacaaggtatattacatttcatccagcccaaccctcttattttaaaatggactgtgtgcattgactctttggaagtgactcagtacagtacagagtgctctgatgtggtgtttctttgacaaggaaggatgcctttactgaagttttgttaatcatttccagaataatgcatgttaaacatgaactttgtacaat

SEQ ID NO: 36210 - DNA, 1035 bp, Homo sapiens
ttttaactgacctactcagataatgaagactcttaacaattcataaatgtcttgatatttcttctctaacagtcacacaaaataaaaacagctcttgaagaaaaacaattcaaagtttaaaacatataaaaatttaggtatttaatgtaatttgaagtaaaagtttgaattgaaaataattataaaactaatatgtgccatttctttgtaataattgttataattttcttgcataattcttaaaggggaaatggtgcaaagaacagcataatagtatggtaatggttgtagaaaatttatttcatttttcattccttaaaaatctagataaaagataggaactgttttctttaaaaacctgtaggcatgtgttttatttttaaatgttaatcaaatttatgctatactcctttattttaactatgccaatggactgatcaaataattaccaatagtgattaaaaaggactttctatatttaaacaaatattaaggtaactaaggggtaactcagctaacgtggctttttaatgataacaaaatatattagatatccacatgtcatgtaaaaccttgtgtaaaatattgggctgcttttcccagccttgctttttttttttttttttaacatcctatttataaagattaaaaagcctgtgggtgagagtgggggatgaaatttagtatcccttaaagcactttgctaatgctttgatttgtatatatgtgctcactaaatgttggatctgtatgggttagcatattttctattatacgttagaaaatactaattcacttttttaaatagctgaatgagatatgaaaagacagaactggtgagttagtagctgctgctttttaggcatgccatactatcaaaccaagatagaacattttaagtaaaaacatttgaacaaaatcctaaagacatataaaggaagtcactttatgaaaaatataactgcctttcaacatctttaccttttctcgtacttgctcaaattatgactatgatgcattatctataaacataaa

SEQ ID NO: 36211 - DNA, 1113 bp, Homo sapiens
gtataatgaaagaaagtaggaaagtatcattaatgggaaaagaatagccaatgtaagaaaaagggaagcttaaatctaaaatgaagtgaggcttgctaaaaaatgatgaaatggtaactgtaggaaaagagaggccatttaaagtatacattcagattaaacatgcactcaacactggagaaaatgtcgactataaggagatgttacagtattagaaaaaggaaagaagcttaagtcctattttgcttcaatcttctctgtcaaatagaatatttggggatgggggaaggctacctgtaaaagacttccaactatcagataagtgaactgatgaaaaagcatctaggtgttctaagtaacattgtgttttcttcctgcatgaatgataatattcaaatatgagagaacctgatgaactgactttgaggaatgtagcatgcaggacagtttcgtaatggaaaacaaatgaaaagcaaatatttttataaatctaatttataaatctcaaccatcttatgaatcctcaaaatctaatttatcggctttataaattagattctgaatcctcccggtcctaaaaaaaaaaaaatttcgtaaaatatcttattcatctgatttttggggaacgcttagggaaagaaagtggtgataaactagaagattatgtatactattagaccaacttcctttgcaaggtgtataccaacataggagaatgctatagacattgtaatctttcactttgactcctgactttcttaaggatgaaatggtgaaatatagactggatatagttgagttgttttgtgattgctttaataaatgtacctaagtattgatttaatcatttgttgtgaattctaaagctaaagagaaatgctggaaaacactggggcttcagggggagaatggccatgatggttaggaggatgtcatatgccatcatggagagggtcacagatagaagcgagggggagggctcaagtgtgagaagtcctaggggagagagcatggctttcttcaaatgaataactgacatagccaaaaaggaggcctggagaatcgactgggagaggcaagcattgaatggaagttaactgaatgaactctgaa

SEQ ID NO: 36212 - DNA, 1060 bp, Homo sapiens
catgttgattgctagaatagggagtacgcagaggagtactatgcagagtcacctatcaggaatacaattattagctaagactaaataatagtaggtaagaagtaggtgaagtggaatgttaagatggtcatttaaaaaggtttgcaagaaaaatctaatatgtaagcatttgaggaaaacaaaagaatttgaattcatcagagtattcctcatagcacaattgattatcaaattttatagtaaaatttttatttggaaaatttgtaatgtcaaaaatataaagtaaattatacatagtttattgtttgaaccaatatcataacactggaaatcttatatttatttatttattcattcattcagaaacattaatctatccagactatgttcatgtatgtatttgtagactggttattctatgccctcaatatatattataataaaaatcagaacaagaacaataatattgattaagtgtttattatgtggaattgtacttatttcattaaatctttgcgacaacctgaatggtagggacttttattcctgccattttacacatggagaaacaaagtcttagagacttttaggcaaggtcacatacccaataacatatgagcagggattctataatcagtttcttcatcatgcactgcaacgctgaaagaagagtaccttttgtattatattggaaacctcagttttgccttttactaaaaccatttactcaaatactacactgaaaataattgaataactgtacaataaatagcaactcaagagacacaaataatcacttcatagttaaatgctaaactgatgatactgacaataattccctatcacttactctgggtatcattgggaaagttactcagtttctgtaagcctcaggttccctcttcaaaaagtgagaataataatagaacccaccttaggactaggactgttgagaggactgagtagtataaataatacatgtgaagcatggccatgtgtgcaaagcaggaacagtgctcagaaaatattagctactcttattgtcagggtggtggttgct

SEQ ID NO: 36213 - DNA, 1047 bp, Homo sapiens
gcgttttaccaactgcctggatgggaggaggaaaaagtgatgtgtgaagagagatgggggaagggagaaaccggttgggcaagcggccgattgttgagcataatctaacgaatttccaaagaaaacgtaataaaaccggacaagaaatattgttcatagacaagagcatactttgcttggattttttttttttaaaccagtactttgtaggcaggttggaaatgaactcagtcgaggtcaaaggaaccttaatcctttgaagagcgaggtagagaagcaagtacaatgtaatcaataggctttgctgtctcctcaacttctttctcctacattgcttaattagcaccgaaaaacaaccaagttgtttccaggatgacacgggtgggggctgggggaagcttgatcacttcctcgaaggaagaaaaagtccttttaagacaccacctacggctagatttgcagagtaagacatgattacaactcctgtgtccagaggaataagaatagagttcggcctaaaaaagtactaccttataaaaggcatatgacatagtggtttagctgacatattgtttgcaacagaatcggaaaatctttgttagaaattagtgaagcgcataaaattgtttttaaaaagcatgatttggtatataaatagggatttaactgtgtgaagctttaattttcggccgagagccttggaccatttaacgtagtaattctcatgatacatcttaaatataggtacatttctctttttattgtgaatgtttggtaaaaaatagcagtgctttcgtcacatcacactgggattcagagcataacagcataaactcatctagattactggcaatcaacagaactgccttacaagagaaatgtagaaagaaaaaatatgaatctggtgctctctctatatatatatgtatgaccaaaaataccttggaagatttttggctgtccgtgtctaaacgttttagattcttttgcgtagtgtatatggataggttgagcctatgagtcacaataaactaaacttattggtct

SEQ ID NO: 36214 - DNA, 1034 bp, Homo sapiens
tacttgggaggctgaggtgggaggatcccttgaacctgggagatggagggtgcagtgagccgagatcgcaccacggcactccagcctgggcaacggaatgagaaaaaaaaaagaaaaaggaaaagaaaaaaaagaagcctgaattctatgtgtgttgctggctattggggtgtgtcttttccaaggccctcttagtaaacagacacatactgacattggttactatctccatatataaacaactactagttgatacctattccttcaactactatccaacatcaccagatccattctaattttctccctttccatatttttaacactcttctctcacagtcgaagtcctggctcatgttattcttaatgtacttacatatttcatcaacatccctgtaggtaacaagtctcacactgttgcctcctcctacataaatacctttctcactttgatactttatgtcaggcacttgggttttgtgcttggcaactccctcctccacactctaatctgtagcagaagttctcttcactcctcataacctctaatacctcaggcttcttggtgcacttttaatttgcattctttttgttatctatgaggttgagcaatttttaatgaagagtgccagtataaatcctttctccatttcctacacaaaatctttagtaaaatcaacattgcccaaaaatatttttgtgtgagtgaattatttaatagttcttgaatgaaagctgagttttatgtttagctgcacagagtgaatatattatttaagctatttattcatttaacaaatatttattgaattcattgtatgttccagccacttcctaggcactgaggatcaagtggtaaaaaacagacacaaattgccttccctcatgaaatttatatttttaatggtacagttgaataatgaacaggctaacctgtaagcttagaatgtaatttcaggtagtggagaagctacaaagagactaaagcacagagacagtgtgagcagttgcaggtgctggagtagcagagaagt

SEQ ID NO: 36215 - DNA, 1040 bp, Homo sapiens
caaagaatgtatagccatctttaatctaccacagacatacttttcaatgttttccaggtattattacattgctaagaaatccttgagcctcttacagggaactagattaatttgtgtcatgtcagcaaacaaaacagcaaattcttttggagattcatccatagatggttgagggcaggcctcctcccatggacctatgaattagcagttatggaagggaaggaaggatactcatggaattagagaacagttttaagagcatgaactgttagtcaccctgcctaagtccctatctggctcttccattttctctgtgtgaccaggagcaaatgaatgacttttaaaatttttagcctcagtttactcttgtctacagataataatagtaacaataaaaataataaagcccttataggattgcctgaacatttcagttaatatacacaaagcagtgtttttaatattcagctgagactcacagtaagaaacatattttacaatatatatgcgtgctaaatgaaacagaagtatcacaaaataacccttatgcttgctaagtatgatagtgatatactctgatattttctaatatattctattttaaaaatgtatgttggtaagacccatactaccttgttttcccaactgaccaataggtcataattgcagtttgttagaaatttatgtaaatgagtttttcaatgttgattacgtggatccattgcatctttatgtaaggccattcataaataagtgatgctggggctgagtctaaagattagtaaacacgcctttatggccatagctttcagtcagcttggacctcaattttaaaacaattatttatcattttgtgactttaaaaattctatcagtattctacttttacttctaatatttaaaaagactcagctaaaaagactttaaacaactttattttggaagaaaaacgtatctcctttccataaatggaaaagcaacacatgccataattgtaaaatacctgctaaatatctaatgagacaattattaaattctca

SEQ ID NO: 36216 - DNA, 1042 bp, Homo sapiens
cttccagatattagagaaaaaagtaatgaaatttaattgttcagattgaaggagaatggaaaagtaaatgaaaactgtattgatgttttaaaatttaagtagaaaaagggttatgttaactcagtgatttaattctattatctggctctagatgatttttaaaattgtgaatgattggtgaatgagcgaatacatttattataaacttgatgctaacaatgtgacagtggtataaataataaatgcagaataagatttccatagtggaaaatcactgttttggcacagacagaacttctttccatattacttgcccagggttagagaaacattactattaaaaacgattttaaaattcttttaccaagttatgatgttaagtcatattggtgatgaggtagcttctctctgtagcaaccatctggttttgggttgtgatagttcaatagggtaaaggtatcattgcaaaactcctgtactcagtcactctccacctccacgttagctgtgtgccatagtgcatgcaggtacaaactccgaactgcatttcaaattttccatatcctgttttctcttgcccttaattttccttgtaggttctggtggatgtgttgccaaagtttgttcatacattagcatctgttctttgaccttcctcatctgtgaaatagtgttgttacatacctacattggatagatgtaatggagaattttattttgcaaggcattttcaaatatttttttctcatggagtcgaaaagtagaatattaactcatttattaggagactatcatgggagaaatgtggctgtacaaaataatatgtgtattactaaggtgtttttggctgcagaactgacactgtctctagtgagtttaggccaaaaaagggaatgaattagaagtatgctccacaggtttaaaagcagagggagagttgaaaattcaaggccttgggaaggtcaacaaacagggtcctaagggatctgtacggtgatcagtcatggaaagtctctgtagggcactagccttcaaatgcctc

SEQ ID NO: 36217 - DNA, 1022 bp, Homo sapiens
atgctatggcacaggaagggttaaggaacccatccaaggtcacaagctggtaagtggcagtcaagacccaggcagcttgatgccagatgcaagattttaaccactatctataccagcttataaatcagctgaattggtttttgttgcttgcaattgtgagtgataggattaaatgatagtgttgaatgagaagatcagtaagcaaaaagtgatagtgttgaatgagaagatcagtaagcaaaaagactcaaaaagtaagcaaaaaaggattagtaagcaaaaagactcaaggtccacactcacggagagtatgattgagttgaggagacagatattattcaaataattttatcagtgaatataattacaaatgtaggtaagtgaaggaaaggatcataatctttagtgttcatcagaaaggaacctgacctggactaggggttattgaaagcttttctgagaaagtgatactttgacagtgatgtgaatgaatgaactaggtcaagagtgtttgtagacctatggcacatgcaactggagtcttccgggggaatccatgggtgccaggaccctgagacaggaggcaagatgcccactctaattgatgtgtggatgatgaggaggggccccactgctagctgaagtagatgaagctagggagttaagcaggtgaccaactcatgcagggccttgaaaggacacatcaagtactcatgaggctttcctctctctggctctactcacctacacaaggcaagaaaataaaacagaggacagtgtgcatagtccttggttttgttttctcatgggccaggactcataatgggaagggaataagtgcaggatcttctgtatagatgattcctggaaggtattcctagactacatgctatacctcaagaggtttcagggaatgtaacgggatccatgtgatatgcaccagagcactatggggtgtgaagttgtttaagaatttccacacttcgcatctgtaagctgcaaggagtgcaataccttgtatt

SEQ ID NO: 36218 - DNA, 1047 bp, Homo sapiens
cgtggatgggaagaatcaataaaattaaaatgtctatacttcccaaagcagtttacagattcagtgctattcctatcagactactgacaacattcttcacaaaactaggaaaaactattttaaaattcatatggaaccaaaaaacagcctgaatagccaaggcaatcctaagcaaaatgaacaaagctggaggcatcacattacccaacttgaaaattacaaggttacagtaaccaaaacagcatggtactggtacaaaaacaggtacatagaccaatgggacagaatagagagcccagaaataaggcctcacatctacaaccatctgatctttgacaaagctgacaaaaataaacaatagggaaaagactctctattcaataaatggtgctgggataactggctagccaactgcagaagattgaagctggaccctttccttacaccatatacaaatatcaactcaagatggattaaagacataaatataaaacccaaaactataaaaaccctggaagacaacctacgcagtaccatcctggacacaggaatgagcaaagatttcgtgacaaagacaccaaaagcaatagcaacaaaagcaaatattgacaattgggatctaattaaacttaagagcttctgcacagcaaaacaaactaacaacagagtaaacagacaacctacagaatcggagatattctgcaggttgcaattatgcatctgacaaaggtctaatattcaaaatctataaggaacttaaatttacaagagaaaaacaactccattaaaaagtggtcagagttggctgggcgcggtggctcatgcctgtaatcccagcactttgggaggccgaggtgggcggatcacgaggtcaggagattgagaccatcctggctaacacggtgaaacccagtctctactaaaaatacaaaaaatcagatgggcatagtggtgggtgcctgtagtcccagctactcgggaggctgaggcaggagaatggcttgaacccgggaggcagagcttgcagtgagctgagattgcaccact

SEQ ID NO: 36219 - DNA, 1066 bp, Homo sapiens
tttttcaaatgaccaatgcatgatgttaagagatcatgtatggataaaatatccattcaaagtgcagaatagctggatagtcccagctacttgggaggcttgagcccaggagtttgagaccagcctgggcaacacggcgagaacccatctcaaaacaaacaaacaaacagtacagaatagaccaatggatctttctgaaacagagtagacgaggtttattaacatggtttgaaaatcacctttaagaaactagtacttgttaagttttggtataatatcaaagaagaatatacaaaattatctgaaaaattaattgaaacactcattcctttttcgattacattgttgtgtaaggttggattttcttaatatactttaaccaaaacatcatatagccataaatttaatgcagaagatttgaaactccaactgtcttttatgaggccagatattcatgaaatttgcaaaggtgtaaagcagtgctactcttctatcaagtatttttttggcttgaaaatatgcttatttaaaaaatatgttatttatcttattttgtaatgggtcattattactttaaaatgaattaacagacatttaaaaacattcttactaaatagactgagatacagtaaatatttatacatataaccctgttaaagaaaatctctttggagtcctcagtaagttttaggtgtaaagtgcctgtgagattaaaaagttgagctgctgcttttatctctttcctgagtgacaggcagagtcaaccatgccactcctaccccaacacaacccaatggttcctccttcactcatggtaaaagccagagctctcacagtggcccatgaggtctctcattgagcttgtcttctctaaccttaccctttgttcatgttgctctagataccctgactttgctgtgttcaggaacatgccaagcttatttggcctaagagtttctctgctttttccttttgccctgagccctcttcccccagatttttgtttatcttttcatttcatttcttggctatgcaaatgttacctcaagggagtcacccctcttgc

SEQ ID NO: 36220 - DNA, 1051 bp, Homo sapiens
atggaaatattgaactttattttgattatgtattggtaaaaactcatgtttttttcttgaagtttaattattgtgtttaattgtgtatttcatggtgaaatgtaccagtaatgactatccatgattcaagtaaaaggtagttgatcttagagcttttagacaaaaaggcttgcatttacatccattcaatgagcattctttaagcacttcctgtgcaatagttcctgtgctaggttctggggatgcaatgatggaagacagaaatggtcatggtccttgtgaagtcacagcttagtggaggcaccatgtgttaaacagatagttataagagtaataaattacagttgtggtaaatgccatgaagggaaagtatagacagaaggagaatcagggagaccactacatggttgccttaatattcagatctcgcgcaatagaattcactgttattaacgtatcaccacattttacagtagatgtcttgaacttattcctcctttctaactgaaattttgtgtcctttgaccaacgtctccctgctacagcccccatcccctagcgatcatcatcctactatttgctgctatgagttcaactcttttagattccacatataagtgagatcatgtgatatctttctttctgtgtctgtcgtatttcacttagcttaatggcctccaggttcatccatgttgttgcaaatgacaggtttttctttttttaaggctgaatagtagtccgttgtatacatataccacatttttgttatccattcatctgttgattaagttgattctatatcttgattattgtgaataatgctgcaatgagctcaggagtgcaaatatctattccagatcctgatttcaattcttttggataaatacccagaggtagaactctttgatcacatgctatttttttttatttttatggaaaccccatactgttttccataatggatatactaatttacacttccacaaagtgtacaaatattcccttttctctacatacttgtcaacacttatcttttgtcttttttataata

SEQ ID NO: 36221 - DNA, 1028 bp, Homo sapiens
ctccatgagcatggcactctggaaatgttcctacatgaatgtgtccacctttaacttttgttcaaaatccttttgaagttgtaaactgacaaatcaatggagtctatgaatgccattattttcagcattcactcattttagaagaaaaggaaacttcctttcctcacctcccacagcctgaagaaagtttcctttttgagagcaaaattaccatttgtttaaagctttctcttcaattatagcaatttccacatgttttaaaactattctcagcaaaagaaaaatcaacattatgtgcttttgaaacataggctaatctggtagacatcagtttgaaagagtcatggctgaaacaagtgacttggaagattttcattgtatgctcttagcccatgttgtctgtgaactcagaagcaggacaaattgaatttttttttttgtgaagataaattgatgcacaaggggaatcttgaaatgcactattaaaaagctcaactacttaaggataagacaacatgtagctgaactttttcatatatatatatgtatatatatatacacacacatatatgttttttatgtttcataggcttcagttaggaggacagtacagagcctccactgcaatcaaccagctgtggcctgccaattctagttcctgacaggtagcaagctggattcttggctgtaaagaatctcaagcagtttcgatatgctctagggagggcaactgtttagcctaagcaattcaaagaagcataattgtgcttcacagtacacagaaagtcaccacatctgtttcgtatttttggcttttagaactgaactagaacagagaaataaacatacagctttgaatatagagtaaaaacaagttcatggtgcacagatgagcatattgtatgtaactcagtgaaaatttccttaatgagggtttcttttggtaaagtgagaaatatttctggtgttaatcaaggttttttaaaaaaagatttaatagaaaatattgtctatttaaatgtcaagac

SEQ ID NO: 36222 - DNA, 1034 bp, Homo sapiens
gagtccaatatatcattcttatctctttatgtcctcatagcttaccttccacatatgagtgagaacatacaattaaaaacataaatttatttctcatagttctggaggttaggagcccaagacaagggtgccaacagttttgttatctggggaaggctgctctgtgttccaagatgatgtcttgaacagtgagtcctttggagggaaggaaggctgtgttcttacatggcagaaggtcaaagggcaaaaaggcctaacactgcatggaacttttttaaaagctttttaattccattcatgagagaggagccctcatgatgtaagtaatcacttcttgaagaccacacttcttaatatttacattggcagcatataaaatttagagggaatgtattcaaaccatagcaatgtcccacactcaaatcatcctaaaatttcaaggcctatcctctgagttcaatatctggtccatttgtggtagactacccaccagcaccatataggggaaagtgacactagacttctttgggactattaaaactgaagttaccttctcattttctcataggagggaggagaaaaattcccaccctatcctcacagctgcctaagtgaataaccactcaatcaaaaatggaatctggagtaaagaagttgtgaaacaaggcaaacagaaacgctttgcaccaatcccatgacccaaaagtgagggattttcttccttctcttcttctgcaatgttccttcatgaataatatttagttcagtatttttcatccttatagaaaactagtgttcacaggtaattttactggaattatggcaggttagggtgcaaaatatacacatattatagaggtacacattttcatattcatcagctttactcattttaaagcttttgattctcttcattgcccttcctgctataactcgaagtggatcagccgtgaactttgggtcattctaaattttattgattatcccattctacccaaccaaaaggcaaaagtatttctaccacattactttgt

SEQ ID NO: 36223 - DNA, 1033 bp, Homo sapiens
aatgtaatttataatcaataacatgcacacaaattaagggtatattttgatgagtttggacaaattgatgcacccatgttaccctcactataatcaagatctgttacatgtacattatcctataatgttctcttgtgtccttgaacatttagttctgtaccaccaacaccaggcaaccactaatttcctttttatcactatagactagatgtatactttttaagaggtccttatgaatgggatcatacttaaatactgctttgatatagcttcatttctctagtacagtattattaagattcatccattttgtgtataccagcagttcattcctttttgttgctgagtagtagtctactccatggatatgttacagtctgtttattcacatattggtagatatttgggatttttttgtctttgctaatataaattgagctgctatgaacatttggttacaagtattcatgcagacatgttttcagttctcttgggaaatatctcggaatgaatgaatttatactgtttgagatggcaattatgtgtgtaacattataagaaaatgccaaactggccaggcatagtggctcaggtctgtaatcctagcactttgagaggccaaggcaggaggtgattacttgaccccagagtcttagatcagcctgggcaacatggcgagatgctgtctctacaaaatttttttttctttcttttttttttttttttttccaaattaaattagccaggcttggtgatgcatgtcctagtcctagccacttgggaggctgaggtgggaagatagcctagagcccaggagttggaggctgcagagagctatgaactgtttttcaaagtagtaccattttatattcccagtagtagtgtatgagagttcctgttgctctgaagttattttggcactgttaacgaaaatcaattgaccatgtatgtgtggtctatttctggacttcctgtttggttccagtgatctctatatctaccttataccaacactacactgttttggttactg

SEQ ID NO: 36224 - DNA, 1098 bp, Homo sapiens
ttttctttcttttccttgcctgattgctctggtgaggatgactttcagtattaggttgaataaaagttgtaaaagtaggcattcttttctagtttcagtccttagggaatggctttcatggttttcccatttcacataaggtagctataggtttgtcatgtatgacctttgttatgttgaagtacttctgtgcctagttggttgagagttttcatcatgaagggatgttgaagaaattttattaaaagcttttttgcatatattgaaatgatcatatagtttttgtccttcattttgtttttattaatttacttatttgtgtatgttgaaccatccttgcatccttgggataaatcatagtgtacacttgatcatagtgtattgactatgacaatacactatgatcaatacacttgatcatagtgtactgactctttgctatgttgttggatttagtttgctagcattttgttaaggatttttgcatctgcttttctcagggatattgccctgtagttttctttttgtgttgtgtctttgtctggttttggtatcagggtaatggtggccttgtagaacgagttaggtagaattccctacccttcagtttttttgaaacagtttaaaaagtgctgttgatagttctttatacatttggttgaattcagcaataaagtcttttggtcctcggctttttatttgttgtgagagttttattactgattaaatctcattggtctgttcaggttttctgtttctttctgattcagtcttggtaggttatatgtgtccaggaatttatccatttcccctaagttttctgattcgttggtgtatagttcataatagtctctaatattcttttgtgtttctgtgatatcaattataatgtgtcctttttcacttctgattttatttatttggggttttttcttttttgtctttgttagtcttgctaatggcttattgattttgtttaacttttaaaaaaaattaacttatttgtttcattgatcttatgtgtttttaagtctattttgtttcgttctgctctttattatttatttaaaatttatttatatatctttaataaatatt

SEQ ID NO: 36225 - DNA, 1058 bp, Homo sapiens
caagtgcatgacgacgctggtgctgggcagggtttgaaacacacagaaactgtgggacagggtttctgccagtgacagaggccccaggcaggtggctctcaggatctgaggagctcctgctttggctccttttgtccccagggtggcctccctggtgctctccacctcctactccttaggatgtaggacactgtgtaggtgagagtgctggccacctagttgcattgttgactccagctggcatcatgacactgcagctctctgggtggacaggaatatcagtggggctccgggcttaggcactgttgggccacagagcaggatgtagtctggtagtgtctgggctctacctggcgccatgctgcagcctcttgggtgccagcagattatgtgggactcagcgtgtactctttctttggaataatgccattgagtggactccaggcagctttctaaactagtctctgggccagtgaggactaaggggctctccagttgctaggattgcaggaattcatggtgggaatgtggatctgtgtagatgtctcttgtttttcccattcgtagtgggtagtttctccaggctcctagccagttccatttgagccagctgctttgcttctctgtctttgcttgcctcagagattccctgccacttttaaattgtaatgttctctcttagatgccctattcagtgtgtgattatctactcactgttttagtcctttgtggaagagctgagtgccaagcacttctaagtcagccatcttgaagcccccttcttccagggttttttgtttttttgtttttttttttttgagaccgggtctagctctgttgcccaggctggagtgcagtggtgcaatctcagctcactacaacctgagcttcccaggttcaagcaattctcctgcctcagcctcctgagagtagctaggattataggcgcctgccaccacgcctggctaatttttgtatatttaatagagacggggttttgccatgttggccaggctgttctcaaactcctgacctcaggtgatctgtccagcttggcc

SEQ ID NO: 36226 - DNA, 1052 bp, Homo sapiens
gtctattctgtcttaacaaaaatgcttatgtagtttctcgtcaaatacttcctcagatccattttctcttctctacgttttaaattaccattaaacttacgttataccttttcttcatattctttgtgtttttcaccttgtatctccctccctttctctctctctccctctttctctccctctaccatttcccctgtcctcctctttctccctcttcccccgccccatatagattttttttttctgtacttgccacattctggatagtattttcgtccagtttttagttcattagttctttcttcagctatgtccagtatattgttaaacatgaccattgcatttaaattttttgtgttttttccagttaaaagactttttaactgttccaaaccactatgacttgtttttatgagtttcaaggttttcttttgtctttaacatggcaatgacatttattatctatgcttgattattccatatctgaagtctttatgggtctgtttctgttgttgtttttgctgtttccttctcttgtgcttttttattttctcttgcaagcttattattcactatatgcttttaaattgcatttgagaagttatttgtagaaacaatacgtgataaagaccagagtatcttcccccagaaagaatttctgttgaacttctgccaagtgcctgggtgtaccactagttaaggactattctaatccaatgtctatgtttgggggactctgggtagttcaaatgaagtaaagggctacatatacatttagttttgcttctgattcactcttaccatgaggatgaagcccttcactttttcatcctatgagcaattagcttttggccatgactttttttttttttaatcttttcttcccttgtgctccagaaaccacagttctgtattctagattcttccttaaaatcagtgaaagtcctcagggcgaagtcaggtatctgagtagctcccttgagtacctcactagattttggcctagcacttcctcataatttgttctcttttttttctgaaatgttttgctt

SEQ ID NO: 36227 - DNA, 1022 bp, Homo sapiens
taaaaacttactattatggctatgtagtagtgtgcatgtttagctaatgacatgaaaagaacaacaactttggcaggatcttttttatcatagtaaaaaagctatagttattcctcgaaatcactgcaagacctcttctgtttaataacattaatatcaaggtaaatttaatattaagcaatatattaatattctattgtgattttaactgtatgtaccacatatttatataaggaaggagggaaagtcccaactggttgattttttttttttttttttttttaaatgttgtttttggttgttggaaagctggattgtgtttttatataaggcttcactttgtgggctaacatccttctttcctgcccagagtcttaaagcctgggtggtctaaagtgatcttgatttactatacccttgagatggagaatactttcagaaatcaaaatttaccaacctcttgcttctttcctgagtactgtcactgctgatattcagatacatattatgttggaaggaacattttgtggatgcatatgtgcatatggacataatcagtttactagtttaaatatatattttcactgttctgttttatattctcttgataacagtgagaagtaaggattaactaacttgctcagagtgatcaagcaagatactggctttacagagaatggagttgatttcctgcagtgttttctggagactagcactagaccctagtcctgccgatcacaccaggggaggtgttggtgctactgatgtggtcagacctgctgctggtttcccatgccatatagccgcaactgcaaggcttaaactcagctgtcctatcaaggcaggagactgggtgggattgacagccacctgtgaagactcacctgctaggatctggctggctgtcttggtcgctgatcatgtccgaagaagtacaccactttcttaatcatgcagcttttaaaaatctcctcagccccacacttgagggtctctctcctagattctaatgtctagcccta

SEQ ID NO: 36228 - DNA, 1096 bp, Homo sapiens
ctagacattttgtgaacaaagaatgaagagtaggctatgttacatagctgtgttaagcatatgggctcttttcttccaggcattgagcccagactatgaaatgtgtttggcttttggttctaactatactggaacctaagtacctaaaggatgaaataacaagaatagcataataattcactttggcacctcttttacttagccacctcataacttgtaaatggatcttccagaagtctatacctggccaaagtaaattgctgagtcttttttgttgttgttgtttatgagttatatcttgtttttaatacaaatattaacattatgacacccatggaaatagtgacagtgaagcacttatatttcaatgtgatataagttcataattgcatattacagattcaaaataactgtccatttgacttggaatatgaaaattatattagatgagaactcagatattaatttcacaaatcagcgttctttttctttgttttattgtttcagaaagtaaaatgaatatgaatgattttaggcagaacagcagaaggaactgggagagaggaagagaattgagatatagtagagaaaaacttcaaaagctttttatgcatgtaaaaaaatgtttttgtagaagttagagataatctgtaaaactgaacactgtaaaaatgtgctacttagtattttatagtaagaacaaattagattcagtatttcattttgtttcctaagcagtcatttatagtaatttttttaaaattccccttaaataatcacttatatcttattaatcttggttgtaacagtgatggatatagacaattttagccagaaggcattaattgcgtctctcctagaaaaaaccttgtcatttctatttgttactcttgttcagctttaaatggtactagggattttttttttttttacatccgtgtgtgtgtctgtgtgtgtgtgtgtgtgtggtgtgtttatattaagattcctccatttctccctctctctgctgttgtagccaagccagacagcctattgagaagcagcaaaccatctgttaatggatttgaagttctgaattatacttgagtgtgta

SEQ ID NO: 36229 - DNA, 1040 bp, Homo sapiens
tgggcctcacatcccctggatactgtattttctatctgcatttgattgaaaaaaatccatatataagtgaacccttgcagttcaaacttatgttgtttgagggtgagctgcattttctttttagtaactgtgaattacgttataccattagcttgattttacagatgagtagcatgtggctcaaagaggtttaaatattaggttgctgcaaaagtaactgcagttttgccattaaattttttttgcatggttttcatatctgttaattaatttatttattatactttaagttctgggatacatgtgcagaacatgcaggtttgttacataggtatacatgttccatagcggtttgctccacccatcaacccatcatctacattaggtatttctcctaatactatccctctccttgtcccccaccctcaaacatgccctggtgtgtgatgttccctccctgtgcccatatgttctcattgttcaactcccacttatgagtgagaacatgcggtgtttggttttctgttcctgtgttagttcgctgagaatgatggtttccaacttcatccatgtccctgcaaagggcatgaactcattattttttatggctgcataatattccatggtgtatatgtgccacattttctttatccagtctaacattgatgggcatttgggttggttctaagtctttgctattgtgaatagtgctgcaataaacatacatgtgcatgtgtttttatagtagaatgatttataatccttagggtatatacccagtaatgagattgctgggtcaggtggtatttctagttctagatccttgaggaatcaccacactgtcttccacaacagttgaactaatttacactcccaacagtgtaaaagtgttcttatttctccacatcctctccagcatctgttgtttcctgaatttttaatgatcgccattctaactggcatgagatggtatctcactgtggttttgatttgcatttctctgatgaccagtgatgatgagctttttttcatatgtttgt

SEQ ID NO: 36230 - DNA, 1107 bp, Homo sapiens
agatccttaaggatgttggggaaatgagatctgtacttcaattgtctgatttagaaaattaaccaataaatacttagggattgtttttatgattgaaagaggcctctagtcacacatgctttgtatttaattccagctgtatttaccttaagtaacttaagcactaagcgttagtcaactcatctgtaaaatggaaatagtaactccccacagagtatcactctgataaaatgaggtaacaatcagaaatgtttggtaaggcacctaatctgggtacgtcttactgcagagcataagctcttcactagtggactgctctctcagagtaattgtcctaatagttaaattgttaagctttaccttaatcccaattcctttttttttttttctcagcaatgtggagtggcctcttcactcacttaacagaatcttggaataattttaagggtctagatccaaattatacaacatggatggatgtcatggagaggcatggctaccgaacacagaaatttgggaaactggactatacttcaggacatcactccattaggtaaaaataaaacaaaaataatcatcatggactgccctctgccatagcgtgtacatgtactctttttgactttaatttttttatttttccacaaaggtgaaagtaaatctcttaatcccttcattgtgttaattaggctgaaattttagctttctttcatcttcctaaaacattaaaatggctaatatactagtcattttgtttttcttaagcattaaaggtctataaatagtgtttgtaaactcgtttagcccacgctttattttcattgaatttcctttaatggctactgtattattaattttaaaatctgtttttaaaaccatagccttcttgctgctttcgttggtcagttctctctaacttgagtctattgtaacttttttttttctttcattttactaagtcctcaaaaaccaggcagccaagcatagtggttaagagtagaggtcaagaatcagattgcctgcttttgaattatagtttctgtttactactagcattgtagtagtctgatcttggacacattgtctaaatgttgacactgtacttta

SEQ ID NO: 36231 - DNA, 1058 bp, Homo sapiens
tcactaggctggagtgcagtggcacgatctcagctcactgcaacctccacctcccaggttcaaacgattctcctaccttagcctcctgagtagctggaactataggtgcatgccactacacccggctaattttttgtattttagtagagatggggtttcacaatgttggccaggatggtcttgatctcctgacctcgtgatccgcccgcctcggcctcccaaattgctgggattacaggtgtgagccattgtgcccagccaagtctatacttttcatgtcttctattctgagacttaaaaattgactgagatttgcacttagtactctcaatatggtgatcattttcattaagttttttggattggaaccgggcgcagtagctcatgcctgtaaccccagcactttgggaggccaaggcgggtggatcacttgggctcaggagctcgagaccagcctggccaacatggtgaaaccctgtctctactagaaatacaaaaaactacccagactctgggtcttctcagctatatcacttctaatcccaactttgacctgccagaccctttttggctcaagttccatctcccttgtgactctttctctacctcacagctgcatctttaaaacctccagttactggattattttctttctaaatttaaattctgtaaatagggatgataggcctaacttatatttcatgcaagactccatcataagttaagtgctggccacgttaagtgctagtgcttacgttaggtgcccatacctggccagtcgacaggctagaaagggagttaaatcctacataatgtggccaactaggtcactccttcagcaagagctgtggatatggtgatgtgtctgctgcaatgactgcttagtaaattctattaacaacagataatctggcaataacccacccgctttattttttcagatttgatggcattttgtctgggttacattttctgtataatattgaaaaacaaaggtttacaaaaattgtaaatgttatagtcaaattgatatgttaattactttaaaagcattagaa

SEQ ID NO: 36232 - DNA, 1034 bp, Homo sapiens
attccgcatatccagttgattaagaagcccttttgcttttacattttaaacaaatctcaaactcattactttctcttcatctccattggatttcgcattctagtcatttagttatttgtcatggtggccttctttttggtctctttaagggatggtttcagattttgtagggcctcaaacttacacaatttgggaggtccttcataaggaaaaaaacccacaaaataacagatacatatatgtacaaaagtaaatatttagaatgataagtgaaagcacaacaaattacaactaaaaagttgtcaaatactacagacatttttaaatgtatgtatatatttttgagacagggtcttgctctgttgcccaggctggagtgcagtggcatgatcatagctcactgcaacctggacctcctgggcttgaacgatgccccccacctcagcctcctgagtagcaaggactacaggcacgtgccaccacacccagccagtttttttatagaaacgaaattctgccgtgttgctcaggctggtctccatctcctagactcaagccatctgcccccctcagtctcccaaagtgctggggttacaggcgtgagccaccacacctggcaacagatctttttaacagcctgatacttcttcaacttttcttatgttttttgggtgaccatagtctttggtcatctcttcatatgataaccactgataggttatggctgtgtccccacacaaatctcacgttgaattgtcataatccccatgtgtcatgggagggacctggtgggaggtggttgaatcatgggagcgggtttttcctgtgctattctcatgatagtgagtaagtctcatgagatctgatggttttataaaagggcagttctggtcatgctctcttgcctgctgccatgtaagatgtaactttgctcctcctccaccttccatcatgatcatgaggcctccccagccatgtggaactatgagtccattaaacttccttttctttataaattacccagtctcaggtat

SEQ ID NO: 36233 - DNA, 1687 bp, Homo sapiens
agtttcctggctcatgggaacatctgtagacatagaggcagctctgttcctgctttaatttcactaatattaactgtggtggttgcccactgagaaaattattaccagccacacaattgtagtgcttggctttctcgagtattcaagagagtagctgcgtgggatggcatgcacttataatcccagtgacttggaaggctgaggcgggaggatcccttgagtccaggagtttgagtctagcttgagcaacatagtgatactccatttctaaaattaaaaaaaaaaaaaagaatatatatatatatttgttaaatttgaaaaagagaaccaacaattccttccttgaaaaaaaaacttttattttaggttcaggggtacatatttgttatacgggtaaattgcatgtcacaggggtttagtgttcagattatttcactaaccaggtaataaacatagtacatggtagatagttttctgatcctcaccctcctccctcccaccaccctctcaagtaggctctggtgtctgccggtcacttctttgtgtccatatgtactcaatgtttagctcccacttataagtgagaacatgtggtatttggtttcttgttcctgttagttcgtttaggataatggcctctagctccatccattttgccgcaaaggacatagtttcattctttttatgtctgcatagtattccatcgtgtatatgcgccacgttttctttatccagtctatcggtgatggacatttaagttgactctatgtcattgctgttgtgaatagtgcatgtttctttgtggcagaatgattaataacaattccttcttgagtggatagtttatttatgttcagagaaggcacaatctgctccactcgattcattttttaaataaaaacattgtttatatgtgtttgctaatgcatacgtataaatggtactgacgtttaaaatgtttgacaattgtgacttcagatgcaaattttcatgttggatatatagttttgttggatcttcaattaaaatttgattcctgttttagttggagtattttatgattcaagccttaaatcagaagacaagtgaaaaaatgaagaaaagaaaaatgagcaactcctttcatggaattagaccacctcaacttgaacaaccaggtgcatttcttagccaatgtctagacattcattaaacattcattacagatcctttctcacaggtcttagagcaattattctcaaacttgagcatgctcagagcttacctgacattctgattcagtcaacctgggataaggcctagaatctgtgttaatcagcctcccaagtgatgcaaaagcagattggtacttgaatcacattttgagaaatactgctttaaaaattgagcctatagatcctatgtgtcctaggtggggagctgttctagattaaagtctaatgctaagttactactaaatgcaatgcatgaaccttgattggatactggttcaataaaaacatctaaaagatgttcttgggacatgggttaaattttaatacggactggaaattagattatatcatgtaattactgttaattttcttatgcatcataatggtattgtgatgaataggagaatgttcctgttcccaggagatgaaggtgaacgtagagtcccgggcgcggtggctcacacctgtaatcc

SEQ ID NO: 36234 - DNA, 1025 bp, Homo sapiens
tttgcaaggcaagtatcatttcatacaggtagggaaatttggggcagcctttatttaagtaattgatgttaaaaataaggtattactttgttcatgtggtttgtggtcatgtaattttataagttaaaacttaaattatgattttgaaaagtacagttgcagcacgcagatttatgtggataaaaaatacatattggagtagaatgtggtgctaggttagtgaaatattggcttggaaaaagcataaattaagcacctgtacagcacacacccagcacattgccttcaacgggttctctgtaagttttagttgaattaaagagtaggctccagtagccgggcatcatcatatcagtaagccaaactatttaaagacttcatttagtactatagattttgacgtttaaacttagaatgtcacagttcagaatttaagattttgaaaaactaacatgtttacatgttaagagaaaaaagatgtttttaatcatatgtttaaggaactgtgagggatgtgacttttgtatgataattttctgttgaaattacatgaattattcagtaggcttccacaattattattgactactttcaaaggcatatgagcactctgacgtcttatatcctttttaacatagtagcagtaaaatagctagatgtatctccagtggctgatcctgcctagctttctcctagggggagtgctttatttaattgcaaaattaatacaggcagatggaaaaaaagagaaagaaaagaaaaaagttatccttctaccctagaccctttccccggagtcatttacctgttgtaatttttttatgcactcattctgatactgtttgaaagagattaatattctggggacatttgattaataaaagtgtaatcctaggtatctgctgctttccagggatcacaggccgtttcccatggctggagcgtagagtgaaaggtgatggctggtgggtgatgaggtgggcaaggcctgtggaagctgttcctgctgctcttagacttgtgct

SEQ ID NO: 36235 - DNA, 1018 bp, Homo sapiens
gtcacttgactcccatgcccgaattccttccatgtgtatgacggttatgttgtgtataggatctcagaatgactttataggaccaggatttgtatgatcctgttttgcctctctgttttgcttatggataccattctggaatgttttcttctgccttaggaggaagaataatatcatttttcccccctcaccgaagattttaaacttcccaccatagtagattagagtaagaagtagatgtcatttattcttattactgctgatgttatatgtttatttcttagggataaagctttcagagttccctagctaggcaagcagaggattagcattctgaccagggctctcaggctctgagattcagcagggggaatgggtggagacgtcagaatttaaagtgaataaaatatgatatttcaataaaaatcataactaagtctttccaaattagggaacaacatagactttaggcaagattgtggtcctaatgaatcctagtatttaaaatgacttattatttcatcatcatttgggtaacactacctgaaaatattcaggcttgttttgtttatccactgtaaatagactaaaatttaaaaaaaaaaaaaaaaagagaaagaaagcaaagcaaagaaaaaagggtggagggtatggaaagggaggccagcccttgacttccaggagggttggcacacaggggatacctgaagaccacagaaaggataaagcactgaggtctgagttagacagagaggctgctcccggagccactagctccagccaggcgcgacaggacagacgagttatcaagggtgagagtctccggaacgccagatcaaaaacccaggaaactctttataggttctagtgggctctgctgtgagtaggaaggacaattaggattataagattggagatgaagatggaggtgaaccagctgggcccggtggctcacacctgtaatcctagcattttgggaggtcaaggtaggcggattgcctgaggttaagagtttgag

SEQ ID NO: 36236 - DNA, 1049 bp, Homo sapiens
attttcagtcatcctctcactcaagtaattgaagctgctaatattaagttttaccttgctaattagaaaatattacagaggaaagcagtaataatgataggatttttaaaaattggcaaaagtgtgttagggaaaaatgagtcaaaatgaataatcaaaaagttaagccagatactggaatctgtgcattgggaagatcacagaagacaggtaatgttattatgttaaatattcaccatacacagtgttcttggttccatagctacaaaagaatgtaagaatgtaaggagggataagaacgagaattacatgaaaaaccagatttctagggaagtattgaaaaaacccccagccaaattgggtggttgccaggggctggggaaagggggaaacagggagttagtgtttattgggtacagagtttcagtttgggaagaagaaacatgttctggagatggtggtggtgatgactgcacagcagtgtgaatgtacttcatgccaatgaatcatatacttaaaagtggttaaaatgggccggatgtggcggctcatgcctgtaatcccagcactttggaaggccgaggcaggtggatcacaaggtcaggagatcgagaccatcctggctaacacggtgaaaccccgtctttacaaaaaatacaaaaaaaattagccgggcgtggtggtgggcgcctgtgctcccagctcctcaggaggctgaggcaggagaatggcgtgaacccaggaggaggagcttgcagtgagccaagatcgcaccactgcattccagcctggacgacagagtgagactccatctcaaaaaaaaaaaaaaaaaaaaaaaaaggttaaaatggtaaatttcatgttatgtttattttatcataataaaaacaaaacaacaaaccaaccaaccaacctgaagactaatgtcaagaaaaaaaaatggcaaggatctagtttagctaacggaaagatttaccagatagtcctggaattaatttttaagggcaattatagaatcaccttttctgaagaattaaaaaaaaatagat

SEQ ID NO: 36237 - DNA, 1034 bp, Homo sapiens
aggccgggtgtgatggctcacatctgttatcccagcactttgggaggccaaagtaggaggatcatttgagctcaggagttcaagaccagcctgggcaacatagtgagacctgtctctacaaaaaaaaaaaaaaaaaaaaaaaagaagaagaagaaaggaaagaaaaaaaagataaaatggaataaaagtgcagaatgctgactccctcgaggcttttcctaaccattctattctatggtggatgctacggtcagcatgtttttttaattgttgttttttgttggtggggggtgtttagatcattaaagaaatggtttcatcatccactttctctcatgtcccttttctcatcagctggcatattccaggccatgtgtctcctgatctgtgccgagatgtaccaagtgtccagactgcagcacatctgtgagctgttcatcattacccagctgcagagcatgccaagcagggaactggcatccatgaaccttgatatagttgacctgcttaaaaaggccaaggtaattgactctgtgtatctgatagcctagttttttataaaatatttttcaaattatactattttaaaatttatcattttttaacatacgttaatactagtcttagtttggaagtttggctaatgaggctaaagtgccttcacaacagtttatctggctagataattttgaagcgttagggtttgtgtgcagtcccttttataaggaggcaaaatgtccagatacggaatttttttaactaaatagtggcccttagtagagtcatttgaatgtggtgctatactatgtcacataggcattgtaggaaatagaatttatgttgaatttccccaaacaatcacatcttcaggttcctaaaagggaaatgacagaattggtccatatatactgatagcgatggttaagctaaactaatttacttcttcattttttcatccatataatgaacatgttttgaagtttcagttgtatgtaggagatattggtgtgcctcatttatccttgcagaatgcc

SEQ ID NO: 36238 - DNA, 1937 bp, Homo sapiens
tacctccaggttccagtaaaattcttctgaccgaaaccaatgtgggtgttagaaaaattaccatatagcttaatatgtttattagttctctttggaaaaaaactaccactgtggtcttaaaagggaacaaaatataccataggctaaaactaaggctttcactctagaatgcaaagctgttttgcagctgttttcccttaaagatgtcctgttgctttagtgatatttagacccctctcagttaagaaatgcttagattaaaaaaaaaaaattacgtaggattaatacagaaatttaatcatgtctgattaattgctctattaaaataaggggcatttaaagacccagcataaccatttgtataatgagaaatctaggggaaaaccaatcagtccaacatgagattttaggaatagaaatttgccggccatttggaaagtgaaatgccacttagttctcaattgatgacagtgtttgaatcatcataaaaaaaatacctgcttttcatctggacaacccaattgagccactttatctccttttggcaatctgagtaggcggggaacctaggcagggctggctttcttagcgtgtaacttgtgtagcagcacagggcccacacttagaaggaccccacacttggttcaaggctctgctatagcggaaattcttaataatgtttgaagaagggccccatgatttcattttgtgctgagccctcaaaattatgtctgtttcgtggtgggaaatatcctatgttttcttgctcaaacacctttctctctgaaagcagaaaaaggcactgatataaagggaagagaaggaggctcaccggagggaagagaacatagtgaagattcccgcctttggggaggtctggaccacccagggcctccactgccaccttggctggcaagggagaaatgtgttgtgttgtcttagctttaaaacagtcacagttcttgctctatcatagatgaacaaatactttcttgatcattctgtaagaccaggaggttggtaagagtgactaaccagcctaactttaatacacatgtataaagatgttcacagagaaagatgctctgtagagaatttgctaccgaagttggctcaagaatttgtttttagtgttatttaccaagattaggacgtcagtggcttaaattctttgaattcttttcaaggactgcaagattatttgataaagagtagcatgaatcttgtgctctaatattacacagtaagttcaaagaaaggatgtaagtcaaagacttgttacatagagggaaaatggactgggatagaggacagactgatagtttctttctttcatatcacatgtatagagaaataattatatcagaaactcacaaacctagacatggaaaaacagattactgtctattgtcagcatcattttcatctgtaagtcactactggaatatatttttcttttaatttccagtgactttagaatacacacagtttttccgacttttcaaaaatttgattaaatggttttatagtataatattgggaccccataccgttagcccttgtatgtataccaacactgccaaagtaaaacattaggtcaggcatggtggctcaggcctgtaatcccagcattttgggaggctgaggcaagtggataacttgaggtcatgagttcgaaaccagcctggccaaaacagtgaaaccccgtctctactaaaaatacaaaattagccagatgtggtggcgcacacctgtaatcccagctactcaggaagctgaggcaggaaaatcgcttgaacctgggaggtggaagttgcagtgagccgagatcgcaccactgcactccagcctgggtgacaagagcgaaactccatctcaaaaaaaaaaaaaaaaccaaagtgaaacactaaaaattccctatagatatattccaggaa

SEQ ID NO: 36239 - DNA, 1030 bp, Homo sapiens
ttaggcttgtgattttttccgcgtgtcagatgtgcagaaagaacgtgtgggaaataacttatggtagatatgaacttcaggtaattttttaaagtcattaaactctgggcagatatgtttgaagcaaagttaactggatagaataaggaatgactgtagtgcccatttatgcctccaagttttgttaagtcttaaatattagaccaaacgatattgttttgcttagtttttacttctctgcccatttccaggaagcaccaactctttatttgaaaaggacaaactattttcttatttctgcaaatctgtttgaaaaagggaagaaccaatcttgggaaaaaaattcagcctgatgttctttttcctagcatgccttttgcccgttaccacttccacatcccctgtttctaagatagtctgaaatttcaaaatgcctacaaaaagttctctgtctttaggttgtttggaattgttaattattggtggcaatggatgagtgttcagcaccttggaacttttgcaaaagaaacttaataaggatacgtttgctgtagttggaaaagtatttgatgaacagctgacctttcaaatgtttacatgagttgaatctctgaactgctaatgtttggaaggtccaagttccaattcagacttagacactgaatccctttgtagagaaagctttgaaatctcttcagctgtagttttctctctctttttttttttaaggccaacttcacctaccagttaattggttaatgtttgtgaatgctttgagtaggcaaaaagcactttctcagggcagtgccccattgttccctctcccaattgtggtttgccattcacctgagtaagtggataagccatgggccaagtttgcattgtagaaaggaaatgattctacagatacttagccatgggatggaaaaatatgtttctttcacgtagagtttgtgaataaagcttccactgtgctgagcaaaaaatgcaaaaggaagccttgttgtctggattaggtcacttataaata

SEQ ID NO: 36240 - DNA, 1028 bp, Homo sapiens
gaggtgtctgttcagatcttttgtctgttttttagttggtctgttttcctattgttgatttttaagtgttctttctatattttgaatttaagtcctttatcaaatacatatttgcagttttttttctcccagtagtggcttgtcttttcattttcgtaacagtgtctttcacagagcacacatttttaactttaacaaagtccaacttatgaatttctcccttcataggttgtgcttttggtgttataaatgaagttcatcattaaacccaagaacacaggtattttcctatgttttcttttagaagtgttataattttgaatgttacatttaagtctgggatccagttgaattaattttatgaaaggtatgacgtatgaatttaggttcttttttttcttttaacatatggttatctaactgtttcagcaccatttattgaaaagacaatcctttttttcattgaattgcctttgcttcttcctcaaagataaaatgatcatatttatgtaggtctatttctgtactctctattctgttgcattgtctattatttttgtaataacacattgtcttgatctctatagctttatattaaggctttatattaagtcctccaacactgttcttcttctttagttattgtggtggcaattctaggtcttttgccttaccatatacactgtagagtcagtttttcaatagagacgaaataccttgctgggattctggttggggttgctttaaagttacaggccaagttgggaagaattgataccttaacaatgtgtgttttaattcataaacacaatatttctccatttatttagatggtttttatttctttcatcagaatttcatattttttgatatatagattttgtatatatacataagtattttattttattttttgggtgctattttaaatggtattattttttaagcttcagattccaattgttcattgcttttatacagaaaaagaattggacttgcttattagttccaggaattttgttgttatt

SEQ ID NO: 36241 - DNA, 1047 bp, Homo sapiens
ggaagtgacccaaagtgtctttcagagaaaaatgaagtttccttgcaaaagcaagtgctaacaataagcatctccattcagggattatgaagtgccttttgctattgtagttatgttattctagtgtctattactgttcatatatcttttcattcagaattcagaatacagagctgaaaacttctccctgtaacatataagttatgacttctctccagagcatataagcttttactatgagtaaaattcagtcctcagcaatatagaagtataaaactttgtccttaatttctaattgcttccatttaactgagcaaacattttaaatggtaacactttctttatgccctccagtctcatgctgtccattaaaagccttagcactttcagcattatgaacccacagacgaggccttgacttccttcttaggaagagtgagatgttaaagacacagactggctacctgctgtaaacatgtattgcctttttctttatctatcaaaagcgtcaagaaactcttagctatttgagctcactcttgcaaggcactatgctaataccatggggatattcaaggatgtggttcttgtcttttagaagtttacaatccaggctgggcgcggtggctcacgcctgtaatcccagcactttgggaggccgaggcgggcggatcacaaggtcaggagatcgagaccatcttggctaacacggtgaaaccccgtctctactaaaaatacaaaaaattagccgggcgcggtggcgggcgcctgtagtcccagctactcgggaggctgaggcaggagaatggcgtgaacctgggaggcggagcttgcagtgagccaagattgtgccactgcaatccggcctgggctaaagagcgggactccgtctcaaaaaaaaaaaaaaaaaaaaaaaaaagaagtttacaatccagtaaaaagaattaaggcttttataattctatctggtgagtgctatattcatagcttaacgcattgtgggagtttagagtagaaagaatttccatggaatagaaagatctagga

SEQ ID NO: 36242 - DNA, 1119 bp, Homo sapiens
ttcataatggcagcagggctgcatttacaaatgagctgattgagtaatgcacaaccacagagagtgatgtcctcattgattatgaagggaatagctctcctggttgataatcgtgtataattctctacattttcaaaattgtatgtattatatatatgcatacacagacttacatatgctacacaaatccataatcaggagagggtagaggacccagggacactcaatatgagcacatatgaatcctggctcatattggatgtaaaagttatgtaggactcaatttgcatgcttctcttctccttcctgtctttcccagcatgaccccctccccaagactatcaaaaaccacagctgtctaggggatgtagctcttcctgtttgctgagaggctataaagatactacttagacaataggctccaacaaccccgtgaagatgccctgctctctctacacagctgggctatgagacggcattcctgtcacatagatacagaggccattaaactgactgtgggttattagtaccacttagtctaagaacaattaatttgaggctgtgaataagaaaggagctatgtttttgagatggacttcatcctctagaagtcacttctatgtaattttaaatagtaatgaagaggataatgcagctgtagactggactttgtaagaaatgacatctggacatatgtgctttctgggtgctttacacttctacaaagcagaattctagcttcacaaagccaaccactggcaagggccatataagtatgatcaacaattgtcaacactcccctgcttctctctgttcttggaacaaagttcaaaatacctaacatcctcttttgtgccctgccttatctaggcccacttacctttccagcctcctctgcctgcagttgcccacctgccatacacaaagaacccaactggcccctaaccaagtgatccaaatactcaatacaatcccaatacaaatttcagcagaggggtgttgtgtgtatatgtgtgtgtctgtgtgtgtgtgtgtgtgtgtgtgtgtatgtaaacagacaaattgatatagtaatccaaaatgcatgtgaaatgcaaaggactaagtatagcaagtcat

SEQ ID NO: 36243 - DNA, 1043 bp, Homo sapiens
cccacgacacgtgggaattatgggagctacaattcaagatgagatttgggtggggacacagccaaagcatatcactagttttcctttttaatcatatacaaagtatgaatgtttctaaagaggatctttcagtcctctagattattaacctgaattcttagtacccgacttagtgggtcctttacatcctagatagtctgatgtgatgagaaggctcaggaaggtcactgtcagcctgtaggagtgtccactgccaccccagcataccccagaatagagagctatctgtggaaaaccacacaatactccagagaggaaacccatgcctacttggtattcccatcatctaccataacataaaataaaagttttttattctctaatgatagcccattataagtctcccacatttttaggtgtggctgcctagtctagtgccatttcaattcagtaggctcttttttttcgatgcctactgtatacaaaccagagcaggcatttcaagactataaagatcaaagaggaaaataaaagctctggccgcatgtgtaactttcactgtccacagcctgagattagtggggaggaccgtcttaatacaggtgaccctggatgttcatgaaggccgctgtgccttgacctggggagtgctgctccatgacaggatttctccagatgccgaaatagagcgtgactggaaatgtttaaaagaaaaccatgacttcatcctttaatgagagcttctctataaaacagtgaaactaatcccaaagcatagaacagtgcctggtccattaaaagtgctcaataagtagtaattaatcaactaaccaatcagtgggtttagttacatttaatgtttaaatgttttcatttgttttgttttttatatttcctgtaaaacatgaccagctgactttctctattattgtgcgtatcctgtttaaatgttactaattacaattgtttaagaaccacactcttaggctaagatgcagatgggggccgtgggttgggttggaatatgccaagtgaacctccta

SEQ ID NO: 36244 - DNA, 1027 bp, Homo sapiens
tggcccctgctctcagctgtcttcaagactagtgtggatatgagccctccccagttttttggggtttcagggtactcttcaggtactttttacagcatgtgtgctaggccacagtggtaaagaaccggagaggaggagggactctaggaggactctggtgaagaaagcaggcaaagaggctgtgattggagtcaaaacaacaatagccagcattccccagtagaactcttgtaaccaaaacctgcacctgcaccacctgcctcatctgccaagtgtgactgcccgggctttagagggctcaattccttttcaactttaccctgactgtagagctgagcattggattgttagaaagcagacaaaccagaacaaaacaaaaagctcttgttttccctttccccgtcctcctttccagggccttaaccccaccaactctggccatggttgcccaggttactgtcactgaggcagttggcatttctgggattgtgacaccctcgaacgccagaaagaatagctgtagagtgtaataaaggtcagaggactcaagaaaggcatgaagattagagagtaaaggaagacagaccagaggaaggagatgaatgcgttccctaggtggttcttgtgtgtataaaagaaaatttattaaggaaacccagagacctgagttgtagttgtgaatttgataatatcaaatactacagaaatagaagttttagtccttactcctgtttccagattcctttgttcttaagtctgcttcttctcctaggttttctttaactgtttcagtaatttcttaagcaagaggttggcaaagggcacaggtttggggaagcagtggtttccaaagattctgtagcatagagtatgagaaaacagaattgtagtgtgagcaggtgtcttaaatcatgtagcaactcacattgcttgcataagacttgggtaccagtgcaactcttgatatccttgattagagtgttgcaactcttaatacttaatacttaatttaggtataatcccaaac

SEQ ID NO: 36245 - DNA, 1897 bp, Homo sapiens
tctccccctgcaaataagttagtcatttgttttgttttttatatttcctgtaaaacatgaccagctggctttttctattattgtgcatatcctgtttaataagctaaacctgaataagctgcagtgttgaacccccacagtggatggtcgacatgcacagaccggaggcctctgagtctcatctttgcccacctgcattgacattgctgggacttgggaaggaaggggcagctgcctgctgctcctcacagctgtcttgcatcccagcaggctttctgctggtgcctgagtctgccagatgaagttgctgtaggagcactaagcatacggtcatatgtacttcctaacctaatgatagatttgtttacctcaaatctagtcactcaggcatgaattttatggagagaaaaaaacatgctaacaatgaaaatggtataatttttctcaggagaaggccaaagaagaagaccgtgaaaagcttggtgaaaaagaagaaacaattcctcctgattatagattagaagaggtcaaggtaaacaggctggagtctttttctattttattttaattcatactgaattcatacacagaacaaaggtacttgggaacagaactggaatataaagatcttgtttcttcatatttcaaacaccaaatagtattagtctactactaatagtgttagaacaccagatacaaagctaaaatattcctaagtagacttgatcctcaagtgaaagaaatctaatgtctaagctacctaatgttttcctttctaacccacagcttgttacaataccagaaatattaaaaaaccttgtgtagataggagaactaaaatgaggaataggccgggcatggtggctcatgcctataatcccagaagtttagaaggccaaggcaggagcatctcttgagcccaggagttcaagactagcctgggcaacataatgagaccctgtctctacaaaaaaatcaaaaaaattaggcatggtggcatgtgcctgtagtcccaggtacttgcgaggctgaagtgggaggatcacttgagcccaggaggtagaggctgcagtgagccatgatcgtaccactgcactccagccagggtgacagagcgagaccctaactcaaaaagaagtaaaaaatgaaaaaaaataaaataaggaacaattactttatataagaaaaatttgcaactttcagatataagttggaaaaataagagaacctatttaacattgagtatagtgttaagttgccccatttcttctattttgaaagtacagattgtacacaacaagggggaagaccccattatgagtcctgtggtttaagtgcagtcacttaaatgaggcggattcgtggacagttgaacaatgtcagtcatctttgtagcaggccaggatttgaaagagtattcaactaaacttcattaacaattctagaaaatcaaattcatgcttctcactcatccatgtgcactagcccatttatttagcagacacgggaactagactgaactatccgtgattgaaagtttattattctggaaacctttatatttgcttcctgagttttacaattcagttgcagccatagcgtttctattaatttgggctcatttgtacattgctttgcaaagttcctagagagcatgctaagggccacatgttctgtctccactgagtgcccattcagtagaggctggtcaagtgcaggtaaactctcttcatgataggtgattggttggtgatttgctctctccctttactgaatttagtagtagtgtttaaggaagcagttgattcacagtccctgatcactttattctgtagtcatttcatcctcctctgacttacctcacacgttattagttacctattaataacattttcag

SEQ ID NO: 36246 - DNA, 1045 bp, Homo sapiens
ttaaatctcaaagttgtttatgataggcttaaagtcctagataacaaactgatactaagaactagtaaacaaattcaggatagggatgtgtttcagcagttcctcgtttctaacagaatttaattcaagaccgtttttgatctacccttgttttttctttctcatagttctcacctgccatggtgaactttctgatgataataatagccagtattcacctggaactgaagggctggaaactgttccaagcctcttacgtgtttagtcttttattctgtcaaactcactaagagatagatgttaacattatattcattttacagctaagggagcagaggcacataaagtaacttatccagcatctcatggcaagcagatagcagagggagaactcaaactcaaggtcattttaactgcagaagccacattcttcaccaccatggtgcactgcctctctagttcatacttgctttcctttgtacattgttatctccagtgtttgaaattctcttatccccagttaatttgtaattgtcttgaacactacttgataaagtgttcaactttagtatttcagaaaggaaatatactctccagtgaaagaataagcttcaagttattcagcatagatagaacaggttataagtattatcaagcagcagccttctcaaagggatttttatgtgagatagttatgattggatctcttaacaacagtttaaggctttttcgccttagtgtgttatgatctaatttttatccaaaagtggtgggtctctcttgtatgaatagtagggataacatcaaactttattccctggtcccttatgcttctcttccaaaatcttctgttaactacataagaatgttgggggtgggttgaagaaatgaaatgttagaaacataatatgtgtaaattgtttcatgtatgttgattgctacctttcttgcagtttacccaattcgatagcaacagttatttgggcacacatccttaacagaaaaaaagcaaaaacaaaagaatacaaaacaaaaaaagtacaca

SEQ ID NO: 36247 - DNA, 1048 bp, Homo sapiens
aagataccttccaacccccaaattttttgactttctattaaacttcctgatgttataatccaagatggcttttaaaacagaagtactcttaagagcttttgatttgaaattttagatagggcttgttgaaaaatttcaagtggtaggggaaattaattgatgttaattaatatcaagtggtagctagaatactaagaaagatattctaaatccatgtatactacttaattaagtaatgagatacacagtttgaccacttggtggtgcccagaatgtgtaaaaaggtctaatacatgttctaggggagctcatctgctgagctcttaaagaattatttctgtttaagagttacattttatttaaaaccgacctcaggtaagggaaatgtatattttcttagtagaaattctagactatatataagaaatcagcgtaaggaccagtttttgttctttctctttttaaatttcaagtttcatttaaaaaaatatatgctaacctttttagaatattcatcttggatactcagagttggcatttgtttactttggtaatagattcttaattttcccatatgctgttgtttaggaaatgctaattttaatgtggccaggttataattgtatctttaaatttaaggaatattcatgaagtttacaatcttcctacatttttgaaagcttatatcctgaagtttagtgacactggtcattttttcctaatgatatttcacactaattagtctaattcacataaataatttactatacttttgcatttgatactacttgtgatattctaatcttttcattttttgacagtatgaagatttcttagatgctcgatttaaaaccatgaagaaagattccttaaattcatctcatccaatatcatcatctgttcagtcttcagaacaaattgaagaaatgtttgattctctttcctattttaaggtattgctgtgaacaaaaaggtagctggagtgggtttaaaatttcgtataatttcgtatgtgagcaagctgtgtgatttagattattttaaagat

SEQ ID NO: 36248 - DNA, 1051 bp, Homo sapiens
aatatgttcagagaaggtcctaagtaagctcttggctgtgttactcagaattgaggtatgctgtcaggtcaggactgccaaaacaagtaagcaaaaagagattttaagaattgaagattcgattttagaatctgaaacacacgccctgggtttcaaggtaaagaaaaagcagaatgttaaaccccattcggatcaccataggtcggagaatagaagaatagtgataacggtgtcattcacatttatgttgtggggagggatgaatgttatggctgtcagacaagatagagaagaaaatacacaaaatgtgtgagatacagtctatgtcatcaagtagctgaaagttcagatggttggtacttgtggagcaataagagaggtaatatgtgctgagtgggacagaatttttgcctaggataaggaagagaaacttttgggaggtaaatgggaattgagttggcttaaataattaaaatataggtaaagaggaatgtgaagtatagggtagggcaggaatggaacaatgaggtctgcaaagaaaatgaagtactaatgggcaagtgatgttttttcagagagtcagtgtttgaccacagtggaagccacacgtgaagagggaaaagaagagaaagttgagtggggcccagttgtagaaggctctggataccataaggaattatttttttcctatgcaacaggaagcttgaaaagacttttgaacagaggaatgacttgattaaagttactatttaggaaaagtattttggtttcagtttataaagtagatttaagtggggagaaacgtaaagtcaggaaattgctgctaaagtccaggcatgaaatggtaaaagtttgaaatgaggagtgctagtaagggtggaaagaaaacaatgggtataaaaaatactgggcagggaaagtacttaaagtattagtgacagggtaaggccagtaaagaaagaggcagaaatgtttttcaggttcaaacctgactgacaagaagaattattgtacaggtactattaacaaacaagaaaatcaggagttcagt

SEQ ID NO: 36249 - DNA, 1040 bp, Homo sapiens
caacttttgcatcatggtgtttttccatcccaaactagttcctaacattatcctcaggtttttcagcacccacatcaaattatgcattggcctcttcacttcaatactgcttcgacacccaaaagcaccttggttttaggcaagcttattttcttctaatcctctggttcagaaataaataggtcagagccatgataaatacaagtttaattaaaatgggaagatttgctccatccttttgtgctttaaataaatgggcatatggtgattgaggtgaggcctgccatagtagagtgattttatcaatttaggtacatcatgactttgttgcttacaattcaaattcatatataatctagaaaaataatttgaatcctgagtttaacccacctgctttaaagagactgttgttcaaaaattgcttcttagttattgatactagatgtcttaggggctttgggccttagagggtctgcaaagctctgacactaggttctagattttatagataacttcatatattttctgggaaagaagggctgtgaccactaaagtagtttaccactgttttctagaaagacttaaggcaactgacctgttcatatgtcactcttctgctgccgctgctccctggcactcccacagtattaggtcctaagagactatcattgtggaggtggagggtaggagcataaagagaaacccagactcaggtgcttcacaggattgagtagcagtgtttctgattctagactgtatatcattattcatatcttgtagatgttagtattgtgatttgaaagaatacttataccttcttagggattttaacttgatgaatttagggattttaatgaattcttagttggttgatatatgtgccacttctcaacctagtgcctccctcactcccttagctatcacttagctctgttccaggttacattccttttagcagttgctcatttacctagattagaagtgtaaactcaacattcatgtttcttttttatattaacattaaatgtagtctttataga

SEQ ID NO: 36250 - DNA, 1030 bp, Homo sapiens
taggtgactaaccgtggcctttgtctctgtcaacacagtgttctccctgtgtttctgtgcccaaattgccccattcttagattaaggcccaccataatccagtatgacctcatcttaacttgattgtacctgcaaagaccctattcctaaatgaggtcatattcataggtcccaggcagacacaaaatttgaggggatactattcaacctagtacaggtagcaataaataagattagtgcatatcactcactttttttcactattaaagggcaatgttagttctgaatataccctgtgaggaggcagaatatctcccgactctgaagctgcccagttaaacttcataatggcagaagtcagtcttctgcttgcctctctgttaactctgtttatagcttagtgctcaagaagcacttgatacttacctcttctttgaactgcatcttcatcccagatgatttccagctttctgggcagatatgtgtttattaggaacatacttcaaggagggatctagggactgatggatagagaggaagggcagaagacttagtatgtgtttccaagattggacgcccttttactgctgtgtgtcttcacatggttagctaaaagcccagttaactttagctcaccaagagggagaatgtgtcactttaacattcttattctaatattagggtgaaaattctggtagcatcaatactctcaaactaggaaatctgacattctacagttaggaattgggataggagacatttatgaatccttggatatgacgttcaaatgtattactgtctaagactgatttctaattaacttctatatcattggaaccaaagcattatgtacatttattggtcattttgttatgtaggctgcacatgacatatgctgcattttgtgatgctgtagtgttgtgatgggtagggtctggaggcacatttcaattgtgttaaattgttcacatctgatgttaacatctgatcctagccatattcctgttttatcacttacaaatctgtcatt

SEQ ID NO: 36251 - DNA, 1045 bp, Homo sapiens
gctgtagcatgcacaaccgcacctcattttgttgcccattcagagagcttgtaagcttgggctctgccgcttttgcaaaagccaaggtaaagccaggatcgctgccaagttgtttgcactctttggagttctagttagctcagggcctgactgtatttttcatccatcttttctgaagtgtctttgggcagtatgtagttatttattacaaaattatattcacctaaatgccaaccatctacaaaaacaatgagtaatttttctactttgaagatacacagatggggacaaaaaccctgttttggaattctgttctattcctcagtatccagaaagttactgacacagtaaaacaaggaaagttctaccctaagagccgccatcacttcaggccgctggtttgtcagccatctgttgcttcttattgatagatggcattggaatgtggtacaaagttagctctgaagaatatggtaacgaagacaataaagcatgcactgtaagaactgacctcaggtgtgcagatctactttgatttggggttttgattaattctttatttttctgaaaaaaagtttaaataatgtctgtaactattgtgtttttttcctgccgaatagccaggtgctacagatttttaaaatttttgttgtattgaaaagctaaacaaggccaaaaggttaaattttttgaatatttaagactttctttttcatcttttatagcgttaccataggaaactgttccaaactgagttagctttaattataattattttattcataaatggtgatagtccccagatctgtacacctttatcactccctgccgtagatatactttaggttagtatttctacattcgtggcaagcattttggtaacaccagtggttttcattgtgacttttatcactatcactaagaatgcaatttaagttgccttttggcatcatagatcatagaaactttctctctgaatcatacccatgtgtgaattttcattttatatgatagtgtagcatattagaagcatattttaaaacag

SEQ ID NO: 36252 - DNA, 1094 bp, Homo sapiens
aaatggttagatatattaaactgcaagtagtatcagcttcaccataagcttgggccttcctccatcttgttttatttaagtctctttaaatgaaattttgttgtcattgtttcagcattcatgaactttcttactatcacaggttctactttaattttccttgccatatgtgtttccattttgtgggacattagccaccacaggaacacaagagttgtcagaagactcctgggtgtacagagcaaatcaagctgcatcagtattataggataccaaacagaatcctttctattaggaaataagaaatcagttaagtgttggctgggcgcggtggcttatgcctgtaatcccagcattttgggatgccaaggtgggcagaccatttgaggccaggagttctaaaccagtttggccgacatggcaaaaccccatctctactaaaaatataaaaattagctgggcatggtggtgcacacctgtaatcccagctacctgggaggcacgagaatcacttgaacccaggaggcggaggttgcagtgagccaaggttgtgccactgcactccagcctgggtgacaaagcgagactgtctcaaaaaacaaaaaacaaaaaaaaaagagttaagtgttgattttgttggattactgacagtttgttgagatggattttaaaaagagtctatttaaaccaaagtacctggaaccataatctgccatcagattgctaaacattcacataatccccatgtttcatggggcttcagggaaggcaaatacatctgagatgagccacctccaaggacagcatttcctgggctgcaaaactagatgtggattttgttacttaggcctctctaaaaactgaggccatggatatgacatagcttttcttctcacctatgcctttgttacttttgtatttattggaattaaatctctttttaaagagcttccttcccccttcatcccatttgtatttttaaaaactaagttatatatatatttgcttgtttttgcattcttttattttgtgctccattccctgctttgccagttaagtactacctgaaaagtagcggttcaaaagtatggtaa

SEQ ID NO: 36253 - DNA, 1030 bp, Homo sapiens
caatattgaataaagctgtgtttaaacttcattgctcatatatcttttagtaactggtaaaccggcgaagctgataagccaataagagtgctgtctagaacgcatttgcaaaccgttaagagtagcttctttttgaggcctggacttctgattcatctatagaagtctattatgattccatcaattgcatagcttgtgtacctggtagaaattgtgtcttggaatgaccctttcgagttattgacatggctctgatgaatagaacatgagccccaaaactaaatccaaaaggaattttctatctttcatcccccacatgtggcaagacaagttggccctttcttacccagaggtcttttgtgtgactgcatctttctcctccgttctccattgtgtgctttccattttgtctttagtgcctatactgttaggtgttttcttcactggcattcacaaatttaagccattgctgcctcattagccttgtattttgtgtgcatatcatgtatccagacctgtatgttcgctttaagcattcttatatcacactgtctcctcatctaccatatggtaaatgttaaaactccacatttgtctgcatcagggaaaatgcatgggcacacatcctccctccctccctctctgctctcctcccttccttcaggcctcttagcattgtttgttttcccatttctgatactactactccatgctgaagatttgccatattactattttggaaacattgagtgatagaactcctagaaaatttgcaaagaaatgttacatactgtatatcaaactctcagattctagtgttgaaaaagtagcctatactttgctattacttatacctgctgccatagaaaaaaataagtttattcatgacacatttacatttgatcataaataaaagaaaaaagggcacctttttggagttagtcatggtagtcattagtgatatttctgaacagttcttaatttaaaatacttcaaaggaagtaaaggtcatggcttagctgaaggaaat

SEQ ID NO: 36254 - DNA, 1093 bp, Homo sapiens
ggggttttctggatatataatcatgtcatctgcaaacagagacaatttgacttcctcttttcctaattgaataccctttatttccttctcctgcctgattgccctggccagaacttccaacactatgttgaataggagtggtgagagagggcatccctgtctcgtgccagttttcaaagggaatgcttccagtttttgcccattcagtatgatattggctgtgggtttgtcatagatagttcttattattttgagatatgtcccatcaatacctaatttattgagagtttttagcatgaaggttgttgaattttgtcaaaggccttttctgcatctattgagataatcgtggtttttgtcattggttctgtttatatgctggattacatttattgatttttgtatgttgaaccagctttgcatcccagggatgaagcccacttgatcatggtggataagctttttgatgtgctgctggattcggtttgccagtattttattgaggatttttgcatcaatgttcatcagggatattggtctaaacttctctttttttgtcgtgtctctgtcaggctttggtatcaggatgatgctggcctcataaaatgagttcgggaggattctctctttttctattgattggaatagtttcagaaggaatgataccagctcctccttgtacctctggtagaattcggctgtgaatccctctggtcctggactttttttggttggtaagctattaattattgcctcaatttcagaacctgttattggtctattcagagattcaacttcttcctggtttagtcttgggagggtgtatgtgtcgacgaatttatcccttttttctagattttctagtttatttgcgtagaggtgtttatagtattctctgatggtagtttgcatttctgtgggattggtggtgatatcccctttatcattttttattgcatctatttgattcttctctcttttcttctttattagctggttttttgaaaagatcaacaaagttgatagaccactagcaagactaataaaggtaacatggacatttaagccggtgaatagaaagaaagaatacacc

SEQ ID NO: 36255 - DNA, 1037 bp, Homo sapiens
caacctctgtaaaagtggctcataaaaggcttcagaaaagcaacgttagagggtagaactattctctcagtatctagattgaacttcttggctgaacagcaatgattgccttgggacagcatttcgttagcatgtcctgaaacttgtaacctaatacaaaagtcaaacatggcactactgggtcatgtacccattgttaattgaggttgatattggtgaaggatgttcctatatatcaaagaaaagtttctttaatgatatgattttccagattgtcagactgtcatagtaagaatctaatgaatttagaaatttggctcttttgaactccaagatcccatccattatatctattctattatttgtttctgatcaattgcttcaactctgtaagattagagagttctcttcccctccctgttcccttataaataaataaattttgaaagggacataattcatttctacctaatcttgctaaaaatgaaatatgaggattttatatatgtatgaagttttatctattttacatgtaggattggtttttgttttttaaagaaatattttgaaaggacactgaagtacataaatgaaacacacaagcttcaggaatggaaggttaaggcagttcctggatgtttagcaaaggaagtatatggactttcctttagcccttccatttacacaactgtgcctctcaactgtgctcctcagtttctgtgtcctgcagttcaggttctctagggaaaatatgattgccttgcttggatcagtaatctacctactactgtccaattagctctgatagagagaacaggctagaaaaatggctgaaggaagaggaggggctgttctcaaagaaggatatgagctggaggcaataaaaggtgcctactatcagtcacttgagcaattttaacacttttttccttattcctcatgtttggttgatgtatgagcttgaaatagaacttttaactacgttactagtagtcattagctatcactactatttatttcaaaaaatactatttaca

SEQ ID NO: 36256 - DNA, 1140 bp, Homo sapiens
ttctttgattgtatcaattttgttttgcagttctgtgaaatgttttataatgtccctgcccagggacctgttagaaagcactttattttttatatattaaatatttatgtgtgtgcttggttgatatgtatagtacatatacacagacatccatatgcagcgtttcctttgaaggtgaccagttgtttgtagctattcttggctgtaccttcctgccctttcccattgctactgatttgccacggtgtgcagcttttactcgccaccttccggtggagctgcctcgttcctttgaactatgccctcacccttctgccctcacttgatttgaaagggtcgttaactctcccttacaggtgctttgactcttaaacgctgatcttaagaagctctcttcatctaagagctgttactttttcagaagggggggtattattggtattctgattactctcaattctaattgttatatatttgagcccatacagtgtattaggttgaaccatagaaactgctattctcgtaggtcaaaagggtctagtgatggaagttttgtagataagtaccaggcatctcagtaactcctagactttttctcatcccatgccccgttttaaattgtcagttttccctctgactcttctgtgttaaaacatgaaactataaatttagtaattatcatgccttgctctttttaatctatatgactgatgcaagcccctcttcttaaccgtttcttggctttgagcccagaaacacagctctccctgtctccaactccagtaagccctcctcagcctcaccttacgaatccaaagaactggggtttgttaggttctttctctaatgtagaggcccagatcccatcacaaagtttttcattcttccttgtccaccatgatcttcatcacagtctttgatatgtctgcatgcaaagtggaacagagttgggcggcaatgacagaagagcttccttggcctgactcggtgtgcggccacttcggcactgcttaatccagatattcttgttaactaagcattgtgcttcccaggtggtctgaagtcaggtactctctctctcaacacctgtagttgaatatgatttggtcagttgctcgttgtaacttggagaaattccta

SEQ ID NO: 36257 - DNA, 1046 bp, Homo sapiens
tgttcagtaccgctatgctacactgtgtcaatgtatgctaatatattgactaataaatacacacttcagaaacagctagagagagagtaagagcctgagagagacaatgagtcctggttatttgtctttgagtgcctggatctaatcatacctgaaatcataaacttttttttttttttgaaacggaatcttgcactgtcacccaggctggagggcagtggcacgatctcagctcactgcaccctccgcctcccgggttcaagcgattctcctgcctcagtctcctgagtagctggtattacaggggcctgccaccacacccagctaattttttgtatttttagtagggacgggtttcaccatgttggccagactggtctcaaacccctgacctcgtgattcacccgcctcagcctcccaaagtgctgggaatataatcgtgagccaccatgcccggcctaaactttttttttttaaattaaataagcaaattcccctttccgctttttttcagaagccagtttgactgttaaaactgataaaactgataaaactcctaatatatccttcaatatgcaaggagtgatacacagaaacctgtatcaaacgtgaaagcttacagatcacactgaaaccactggatggctctacagactttgcaaacatttacgcttgcatctaggagaaatttgaggactatttcatgagattctttgaggtaattcattgaagtaaccaacccttcagtattctccctgtatttacctctgcccacttatgctctctttcatttcttcatgccaagcctgactggcatacaccttgctctacatctagggtctacagcttcaggaaaaatcagagtacatagtgaaagcagtgtcctggtgacctggcatgctgcaacccaggctcccatctcaaaattgcccataaatgtatctgttttccatggaccttccccagaaaagttacactgagccttgtctagtaggggagccttgcgtcagatatagtgtccatctcaaatttgttgctttaagtca

SEQ ID NO: 36258 - DNA, 1124 bp, Homo sapiens
aaaaaaaaagttaaaaaaaaaatcccaaaacttaatttggtactccatataataggatacacaattgatcaatcaatatatgaaaaggtacgtagcatcattagtcaaaagggaattgaaattagaactataaggagttaacattccctacccagtgatcagaatggttaagaatatcaatactaagagttatgtgggccacatggggtggctcatgcctgtaatcccaatactttggaagactgaggcaggaggatcctttgaggccaggagttcaagaccagcatgggcaacatagcaagacactgtctctacataaaaattaaaacataatttttaaaaacttaaccaggcatagtggcatgtacctggagtcctagctactcaggaggcagaggtaggaggattccttggcccagaaattcaaggttacagtgagctatgatcacaccactgtactccagcctgagagaccctacctctattgaaaaagataaaaagttgatttgggtaatttgttgatgatctgaaactctcacacacttttggtaggactataaattggtacaactttgcaaaaacagtattaatctgctaaaattttaatctcctaaaatcttagggatacgcccaccaggaatgcaaacatgcatatcaaagctacactggaagttcttaacagtattatttatcctagctataaattgcaagcaaccccaatggagttagaatggataaataatatgtgacatattcatggagcaaaataccattcagcagtaaaagtgaagacactatagctatgtacacaatgtgaatgcgtcccacaaacataccggacaccaaataatataaatgcatgattctattaatgtatactcagaaatgaaattttagaagttagaatattggttacctttgaggaaaagaaaagggatagttcaccttgctccagaataccctggtaacatacatactaccatggctgtctggtgggtaattctaccctctgccccaagtcccatgtcccactccagaccacaagcaggttccccagtctttctacccgattcaccaatggaagggatggtggaactgtgttctaacaatggtcaacaactcag

SEQ ID NO: 36259 - DNA, 1028 bp, Homo sapiens
aaacctctgtctccttagcacaaatcaaggcaggggcaccaaactgtactgagttataagattcttggccactggggactcagaaaaaaatgtagtttcacatcaagaatatagtgatgaggtagtaaaaatgattacttagtaatttttttttttgagatggaatcttgctctgttgcccaggctggaccctaattcctgggctcaagggatcctcctgtctcagcttcccaagtagctgggactacaagtaaatgctaccatgcccaactaatttgattaaatattaaccctttagtacatggcttctaaatattctgtgtggcaaataagtcattcatatagcacttttgctgcgtacaaaaatacaatatttgtcttgtggaaaagcatttgtgtgatgaagttgtgggccaaactagctgatttttttcatggggcactatttttacttgaaagaacaattgacagacaaattaggattattcagacttggatatttggcagacattttctcaaaaatgaatgcagtaagactgtcatctcaaggaaaacaactgacagtattttgttatcaataaaaaaaaaatgtaagctttcaactaagagttagtgttttagaaaaccatccagtactctgagcatgaaaacttcacaattaagatgttaaaaataatgttaatgtgatattagtgattgtcattttattttattgtacaatgaaatgtgtcactacttggaaggtctgaataactcagtaatgcaatattttccaaatgttcaaagcatgatgttacaaaatcatgaaagtttcatttaaagtgcaagttaggccaatagttttaatgtaacacagtatattgaataacaaatttaaataaaaggcaaaagacaaattgagaaaactatttcaacacatattaacactgtcagaaatagcactttatattattttaataagtataatagatcattgagttatttctacttgttcgggtatagaaatgaaatagttttttttttttaat

SEQ ID NO: 36260 - DNA, 1075 bp, Homo sapiens
gcatgtgtctttatagcagcatgatttataagcctttgggtatatacccagtaatgggatggctgggtcagcaggatctccctcttatctgaaagaaccagccttaccctgcaaaaagcttcttgatgacagtatttgtttcctcacaaggagattctcaataacaggacttcctctcgccaaagctgaattgacaaatgctactgttatgtgtgtaacagtgatccctttttcagaggcagggttaagcagtctctctaagcccagtcactgtacagttctttgcaaactctcgtctcattgtctaaacaggagtaatgcttggaggggctacaaatgcctgggccccaaatagcaacctccctgtaaatatcatacaatttttctcctattggtaattggtagtggtactggtgggttggagttaaagggggatattgacttgtgttagtggcacaagtttgcgaggccaaacaacttaagcttgaaggtttgttagtttttagattaaaaagaaaacttctttttaatttaaatttttaagttttgtaggtacatagtaggtgtatatatttaaagaaaacttttgatgtcaacagtcaattgcactttttagcccagtactctacaaacccagacaattttgtcaagctttattgacttcccttaacaagttctctcatttttctggttgtataattttgttagagtttataacacttaattatatttcatagccctgaaagttgtaattttgaaaattcatctaacaatttccaatggtccttcagactttatatttttttggcacaaaagtggacttgggctaattcccttgatagctaccctttaacatacatagactttaaatgcctgactacttttaatggtaaaatcctggaggtattaaaggataaattgtgcttataggtctggtcagagaccaatattgtgcgtaccaacagaagattgcatctcttagaaactgtatatgtcttaatcgtattttaccagggactcttctcttgtagctcatatttcagggagttgtacaagtcattgatatctaacttta

SEQ ID NO: 36261 - DNA, 1026 bp, Homo sapiens
gttcatgaattatacattttaatagtattacagcctgaataggcaaacatgaacaaaacaattgcatctgttcttcaggcactcactttcaattaaagacgcatataagatgaaagaaaagggacagaaactgatattccatgcaaatggtaaccaaaacaaagcaggggttgctaaatttatatcagacaaattagattttaagtcaaaaactatctcttgagacaaaaaaaaaaaagatcattacatagtaaaggagtcaattcaccaggaagatatgacaattagtatgactctatcagagcacctaaattataaagcaaatattgacagatctgaagtaggaaattgacagccataaaataatttatgggactttaatatcccacttacaataatgaatagactatctagacagaaaatcaataaagaaacctctgacttaaacaacactgtagaccagtggacctgacagacatatacagaactttgcacccaacagcagaagaattcacattcttctcaagtgcccatgggatgcactctgagataaatcatcttaggtcacaaaacaagtcttaacaactttaagaagattgaaattattccaagtgtcttttccaacctccatggaatagaaatagaaatcaataacagcaggaaaacaggaaaaattataaatatgtggaaactaaacgatatagtttgaataaacctccaggccaaatctcatgtcaattgtaaccctccatgctgaaattgaagcctggtcagagatgtttgggtcatggggactgatccctcatggcttggtgctgtccttgtgatagtgagttcttgcaaaatgtggttgttttaagtgtgtagcacctgctcctccttgctcctatatttgccgtttgaagtacctgatcccatttcaccttgcaccatgagtaaaagctccctgatatatgctcagaagccaagcagatgtcagcaccatgcttgtatagtctgcagaaccacgagccaattaaacctctt

SEQ ID NO: 36262 - DNA, 1064 bp, Homo sapiens
ttttttttgccatcatgctcccctttgactttctgttctttctttcttcttttcttttctttgtctgtaaaatctagttcctgcagaccctttgactttctggaaggccacatgtggtttcatgaaacagattgacctccctctgttaaacaaccagaagggtttatggtttttatcttattaaatgccctagcctttggttataaaaatttacttttctcttagaattaaaactttctttaatattatatacattttttctcatcagttttcattttgtttttattttgcattgctgttttttgatagtgcagaaaagagttggacacattttgaacggttgatgttggagaatatataagtgcaccttttgtggcgttttatccagatttggcattaagatgtcccattttatcagatgagcatgctttaatcttcatctggcctcttattctggtgttaggacagcctttgcttgatgttgaggaaggtatctgactctgctgttttgcttccttatgtacctggcttgccagtttaaaagtttcaccattttaagtttcctaacagagtggcacatagagcatatttaagaagcctattgtaggaattcacccagatttagtgaatagaaattgaatacttgacctttatctagaaaagttgctgttttgttgtcaaccagaagaactttcttagtacagcccctatattccaaatagctagattcttaattgctgtactttcattaaattgcttcattattattgctgcatcaagattttcactaaacgaaaaacagccatagattgtttatttctgcttattgttttttgtagaaaaaattaaggaagaagacatattagatttcactgctgttgtagaaataaatttcctcttggtgtactctcaagtagatgttggaaaatgaggctcacagaggttaaagtagttggcccaaggtcatataggttgtaagtgctgggaccaggatttgaatccacagactctggcttggggacctgtgtcactctggcaagcttgtcgtgtgggaattaataagc

SEQ ID NO: 36263 - DNA, 1049 bp, Homo sapiens
tgctagttctataattactataatggtgttaactactgttattaccattaacattttccactctgattcatacctaaccatgtcttttaaaaatttttctaaatttttttaatttttaatttttgtggataactagtaggtatatatatttatggggcatatgagatattttgatacaggcataccatatgtaatcatcacatcagagtaaaatgggtatccattacctcacacattttttgtgtgttacgacctaattgtacatttttagttattttaaaatgtataattatattctcattgactacagtcaccttgttgtgctatcacgtactagatcttacttatcctttccattttttatgcccattaaccatcccaactccccctctaacctctccacttcccggtctctggtaaccgtcattctactatctccatgagttcaattgtttgtatttttagttctcacaaataagtgagaacatgcaaagtttgtctttctgtgcctggcttatttcactgaacataatgacctacaattacatccatgttgttgcaaatgagagaatctcattctcttttatggctaaatagtactccattctgtatatgtaacacattttctctgtccattgatctgttgatggatacttaggttgtttccaaatcttggccattgtgaacagtaaatatcagagtgcagatatctcttcaatatgctgatttcatttcttttgggtatatacctagcagtgggacatatataccccaaagaaaggacattactgaatcttatggtagctctagtttttttgaggaacctccaaacttctccatagtggttgaactaatttatattcccaccaacagtgttcaaaggttccctttgttccacatcctcaccagcgtttgttactacatgtcttttggataaaagccattttaactggggtgagatgacatctcattgtagtttttatttgcatttctctgatgataaatgatgttgagcgccttttcatatacctatttgtcatttgtatgtc

SEQ ID NO: 36264 - DNA, 1100 bp, Homo sapiens
aggagtggtgttggaagttctcaccattgtatttaactttttaaaaatcattcattcaagtggttatatatgtactaaattatttttttaacatgttcgttttatttcaaattgagccaaagatgttgaactttacacaaactataatctcttacattggatcatttatatgaagttatttttaataattattagaatttatggaatatgttagcagaattatggtaaagcaaagtttgcattttgtaaatttactgttccattcttgggtcaagtgtacagtgaacacattcattttcagagaaagaactgagaggacacaagcaagaatacatttcacatttcagctgttaaaggaggcaattttgtgtcatgtaagctcacagatcctggagccagactgagctctgtccacatgtagaaggtgtgactttgaacagacgttacttaaactctgagcgtcttcatttcctaatatgcaaaatggagaaattagtattattcatctcaggctttttgtaagcattgaatgagttaaaacctgtaaaagtactttgaatagcgcctagaatttaattcgtaatcattagtgtaagctcttattaatatcaattttttattctctacttagtcttattttctaaatcgttgctattaacagtttctgagttttttaatgtggtttctgttagttttatgaactgctgaacatcaaagggaatgattataaactagtgatttctaggaattaaattttgaaccattcatggagaaaatggagaaaggcatcacaaatgtagtataatttctaaataaatagcaactaaaaattactttccaagttagacacatgccattttttaggtcaaagttgcgggtcagaaaggtactgggctccagattcttcacagcttgaaatcttacttcattcatcattctgagcatagtcagtagcaaatcaataatttacttgaaaagaaacaagtaacttactactcttttgatatgtggtatagaggtcaagaatatatcttaaaaactctatatcaaaagttataaataagataactaccaagcaaaggctgattataattaataat

SEQ ID NO: 36265 - DNA, 1057 bp, Homo sapiens
tgggcatagaatcaattttagcctcttacagaacactattttcattattctcagcagtgctattctagttatcagaaactgagcatcagatataagaagtcacataattttatttttctgagcaattatatttccccccattgttttcttgaattatacttgttcattatgaaaaattgtcaaatgcaaaaaaacataagcacaaagaagacaatatttttaaattacccattattttactacccagagataagcactgatatcatttgtttgtgtgtcagccattctgctgttctgttcatgcatatatgcacatatacaaacagagattcaaaaccataagacataaaattaagataactgagcaatatttttcactgagcattagatagtgaacattttctcctgtcactaaatgttcttttacagctgcatctaagtagctgcattacattttattttatgcctctatcagtcctctattattgggatcttagaaatttgtttttgctgttataaatgacactctgatgaaaatacttttagattaattttttcctatctctactttcttaaaataaatttctagaagtaaaattaagtagaagagtgtggatatttttatgtgtttgatacgtatatgccaaattgttctttaaaaaagccatgtgacagtttatatttctgtggcagtctgtatgagaacacccatttcccagcctgaaattagctttcttttttttaactgccaattcaagaatacgttataacttggattgataacatgaacattttttatattatttttgaacatttttatattatttttacttctacatgtggttactctgttgatgttttcctcttttcttttatatttgtaagacttatttatgtgttaaagacattaacccagttgtattttatttcttttgcaactactttttctccagcagattcttctgttttcaacattttgccaagtgttactgaagaaaaaataaaataaattttaaaaccaaaccaaaaaacctctttagatagctaactttatttg

SEQ ID NO: 36266 - DNA, 1032 bp, Homo sapiens
caggtagcttgtccatgtcaaagttgtatatcaattaatttaacaaatttttgtttatgatcttctatatttcaggcactgtgctaggtactggtggtacagagaagtcaacaaaacatatacaaatccgttctctcatagagtgttcagtcagaaattaaagtgataagaaaaacaagtcatattgtaatgggactcaatactttagagcaatagagggggagttgggatgccaggagcctggggaagggttacacttttaaataatgaggtcaaggaagattcactgagaaagtgacagttgagcaaagatctgaagggcagtgagagaggaaaccacatggatacattgggtgagcatattcttggcagaggaaacagcaagtgcaaagatgctgaagtaggagcctgcctgtgaaaagaaaaggaggccattgtgctgggagaactaccaggaagggaagggtggagggaagagatccctgggatgggataggggtggaaaggtaggttctgtagggccttttgactgctgtgtattgagaacagattgtaaggtaccaacggcaaatcagggggatgagtcaggaggcagttacagtaacctggacacaaagatagtgtctatctacctactgtgcatttaatgctgcaagtattgtatgtagagaccaagtacaaagaggtcctttctgttgatttttcggtctgaattcttttccccttgtggttcaaatcttacatggaagggaaggaaaagtcaattacatgtttcacaatttttagtcattactggtaataataataataatatgaatcttgcatgtatatagcattttgtagttttcagggctttcttatatatattttcatgcctagccctcaaaatagcctacattgaatgagtaacagctctgaggtttataagacgtacccagagtcatgtagtgatcccttctcttttcaggatattgactttggtgaatatatacaaactaaataataatcaataaccttgtatttgtggagaag

SEQ ID NO: 36267 - DNA, 1065 bp, Homo sapiens
tgaataatttttatgagccatactttgagagaaacataacttctccatttgatatatacaacaatgttaggatttggtaaattcgccataatctagagacattcttatcccaccatcaggaactattccaagggaagaggaagaggagaaaaatgtggttttaagaagcaaggtcctaacatggctctaagaagcaagtcagcccactaggtgaaaagaaagttctacagcttgatcagtggtactgttgtacagtatcctaacctaaagcctaattatgttttaaataaaccaccagagcctaaggacttgacccatgagtaaatgcaccactaaatgtgacatacatgataaaacactttaatgttactggaattgtggtttctcacattgagtatgtatatttagtgtaatgaatctctttttattcctcccttcaaagttactattaaattgagactacgtcttaaaactgatggtccaagaaaatagaaaaaacaaatgacaaagaacttcaacccagcctcagcttatacaaaaacgaacacaaaatagatcacagagttaaatgtaaaaaataaaactataaggaaaaaataggagaaaattctttaggacctatggctggataaaaagttcttagacgtgacactaaattccataaaaagaaaaactagtaacttggagttcatcaaagctaaaaacatcttctctgtaagatcccttgtgaagaggatgtaaagacaagctacagagtgggagaaaatatttgcaaaccagaaatctgagaaagaccttatgcctatagtatgcaacaagctctcagaattcaacagtaaaaacaaatcaatccaaatagaaaatgggcaaaggacatgaatagacatttccctgagaaagatctatagatgacacataagccttctatagatgctcaacatcattagccattagggaaatgcaaattaaaagctcaatgaggtatcactaaacacctatcacacaggttaaaattttaaaatagtaacatcaaatactgacaaagatacagagaaatggttcact

SEQ ID NO: 36268 - DNA, 1256 bp, Homo sapiens
gttcttttctgtttttaattatttttatttctcatagtcattctgtttgtttattctttccttaagacacttaatgattttataccttctgttttcattatctgtgcctctttaaatttttgtattccagcaggataggcaccgactcaataattgcttgctgaatgcgcgagtgaatactaaataaggattttggccgttttctgactcagcatttcaaacagtagataatttacctttctaccttgaattatattctaatctaaggaatcattgttttgcttgtgtttatgaaaagccattgtgcatgaattcagcaaacttaaaattctgctacatataagttattgggtaatagggatgtgaagtatgatgcctgtttaaggaagtcacaggctagcagaattctagacaagaataaaagtgttaaaacatataaaaaggactttctccttgaacttttcaaatttctgaagaaaattacaaaagacaatacaatttacattattaatactaggacagactctcttgatggcattaaaagtcaaaattcgatttgaataactcactattttggctttatgtttatatgctagttatataacccatcttaaacatacttctaaattttgagcaaataccatcacagtcattatggaactcatatgtgtatatgcctgttatatttacatatgagcatatagcatgtgtgatgtgtctatatatctgtatttaattattgaatgtgaattacagtaggtgtttgaagaactgcaatgatgaagataaaaatatgttttatattttgaacaaaattatagctttccctagggcattgtgtgttttttttgttgttttaataagaaaccatagaatttgaatgggtgaaagtataataatatctgcatttgaccactgaactgtggtgctgtctaaaaggtgttttacagacactcagcggaattggctctgacagcagcccactcagccaagaaatttgactgtcatcttcatccacttgctttccctcacatggatgacctgtaaataattgtgtcttttccttagtgaatgatgacaggtccctatctatcaaattgcactacataaatgagatagaagccattgaatttagaaacagatgaaattaatctaatgattcattgtttttcattttcttgggcttctctcttgaatgtagaacagtttcttttgcagaattgcacagttagatttgaatagttcaaaatatgacc

SEQ ID NO: 36269 - DNA, 1047 bp, Homo sapiens
taagcactgtaaaatgtgtcattgagtgcagtagcaatgtttagacataaattactgataggctaaaattaatagcatccattccctttttccactttaatattgtaatagattcctatcatatcgcatattgggatagtataacggatcaatttttaaaacacagttggtctctgattctaacttccagtcaccaatttggtgagtatgttccttggctaataatattaaggtacttggattaaaggtgttaataggagttccttagaaattgcccaattctttgtagactagtgtcaactttaataaaatagaatgttacagttggaacccttttgactgtttcaacagaaacaaatgcatttttcctcacaagactagtactttatgttaaatacagtagcaatattataatgcagcgttgtatttagcacagatccagaactgtgaaatcggaacatcttggtttcaaatctcagctctgctacttggtagtggtaataaacattggttaaatgatgtaacctgtattggtctgttttctcatctgtaaaattgggctactaatcttggcagcttgattgggccatcatgaagggtagatgaggtaatataagtaatgtgtttggtgtagtgtctggcatgtagaagggatagctattatttttattcatttattgataaagtatatattaatcattcactatgtgccaagcactttgttgggcatggagaatttggtatgaataaaacagacacacactctgcttttatggacttactgcctgtctaaccttattggagcaaaggaacagtgggtagtttctgtgatgctatttatcaggctgatatttcttaatcaccattctaatttgctttttcattatgtatcattctaattactatattaatgtctgtccattgcattgaagttcacataggattgtctgaatttgggaaaatattctatgggtttatagaacaggtaatagtatttgaatatctgactcatactgaatgcattttgaaaggtaaggaccatcccct

SEQ ID NO: 36270 - DNA, 1023 bp, Homo sapiens
gtatctgagagagtataacctgaagccatacctgggcatgttttagatcaagcttgtccaagctgcaggccacaggacagctttgaatgcggcccaacacaaattcataaactttcttaaaacattatgagatgttttttgcgattcttttttttttttcttttagctcatcagctgttattagtgttagtgtattttatgtgtggcccaagacaattcttcttccaatgtggcccaggaaagccaaaagattggaccatccctgttttagactgtgatcttccttagtatgaaaagattggctgtgattttagagtgagttctatgggattacataaaatgtttgctttactttgtttttttgtttgtttgtttggtgttttggaaattacacagaatgtgaagctgtaaaataatccttcaaaaacaatcaattgtattaaatgccatatcaaccatagtgtcaagcctatactagtgctgggtatactagtcttcctgcctgtaggagtttattgtattctagtaggtgagacaagcacaaaaggagtgtgtttataggcaataataataatgcatactggatctgaagtctgcagagagacaggagcgtacaagtatacctgaaagtggagaggtatgaagtctgggaaaggctttccagaagttggacccagagcagggtatggaagggtgatcaggagctcccaggccagagcaggagggaagacaggttccagacaaaggtaaaagtagatgcagagacacgggagtgaaacagcatcttagacacaaagaactttgggtcatctgacgttgctggaatgtgaaatgcatagggaaaagtggcaagaaattagaagagaggtcaaaggtggggagcaagccataaagatccttgctaggacttgattcctaaagcactcagaatgctcttcagtcaagctgtaacctgactggattttcatttcctaatgccgctcagtcttgggcttgagtacatggaaaagctactagccttat

SEQ ID NO: 36271 - DNA, 1050 bp, Homo sapiens
aaactatacaatagactcaattaggcagtgattctgcatggaggaaatgaatcctaggagactatatagaatgaggaagttcacactgatgtcttccaaagcagacacacacacacacacacacacacacacacacacacctcacatatattaaggttggcacttttagaaaactaacacattttgtaagttctctttatttcttatgcattataatttcttatatgcgttcactataccaaagctataaacatcctgaactttctataaccattgtttaagcaaagaatatgggcttgaaactaagaagcttactagatggaagcaaaagtctacacaattacatttaagagttctgaatttgagtgtctcacctctttaatattcaaagtctagatgtagtgttgaaacttacgtctgttgtattgggaagattcagtgtcttaaattccaggcagaattgaaaatcaaaatctataataacagtatgtccttgttattatgtattatgctctagacaacatttatttggctgcagaaacagcctttaacatgttttattcagtttgctccaaaatctcctcattgtagtctttgtgccctcatataatcaatctttctactcaaaggtcagcataagctactgtattcccaaggcagagagaatatgacaaaaatataatttattgagggaaaataccccatgaccccagatagttaaaggtcttcggacaccttctgtgaaacagtaatttcacagtggttttatgctaacaaaaatgaattaccattggcatgttttatcaaataagcagaatcaagggaacaaggttgccagttaaaaacacaatagtctactgtcaaagcctgctaaagttacagttgtaaacagtttatgggaagagttaaataaaggctgggcatggtagctaaaatttatatttcattgatttgttcaaaatagggcattcctttgatcctctaataaaacacaaataattttagtaacatcttcttaactaattccaagcactctctatgccactttgc

SEQ ID NO: 36272 - DNA, 1002 bp, Homo sapiens
ttctatcttctccttttttatatttgtctcgttttcttaaaaaggaagaaaagttgatttctgattgcttttcaatcaaatgagccctataaggggaagaaataataaagttcacttcatttgtgatccttgagctggtcaccatggtcatgtgttttatttctctaaggctagagaataaatattgtgggacagtaataagtaaacaatcaataaaccaaattgactttaacccgaagggaaaatcagttaagactaagtcataaaacaaattattaaattctaaaaagagatgcttttatttttccattcctcatatcctctcattaatcagttatgttccatggctctaatcatgttaacttggttacttgacatattttgtcagtggctaaactgctgctgaacatcctatttactctccttatattatagaaattgcagaacaataagcagtaacaagagctgggtttttttaggtaatgaagaactagtaatgtgtgtgggaaatgggaatttatattctggaaagttctgagaggtatttgatcatttttaaaaaataatagcacctgcctcattaagattttacaatttctaaaaaattagatacttttttttttctatccagtaatcttaaagcattttttaaaaaaccttcataggaccatttttcaatgtatatttcatctattttagtttttctcaccatattcctgaaagtacatcagagaaatttccatgctgggagcagggaatagtgagtggtccctgataatagaaaaatgtccattgatccacaaagcagttaatgcaagcacacaacttaggaactttaattggtggtgttattagattcccatgtactatgctgcattccttttctccacacattagctgctactatagttgtgttttccatataccaaactcacacaattgaattccttaaaagatctagagcatttgggtattttataagaatcaaaagttagggaataa

SEQ ID NO: 36273 - DNA, 1021 bp, Homo sapiens
gtgagccaagattgtgccactgtactccagcctgagcgaaagagagagaccctgtctcaataacaataatagcttaaacatatggattcaagtttttatttaattttaattttttttgagatgaggtctgtctctgtcactcaggctggagtaccgtggcgtgatcatagctcactgcagccttgaactcctgagctcaagcagtcctcccactttagcctcccaagtggtgaggactataattgaatgccaccacacccagctaatttttttatttcttagagagatagggtctcactctgttgcccaggctggtctcgagctcctgggctcaagcgatcctcctgcctgggcctcccaaagtgctgggattacaaatgtaagcctccactcccagcctcaagtttttaaataatggtttatctctccctgaaatactcttgtattttatttcctaaataagacgtttcattgtacaagcatatgaaactatttatatttaatgtgtggtacacgagaatttagcagtaatgaactgtattaatttttcttctgtgaggcagaatgccactgtgccctaacagatttggttgacttataatttgctttgtttattttactgagattggccctattacttggtaattattttctgattgaagatttcacctgggataagctgatttcactggcaagaattgaaaacctactttgaaacattaaaccaagactatttgtaaacatgacagaatctcttagcatcattttggaaagacttcatctccccttgcaccactttcttaataatatattcttcagtgaaatacatcatggctaaaccagttatcattttcatttcctaatggtcatgaaaagagattttataaatgttttctaattgtgctgtaaatgtaattaaaacgtaagcaacaggactccatagtcgtaagtaatttcatcattagcagcacctagtataggatgaggaaaaggaagaactggtggttgcccttgggtttgg

SEQ ID NO: 36274 - DNA, 1021 bp, Homo sapiens
agctactaggatcaataggtaatgtatatttaccttatttttctaaaagtattgtttccagtaatatgttctcaacatgttctcaactccagattttaaaaacaagcaatcaagcttgaaataattctatcatttgctatctgaatttagagcaactgacaaagttgggaatgacttgcccaaggtcatgggtaagaaatttgtatttaatttttaggctaacactggaaatctgtagcattaactagtcatgtattgaatcatttcttaaataataaccaagagaaatctgaactagaatttttaacttctctatcatcaaaagtgtttaaggtagaactcaaatatattttatcatataatttctttaataaggattttaaattgttcttaattggggattagaaaataattatccctgaaattgaggcctaaagtctggctcaaggctgaagttcctttcctgtcaaatgaagacagttatgtggaataattccgatacagttctagcattctctgattctcatgtcgtgatgagcaggaattggaacaataatcaatattaattccacttacatacacactagtcctaaatcaatgcctttattcttgatcatttcatcgtatagggaatagcctttaactacctgataattaaaaatatggtgacactggaagcaaaagtattaattaacttagctaatattcacagaaaaaaaccatgaagtttttctttaactatcctagaatttctggttaataaagagactcagatcctgaaagttttgaacacttggctaagtaatgtaagtgtgcaaagacaatttaaaataaaataacaataatgtaatataatttttccaaacattcagtactaagagaaccaggttgctcatggtgttagacttcatacatttttttacacatcatctttactgttttgaaaattcactaaaggtgtatattttcataaatatgttctagatatttacattaattttccttcttgaaaatttccagc

SEQ ID NO: 36275 - DNA, 1023 bp, Homo sapiens
attgttgtgcccctttgaactaacttcctcatatctgttggtaaaggaagtgagatgcttaactttcagttctttgctttgtattagtggagtgtttgccttgctcattcttttaatgataatgtactgtgtcaaccaggatattaacttttaatttaaatatgcatctagaaataaaaactaagtgctaagcaagaggctaaatgagccttaacgtcataaaaatctgaagagttctcaattaaaatttccaaagcattgtgctttcatcagatgttaggcaaagaatgagtcacaatatgtgggtcaattcagcaaacttgaaaagagtctcactccaagatgaagtttgcttttcctttcagtaaacaagacttgatattacaccaaaacatataaatatattctgtgttgacacagtaaactgaaatcagtttataaatctctcagaattttcattaaatagattattatcacaaagattaattttgggtgaaggaaataatatggtctgttgactcctgtgtaaaaagagattcctcttcacgatgaaggtcaagttttacataagggggttgtgcttctgtttgtgcatacccactccttatctcctcttacatttcagttctccatcttctactattacattctttagagatgtttccatctgaatgtagggactctgtttttatgtctgtgcagggaagcttagacagtaggacaataaagaaaatggttctatcaaatgctatcaaaaagctgtgagagaaaaatacacattgtcattccccaagtcattccccctgtaatcaaaggacagacttgtggtccctcattatctgcttttatacacacccttcggacaggcatattttttgtcgtcttctgtgtggcagctcatatggaaaagaaagagaatgatccccatccttccataccaaaagaaaaaaaagtgagcccagatttatgtcatttttccaaccttcacagtgatgattaaaatgacaatacttgagctgaaaa

SEQ ID NO: 36276 - DNA, 1032 bp, Homo sapiens
atgagctcaaattactgatttcaagtgatagaaagtgattgaggatacaaaaactttgtaactagtgagccagagatattccgagaagaaaaaaagtcagccactttggggagtacattaaccccaggcaagtaaaaaaatatgatttggcatattggaaaaaccttttcttaataggccctaatataaaggagtgaaaaatatctttggtgggtcagtgctataatggtatggaaagattagctgtttctttagcttctatcgtagtaccattcagcttccacgatttactgagggccttttgtgtgtaaagcactatagcaggtctaagggaaatgagactgcacctgaccttatagccttataaggagagagggggaaatttacatacataaacacatatacaaataagtatatcactggtatataatatcaggactaaggaaatgggatttagctattggtaagcaaccactgggttcatatggagtccctgtcaacttattttgtctctttcctaggatcagtttatgtttgtacattctagcatctgcagggttttgacatgtcatttccagttaaggactcgctatgagttgctcatgttacctaatatttaagtagcaaggggattccattattagttgctttacaaatgattcacctagacattcagacacaaacctaggcttacttgttttcttttctcatcaaagcagctggaaaagaaatgaaaagcagcaacagcaagggggagtttaaggattttatgcagacagataagaaaatatagccagctcaaggggtaataaaatattataaaataaatagcaattgtttggcatttgtagagatccaagtgacactactaagtggcattcatatcacactcatatactaaagaaggttcctgtccccctagttttatgtctttgctatatatataattattggtaagttctgtttgccctggaataaagacgttgggaaagatcatgttgttaatagtagctatcacttacagagcagaaa

SEQ ID NO: 36277 - DNA, 1070 bp, Homo sapiens
tacataatacttgggagcttttgtttttcttctttaatagtagcatctatatggctctgtaggatacgtctctgtctgtttttctattttatttttaaataaaataatctcccctttcccatccccaccttctgactttatcatttaagaatttacaaggtaacagacattgctgcaaactttacccaattctgttattgtttgctttttttcaggaaagggaagtggaggcttaaaccttggtaatttctttgcaagccgtaagggctacagtcgaaaagggtttgaccggcttagcactgagggcagtgaccaagagaaagaggatgatggaagtgaatcagaagaggagtattcagcacctctgcctgcgctcgcaccttcctcctcctgaaaaccaagctttgatttagattgagtaagatttacccagaatgtcagattcctttccctttagcacgtttaaagttctgtgtatttaattgtaaactgtactagtctgtgtgggactgtacacactttatttacttcgttttggttaagttggcttctgtttctagttgaggagtttcctaaaagttcataacagtgccattgtctttatatgaacatagactagagaaaccgtcctctttttccatcataattctaatctaacaatggaagatttgcccatttacacttttgagactttttggtggatgtaaataaccccattctttgcttgaacacagtattttcccaatagcactttcattgccagtgtctttctttggtgcctttcctgttcagcattcttagcctgtggcagtaaagagaaactttgtgctacatgacgacaaagctgctaaatctcctatttttttaaaatcactaacattatattgcaatgaaggaaataaaaaagtctctatttaaattcttttttaaattttcttcagttggtgtgtttttgggatgtcttatttttagatggttacactgttagaacactattttcagaatctgaatgtaatttgtgtaataaagtgttttcagagcattagctgtcagtgtattttccagttttt

SEQ ID NO: 36278 - DNA, 1025 bp, Homo sapiens
attgtttcggaaaacttatttgtttataactaagtgttatttaatgggctccttacatcaccttttgatagtagagggcagagtatataagaagaaaggccaagaagtacaaaaagactttgaaaaaatatacaattaacctgtttctaaaataaatgggtattttcttccacccagtaaaccagagtaagtctttaaacaagtttggtctcctaagagcagtcagtatccacattcataaatgcatttaccttacaaaagaaaagggtagggattggggaagtcatttcatagagaaatgcagatgaccaataaaataataatgatagtaataataatctgtcttgcctatcatattggcaaagtgttttcttcgtttctgttttaaactggtaataaagtgtgctgatgagaattcattgagacaggatttcagtctatagtagaagtataaattggcacagtgttttgaaaagtaacttggcaatatatcaaaaacttcagaaaatgtacttatgctttgacctgaattctgcttatcaggatctaacccaaagaagtaatcagatgttcagggaaagattatctatagggatattcatagtggtattatttatagtagcaaaaattaatgattatcttaaatgcagacacatatttataataatctttatatatttagtttaacatttgatatattgctcttatcacattttgtggttaatagtaatacaggttaattttctatatcttagtatttatcatcaaaaacattctataagcaaataatttaaaaagttaggtaactaactttctttccataaattaatattggtctacatgacaaagctcacagaaccgctaacttgctgcaggggaaggggtgatttcctctcacctttaaagaatgattattaagttcttttagtgcttataatgcttatttttgaattactttttttttcagaacccaacacagatcttaataccatgaaaaggagtaggtcaaaattaagtacagaaac

SEQ ID NO: 36279 - DNA, 1064 bp, Homo sapiens
aaataacttgccaagctaaatgtcaaaactggaatgtggaactatatttttattgatggcttttattcaaaaaaattcattacaaattcattacaaaggcataacaggatagtggtttagagcaccagtctgtagccagactacctgcatttgagtcctactcctttacatcctagtggtttgatcttaagcaagtagcttaacctcaggtaagtcactcatctgggaaaagataataatagatgcctagagttattacatgtaaatatatgtcaagtggtcagaaccatatttacacatgttaacagagtcagcagattgtcatcaaattccattaagttagagtgttgctgctaaattttctttattgataagacagctaaggtttaatattttttaacatgaattctgagtcttttacttcctccttgatctcattactatacagttcacctttagacaatgttggggttggaagtgccagtccccctcacagtaaaaaaattcgtgtataacttttgactctgcaaaaacttaactaccaagttaagcctacctttgactggaagccttagcaataatgtgaacaatgaacatatatgaatgctcattatgaaaaaactatacacaaatttcaacttttttttacactaaaataatcttgtattatcttgttatgacatgtctgaacaggatttagtttgaggcactaacaagagtaagacatcagtttgaagagagcccctgcgaggggcaacatgaattctgctaaaattgaaacaagaacaaacagcaaatttatggtgaagcttaagtgaaaaaaatggtgaaatcattgacactttacaaaaagtttataggaacagtttcccgaagaaatcagcagtatacaaatggataactcgttttaagatgggacgagatgatgttgaagatgaagccctcaaaggcagaccatccacatcaattttgcaaggaaaaaattaatcttgttcatgccctaattgaagaagaccaataattaacagcagaaacaatagccagtaccatagacatctcagttg

SEQ ID NO: 36280 - DNA, 1062 bp, Homo sapiens
tatatccagtagtattgatggaattgtttgtgaagaggagcgatacatctcttacatggtcctttttgacatacatagagggtataaagatcatgagtaatataggaactgatagaaagcctgtagttggagaatagtagtaagtattggataaaatgacagcagatatggttgaagagccagtgccttgtattctaattggattgggaagccatttaaaggttttaagcagggaaatgggtggctttggttattgtgtggacagcagataggtgaaagtgggtatgaggaaaccagttaggaaattattacagtggtccaaaaagatgtcatttggactagggtggtagctgtggatctagagttttttgggcatatattgaattcaggctgcatttctaaaacaaaaactgaacaacttcattattttaaaaatcagtgcttccagggggaaaaataattacatgtatttactaagatgaaaattaaagtctgccaaaatgttttgttttcattatcccaactcttattatccttgtaagaatctgtaagtaatataattaaaatcttactcagtatattcccctttgtaatttttaattattcagaatggatggggtaaaatctttctgtagaattatttgtaaagtttgttaaggaactaagattataaataagatttcaggaatatgtgtaatggggccttaatttaaaaagatatttttgtgtcttcttacatattaattacgttctggaagttactactaaatattacttaattttatctatttattagagaagacctagcaaaatctataactgcaacactgagttagatattaaatggtgttcttaatactggagtatcacaaaatcacaagatcaattatctgttcacctaatgaaaattttcagtatttaaactcatcatttgtgctaacttacatttagtgaaactcagtaatgctaatttatgttttcccttatcaattttgaaaaaaatacatcttttcacatactacctcctaaacttgcacacatgcatgtgcgcacacacacaca

SEQ ID NO: 36281 - DNA, 1034 bp, Homo sapiens
cctttcccttttcttccatttttggtagtagaggccagctttcaatcattaacagtaatagagatgtatactggtgagtgttctaaaatacttcactttagggatggttttaggaagtaggtcttaacttaaaaatttgcatataaatgtgtccgattatgagaattgataatacttcaaatgaaataacttctccaagtggtaaacgtcagagacaggaaaatgaaggtggtaatctccttttatattctctataacctgctagaatggacaatgctgttacctcagaatgcagtagagaacctgaataaattctagtttaccccttcacccttaatgatgtttcattgcttccctggggcaaggatttgaaatcttaaaatagagattaaagaattattctaattagtaaataagagtttaggggtagatctcaacactatttagattgtagaagacttgcaatgaatgatttgaaggtaatagaaatagtagtgacatgtttgttatgaaaggataattttagtagaatatttacaaaaagataatattttaaggtttgttctgtggtactcttgatggattcattttgtagttagtgaattcagttcatcagagtgtattactgaaggatattaatgaggcaaaggatattagattctttttccagttgtgctaatttctaattagctcttctgtatatcatggatacaaattgtacctcagtccctctagctctcttaaaatttcatgcaattagttactaacagaactagatgagaaagtaaatgtacttaatgtggctcatagaattggataaaccttagagataatctagttcattggtcttcaaactgtattcccaagagtctttggaaattccatgaggaagagaaagatgctgaatagttagggcttgtgtctttcatggctgcttcaaccagagtatctcctttggtctattttatttaagatttcacttaagaacagctttactatttaaagaaaaaatcgtagaaagacacagttgagga

SEQ ID NO: 36282 - DNA, 1037 bp, Homo sapiens
cttaaaaatgtttttaaatctaaggttttctttgtttatgttcaggtaaggaactgttgtcatgatctggaaatgtttaaaacaatgtttgttagcattctgtgagcagcaaaacttatagtgataaaaatcgattgttgttaatatgatgtttaccatgtgcacatagtaatgaaaaggaacataaaagcccagcaggctcgtaccaaagtcacagcagtaatgctatgtactgcagagtctgatgagctggcctttgtgcacacttttattttcatgggattgcatcttagctgttaaaacttctagattgaaatttgacagccagggttacatattggggacttttaaagtgtctttccaaagagatttcattaaccgtttagattagaatatctttcccaattgttacagtgacatatatgctgcaatatttaacaactggagtattagccacatgggttattttttcaatctgtgttttgaatttttttattgtgtgttatttaaaatattacatatgcagctgggagaactacacctttgtgcacatagatttatatattaatttgtagaaaatattttctttatatatttccttaccatacaaggtgccttgttcatcaggaaaacttttgttttgtattttgacaagaaaggcaccttcagagtttctttttaagtatagttgacaagtgtataaatgttacacttactttcagagttctttttagatctaaagaagtcagttcaaaaatggaaatcaacaatgttaggagaaatctgaattctgttaagttagtaagtattatgtatagcatctgtttttaaccatttccattcttatccctagtgtatcagttgatcacactaagaaagcttaaagattgagcatttgaaataaatgctctttataaatgattagatttttgaagggatattgaaatcattgcgctgtgatttcatctgtgatgtgaaaaatcaatttattatccttggtgctttcccccccaccaatgcacaaataattgtgaaca

SEQ ID NO: 36283 - DNA, 1047 bp, Homo sapiens
tttgctttgtgattcaattttaagatcccttttacttaatagattagtgtagtctgttttatgtaatgtatctttgcttttagattgtgcttgctttttttattgctttaaaattcttttgtctttctgtaacaatactttccactgcaagtaggaaaattccaattgaaactggtttaaatcatcagaaaatgtattattacacatttctgaaggtccaaaggtggggttggcttcagccacagttgcattagccatattgtcatcaaaagcccaagtgacctcccttgtcacctctggcatagtataaactttatcccaaagttgttttctctcgtgttaacaataattgctgtcggtttcagtgaggactacatattttttttgttcatgtccaacacaataaaaattgagggaagttctgtcccaatcctggaatattaatattaagccatctacttcagtgtgattgagccaacttctttgatcatctactcacccctagataaatagaatactccaggagattcccatgaccttactgaccctagagcagatgatggagtcagtttttccgaaaagcctcagcactgttgacattttggaccataaaattctacatcataggaagctgttccatgcatagcagcatgtctagtaggatctctgtacctagctgtgaagtgttgagagtcagttaaggtaagtagctgaaatgaaaataacaatcacatctttattcacttactatgataaaattataagcaagagaccaaaaaggaaagtagggccagctccttgttgttccatttttcccctaccatggactagcactggacatgcgtcaatcagacgacatgcagtccaggcagaggaaattgtttcactgctaaggagcaatgaacaaaaggttcctgccatcttatggacctcaaggactgcggacagggagcagggaagggttagaagtagaaaacaactgagtcagagtggagatgagtgtctcagtcaaggcccaccaatagcgaggtctctgtggaggcacct

SEQ ID NO: 36284 - DNA, 1028 bp, Homo sapiens
tctcgccgaccctcctcgtcctggttgcaacccgcgtgcgaggccgcccgcgccctccgagtgtctgccggtgcagtgggggtggactggccggctgtggccgtgtgtgcgcgtgtggattggggcccggtccgagccagaagcttaagcggcagatgtcgggcattgccaccctcgccccacctgtcgcgggtggactttggggcaggtgggaagcggaggagaggggtttcgaggcgggtggcagtcagacctccagcaacgcggccccattgtgaagctgccaaactctctctagtggtggaatctgcaggtctccgccagaaaggagatgggaacgcgaagggaatgatggccccgtccttttccccttgctagtgttccacacgcttagggactccctgcctctccttccacctcagttttcaacccagtgggttactgatttgggtggaaccaagatttccgtgtgtgtgtgtgtgtgtgtgtgtgtttgtgtgtgtgtggtgcacaggtaaagctggagctgggaactttttatttgagcaggaagaatggaggcattttacagtgtgcttgccgctcctagctgaaagaacaattcttgcatatttctgatgttactagactcattttccttttttttttttttccgaagagccaacctacaatttagggttgttagttgttttattttctcaaatcctgtaatgctggattgacactatagaggtagaaatgacccttttgcaaagtttattttcccagtcatttcaaaatatagtattggttattacggcagaagcttttggccgcgatttatgattacactattaagtttaatgaatgtgtcacagaatcctcagtgttttaattatgtaactgtgaatgcattataaactgaaaagtaaaatgaacaggatggaatataagagttaatgaatacagagacctgttaatttgataataattgatgtatagaatatgcttttgctaacagtttatttaattgcaaatgaaagtgttag

SEQ ID NO: 36285 - DNA, 1043 bp, Homo sapiens
aaaaaggctttggtacagtaatttcatctttatgattctgacactcaaattgggaatgttacctgcttggttgttgctgacttgatatgattcattagaaatttatatcttcagtactcaagtacttcttgaatctctgtattttactataaaatgtatgtaatgatttgttttatgaaatttagaacttgaacattgctgaattggaccactttttatttttaaatattgagtttaaatattttataactggttttgcactgaaaaaattaacatttcagattgacaagagagtaatctttcttcacttgcctcaataatgttattgagcaatgaattttttatttccgcatggaaagttattgatctctatggctgtaaaatatttctttatagcgttattaaagtgtgtcttaataaaattaaatttgggatacaaagtatttattttacaatgggtgggcgggggaaacttttccagaaagtttccaatatgacgttttcataagttgaaaaaactctccttagtgcttattttctaacttaaaattcacctggaactttaaatgggaaaggattcttttaattgtggattataggcataatactgtttgcatctgaattttctgtaagtgaataatagtttaatagaggaactcatgatttgtactattgaatgattaaactaagtatgaagtgataccattcagcatggcatcaggtcattgcagttttagttctgtgtaacacaagcactcactgaaattccagtttctaggattagtgtaggagcctaacgtgcttctactgttttaatgggttaatcctggattacttaacaatttatgtcaattgcactggtttaatttgttgctaaagaaataatgccctgggtttagtaacaaatacagctcaactattcttgaatatattttgaaaaaaaaatgtatgtaacttaccttttgtaaacgttccatttcttttttccctcatttttgactcttaaaggtgcaatttattactgaattgggatttctggcagc

SEQ ID NO: 36286 - DNA, 1055 bp, Homo sapiens
aataatatatatatatatatattcattggataggagaaaaaaaggcaattcagcctttttgtaatttacccatccctccttagtggaactatcacttgatttagtatgaaagtgttaggggtgagaagacaggaaaatcatatgatgtaacattcattcttccccattttctcagcagttacactagtggtgcttcttaattttaagacttttctgctgcttcatacctgataacaaattgtattatcaaagcctgtcacaaaaaaattctgtgaaattttaaatgccaactccataagctatataaagtttttccagtttagatatcaatgtgataaattatactgtcaaacactttttaatacttgatgacataaatagctttgaaaaactgatgatttaggattaattacctccaagttctcttgactagcacaatattcctaactagttcattttcagaaaaagtatttctccaatgcattagaaaaaattgctccccacattctactccaggccataataggaagtagaaaaatcctgtagatccaaaataagaaaggttataaggcaaaatttctacaaacatattgccaacatgtatatctgaatgttgaacaaagcctctttccttatagatggaagcacactgttctcgctatttttgtagatccacctcaatgaataacagcaaaatatcttatccagataaaagatatgttttctaaatattgaatgatgaatggcctatagtccatcatgtgttccctcctagagaaggtaaccagccaagggaaatatttcattcctcagagtctaaacaaaacgtggaaaaaaatcaccatgaatggtgggaatccagcagaagacagagaactgggagaacaacagtgctaggaaacagaagattttaagaaatgaaaaaataagttggtcatccgacaatgtagtctgagttagttgctagggattgaatccaatacaatagtttagatcttaaatatatttgaaatatttctccagatcaaaatatgctgggtttttttttttgtcgt

SEQ ID NO: 36287 - DNA, 1029 bp, Homo sapiens
tgttccaatcattgtgtttaattgtgttttgtggaatcaccactttttattgattaataacatttttgatagatttcatcttttcttgttcaactgtaataatctatatgtttacaatgctaaactcaaagttgatttaaatcttagtttctcctctcttcctaggtgcagacttcaaccttagctccagaaacatgcactgaacgtagtgccataatttactctactcttccctctttcccattccaggaacttgatatggaaaggcgtgtctggtggggtatgcctctgaggataatataccctgccacatatgggctctatctcaaccattctcaatgattggagcagcagacatcttttagtaaacattctagaaattcatgggtactttaaaaaatcagttatcaccattactggagggcactatgggcagtagtcaaggttggaagaaagcctgacatttatgaaatacttagtcacaataattatcctgcataacttcattgggactatttgaaacacaaatacatattagtagtactttagcacaaaatagcattgaaagttttacaagaatatgaatgaaaatccagtacttgaggagaagattgttgtgaaatacaagagttaagtattagaaaaccattcctgattttattgaataaattattaatcctgtatattctgtctcttcaatgtgcaattgcagtactgacatattggctctgcatcaatcatatcacctttgttttatatttttcctttatgattggtgatacattatagatatagtctagtgtcccttgatgttttgttgataatatttgtaaagaacaccatgtcctacaaagtgttttgaaaatctatcaactgtagtgaacaatatttactacttattttcaagattctttttattttgaatatttaattttttctatatgttattcttattgcaatgaaatataagctaatttcaaagtcataaataaaggattatatactatttgtaataaaggatattgccta

SEQ ID NO: 36288 - DNA, 1029 bp, Homo sapiens
agttaagaaaccaataaatccccctgccttcttgtagcttagattgtattgtgagtgtgtgcttgggcctctagatatctggcttgtataacagaggtagtagtaccattcattgaaatgggaaactgataaaaggccagctttgggaattatgagttcagtaatatattgacttttatctacctcttgcgacatctaaatagaagtcacacggatgtttcaacattcaagtttggagctcagtgaaaaaagtttaagttgcagatttaaatttgtgagtagacttggttcaggtggtaattgaagttgagacataaaagagattacctagggagaaagtacagagtgagaaaagaagaaacctggaatcagtagagcctagaatcacattaccatttaatgacctggtagaggagggtgagcctgctgaagaaactgagaatgtgtagtctgagaggttggaggatagtgtggtaggggaataaatgtttcatgtaggcatacatggtcaatagagtggaattgtgttgagacgtcaagtaagagaagtggaaaatgtgtctgttagattggtgaaatggagtctgttggtttcctaagaccatctgctttggtgtagttatggggtgacagccaaataagagcagattgaggaatgagtgagagtagagaaaatggagacagtgagcatatataactcttttaggaatttttttttataaagggcaagcagtagctggaacagaatatgtggtgaagggagaggttcatccttctctttcttctgctctttccttcctttatttcctactctcttccctcctttttttccctatctctctctcacacacacacacacacacacacacacacacacacacacacacacgtaaaaactgaagggctgatgggaaagaaccatttgagaagggatggttgacagtacctcagagatccattaggttcttgtaaggtgtaaggttcttaggaggtcaggaagcaatgagatccaaagttaagtagagtggt

SEQ ID NO: 36289 - DNA, 1065 bp, Homo sapiens
gtatgagcagatcaatcctcaaaagtttttaagagatttgtagcatcaggtgtaggccgatgtgaaagattagaatctagaggagcctaacccacagagcgaagcactatctacccatctactcttactcaagtgttttcactgggtgaagcagtagatcagagaaggagacttgagagatacttcagatgaaatcctcaatacatcagaatggtggtatgtagggtgtgtttctgatgaggggtgtgggcgtggggaggagttcaggcagaaaaactgagtactctaggctttcacttacaaaagaatataagagccccttcccaaactgattctctgtagggaattctgggtcttcacattctagggcaatggcccttcaaagactaggctggggaatgggtattagagctgaaagttgtcttcttaggtacataaagtagtgggtgagagcaaagagacttctctctcccacccgagaggctgtaaagctgggagagatctcctgtatttcctaaagctggtggatcagctttgaagctgagggaggatgctagaatctcatcatggctcagctttatttctagatgaaggaaaactgatctctctcaaagtatttgaaggctgtggcaattgatttaaactaaaactgtagcaaaggctagaaccaacttattaactacagctccaactctccagcagcctgtcaaaaaaaggagtgggtatgtccatttcttgaggaaaatattcttgaattcagactctactgttcttttatacaaactgtctggcctacaatcaaagattatatgacacaccaaaaagtgagaaatttgacccataggcaagaaagtagacccagatcttggaattatgagatattcgttaatatagccgttacaaaaatgcttagggatgtaatactttcactctcattataaggtattccttgtctcacagtttattagtttaagtcaagtagaaaaatttactgttgtatcgttatgtccctaaattgtattaaaagcagaatcttagttaagataccttgataatctaatttat

SEQ ID NO: 36290 - DNA, 1045 bp, Homo sapiens
gcaacagtttagacattgcttttcacagtattatacttttaaaatgaattagaattacatataaaatcaagttgtaagaaagaataaaatataacttaatatttataaacttttggacatggagataagacatttagaggttagaaaacccacagaaaataaaaaaggttaatgttagcaattttgagtatctaataatattctaatctaaaatattaaaagaataattccaagataataagacaaattacgaattaaaactagtgcttatcatacaaataactcataaaaatagggagaaacatactacaaattcagggtttaaatggagagtggacatgggctgacaggtcacatgagagtgactaaaattgtttttaaaaataaatgtaaagtatgacaattcaatgtaaccatatgtacaaatatagctctgaatagattttattttttgaaacatttttagcaaaatttaaaaagctggaccataacgggatgatatctttacagtaaatagtaatataaattgttctactctttgaccttttaatatttttgttttttcgtgcatttaacctgatagtcactatttgtttctttccactttttaaaagtttttttttctctctttctttttaaataggtttctggggagcaggtggtgtttgcttacatgagtaagttctttatggaggttgtgatttctgagattatggtgcacccattacccgagcagtatacgctgtacccagtgtgtagtcttatatccctgattccctcccaccatttcccacgagtccccaaagtccattgtatcattcttatgcctttgcatcctcatagcttagctcccactcatgagtgagaacatacgatgtttggtttttcattcctctgttacttcacttagaataatggtccccagttgcatccaggtggctgcaaatgccattattttattctgttttatggctgaatagtgttatatggtatatatacaccacaatttctttatccactcattgattgatgggcatttgggttg

SEQ ID NO: 36291 - DNA, 1037 bp, Homo sapiens
taaaaaattatattcacctgtatggatagtgtggctctggttcatttgtttcaactgtttttaatttttaaatagatttttaaaatttatggatgtaacacaattcatacatttttctttaaatggatatttttatttgttttgcttttaattttcactgacacaaacagaacatacagaagattcttctagagatgtgacgtatgtgtgagagtttcttttattttgtatacctagaagtagagtaccaagaagaaagggtctgcatgtcgttaattttattagatgttgctaaggtgcttcccaatatgtttgtaccaatttatactcctatcagtatggcaaaagagttttcatttatgtacacctttaccattcttactattttttttttttgccatcctggtaggtatggtttcaattatgttactagattagattatattttttgattactagatgatttaacatcttttcctgtgtgtattagctcttctgttttccacttctatgtattactgtttaaatttgcttcaatgtgggattatggattgatttttagtctcttttaataagtaggaggaaagccctttactataactgtctaatttcactacatagcacacagtagtacagctgatttggggcattaactctgcatctctcttctctgaaagtatttattttgtttctgagtccagcagtttttttgattctttctctttatatttttctgcattgctatgtgttggacgctggcatagtcttttaatgtatatatttactggttaatgttgacctttttttcataaagatgatatataatatatatataagtttatttgagactaaattgacttaggaaaaagacacaaatggaagaaccatagtttatattaaaatgtaaaacgtgtttatcaaaaagcatcataaacagaattttaaaattatttgccacatatttaagcagacattaatttatttaatatatagagtacatttgttctaagaaaaacaaactctctagtaaaaaaaaa

SEQ ID NO: 36292 - DNA, 1021 bp, Homo sapiens
ctacaagtttctagtggaaactatttctgtttacagcttgaggattgctgtatagttggaattttgggttagttttaatcaacggcattttatttaaaactattctgtaggccagtgtgaaattttctttcctacttgtactttatgaactgtttgaaatacactgataaactttgtggtgtgtgtatgtttacttacaaaggtatgttactagattgttagatgtcatctgtaaagaatactctgattttgaagttaaggggagtcaggattgacatacttgatattaatggtaatggcattcatttatggttttattcttgatgaatcctactgccaaatttgtttttattcaggtttatttctaaaagttggctttgtgccattgttctttgatatcttcagaaagtaaaaggaggacacactttttattgccatatacttgagtgaaagcccacaatttatggggagtttggggaacatttcttaatttcgtatgtcattgtcaatatcagaaaagatatattttggaggggttaggtagaatatgatttctttttctaattttcaactctatactgattctcttcatgtttggttgctctaacacagtgatttttgtttatcatggagtaagctaacaactttacaaattaaagtatattagaccacatttattttattaatcagtcagagttttgcttatgcattgaagacattgatatttccagtgtttcacaaatgtgggcagttgactactctatgccaggggctaccaaaatgaagattatagtcactgccctcagatggatagaacaaaagttaacaataatgcaaagagatagtcaattttgtgataaaatctacagaattctttgggagtaatatcaagagagtctaatatgacctgtcagtatggggacgatgatgggaataatcagggaaactttgcagaggataccctctgagtgagacttggtggatgggtgtgtcactgaatagaaggagtaagaagattcca

SEQ ID NO: 36293 - DNA, 1031 bp, Homo sapiens
gtgattagaaactaaaggaatagtttcaaagaagcagtggtcagtaatgtaaagtgctactgaaaaatcaagaaaaagaaggccctgagtatgcatagcatgtaaccacaacgaagctagagcagtttcaataaagtaatgggggcaaaatcatattaatattatggagggccaagaaaggaggtgaagtaatagaaacagagaatggggtgatatctggaaggggctcaaaggtaagattttttaatgctcagatgctaatggagtccatggagaagaggaggtagaccacacttggtaagtaaattatgctaaactgagacccagccagttatttctcctaggccataaatcacaggaatatcatagtgttttttgaaaactgccaagctatgtggatttcatgcttgttacatcatgatgaagcttggtatagccccttactctctccaaaagtcaatcagaactgtagacttactatttctcaatcaatcaaaaatatatacacaattaaattgaatctgatctttattaccttctgagagacacttgtgtttttaaatctgctggcagttcagtgttacacagattttcttagtgacggtttctatgaaaacactttaaaatgcaatttactgctgtgatcagtaatgggggaggctgtaaaatttccactgttctaaattctactccctttgctctgtcatgcctggactgtcatttttgtaaaccattgtcttcttgttggaattttctgctggagtgtacattgctgttgctagtgttttattcgatcactggcgatgagttctgttttttttttctgatatcgagcatttcaaactgttccctaatgagtctgcctctgtgctccagtgctgttaacttcaatagatttcctattgtgaggatatgcttccaaaaaataattgacttattttccttagtgactttccatttttatggaattttcattatttctaaaattgtggattttagtttacctacccagaacttctctgatacaaatt

SEQ ID NO: 36294 - DNA, 1096 bp, Homo sapiens
tctgttctggtaccagtcccatgctgttttggttactgtagccttgtagtatagtttgaagtcaggtagtgtgatgcctccagctttgttcttttggcttaggattgacttggcgatgcgggctcttttttggttccatatgaactttaaagtagttttttccaattctgtgaagaaaatcattggtagcttgatggggatggcattgaatctataaattaccttgggcagtatggccattttcacaatattgattctttctacccatgagcatggaatgttcttccatttgtttgtatcctcttttatttcattgagcagtggtttgtagttttccttgaagaggtccttcacatcccttgtaagttggattcctaggtattttattctctttgaagcaattgtgaatgggagttcactcatgatttggctctctgtttgtctgttattggtgtataagaatgcttgtgatttttgtacgttgattttgtatcctgagacttgctgaagttgcttatcagcttaaggagattttggattgagacgatggggttttctagatatacaatcatgtcgtctgcaaacagggacaatgtgacttcctcttttcctaattgaatgccctttatttccttctcctgcctaatttccctggccagaacttccaacactatgttgaataggagtggtgagagagggcatccctgtcttgtgcccattttcaaagggaatgcttccagtttttcccattcagtatgatattggctgtaggtttgtcatagaaagctcttattattttgagatacgtcccatcaatacctaatttattgagagtttttagcatgaagtgttgttgaattttgtcaaaggccttttctgcatctattgagataatcatgtggtttttgtctttggttctgtttatatgctggattacatttattgattagcgtatattgaaccagccttgcatcccagggatgaagcccacttgatcatggtggataagctttttgatgtgctgcttgattcggtttgccagtattttattgaggatttttgcatcattgttcatcaaggatattggtctaaaatt

SEQ ID NO: 36295 - DNA, 1033 bp, Homo sapiens
caggatatgcacacatatgcatgcataaacacacacacacagagttgcagacacactcacacagtgctaaacagatcacatcagcatttctgaatctgtagtttagatacactagtttgcaaccttttaaacattaataactgtcttggaaaaccacataagcattgatatttgttttataaaggcaattttttgattaagttttaaattttttgtcaagtgcagtggctaatggctataatctcagtgacctgggaggctgaggtaggaggatcaactgaacccaagaattggaggctatagtgagctgtgatcatgcccctgcactccagcctgggtgactgggcaagaccggaactctaaaaaaaaagttttttttaggtctttaggtgttaccttacttcttgagcatgaaaaatatttcgtattttctaagaaaataattttatagttactcagattgtttctgattttaagaatttatcccatgtgtagttatttttgcttttttgttacttgttttgggaatctgatttttttcttcattttgatttacttaattttgttggtttttgcccaccttaccctcctagaacctgtttatattttaccagtttttactcttgacctatctgctttcatctttcctaattccttctactcactttcactaatgctaaatgagccagtccacttaataagttcatctgtgtgtttaccttttagcaatagtctgactagcttttatgtttttatatgctattttctcattattgtatttttcctacatatttaataactgtactactgttttctttttgacttaggtatgttagaaaaataattttcaatttgcaagtgctattttttcccagttatactttattataaactagctttaatgtcttatggccatagaatatggactgtatactctttttttttttttttttttgagactgagtctcgctctgtcacccaggctgaagtgcactggtgtggtctcagctcactgcaacctctgcctcccagt

SEQ ID NO: 36296 - DNA, 1023 bp, Homo sapiens
tgcatctaggtccttcaagtgcactgagttggaaaatttgtgtatgtttgtgaatatacatacagatacctgtatctatatttttatatttcctcatgaaaaaccataagttagtaccgatatctcctgttgtaatgcaatatcatagggtacattccagtcttccacatttgtagttacttatcttactgtgaaaattctggctcccttgttctcatttgttcaatcttagaatacatgaaagctgccttcagaattgttaaatccgtgctaccacaaaaaccaaagttactaaatagagttcaatatttctttttaatttttggatgtaaattacatatgtgaaatgcacaaatcttatgtggtcagttcttttagttttgacatatgctctttttgagttttgactgtatactcttggtcccctgtagatcctgacttttccttattgtcctttactggctccccatgtctatgttcttctttagtgttgtttacaaagttctagttctctttgttgtcttgtgtgttactttgtgttacacttatttgaatgacagcctctgcaaactagagtcaagatctaatttaactcgtttttgtaactgtggggtctttcatcatcttaggtaaggtgcttaaaaggtgtttgaatgaaaaaaaatacacacagcaatattacttatgtcagtttataagttgtaagtagacactttatttgagaatcccaaataattaaaacatcagatttttataatgctagatgaacaatcttattctaaccagtacatttattatctttttcatttttatttttttacattttatcctctgtgaaattgagatatatctttagtcagtagttcacattattggtgtgagccagctatgagaaatcactggcacctttgtaggtagagtgaaagcaccagcatcataatgacttaagatttaatgaaatatggtatagttattttggcctgttctgccactgtatcataagatgatttggggcttttgtaa

SEQ ID NO: 36297 - DNA, 1032 bp, Homo sapiens
aaattgataaaactggaatattttaggacttacctgataaatttgaacatgttgctttttaaaaaatgttttcgaattaagttgagcttgttcacgtgttcgagttcttaatgaagcagttattttcacttattaaaaatgtaaatttttttgtctttctgttacgtaagcagtacatactcattgctgaaaattggaaatccatacataaataaagggcgggggctatttaaaagctcaggatcatattcgcaaagatagcttttaactactaggtaggtcctccagtctcacttgttggtaggcttctcacctctccaggccaacatgtgataacattgtagttttaattaaaagtaattctgcatcaggaatcagtgctcattttccatatcttattcgttttgtttttatttttgtttcgctttttgaaaattactttttcttttcctgtgcttctttgttggtgaaaagtcccattgactgactcattcttggtaaacatggggtgagactgtagattctcctgggttgcacatcctctcctcaccataagaggaaattttctccaagagtgaatttctccagtgtttttataagtctatgctccacacttcctttgttcttccatcccttttttactccgttcttctcacccagcctctgcagctaatatcatggtatctctcagtgaattctgttacctgaattgggaacagttacggcaggaactggcagccagggatggacatagttttggatgagccagctgtaacttttacggctgctcagtttgtatccctcctggtcagctggcgctggttcatgctggggctttcctgtctctgctatgcttagatagaagaggtagatagagactgagatgtgtgagtatcttccttcagacaggtggccattaaataccgctggggtatatgtactggaagttaaaggggctgctgatttagcacagagctaaatcagcattactttgtgtaaagtaatgacattttgaatattttttgggaaaac

SEQ ID NO: 36298 - DNA, 1046 bp, Homo sapiens
ttttctttatgtttagaacttgttctgtttgaaaaatttttgtttatcatttggttctgaagctacattcttatgaagctatcctctagaagcttaattgtcttgccttcaacatttaggtctataatctatctgaaatggattgctgtgaattgtgtgagggtagggatcaagatacattttggcttatatagatatccagcaccatttattgaaaagaccatactttcttccacagcaccacagtgtcatctttgtcattaatcatgaatgagactgcatttgtgtgtgggtctgtgtctacactctctattcacttttattggtctgtttgactcatctcacactgtcttaattattaacactacagttttataataggttttaatatctgatagtaaaagtcttccagtttgttctccttcccaaaattgcattggttactgttagtcctttgtaattctacataggtgtaggtcatcttttaaatttctaccaaaaaaaaaaaaattgaaggggattttgagtgggattgcattgaatctttggtttgatttgagcacaaataactacaattattgggccatctaatcgatgaacgtggtgtattttgtgtattaatgcaattgatttttgcattttagccttgtatccagtaactttgttaaatttatttattatttttagttatttgtggattctttatggatttcctatatatgagtaatggcatatatatgtcttcctttccaaagctttaaatctttccatctactttcttaccatgtacaatggctgtgtcctctagtataatgttgagtaggcgtggtgaaagcagacataattttctaagagagaaaacattcgttagtcataatgtttgctgtagaattttgtagattccctttatcagattatggaattttccttatattcctcatttacagagtgttttttcatgaccagatactaaattttattattttcttcttctaggacattgctttgtgttaggcctttatgtcttgtgcaatgattgaaccagt

SEQ ID NO: 36299 - DNA, 1049 bp, Homo sapiens
cttatctaaactgctctgggacattgccaagaaggaagtatttttatcttggctcataccaaaaactaattgaaatattttcaaagggtatactttattgttaatactaattctgtagcatgctatagatttctaaactttgaagttcaaaatggtttttattgtctaaataaaatcctttgttttatgtttgaggaaagtgagactcagaaatatttagatcgtagactattttgtcactcttattatttatactttcctgagctcatctgtatctgctggatatgaagttaatgccatatttccttctattcgtgactcatttcttttatggttacacacacacacgcgtgcacacacacacacacacaaacacacacagtcttcttcctagtaatgcttgtgagtaataatactcttagtgttagctaaaacatattgagtgcgtattatttgctgtaaattgcttaaagtactttatttaacttatttagttatctgaacattttctggtaggtcctatgattgttcccattgtagatgaggaaattgaggcacaaatagattaacttgcccaagatcactctctgtttggtgaagccaagatacattggctacaccaaattgaatacagttgaaaattgcttatctttaatataaacataaggatttagaaataatcatctattttgctgtaaaaatatattgcaccacaactagattacagtcacttatatttgccttatcagtatcattgttgtaaatgttccagtcgcaattttgtctttgcagtgaataagtgatagctaaatttataccattattggccagtcatggttgtaagtttttttttgtttgtttttgagatggagtctcgctctgtcacccaggctggaatgcagtggcgtgatctctgctcactgcaaggtcggcctcctgggttcacgccattctcctgcctcagcctcccgagtagctgggactacaggtgcctgccaccacacccagctaatttttttttgtatttttagtagagacggggtttactg

SEQ ID NO: 36300 - DNA, 1032 bp, Homo sapiens
tattagtattctagtacgtaagtatacttttaattgttaatgtgttccctcaatttaatattatattgattagctaatataatgttttgaatagtattgtttagatatttacattgcttagctgtggaaatagtttaaatattttttgtttactatatttctgtttttctccttacactaatttttttttttttttttttgagacagagtctcaccctgtcacccaggctggagtgcagtgatacagtctcggctcactgtaacctccacctcctgggttccagtgattcttgtgcctcagcctcctgagtagctgggactacacacacgcaccaccatgctggctaatttttgtatttttagtagagacaggatgtcgccatgtttgccaggctggtctcgaactccttacctcgggtgatctgcctgcctcggcctcccaaagtgctaggattacaggcatgagccaccacatctggcctccttacactaaatttctaaaagtaggaatcattggattgaaagacagactatttctaagttatagttttttctgattataaaattataaatgctagatataagaaatgtataaagtatgaaaaataattataatgctgccacctaacaataagtattgctaatattttggtaagtcatcaagttatttttctcttctttcttgccatcttttatagatgattttaatattcttttagtatttacatagaaaagcatagatgacttattatagtttaattgaaattattacttttgtgtttttttgtgttgtcatttatattttcttatatatttacccctctttgtgctcttcatttttccctgcaatctcatgtttccctctgatattattttctttctgcctgaagacttaacgtttctttcagtacaagtttgctggtaacccatacactcagtttttgtttctctgaaggcatttttatcattttctaaggatatttttgctggatatagatttttaggctggcagtatttttttgtttcctcacc

SEQ ID NO: 36301 - DNA, 1033 bp, Homo sapiens
acctcggcctcccaaagtactggaattacaggcatgagccaccgcaccggcatgccctccagtttttctctccccacacgagggagcacgctttttggtttccttagactggtgctaagcaacagttaaaagggtgatgccttttgttttctgttctctctctcctgatccacccagtgggggaaggctctgagaagagcaacatcattttgagagtggtgctaaaaccctgtaagcctgagtgttctgtcctcccaaagctgtgatacggctcagcctcctgacggtgacctacttggttttatttcttcttgctgtctcagaaaatattctaaagatgcttaatattattttacaaatacaggtataaataatatatatgtgtactcttctgacttcacacattacagatataaagtaaaattcctctggcatctgtgtctgtctccatccactcttcaggagaggaattcagatatatgtgcaagcatacgtgcaccacacggtcttacaactgtagaaaagtatagtattgtgtttgtgtcgattttcagcatagtttatcatgctatacaaatgctacatttagcttttttcttctgatgtttctctgccaagagagacagttacctcattcttctcatttgtgacacagcattccataacatgggtgtatgtgattttatttattcatttccctgttgaagggcatctagtatgtcttcccatttttttgttcctagtgccagtatgcagtgaacatgctggtgtgtgcctcctgggctcaccattatgtacatctcagctaggtacagtggggaggaactgctgtgcaatagagtatctgtctttaatattaaatatgtattactttcttggcttctaaggtgagtgtgccattttaaaagagagttttgggttgttttaaagagtttttggggtctggaagcctcttgtgctttatttcactcaaatagctcttgcaggatatcagatttcagttcagtgccctctgcccttaaaaacaaaaaca

SEQ ID NO: 36302 - DNA, 1050 bp, Homo sapiens
gccacaccctttgccctcctttggtcctctgcccctgaggctggcctcctcttcctcacaaacgaattctcctggatcaactccaaaaaagacatctgccttagctatggggtgcatagcaggaatttttagaggttttggtgtctcaactgatggtctgagttaaaaaggagattggattattaactgttccctgattcactttggcagctctattttcttgatttaattaattaattaatgtgtttacttgtagttttgtgttctgaaaagagaagcctttcagcataagcatacttgggttcaaacttggttgtgccactcgtaatctgaacaacttaacctctgtgagccctcagttttctcatctttaagatgtgtagaagaatcctgtatgggacacataggctaaaaaaaaaaagtttccttccttttcctttttgaacacaggagttttgtctgcttttcagatccccagtctagaaagtttccttcctataattttcctttctgctttccttctgctgacctaaaaactacatataaaagttagaaacactgatacaatttcaagataggacttcggaatcatgacataattattctccatgggatgtcagaaaagctgcaacactgcatgatgtagatattttcaacatccttttttattcataaaatgtgaataatggctacctctttctattcttctggaattgttagaataatagattaatggtattaatattaaatttattgtagaaatcagctttattcttatttcctcgactttgacttggaagtacaataatatttaactaagaagaacagactaacgaatgtctagtgagtaaatgaggatgtgaagaaagatagatgacttacctagctaattgtcatacaattagctttttgactcttcccggtttaaagttatgctttggtggttacaatgaggaggagttccttgacacaagcaggggtttattttgcagccttaacaggtgggtgaatgttaattttgcaacaaagatagacacctaagagacttac

SEQ ID NO: 36303 - DNA, 1050 bp, Homo sapiens
gactcttcatgatgaggatagagaaaaggtttttaaagtagacgtgtgaaggcagaagacaaagagagatcataatgtttgggaatggatttaatggagtacaatgggagcttgaagtgggggttgaagagtaagagaaagatgaaaaagtagccagagaagtaagcaggatccagattctaaagcaccttctaagaactgcacactactagatcttaaaagctacaagagtactgttgaaggtgttttagccatgaccaaaatatcttgaagacctttggattgtttggcaatatctattaaaatttaaaatgtacatgttctttcacttccaggaacttatcccacatagatgtgcacatatatatgcaaaaatatatatacaaggatgtcctatgacattgcatataatagactggaaatgattaaatgtccatcactagggtaccagtgaaataattatggtatattatggtgaaacaccttgtaacctttaaaaataagagggtagctctgtgtatactaatgtggaatgatctccaggatattttttatgtttcaagataatactacctgttaaaaataagcaaaacaaaaatatttctataacatacacacacagatatacttgtatatgcatggattatcccgataaattttaaaactgctgctgaggactgggatgaaaaggagacagacttttcagctgataccctattgcttctttttaattctatcatgtatatctattaataatatagataatatagataaataataggagtattactgatggtatcatgcaaaggggcaaaaccagagacagtgaaacttgtagtcaaattgatataaagtaatagtgttaagtatggagaagagcatggatttgtaagatactaagggagtagaatttgtagaacctggggactgattagataggaagagtgagataaaaatgttttctagatatattgtttggacactaggatgatgaagctgctatctagggaaataggaaatacagcagagaaggaaagaattggtgtggta

SEQ ID NO: 36304 - DNA, 1050 bp, Homo sapiens
ttattaatcccctctgatcctatctcctcatctatgaaatggagaaaatagggttattatgaagattagaaatagttcatgcaaagcactttgcatagtcatggcatttagtaggtgctcacaaagataatagaatataatggtcacaaaattatgtaattgtactaagtaaagataattcagaaattaggtactacataaatgtaatgtgtcagcctgcattagagttacttaacttttttaaaaaattgtcattcttatatactttgtaaagccttttttaatcctgttctttgtttccatatctattctctttcttttaaccaatcatcttaattttcttcctttaatttctcatgtttactttcataatcagttgtgcctcttgcttctctgccagccccttctatcagcacgtatgaaaacaccttgtatttttttctctcaaaccatcacagttgtttacactgtgttctagaaaagaaaatgttcaccattagaatatatttctcctacagattgaaaaaaattagaagttgattactgttttgaaaattgggctaattccagatgttttaaataacatggcttttgttttatttaagtttatttttatgttttagggaggttttacataaatggagtcctaaacaaataggagaacaccttctactgaaatcgtaagtatcaaaaaatggcatttttattgggcattttcactaatttttatagtattagaactggaaacaaatcttattaaataactgtagagaaggaaattagagcagtgaaatgttggtgggactataacttcaaaggacaaagtaacacagagtttaggaataaatcctgaaatatatattatctttaaaataaattcctaatttgaaaggctagaatcacagactaattttgtgtatgttttcttaggaagttagcataggtcttcaatttatttaacccagattttcaaagaaagtataactattttattgttaatcagagatgcaaatgtatttgtatggtgataagcaaacccaaaaaacctta

SEQ ID NO: 36305 - DNA, 1150 bp, Homo sapiens
atgatcgtaggcagaagcaaaattttattataaaatctaaaacaaaactttatagagttgaatctattccatctgacttcaatatttgccaaacgtttattttacctcctagattgatgttggtatagtatccttaatacagtgtagtatattaatgtccttaatacaatcaggaggtttttacctttaagcaaataaattatgtcattattgaaaaagacttaagggatgattagacttggcaatctgtaagcaggagtataaatgttttaaattgcattgtccctatgtaactatcttaatggctatatatatgtattttataaagccatttatgtatacacatgtaacttggaatttccttcatccctacacattttctacacttacatcaccttattgcataaaacaaagtcacgcgctttctgcttgaacatcaaaatatcaaaaaccaaggtacccaaaagatacaagtcagagacaacatccttgtccatatccaaacccagtgtttcagtgctagcaacttaatttctcatacatttatagagtttggtttgctttgctagttgtgtgaatcattgggctgtttttagagccactgttaagagagaatataaaataatcatgacaattactactgtttccacatttacaaattgtgtacttaaatgaacctcatttcccttttatttctgaatggcttgtctgagaggaaacaaaattaaaattcatctgggaatttgtgcctcttgtctagtatatagtcaccactaaataatggcttccgtttttattttctttcaggttttgctttaaattttgttttccaaaatagatgtacgtggagggaaaagcaattattcttatcaccttttatttaaacttctttagatgaatactgaagaaaaatccaaaccttaaaggaaatgtgcccttgtattttatgggtgaggggaaaaagtacatttgtacatttcaacatataataagcaaaaaaattactaatcagtttaataaaaacattttgtctattcctaaatgtaatttggtgggttaagcactttgtgtagtaaaatgatatgtgtctgctctatcattagacattttaaagtttcatgtcttcacgtgaataatcacagttgtatca

SEQ ID NO: 36306 - DNA, 1121 bp, Homo sapiens
tgaaaatagttagttacataaattcattttattgtagaataattataagactgataggctgaaccatacacaaataaggttgatcttgttttcctttttggagaaagagaatacaaattaacattaaaattgaaatgtagaaagtaaaatatgaataattttttacaaccactccaaattagttgaaacaaaatcttgaacggtcacgcacttaaatttaagctagccaaatatgttgcactgaattttgaaaagaatgagtgagataactgtaagatacgctcgttcccttttaaaaattgttatttttctttaacatgggtgccaaatcaaatatccatgggctatacttcttaagataataacagctcaaaataatattttttaattcagtagaactaatagcattatggaaaagattctattaaatgttccacaggcccactggtcctcttatataagccaaattttggccatggagcttgtgatacacttgccttacattgtagggtttcttaatttgagtcaagtacactgaaagcaattaaaaactggtaaatattaatttactatgtaaagtgaacttacgaattaacttactaaatacatatatgtagaccttcccgaaatgccattctcaattttattttatgggctccaaaaaaaattatctgggttaataaggttatctattaaagcccccagaatctcagcactagatgtcataaatatgaaatagtaaaaacaaggtcacttgaaaatgggtatttaataccttagctggtgttttcagaagcatacagaactggaaaggtaagaacttgcttactattgcagatatacctgaccactcacaactgtctttttagcagcagctttgttaaaactgcacaaagcattcactttattgattgagtacaaatgctttagtgtttctacctaagtattagtacatctgttcaggaaatggaaaaaaaaaatgctgcttaaatttgttttatcagctgaggttgtggaggatttttgtccactgatcttttgcaacagaaaagcatactttgtcagcttctaataagatagccaggtttgaattatttgcaaaatttatataagcaaataag

SEQ ID NO: 36307 - DNA, 1022 bp, Homo sapiens
tgtgatacagagctgtgatggcagggaaagttcaatatgtattcactaatgaaggtttcctggtacacaaggtacattgaggaaatccatgtttttccatctcacgtaatgttatgtgtatgtgactttgtggtattgtgtttggggttcactgacttttttttttaaccagtgtttatatcttattgctactaatgaactcagatagatttggtggaagaaggcagaaaataattatgagtccacacttgtgcgtctctgtacattttctttatgcttgtgttacttctggagtcgtgttagcataacagaaagcatctgggctagggcagagttatgggatgccaaggcatagtcatagttacagggtgccaagacactgtcgtattcatggcagctctgggaattacccctaagtctgtcgtcatacactttccaagaatggatctagttggagaagtattttaaacctcgtcagagtcacttgtcttggcttcttcagctgacttgagtggggactctgattgttggctgctgtagtatcatccgtgcctagagatacagggctcttgctgtaaataggatggcataaccataaaccatggggtgagtaccttcttatacatttttgtttagtatggagaagtgtggaggaacacaaagaaaactgcattcttccttgggcttttatgatatgaccagcattttcttacatattttctatagatcctttctcctaaccacctttaaatttaaacatacttttggggaacttgtggttgctggtagagttagtgtaaaaaatatcctatgagtcttataggtcccaaaaggacttacacgtaatactcagtttaagaactctacaatgatattcttagcagtaagctggtaactaacatagtaataataatactacaaaacaagttaatcataatgtaatgttaaccaaaagaacttgtaagaaaaactttgactctattatttgtgactcactacatttttcctggagaaattatttt

SEQ ID NO: 36308 - DNA, 1050 bp, Homo sapiens
aaatgaacaaatgtacatggtgcatttgctaaaatgcttagctacaattttatgatgttgactttattccattttgtgaaaaacagaaaagattagctactgagaggttattgagtatattatatacaggcttttctttcatttttcaatagtaagtgagacaaaaatttccattttaattttctaatttgatattcatatatgcacatggatatttcttcatctgagataagactgtcattatcagcttcatttggttacataatgacaagtcaactcactatttaaaccattcccaaataaatttcaattatttaaattataaattatctgtaatgttatatataagcattttcttttcacctggaaaaagcatttcagaaatctttttgtgtgcagaaataaaactctggtaaaactaccatagtttaagatctgaatattgaatctggtttatgaaaaatagaagctcagaataaattatcattgtcttgattattcccgcacatggatgtggaagtgactcaaattttactcttaaaaggtctgttttggaacttgagggcaagggcctttgttctgccttctagggtataaccagctctgctcctgcttcattaatgtctataagtttgttacaaagacagaaactgacaggaaatgaatttagggtagggggcactgacacccaaagggaagtcactgtggacaagaccctctgggaggctggcagagattgctgccacgtggccatggcagtgtgcgctgtgagatgatcccagatgtctgcacagaatcccttcctggaggtggagagggttgacacccttgtaaaacacagggaacagacctgctaacctcatttaatgccttcacactctgtaatgccagaaactaatattaatatcaaaatacaagttttaaagtgtgtcagagatgatgttcatgcagaatgtgaagaaattaacatattgagaaggaaactgaagaaccaaggggtcagtttctctcagcattcacagaaatcttcctgcacatcccatctactcc

SEQ ID NO: 36309 - DNA, 1044 bp, Homo sapiens
gttacagttacttcagttttggtaggagatcataaattccagcagccctgaaaggatggagatagtcaatgttactttgcaaccaatatagtttttagatgttaaaaaataaattatgaattttaaaaggctggccatgaaactcagtcgtgttttttttctttaagtttatgatacacaattttttgtgtatctcagtggcttctagactgcatgtaccatttcatatgttttataatatcactgcttctattgatgtttaagggaccaaatgattttataaactgcttcttaatggtgagaatctaggatgtgttataaggatttattggtatataaatataaaaactgtgatcctggaaaatttttaaattcagtactgtcataagtaatgtttgatcatttctcaggcatgggtaataattatttaaaaatttcaggatgcagtgtaacttggagaaagaagaaaagttagtatttggtaaaactatgccattgtagaatttgaagaatcaacttattctgttactttatgtttcagaagctgtaataatgtttttagggcattcctctgtatgcgttagttctcttaactgagattataatgtccataaaggcaagggttttccttttgctgccctcctacaggaataattctagtgctttgcacaatgctcagtgaagaaatgcttggtagtgttagagtcactgcatagccctggacacgtgggagtgcctacctttgtgttggaaatggacattgactcaaatccctgtaaatgttgcatttcacagatttatgcaatagtcagtttcattatgaaattaggagaatcaggcttgtttgttttttttacagtgcagcttaaatagttcaaaataatttgggaaaagtcactcacaattatagaaacctttatcttaatggaagaaataaaagacaacatatatactacattatattataaacaaagagcctgttaggttcatgtgaataaactaatacttaaaatttgtagctaaatataaaaacatttacggagt

SEQ ID NO: 36310 - DNA, 1030 bp, Homo sapiens
ttaaaaaaagaaaaataaatctctcagcaaagtaagaaagaaagggaattttcttaatttgacaaaccacatctatgaaaaaactacagctgatgtcatttttattgatgaaaaactgaatgctttcactttaagatcaggaataaggcaaggatatctgctcccactacttcaatagaatattatatttgaggtccaagctagtgcaattggaagagaaaaaggtaaagtttgaagtaaaactatttattcagataaaacatattttttttggtagaagtcctcagaattctactccccaccacccctacaaaaaaacaaacaaataaaaaactctagaagactagtaagttaatttggcaaggttttaagataaatgtcaccatacaaaaataagttgtatttatatatattagaagcaaacacccataaaagaaaattctacaatattattataattacatcaagaaataaaaaacaatgaactgtaactttaacaaaagacataaaagacttttactaggaaaacttcaaaatattgctgagaaataaaaggaaacctaaatggagtgatacacactgtaaatggattggaggactcaacattaagatgtcagttctctccaaattgatctatagattcaatataatcctaattaaaatcctagcaggatctttgtttttctttttttgttgttgttgttgtttggttttttgttgttgttgtttggtaaacatcagtgaattgattctaagtgttacaaggaaaagtagaataaccagaataccccaagttataattaattataagtaatctagagatgatttaaagtataagggggaatgtgcatagattatatgcaaatactataccattttatataagggacttgagcatccatggagtttggtgtcaatagtggatctgagaacaccaatcccccatagataactactgtaaaactacagaaatcagagtagtgaggcgttggcataacaatagagagaatagagtcctggcacagatcca

SEQ ID NO: 36311 - DNA, 1023 bp, Homo sapiens
atgcattaaattacatatcagccagcatcataaagtctgcaatttactttcaaatggttaaacaacaacaaaaaaaatggtttgtgtatgcacaggttgggggagagaggaaaatcaaatatggcaaaactaaacaattattgtagtatattattattcattctggtatttcaacatttcagatacgtgagctttctcataatgagaagtctgtggagaaacataattcaacattgagaccctgttcgcataattgagcatttcttctggctattcagaaagcatttcaagatcttgcactctctaaatgttatgacaaacatcagtgactcactgttataaatgtattgaagtgccagaaaatagaaaatgataactgaaccactttttattgtattgaaaaaaccctggatatttcctgtaacaatatccatttgtctcattgtgccattaatgaggataaagctttcatggtgttaactgtaaacaagagaggaaaatggattgaagtgccttttgggttgtttgtttcctttttttccacttagtattagtgattcttgtactgaagaagtcatcaattccctagacatgacattcatcctctcctcttgtgtggggatggcctaagtgccatttttgttccccatgcatgctacattatcttgtatatattgtctaatttgcttgtgattatcggtggaaatttaactttgtagtttgtaaagcatgaatcaagggtgaaggaaacaaggctaacttttttctttcatgcataagcccttcagtatatccactgtatgtgatatttgaagtagagtagaaagattttattaagttactttgggtctttaagggattttgacagacatggctagtggggacaaccagtgttttataagatgtaacctttttattgttgttaaatgatgaacttaaaactatatcaaaggaaaaaaataaattcgagaaagtgtcaaaatttgaacaaattaagcagttggaaacttcaaactggactga

SEQ ID NO: 36312 - DNA, 1024 bp, Homo sapiens
aaagcccttgttctgacagtacccgagtcttggtggattcatacaatttggtggtcagggagcagtattgacaggtgatttcgcaagcactagttttggagcattgttttcatagtccgtcaaatgagatatttgtactgatgatttgtcaagtctgcatgaatgattacattctctgacaccatctgcatatcgcatccaaagctctgagctcatgcttctcctagagccagctagttcttccttagcatttgcaaatctattcctggtaaacatgctgcaaatcaacactgttccaccccaggtaacatctgaggaaagcaaatagctagggcagagcaacataacacccatccttcctcagcagtggaaggcacctcagttagcactttctgcaggaaggaaatgtctgtggagtgttcctttccatatgtcctaagatcaaaccctggaatctgagaaaatccttgtgatgtgaatgtgtcatcctataaaattaagtataccaatcaggctgcaagaaagtgagtaaagtgcatgccaagtttgcctgtggtagcataaatgcgtcttagctgtttcctgaagataggagctggaactcttatggggaaagctgactgagcgcacacatttcacccttggcctactttgtttatcttgagaccactgaagcatttagtctagaccgtacagtgttttcagtgtgtcctgttcattctttcccaagcatctgttttttctcaagccccatgtgactcaccttacatggccttctgctgggatccaagaactcctgcgaatgtcctatcctgtgcttgggtcattgaagacatctgttaaagcctggggcctgtcctttgaggtgacttctcaagcaatatgaagttgaattttctttctggacagggaatttaaggcctttgcatatgactttatatgggattttagaattcagtgaagggaacggccagggagctcttgcctttggaactcctactacaggtctgccattctgggaact

SEQ ID NO: 36313 - DNA, 1027 bp, Homo sapiens
aaacccaaaccggcttcacttccaagaagtgcagccttggaaaaaggaggaggagatcatctccctgcctcgcgctctctctccaagagtgtgtgtgtctctctctttctctaagagtctctctctctccctttccctctctctcccgctagggtgctagtgaacaatgagctaattctgatggagctggcgcggagccagcgccccagccttgctgccactgtgcagccgcctaggagccagactgcttactcggcaggaatcggcggctctgggccccgtcggcgagcggccaacaggcgcgcgcgccccgacaccccgcacccgcgccccgggcgccccgctcgccgcgccgtccccactgcaccgcgcggcgccccggggagacaaagcggacccgcagctctgcgccccggccccgccccgggagcacggcgcgcgcaaatccccggccttcctccccgcccccggccagcctctccgcctcgacgtgcggttgcttttcagacaaataaggaggtggaggaggcggtttgggggcgcgccaagcgtgaaggcggccagggtgctgcacagcccggcggcccgccagggccgtggggagaggcggcgcggcccgtactgtaataataaacctgcagcagagggcatctgaggaaaagaggacggcgacgggcggcagccgccttccttttatgtgcctgtcctgagcgaagcagaaaatggtgcctgcggcggcgcggagccgcgctcagacacacaaagagtccgcgaaggatgcatttgcacacggcctcgggtcggaccctgcccctcagctgggtacgcgcgccccactcccttccgcggggaagcccggggcggggagcgcccctgaaggccgggcccagaggtcctgtggctgcgcgtgcacacacacacgtgcacacagtcacacgcgcacaaccagccagagctgcggcctggcgtgatcggcccaagacatactcccctggtgcttccttctccttccctatacgctccccca

SEQ ID NO: 36314 - DNA, 1036 bp, Homo sapiens
catagtactggcattctgcatctctttaagatttgtttttatgtgtagtaattgagttttttaaaagcttgtgaaatcgcaggcatattaccaagttcttgattaaaatgtaatacaaaaatatttgctgtcgaattgagtactttattttttctcttaggatgtccttggtgaggattttgaaaatttgatcttcacaagagttgcctggatcatttgaaatttctgggagtctgaggagtactgacataattacctgctggagtctgtaaatacacatttaagacagtgaggatgtgaataaatatattaatgcactttggcatttgtgttttaagtgattaactgccagaaacagctatttctaaaaagttataagggaggaggggttcttttttgatcagtattcactgctgtcaccataattaatagccttaaaatagcttgtgtttggcccaaagagaaatgtactttcttccagtgactcaaaaatcgtggctagaactagactgatttctagtgacaggtgtgctttactgcactcaatgcgtatttttcctccaactaaattgtacatttaatgttgccatatcttctgcctttgctttgcaggaaacgacaaataatgtatagaggtattcaaaaaatttattgaaagcactgtactaggagctgagaacacgatgatgagcacaacacagttcttccctttggaaacatagataagtggagggaatgtcatcacaaatgtaaaacttcactatgagatgagttccgtgataggattttcttagggaaacctgagaaagagttgagactaaaggtatgtgtcatatttttcacaaggcaaaactgggggaatgacatatacagaggcttgggctagaaaaaagataccgttagtccacttacttttgagacagttttggctgctttccctcttcagtgccctgttttagaactgagtccttactgaggcttgtaagatggctattatgggaggtgagagtgttacaaaatgaggctgaagaggtag

SEQ ID NO: 36315 - DNA, 1880 bp, Homo sapiens
atattggtcagtttttatgccagttggtgctctctgctgggtctctagtgttgtgttccttttcttctcatttcctcaggtttttatagcaaataacttaatctcttcctttgctgagaaaaatctcaaccatctgaggtatatttccacttcacttttttcatctcagtgtcatctctttatatatatatatctcagaggaagaaatgaccttctttcttttcaagagcaaccccctccctccagatgtgtccatgtaccctttcccatctttctttctctagaaactgtccattttcacttcctgtccaccttcttcagcctctccctctctagcctacatagatgcttgtatcttctgccatataagtgtgtgtgctgttcaactctaggaggacgttctaaagcttgagtctgctatgccactgtatttctattcttttctttaaagacttattctttcatcccaggaagctgttatagtaggaagaacattgacttttgagcaagatagaacttttgatctgggtttttgaagtcttttaaaaccactttagtagctgtgtaactgtgggtatgttactattcagatttcattctgtatctataaaatatgttatacttagctcacagggtggtggttaaagaaattaatacatgttaaatgtccatccaagtgtttggtacattgtagagttcttactaaatgcttctgtgctttgcactcgtactgcctttaccatttcaccactgaaactactgttttaaaagttatctgtgacctccgaatcaccaaatccaatgacgtttcctctgtcatccttggtttccttagacccaggggtccccaaaccccaggctgcagacaggtatcagtccttggcttgtttggtgttaggaactgggcagcatagcaggaggtgagcagcaggggagcaagcattaccacctgagctccacctcctggcagatcagtggcggcattagattctcatagtagtgccaaccttgttttgaactgcacatgcaagggatcagggttgcatgttctttatgagaatctaactaatgcctgatgatctgaggtggaacattttcatcctgaaaccatcccccacccaactcctgtcccatggaaaaattgtcttccacaaaaccattccctggtgccaaaaaggttggggactgctgccttagatcagttgtgaaatatactgtcttctgtagtcataaaacgatctagatttcttggcttttctgcattatacttcctgattctgtatttctcaggaagtttcttcacattttccttttatcagttaggctgcaaatgggatttaaaaatgaaagataagctgggccatggtgtctcacacctgtaatcccagcagttttggaaggcccaagtgggaggattgcttgaggggcggagttcaaggctgcagtgagctatgattgggccactgcacttcagtctgggtgacagaacgagaccccatctcaaaaaaacaaaaaaacccaaagagatgttttggctcttgcaattggcaagtacatagatagaagtggcttgaagagtgctttgtcatgtcatcagggctaagctcccatttatctgctgttctctcaacattgtccttgtgtttgggctttagacttcccttctaataaaaaaaaaattgccaccaatgatgttcatattatagccccttcatttatttccaaagaaagagagaaggccacttctcctagccttttcccaagaatcctaagctctagtttgattaaacaaacatagatcatgctgccaaacctgtaacaatatctttgtctagagggatggaattatcctaagtggcttagccagtggagtgaatctt

SEQ ID NO: 36316 - DNA, 1039 bp, Homo sapiens
ttgggaatttaagcatcacctggttcgatttaaatgcaatgtagaatttgcattaaaatactacattaaagcctcagatttgtagtagctaacagcacttctatgtatgtgtcagggactgctctaaatacttcatatatattaactcctctattctgtacttctgttcccgttttatacagcaggaaattgaaacactgagaggttaagtaactaaagttacagagctagagtgacaggagtaaagcttcaactcaggcaacccagacttccagagttctgatctccactactaagctgctagcatagcttttctggtaactatttttaattcaaatataattcgagtgatctatctaacaagtcatcactctgacaactcagtgacttgtaatgtaaaattattcattgtaattcatttaatattattgtttctctgtgctgcaaaaatcatagcaatcgagatgtaatttattactctccctcccacctccggcatcttgtgctaatccttctgccctgcggacctcccccgactctttactatgcgtgtcaactgccatcaacttccttgcttgctggggactggggccgcgagggcatacccccgaggggtacggggctagggctaggcaggctgtgcggttgggcggggccctgtgccccactgcggagtgcgggtcgggaagcggagagagaagcagctgtgtaatccgctggatgcggaccagggcgctccccattcccgtcgggagcccgccgattggctgggtgtgggcgcacgtgaccgacatgtggctgtattggtgcagcccgccagggtgtcactggagacagaatggaggtgctgccggactcggaaatggggtaggtgctggagccaccatggccaggcttgctgcggggggaggggggaaggtggttttccctcgcactgtcttaaaccgatggcctttccttggcacagggtccactgcagcatgccaaacgaggaggcaggggcgtcgtccccccgccccccactgcagcactggagatg

SEQ ID NO: 36317 - DNA, 1025 bp, Homo sapiens
aaactaatctattggtacaatatagttaactacatttatatggttttaattataaaggctttgtacaatattttaatatgttgttggtttactccctgctcttctttcatattttcaattttttaaatgtctagctgcagaaaataaacaaaagctttatatagtatttttactgggactgtaaaatttataagttagcttagggagaaatggcatttttatgttgctgaatcttggtataccagaataagaaacgtctttccatttgttgaagtctacttttctatctttctcatatatgttttggactctttttgtagtttatgcccagatatttgcattttttattgtaaatgggatcttttctttcatttatcttctgtctggtttctctcccctataaatgaatgatttctgtatattttgtactatactgtattgccaaattatattattataataatatttcatcgatgcttttgtatattccaggtatataattgtgttatctgtgaataatgttccctttctaatttttttctaattttattcattaatttgtgttgactaatattatgactaatagaatggtaccctgactgtaggactatatccagtgtttccacattaagtatgctgttggccttggggttgatagatcatgttaaagaaatgttcttttttattcagtattttcaacaagaatgggtattaaatttgtaaagtgtcttttcctcatctttggcatgaacatatgattttttcccatatctattatgttaaatgatataattaattttctaatagtgactttttcattgtaaattatatttttcatctcttttgggatcagttctgatagattatatcttctagtaaattattttgggttttcaaatttgtttgcatagagttgagcagagtcatcttttatgattcttttgctttcctgccttcttattcatattttcctcatttcatctaaaaatgctggaaaatatatctttgtttttccatgaaaacaa

SEQ ID NO: 36318 - DNA, 1114 bp, Homo sapiens
gatgaacctccagaacatgctaagtaaaataagccagagatataagtccatttatatcaaatgtccagaaaaggcaaaatttctaaagacaaaaagtacattagtggttgtctgactgtaagtggaaatgaggattaactgtaaatggacagcaggaattttattggaatgatgaaaatgttctaaaactggattacagctgtgcttgataaatctaaaagtcatttaattgaacacttaaaatggatggattttgtgatatttaaatacctcaccaaaattttttttcaagttctatcacctagagtagaaaaccttggagaagttgtaaagcaactatggaaatgaggaaactagttagaattaatctttcataatagtgaacaaccacttcttttgtcttcagtgtatcgaagcgtgcaggcaggcctgtagcctaggatcagtgaaagaataaaaaaaagtaattaggaaagaggagggaggaaagaaaatgaagatagtaaatgttaaatggtagtttgggttggaattgcctgggttggaattccagctctgactctgccatttactagatatgtgactgaaaacaagttacttatattctctgtgcctccatctctttatctataaaatggggataatggccgggcactgtggctcatgcctgtaatcccagcactttgggaaactgaggtgggcagatcacctgaggtcaggagttcaagaccaacctaaccaacatggtgaaaccctgtctctactaaaaatacaaaacataaccagcatggtggtgggcgcctgtaatcccagctacttgggaggctgaggcatgagaatcgtttgagccgagattgcgccattgcactccagcctgggtgacagggcgagactctgtctcaaaaaaaaaaaaaaaaaaaaaggcactttaatattactcaacatattcaaaacataattaatgatctgttcctcctaagccctctttactaccccaccttgcagcaaaaaaccttcatcctccctcagtattacctatctctgtgaggagtagcaccatcattattgaattgtgtgagctaaggaatgtaggagtaatactccacaccagacc

SEQ ID NO: 36319 - DNA, 1038 bp, Homo sapiens
ctgttatcaatagttatctctgagtgttgggatttttgtgggttttacttattcttttgtgtgtcgttttattttttgtaatgaacatgtattactataatttataacacccaaaacccattttcattttgggaaaatagaagaaagcactgtcttgatttccgttgtatggtagtttaggttgccatacttcagagtcctaccatgacatacatcatgtcatttatgtcagtatagggatggcagaggaaaagatctattgaaaatagtaaatcagggcccggtattcattcctcctttaagtgatgaactctgatagtgctgtgaattcagaggtaaacataagtatgtttgtttagcagtagcaatcatagacttgcccaccatattggtgtttgtatgacactaatgctgctaatactatctggttactttcagtcactgttttaaaacaatattgcagctattcccagatcctgatgtagatgtgtgacctgtatctgtgggactgtgatttgttattccaaaagtcctttcatctaaataggatctatacacatgatcgcctcttggggtttattagtttgttttgttttattatttgctcaaaagacaaaagccaccaacactagttgaaaatgaaaatcagtctctgactttctcaggatcacagtagcatgctctgccaaagttctgtcctagagtaattctcttcaccaccacgtgggaatgtattctaccgcttctctcacctggtttcctgcccacaatcattctctttgaaaaatccttcattggcttcccttgattcttagaaaaatgataaccatttattgtgacccaggtaacctggcccctacctatcttgtcagctttatgtcacatcttgctctcacacctccacactggccttctctcagtacctcatatttactgggccttctcctaccacagcctgtgcacatctatacctgttccatgtagtgtttgtttcatcccattttgctcagttaacaccagttcatgtgtgtctgagct

SEQ ID NO: 36320 - DNA, 1090 bp, Homo sapiens
ttttgttctggaagccatatttgatagtatactttgtcttcactggtcttattttgggaggcactcttgatggttaggaaaaaaatagtaaagccaagtatgtttgtacagtatgttttacatgtatttaaagtagcatcccatcccaacttcctttaattattgcttgtcttaaaataatgaacactacagatagaaaatatgatatattgctgttatcaatcatttctagattataaactgactaaacttacatcagggaaaaattggtatttatgcaaaaaaaaatgtttttgtccttgtgagtccatctaacatcataattaatcatgtggctgtgaaattcacagtaatatggttcccgatgaacaagtttacccagcctgctttgctttactgcatgaatgaaactgatggttcaatttcagaagtaatgattaacagttatgtggtcacatgatgtgcatagagatagctacagtgtaataatttacactattttgtgctccaaacaaaacaaaaatctgtgtaactgtaaaacattgaatgaaactattttacctgaactagattttatctgaaagtaggtagaatttttgctatgctgtaatttgttgtatattctggtatttgaggtgagatggctgctcttttattaatgagacatgaattgtgtctcaacagaaactaaatgaacatttcagaataaattattgctgtatgtaaactgttactgaaattggtatttgtttgaagggtcttgtttcacatttgtattaataattgtttaaaatgcctcttttaaaagcttatataaatttttttcttcagcttctatgcattaagagtaaaattcctcttactgtaataaaaacaattgaagaagactgttgccacttaaccattccatgcgttggcacttatctattcctgaaatttcttttatgtgattagctcatcttgatttttaatatttttccacttaaacttttttttcttactccactggagctcagtaaaagtaaattcatgtaatagcaatgcaagcagcctagcacagactaagcattgagcataataggcccacata

SEQ ID NO: 36321 - DNA, 1026 bp, Homo sapiens
ctatatatactatgtttttgcctatgtatatatacttgatatggtttggctgctacccaacccaaaatctcatcttgaattataatccccaaatccctatgtgttaagggtgggaccaggtggagataattggatcatgggggcaatttcccctgtgctgttcttgagataatgagtgactctcaggagatctgttggttttataagtgcctggcgtttcccctgcttgcagtcactccatcttgctgccctgtgaaggtgcctgcttctccttgccttctgccatgattgtaagtttcctgaggccttcccagcaatgcggaactgtgagtcagttaaacctgtttcctttataattaatcagttttggatatttcttcatagcagtgtgagaatggattaatacatacctatgataaagtttataaattggacacagtaacagattaacaataaaatagaacaattataataatatactataataaaatgtatgtggaaattgtcagtctctctcaaaatattgtgctatactcacctgttttgggaccaaggtaactgaaaccacagaagtgaaaccacagatgagggatgactgcatagctttttcagtcctgacagccaaggcagctaaggaagaaagtagttgagaatgcatactgggtcaggtacagtggctcacacctataatcgcggcacattgggaggctgaggcaggaggatcactgaagtccaggaagtcgggaccaacctgggcaacatagtgagactgtctctacaaaaaaaagaattagctgggcatggtggcacatgcctatagtcttagctacttgggaggctgaggtgggaggactgcttgagccctggaggtgaggctgcagtgagccgtgatcatgctattccactcacctcagcagagctggaccctgtctcaaaaaaaaaaacgtactgtggtagccaactgaaaagatttgtcacagaaagatggttgaaatctggaaatggtttacttttggggcaataagg

SEQ ID NO: 36322 - DNA, 1068 bp, Homo sapiens
cagtaacatacataactcactcctaggaatgtattttgcttcaggatttttaaattcaaataaggatggcagtgcccattttaaggaggatttcagctataactgaggacaatcaccagggcgttaagggggctttagtgttttggctgcatctgacctcattgaaggaatttcttgggagtcgggggtgtttgagtatatgtgtgtgtgtgtaactatcatgtgggttttaaaaatccttttttacagtggtatccacaaaatacttctctgcttataaatgttattgtagaaatctttattctgtgtaggtagcctatttaattgggttccactgaacctcatgggacttttaaaagaagggctatttaaggaattcacttggtagtactttgctttagcttttaaatggcttgattttaaaggagaaattctatttattaatgaaagtgtcacccttttggtgctaagcaggagaattcacaattaaagcagtgtgtatagaattatgatattcagaatcctgcatcttttaatgtgacaaatttttgaatcctgtgacttttgctttttaatgcattatatgattgtgtttggaagcttttactgttcttttcagaaatacggctgctttgcttgggtctcttcgagccatatttatagttggtcccagcattccagacttctggtaaattgttaaaggagtgaaaatgtagtttgcctggcagatgaataattttcactcatttattgtcttctggaaaccatttaacttttactgttttttatttttttggtatgtgtttttttttttctttttaagtgcatactttggccagtcttcctggtgcctgtagagttggatttttcagctctcaatactgaagcaaaagagattatagttaccagaagtatggcctctaatggtgttgagccttttcaagaaccaacaaattatctttgtgattacagtagtttaactatggttaaatgttactgctgttgcgctgctttatttaatgcactgtggaacaaaatataagggtactgttggggtgtgattatgat

SEQ ID NO: 36323 - DNA, 1024 bp, Homo sapiens
cactcctgttgcccaggctggagtgcaatggtgcaatttcggctcaccgcaacctacgcctcccgggttcaagtgattctcctgcctcagcctcccaagtagctgggattacaggcatgcgccaccacgccctgctaattctgtctttttagtagagacggggtttctccatgttggtcagggtggtctctcttggctttttatctttatttttgtaccagtggaccttcctgctccctgagactgttttgattgacatcttttgtgtttctatattttccgaggcagtattttctttgtatgttaatcatagttatagtaaagtcagactcattaacttttcttcctagtaattttgacttggattattttctagcctgggggatggggttcatatgtgttgttgtaactttagattactaaacaaaacaaactgtttttttgtttgaaggtatcctttacatacctgtctgtaggtaagcaagtgttagtaaaaacaattttgtcaaacagtactcctgacagcttggtaaagtctaggtagagtttctgattttgtattatgtcctaagacttgaaagtgcatttgtctagttgccaaaagttctaaaaatgagatggtgggctttctcagcatctttttgcttcctagaattgagttgctcttgaagtctgtactcctgtgtcagaaagatggcagactgcaaatgggcagtacaggctttgccccatgctttcaaagtaggattctggattgcagtttcaaaaaaatatgatagattattgttatagaatcaaagtgtcctgaagggagaagaatagctatagttgctgggcaaagagtgtaagaaagaaactttagagcatttatcaatacttgagtgctttattatgttccaggctagaaatgtgatcattgcatggcctaagtgtagtcattcatatatatatgaatatctatatctatatctatacatatatatgtatcgccattatcgagtgttttctagccctggataaagtt

SEQ ID NO: 36324 - DNA, 1047 bp, Homo sapiens
attttatcccttttgaaaagcatagtatccagttctgagtgttaatctcttagtaaccatcttagcctaaaaccttctactctttactggtattaattcagccaaccccattgtcatattgattcatattgtttttgaaatttttagttctttttttaaacttacgattttattgaattaaattatttaatcatcatgtacttgttttgaatttttttgagcttgagatattctgtttattcattataaattttatcttaaagttagatttggcccgttgtttctgcctaacaattttttaaaaaattctaattgttatctattgcattaataagctttctctgtttgtcaatttgaggtgtctgggtcaattaccaagcatgtggtatgctgcaagggactaggtcaatatttgggtgtggttgttcaagcagttataatcctacacatcttctagtctaacttcttaaaaaataagtgagggttttttgactttttttttctctttgtaaatgtgtgttggctcctattgatttattttttaaagctcattattcttttttgttttgttttgttttgttttgttttgttttgttttgttttgaaacagggtctcactttgtcacccaggctggagtgcagtggtgctattgtggctcactgcagccttgacttctgggctcaggtgattctcccacctcagcctccagagctttggatttagatacttctaatatgccccagactgaatacttcatctcttctgcaaaacctgtttctcttcttttgttgaagagctggccaggctggctttgaacttctgggctcaagcgacctgcccacctttgcctcccaaagtgctgggattacagacatgagccactgtgctgggccctcattattgattttttgaaaaataattgatctccattttttttttttttttttttttttttttttgagacggagtctcgctctgttgcccaggctggagtgcagtggcgggatctcggctcactgcaagctccgcctcccgggttcacgcca

SEQ ID NO: 36325 - DNA, 1027 bp, Homo sapiens
ttaccaaaataaaaaatatgcatgtcctactaatacattaacctcacatatactacctaatatgtatctaaataaatgcaaattaatgaggtattattttttgaatctcagatgggcattgatgaaaatgtttaacagtatgtacaacatagaggaaaaacatgggccaatagtctttcatattttactgatgggagtatagattggtgtgacttcttcagagtgcaatttgaaactatttatccaaatctactctttgaccatagattccacttgtcataatttatcctgagtatgcttgcacacgtgtgcaaagatgtatgtttaagactgttctttgaagcattgtttataataatgtaaagtctgggaacagtgtgatgtccatcaatactgaagtgattaaataaattatagccacacagtggctttctgggtagctgttaaaaggaaaaatgtagatctgtgtgttcttatatggaatgagttttcaggatgcattgttaattgaaaggatacagaacatgcatctagtagtcttttgtggtaagaaaaatatatgtgtgtttgtgtatgtattttgacacaaatgcatcgagaagtctgggagaaacattaaaaaacaatgaatgattgttaactctgagaaggaggatttgtggggttcttggagtaaggagacaattttattttttttgtaatttggttattttactaagtgtttgggttactttttaattttcaaaagataacattaaaaagtatcattttcagtaaatatttatcttgcattttattataattagcaggaaaacatgaaatgctgactttcaaagaatgcctcatatactgaagactcatgtgcattatttctttactttgtaacttcatagaatgcccatgagggctttgttgttgttatgtcagttgttttcttatgaccaatagtggcttgatacattaagctggatgtccctgctattaatagtatattattgtgggtaaggctgggtgtagtggcttatgc

SEQ ID NO: 36326 - DNA, 1051 bp, Homo sapiens
tagaaaattatgcaagtctttatgatgacaggataaatggcattcccttggagctgtgtaatgcataatttgtatgactctaatcactgggcctgaacacagtgcttgatataagctcagtaaaattgattgaatttaaattaccaatattcattcatgctttgttttttgctcacttttatatgtatgctatttcttttgatttttaccataaccctacaagatgtatcaggtaggtgtccttcatgaatctcactgtctgaaataattgagacccagactagtgaagtgctttccaaaatgattgataagaggataagaaacagaataggatttaaactcaggtatcctgatcctggatcatttttctctttcctaaatcacattgcgtttacagtttattgtagcctttattcgttgtttgagtcctaatcttgtactttatttttaagggcagggcgatgtagacctggaatttgttttcgtctgttcagtagactccgattccagaatatgttggaatttcagactccggaacttttgagaatgccattacaggtaaaaatttatttaaatataaaaggcatttttttgggtgagggaagtgaggggccatttcaacttctatggattaggcctttaaaaaatcaatttgtaaaacaaaattattcaatatatattatggagggtggctatgtctataacaaatattttttctatataagaaaatttaattcataaaccatcaaaattttaaagaatcacttgaatatttaaattatggtacagttttaaaggatatatatatattttttatctatctatctatctatctatctatctatatttttttttttttgagtcagagtcttgctttgttgcccaggctagagtgcagtggcgcgatctcggctcactgcaacctccacctcccgggttcaagcgattctctggcctcagcctcccgagtagctgggattacaggcgcccaccaccgtgcccagctaatttttatattttcagtagagacagggtttcaccatcgtgacca

SEQ ID NO: 36327 - DNA, 1022 bp, Homo sapiens
ctcgaacccctgacctcgtaatctgcccgcctcggcttcccaaagtgctgggattacaggcgtgagccactgcacccggactccataccctatgtatcttatataagctggtggttagctctcagggtttgatttgatccagtgttttaacaagaatattttataggtggtgttgtgaactttatattgcaatacatcaggaagtacttaatgtctgtcccagaaagacccatactttaagaaagattatgaaattcctgactgcgatgtttgtggcatttattcatagaattttagaatataaaaatcttggagtttagatataatccttttattttatttaacagataaggaaattaaagttccaataagttacgaggcttgctcaggatctcatacctagttagttgtaaatttagaactgccatagacatctatatttcctgaccttagtatttttaaataatattccataaatcataagatcattgggactttggattgaaatggcatctgctttgtattataaacttatacataactgatctttgtatgacgaacttatatataactgatctttgcttcctccttcttgctcaagagtactgatgaaatctccatctccagcattacacccacctcagaagtacaaagatagaggaattttacatcctaaacgaggtactgaggaccgatcagatcagtcttctctgaaatctacagacagcagtagttacccaagtccttgtgctagtccttctcctccatcctcaggaaaggtaagagtatctgaaagaaaatgtagtaaggaacagatttgtagcacatgtaatcctaggtaaataaaattgtaaaacaattagagtacttttctaattgtggcctcttctagatgtaagttgaagctagcaaacttgatacagtttgagtaaattttaaagtttttcctgcatgccaaatatttctagttattaccatcttggggtattttagaatgctttaaaactatagatcattcacta

SEQ ID NO: 36328 - DNA, 1027 bp, Homo sapiens
cgcggctgccttcctgccgcccgcggctgcagttagcccgggaggaggaagacggcgtggaactcgttcttctcgcccccctccgccgactcccatcctttccaggtggacttctttctgttctttggacagatgggctaccgtttttcactgtggtcctctcatagcacaggaactttggcttcctgcgtttgataactgcacgttctgtacagtctctcttctgcatgtttcgatacgtgacagactgcccagtgtgactttcaggtgtctccttattgaaaaggaagatatgtgaggacctaatatttttatcaggctttttaccagctggctgcaaattatttaccctcgaagtaaccggcgacgtttgtagttgactgattggagctgtggttctatacctaaaagttatgatttcagcttctggtttggcatttttccacgtatgggaatttgccctcatttatagtttttttctatttatgaagaatagtagcatttgtagaacttctcttttaacgtgtaaatactgtttagtatggacaagtgcaggaggcattaaggtagtagagataagtgatttgttgatgatcgaggaagggttttatagagttatgtgcttacctgagggcagaattcgctagctgaaacacataaaattggactcccagtggtaggattaatgtgaggtataactgttgtgtggtattgtggcactttgcttatagcaagaaatgagctttcaattcaattttgaaattgtgccaaggctaacacttttatgcagataagtcccagatggaaatcaatcttgccattacaaagtaaatgtgaaaatgtcagtttgcctaaaatgataatgcagtctggaggtgttagttgaagtgagaaatcttgagcttattcttcatttttttcagttgttttgcttttgctagctataaagaatattttctgctactcgtgtgtggttttaatttagtataacttcaatactaatggtctgtttaaaaattctacatca

SEQ ID NO: 36329 - DNA, 1008 bp, Homo sapiens
tagtttatcccacctaggggagtagttaattcattttatcattatgtcaagagagcattatatttttacagaaaaaaaattaatatagaaccatgctttctatttctctgtttcccatgactgaagagagtggtagacatgcacactatgttccaaaacactgtttttatttacctgagcctagccactagaattacaggaagaaaaacaggagaaagtgtaccatttcaaatttagtctcttattgaagagaaatgttgctattaagaaagaccaaaacaaatgtgtcttttcctagaggtaaatcagaagtattttatgcttgcgtcctgagattaagtcatcaccattgattattattttgatgctgttgttgatcttcttatgagaaagtagttctatctccaaaggggattagatggggagttttcaaagaacaaacatggtattaatatatcatatccaaagtaaattctgtcatgtactcgtggaaagtagaaactatcttttgtgttttgcaaaattttttatccatgcttcacacgttgatcacttgttttgatattagataacatacagaagaaaggatttcaggaggactttgtcattttccgattactaaagtaggctagagctgtttttacaatacccctgagttaccacatgctgatgtattgtgtcacaaaaaagaagatttctgtaattcaccttataggtactatgtctgtcactatcaggaacatgttggaagttctgtggttgtgatctttccccttcaattaccacagttcattaaatactgaagagggagtgtactgagcacacatgagtcagtcactttaaaaaacatcagttgaataaacaaagatggaagtgcatagcttattatttctgcttctgtttcatcaaatagctattcagagagaactgattttcttaatttgttcatcctctagtttttagaaaggcaattttaatgtaaaaagtaaaagtggaaaattataaacc

SEQ ID NO: 36330 - DNA, 1060 bp, Homo sapiens
ttatgaaaatagatatctaaatgggtaatacaaatgaaaaggtacgcagtcttatatcagagaagtacaaattaataccatcatataccaccacacacccttgagtatggttaaagttaaaagatggataacataaggtggtgaaaaggctatggaactacagaaactctcatatactgctatttaaagtctaagtgcgtataatcgttttgaaagtctatttgacactgtatactaaagcttaacctacacgactctttgacctagcagttctactccaagtatacaatcagtagatatgtgtatacgtatatatatgttcactaaaagatgtgtaagaaatgttcttaacagtactaattgtaatggcaccatactggaaacaacacaaatttatgtcaccagtagaatggacacactgtgatattctaattcagtggcatactgtacaactaagaatgattagctgttgtattatgtaataacctgaataaatctcacaaaaaataacaatgaataaaagaagccactcacaaaagagcatgtatcctataatctcattttaatatggttcagacatagataaaatgtattcatagtgttaggaagttgggtattggttacctttgatggttgataagtgactgatggactctgagaaggcttctataatgctggtaatgttaaaacatgatttgagtgttgattatacagaaaaatttatgttatatgttatgatttttgtacttttctatgtgtatgttacacttaagtaaatacttaggtgggggtggaacttaagtggctttattttccataacttttaactatgattttctaaataagtattcaaatgatttctaagttaaagactattttaaaagtaaatattttcttctttctcaatggaaatgtcaccagtaacttgagttgtttccggagctctggtatcatcccaggctgtctagtttctttaagcagatgtgcccattaataggggtctaggaaaagacctttcccagctgtttcatcagggctgccctggtaacagtgaaaattt

SEQ ID NO: 36331 - DNA, 1087 bp, Homo sapiens
gcacattaatttgtatttaaatctttacattgttatcattgcatgtgttcactgtattttttaatgtgtcactgttttctctttatagattagtatttcaaagtaaccattccataccaattcaaactaccatctggtccctaagcttgttatatgaaaatcttttatcattgtcttccattgtaagtgttttatgatgagctacacctgagttgtacattttctttttcttttatttgcttctgtatacaggctggcttagcaggagctccagcccgtgctgtatcagctgtaaagaatatgaatcttcctgagatcccaagaaatattaacattggtgacatcagtataaaagtgccaaacctgccctcttttaaataaaaatgtaaaaaggccactcccaggtaaaatccagggggaagagtcatctaagtttaccatgcagttgtttaccaaaaatagaggaggagagtcttaacttttgctcttggatttaagtcaaggtactgtatagaagttgtgtaaaatcagtatgaaagttcaatgttgctgttcttgctcagtgattttaaagaaattgagtagttcctatgtgatttttttttttcttttctaaactgcattcctgtgcccacctacggcatgcctctatgtattggctactacagtgttttaaaaagtgtttcagatatttctctaattatgtacaacctaaaatgttggtgttttgtatggatcacaagtgcagcattccttaattccttctgctatatgtcacacagttgttatttggagaaccaagtatgtattgcatgaaaacattatgacttttttctcttagtttaaataaactccaaggtaactggacttctaaagcacctttctgtttgcctgatatctactttagcaataattttttttacaaccctctgactcaacaaagtaaataaaagtatattttatcactattaagcagatgttaatgtcgatttattttttactcatatttttaatattcagaaactcagtaaattattcggaaactcaattatttcacaaatcaagagcagtgtatcttaggcatatt

SEQ ID NO: 36332 - DNA, 1023 bp, Homo sapiens
tctcactttagtgcaaaaggtaataatctcagagacaaggctgttcttgagagggagcgggagtgctttgggaaagtaccacattggatcccagtataacatttctaaataagtccatgatagctatgctatttttctttagcagttttgttggaactgttgctgtttctttagttaagcactcagaatacatttatgtatcttttaacattggtatcatctttagcacacatgagatcctggaaacatatgagaccttggcatacattgactgagtaaacagcagattcaccttttccatctcacagtcactctagggcttacactttttcaggggaattgtggacttaattgtctgcattatttagttattctatttctggttgcagagtttatagttgaattaatacaagtgaatcatagttaaattcacataaatatgaagtttctattaactgatgacttgggttgtttgtgcattgtccttatgttttatttatatatgccatcagaatcttcagattctcatttctttgaatttaaaaacgctactattttcattaagaaagtctcctgtctgtttccattttctactgattttagcatcagaggctgttaggggagataaaagattcttaaatatatattctatatttgttagataaatgtatttttgtaaaaattttgtagataaacagacatcctgtgtattctggtaagaaaaagagaggatagtatagatgattgctgctaatttttaaattgacaaagtgaggaatgtgactatattggtttaatgagtgcctaatttgaagaattctaacatagttgttttttcccctccatatgtgttgattgtgattctattgctttcagccaaattattttaattagatttagattcaggaatgactgcctcccacagtttctactcttgtaggctttacttacactgctttaaacaataggggtttacctttatattaggagcattaattatctattaattttcctcatttagaa

SEQ ID NO: 36333 - DNA, 1153 bp, Homo sapiens
ttaatagtttgtggtgtttttcctaaaaagtaatccttaatatagtttttacccatattggtttagtttcttttgagagaaaatatattttattgatatataataattatacttttggtatctctcattttaaggtattagcctcatttttaaatagtgtttgaatcggcaaatgggtaaaaaatttgggtgttatggaatataagaaaaagaaatgaatagttgtatagtcaacattttatacagatgtaagtatataaagtttatatcaaagaaaatacttcaaaatattttaagtattatagctagtattgatgcagtatggtcaaattcatttagtgagggagtcattactgctacatctagcttttataaaatttgaaaaattcatgaatattatattaaatattttaccactttgggaggccaaggctggtggatcatgaggccaggagatcaagaccatcctcgccaacaaggtgaaaccctgtctctactaaaaatacaaaaatgagccaggcgtggtggcgtgtgcctgtagttccagctactcaggaggctgaggcaagagaatcgcttgatcccgggaggcggaggttgcagtgagctgagatcaggccactgcactccagcctgggcgacagagtgggagtccagctaaaaaaagaaatatatatatatatatatatatatatatatatatatgtatatataattcatataaatatagtactttatttaaaaataaatagcattttctcctcttctcatttgtttatacttttaatatgttctgtttacttgtaatcaatgtggagtcttcttttaaaaaaaaattaacattgctgttgtgaagaaaatttgcagatgaatattggaaaatatactgaatacctagaaggaaaataatgttttttgtccttcttaatatagaggtcaaaatagaaaagctatttctaaagttgccattcgtgggaaaggaaaggccttatcatttatagaatttgatatcagggaacagttgttctgaagtaaaacaatccagaccattaccacattgataattttctccaattagacagattagaggtttaatcctaaaagaaccccagtatccaatatttttgcctacatctttaacattaaggaaatc

SEQ ID NO: 36334 - DNA, 1043 bp, Homo sapiens
ttgttggtataaaggaatatctgagactgggtaatttacaaaggaatgatatttattttggctcatgtttctgcagactgtacaggaagtgtagtgctctcatctgcttctggtaaggcctcaggaagcttacaatcatggtggaaggcaaaaggggagttggcatatcacatggtgagaggagggaacaagggtccggggccgcggtgccgcactcttttaaacaaccagatctcatatgaactcagagcgagaactcatttattgtgaggacagcaccaagccattcatgagggatcttcccccaagccccaaacacctccctctaggcccacctccagcattagacatcctatttcaacatgaggtttggaggggacaaaacattcaaaccgtatcacccgggatattgttgatgaagtatttgttgattgaattaatactaaattttgttggcattacattttattttgactttaaatgctgatgagtatttgatagttcatggttctgtgataacatttaggcttgtagtgaataaaacattacaatattgtttaaatcttttcttttacatttaaataaaagatggataagaatgttactttaacattttatataatatcctttaacaatctgtaggctaatctttagtttatggggcttctaacccataatgcagttgtactgattcttttgccatttccaatttgttgctgtgaccatttggtgaatattttatttcacttattatactttttagatctagagttttctgtttttgttgtttctttttttctcttgagatttattctgtgttcactcactgatagcatatttttcttcagttctttgaatatatttataatagcttttttgaattactttacttgctaaattcaatgtctgagcccagttagagtcatttgtattgagtgtattttttcttaagtaatttcctgaagactttcctgtttgtttttttggggatttttttttttttttttgcatatgtagaaatttctggttgaaaactagacatt

SEQ ID NO: 36335 - DNA, 1068 bp, Homo sapiens
tttcttcagggtaagtgtcccgagttttattttgttcctttgattaggccatatttccctattgctttgtatgctttgtgatttttgctgggcattttgaaagacaactacctcccctagtctttgcatactggctttgtgcaggggaagaccttcactaataccccagctgggagttctagggcctctcaaatgttttctgatattttgctccctctggcacctgcccgtggaactgcagctctaatatgcctctcacctctgttttcagtgccttccaaacgctggtgctgggcgtgtgagtgcccttctttaattaatacagaaaccagttccttgggaatcccccagaaagccagaatgttggatgtatggttcattcttttatttctgtcctgagggaggagctctggcatggggggtggtgggttcttcttggttgctccgctattccacatgggagagaggcatgcatgaatacactgaacactgtgaaattcatttcctaccactttcattggaattccttcttggttttataatggtgtgggtgctgtagcatctcaactggtctctcaagttctcacaagggtattctgatccgtatattgttaacttggtaccttagtggtggaaagagggcctctagctttctagtctacccctatagctattgttcttttaagaagtatgttttcgaagttacatttcttctctttcctcaatgtaacattttaggaaacaccaccttaaaacaaagcaaagcaaaatatagaaaacaagaacctggcttgactgccacctttaggggtacatcagatcagttgtttacgtgctgattcagccttcattctctcctatctttttggatggaggtgagagtgatgaacttgtcttgcttttctcagaactttagggtaaacctaggcttatcatccttccttaactgctaggagggcatatactatgtatagatgatgctgattaaatctttggagctttaatgatgtgtgacagccaatgaatttttctaatatagtataaaaacttcatgattttatatcattc

SEQ ID NO: 36336 - DNA, 1045 bp, Homo sapiens
tgtagggcctcctgaaaactgaggatagaaaaagaaccctgaaacaaatttggggacactctaggaaccaaaccaaatgagataatatcagtacactgcttaagtaagtatgatacactgaatgcaaacatagtaacacatttgtaaactcagtttaactacttgccagattaatttattgacttgacacctatgcatactttgacagccttacagaagaggcatgttctattccaattgctacagttaaatactattgacttgactgtctgcctacactcatgtacagagtttaattttttttaaaaaaattgagaaccacaaagagtagaggaaaagatacacagttaaatgataaaaacgttaacagaaatggacccaaagaaaaagttaacagaaatcgactccaagaaaagccaatgatttggaattattcaaaaggatctataaagagttagttaagttataagaaatagggggaaagttagaatatgtataaaaataagtgaagaattttgacagagaaaaaaagttataaaaattaatcaaataaaaattccacttgcgtgtgtgtgtgagaaagagaggaagaattatttctttcactttcaggaaaaataaatatgaaccaggattctataactagttaagggtatcttttaaaacaaaggtgaaataaaagctttttcagacaaacaatatctgagctaattcattgccagcatgtctaccttaaaacaaatattaaaggacattttttaaacagaagaagtataatccagatataaatttccatgtgcagaaagaaaaaatgcatagaactattaaaagaagaggaggaggaggaagaagaagaggaagaagagagattgaatattagagacttttttcccacatttaatctctaaaaacaattgctgagaataattaagggagacctaaacaaatggagaccactaccatgttcatggattagaaaactcaatattgttaacttctcattttttcccaaattgatattgtagattcaatgtaatccttatca

SEQ ID NO: 36337 - DNA, 1047 bp, Homo sapiens
agaatttcaatgtttgcccattttctcctttcctaattataattgatgaatgtaatgtataaaactcaaaaagaggctggtttattggcttatcagcactgactttgcagaaaggacaataaaaaacttgatgaagaagggcaaaagtggatcaaatggtgaagttatagacttgaaagatgtataaaatctatgattctaaaatatagtttcagaatgtttagatccttgtaaaaatatattctttccttttctttgtatattatggagtattcttgtgaggtggtggtcttcatgagagttgcacatcacaactaccattggatacatgtgcccaaatcctgctctgggaatttctacatctgtagctgtgggattgtgtctatgcacttatatgtcttgttctagagagggttctggtatgtactgtgattgaaagacattcctgcaaggcagtgtttcatgaaagcatattctgtaggtcacctatgtcaaaatcacctggggtgttaaagtacaggtttctgtgccccatcctgaagcttttgaacctgaatttttgggcacaggtctcggaaatttgaatttttagtaacatctcaggctattatttgttgtaccaaagtttgagagccaccacattaagagagtatgaatctcaatctgtaattgggctgtgaactcaacttagtgtaggccacaacccgaatttaaaaagagaatgaaatagagaaaatatcagagtatgtcacatgtaataaggacaaacataggttatatttatttgtatgtgtgtgtgttctgggtcagcatacattgtgtatttcttactgatttgcaggcagaaaaaaagggaaaaatttcgctttaagaagttgtaaggccataaattatatagtagtatcaaaatgttacatcttttattctgaattttcccacatactattatgatctcagatggggacaaaacagtaaaagagaaggaaatgtcaaatagtaaagccacagacacatttaaaattaactttttaactgtaataataaagt

SEQ ID NO: 36338 - DNA, 3066 bp, Homo sapiens
tagtgtgtgttactaaaggttaactgagtggttaaatatagaacatctgcattgagaagccagtttacttattttccagtttaatattaggtcttctaccagtaatccactgactcagtcctgtatggctactgattactcagtgaacttcagtgaccttatattcctggagcaaagttacttttaatgcagagcccatttcttattaatatgaaaactgttatgtttttcatcttgaatccatttataaagatatttgtgtgtgtgtttgtactaattgtattagttttgctaaggcattttatgttcctcacactcaaggcaaagagataaaacataatctgaagaaaaatatatacttcttcaaaataaaaagagtcttcttcattatgcagatctgggcatattgtacaatacttaatggctcaaggggatcaaagtaccagtttgatgctgattcactaaatagaatctcattcatatttgatgactggactgtttgcgggctgtgatagattgaaccattctggtgatatccccagatctcactaaataagaaaaggctctacactagaatatgtgacaattgatctggctataaattatgtctataggctctttattattataaggtggcgaaagaggcccctttcttgagcacatgtttaataaaagtattattgtcatctatagattgctggattgattttgtgttgttataatgaagataaggtgcatataccactgtcagattaagaaagttacataacttggccgggcacagtggctcacgcctgtaatgccagtactttgggaggccgaggcaggtggatcacgaggtcaggagttcaagaccagcttgaccaagatggtgaaaccccgtctctactaaaaagtacaaaaattagccgggcgcagtggcaggcacctgtaatcccagctacttgggaggctgaggcggaattgcttggacccgggcagcagaggttgcagtgagctgagatcacgccactgtactccagctggggcaagagtaagactccgtctcaaaaaaaaaaaaaaaatggagcaagtcccttttctgggttgacaattagtcctatattggcattgctgctggctatgaaactcaccaccaaaggtaaacgattaatttgaactacttggtaggtgttatggtaacaaatgatacttttattttttgaaagtccaagttttctcctttcatctgtgcaagggcaaaagtagataagaaactagatctcaaagtatgctctggagcattatcattaagcattacatttactggtttacttaaagtatattgcaaagaatacggataaagagatgtgtagggtgaggtgtggcggaaggggtacagagcttccatgctctccttaggcatgagatctccatgtgttcagctatccagaagctcggtaattcttaatttatagtaataacctgtttgtatttacttggttcatgaactcttttgcttatagaaactgatgatggtgttgatgatctgaaaataaatcccgaaaagaaggaattaggctgtgataaaatggtaccaaactcaagttttacatcattatcgtcagctgccattgatcatcagattgaagtacttctgtctgaatggagtaaaaatgcagatatgctatttagtattcatcccatggatggttctttgctagtttggcatgtggattggctggatgaataccagcctggtatgtttcgtcaagtacaggtactactgttatttctggagagctacttccttgtttatgtgggtactattttctaatacctctttatataattttatatgttctaacacttgctttcttgattctaggtgtcctttgtttccagaattccagtagctttccccacaggtgatgcaaactctctctgtaaaagcataatgatgtatgcctgtaccaagaatgttgacttggctattcagcaggggaaacaaaaaccttctggcctcacccgttccacatcaatgcttatttcttctggtcacaataaatcatctaatagtttaaaattaagtatttttacgcctaatgttatgatgatatcaaaacatgctgatggttctctgaatcagtggctggtcagttttgccgaggaatctgctttttctactgttctcagtatttcccacaaatccagatattgtggtcatcgttttcatcttaatgatttagcttgccactcagtattaccattattgctgacaacatcacaccataatgcattaaggacaccagatgttgataacccagagcaaccttttgatgctctaaatattgaagaatgctctttgacacaacaaaataaaagcactgttgacgtggcatttcaggatcccagtgcagtttacagtgagcttattctgtggagggttgacccagttgggccattgtctttttctggaggagtttctgagcttgcccggattaattctcttcatgtttctgccttttccaatgtggcatggctgcccactcttatacccagttattgtctgggtaagtattctggtttttattacagtaatttagatttgctgacattatcatcaaagggtgaaattttaatatttgtaaatactttctaggtgcatactgcaactctcctagtgcatgctttgtagccagtgatggacaatatctgagattatatgaagcagttattgatgctaagaaacttttatctgagctttctaaccctgaaatttctgtaagtaatgtcttttaaaacagcttaagtatataatattatgttttcagatagtttatatttattgggcatgttctacaattgtgacctataatttgtaataagcatttgtatctttgttttattttttcacatttgtactcttgtaatgatttaaagctcctttaaaaggaaaccatttctttcactctttgaaagaaagtagagtctcatctcctgtaatatgtttctgtaacacttctttactcatagataaatgaggactactgacagtataatgtagaagttatatcggcccccctg

SEQ ID NO: 36339 - DNA, 1039 bp, Homo sapiens
ccaaaacagcatagtagtggtacaaaaacaggcacattgaccaatggaacacaatagagaatccagatataagaccacacacctacaactgtctgatctttgacaaacctgacaaaaacaagcaatggggaaaggattccattaataaatgatgctggcagaattggctagccatatgtagaaaattgaaactggatcccttccttacatcatatacagaaatcaactcaaaatggattaaagacttaaatgtaaaacctaaaactctaaaaaccctggaagacaatctaggcgataccattctggacataggaatgggcagtgatttcatgacaaagacatcaaaagcaatcataacagagtaaatagacaacctacagaataggagaaaatatttgcaaactatgcatctgagaaaggtctgaatatccaacatctgtaaggaacttaaatttacaagagaaaaacagctccatcaaaaagtgagtaaaggacatgagcacttttcaaaagaagacatacgtgtggcaacaaacatgataaaaagctcaatcactgatcattagagaaatgcagataaaaaccgcaatgtggcaccatctcacaccagtcagaatggctattattaaaaagtaaaaaaaaaaaaaaaaaaaaagatgctgatgaggttgcagtgaaaagggaacacttacacagtgttgatgggagtgtaaattaattcaaccgttgtggaaagcagtactgtgattcctcaaagagctaaaaacaaaactgccttttgacccagcaatcccattactggctatgtacctagaggagtataaatcattctgtggtaagggcacatgcaggcaaatgttcattgcagcattattcacaatagcaaagacatagaatcaacccaaatgcccatgagtgacagattggattaagaaaatgtggtacatacacatgatggaatactgtgcagccataaaaaagaatgaaatgatgtaatttgcaggaacatgggtggagctggcattcataaagcaacttc

SEQ ID NO: 36340 - DNA, 1029 bp, Homo sapiens
tttgctttttattctgtattataaataaagcagtgtttttaagaattgttattgtgttttgtgatacttgcatttataagaactgtgaattacctctttatcttaataaattcatagtaatgacttttttatgtctccaagttgaggaatggaaatataaaatgaacattttatttgtggtaagcatgtcatatattttttactatgagattgctaatgatattctagacataaagtttatttctgacttattacgctaaaacagatcagaaaatccactttttgctttttcttataaaacttgtgtaaaaacaaaagttctgtattcagtagtcagtgattatcacatgtcattgctaacattcctttagcaaagtaagcaaaacagcaaaatatcttgaccagaaaagacttgagcatattaaaatataaaacaaaataggtgatttaaaatataattgaatatgccaaacatttaactggtggtttattataaggaacttttaaaagactgctgaacttcaaagtaactaattctgtggaagggaatactttccttttcttttctttgtgaggcagagactcgtaccgtcgcccaggctggagtgcagtggcgtgatctcggctcactgcagcctccgcctcccaggttcaagtgattctcccacctcagcctcccaagtagctgggattacaggcgtgcaccaccacacctggctaatttttgtgttttttggtagagacgggctaggctggtctcaatctcctgaccttcagtgatccgcctgccctggcctcctaaagtgcttggattacaagtgtgagccaccacgcctggccaggagtacatttttgttagacttttcattgaagaccatataatataaattttaatttaaagtttaaaaagtgttctattcattcattttacaaatgagtcaggaaggcaaatttttatacaagagtagagaaagcgtagaagataaaagaaactccaagaaatgtgcatgtatagatttttacatgtaa

SEQ ID NO: 36341 - DNA, 1081 bp, Homo sapiens
ataattttaaacctgttgcttctctaattgaaatattccgtaggatcctggtgttaatctattgtaactatctctttctcctccagcttctaagggcagctctgtggaacccaagcaatgttcagatcagtttctgcataattcctttttgtggtaaaatataaataacataaaagttaccattttaaccatttgtaaagcagcccagtggccataagtacatttacactgctctgcaaccaacacaccatccatctccagaactttttcatcctctccaaactgaaactttgtgcccgctaaacaacagctccccattcctctggcgcccactccaggcaaccaccattctgctttttgtatctatgaattttactatccctaggtacctcatgtaaatggaattgtataatagttatccttttgtgactagtttatttcaccaagcataatgtctttgaggttcatccatattttagcatgtgtcagaatttcctttctttttaaggctgaatagtattctaatgtatgttcatacattttgtttatccattcgtcagttagtggacatttgagttgtgtctgtcttggttattgtgaataatggtgctatgaacattgatatacaaatatctgaatctctgctttcagttttttggggtatatacagaagtggaattgctagatcatatagcaattctgtgtttagtttttgatctgcataatctctttaaatctcttttagcgttaatatttggattcttttttcttcacatgtccagcccaatcaaagcatgaaatctttacagagtgtgacttgaaactttaggagatcttttaagaccatattcattgtgattttttttttaactataatgttatgttgtgaggcctttaacaaataaaattacattcatagcacatgcaagttctgtctctatttttagctgactgtatcatgttcctagttccttcccttcccagcttagatttcatgatccatcatggaatcaatcagtcacttgcaaacatccttatccctgttcttcctacttgccttgaaaattcccaaaccttctta

SEQ ID NO: 36342 - DNA, 1054 bp, Homo sapiens
tgagttggagtcttgctctgtctcccaggctgaagtgcagtggtgcaaacttggctcactgcaacctctaactcccgggttcaagcgaagctcctacctcagcctcccgagtagctgggattacaggcaaacaccaccacatctggctaatttttgtatttttagtagagacagggtttcaccatgttggccaggctggtctcgaactcctgacctcaagtgatccacctgccttggcctcccaaagtgttgggattacaggcttgagccaccgcacctggcctgtaagttctgttttttttatggttgcctttagtgatgatagtgttctatataagtgtattagtttttaagggctgccataacaaaataccacagactggtggcttaaacaacagaaatttatattctcacagttctggagactggaagttcaagatcaagacgtcaacaggtttgatttccctgaggcctccctccttgcctttcagatggccacatttctgctgtattctcacaagaacatttctctgtgcacaaccctggtgtctctccctcttcatagagtgccagtcatattagattagggtcccacccttatgatcttatttaaccttaattgtttattaaagcctgtctccaaacacagccatactagagatcagggtttcagtatatgaatttgggtggtacatttcagtctataacaatcgcctttataaaggatattagttgtcctcctttacacagggaggatcttttcaggacctgcagtctatgcctgaaactgcacatagtactgaaccctatataagctatattttttcctatacatatgtacctatgataaaatttaatttataatttaagcacagtaagagattaaccataataccgaataataaaatagaacaattataacaatatattgtaataagatttatataaaaatgatctttctgtcttcactttctctcaaaatatcttgtatactgcactcacctgttttcagactgcatggtctgtggtcacactgcaactgtggaaaccgaga

SEQ ID NO: 36343 - DNA, 1033 bp, Homo sapiens
tgcggtttgttcttaatacaagaaagacaatttgatttttaaaagttttgatttgtagaataatgtaagacaatatgtttctttctactttggtttttccattcaaaagcttacagatgaattcattcgtttaaaactgccaggctgagtgcggtggctcatgcctgtaatcccaacacttcgggagactgaggtgggcggatcacctgaggtccagagttcaagaccagcctgaccaacatggtgaaaccccatctctactaaaaatacaaaattagccgggtgcagtgccacatgcctgtaatcccagctacttgggaggctgaggcaggagaaccacttgaacccaggaggcagaggttgcagtgagccaagattacaccactgcactccagcctgggcaacaagagtgagactttgtctcaaaaaaaaaaaaagaaactctgtctcgaagtaaataaataaatttttaaaaaccaacctgatgtgaagttgaaacacaagacgcggaaataaaaactcagagtataaatatctatattgttaccattatctgggataattgatgatttataagaagctgaggtttcgtcttcctagaaatggacttttattaggccagcaagaatgaccacttagccatttaaatgatttgtcagcatcttttgctgctctcttctaagaccattggttttcactaaaggataaatacctgctaagcaaattataaaatactataagacatttaatctcctggaagaggacttgctgataattggatcaaagttccagcattattgctcttttcgaatcatatggacttagtgttctcatgaccgaggagtcacatttttagcttgctaaaatattcactggagaacatggtgaaatccacgagtggaaacgttccatggtattttcaaacgccacgtgtcaggaatttggcatgccttcctctgggagaggcactggagtgtggccagatggaacccagcagggtacagagggcatttgtgggagcagttaggaaacc

SEQ ID NO: 36344 - DNA, 1049 bp, Homo sapiens
ttctattcctttttaaagtctgtgtcttacctgttagcctttttacatgtacaccatagacaccgtgtttccaagttgcatcacacacactaattttttttttttttttgagatggagtcttgctctgttgcccaggctggagtgcagtggcgtgatcttggctcactgcaacgtctgcctccgggttcaagcagttctctgccttagcctcccaagtagctgggattacaggcgcctgccaccaagcctggctaatttttttttttttttttttaagtaaagatgcggtttcaccatcttggccaggctggtcttgaactcctgacctctttttagaagtggcatgtcacttctaccgacatttcattggccaaaggaaatcatttggctaagccaaaagttaggggcatcatttaagatagtctccaattttgtgttaatatgattgctatgttttatattccataatataaagcttatgggatatttaaatttggtataagaactgctaagccttaggctgatactgtaaaaagggacatttgcttttgtgtaaattacatctttcaggaaatgcttgtgcatttcttaagtaggttattgggaattcagtagttttgaggtttcctcagtaggtgagctatatctagttctctgaatagtaagttttattttgaggacataaacacaagaaggactgacaaaaaggagcaaaaagaactccttagtaaaagaaagggagttctactcttgaactgaagtaacacctttgggtaaattgaattacaatctttttaagtaagattgacatgacttttccgtgctacagttacataataatggtaaagctgagtcttaacttcctgtggcctgatgctagagccattgtttttaacccctatgggatcttgacagctggaaggtgaactgtagtgggcaaggtgcattgcctttgaagtcaggccaagttttaaatcctggctctgctgcctaattatatgacctctctgtttatagctgtcttagctaacttccgggattatggtga

SEQ ID NO: 36345 - DNA, 1091 bp, Homo sapiens
agtatagtacttagtaatcaagaatatatactgattgaataagtgaaactgatataatacagggagaaagatcataagaaggcacatgtgaattccagctgataataaatgagccgtacatgaaatacccacatctcccttggatacctccatgactatcaccaatctggattatgggggaaaacctttgaataaatttagagtagctcttagctatttgtcattttaagagctagagtagttcttagcaagtcgttattttgtcatttgccagttttaaaaaaagtaataaggttaatagacttaacatcaaatagattcatttattcatctaacatgtatttattaagcgtctattatgtagcaaacactgttctagatgccagaggaatatagtgggaataaaacagagtccctactttcatggtgcatatattctagtggggagtagtggagggacagataatcaagaaatacatatgtaaaaatataatagatgtaggtgctgtggagaaaaaaatgagtgaatggaacagaaaatgctttaaggagagactgcaggaagtgaaggagtgcgccttgaggagatctgctgtcgcggcatccctggcagaagaagcagctgaagccaggttactgaggctgcagcaggcatggtatgttttagggttaggaagggagccagtgtggttatatagcgagcaaggtcataagggagacaaaagtgagagatgagggcagaggggtcctagaaggccagatcacataggacctttagttcagagtaaggactaacttttaccctgagatggggtaaaaagcaatgtacataatagtcatcaagtaatattgatgctcagatatgaactttatttctctctcaacatttcagtaaaggaatttatgattcatatcttatgtaacaaagaattaagatcttttataaataaaggacatttacaaatctataagcaagtatcccaaataaaatgtgaactaaataggcaaaacaataataaatataaatataagccatgaaaataaaatattactttactagtgctcaaaaaaatgtagactaaaataatgag

SEQ ID NO: 36346 - DNA, 1045 bp, Homo sapiens
gggtatagagcaaatgaagaaacatttattcaagaaaatctattatattttggtaagaacagtgagactgtgtggcatttgagtcacaacccctccctttgttcttcctctcctggctgagcatgacagaaactgtaccccaggcgtttgcagccaagaacgtaggagccctctgccatgctgtcttcccaggatgggcagactattaacttttcttatccttcccactagctctgaattgcagatgctctattccaggtaaaagtgactgacttgtgagcctctatttctccatccagcccccacttacagagtggagactttaccctacctgtggcaggttgagaatactggggccctgattgcacttgccctagctttcccgtagcgtggaggttccgtggttggagagtcagcagagaagaacagaagctactacacctgccctgcttccttcttgtaaagcaagtgtatcatttggaaagaagtatgtcactactcctgcagaaattctgcctagagggagaggaaggctgtaataacacaaagttctgaccctcttcacaaggaaacagagtctttttgtaactaagtatttggaagttcaagcatagggatgccctcaaaaacaaggtgtgactgtagtgataagcaattaagagaaggctggtagttccgtaacagcagggagctaaagtgtagcccagctagacatttactagaaagaaccagggaaagagatagctaagaaaagccctcctgggattgtaacaaacctcaaagtctggcctcaacgactacccttgcaaagaggcttgaatttaattggatcagattgttgaacaatttataccccaggacactgttgaaaaaaatagaacagtaatctagcaattagtggaaccttacaactgggtatgataccaaaagaggcagacagtttaacagagagaccaacgagagacagtcaaagagagcctgctaaaaccagtgtcatcgtagggtgactgcacctactcaaggtacactctctgaggagcaatat

SEQ ID NO: 36347 - DNA, 1023 bp, Homo sapiens
tcttctctaagatggctagtagactaaccatgcagatatagcataaaatccttaaacctctggagtaacgcagtgtgtgtgcatgtaataacagcaaattgttcagaaaggtcactttaaaaaaatttttggttgtattttagaagagaacaacacagtggggcctactggagggtagaggataggagaagggagaggatcaggaaaaataactaatgggtagtaggtttaatacctgggtgattaaataatatgcacaacaaacccccatgacacacaattatctatgtaacaatcctgcacatgtactcctggacttaaaagttaaaaaattttttttggtatgtttgatatgaaaacttctgcaggacttatgtttcctagcaaatagaattgtaatctcataagccagagagaattaaagttggtacatatgtattttttttctgtaccatataatcaggtgatggagggaacattgttttattcttgcttttaaatattttttccatccattactgtttcttatgaatttcttaagaatgtgctcatatttatgtttacataaggcttaattgagaaactaattctgttagagtactaaaaaacagaaaaggctcatggtttcatggttcagaaaacccaagaaatgcctctttattatactgaaataaaaaatatatctgctacaaataaaagctgaatagtttccaaggtttgaatttctacgcacagtaagtagtggggttttctttcttttgtttttttttcagatgactaaaactttttgttagttttaaggtaggttttaatattttgctgcgtgacaaaagacggtttttaaatcaacaatatttttgtgtgaataatgggcactcatcatttggcagaggttcttggccattttgtattgtatgataattagagaatataatggaggctatataccagttccctaaaaaacattttgcataaaactttgcataaatttcagggaatttgtgggacatttgaaattggatg

SEQ ID NO: 36348 - DNA, 1125 bp, Homo sapiens
ggtgcatggcagtgcagagtttggaaactggcaatatggacgtatggttaagggctttaagaaataagaaaatagataggaggaaagatttatgtacaaaattcttctgctcaaaaatgtccaaaattgatatttttacttctagtaattaggtgttcttgttttaggttgtaaatctctttcagagtttagtacatagcaggctggcctaagtactgactccttccctgcatgagttgcagaccatcgttttgtttgtttgttttttgtaactgcatagtgaaagaaatcttagttttgaaattctggtctcctgtttgaatgcatttgattgtgactgaatgagctctctctgactatttctggaataaaaagttgttgccttttctccagttcacgagggtttgcttctgagactaagtgctgctcgttaacaagtattgttaacaagcattgctgagcaaagaacacctgagtttaagccctggccctacttcttgctggctctgtagacttgagcaggttatttaataagctctctgaaattcagtttctcatctgtcaactggggtaagaactgctgatgtgcccacttcaaattgacagctgtaattcttaaatgagattatatttgtggagctgctttgtaatgctcagtgtatgtaggtatcactattttttccatttagctagaaatctagaggctttttcacttcatattttatgtaagctataaaaactatgattgattatttttattttactgatagggaatttacactgaaggagaacttaaggaacttgcaccagtttctgtatcaggttagatacaaaactgctacaggaacccttcgtttttaacacaccagcttttgcttggtaatgatgaattaatactctcttatcacatgtcaaactactaagctaagcactctacacattactttatttaacacgcacaacagagttgtgttatttagggactgttgttatgccttttatagatgaggagattgaaactcacagaggccacgtatctaagcattttctcaagctcaccttgctattaaggggcacagcctggattttaactcaggcattctgatgctacagctgtgatctatt

SEQ ID NO: 36349 - DNA, 1050 bp, Homo sapiens
ttcccatctcacctcagctacacaatcactcatatgaattttgagctctaaatttggtagcaatatgtacaccttatacttttactatatattaatttctaaataataagacagttgattttgggggcagggagtgtgacttaaaaatatctgctctttttaatttgtacttactctatatcacctagttatctttcttctgctttcaacaatttcggatagtgaattttcatttagaaattatgtttatgacctaaatcccactgggaagttatgctagtaaattatagccagcatatttttgtctgttttattatttttttagttttggaaattctgctgatttgaccacattttatgtagttaagaaccattgctgtcaagaagtatttgacaaagtctaatctaaatttctcttgagccattttgaaaacatgcacatataatccaaaatctcattattatgagcattagtcagcttatttaagttctgaataaagtagtcttaagctgaagtctgtctttatccttttaaaaaagagatattaacaagcattagaagaaccctgaagagaaacctagtgtctaattcaataaaatctatcatatgtggaaatcctctcaaccagaaattcaaaacacaatttttattactatactttattccttaaaaatagcaaatcatggaagctcaggatctagagacttactgctgcagtttgatccctgcctctgtaacttagctactgtaggaccatggacaagttacttatcctccctgcacttaatttttttttttcatatctaagatgaggatgataatgtacctgtcttctcagattgttctgaagataaaatatgataacaaacataaagtatgtttataaaaatacttgtaatttcataaacattataaagttaaactcattaacaagcatgtttctagctctccaaaaaatagtttcttatgtataaaatactaatctgagcattttatatgctgtataatccttataaatgctaaatatcattagtttttttgcagaaggc

SEQ ID NO: 36350 - DNA, 1040 bp, Homo sapiens
tcagcgcatttatttatattaaattatctaattctcaaaacaggtagatgaggaagttactgatattgcccattttacacataagaaatctgaggtccgagatagtaagtcatttgcccaactcacttgtcttgtaagtggagaagtgaagcttcattgccaggtagcttggtgtcaaagaacagcattaaccgccaagctctttcacgtttcctattttttttttaacattttcttagaagtcaaggatctaaaagctttaaaattctcaattcatattgccaaactgtcttccagggagttttcacaaatttttgcttgcagcagcagcgtatgtatggacactgtttcttaaattgggagtgaagctaataaaccatttcattatttcattaaggcttgctgtgtagtttattatcttcatggtaacagtcattatttttgtaggttgcagaaaacagtattgagacaaaattaatagtgaataaattagaccttgcaatttaaaatttgcaaataaagatgtgctgtgattaattacctttaacttattcaacaaaaatgttgataagaatattacatagatttttaatattctggctgagaaaataaaggaacaactaatatggaagctcgttgatacttagcattgtatataattgtttcaaagaatacaaataatttggaatatattattctcttttgttgctatcaaattaccttagaagagaggcactatccttaagttttctgagatgtttgaggtttgacagttctcttgctttctgctatgactgatgaattagagaatcttgttgaattctttactaggaacaacattattgaactggctaatgatgtcatatgtatatattataattcgatttcttgtattaactttagtgctatcgattataaaccacctcctctctcccacatataagggttataagaaatggccttattctaaaattgtttgttttcttttccagtatgttatgaatagaaatgtttttattgtattaaaagttagttcatta

SEQ ID NO: 36351 - DNA, 1089 bp, Homo sapiens
tattgaattcttgatatgtgtaagtcactgtgctgaagaaagtaaaagatgcatatatgaataagcttagtgatctgcccttgaagtaactattttctgtttacttttgatgacagtgataacactgtaggctattatgaattgacataactttgtaattttaaagcccaaatatcagaggtatatttatgtttatccaattatatatagaatgaagtataaatttgattgcctctttattgcatagctcaatgtttttgataaatatttggggttatcttttgttttaaagaataggagaatttttagtctgtgttgctcagtaaggtggcatagtatagaagggtgagagcacaaactctgaagccagtctgctttttttcaaattgctctgctgtgcaatattgagcacattatttaatttctctctgttttcattttctccatagtgtggcgatagtgacagtgttatgtgcagtataggttggttatgaagattaaatgagttctttgtagaacgtttagaatggttcctatgcataaagcaagcattgtatgtgtgtctgtcattagtgttattatttgaatttgtctgagcccctttattcatttattcaacaagtagtgtttaacacctactgtacaccaggcactgttctagtttctagggatatagtggggaacaaaacagacaaaattccttcatggagtttacatagtggatggggagggtagggagaagatagctcagtaaaataaacactagtttacatcaaatattagaaggtgatttatcttatgaagtaatagaagattataatgggatgaatagtgatgaggaggaagtgcaattttaaataggattgttcagaataagcctcactgagaaagtggcatggtggcattggggaaaatgcttgaaggtgaaggagcaagcagtaaggaaatctaggggagcattttcccaagtagggaatagcagcccaagggccttatagtggacaagtttcccatgcatttgcagcagaacaagggcccagggtggcaggagtggacgagcagggcaagagtagcagtgataaggtcaga

SEQ ID NO: 36352 - DNA, 1033 bp, Homo sapiens
tttttaatgcagtctttagcctatagtaaattcacaaatatatcatcttttattgtgcttgtcagtaaaattttaaattaaaaaataaaatattgtttagtttatcatgaatataaatttctgaatatctcagataacaaatctggccaagaacctggaattaagtgggcaaagaaatacctacagttggtgtaagtgattcttaacaaatttgcatgaagatcatgcactcaaacaaacttactttatttcattcagttccaacttggccttaattggcacagaacattaacaatcttaattttcagcctatagtagattgtagataccaaattagaaggggttacaagtcttctttccttctaaaaatttgcatactgtcagaggtatgaaacagcatatagctcaacacaggaaaaacccaggatgacatttttaaaaaagcaagcgtataactaacaatattgtttaatagaagaaaatattcctatttcttaactactcaagttatctgaacaaagtttaattaccattagcatactcacttttaaaatgtgaggcaaatgtataaaacattcgaaatgattaccgactctagtactgaaagttaaaaaagaaaataaatatatgtcttatgtataatatataatatataatttatcttatatataaatgtatatactttgtattacatataaaatatataatacatgaatattatatatatcatttataatatataagaatatataccaattcttatatataatatataccttatatgttagatatattttatatctaatatatgtttatataattagatatgatatataatatataattatatattgtatatataaatgtatgtacaatatgtcatatataattatatattgtatatatgaaatatattcatttatatatagtatataatatataatatattatacatatattgtatatacacttatatataatatatatacacatttttatatatatattttattcctaaaaactggaaccttca

SEQ ID NO: 36353 - DNA, 1421 bp, Homo sapiens
tagatgctctgtgtcaacttaaagaagtttctcagtatttttacttttctgaaaatttttatcctgaatggatatggaattttcacaaatattttcaccaattgatacgattatgtgatttttcttctttagctttttaatatggttgattaaaaaagtattacatcccttgattaaatgctacttgatcatgctgtataattaattttgtatatagctcaattctatttggtaaaaacaattgataaggatttttgtatctgtagatatggtgtggacattcccacgtcttctattttctagaaaatattgtataaaatttgtagtaattcttctatgaatgtttagtagaattccccagtgaaaccctctggaactgcagattttcttacttagggatttaaaaattattaattcaatttccataatggttatagagttattcaaattatttatttcatattggatatggtgaggtagtttatgtttttcaaggaactgatgtattaaatgtaagttgccaaatttatgtttgtagagttgtttttagtattcccttctcattgtttagatatcttcaagacttgtagtgatattcccagtttcattcatagtattggtaatttgtatcttctctcttgttttctttgtcgatctttttcgagatttgtaaatttatttttttttgaagaaaaagggctctatatttgatttattttgattttgtctatattgtttttgattttattggtttttgctcctatatttattgctaacttccttctgcttgctttggtttatttttctcttcctaggctcttgaagtagatgcttagattattgattttagatttttttctcttaactaatttaagtgtgcagtgctacacatttcccactcagcactgctttagctgttctccacatatagtgacttgttgtattttcacttttacacagttcagtgtattttttaattttccttgagatttattcttttacctgtgaattatttgaaagggtgttgtatagtttccaccagtttagagattttaatgttctctttttgttattaatttctaatttgattctattgaagtaagagaacagactctgttatgatttcaattctaataaagtagctgaggcttgtttcacggctcagaatatggtctatttttgtatatgtttcacggacacttaagaagaatgtgcattctgctctttcaaggagtgttgcacagatattgattagattctattggctcatggtactgtttacttcttctgtatccttgctgtatgtttctagttaccccgtcagttttgaggaaggaatgttgaactgttcaactataattgtgttttttttttctcgttttccttttagttctatcagtttttgcttcccctgttttgat

SEQ ID NO: 36354 - DNA, 1038 bp, Homo sapiens
acaagtctctccttaaagctcagctagcctttagttacagttctttgagcaaatttttagaacaatcaataatcaaaagaaaaatattgaaaaatagtgtgcacttttcactactggctaagcgtaactttttcactttagttgaatcagggttgttataaagataaattgggaagtgtctagaaaaataacaactcagttattttaggctgtttgtgttctttctggatgacagagtaacttcagttttaagggtcagatgttactattagccctcaagttttgtgcttgttcttttgttgtcctggaactatcttttatcagtagaactggaaataaattagggcttgacatgttcttttcatggattgattgtaatgtatcattgtgaaggcgtctgacttgctattggccaagaggtgactaaggaatcagggaacagacagtgatatacaccactgcgtgactgccatcctatctgtttttagtatgattccacaaatttgattttgatgcatcgaactgagtttaaacgcactgatacctgagtgctgaaaacattgagacatgctgaaaataaactgtcgcctcttactgtcttttcatgcatgtacacacacacacacacacatgcacactcatatatccatttgacttcgtttcctattataaagccaagttgccattctaaaagagcatattgacctgttttcctcatacctccaagttgcctaaacttgcatgtttctcttttattgattgattgattgagagaggctcctccaggctgtagtgtgatggggtgaatactgctccctgcagcctctacttcctgggttcaagtgatcctcctgcctcagtctcccaagtagctgggtgtatgtgtgtgtgtcacttcacccagctaatttttttgtttttattttgtagagatggcatatcgccatggtcttaaactcctgggcacaagccttgacctctcaaagtgctgaaaatatcgttgtgagccaccacacccagggcccaggctcctttatt

SEQ ID NO: 36355 - DNA, 1033 bp, Homo sapiens
atagccatttccaccattattttgtgtttttcttaaccctcattccttcctttctcattgttaacatgaattttaaaattcagtgtgcctaaagcagggaaggacagaaattggcagatgcctgattatttcagtattttcattcctctttaccagctctcaataccgtttctcctttttgtttactcaagtttactaagtatacctgacaaaaaattgtatatattcaaagtatacaatgtgacgttctgatacatgtagacattgtgaagtgattcatacaatcaagctaattaacatatgtataacttcacatagttaactttgtgtgtgtgtgatgagaatatggaaaatctactctcttaaaaatttcaactgtataatacgttattatctgtaactatagttactgtgctgtgcattagggttccagaacttatgcaccctttgaacaacatgtcttcatttccctgtcatccttggaaatcttctactctatatttctgtgagttctactttttaaaattctgtatataaataagatcatgctgtatttgtcttcctgagtctggcttatttctcttagcataatatctaccaggttcatccatgtttcttcttttaaaagacaaatgaaaatttgacttttatagtcagatgagcttaagttaaaatgccggctctttcgctaactggttgtgagaccgttagccggttatatcatttcacttgccgcttcatcgtctattaaatgtggataataagaactgcctcatcaagttgttgttctcttagcatagggcctggcatataatcaatgtatgatgaatgcatggtagtttcttttgtatactggaaataagtcaaacttaaagttaagctttagcaaatatcactgtgtgttaaatgcaatgttttctacgaactaccaatgattgttttgatcagtggttaagacctgtgcatgtatataaatgtaggatatgatgaacatgctgaagagaaactgctgttgatgtggaactaatgtcaa

SEQ ID NO: 36356 - DNA, 1124 bp, Homo sapiens
gctcttcccttccctttttaaaggcagaggagcttctccctgtggccaccaccaccaacagcccatgaagggttcttccaggccacaggctaatgttcatttaaagcctaagggatcttcattcagcttgtggtgaatgctgccatgtttaagactcaccatgggccagtgtgacctctgccctggacaggtccagaaatgctgtccaagactctaggcttggagttggagatccaaatgcctgcctattgctctaccccactgtggctgagctgctatctatctgatatttatctgtctatctggtgtaagacaatgtcccctttacttttccttctgctttctcaaacagaggaactatttcaccatagccaccatagctgggaatgtgctggttcaaccctgaagttggcatatctcagagcccaaagcacatggcatactaaacgggtattactcctggttattcaaggtttaagggctctttagtcagccagtgatgaatcctgccgggactgtcgtcttctcttcagggcagtgagtcccttttggcccagggtgtgtctggaaatctcatccaggagctagggcatggaataggagccctacgactctgtttagtgccctgtcctactgtggctgagctgctatccaagatggaagacaaagtcctctttactctttgctctcctcttaagcagaaggaatgagtcacttttgttgctgtgagctgcaacgccttcggttgggggaggggtggtacaggcattcccaaaactgctcctggctggtgtctccttaagtcatatgccaccctagtcccctgcctctgagcccagcccaacactagactttgcctaagaaatccagtctttgtgtcctagactgcctttcaagtttacctagcaccccagaacactctggcctgtagtggcgaggcttcccgtgaaactccgaccttccgacctctgggatgagcatgtcccctctagctaggtctggtctaaatgctccctacatgcaagggcgctggctgaggcaagcatgtctttgctctccgctataacaaggcagcactgagttcaatggaaagttccccagtcactgtgctctctcttccccaa

SEQ ID NO: 36357 - DNA, 1835 bp, Homo sapiens
aaaaatgtaaattgacacaactactttgacaactgttcgagagtgtactaaagctgaaaacaatgcaaacattaaaacctagaaattccatttataggtacataacaaaggaatttgttcgtatacagcagtctccccttatacacagtttcagttacccatggtcatccatggtctagaaataggtgagtgcatttcaataaggtgttttgagagagagaaatcacattcatataacttttattatagtgttgtagccttttaattattacttattattgttaatctcagaatataccttatacattaatctttgtcaaaggtatgtatgtgtaggcaaatatagagaatttatgacattcaatattatgcatggtttcaggcacccattggggatcttggaacatggataaatgaggactgatgtatttaccagaagacatgtaaaataatgtttatagtaggattattcaaataatcaaaaactggatgtaaccttgattacaaaaccagacaaggaaacacacacacacacacacacacacacacacacacacgaaaactaccagccaatatctctgatgaacatagatgaaaaaaatcctcaacaaaatactagctagcaaactgaatacaacagcacatcaaaaggattatttatcatgaccaaggggattaatcccaaggatgcaaagtttattcagcatactcaaaccaataaacatggtatgtcagatcaacaaaatgaaggccaaaacatcataattatctcaatagatgcagatgaagcatttgaaaaaatcaacattcttttatgataaaaactcaacaaactatacaagaaacacctcaacataataaaggccatatagacaaacacagagctaccatcatacggaatggggaaaagctgaaaaagctttctctctaagattgagaataagataagtatccccacttttaccacttttattcaacatagtactgggagttctagtcagagcaatcaagcaagagaacaaaatgtaaaaacattcaaattagcaaggaggaagtcaaattattcctgtttgtaaacacatctatagccaattgattttaagcaaaggtgccaggtacacacaatagagaaagaaaaacctctgcaataaatagtgctggtataactggatatgatgcagaagaaggcagttagactcttaatccctcaccatatacaaaaatgaattcaaagtggattaaagacttaaatggaagacccctatactacaaaactataagcataaaggacatgattccatgacattggtctaggcaaagatttttttcgataaaacctcaaaagcacaggcaacaaaagcgaagacaaactaaaaatcttctgcccaagaaagaaaacaatcatcggagtgaagagataaactatggactgggagaatatgtttgtaaactctacatctggtaaaggaatataatccaaaatatataaaagactcaaacaactcagtaacaacaacaacaataacagaaacaacatgaatgaaaactggacagcagttcctgagtagatatttctcaaaagaagatacataagtgaccaacaagtatatgaaaaaatgttcaatatcactaatcattagggaaatgcaaattaaaactacaatgagacattacttcattccagttagaacggccactgtcctaaaattaaagataacaggtgttggtgaggatgtggagtaaaggaaacccttatactctgctggcggaaatgtaaattagtatagccagttgaaatcctgaatagaacaaaaaggttaaccctatgtgtgtca

SEQ ID NO: 36358 - DNA, 1023 bp, Homo sapiens
attttcaagtttttgtcacagtattctaaaacatctttacttggagtgactttttgtttcacttactgattttgttgcctagattagcattcaatttcttaacatgtattatcgttttctgagtttatttttgcttgtgtttttctcactcactgtttacctttccccatctagtgattagtggttgccttgacctggcctctagcccagcgtctttcagtttagaaccaagtctttccccatgtattattgctgacatagtccaaccagtgactcagatcttaggtagatgggtcaatttcctctttctggtttgtaaggagctcctgatattctctaaccctatgcccacaggaccatataaaattcatgtcaaggtttgcaacagattttcttcagccttcacctgtgaatgactcaaatcctctgtatagttttaagccctttaagtttctgtttaaaaattccagagttttatgtacatctaggtgcacttctgaagcataacacttctgattaagttcggctcatcaattatcttttctgttatgattccatttcagggaaatgctcttcgtttcgtagcccagctccatttttgtttaatttttttttctgtttatgttttatcaatcatattatctactatgtttgtaggagaatgggttgtactaagagatgccattctatgccaatttgactagaatgtctccttttttgtttaagcccctttgacttatcttttttgtttaaccccaaagactttaaactgatacaatatgtataccttctcatattttaaaaactttctcaaggtgtttttagttttgtcctttatttattgctccaacaacgcataatgataattgggattatttcaatagttcagaaatttgcaaactgaatagagaatatgagacctgctaagagcagcatgtaagaggtagcagggctaagactaatgtctaatgatatagttctttttttcccaatgattttatttaattttataatttctctttc

SEQ ID NO: 36359 - DNA, 1068 bp, Homo sapiens
gtttttctaagtaatattaaaataaatacataattattaatgatttttttcattaatcacctaaagtcactttggtcatcagttgatgctcttaggacaaatgtgataaaccagctgagtgcagtggttcttgcctataatcccagcatgttgagaggccaagatgggagaattacttgagaccaggagttagagtcaagcttgggcaacatagtgagacctcatctctgcagaaaatgaaaaaagaaatcggtcaagcatggtagaatatgcctgtggtgccagctactcagcaggctgaggtggtaggatcacttgggccacgaaacacaaggctacagtgagctatgatcaccactgtactccagcctgggagacagagcaagaccctttcttaaaaaaaaaaattggggtatgccatactgtttcccttacctaatattatgtattattggctataggcatttaacaatgcaaagatccaaataatttccaaaacatgggcagtgctttttggatccatttggaaaagatcattttattctattagattgttgcatgtagaaattttaagtatcagtgaatttttttttgtaatcgcctcattgaaacctataaatagtggttcccaattcaattgtttcaataaactatttgagacagtaaaatgtacccataatttaaaacaacattgttcatgtaggcagatgtagaatatatatcttagatttctttttcaaagagaggctgtcttttttccccttttactgaaaagtgaagagatcttagtgtttgttttttatatactctgtttcacattcaatgatatgatgtgaaatatgataactatttttatcttgtcagctgtaaatggaagaaactaaaacaaactttttatgtttttctcttttggagataaatagtttctttgaagatattttactatataaagaagatttcatttgagaattacagagattcatgggtgcagatggagttggctcccagagttgtgctgtgaatatggatgctgcagtagggacccttgatctatgcttcattagagtc

SEQ ID NO: 36360 - DNA, 1025 bp, Homo sapiens
aaattttctcctaattatgcctcagggattgtgtgagaaatgggttcttataagaccttcaactaagtggaaattaaaaaaaaatcttgtaaaaagttttctggatgtaagaggggaggcttttctgtgttcaaatgtaattactttgaaaaaacatctcaatatcttcaaaagtattaaaatcatagaagataccttaaccaacaaaattatatgaggaatttataacaaaaaatctgcgtatctcaaacttttgagaaattacccttctgaaaaattgataggttgaaaaagaaattataaaagtaatttaaatgtattttgaactgaaagtaaagaaaagcattacacattgaactttgttggatgtactgaaaatagtacataagaggaaatttttagcaacaaatacttatattagaaaagaataattgtttcaagtcaaagatctatgcatggacccaaagaaactagaaaaagaataaacaaatcccaaaagagcaaaaggaaaggaacactaaagataaggctaaagataaataaattagaaaatggacaaataatataaaaggtagatcaaaccaaaagttagttctttgaaaatattaaaatacattgttaaacccccagctagattgatgagagagacagaaagaaagagagagaggaaaaaagaaacacaatttgacagtgacagaatgaaaggtcctgcagttatttaaagtatagtaaaagagtaatttaaactaaaatttaaagaaaatacataaaagagggggaagagccaagatggccgaataggaacagctctggtctacagctcccacgtgagcgacgcagaagacgggtgatttctacatttccatctgaggtaccgggttcatctcagtagggagtgccagacagtgggcgcaggtcagtgggtgcagcacaccatgtgcgagctgaagcagggcgaggtactgcctcactcgggaagcgcaaggggtcagggagttccccttcctaggcaaagaaaggggtga

SEQ ID NO: 36361 - DNA, 1051 bp, Homo sapiens
taattgaccatcactgacaacagaatatagccacaaagcagaatacaaggattctagtcctagccctgctttgattctttgaatgagtttcttaaagtttcttgggtcatgatttcctcttctataaaatgagtgggtcaggagtccccaagaccactcttgagccttgatgattctctagaaagattcacaggactcatgaaaggctgttatactcacaaaaagtttattactcttcaaggatacagattaaaatcagcaaaaggaagagcacatggggtgaagtccaggaaaaaataggcataattctaggtggcatctctcagtggagtcatatggccacattcccatcataaggtaacaacatgttcaaagtgttgtcaaccaggaaagctcacctgagcctaggtgttgagggtttttattggctgttagtcacgtaagcatgaattgcctgcatggctgacctcagctattcagactgaagccacccaaagtgaaaacacattaaccgtaaatcacattgttaacataaactctctgatcagattggtaccttgtggcccacagactcagaggtcatctcctaggagctggccaaggtccagtcctgatgacaggcctttctcaagtatgtacagagttgagcaacctaaattttctttttccaaattgaaatgtatctaggtatttttttctcctaagttcataatgtataacttttacataaaatttgcatattactatgtagaaaaatgcattatattctgcattcgaaattgcagaatatttagagtatttgcagttatattcaatttagagaaaaatctaaattcaagagaactacatttatctgaaaaaaaaagatattggaatttgtttgtttgtttgtttgtttgtttgagccggagtctagctctattgccaggctggagtgcagtggcatgatctcggctcactgcaacctccacctcccaggttcaagcgattctcctacctcagcctcctgagtagctgggattacaggcacgtgccactacatccagctaat

SEQ ID NO: 36362 - DNA, 1030 bp, Homo sapiens
ggctgggcatggcggctcaccctgtagtcccagtgctttgggaggccaagacagatggatcacttgagccccggagttcaagactagcctgggcaacttggtgaaaccctatctctacaaaaacatccaaaaaataagctgggcatggtgacacacagctgtagtctcaactactcaggaggctacactgggagaaccacatgagcctggaaggtggaggttgtagtgagctgtgatcatgccactgcactccagcatgggcaagagtgagaccctgtctcagagaaaaaaaaaaaaaaaatgaaaaatgttatccctaaaatggttttaaatgtgtgctcaggtcttagacaaaataatgacacgttgaacagaatagtgctaattaaatcaaaatatggcacaatatatttgtttttattttttgagatgtcaaaatacaataattggttttttgccatatatgtccttagcatactgatttcctttcctttggatatatacccatacccagtaatggaattgctgaatcttatggtagttctatttttcattttgttttagaacctccatactattcctcataatggtggtattaatttacattgccatccaacaatgtataagagttcccttttctccacatcctctccatcacttgttatctttaggcttttttgtagtagccattcttatgggttagaggtgatatctcgttacggttttaatttgcatttccctaatgattagtgatattgaacattttttatatatctgttggccgtttgaatgtgtccttttgggaaatgtctgtttaggtcctttgcctatttttaattgggttgtttacttgctagtgagtttccttttgtttgtttctatgttttatttgagacaggatctcgctctgtcacccacactggagtgcagtggcaggatctcagctcactgccacctctacctcccgagttcaagcgatcctcccacctcagcctcccaaggtgggaggtgccagcctagaggctggtgt

SEQ ID NO: 36363 - DNA, 1050 bp, Homo sapiens
gaagacattagaaaaaaaaaattaaaaaaatcttcattcatgagattcgtacataattatagaattgtaaatctttttctagagcctttcagaaaaaaatgaaattcactgaaatgagattactaaatcagcgttagtctgggatatcttccagggcagagaaacagctttgctaaataaaattaatgataaaatgactcttaacaaaatagcatttaccccggagtccacactagacatgcaagtattaccactgctcttctaaaacttgttataactaagatgggaagatatagctaactctggaaagaaatacccagttcagcaaagattttagcaagttgtcaaaacagggatttggaaacagcagtagatgtgtttttcaacaattgtttgaatacattttaatcaaaatctggttaggattcccagaatttcttatgtctgttttatatctgttcatatattgagaattacctttgaagtggatttttagaaactataagaggtaaacatgctgaaagaagcagtaaaaggtaaaaagctgctcctggaatatcttcttttttcctataacctgaagggcagtttcttggggaatacacttctcaggattagtcatttttgttgtcattgtttttacataccaaccttctgtaattaatcctgaggattaaaatatactgcttcttcattggataccaaattgtttctaccaagacagaatctcaaattgtgttaccaatctggaagcacacttactgctataatctgttgctttaatttggcaacagaagtctgtcatggtagtatttttattttaaatttttaaacatcacgggcctactacacagttttttctttcttcctgattttttagttctgccccaccaaggattctacttgcatgtaatttagagcaggcatcacgctttttctgtaaaggacctgaaatgaatgcctttgtaagacacacagcttctgtcacaactacttcgctttaccattgtgtcgtgagtgcagacataggcaatatataaatgaatgact

SEQ ID NO: 36364 - DNA, 1032 bp, Homo sapiens
taaaatgaatacgtctgagcatatcttatgtttggtttttaagaagtcgaaagatttctttgtgaattcagaccgagtatatgtatttaatatcaattccaactgccctcttaaatcttttcaaataattttttaaaatactgtcctaaaacagtcatgttttatatgtttcagtgctaaaatgagtgatgcactgtttctcttgcagctgctgtacaagcctttaaagaagcaagacaaaatgttgctgaagttgagtcatcaaagaatgcttcagaggacaatcattctgagaatactttgtattcaaatgataatggaagtaatttacagcgtgaagcaactgtcatcagtgagcaaaaagtcaaagaaaccaaaatattggcgaagaaaccaatacataattcaaaggaaaaaatagcaaagatggaacatggacctaaagcagtgactattgcaaattctccatcaaagccttcagaaaaggattctgtagtttcccttgagtcccagaagacacctgctgacccaaaactgaaaactctaagtcaaaccaaaaaaaacaaaggatctgatagctcactctctggtaacagtgatggcggagaagaattttgtgaagaggagaaggaatattttgatgatagcacagaagaaaggttttacaagcagtcttccatgtctgaagatagtgatagcggtgacgacttcttcattgggaaagtcagacggacacgaaagaaggaaagtagttgtcattcttcagttaaggaacaaaaaccactagaaaaagtgtttcttaaagaagatacaggtgaaactcatggggatacaagaaatgacaaaatcaagccaagtacagaaaccagaaagttagaatcagtgtttttccactctttatctggatctaaaagctctagaaggtaagattctttttctattctgaaataatcattagttcttttttaaaaagctataaatgtctacttgtccatacatgaagagactataattctagtttgtacaacccat

SEQ ID NO: 36365 - DNA, 1031 bp, Homo sapiens
agccggtgcttctgctttcttgtttccatttgcctggaagaccttagatattcttttattttcagttttttttttttttttttttttgagacagagtcttgcttcattgcccaggctggagtgcagtggcacgatctcggctcactgcagcctctgcctcctgggttccagcagttctcctgcctcagcctcctgggtagctgggattacaggcacacgccaccacgcccagctaattttcgggtttttagtagagatggtgttttgccatgtgggccaggctggtctcgaactcctgacctcaggtgatccacccgcctcagcctcccatggtgctgggattaaaggcgtgaaccactgcgcccggcctatttttagcctttctaaataattgttttaggtgtttctcttgaatagagcatatagttggttctttatgaacccaaatgaagatcttttccatttaataagtgaagtaagccctttcacatgtgttaagatgaatatgtttgctgtcaaccctgccagattattttatgctgtaattattatatttattacatttagtctgtttttcgttataatgtgtttactgtgctcttctttaaaaacaaaatcttaaatttggtatttaggaaggtttatgtttctgttgtccttttgcttatactttttttaatgcccttagcgccccccccattttttatttagaatctgtattgtccatctttaatgacattctttaactttcacatgttgcttaaataccagttattgagttttcctactttccttttttcatctaccttctcttcctatttttagttgcatcattttttattcatcagaacatacagcacaaaacaaatagcattatcatataacctattattattataccctgttctcaccttaattttgatcttagatttgcaattaagtatatttaatgctaaattgctgaagtttctctagtcatttttttgtttgaataaagtttattttctagcagatttcttaaaaaaaaaaag

SEQ ID NO: 36366 - DNA, 1033 bp, Homo sapiens
gaaccgaaccgagcattgcagcggcgctttcccagctcagctggccttcctcggtgtctcttgcacgtcctcctcttcaagccggagaagggcttgctctgcatcccagtaaacctccaccgagctcttttgaaggggtgctcgcttttcctttccagagggagggtgtgccgctgccaggggagcgcaatgaagtgagcgctgaggggccgagggtctgtggggaacgaatgggtgcactttcccaggaatggcccttcacggactgctggttcctcttgagggagctgcttctgatttggactgttaaataggtaaatgcatttgcctctttttgtttgtctttagttcctagacttttaaaaggtcatagtatttataaaatgtaaagctgaaggcaggattagtccaggaaactgctgttgtgtgtgtgtgtgttttcgaagttaccaagggagaaatagaaacagatctccactcctttttcctcttttctcgcttgatcagcgatctctgaagctgtgtgttcctgtttttgtcaaaggaagcaccctctataaacttaactgtattgggccctccttatatccagttccatttgaattgctttgcgtttgatgagagcacccacacctcacagcctaattttaagtgtgtgtatgtgaattaaaatgtatgaaatttcccagaggattgtttactgtgggctatacttgcttttaaagtattttcaataagctttcttggcttgtttaactctgcaccaaatcaattggaaattactgtaaaatatccattatctgaaattcagttacctgaaactggaaacccggaaacagttttcagcactgatcacattctgctaattgtatatgcagtgtcccacccaaaccccacctcccctcaggttataggttttctgcagcttagtgttaatttcctgatcatctttgtgtctctcacaaaatcttgaacatgtgtatttattaggttggtgcaaaagtaattgtggtttttgccatcccttttaata

SEQ ID NO: 36367 - DNA, 1081 bp, Homo sapiens
tagtatcttgacatacaaagggacacattgttacgatttaattgatttaatatagcattgttagaagtttgactggtgctggttcttttttattttctgttattttgttacaaaggaaagaaaacaaacgaagaaaaagttaatttgtatatttaagattaatttttttttcctgaaataacctgactttagtagtcttacctttatcatagctcctacatctgtaccacaataaacatgtcctggttctagaatactatgagataataaattggacagggaccaaattagtttagatttagcatatcaatggaaaagccggttgatgtatacattgagaacttaagcaaatattgaattaaagggcatgttcattagctttttccctgtattggtacatattttaaggaatcaaatttttactgaacagaggaatttataaatgaagaaaagatatggccctgttcccctaaagcaagactaggtctaaaatcttacattactttttggtggtcgtgtgtatgtgggtgtgtgtgtgtgtgtgtgtcggaagtgagagggattgtcttaagctttccaacatgtggtcgtgtgtgtgtgtgtgtgtgtgtgtgtgtgtgtatgtgtaggaagtgagagggattgtttgtgttaagctttccaacatgcggccggggacagctttgaatgcagcccaactcaaattcacaaactttattaaaatgtcatggccgggcgcggtggctcatgcctgtaatcccagcactttgggaggccgaggcaggcagatcatgagatcaggagatcgagaccatcctggctaacacagtgaaaccccgtctcttctaaaaataaaaataaattagctgggcatggtggcgggtgcctgtagtcccagctactcaggaggctgaggcaggagaatggcgtgaacctgggagttggagctcgcagtgagctgagatcgcgccactgcactccagcctgggcaacagagcgagactctgtctcaaaaaaaaaaaaaaaaaagaaaattgtaaaaaacactgatgacattttttttttaaagctcatcacttag

SEQ ID NO: 36368 - DNA, 1026 bp, Homo sapiens
cccaaagtgctaggattacaggcatgagtcacagcgcctggccccattgcttttcttcaagtgattttcttagatgaatatgggtaggcagtaggtttttgagctggccacagtactgacattttgaaagtgtatatattttacaattttttagatttggaagggtttttaaaagcagcctttgcctagagatgtattcattttcattggccattaatgtcagcgtataaaaatgaaaaatattagtttttgaaggcatcatattttgaactgattaattgcttaattaatatattggtaatgctgtaagatagttcattttaaggaatagtttcattaaaaatagctggagatattaaaaagtgccatttaacctcttgtgatcttactctcaacaaagtttcaacattgaagcaaagcgtttatgtttatgttataaagtagcataattaatataacccagtaagtgaagtgttttgagtgtctgctttgtgcttactacaggccattgacaactatcaagtatgattctatacctcaaggagtttttagtttagctctgcacaaaatcacacaatacttgttgatctataatgaatgccctatggtaatagcttgttttgaatggagattttgaaaatgagatcaatgaggagtggagtgcagtacccggaagacctcctgcaagagatggtgcttaagctgcattttgaagactaggtaggatttaaataagtgtgtggaaaggacagggctttgtcaaggaacgcaccctcagtaaagttagaaagataaaatgaacattatatcatggacgatagaaagggagcagtgtcctgtgtgcaggaggtcagtggtggttagagagtggaaatattttggatacatggggcagagccacattgaggaggtccctgaggaggactacctttgttctttgtcctcctggagggtgggcatctgccattgttgaagctgtcaaagttaacccttagacttttgatgggcactggggagaggagggca

SEQ ID NO: 36369 - DNA, 1049 bp, Homo sapiens
tgtgaaacaattcacctgcagataatttctgtggtacaaggattatgaattttgtttgttggattttttttttttttttgagacaaggtcccactctgtcactcaggctggactgcagcaatgtgacaaactcctgggctcaagtgatcctctcaccttgacctctggagtagctaggaatataggtgcttgccaccatgcccaactaatttttaagttttttatagagacagagtctgactctgttgcccaggctggtctccgactccttgcctcaagagattctcccaccccagcctcccaaaatgctggtattataggcatgagccaccacacacactgaattttgaattttatagatgaactttagccaactgtggctgaatttagcattaggatgcctctactccttcccacataccttgttagccttttttcctacagcgtctttctgttgtgatttagagtatatggtagagccatagacagtgctggctacttggagagttgtgtaaaatgtaccaccccctaactcttggagattggacttggtcgcatctcagtgtcagccagattctggatagagagccctctaggccttccggccttggcacagcacagagctcctgccctcatctctttgttctgtgttctggacccactgtgaatgcttggggctctctgtgtcttgaaacatcctgattgtcacaggtggggacacagtcattttttcctagtatggacctatgggaaaaaatatagagataaaaattaagggccagatataaaataattttttcccttgaaaaacactgttttttcctcctttcctttttttaatcttacaattaatctctcaatctctgtctgtaaatgtcaatttttcagctcactggcttttaaattatgaataataacataaaaatttagttaattaggtcacccaagtatatgatttattttcatatcagaccagttaaggacatgggggtgggagcatatatagggaaaaatgggagtaggagaggaattggagaaagctgggcagg

SEQ ID NO: 36370 - DNA, 1005 bp, Homo sapiens
gagaccttggttttcaccttaaagtgtgtggggtttttttgttgtttgtttgtttgtttttcaataggagtgaaaacagtccttgtccacccacagccagtctgaaattccagaggcaacacattcaactctttttttcttttttttttttccacgatctctgctcaccacaccctccgcctcctgggttcaagcgattctcctgcctcagcctgccaagtagctgggattacaggcacgcaccaccacacccagctaatttttgtgtttttagtagagacagggtttcatcatattggccaggcttgtcttgaactcctgacctcaggtgatacgcccgtctcagcccccataaaggctgacctcttgtctgtcttgttcagtgctgaatcccagagcctagaacaacccctgggcttcctggctcgcaggccctcagtaaatatctgttgaataaataaacagatgaatggtgcattctgtgctgagtgctttcccagcgccgtcctggaggccgccacctcacgaggtgcctaatcactactaggagtttaccagcagagccaagcaagaaaagatatttccaggcagcagggacaacatatgtaggaaaattggaaagactttacaaaaatgacctggcatggtattcaggaaaataggatttattaaatttttctttttttggaaacagagtctcgctcggttgcccaggctagagttcagtggcacgatcttggctcactgcaacctctgcctcctaggttcaagcgattctcatgcctcagcctcccaagcagctggatctacaggcacacaccactatgcccagctaatttttgtatttttagtagaaatggggtttcaccattttggccacactggtctcaaactcctgacctcatgatccacctgcctcggcctcgcaaagtgctgggattacaggcgtgagccattgcgcctggccggatttattaaattgactccatttctttcttcactttg

SEQ ID NO: 36371 - DNA, 1032 bp, Homo sapiens
tgtttaattccatgaagtagacaataagaaccaaaaacctgccatgtggggtcaaaccagtagcacagcaccctgtacattctcttcaaagggaaccctgaggaagtagcggtggcaatacagggggaaagatgggattttatccccaagtgtttcccgcttctttaacttttcttttctttttcattctttttattcatgtacttgggaaaagtatttctgcttctttgtggaaaatggttactataaccaatgtatgcagtgataggtctgtgtggaataagttctgtgtaaattcttctagcagtataaaaaaggaaaagggagtggtcacaccaggaaaaggagattgtgtttgtggtatcgtggaatctggtacttatctgcgtggatcagacaggcagtttgcctggacacagcagggccaggaccgttaatcatcggatgaagtgacagaggagtatttatcttgtaagcagctgagccctactggaaacatattgtctcgggtttgtctctcatctaaagcaattcattactcacctacaaatgctgtcatggatcccagcagctatgatcatacgcttcctcagtactcctgacataaataaaaaaggaaaaatattttcagttgctagatcttctaaattttttttaaaaggagagacatataatagagttgattttctattctgaaatatatgttgtgattcaatagttcaaaaggaagtttctttatgtttaaagtgaaacttaagcttattaccacagaataatttagcattttggccttgttattatggagaactgcctcggacagtatagagattaaatatgtatttattcccctgcaagcaattctaaattcccctccttctctctcccttgcattatcagtttccccctcaatactgaatcagtctcatcactatatgaacctatcgcagtagtttctgtttcacataataaagcctgccttcagccccatgcttccctcctgtgctcatcccgttgtactccttccttctcttt

SEQ ID NO: 36372 - DNA, 1005 bp, Homo sapiens
ctccatccctgacaccatggccactttgttcatgggcccattgggcaatgacaggaatagctgaggaaagagaccgagtggtgtccacagaacgagtcatcctatccacttgattattaaaatgctcctctgctgaggtcatcctttggtgaacactcatatgggatagaaatatcttcacaggttttgaccactcagaggggtccatccacatacctcttccccagatttctttgtcaccaattttccaatcatgcttcttccaagtccctgaccatcaagccaaaccattggctatagcccgtgaatcagtatataatcacacatcagaccatttctcctcccatgcaaagtgtacagccaggttcactgctcaaagttctgcccactgggaagatttgccttcaccactgtccttcagggctgtcctagaaagggactgtagtgctgcagctgtccactttcaggtggtgcctgcatatcatgcagaaccatatgtgaaccaggacctagtcatctcttccactgatcatagggaactccctgtgaagccattggtgcaggctggggaggagaaggctgggtggcagtagtgggaaccatgggcatttgagccacttcctcatgtaacttacttgtgccttcaggacctgctcaagcctgattacgtatatatcacttccatttaatggtgaaaagctgctgtgcatgacccactttatggctagatggatcaaaaagcatcctgctcgtgataggcagttcaggttgcatggtaagttggcaacccatagtcaagcgttcagtttctacaaaagccaagtaacaggccaagagctgtctctcaaaaggagagtagttatctgcagatgatggcagggccttgctccaaaaatcttagaggcctttgctgtaattcacctatgagggcctgccaaagtatccctatctgccactgacacctcaagcaccattggatctgctgggtcatatggctcaagtggc

SEQ ID NO: 36373 - DNA, 1018 bp, Homo sapiens
aaagttgattgactttgtctagcctgctgtggacctaacacacagatagtcttctagatattgggagagcctcagtttttcacttttaatagtagcataatgctactattaagtttttcaactctttatggagacaaatgaaacaataagttgaagacggctttagaggacttcttggagaaaggccttagccacagttttattatcatgcattacaaatattagaagtgtgctttttgtctatggaggtagtggctggagttggtacctatgctgatgtcgttgatgggatgacacgtgtggagaagcatgttggaagttgactgtctctggcacaggctgctagggaatgaaaactaaacactcttctgaccatttgcatcattgagtcaagcagaaaaaaaaatcagttaagtaactccctggagtgacttatttctatttccatgggcatattgcctttgcttattgtcatttgcttttagctatttttgcaaaggtgctgaaaggctgtctctgaagtcagacagtaacattcaaaattatagacattatctatgtattttcctatccaatctcttactttaatgtccgaaaacacaagagtgtgggaaagagagaaacctctataactcaatcatgctacagcaattttcatggcccccaaagttacttcagtgaaatatttcaattcaattgagtcatgagtttgaatgttaaatttccccagctttcattagtcttttaaaaatctctgggtttagaggccttgcagtcaggcagccttgactgtgaatcctttctctgccactttctagcttctggttcttggtggagtagtagtgcttgggaattgctttatctgcagaatgggaatcatgatacttagataatatgctggtttttggttctagacaggtgtctgacacatggtatgcactgtaattgtgtttattgtctttcatgtaattcccaaaatgtcttgaagtttttattttcacaatcaataagcttgaga

SEQ ID NO: 36374 - DNA, 1106 bp, Homo sapiens
aatgcatcgtttctgcaagagattgcctctcatacttggcttgctggcctgtcaaaatgatctttttcactgtgagctgccttatattcactaaataaagctcatgggactcattaatccactcaaatttttgatgagtgcccactctggccagcactatattaggccatggagatacagtatgaaaaacagacctggtatccggaaccctcctgtgactgttggggatggggtcctgaggcctgtgtctgcaaagcctcttttgatggaggaggagctgagtgtatgagtctacagcccagcagcccaaaatgaggacgtggaagccaatgaactacctaccctatagttatctgctggagtgccccggctcaaagcatctggtttggaaacattttggtttttgtttctgactaattaattgtaacctccaatgtggtttaaagtttataaaacacttttaggtacttctcatgttccagtagtgttattaggaactctaatatcatatagttaaaggtctgccaatatttttctaagaaaatcgtacagcaattgttcaatagtacaaatttactctacctgaaaatgttaaaactgaacactattatattgccctttgatgcctatctatttttagagtgccaggggacaaagacataaacatgaacaaaaatctcatagttcattgtgggttttttcccccccagaaggctttgaatgattgggatgttggcaggaggccactacacatatagactataacaatgcatattaacactgaaaactatgaaacctttcttttctacctttacttgtacttgatgaagttaaaattttgttgtagtaaagagactggggaatttagtcagtgtttttctttttcttgatacttcagtagatataaagtgaattttatctattgttcagggcatgtgagttgagtgtgctgggatggttcttagagttggttctctgttagaaaaaagacttgctgggtgtatgcttggatgatctacaggatccaactcctaaattcaggacataatctattttttttaattatctgtaacaacagttagaataaggtacatttgggaattgaa

SEQ ID NO: 36375 - DNA, 1065 bp, Homo sapiens
ggtgtgagtgagatagggaagctgtggatcccggaggctgcttgctcagttcctctgaaggtcgggtggagctggctcttttgacccacatgctccaggggagctttccatctgtccaaatgttagcctggaactaaacgcctccacacagtgatgaaatccctaacaaatgtagtgacaacactgaacataaggccttaatttttttcaaattgcttgcatttacagttaattcagtttgaattataagtcacctccatgtgaatgactcatgcactcattattaggagctttgcattctaaaatgtacaaaacagagaggagctggtttgcaaactcggcatcaccaaggtaatattaaactagtttcaaactaagaaagtggtttcctgtcattgcacatcttgtattccagatccagagttatcaaagaaaaccgtcatatcttttaagaacacctttggatcactgtatacagtagttattggaggggatatgtatggaaatcaaactcaattatgtagcataagtgaaaaaaaaaattatttttctgttacaagacaatttgctttaggccagttgaaaaccttttccaagtccagacctgttgggacctagagggacggtcaggctaggctttgtaagttgtgatggaagtgaaaaaatgacttcaaaagcaaataattttaacactgtataatagactggggagaaatagtaaggaaatgcccagaaaacaaccatataaatagataattgctgaaatatttggataatttcaagaaaaagtgcaggctaaatttttggacagtgaaatcagctttccataataactctgtctcccagccagtaatttccttgttctccctaatttacttcacttctctgtagctggaaaattcctttgttttgtaccctaataagctggctctgcagccactaagttctattgtgagattttgtcttgcctcctgcttttatgcacataactggtccctgccagggagctctggagcccccaaatagctttaagctttctaatgacttttcccaggggtcctccag

SEQ ID NO: 36376 - DNA, 1062 bp, Homo sapiens
tccccatcacctttcctgtttggttagagtcactgatggattttcctcagattcgtcctgctggtgtaagaactctaaagctaaagttctgtttaatcttgccaaagttgccagagcaaagagcagccacggagtgtgtcacgttgggatgaatgtgaaggcctaaacagcatttgctcatttgctttgcatgtgcagtgactatcataccaagagctggaccagaaattgtggattatgtaaagtgctaatgggcgcagttccgattttggaggagcttacaatgtgataggggtgagccattcattcaattattcaacatatatttgataagcttctcaatgtgccaggcactttaaagggttgtctgaagatagcattgtcttagaaagacacagtccatgactagatggagcttacagtctgtgagggagacattggatacctgaggaagatgtttaagtgaacctgggcacctgattttgaaaatccagagggataactgaggagatgaatgaagagccagttggggaggtgagtcaactcaagcctcctctggatgttagtttgcaatcaggtttttcaggattagtgtatgtggaatagtaatcatgaagagagatggaattcaagttgggataaatggcaaatgcaaaagcccagaggaggaatgagcaagttgttttgtttagaaggttgacttggagtgtggctgtctctcaataggctgatattaagaaataaggctgataaattggagtcgcatcagtgaacttcttgaaaactaggtagagagttgcggtttgagatgcaaataggaaactacaacataatctttaggaggaaaacttgaggagggcagcttgcaaatgaagagaacatgggtttgactcaacaagtaaggtaaaactaggttttgcaagtttcaccaccatccaagctctccccttcatttgggctgataaagattacgataagtctggggacatccctgaacccttgtgaatttcaatgaccaaagcacagactgtcttacacatgagctgtcagtcagggtgcaca

SEQ ID NO: 36377 - DNA, 1046 bp, Homo sapiens
gattctggaatcaagatgtggttggagaggagcatgagggatggggtgggtgatgtgggagtacgacctggaaggaggaaggatgggtggtaaaaaggatgctgcaggaagggcttctgtttgatataaatgtttttatgatttgtttgtagaaaagatgctgacacacttgtaacccttatttcaaagggcagcaaatcttgcacttgatttttctgtgtaaatgaactgtgtaattggtaatagtttatatcaaaccattcaaaaattttctaagcactgttgcaagctcgtagacttcccaagtgatatcataataatatcataattaccgcggcttatgaaaaaaatgggttaagttctaagatgtagtaacatctttaatctgaaatatctgcgcttggccaaatcagctttcctgtattttctttcacaaaacatttggtcccaattgtagttttctttctttcagaaaaaaaaaaaaggtcagaaaaagttcaaaatgacatgatggaatatatatttgtttggaaaaatgatctggttattgccatggcagctatattaaatttttagggttatgtgatatagtttttatattaataccatctttgaaatttatttacatgatgtaacagctctgatggttacattacatctttgaaagcaaaaatgtacaaactagccaagatttatgcagcttctcagcagggcaaaattattcactttaaagggaaaaaaagatatttgttggattttaattataccatttagatgttgacatgtattaaatttattacaaaagaaatgcaaagatgacttacagaaaaacaaattcttacctaataaaaaatggcacatatcttgataggctatgaatttttgctttccgatgaaattgttacaaagtaaatgtctgaaaaacaggtttcatgaataagacagaatctttacattcagtctttcttctggtgcataggattgttttatgtgtttactcttgctgagacttaggcttgtaaatggcttactaataaacagaaggc

SEQ ID NO: 36378 - DNA, 1035 bp, Homo sapiens
tgtcacagctaacagctggatgcagaaatatttctctttaatttggatggataaaatttttttcacagcagggcactctcaaaagagtacaacatcaaagagggcgggtctcaccagtcagacatcagctggctccaggatggagcaaaatgaatgaactgtcaggacttttccagcatatatgcttttgccaagtgaaaagttaaaggttcagtggcttgttcagatcacagacagaatcctgataatggaagcctgattccccaaagtcttcctctgatcaacagacagagcatgcctgaagaagactccagaatgatggatggcaggcttcatatcgacggctgccgccgccttcagagataagtggaattcaccaaatgctcaacagttctcaggagtgcctgagtccccatgtcataatcctcagagtcaccgactctcctctgctaacttgacacttagcagtagctgacccacagtgtgaccaaaatacccatttccatttcttcacatggccggctctctgatgaaggctttgcaaacaacaccacaggtgttttacagttcattgacacttttcaactgtttttctgattaccatatttcagtcttgacttatatgttagtattatctgcacactcaacataaacctctaatgattttctaatatttctggaacttgatgaatgtgaattgacaaagtacagtatatagctttatatcagcattactgaaaatacagcaatggtgtatataaccattactcacttattttatggggtatttattacttgacctttgaagccacattttagaatcttggcattcgagacattccaaaatattccagaccaaagtgaaaggaaaggatttccttattagaaacaacaacaaagtaagttaattgtaataggtggaggagggagaaactattaaaatgaaaaaatgtataatatatatttgagaaaaaataaaaagctgaacacacataatatgggcacactagtcggtgtttaatgaagaagctttat

SEQ ID NO: 36379 - DNA, 1102 bp, Homo sapiens
atttactcattcagttatgtatgtgttcattcattcagctggtatttaccaagtatgtacttttttgctaggcaccctggtaggtacaagagatacaaaggtgaatgacatttagctgttcctccttttctccatctttgaaaacctcatagtctaaggggaagcccaattagtaaacgtattatagggtgaaaagtacaacagtaagacatgtatgtatgatgtttcacagtagcacagaaatggagtaatcaatgctatctggtggaaatgatgtttcagatatgttttgaaggataagtaggagatttctagacatacggggcatgggggaaggtatttctggccgtccaaacagcaggtggaaaggcctgagagtgtgagtcagcatgcatggttgattggtgttctcagagcagtttttatggtctgtgtgatgaactcttttcagttcaaccctcttacagctctcttcactcatttgctctactggctttttctgtttgagaaggagaattaaaagagcatagagttaccgccttatgtaccttctgtaggacatgatcaagcaagagaggaaatgattcaggcagtaggagactaatccccctgctcagtctcagccaagaagtcttcccagagcctcattacccaggattttccatccagacctgctgtcgtggcgcactttgtgctcagcctgaggccaggctcagcttgggaaacagagttctctggtctgggtcctgccttcctctctgtctgccagtgaagggagaagttcataaaagatagtcattgtccctcttctcctcaataattagttactttattcagcattcttaactattctccaacatagtttaatttatggtgttaataatcaaaatagtgataatttttgttgcggtacataggtgcagcttgttcactgcataagagcatctggctaagtgggcaggatggggcctaaaatcaagtctgtactatgccacccatgctgtgccgcctgaggctgcaatagcccaaagagggcatctttttctaatccaccctaaggagctgcatgggctaccacagtcctaggagttccctatcacca

SEQ ID NO: 36380 - DNA, 1054 bp, Homo sapiens
atcagagctgcagcaggacagggctctctggagaaatcaccttccccctgcctattgacagatccctctgttctgcatcagacgggctttgtcccatcacaggcatccaggccttggaaggagccaccaattaaacctcttgagctggtaaaatctgaagccactttggagtgtctgttctgattaggcaggatgagaggaagcccatcaccctgcaggccccgctccctggtctcaattttctctcttgcctccaccaggtgcgagaggtgtgagaggagcttcacgcaggccacccagctgagccgacaccagcggatgcccaatgagtgcaagccaataactgagagcccagaatcaatcgaagtggattaacggattgactggttggaattaaactgcaaggaaagtcatgattaaatgtcacggacacttaagcaaaaccaaagatttcctctgagcaactttcaatcagtcccagaaaaccaaaagcagtaataaaataagtaagatgttaagagatattgatcctggcatggaagtcagaccaggaaagagattatttatttatgacttagggatgagacttatttcagtggacaactaacctgggatggttaacatttccagtcccaccatgtattttgctttgtttctaaaaagctttttaaaaactgttatttaataccaaagggaggaatcgtatgggttcttctgcccaccgttgtgactaagaatgcacagggacttggttctcgttgcacctttttttagtaacatgtttcatggggacccactgtacagcccttcattctgctgtgtcagtttggcctggcctgacactggctgccccagcggggaccacggaagcagagtgagagccttcgctgagtcaatgctaccttcagccccagacgcatcccatttccatgtcttccatgctcactgctcatgcactttttacacggtttcttccaaacagcccggtcttgatgcaggagagtctggaaaaggaagaaaatggtttcagtttcaaaattcaaaggaaaaagtt

SEQ ID NO: 36381 - DNA, 1123 bp, Homo sapiens
gaaaacatcccccgagcccagaagtttgagttcagcttgagcagcatagtaaaagcctgtccctaaacctaattgttttttaaatatcaaagacaaagaacactgaaagcatcaagacaaaagaaacgtatcacattcaacaaagccccagtacagctttccacagatttctcagcagaatccttgcagggcaggagagagtgggatgatatattcaaagtgctaaaagaaaaaaaaaaacctgacagcctaggatactgtaccccagaaagatatcctttaaacacgaaggagtgatacagactttcccagatgaacaaaagctgagggagttcatcaataccagatctgtcttacaagaaatactaaagggaattctgaaagaaaagaatactaatgtgcagcaaggaaacatctgaacgtataaaaaaatcactcataaaagtatatagagaaattcagaataacactgtaattgtggcatgtaaaccacttctatttttagtgtgaagactgaagaacaaaactattaaatacaataataactgtaacaattggttaagaaatagacaatgtaaaaatatgtaaataaagcaatcagaaattcaaaatgtgggggtggggaatggtgttaaagtgtagaggctttttatttctttgtgctcaaagttaagttgttatcaatttaaaacaatttgttatgaaatattttttgtaagtttcacagtaaccacaaaccaaatacctataatacatacactaaaaataaatagtatgacaccaaaacatactactaaagaaaaccacatgaacacaaaggaagagtaactgaagaaaagaagaaaaaaatatcctcaaaacaaccagataacacagagaaaaaatgcagtggtatgctagtaggagtgtaaattagttcaaccattgtggaaaatggtgtggtgattcctcaaagacctaaagacagaaatgccattcaacccagcagtccctttactgggtatatacccaaaggaatataaatctttctattataaagacatgcacatatatgttcactacagcactattcacaatagcaaagacatggaatcaacccagatgcccatcagcgatagactgg

SEQ ID NO: 36382 - DNA, 1033 bp, Homo sapiens
tctcctttccggtcggcgatccgaccaatccaagaaggttggtgcaatcttcggctctactcggctgttttcgctgatgcgggcagcttgggggccgccgccgctaaacagacgctttcctttttaattttttttccatgtgttcacttccgggtccggcgtcgatccggatgcccgaggcagaaggatgtttgacctccggataagcgaggcgctgctgtgcattcattccgggctgcatcggtggcgacagcagaggctcgggcggcgactctccggccagcggcggcggtaggaggcaccagcggcagtgcagggaccgaatccgagcagcgctgcgttacctctctctctcgctccttcccccctacctcgctcgctcgctcgctcgctccctgcgtggctcgctttcctcctccggccgccggcgggtgtgatgtgccgccgccgctgcccccgccggcgctgacggactgggggcgccgcccgcgcccgggaccgacccctctgctcgcggccgcgcctttgaggtaaagccccctgcgcgtaggtgctccgctgccagccccggcccggcggctgcctcggcgcggccgcggcgccctccctcccgggtggggctggggtcccgggcgggtggggtggggtgcggcgggggcggcgccgcaggcgcgggtgtcgggggaggggtgggcgaggaccatggcgggtggcccggaggcgtgggcaggagggggccgcggtcggaggctgagggcgcggagggctagggggcagcgggggccgcgggtggcgggtcgggctgggtgcaaaagttgccggagtggtgcggcgcgactggggcggcgagggaggtgggccaactgggccggcgggggcttccttaggagagattgggaggtggggagtgtcgcccacggtgctccttgactgtgtccagacaattacctttggagtaggggcttcaggcaggaaggaggcatggataggctgggaggaggcgacgggggccagcgttcagctcagggataaa

SEQ ID NO: 36383 - DNA, 1031 bp, Homo sapiens
tttctttaacagttgttgaaaactctcctgggtttttgatactaagttattaactctggtcctgtgggtcccactgtagttccagaagcgttgtgtaattaggatgcttgagacggaaaatgttttgggtaactttggcatgactgagtattcatcaaacactctttttagtccttggggttacataattttacctttgcacatgataacttcatgccaaagcgcctacaggcagccctctcttttacatatcttggcttacttttttaataatagaaagaagcaggggtgtggttgcaatccctctgttttagtttccttaaacttccttaatttgtttttaagacttcgtttcaagtatatttatatctgctttggcttattcttattttttgcctccggttcctattcccatactttgtggttcttctcatttcttttcctcttcctcctcctcccccactgtaagataatattcctcaagaagaaaaacttatagttatcgtattctgtatcagaaaaattttctgcctgccagaaaggtgacaaataaatctgtatattttagtattatagttttctgaagaggaccttgttttaagggaatggttattgtacttcttgtgcagaggtagtgttctgtgtatgtggtctcttttctttccatccttaaacactgaaggataatgggtgggggggagcactggtgttatatgctttttaagctgtgttttcaagttcagcaagataccaggcactctctagatcctaataggagcatgtgaaccttataggtagccattcttctccacctcaagaataagatttaaaacttaacacagttaggttatatgcactggctttgtgctcggaaagcactataattctattgtagttcgtatcatattttctgttgttgctcatttaaactatgtgatgtcagacaggttgtcttgtttgccatttgtatttcctgcctttagcacataataggtctttaatgatcacttatttgttgaatggattgtttc

SEQ ID NO: 36384 - DNA, 1067 bp, Homo sapiens
acttcatgatccacctgcctcagcctcccaaagtgttgggattacaggcatgagccaccacgcccggccatgatcttcttctgctcagaatatccttaatatgtggatgtgataaatattctttcttgtttttagcttatatttaactcaagatatttggaattaattttgttgtaaggtgaggcaccagtaactatttttctcctcaaagtggttagtttatcacagccaattattgaatgtttttaaatattatttcagatattttatgtttatttaatatacttactggattaaatatgagccctagtaagattacatctcataataatgatgaatttaaaatgaaatgatagttggaagaggaatttggtattcttattcttatataggagttctcgttttgaaattttttgaccatgcatttgactattgattacttttaaattgtatacaatattccaagaaagtcagaatctttccatttttataagtgggctactagtatctgtagtgtctgtatcactttctactctgaatctaggtgaaatactaaatacatcgagttgataataagtttgaatatttccttgttaagtttttttgccaaatagaagcaaaaacctatgctttagttaaatgtattatgtgctttttttcagagtacagttttatataatgtatctttaaaatcaattactggcagaatctgatttttttttctttttcaagggaaaaatttatacacaaatgaatatgtggcaattaagttggtaagttcctgtttcttaatttttcttaatgatttctttgttactttttaagtaacttatatattttaattattttttgttttcatgtcatttataatttggatgtttatttgacagttatatgcatagctaatctttgttgctaagctcctaacatcatcctgctcttaaagtatatggtaatgtgtaggacattcatgtttgtctgtgccacaaaaactcaatccctttactttggcagcattgtagaactggatcttggccctatttttaatttagggaaggatttttaat

SEQ ID NO: 36385 - DNA, 1079 bp, Homo sapiens
aatcactttgcaaggctatgtttactatacgttttcttactatggtcttaggatcccttttttattttatgacaaatttggagctttttatgtttatgctgatatgagtagagaacattgtgaaaaaatttaatttgcaaatataaaatgcatacttcttccatattcttagtctttttggaggcactattatagctgttgaagtgacttacaatatagtggtaggctgaaaaatggccacatagaagttatctgtatcataatccctagaacctctacatgttactgtatgacaaagactttgcaagtatgataaattaaggattttgagatggagagattattctggattatctggtgggggcagagggacatttacacacacagaaaaggagtaggcattgtgactgtggagcagagtggagagaacctggaagaggcttctagtactttcgcctagagtctctagagggagtgtggccttgcgaagacattgattcagaccaatgaaactgatttcagactcttacctccataactgtaaaaaaataaatttctgttgttgtaagccaccaaatttgtagtaatttgttacagcagccgtaggcaactaatatgggtatgtttttagataaactctaaattcaagtgagattatttcatgccactagagaaaattcatggaaaaaatttctattgtttgttacatttcctttatgttaaaaggttctcacagcacttttctgtatacttctattcaattaattgtaagaattttacttgtatagcttcttgtataatacaggtagaggaattttgtttctccagatttaataaaatggaatttcttcatgtatctttttgtaagcatgtttacattctagtgggtagagctgtccatttcatactgatatcagttttacattctgttttttctaagagcacactttgcaaatgagtagtcattgtaggggcaataagttttaaatgttgtagtaatgtgttcatcactacagacttcttataatacatatttaagtctgatacagacaggcctcagggagttatcaaaattatca

SEQ ID NO: 36386 - DNA, 1081 bp, Homo sapiens
ttaaaatctctcttgacttaattctcttccagtccccattgttacttttcttcgaattgggcttccttttgaatatctcaaccagctttttacctctacctgcacagaggggcacatcatttagtataaagtccaaattcgtttctctttctactgacctactttttagttgcactacacttactattccttgagtagatcttactattttcacgtctgtattctttctcgaatatctttcttttctaatgaattctatttttctttaagccctagctaaatgtcacctgcttagcaatgcattttctgacatcttttcctctccagaaaatcttcttatttgatctgatattttgaatatgtaaacctttgaaacctttatttttcttttatcgtatggtaattattatttgtctatgtctgtcttctccactgaattttgaactctttgagggcagtgataatgatatgttcatctttttcttcttggtagcagaatgattggcacttgtaggttcttggtaaatggttgaaagaataaattcttaactaacaataatagactgttttctttcattagatgtgaagttgggatgtataatcttcaaatttcctatattttctaacttctgtgaccctgtgattaaagtttgatattttaatattacacaaaattgtcgtattattaattttgagtttattctatttctggacaaataatacaatttcaaatttttaaattctaaaaattaatttcatttgtattatcctatgattaggtaaatttattttctcattttggacaactagagatcaaaggaaaaaattattggtgagaattttttaattaatggaagtggtaaccaaggagatatgcagaaagttttatattaaaacttgctgaactatacaactcagccatctaaaattagtcactttcttgagaagggtgggctttaattattagaattaactcagtttcttcatttacttgaaagtaagtatatctgaattgttgatatttcatgaaaatgcatagaacatatttgaaatttatgggaaaattgtttttggaggtctg

SEQ ID NO: 36387 - DNA, 1028 bp, Homo sapiens
agtggtcatttcttaaaggtcagttacaatgtagagtatagaaatcataccaaaaaactttttctattctcatacattaaaatccattgtagtttgaatgaaccatttctgactacatgcattgtcttttggaggacactggttcattgagttatgcatgtatttcaaatactaacacatttcactacccaacattaaatcataatagctaatatcaccacaatttcatcagaacaagcttttaagtattggaaaactgtcaaggtcatcatagcatataaaaatttttacaaaattcaaattgcttgaaagctttaattttattattggtaataaatgtcagtttttcttgaagtaagagtctcttcattcattcttgagaatgctttttatttatttatttgttttgcttcgttgtactcttgaatagaaaagttaaaagttctcttgctctcagtcattaatggaaagcattcaatctttcaccattaaatgtgatgttagttggtaacttttcctagattccctttatcagatttagaaaccttctattccaaatttttgagtgttaaatcagatgctttcttagcaccctttaagataatcttaaggtttttgccatttcttctattattatggtgaattatattggtggatttttgaatattaacccaactttgtattcctggattaaaacattcttagcatggtttctcattcacttatgtatccgtaatgcccaacccagtcccataaagatatagtatatgtccagtaagtatttgttcaattaattaagacagtgaaattccttaaatggttttcctgttttggaaactgttgaaaacttttgaaaaaaccagtcattttataaaccaaaacatactgctatctatcttattcagaagtcatttctcaacaacgttaactattgggaatatagatggtgattcagaaggaagtagagaacgttttgacagtcctttctttttttttttttttttttctttttgaaacagagtcttgct

SEQ ID NO: 36388 - DNA, 1048 bp, Homo sapiens
gtcaccagtgaaatacaaattaagtcagttaatccatactttgaagtttgcttttctgaaaggatttattactgcttatacttcatagccactagcatggctaaaatttaaaagaccatacagaggttggacaggtgcaactgaaactcccatacattgctggtagaaatgtgaaatgacataacccctttggaaaatcatatagaagttttttataaagttaaacctatacttacaacatcatgtagcaatcccccttctagatattaacccaacataaatgaaaatgtatgtcaacatagactagtacaagaagaatgttcataacagctttattcacaatagccccaaactggaacctattcaaatgtctgtcaacagatgaataaacacattgtaatatactactcagcattaaaaagtaatgagctatggttgcacgtaacaacatggataaatcctgaaaacatagtaagtgaaagaatttggacacgaatctatactgtatgattccattcatgtgcacctgtctaatctgtagtgatgaaggcagataagtggttgcctgaggctgatggtattgtgggggttgggggagagtaataggcaagagacattttggagcattagaaatgcctcttgattgtggtggtagttatgcaggtgtgtttgttgttaaaacttaccaaactataccctcaggactacgagaatctaatgaagtaaaattttcgttataaaagttataactagtttttttcatattctcatccccactttcattagtggatgtagatggactttaaggccactacttattttggaaaatttgctatttttaatagcatatacttacattttataataaaaagtacaagaaataaaaaaacctctccgttatatcacatttttagcatgcgaaatgggaagttgaaatctcttctctagtcttccaatcttgtagccttaatgactgtcaattttgatgtatacttctgcaacttgcagtctggtggaagcatatatattgattaaataaaaacacaaa

SEQ ID NO: 36389 - DNA, 1050 bp, Homo sapiens
ggtttatttagtctgttatatatgagaagcagagctaaaggaatatgcttttgttattttatgttttgttttgctttcttgaaatccagtggtaaaaagcacacactaggaaggatctaagctttctttaatataaaaaaaattatacttctctgaactgtttaatagagcaataattaaatacatcttctgataaattaagggaaatagcatcatttttcctttttgagaatggaatcatactattatgttcacagaaattaagcattattccagttttaagtgaatgactttaaaatcattgtagatggggagcccatatttctaacagtatctcatagttcatcattgtgctaggtgctttaagggattttacaaaatggcattaatggtacgctacttactgagggatgctacaggtaagaaaaggcaaagcagccctctctcaccctgtgaatattgtgtccattaagcagcagagaccttcagaagcaggagaaagatctggagatgacacaaaactgttaaaggctctatttagaaaaattcgactttaagattgggatttcagtctgaatgaatgtatagttgcattagtcagaactctttgaattgaaagtgacagaatttaacctggcttgagcaataagagtgtacattatttcatttaactgaaaagttcagtggtaggactgccttcagacatgcttaatcctggagttaagacaggaatcttctccatatcttttggttttgctttcctaccctgctgttttcactgtcaggaagactttccatgtgtcatggtaaagtggtcatccagcagcttgagacttctaccctaccatcttagtagtctcagcaaaaacaaagggccatttttctcaatatttccaacagaagcttaagactgacattcccttattggttgatgtgcccacccctgagccaattactatggacaagggaatattgttctcccagtagctgagcctgagtcatggtttgaccttgaggagacacaatggtgatggaactggttgagaagag

SEQ ID NO: 36390 - DNA, 1039 bp, Homo sapiens
gagcgaaggagagtttgtaattcacctaagcgagtgcgagttttcattccagtgcacaaggatacatttgcagacctttgctggccttattttgactttctgataagcaaaatggcctgtcatcagtaggcaacaagtgttgatgtcatgctttagagatttgcaaaatttgggtctgaaattcatggtcgccattagcactgccagctgaaatttctggaggtaccttattctcactttgacaccctttgcccctggatgtctttctgtctgtatctgcgtgaatgtccctgtccgaagtctctgagattttgtgtatttttacttatccctcctatcatatgttttcggttcataaaaaagcatgtgcacgtggtaagaataaaatagtatagactggtttgtagcgaaaaacgataactgcactacctctttccggaggcaatcacatttatccctttttgtttttatttctttggatatttagttatacaactcgaaaataatactaagcttgtatttccctttcttggatttactaagccttggtttcatcttttaaaatgagcagtcagttaactcacactattatttctatgttcctccaaattttttgccactgaattccttcaaatcttagatatcgttgcttgtaagacttgccattattatgtgtaccactaagaaaataaaaacatcaggaccaactgtgtaggatccatcctgttggacccatcatgatgggtttcatagatattaaaatgtcaaacagggccgggcgtggtggctcacgcctgtaatcccagcgctttgggaggcgaggtgagcggatcacttgaggtcaggagttcgagaccagcctgaccaatatggtgaaaccccgtctctactaaaaatacaaaaattggccggacgcgggggctcacgcctgtaatcccagcactttgggaggccgaggcgggcggatcacgaggtcaggagatcgaggccatcctggctaacaaggtgaaaccccgtctctactaaaaatacaaaaaat

SEQ ID NO: 36391 - DNA, 1046 bp, Homo sapiens
gagggaggcattcttaagggtcaatttaaactagattcttactcagtgtttatgtaacaaaacattggacaggggaccagaacccttatctctctaaggttgtgtcctaaaatgtgatcatttcaccccttttggtataaaacattttagtagcttctagggtaaagactaagaccctactaatagtagggtgaccatataatttggcatccaaattgggatacttttgtgtatgaaagagggagctgttaataattatgcagtgacagctcgcataaatggaacttgtccttggcaatctgggacatatttgcccaggttatcctacctaaaagttctttccctacatgggctggtcccagtctgaccctccagcttcatctcataccacagttgaacttgtttactcctctttagccatgaaatcctttattcagtcccgtttactgtgatcctcttaaaatagggactttgcatttggagtttcctttgaattttttttttgaggacgagacttgctgtgtcttcttggctggagtgcagtggtgtgaccttggctcactgcaacctctgccttccagtttcaagtgattctcctgcctcagcctcctgagtagctgggactacaggcacctaccaacgagcccgactaattttttgtatttttagtagagatggggtttcaccgtgttggccaggttggtctcgatctcctgacctcatgatccacctgcctcggcctcccaaagtgctgggattacaggcgtgagccactgtgcccggcctaattttacatttttaatagagatgaggtttcttcatgttaggctggtcttgaactcccgacctcagatgatccgcccacctcagccttccaaagtgctgagattacagacatgagccactgagcccggccttattttattttatttttgagacagtcttgctctgttgcccagactggagagtagtgagtggtatgatctctgctcagtataacctccacctcccacgttcaagtgattcttgtgcttcagcctctccag

SEQ ID NO: 36392 - DNA, 1034 bp, Homo sapiens
tgggattataggtgtgagctaccgtgcccggccctggatgcattttttaatctcctttttttgccttgccctgtcttcttatggtgctgactgatctctactttctgactggtaggactagtctggagtagggtacacctagacaaatgaaggacacccagggagtgagagagagtcatcctcacagaaggactagtgcagaggccaagcaaagttcagacactaagttccagaaccaagtagttcaatgcagaagccagggttggaaatgaccttaaaacaagtcaaggtcaaactggcggcatgttgaacaaccagcatgattaaagcagcagagtatatggtattgctggtggtagaaggtgcttaggagcattttagaaagtgttaaccaactggatttagattagttctataggcctcaggagaggataggcatgtgtcccagatacatggtactaggttttattgggaaagtacaaccatagtaaagctgtgtatgttagtcttaagtcactgctgtagaatgttagcaggaatataaatatatcctttctagctaattttctttttctttttcttttttctttcttttttttttttttttttttgagatagagcttcgctctttgacccagttggagtgcagtggcacgatctcagctcactgcaacctccacacccccagattcaagcgattctcctgcctcagcctcccgagtagctgggattataggcatggaccaccatgtccggctaatttttgtatttttagcagagatggggtttcgccatgttggccaggctggtcttgaactcctggcctcatatgatccacccgctgcagcctcccaaagtgctgggattacaagagtgagccactgcacccagcctggctaattttctttttaatggccagatacttgattacacctggttacttgttagaccaataaaattcaagcttacttgaaatgaaagctaatttggtttattaagggaggaaattcttaattagcatagaatgccagtta

SEQ ID NO: 36393 - DNA, 1018 bp, Homo sapiens
cgagacccgctctgtcgcccaggctggaatgcagtggcatgatcttggctcactgcaacctctgcctcctgggttcaagctattctcctgccttagcccccctagtagctgggactacaggcgcatgcacccacgccctgctaattttttgtatttttaatagagacgaggttccaccgtgttagccaggatggtctcaatctcctgaccttgtgattggcccgcctcagcctcccaaagtgctgggattacaggcgtgagccaccgtgcccggctcactcatgtggaaatcttaaaatatcacttataagccttaactgctgtggtcaaggggcaggggcaaaaccgttgtcaaacaaaggaagtaataaaattgaggaaaggggaatgtatatttcatgaaaattgtagagggttgaaatcaactcatgggggagaacatgctgttaatgtgctaggcttaatgtttttagaagtagtgtaattttgaaaacagtgcaaataggaattcattgtagcagttagcaaaccagttttttagttggaggaaaaataatagaaatctgattattttttaaaattacaggctttaaacaaaatagatattagtgcaaggtgcaccagacaagcagtcagaccttggacaactcttagtgtcagtttcttatttaaaatgaaatactaatactgctatttttttcttcaatgagtggtaaggatcaaagtggaatactgtgtgtgaaaactctttggatactgtagcaagtgctgtcatataattgttactaagtgttgctttgttaaagcagatattttgatatgaggttgacttacatttttgttttgttttgtaaaaattgtgatttatcattacttatttctgatgttgtgtgtagacaaccaggagtagggttttttttctttgtaaggtcactggttctatataaaaaatagcatcagtaaaaagtaatttaatatttttagagtgcatagcatctttgaatttttggcctttgcc

SEQ ID NO: 36394 - DNA, 1058 bp, Homo sapiens
ctgaaaggaagtgtttctatctggtttgaacgaatctataaactagtattttctgcttgttggtttacattctgtattggatttggtgggttagggatatgtgatgtttcttttcttacagacaccaccacagtcaagttgctattgcccagtcttcttattatcagtgttatcttagacattaaaggtttaatagatgaaatattgaagtaataagctttgggtaaaggcctaggtatattagcattcttaaagctcattatttaggaagtgactctaaaagtcacacagaattaccatcattcacaccatatcagcaaacttcatgatgcttttcctgtgtttcatctaccagttaccagcaggacttaggtttgaaatgccttgaggtgaatcatgcttccttttttgtttcagttctagataagactgactatgctttgcttcttcttttagcttgagaatgccagactgtcatcagagatgaatacttctactgtcaacagtgccagggaagaactgatggaaagccgcatgagaattgagagcctttcatcccagctttctaatctacagaaagaggtaaataatcatctttctgtaagaagttagacttgaaggctaccttcaccacgggcacctacctgctttgcttgggctgatgtcactcctccctctgtttgttacagaggatggtgtcatcctgtgctttcgtcttcacagtacttttctagattcgttcattttgcattgcataaacatcctgtgagcagatactattgttcctaattagtagattacacagagctaagggacttgcccttgaggaaggagcctgctagtttattcactgtacttaccctaggacccggatcttccgacctgtctaacagcttcatctctacagagttattctcaacaccttccttttttatatcatttgaaaaccaaaatgaagaaaaacatgcaaaaattctttgtgggtggtgaatgctttgtgtttctagacaaattctttagtgcttaaagtatataacaattaggatccaggaaagtag

SEQ ID NO: 36395 - DNA, 1053 bp, Homo sapiens
atgattcagcaattaactcgtcaccttaattattttggaaataacttccgcttctattttcctcaagggaggaaatcttgttttgaattttccacatgagaataaactttattttacttttttttttttttttttttttttctttttgagatggagtctcactctgtcgcccaggctggagtgcagtggtacgatctcggctcactgtgagctccgcctcccgggttcacgccattctcctgcctcagcctcccaagtagctgggactacaagtgcgtgccaccacgcccggctaatttttgtatttttagtagagacggggtttcaccgtgttagccaggatggtctcgatctcctgacctcatgatccacccgcctcggcttcccagagtgctgggattacaggcgtgagccaccgtgcccagcctattttactcttgattgggcttttcttccttcctttttctttttaccatttttagtaaaatatttttctaattataaaactgatgacctctgttgcaggaacttagaaataaagcagaaaatgagtcccataaaatggggtgatataaaataatttagttaacacaggggcttttacactgtctatcatgtgctttgttacttacggcacaaatttttaaattattttaaacctattttgtgctgatagtgttttgaagattttcatttaatagcagagctggaagcacctctgagttcattccatgtaaccacagatctaggtgagtttaatgatttgcccgttgcccagaggctgcagactgataaatgggtttctctactccttcccagtttttccttttataactcattttcttcaaagaagatttacttttagaaatttaacagataatctttttttccattgcaccatctgtcttagtccttttgggctgctataacaaactactattgacttggtagcttataaacaacagatatgtcagaaattatttctcacagttttggaggctgggaagtccaagatcaaggcactggcagattggatatctgcctggtgagggc

SEQ ID NO: 36396 - DNA, 1750 bp, Homo sapiens
cctttagccaaaatagtttttaatttctctggggtgaatctttcctctgttcattattggtaacagactttatggtaaacagtatattttgaggaatatttttattagttgataaattttagccttagaaaaatcatcaaaaataaaaatgttatctttttgaatattttcctattgtttgtcttaatagtgtttgttgctgagtcatatcagtttcatcatgctgcctattaggccataagaatttccttttggttaaataactcaggttagtgaagtacttcttaaattttacttaaaattgacatggctttaaaatactggttttacaagatatatttaaataatatatagatggtagcagtgttatgttttggaattagaaattttacattgcttatagcatctctagatttttgacttgggaccaaatgaattggttggttagagtctgcttgccttagagaagagtacagtatggtacttaaaaacacctctaacttttgtttttctaacacccagattctggagactttggttgcagctagaccttaataaaccagtacaattacattacatactataaaatatttaaaaaccccaagatcatcagaagtcataaaatttagggttagtggcaagatctgagagatcatctagatagttagagctcttcattttccttatgtggaaactggtttagtgagattagttacagcttgcttatagcctcataggtagtttcaatggcagaattagaaaggagaatctaggtctaacttctcatactgtgttccttatatttcactacacaggtgtaagtgcagctactgaaaatagaatttaaatatttctatttaaaatacagaatgattcagagtaactttaaaatttttatacctagattttgatttttccctcttaaagagctctacaacatcaaaggcagtcaaacagagacatcattgggtttataaatctcggctcaggttatctgtgaatcttgggtagtttatatctctcatcaactctcctttagattctacctttttgcccattcaaatatatcttctacctctgatatatgaaataaagggaggcattttgaacttacatgactttttttttttcttttggagaaaaagaaaatacaaggaacatggtagcggggaaatggatttctccatttatagcatgatttttgcaaacgcagttaaatgcaagttctctgaggttcagggactacctttgtaatatccatcttaagaggagtgcctgtctaaatagcatgtcaagtcatatactactctggaatttaattaattgattggtcaattttttttctttaaaaatatatttttgtgtgtgcgtgtgaaccaggcaccccctctgcccccaaataggtttacagtgactcttgattattttttaaataaccttgttattttggcataattttagatttacagaaaagttggcaaagtactatagacagttcttgttttcctctcacccattttcccctgttgttagcatcttatgttaccatagtatatttgtcaaaactaagaaactgacattggtatattactgtgaactcgtctccagactatttggatttcaccagttcttctgttatcttctttctgttccaggtgccacatgcctcccctggtctgtgacagtttcttgggctttccttgttttttatgagcttgagtcttgagtaagattgtccaggtatcctgta

SEQ ID NO: 36397 - DNA, 1061 bp, Homo sapiens
accatgcccagccccactgaccctttttttgagccccttatgctttcatgtatgagagctgaatgtgggcagaagtgggacagatgcagaaggaaaatgacagattttcttctgtttctaagcttatgtgtctattttaaaagcttgaagtaatccaatacttgatgtttaaaaattgtgattatgacagctagatagtgctgtaaatttgaaagacccaccttatctagcagtgaatttgaccatttaatttggttcataccctgttcttccagttctgtcctctttaaagtcaagtaccttactaattaactcattgttgaagttactgtttgacaaaatgacagaatcgtgttttctttttatagtaggaaaacctgaaatgtgggaagatgaccataaagcggtcttagtttaactgcctgtatggattaatttatttgattattccacaactttctttatctttgaagtaacacccctcaccctcctttctgtgtgtaggatcaaccaatgggaggctgggagatgatcagaaaaattggagacacatcagtcagttataaatatacctcaagatatgtgctgaaggcaggccagactgttacagtaagtgaatctagtcatcatttaatttaacttcattgtgttaactaacaaagtaactcaaaaagttttttggctaaaagagaagcattttagaaatggccgttaaagtactttttatattattagggcattacaagtgctataaaagatttttaaaattctgtcttattgagagtagtgaagaatggacctttgaattatttttatcttgtctattccagtagatataaaagctatctctaggctgatacttatagcccagtgtcattcaggagacactgcttggcataaagaactgttaagaatttagcattaacatatgcctaaaacagcaatctctagccttgggtgagcttcagaatcatttgggtagtattttggtgttcaggccctacttcaccctttgctatctttagggttggggtaggagcctaggttttgaataaaagtcc

SEQ ID NO: 36398 - DNA, 1030 bp, Homo sapiens
aattttaaattttcttatagccgcattaaagtaaaaaagaaagacatgaattttagaactatattttatgaaacccaatatatccaaaatattgctttaacatgtaatcagtctaaaaagtcagatatttttacattcttttttttttatgtttagctaagtcttcaaaatctagtgtgtattttacccttacagcacattcatttcagactagccatattttaagtgctaacaagccacattttgctgcggtattgaatgacatggctataggacatattagttttaggttaagttagccagcaaggatactgacattttatgatgatgattactaacataaatcaactatgtgattacatataggctagtgagaaatattgcttacaattagggaaacactaacattccacatagtctgaatgttggaccagattcagttctttttttcagtttaatcccagttaatatcttgtgcccttttccatttgtaatgctgatgaaagatctggatgcttcaggggaacatctcaaaagtaagggctctctcctaatcagtaattcatagattttttttttcctgtttccaccccacccccccaccctttcttttttttgatagagacaggatttcaccattttgcccaggctggttttaaactccttagctcaagtgatctgcccgcctcggcctcccaaagtgctgtgattacaggctggagccactacacctggcccccattttgaaataatacttggctttgccatcttcagctttccttttgcagtcataaagtcttttatattctataacaatgtatggattacaaacttttctgtttctatttgtttttaaatgatctttctaagagatcagggctagtagtatccctgtagctaaaggcattgagtttcctagaggtgtagtgatttgtccagaattcaaacctaggctttctgactgccaggtgttcttcactctatccattctcttttgccagtagatatataaaaagaatttcatgctcat

SEQ ID NO: 36399 - DNA, 1031 bp, Homo sapiens
gtgaaggagtttcactctgttgcccaggctggagtggagtggcatagcacgatctcggctcactgcaacctccgcctcctgcctcagcctcctgagtagctggaactacaggtgcgtgccaacacacctggctaatttttatatttttagtagagatggggttttaccatattggccaggatggtctcaatctcttgaccttgtgatccgtcacctcggcctcccaaagtgctgggattacaggtgtgagccaccatgcccggccaaggttggtccattcttttaacaaacttctaataccttcagcttgcgaggctctgttttaagtgagttctgtcagaaatgaggagagaaagtattatgaatacaggtcttatttcactagacagttacttttggcatttattcatttaattcgataagaccatatttgtcagtagggaccagaccacattaggaacaatctataaacaatccccgccataaagaccagtttgcagtaagattgttggtaactggcttagtcagttttgtttcttatgtttttttttttcttcttgctggggcattggaaatgtcagaaaacccaattaaactggcttagaaataatggaaattttttgggctcacataataaaaaatttaaatagtggacctaatccagtggctcacagcatgtccccggggatctgtctgttgtttctcttctggttgcctcccttggggacgcaggatagctgctggctgctcccagaggtacgtcttttctatttgctttttgtgggaaggtgatctttcaaaaaagtgctctttatggtggagtttatagattgttgctaacgtggtccggtactactgacagataaacatggtcttacccaattaaatgaatacataccaaaagtaactgtctaatgaaataagacctgtattcataccactttctctcctcgttcctgacagaactctctcagaacagcctagcaagcagaaggcagtagaagtttgttaaaagaatggacaatccagcc

SEQ ID NO: 36400 - DNA, 1030 bp, Homo sapiens
gtgaataggagtatgactagacagaagatagtagggatgacaagttttttgggggcacagtctaagttggtctggtgtctggaatgatactggggcctaataaaaaggagcgtctatataggagcttaaatgggctgtaccctgtagcagtccgaggacaggcctgaattctgagaagggaaagtggtaaaagtattgtccagtcctttttaagttggtggctgagcttggtgaggtgtgtttttttaaaagacctttagtcctacttttcttgaagacggaggaccgtaagggatataaaggtttcactgaatactaagagcctgaaaaactgcttggctgatttgactaataaaggctcgtctgttatcagactgtattgaggtgggaggctaaactgaggaattaagtctgacagaagggaagaaatgcctgcagtggccttctcagaccctgtaggaaaggcctctacctatccactgaaagtatctacctagactaagaggtgttttagttatctgactcggggcatgttgagtaaagctaatttgccagtcctgggtggggcaaatcctcgagcctgatgtgtagggaagggaggggtcctgaataatccctgaggagtagtagaatagcagatggaacactgagaagttatttccttgaggatagatttccacaatggaaaggaaatgagaggttctaagaggcgggctagtggcttatactatagcataacctgcctttgctggtgtgtggcgattaggcctggtggacccaccatcaataaatcaagcgtgatcagggtgaggaacagaaaagaaggaaatttggggaactggggtgaatgtcaggtggatcagagagatacagtcatgggggtcaggtgtggtatcaggaataatgtgggaggccagattgaagtctgggtcaggaacaacggtaattgtgggagactcaacaaagagtgagtacagctgaaggagccgggaagcagaaagtatatgcgtcaggtatgaggaagaaaata

SEQ ID NO: 36401 - DNA, 1077 bp, Homo sapiens
ggccagatttccagcaagtgtagcaagctcctgtgggaggaggttctggaggaacgcctggccgctgcagttcaggcatttggaagttcttatgtgctggagatgtggctggggtttgtctcacagtggaggcaaggaattgcaacttttttctattatggtacaccttgaaggcgaggttaattaaatcctgttgtggggtttgagagccggaatttaatttttggagttttatttaatgtcgggagcagattgggcaataaaatgtattttgagaataagacggccttttgaccttttagggtctagggctgtaaagtgtctcagggttgctgccaaacaagtcatgaactgggctggatttttatattcgatgaaaaagagcctaaacgctatccgatttgggataaagaaaaaggagcattaaccttgactgtgcttttagctccagccacctttttaagagtaaattgctgggcaggagggggagggctagtcacggaacgaaactgaaagccggaccaggtgtgaggaggggaggtgataaaaagattatagggtggaggagcggaggctgaggaagaattggcacctagctcggcctggcgaggagcaagcaggctggggaggaagggagaggtcagatgggtctgtagaaaaggaagattagaaagactcagcgacacttggggttggtactgaggggacaggcgggagggaaagaaggaagatttggcacgagttgcactgggcacagagactaggaagggactgatgtgtaaaagaatgcctggacgtcaggcacctcagaccgtttgcctattttacgacaagaattatttagattttgcaggatggaaaaattcaaagtgccattttctggctatttggaattactgtcgagtttgtactggggtcaagcggcattgcagaaaataaggcatttaggttttaggtcaggtgtgagttgaagaggttttaagtttttgagaacacaggccaagggagtagaaggaggaatggagggtggaaagttgcccatagtgaaggaagcaagcctagagaaaagagagtaga

SEQ ID NO: 36402 - DNA, 1044 bp, Homo sapiens
cttcaggcatcagaatcacaactctacatttctcatctagcactagggactacaagttgtgtggcagatcttcaggcagcttctaggaacactctggattgaagtggaaaggaagcatttcctgatttcattttctagctgtctttcctactcaggttctttgggccatgggtcatttcctagtgtggacagctccataagctgtgtggagtgtcaggcaaggctgagcggattccaatatgggagaaagatgcacggtgcaggcgcagacccagagcccagccagggtcagtgtcccaatgggaacaataaggatctaggaggaagtggaaccggaagctggctgcttgcccaactgtggggtcacttgggctgcgatttcacctccattttctcctttggctcctccatgccgcagatgaattattttcactgaaaatgaaatgcctatggctacagccccactgaaagtgacaatccacggcagggcccaggcactaggggcaggggagactaggacaatgaaagacaaatcaaagtaacttccaaatcatgccatttatttttccttaatggattttacagctcatctgagtctctgctgtgttctctgaggagctgtagaatttgtgtcgatgctctgtgtcctccgtccttccccaaatgagcacatatgcagggcaggcaagagcatgctggatttgtcttagttgttaattcaccttctggcttcactgtgacacacatttatctctacatgacattctcaagaaaaatgattaggacagaatcacagcaaggagtgtggaagagggagtttttttaaaaagtcagttaaagagaagcaatgaaccacgagggtcctttaggtaaaggacccccactcctcatctcttcctcttcattcttgatctttcaaaaagaagcacaggaagaggactaggctagcaagggtgctggtaggctgcatggtgcctctgtacccattaatacctgttaacaaaaggcaccccttcctgcaggaggtgtagccctttccatggg

SEQ ID NO: 36403 - DNA, 1059 bp, Homo sapiens
aatacatgatggtagaagcagtgacataatggtgcctgagagatccttgtcttttttttttttttttttttttgagacagagttttgctcttgttgcccaggcggaagtgcaatggcgcgatctcggctcaccgcaacctctgtctcccaggttcaagcgattcacctgcctcagcctcccgagtagccaccatgcctggctgattttgtatttttagtagagacagggtttctccatgttggtcaggctggtctcgaactcccgaccttaggtgatccacccacctctgcctcccaaagtgctgggattacaggcgtgaaccatggtgcccggccaaggtgcttgctttttatgtacatatattggaatgagatgcttaaacctgtagtctgttttggagaaggctggcataaaacattgatggaccgtccaagaaattcagagtctgatgtgtaggtaagtgctggaaaggaaggagaccatgagcttggagtgacaaatcaggtctgggctgtttaattatctgggagtaggtgtgttgtgttgatcccactaaaggtctatggtggtcagaaagtaggctggcctgatgacttggtctcgagtttctggaagtagatgaaaggcaggcccttgatcagaatgggctttttagtcttcatggcaggatcatgaaattcaaggccacttattcaaatttctgaggctagaaagcagatgccacgggccgagtgccagagagggttgagtatgaaaatatacgcttttaaactcacacagaagtgcttttctccaaaagtccctgaacatgctaaagtggatcagtttggtttttttttcaagtgtgattctcttgtatctattctgtcctgctgctgcttggtgccactcacgaatgtaggagaggcaggctgggaagccagctgttcagggccaacagcgggaaagaggtggaatgcagacaattattatactaataaggaactttggcaatataagaagtctggaatctgggaacattacgggaaagctggatttcaaatcaagagtcccctttt

SEQ ID NO: 36404 - DNA, 1027 bp, Homo sapiens
agctgcttcttttacttatgggagttgaaagtcatttacactcaattatatttgttgtatattttaaattacacattttaaaataattcttgggatatgctttggtaagttaaaaattttgcaagaagaaagtaattagacagtttgaaaactaaataaaaaacatttctaattctgtgcttttatcctctccacttttttctagcggcaaccagttctttttcttctccaaatgtatcctccatggagtccttcccaccactcgcatactctactcctcagccgccccttcctcctgtgaggccttcagcaccattaccttttgtgcctcctcctgcagttccttctgtcccaccacttgttacttctatgccacctcctgtttctccatcaactgctgctgccttcggtaatcctcctgtatctcacttcccaccttcaacttctgccccaaacactcttttacctgcacccccttcgggtcctcctatatcaggattttctgttggttcaacttatgacattacaaggggacatgctgggagagctccccagacacccctgatgccatcattttctgcaccttcaggaacaggtaattctttctgatactttgaaatacatggctattaattaatgttttattcttttttaaaataatagctttgttgagatataatttatgtactctacaattcacccaattcaaagcatacagttccatagttagtttacatcagaattgtgcatcccttgtcgcaattttataaccttttcatcactttaagaaagaaaccctataccttttagcagtcagcccctactgtcccccaaatcctcacagctctaggcaactactaatctactttctatgtatatggatttgcttatcctggtcatttcatatagatggaatcatataatacgtggtcttttgtgactggcaactttcacttaaatattttcacttaaatatttaacttaaatattttcaaggttcatccatgttgtagcatttgtcagtact

SEQ ID NO: 36405 - DNA, 1043 bp, Homo sapiens
gactttttaaaagtattttgtctagatgtccaactgtaggggaaaagataaatatccttggtgcatcttgctatattatatagccattctaggaccagtaggcatgagttctccatttatgagttattggggaagggggtatcttagatgttgacaacatgcttgtgacattgtgggattatgtggtgattagcaaaccagttactgcttctgcctagacagacattaacaaagtagttggacaaataacatagttaataactgttttttaagtgttacgaaagaaaaggatacttgtaaagatagaataggacctaattttaattgggttttgggaaggcgtttttttgagaagtatgacattgaagctgagacctgaagggtaagttgatgattgggtggaatgacagtcctgaccaaagggacagcgcacatgaaggtaatggggtgagaaagagtggtatattaacataactaaaaggagataactatttttcattataaatgtagtgggacgctattgaagaattttgtgtggggtagccacatgacccattttgttttaacatctttaggctctgggtggagaatggattggcaggggcaagaatggaagcaaagagactcaagtgattactgtggtctggttgagagatagtaaaggttggtggcacaaaggattggatgtgggagtgagaaagaagctgacttgtagattttgaacttgagaaacttaatagatgttggtactgttgcttgagatgagaaatactggaggaggaatagatttggtggttgggagaagtttgtatttgaggctattctgtttcagtagcctataaagacaaagacaacttattccaagagtcgtggaggaggctctgtgtgtgtgtgtgtgtgtgtgtgtgtgtgtgtctgtatataaacatatgtaaatatatatatttacatataaagatttggttgcttaaggtcatggactaaattacttagggagagtggtagataagagaacagaaaatagggtctggcattggacttgg

SEQ ID NO: 36406 - DNA, 1032 bp, Homo sapiens
tttttctactttggggtcttcatatatgttgtttctcttttctggtatactctttttccctgatgatcacatggctgattcttgctcagcaaactcttagcttaagtattgtctccttccttatatttgcttagccttctgtaaccacattgaattagattctctctctctctcatttgttattcacaaatccctgtttccatcagaacatttactgctgtttataattacctgttattttggtcatttgctattgagactcttaaattccatgaaggcaggaacaatgtctaacttgtttatattgcatctccaagtactttgaggtgctagaaagctctagtacaggacctgacacatagtagctgctgaagtattgaatggatagatggatacattacagttagtcggttatcttagagtcagagatgaaaacactaggtctagttgaagcttttattgttgttgaaatagaaaggaactttacttagggtagctaattgtctgacagcctcaaaaatcaataggtgactagacagcagagaaagctgtggaccaaaatctatacagatagtaaagtaagttggaagctatcaaaaagttgattctatattattatgatgttgcttttgttttccttttttttttttttcttgagatggggtctcactctgtcacccaggctggagtgcaatggcatgatcatgggtcactggagtgtcgactgtccaggcttaaatgattctctcaccccagcctcccaagtagctgggaccacaggcatgtgccaccactcctggctaattttttaattatttctagagtcaaggtcttccttgtgttgcccaggctggtctcaaactgctgggctcaagaaatctgcctgcttcggtctcccaacgtgctgaaattacaggcgtgaggcaccacgccatgcccccttttgtttttctacctcccttcttgcttcttttacctcagagattgaggggattatccacattttgatttgcatttgggctagtcataaca

SEQ ID NO: 36407 - DNA, 1079 bp, Homo sapiens
tttttttaatttttaattttttcttgagatagagtctcactctgtcgcccaggctgtagtgcggtggtgctatcttggcttgctgcaagctccgcctcctaggttcaaatgattctcttgccccaatctcccgcgtagctgggactataggcgccagccaccacacccggctaatttttgtatttttagtaaggatggggttttaccatgttggttaggctggtctcgaactcctgacgtcaagtgatccacctgcatgggcctcccaaagtgctgggatggcaggtgtgagccactgcgtctggccagttgttctgtatatcccctaaaactgtaaatatctaattggacaaactaaaatatgaatggataaaatctgaggatgttcaagagcaaagagcccctaggaggtaatgcttttataacagcatgtaatatatatatatatattagtgtgtgtgtttttatatatgtaatatgtaagtgtactgttttagaaagcatggaatcatcttgcacatggtcatatttgtatgggtctgtttttggattcttgattctgttctgttgatcttcgtgtctgtccttgtgccagtaccacacattcctaattactgtagttaaatgataagttttgaggtcaggtagattaattcctcccattttagcctttctaaaaaaattgttctagctattttagttccttggtctttccatataaaaatttaaaataaccttatgtgtgtgtgtgttttaattaattaatttactttttaatatattttcacttcagtagtttttggggtacatgtggtttctggttacatggatgaattgtgttgtggtggagtctgagattttggtgcccctatcacccaagcaccttacgtttatttttaaaaagtcttgggattttgataggaattacgttaaactggtatatcagtttggagagaattgactttgttgagtgttcaattcataaatatcatctctccatttatttgtattttctttgattttctttcagtcagcattttgtagttttcagcatatacgtcctgtatgtattttgttag

SEQ ID NO: 36408 - DNA, 1052 bp, Homo sapiens
ctctcagtttgaattcacctgaattcatgatcttagtgatcaatcctatgttgttggtgttttttttttttttaagtcttctaagaggaaatgtttgaacatgtacacagagaaagcaatataatatacctagtatctacattacccagctttatcagttatcaatgcatggttaattttgtttcatgtgtaactcttcctatcccagattatttagagcaaaaccctagactttatatcatatcttttcgctggaaatatttccacatttagctctagaagataaaaggttagaaaaaaataaccacaatactatcttaacataagaaacagccttcctaatagaagtacatgatggcacttacacagtattcttgccaaaacttgtacctcattttgattaactgtctagatagaaccagtttactagaattatagaaatgagaagaggttaagcaatacaatgatgatgaagtcagaaaaatccagagtatgagatctccatgggagaaatgatagaaaaataataaaaggaaaaggaaatgtgaacctgttgattgaaaaagactgaagagacgcataaaccaaatataatgtgtaacctttttttttttttttttggatcctgatttgaacagactatttttaaaagataagaaaggacaatttagggaatttgaatgctgacttgccttttttgtggtactgttaagcaattattaagtttctaagctgcgacagtggcattgtagttaagttttcaaaagtccttacctgttagagatacgtactgacatatttatgtgctaaaggatatctgggacttgtttcaaaatattgtggggaatagccctaagttgatcattgttgaaattaggtgatggatgttagcagttcattacactcttctctctgccattgtgtgtgtttaacattttacgaatgaaaaggttttcttaaggtaagggctagtggtaaataaatttgtttcagatatttgtaatgcacatagcgttgttgttattattattataaaatgatccctagtgtta

SEQ ID NO: 36409 - DNA, 1555 bp, Homo sapiens
atgacaattttttttatttatcttttgctacaataaaatactaaaacttgtgtgtgcacacaatcttggaaatagaattttctaatgtgtttaaaaatcttagattgagtgaattttgggggatactttggccctctgtgtctgcaggttccacatctaaagattcaaccaaccatggcttgaaattatttgaaaaaataataatacaacaataaaaataatacaaattttaaaaatacaatataactttatattgtattagctattatgagtaatcttgagatgatttatagaataaggggggttatgtgttgtttatatgcaaatactatgccattttatataagggacttgagcatttgcagattttggtatcctggaagggctgaagggagaccctgaaaccaattccctattgttaaacatactgagttgcaaatcctgatgaggttgcaagaaaaattgatggaataactgaggaaggaaattaactagccagatgtcagcaaaaacttttgcatgattggtagaacaaattcagattttagtattgatgtgattcagaactgcattcatttggacttttgtttatagtttttaatggctgttatcacaatatataaatgagaatgccactgtattataatttttaaaaagattatattctctttctcttagtaaaaatatgaaaattttggtagatcataaaagtacaaaaatatgtacatttagaatttttcaagtgttttatttttaaattatatttttgtgtatgtttaattttaagtaatatcaatggaatagtatatgtaatttataagtaaatatgaatatggaatgctgaagaatttttgttaagagtgtctatagaagctgtcaatttggaggacagttttatcacttcagaaaacattttgttgaaaataatatatctgtaaagttatattgaccctatattttaggctgctggtcttggtcgtatgaagccaaacacacttgtccttggatttaagaaagattggttgcaagcagatatgagggatgtggatatgtatataaacttatttcagtaagtatctttttaattcaataatttagttcatttagaaaatgttaattttgaaagcttgtcctaatttttggagactgtttctcatatagtctcttgtaatggaaatataagaacgaaaagaatcacacaaagcatctgggttttaaattgataatctattaacaattttttattgatctttatatgtctctttacatacatgcatatatatatatatacacacacacacacatatatgtatgtatatgtatatatgtatacactctggcttctcatttaagtttgtaaactttttcctatccctccagctgttgctgagcagagttcccaaatgtcagacccatcacctcctaaactatgtcattataatgtgctgaggaagagtgttttatcgctgtttaggcttgttccccttccaaacaaattttgcagttaatcatttggttcattcattaagttatttacatttcttttatttaaatg

SEQ ID NO: 36410 - DNA, 1046 bp, Homo sapiens
aatgttgtggaatttgaaactaacatacatatctcaacaagtgattttcaaagcatgttttaaaaatcagacgtttaaagccgaaagtaattttagagatcatctattatttattttaaagaggataacacaaatttttgtgattttttttttggttttttcattttttgtttttttgttcttagtgatgcttttgacatacaatatggagtagtggttattcgcctaaaagaaggtctggatatatctcatcttcaaggacaaggtaaattttgttggcaataagttttttatttacaaaaatataaactactttgttagaaaattatattctcacaaactgggctcttcgttacttttaataattatgtatcgtggacttattgtatggcattttaagatcacatctgtttggctccactaaagtttgtgttttctcgttgtaccaacctggatgatggttagtgattatttggattgaataaaattcaatccaaagcataagcttaagagaaacagacattagttatgtctttaaaaaacctggccaacagacaaacctaagtaaaatagcctgaggaaaaatttttaaatgaccactaaatcattagacattttcatatttatgaaagtatgctttgtacagagtcatattgatagaagcctaaagtttgtcataacgttttctatcttcagcagacctaataaattttttaaaaacattttttaatttaaaaatatttatagattcacaagaagttgcaaaaaatagtagagaggtcctctgtacctttcatccagtttcccccaatgataacatcttgccttatcctaaggtactatatccaagccaggaaattgacattagaacaatccacagacctttttcagatttcagcagtttacaaagacttgtatgtggttgtgtagttgtgtgccacttatgtgttcatttgtgtaaccaccattgcaataaagatacagaactgttctgtcactacagaggtctccctatgtgttccccctttctacttcccactatgtac

SEQ ID NO: 36411 - DNA, 1034 bp, Homo sapiens
aaaataacctgttctcaaacttgtactggtcatttctagctggtcaggtaaaatttatggctttcaaaaatggctacaaaatgactagctgtgtaaggtattagagtagatcatcaaacagaaaccatgctagttatttactaatatggcttctgtgtttttatttatagttgctttaaataaaacattttaatttgaagcataagttaaatctgaatttggaaagaacatggtaattttaaagtaacaaactcatgactttcacataatttcatccacaaatctgtgtcatgtttgagaagaaaagagggatgacttccaaatcttactctcccaccctcactctcctacctctgttcagtctagtatctccatctgtcctattcccagctgacacgcaacaagaaaataatctgcgctgtgaatcatcaaactgtaacatacttttgattcctgcaaaatatttcccattctttttctgaaattgtaaccttggaccaatcatgtctctgtacagtttatctcttctatattatttagaagcagtaatgttgctttttatttctttccttctcatttaccttgttggcttagagtattagtaaagtttagttcacacccattttccttttcagttctttgctgacttgattataatttattttgtttttcctcaaaattctataaactgattctgataactgttcctatattccagcatttattttagtttacactatacattctttcatttcctcttttttgtttttttcttttgcttcaaacattctttttctacagaatctgttgggaattaataggtgaagtttaatgggagggtaagaagaaatacatatcaagcatctactccgtgcacccaacattataatggatgttacccatacattagctaattaatatatgttacgatcttatgaaatcattatttttatagaacaggaaactgggtcagtacatttctacttacctttttattgtaaaaatctaaatgcctttaacttactttataattg

SEQ ID NO: 36412 - DNA, 1035 bp, Homo sapiens
ccatctttctgtggttcagagaaagatgtggttatatggctttagaattgggtgccacatattggggacaaaacataggtaaaaatgagaagtctttccttagactaaggtttcactgtgataattgtaagaatgtgttagtatgtcttcaactcccatctttcatttatattgcagataacaactttgtcttttaaaaagttttgagctttaaattattgagataccagattaccaaagaaatagtttcacagaacaggtataaacttgatttgtccagtttgactaaaacagcttttcaaaacaaaatctagcagctcactgtaattttttttattgttatttatgattctcttacattcattcagaatgcttgaaaatattagtaagtaggcagataatttggattggtttagctattgtaaagagttatttctctctagccatttataaagtatacttttattataaacaactgaaagtttatggtagatgccgtatacaattgtctgaattatctgtagtataaacatctgaatatacaaacattaggaaatgataggaattcagcaaaagggactttaatatttactttgcttacattttatattttgcttaatcctttagaatccaaaggccctattgtgcctttaaatgtagctgaccaaaagcttcttgaagctagtacacagtttcagaaaaaacaaggaaagaatactattgatgtctggtggctttttgatgatggaggtaaggttgttaatttttttaaaatgattttaaatttactgacattgtgagaatagtaagaaatgacatgcactctttacctgtggaccccattcaaattttgccagcattcccaaaagcaaaaggattaatttcagaatcaggcacagcctttagttgtctggtctcttcagtatccctaatgcggaggttgttcagtagtatttccttgagcttcatgaccttaacttttttttaatatgaaccattttgttgactgtaacccaatttgaagtgctagttaat

SEQ ID NO: 36413 - DNA, 1935 bp, Homo sapiens
ccccacaaaaaaagccaagtaatgaaaaaaactaccaaaagattgttagtttaacaacattcaataaatcaaaaagtttcaagttttgctgatgataatcaaatacctgtaaatggaaaagacaccaaaacatagaaatttagagaaaaactatacagcaattggtcactgctgccaccatccataaatagaaattaaaactaagagaagataaaaattgcatttatccatatatagcttctgttttctaaattttgatagtaaacatacctttcacctaaaagaattctattcttattaaagaaggggaaacctaggatttagtgttagatatcagaggtactgtggtttatagaaatacttactgttcttatgaacaaattttgaaaaatcttttgttgaaagattatagtcttttatatatgcatatatgatggtggtaccataagattataataccatatgttaagctgggcatggtggtgtgcacctgtagtctcagctacttgggagactgaggtgggaggattgcttgagatctggagttttggagttttgagtccagcctgggcaatgtattaagaccccatctctcttaaaaaaatatatatatatttttactgtatcttttctgtatttagatatgcaaatgcttaccatcgtgttacagttgcctatagtattcactacagtaacgtactatacaggtttgtagcttaggagcaacaggctgtgtcatatagcctagatgtgtagtaggctataccatctaggtttgtgtaagtactcctgtgatgttttcacgagggcaaaattgcctgacagtaagttctgagaaatgcgtctccatcgctaagcaacacaactgtggttgttattctatttgcagaattctcctgcactcagaaatattctgtaattatagtaatttacagtaactgttattgtaatctactttataatttttgctacattttattctgtaaatgcattgctcagggttttttttttttctttttctctttttgataccaggagtctcccagttgcacgaaaaggtgctgtgtctagtgctctctacatggcatggttagaagctctatctaaggacctaccaccaatcctcctagttcgtgggaatcatcagagtgtccttaccttctattcataaatgttctatacagtggacagccctccagaatggtacttcagtgcctagtgtagtaactgaaatcttcaatgacacattaacatcacaatggcgaatggtgacttttctttcacgatttcattaatttgaaagcacacaggaaagttgctccattgataacgtgtatggagacttcggttttagtcaattccatatctcaatcttaatggtgattcttctctgttgaactgaagtttgtgagagtagttttcctttgctacttgaatagcaataaaagcgtgttaactttttgattgatgaaagaagtacaaaaagcctttagccttgaggtgccttctgaaattaaccaaatttcatccatatatcctcttttataaacttatagaatgtcaaactttgccttcaactgtttttatttctagtctcttccactttaaaacaaaatgaacactgcttgtcttcttccattgaccatttagtgttgagtactgtatgtgttttgttaattctataaaggtatctgttagatattaaaggtgagaattagggcaggttaatcaaaaatggggaaggggaaatggtaaccaaaaagtaaccccatggtaaggtttatatgagtatatgtgaatatagagctaggaaaaaaagcccccccaaatacctttttaacccctctgattggctattattactatatttattattatttattgaaaccttagggaagattgaagattcatcccatacttctatataccatgctt

SEQ ID NO: 36414 - DNA, 1028 bp, Homo sapiens
ccaaatgtcatgcgtcatacatgtgggtataaagtacataaaatatatctaactattcataatgtggggtgggtaatactgtctgtgaaataatgtaagaagcttttcacttaaaaaaaatgcattactttcacttaacactagacaccaggtcgaaaattttcaaggttatagtacttatttcaacaattcttagagatgctagctagtgttgaagctaaaaatagctttatttatgctgaattgtgatttttttatgccaaattttttttagttctaatcattgatgatagcttggaaataaataattatgccatggcatttgacagttcattattcctataagaattaaattgagtttagagagaatggtggtgttgagctgattattaacagttactgaaatcaaatatttatttgttacattattccatttgtattttaggtttccttttacattctttttatatgcattctgacattacatattttttaagactatggaaataatttaaagatttaagctctggtggatgattatctgctaagtaagtctgaaaatgtaatattttgataatactgtaatatacctgtcacacaaatgcttttctaatgttttaaccttgagtattgcagttgctgctttgtacagaggttactgcaataaaggaagtggattcattaaacctatttaatgtccattcttatatctgtttaataagtctttgccagctttgtggttttatctcatttcgataactattgcttcattcatttctgaatttttaaaatagcttttaccttaatattcacgccctggaaaagtcgttcactattcttaaacctttgcaataatcactgttgatgctcacagtatgactgaaccatctgagatgcagctcattatggtatttttttaagtgacctagcttttctaattctgctttatctttgggccagatctctcatttgtgaatgaggaaactggaagattaaaagcgattcatagtccctgaatataatctgat

SEQ ID NO: 36415 - DNA, 1052 bp, Homo sapiens
atgttagcattcctataaatatatttataggtttctaaagggatcttaattgtaaatatttatcctcattagagggtaagttttttaacatatgctaagttttagagtgtagtgtttaatatatgagggacatcagaatagcctaatacatttattgattgattatatgaagcccatttaatccttgaaatacccctatgatgtagatactatttttcttgctgtgttacagataaggaaattgcatatggagatatttacctaagttcatgtaatcgaaattagtgaaattgagatttgcactcagattctaatgcctactgaggcttgtgctataaaggggatctttgtaacctgggggagtcacatcacagacctctgttgtaagtgagttgacattggagccaggccttactatagctgtggtcatcggatttcctcagaaacacttgggagtgaaataacgatgccccaggtccccttccagactttctcccaaacagatcatgcctattttgtgactctaattgactaccaaattttttaaacatcgcatttacagtttcaaattttaattattccaaatccctatagtaatttgctatgggctgggtgatgtgaaaagtcttttgagtatgaaatctaaggtcaaatcccagctatgacaattcttaagaaagtagacaaaatatttatacttgaatctgatctcttaaactcttgcttgaggaagccattggctatgatcaactttttatatttaaatatatatatatttgtatatgtatcatgtgcaaatgtgtgtgtaggactatgtgtaggcatatagatatacgaaggtgtgtggatacatatatttatatgtgatttgtttatattccttaaatatgcatagatctgtaattgctatgcttttactcctggtgacatttggtccagtccacttttaatttgctgaggcaggactggctgtcttacagttgcaacatgtaaatgtttggctactggcgatattttttaattaccttaaagattttggtttaagagaactt

SEQ ID NO: 36416 - DNA, 1032 bp, Homo sapiens
gttttgctgtgtgatgggtggagtgttctagagatatcagttaggtcagtggggttgatactgtttttcaagtttctatatccccactaattttctgcctagtttctctttctgttattaagagtgcaatattgaaatagccaatcattattgttgagtactttatattttccttcaattctgtcatatttttacttcatgtattttgagactatgttgttacctccatatatgtttgtatattttatattttcctgttgaatcaatcattttattattatcaaattttcttctttctcctaggagcaattttttggtctgaaagtgtgtttcttttttctgttattggtgtagccagtccatctctcttttggatactgcctgcatggtacagttttcctattcttttacttttagcctccttggttgatatggttaggctttgtgtccataccccaatctcatcttgaattgtaatccccatgtgtcaaggctgggaacaggtggaggtaattaaatcatggagggcattttatcccatactgttctagtaatagtgagttattgcaagatctgatggttttataagcatctggcatttctcctgcttgcattcactctgtcctgccaccctatgaaaaaggtgcctgcttctcctttgctttctgccatgatgttaagtttcctgaggcctcctcagcaatgcagaactgtaagtcaatgaaacccctttcctttataaattacccagtctcaggtatttctccatagcagtgtgagaaaagactaatacagtgtcatttaaactaaagtttatctcttgtgaatagaataggattgtatcatggagtgttttttgttgttgttggttggttggttaggtttttttttaatgtctattttgccagtctctacctttggattggagtatatgaaccatattatatataatgtaaatattgatatggttagatttatatcagccattttgttatttgcagtttctcttttattcctttcttttgctttaag

SEQ ID NO: 36417 - DNA, 1035 bp, Homo sapiens
attttcttgttctctgatcttccttaaaatagttattttgaattcctttttaggaagtttatacgtctcattttttttggggggggcatgtcattggcactttatctttttgtttatactatttttctttattctttattgttgtggtcatgcatttacgtcattgcagtcttcgtagactggctttatctgggaattcccttcaccagtcagcccatctagaaattcttggaaggctgtctggcatagtcccaaagcccaaggttgctgaggccagcacaacgctgaggtaggataaaagcctagggccactgggatgagctagaagcctgcggctactgaggcctgctgctgctgaggtatttccagatcctggggctgctgaagtttgtccagtgatggtataaacccgggattgactccacctttcttacctgaagtctggggctttgggggtcctgcttggtgctgggacaggtctgtaggctcagtcttcaggtgccagccaggattctggggctgtggtggcctgctcagtgctgggctttacactgaggcaagcttggtgttggtgtccaaaacaaagtcctgtgctcacattcctctctttcctgcaagcagagagtatctgttcctgcattgtgctgcctgggtttggaagagaggtgacatggttaatttcaaactcttttctaccctcttcagttcagtgtgtcttttcttattgtgctacaaacaggtcctgtaattgtttgcctggtttccttagctcttgtgaaggtattttcatttatagactgtttttcagatcaatgtttctgtaggggtatgatcactagagagtcctattacactatctggctctgcccttctgtttttaaattttaatattatctatttataagccagaaaaatattatattctagattgtgtataatatatataatctttgccaatttctgcaaatccttacaataccttaattttcttattttagtttgctaaaattgtatgacaagccttcacagcaaatt

SEQ ID NO: 36418 - DNA, 1042 bp, Homo sapiens
agtttgagaccagcctggcctacatggcgaaaccccatctgtactaaaaatacaaaaattagcagagcagggtggtgggcacctgtaatcccagctactcaggagactcaggcatgagaattgcttgaagctgggagggagaggttgcagtaagccaagattgtaccactgcacttcagcctgggagacagaggagactccatctcaaaataaaaataaattgttttggccattctggcctctttatatttctatatacattttaggatcagattgtcagtatcttcaaagaaacttcctggactttgataggagggtttaagcttaatctgaaattcagttttctgaaattccattttggaagagattttatcttaaacaatgcaaaaccgattatttttttttctctgtgaaaatgattattactagagaattggtagggtgtgtttttgaatacgctgtttatttgtttgcttgatttgaaccctgaccctaacaactttggtctttttcatagcagtaggcctgaaacacaatagtggagtcttgattaaaaagaacaaaataagctactggtagtccatattacagtatttaaaatgaacaatttcaaaccactaacaagatttaaattccataaaggatttatgagaacaagtaatctaagctactcatttggaggcatacaaataaggaatacaaaataggaaatcacacagatagtgtttttgcaggattaggacatgaacccaggattcagactccagattccactcttatttcagtcctactgctatgagaaagaccaaagttgttagggtcagggttcaaatcaagcaaacaaatacggacaaatgaacaaaacccaaactaatcttttcaggaagtggatttcactcacaaacattcagagttattctctaaatgtaagcttgtacaaaattattgtatgtgtttagttaaacagaaccaaggatatcagtacagtactttttattaaaaaccaaaccaatatctcctctctggtaatgtaagtttcaag

SEQ ID NO: 36419 - DNA, 1078 bp, Homo sapiens
gaaccaaagacaaaaaccacatgattatctcaatagatgcagaaaaggcctgtgacaaaattcaacagtccttcatgctaaaaactctcaataaattaggtcttgatgggacgtatctcaaaataataagagatatttatgacaaacccacagccaatatcatactgaatgggcaaaaactggaagcattccctttgaaaactggcacaagacagggatgtactctctcaccactcctattcaatctagtgttggaagttctggccagggcaatcaggcaggagaaagaaataaagggtattcaattaggaaaagaggaagtcaaattgtccctgtttgcagacgacatgattgtatatctagaaaaccccattgtctcagcccaaaatctccttaagctgataagcaacttcagccaagtctcaggatacaaaagcaatgtgcaaaaatcacaagcattcttatacaccaataacagacaaacagagagccaaatcatgagtgaactcccattcacaattgattcaacgagaatgaaatacctaggaatccaacttacaagggacgtgaaggacctcttcaaggagaactacaaaccactgctcagcaaaataaaagaggatacaaacaaatggaagaacattccatgctcatggataggaagaatcagtatcgtgaaaatggccatactgcccaaggtaatttatagattcaatgccatccccatcaagctaccaatgactttcttcacagaattggaaaaaactactttaaagttcatatggaaccaaaaaagagcccacattgccaagacaaccctaagccaaaagaatggaaggtattctaatggaaaggaactatacaaaaggttaggctggaattaactatgaaaatcagattgatatcagtttacagatattttgaataatgagataaagagtggatttcatcctgtagatcattgctttccagaattttaagtaaataagaatcatctaaaaatgtatcaaaatgccatttcttagaccttacctctaaatattctattttaattcgttgggggcaggcccatgaatct

SEQ ID NO: 36420 - DNA, 1048 bp, Homo sapiens
attcccttatatgatttatgatacctagaaaatgctaagtaacaattaactgcaagaaaataagaaacaacataatgtttgggaaactacaagtcatttggtattgctgaagtaaaaaactaataatgatgtcgaagaatatgaaggggatatgtatcatgttaaagagctggaaattgtcttatggataatgagaaaacataggaatggcataggcagattgtgttttaaatagatctcactggagcagggtaggaggaggggaagggagaatgttggtaaagattagagggacagaattcaggtacaataccataaaaattcaagactttgtatatactgtcataaggatacgatacaataattttaatagtaactataggatagaagggagatgacagttgagtgaaacacttagaaggtagagttggcaaggcttgcctctaacagtaaacaaaatagaggctatgtgataattcaggaaaggaaaaaaataaatgatgacttgaagattctttatttggtggaacttagtagctagcaaaagcataaaaagagagcaagagaaaaatagaatagaggagtaagtagagaattgaaagagaaagtaagaaaggcagtctttagacgtactaaattgaaggtatttctagaacatctatttagaaataagtccgacttttagaatagaatttcaacagattcaggattcattaaaaaaagacaaagaaggccaggataatttgtgctatatgatgtgggaggaagaagatggtctaatgaaagacataggaaattaatagattaatgaggtttcaaatttggtaaaagatgtgtttgttttcaaatcaaattttgaagaaaatttgattcaggcaacagcaagaatctagtgtggttaaacataaatgtattatttctgagtttcatacatactattatgcaaagaatatatctgtaggtcatttccgtataaaggacctaaacatgtcattttataggttgattagggaaatgttttttattaaataaaaatatttaccttaaa

SEQ ID NO: 36421 - DNA, 1025 bp, Homo sapiens
tcactgttagatattttgaaatatacagtaaattgttgttaaaaaaagcttacaaacagttcagaaatctaaagtataggaaaataatattttgggatttgcaacaaagtaagtattagggtaattaaatattaatatattgaaagaatgtatgtttcaaataggtctgttacaatttaaatatattcttcaaatatatctaatagatttgggtcataagttgactttaattttgctgtgatttttagtctattttgaacaccaacaccagaataagtttcctaaaataacctattatcttatcaatctgctgctggtcaactgctaaatggcttatttttccctacaaacataaagtccctagtctttcctggctcttctgtcttttcagccttgttctttactactctcccccatgatattcctactccctttgcaccagtctgctcaccttttcataactatgccttccccatttctacttgttctgtctttattgacctgttctcctccactctcttctcccagtatctggataggtagtaacacagtcatcttcactacagatttaatactcaacttacttttttttttcttttttgagacagagtctcaccctgtcacccaggctggagtacagtggcacggtctcagctcactgcaacctctgcctcccgggttcaagcaattctcgtgcctcagcctcctgagtagctgggattatgggtgtgcaccaccacactcagctaaatttttaagtcacttttaaatgtcctttatggatttcatatttctgtacaattgttaacaatatgtgtgagtctaaaaaatgtcaaccaccttacagaaatagaaagtctttattaatatgtgtgttggcctcttcatatctatgtctctgagctgaccacaattatagctgtctaaggtttttgacaatttttcttttacatttcctcagagttatctttgcttattgttgccatgtttcagctgccttatccaagtattttttattcccttta

SEQ ID NO: 36422 - DNA, 1031 bp, Homo sapiens
tttcctaaaggctcctttgggtataggaaggaagtcattggaaatattcatcttgaaatagctttagcaaaaagaaaagaaaatagaaccttggcaaactgatcattcttaaagaaattaacctgtctacatcaaactatatattattttatagagataattaatcccttcccaatacaattattgtttttcatcattccttctttaaactgtattcttaattgcaattattatttgcttttctgaagattctggcattattgtcttgttcgtaatttatcaaaaagcctaaaatggaaaatacttcagatagacctatgttatatctttgcaaaatcattccatctcatgagttttttaaaaaatctcaaaaaggtcatatgggtctacttaccttccacgcagttttgtatgtaaagcactatggacaacttctcactaaaaaaaaattaaaatgagcaaaattcaaaagaaaaaacactttttataatgtacctgtcatttagtctctttgggctgctataacaaagtgccatggactttgtggcttataaacaacagaaatttatttcccacagttctggaggccagaagtgtgagatcaagggtgccagcatggtgggcttctggtgagggccttccttctgaattgcatactgccgacttctagctgtgtcttcacatggcaaagagagagaggaaacaagctctcttgggactcttataagaacactaatcccattcatgaaaacttcactctcatgacctcatctaatcctaattacctcccgaagactccacctcctaataagaacacattagggggtagggttttaacatgaatttgggggagggcaccaatgtttaatccttaacacctctgaactggaaagaaattaaagaacccttagatactaaaaacaaagtgggaacaggaagccagagaattaagctaactataaagacccacctatacttgattctggtaagcaggtgtagactttgagagccacagggactctgtggacaga

SEQ ID NO: 36423 - DNA, 1050 bp, Homo sapiens
ggttataagcatatagttgataaatactcttgttggtatacatatttgttacataatatttatatattcaattcactaacttctgcatgtcgattgtctaacacctggtcaagtgtataaataattttaaatttattgaaattgatctgttgttttatttaaagagcatttaacagtataccacaaattggttttgttgaaacctaggcgacctaatgaatcatagtgtattaataataaaacaaacttacttgaaacaaacaataaatgtagatattttcatgaggtcctataaggccctgatttacgtaaattttagtattctgtttttttcttaactaagttctaatttttttaaatttcaactgaattttcattttatgttctttatgcctctaatatttctttgttttctggtcttcatattgttcagtgctatcagcaggttttattttgcctcaattcattttagaaatggttcattttctgttaaatactaccacattgctctggaattcttggacacattatgaatttcaattacatttttcttaaaaaaaacttttgacatttgtaacaaatggtcacaagaactaagttttgtgtttgggacattgtgtttgtagattaaaaaatcaacctacccaaaacccttaaaatatccaagcttgtaaaacttgaattgcatttgaattacaccaaatatccatttcatcaagtatgtcgtttgcagaattgattgaaacagttgatatcgagtgaaattgagttcatcaaatttggcagacaactgtaataattgaaggaaaatgtctgtgaatgattgaaggaaaatgcatttcgttgtatttcaggttttattgtatagtggcacatatcagtttcgtgtgtaaataagtaataatactgacaattcctggttatgtaaaacatttacacttgtattttttttaaagaaactgtattttcattttatttttttcccaaaagatttgtggttgaacacattacaggaacatttttttaaaggattggagtggttaatccctt

SEQ ID NO: 36424 - DNA, 1035 bp, Homo sapiens
catttttattttaaaactgcaatgtcagattggaatagacaagttcaagtatatataatataaggaaatgggaaagaaaagaggtaggtgacaaaggtcagacagtaaaggcccagaatgaactactgtcatccattttagcattctctctactagacagttggagctagagtcactttgttgttctaggagagatctgtgaggagtgaaagagatcaaaattgctacatttcttctagtccttagcatgtttacaggaaaaatatgtaagaataaagttttcattttcggtagaaacagaaaattgtatcttttactgtgcctcagggcaagaataaaaatataggctgtcagttttatttaatgtaattgtttttctttcagctatactatttaggaacaaagtgcacatgggacatgggcacacacatcacactagaatttcacttgatgggctgtattctgaaaactcatcattgtagtggaacatgttccttgttctggtgattagtgtaggttagaatgaagatttctcatttactgctcaaaaatatatacacatagtggaaatttctcaggaatagttaaatagcaaaaataaaaaaaaaccacaaactagctacaactttgttgaaatccttattgctccaggaatttttaacattagtgtttaataatttttaatttctaggagtgtcttttacatttctttatattgttagtaaatccttgtgaaaatctctatggataaatggggttattaccacctttattaaaattaccatagtaagcaagtttgtgttgaatttagccatatgcttagctgttgatagaatatgaaaatgatgatgctccagataatctctttagaaaggtacaactatttctcgagtttaaacaaaatgttaactcgtacagtaaaaatatcaggacatcagagtatacctgaatgaatgtattggaagtacttaccaggtataaaattctatgccttcgggcatggtggcttaagcaagcatggatggaatcttagca

SEQ ID NO: 36425 - DNA, 1046 bp, Homo sapiens
ttatatttttgaatatggattttatttagatgtaataacatcaaataattatctctaaattttcttcccaaaggaaatagtacagattagctagaatgaaagaagagatttatatttattgtaccagacaccctgcctaacatgatctatgttagcttgtttcatttttacaatagcctgagtgtatattttatctccgttttatagataatgaaactgcctcttaggggaggttacctaatatttctaaaagttttctgatttcaaagcctattatctttgcattctacctaaccagatcaaggagagagtgtacgctttggtttgaatgtttaaaactatgttttatttggtcatggatttggcagatagaatttacatttaatgttttcttcacttatgacatgttgcaagttgagtagttaatggatatatatgagaatagcttttattgactcatgtgtttatcctgccttcaaccaaaattcttctttagagtgttttcttggatgtaaaagagtgacatttgcattcgtatgggtctgaaagttttccacaaaagttatatatttttttatcttgatgataatgaaataatatatattggcacattgaacagattctgcatcgtttttatgatgccattataacagttttggcattcagtagtagtatgcatatttgtgtccattttttctttcatttgaactaaataggtctcttttcattatcatgagctaaggttaacagaagagagtcagactaatatggagctaatgcattagcaccaaatgaatattaaaatatcatcaatgcatactgtgagaaaggttttgcagtaattcagttactgaaaactgctggaggaattgatttatcaaatgttgatcaaaaaatcatgccgaactccaaagagcctgtgccattgtatgcaatactctaaataaattgcaaaacagcgattgtcatattaaattaatgctaaaattttcgtcagttcaaattttattggtttgccatgctggcatttaatttgtaaattaaat

SEQ ID NO: 36426 - DNA, 1035 bp, Homo sapiens
aatccctaaaagaataaaatataggactcagtatttccttgttagcctaaataaatgacatattaatctagtttgttagctaaacatagcaaactctactattcattcaaatttcagcttgaatcttgcccttctgaatcccaagtgaatatgctctctttagtgaatttgcatattcatatatttatttttccttctcatgataattaacgtatttcgcatttactagttactgctagacattaatcttgtcctgaataagatttgaattttcatttatctttcttcatttttagatacttttgcctagtatatatgtaaataatattggttagatgactagagagatgatctcatcatcatattccagtagtaatttattacttgctttctaagcaaaaatctttgcccatatatccagaatgttgttttttgatgctttcacatttcctatagctacctatgggattgtagtttgtattttgatttatgatttgcatcttgaaatttggatgttatgaataaaaaatttgaaaacaaggactctcttctctattttcttcactttcatatttattcagtagagcagagattcttaatttgcatgtaaaactataagacgttaatttcaatatcgttaaatagggaggaataacaataaacatatatttatgatctggaatagttgagtttattgttattcagtttgaatatgcagctaaagaagcaagattataaataagtggtttccatagatagcatgtttagacttatttgcattaagatttctatgtcatcagcataggaaagatgctgagagctataataaatttgaaatttttttccgattacagtttttactttgcatgttcattttgttacagtttaaggtactgttttctttttccttttattgcaagtgatgcgtatctttttttacttgataacaacactttaaaatttctctgatatcatacttgattattgcattgccatgaagttaagtggtgttgagtgtttaagcatatttgatac

SEQ ID NO: 36427 - DNA, 1035 bp, Homo sapiens
tagatttatttgttttaaagttttaagactctcaatgtaataatctctgataatttggtaaatatgaagctttgtatcaacatctttttaggaaatcatttgttttatgtatgaaatattttttaaaaaaataatgcatgccattgtttaaaaagtaaactagtttttatttttcctgcaaaattaacagatttttgtgaaacattttatatgtaccctactccaaataataacataaataagaaagggcattataaaagactgcccttgtaattattttactttgtgcctagtgttcgtagttatcaaattataatttattttccaagttactctgaaagccgtgtccaccagtggatatgatcaaaccagtagacaatttccgcagtatgttctgagttgaaattcttcccagagtgacttgaattggaatgtttggttgattgcggcaagtctgacttgcttttcaccataaatggtacagacatgagttttcagaaaacgggcaatggaaattacagctaatgcatggaacacaccaaaaggggtaattgcttccttccttccctctttaaattcagtatttctgacattgctaacgttgctcaaaatgcttacttttctaattgcaacatataaagtcagtaaaagcagggaaggtatgtaacagtgatgaaaagggtttgaattgagacagaataaaatgtgtgttcatattggcctattatttcttaaaatagttttatgtgaaatagcaatatacagagaattattccttgaattgtgtgaacttttcaaattgaactctcatttgagaaaaatagtttagaccacttactgcccccttttaagaaatgataatcagtgatgatcatccatttctttttatatctgagcatactgtacacagtatgcacttagccctagaagtttttctctgatacccaaaagttctaaactgctccaggctttccacaccttttgtttctgattttaaacactacctcagataaccccttctctgatcacacattt

SEQ ID NO: 36428 - DNA, 1050 bp, Homo sapiens
tcatgctttttattactcacctcattttctacaggtgactctactccttccatccagaagaaaataaaagtcatttgggaactctcatattctctcagcccaaaccaggaaactatccatacctgcagccaatctttcaactttgtccctaagttacatacataacaggggtcctactcatctcataccaatccctgcttctgggttttgtttcctgtatccccaaccctctcagaaaattttcattatgaattattttctcctctcttcggtaccaactattgcatctcaaaagaatcattccaatcaagactcagactcaacactactatggctgaacgcataaccttcagcatcaagccttgccttttcttctctaatctcagcaaatggtaccaccaccaagccaattgaacagaaacctaagtcattcatgagatctcctcctctctccctgaattcaatctgtccccaagtcttgttgctattgcctcctaaatatctcctttaaatccacttgttttcctctctcctcttaacaccctcatctaggctggcatcatctgtttccagagacactgcacaaacttcctaatgcatcaagattgttctctgatttgcagctgtatttatcttttctgattgtaaatatgacctgtcactgccctgcttaaaactatttagttgtttcccataaaacacaatataaagaccacactcctttctgtagcccatgagatcctgcatggtctgacacctgtgtgcttttgcagctctgtctcatgctctctgctctctgctctccaaccaccacagccttctctagtcaagcaaagaaatcctgcttcctcctctttgatggtgacatcaagtctctggactctggctttttttgtacatattaacttgatggctgaattccggcttcaaggattgcattcaaatgataactccagcagaaagagcagaattatcatccagaagagccagttgactctatgagaggttagaacacatgggttgtgatgtaggctgcacctaactttggta

SEQ ID NO: 36429 - DNA, 1072 bp, Homo sapiens
tttatataaccaatttagagtggcagagttgtaacagaaaaagatactcaaaatccaaagcccttgtttaacatcagaattcactccttaactggcttcagtatcttcataaaataaaaatcatgtacctatctcatagactctgtagtttaatatgcccatgccacatttatatagggtgagaaagactttgaagcagggaagatggaattagttaatggagagcctttttacatgtcttaagagtcaacatttgatacaagaggaatcaagtcatgtaaataaggactattttcaaatgattatacttgatgaaaagtcttatgtggaataccattttagatatgtgtatatatatgcttatcttgtttacttttaaatatcattttaagagaattaaacacacttatttctgtaaaattgaaaagtcatttctaacagttccttttcctgctaaatatggcatttatttaaaagatctaatatttaccagtcgctgctatttggttctctgaaaaccctcctaattatctgtgaaagccaaatgtgatctgagctttcttggcaaaaggatattgactttcattaagactgaattgcagtacagacctttaagcctttatctgcatctcattaattggcatgtgatttgggagagtggctattaattatacagaagacggtgagtgaatagaaaggatcattcaaaggcaaactatgcttaaacctgaccatgtccacagacagtatatacttcatctggcagtcattaattttcctaagtgtttgaaatcagccatagtaagggtttttaaatggcacatctagaaataacattaatgtctagatttttacaatttaatttcctggaaagtcatttttttaaacttgcatgaatttttggttgaagtggcaataagagagtatacataatatgataagctacagatccatttttaataataaaatctctcttcccctgacaataaactatggtagtgtagtcttcaaaaaatccactaagttaaaataaagttttcaagttaaaataaagatacaagaagagacaatc

SEQ ID NO: 36430 - DNA, 1052 bp, Homo sapiens
cagttattcctggtatgtttcccttcctgctttctatttgtagtattctgggatgcagttatgcaagcccagtttagtcctctcagtcacatatagatatatgtatgtatatgctatatatgtctatacatcctattatttttgtacaatctaaaatttttgatgttaatagccttttttttcccctaagtaaaagtcttaatgtctgttttagggactctccaagaaatctgcatcatgaaaacagctactggcctgatctctgcagtgtgtgtgtgtgtgtatgtgtgtgtggtctgtgtgtgtcttcatgaatatggaaaaatgctctgcaactgaacccttaaggttaactcccccacacccactctcctactcacaaagctttcaaaaccagacctataataggcaagaaatgagtggggaaaccatctttatttcttttcaaatatctaattctgacatattgccatcttgagtgctgtctgttgttgcctgtgtcttagttttgtgccttgcatcttctcatggctgtcttctctgtttcataggcctatcttgcctcctctgctcttttctcccatgcactgccctgtcccttcttacttgatctttagcccacagatagagtcttgtgatgagtcaatcatgctttttcatggtgagttttatgccttgtgttgctctcatattgtgattgtaactctctcacatgatgctcctgctcctctatcccctcaataactctttcattaaattgcttttttgtgagttatcttttagctatggtgtttatgaaacctttgtgtcatagattctacactgataatgtgttatcaggaatgtagtcctatcagccatgattgttgattcacattatattattcaatccaagatcataagctttccaaaaagaacatattatccttgtatttcttctaatttaattacactttttatgaagaatttcagagaatctagaattctatccatagtcttaacttacccacctctaactacatattcaaatgaactgagaaaattttgcctgt

SEQ ID NO: 36431 - DNA, 1050 bp, Homo sapiens
catttacttaattaaaaaaaataagaaagcagaacagaaaaataatcccaatgaataagaagagagggattttaaagttcctctataggcaatttgagaccctgtggtctatctagttttctcgaaattttctgttatgagggcattgaagtatatgactgccaagttggtttaagcaccttgaacatgtcaatggttaatttgatgtacacaaaacctgtttgtgcctcatattttttgggaaaaatccaacccttgtgatgtcatgaatcagcgtttatcatgtattttgaattgttctcaatatttcatttaacagatatttatttaaaaattggtttgacaggatatgcattttttggtttcgtatttttcctttgagaactttatttatttaaaatctctggaaaatgttctgaaacattcaaggccattgataaattagatatatttcagggtttatgtgatctttaaacttgctttaaaatattcacattttaattcttaaaatttattcagactataactcttgaaaagctaaaatgcagaaaggaagttgtttctcatttgtttttgtatcttccatatagtggccattcaacctacttttcttaaatgatattcttttcttaactgaaccacgcaacataaagttgactgctgagtggcaaataatgaataatgcaatgtctttctttaaataagcttgtgtttttcaacgtttacaatttttatatatttgagtataagtgatatatttctgttactttgaaatttttaaaccatctagaattagaaatattgattggaactttgtctttattaatcatgacttaaagtaaaaagtatgtaaatgcatagaagcaatagttacccatttatttgcctgtttgtcctgtttgtatttgttgatagtatctactaaatgaggaaagagaaaaggtgatgcaaaaatgtaagactcgattttggtaataattaggatagcccaaattaatctagttttaaaaattgatatttaggggttgagttggctctgaattatttgca

SEQ ID NO: 36432 - DNA, 1052 bp, Homo sapiens
atacacaaaatcctgaatttaaaaaactgtatatgctaaaaaaattgtttatcaggaagtcaagtaaacttacttttattgttaaaactgtattttgaggttaattttccaaaaggagcatgtgccacaactctgatataatactggtgcttagaacattattcaaaaatagggaaattttaatgttattctttagtcattattattttggtttctgaaaataacttgttaattcaatagaggtttttaaatactgtttttgaaaagttgatatgtaaatagtaatttaatgtgtttaattccaatatccatttttggaatactagtaaaactattatctgagacctaatcccacagagccttccaggtggactctactaagtcaggacagttttaagagctttgggggctttagtgttattccccggagctaggttcttagagtgtttatgaacctagtcccttgatctgaactttccattgaagatttgaggatggtctaaagaatggtaattaaggcttgttataatacattttgttgtaagaataatgaatgaaagtttttgcctcattgtatgtccctacaaatcagggatagtttttactttttttaattttaatagctagagtatagtgggcttatcctagaagaattaaacctattacttatggagtataagaagcagatggtgtcatataaagaagaccaaatgagattggctcattccgagtggtatgaaaaataaataaataagtaaataaataaaacaaaatggaatttctaagataaacagttaaaaaaagatgaagactgggattctgcttctctggatgtgtatcctgatgagccattaatttctctatatttttgctaacacatgagagggctgaagatctgtccaaggagttatattattagactctaattgtctttattcatccaagatatacttatttatttgctgttatctcatactttaatggattttatgcatatatgaattatctaactttgaaatagtgtgatatacaacattattatctcactgtgt

SEQ ID NO: 36433 - DNA, 1070 bp, Homo sapiens
aataaatataggaccttttccttatggagacgttggaccgctaatatccatatatgttttatgcagaattaatattctccactattcagggcagtacatttatttcagcaagctaacgaggaagaagagtttgaaagttatttctcaatgcatataatatgttgtatacaagcaggtgttctatactagtaaatggaaatttgaacttatcagagaagtctgaatatcaaaagcggataattcacaattactgactagcgatcctgtatctctttaaattactgtgtctaactttttaataaacctacttgtagttctgacatatatatgtgtgtatatatatatacacacatatatatacacacatacatttatatatattcttttttgtgagaatacatattgaaaaaaagttttattttatataacaaatagaaatctcctaggaaaactatttctaaagaaacctaaatgtgaatatgtagccataataactaacacctattgagcacttaatacttgccagtcactgtgctaagcaatgcattttctctgttgaactgtattacaatactttgaagtattatttccattttatggataagaaaactgagatttggagagttaaaataactcatgcaaggtgaaatatcttataagtgttggtgataggattttgaatcagattgtctgatcccaggttccaaatacaccatgttggggggccatccgtacaactttacctggcagtatctgtgtttcctgaatcacaaatgcctctccgccagcctacccacttgggcttcagaaacaccaaatataattttcataaattttatgtgatcatgatgctgagatgcttttattccatgggtgtgtgtattgtttcatgaagaaaacagtgagtacttgcctatagaactgccacataaagagatacatatcccggtccctgcaaagcagctgccccatcttgctaatatgatcactctaggattaaaaggtaattcatttttggaatcatttttaaaatattttaaagacttacacgtcagttttgtcattgatgg

SEQ ID NO: 36434 - DNA, 1028 bp, Homo sapiens
gccctctgttgctggaccccactatgcactgcagcagacagctccaggaggcagatgggcctatgctctgaaatcctaaaaacactgggtctgctctaaattcctcatgtgtgacatgggagaataattttctctctaccctgctacaatttatcacactgtggaaaagggtttagttttggggacaaatcttgagttacagatgccatacacagaaagcattggcaggcctacactactaataagctagacctgcataagtgggccgaaacccactgtgaattcatcatagtcttgagttggaatgattatgtttaggttcacacctctttataaaatacttagagctttgtttactgtatagactcaaaagaactacatattccactaaccctaaaattaagtattctgattcctcaaagtaccaaaatatggacaattttaatgtacccaagaagtttcctgtccatctttcactttaaatattggcctttgctataatctgaacataatctgaatctaattttttaaccaagataccaggggtttggtataggtcctgctgcttgcattacagaaaaccaattactgacacaagtattgccaggaaagaaggctttaatcaggtgctgtggcagaggagatgggagatcagtctcatatccatctccctgaccaactaaaattcagggtttatataccagggaagaaatggaaccatgtgtaggaaaacaggaattagggagtggtaagaaagaggagttgatcaacaggaggcaggtagtcagttaggcaatcataacagccaaggtgtctggcatctcattgttcaaatccaatgatctggtgagtatcagctcctagctaccatctgggaggcctcatggttggtttccttagaaaggaactcagataaaacaaatgtaactttctcaagttttaagactgggagaatcaatttatgggtttattcaaaaaattataaataccatctctatgggacaattgggttagtttcaatctaaaca

SEQ ID NO: 36435 - DNA, 1044 bp, Homo sapiens
aattcttacttctgtgtacatcatctctgtagccccagtcaaatcaatggcatgttacataaaagcaactactgataggctaagtgcagcggctcacacctgtaatcagtcccagcattttaggaggctgaggcgggcagatcacttgaaatcaggagttcgagaccagcctggccaaagtggtgaaaccctgcctctactaaaaatacaaaaattagctgggtgtggtggtgcacacctgtggtcctggctacttgggaggctgagacacgagaattgcttgagtctggaaggcggaggttgcagtgaggcagtgagcagagatcacactactgcactctagcctggggacctgggcaacacagcaagactctaaaataaaatttagagtcctatttttcttgccccaacctggaaaattaccattcttgagaaaaaaaaaacatacgacataattcaccaactgcttaaaactacataaatttgttgcctttgtatacccttctcctagccattctgacctctgatgttttctcaaaacatcattctctctcagcctttaagttttgcaagttgaatcttacctgcttataaataccttctcctattacctctcttcccatttttttcacctttgatcctttaaatctcagcgtataatccccaatctgggaagccttttttcattgctccaacaggtagtccctttttaatttacagctccttgaaggcaggattctacttcagcatgcatcacactgtgcttcctcctgatgtcacctctgcaagtgccacagctggtcttgatcatcgtggagcccccattgtgagcactgctgccaagcctctgttgggtcaaaatgctagagtttagagtttgcaaactattggttcttggcaagctcttagttttatttacttggttcattgttcatttagtttttgtttttcgtttttttgtttgttttattttttttctgtaatcattacgtaaacattaggaaattgcacataccatagaaatttggatttctggctgttttt

SEQ ID NO: 36436 - DNA, 1029 bp, Homo sapiens
ttgcatagcaatgtgtatagcagtctagtaacttatccagggttttacttaaaatcaggtttttaaataataaatcttaatgccatttgcttaccagtcttaatattttcattacaacaaatgcattgataaagtatctacatgatttcaaggggtaattttacttaaaatgtgttctgcagagaagtatggaaatctacttttggtttgcaatgtatggcaaataaaagtagttttaaaatcctttacataagaatgatgaaagtcctttcaagtatggagtttattatctggcaggtagatatttgtggaggtttatacatcagcataggtaatgtggtaatgtagaacacaaaagctaaccttgaggttttgtttctggggtttgtttatttgtttgtttgttttttaagaaaatgatcaaacagaatggcagataggaccacattaacgaagctttcaacctatctaaagtctatgtcattttaatatttataaaacatctggctgaatatattttggatactattcggattcttgatgaactagcctcagaatttaataggcatgtgtgtttgtgttttcaaaaaaaaggtttagattgaaggactggattgtcactgtatttcagatagtgatcacagtccacaagacagctctgaaaaataaaataaatgatgtaatgcagtgagacagacaatcagtatctattatgtgattaaggaatgaaactgttttcaagaacaaatcagaactttttgaaaaatgtattagagatacaaacttttatgaaataaaatatatagaattagaaccgctgatagtactgtcacataccagctgggagaatatttctgccaactttggaatatgctcaaaaataaatagctctaactttagaaaaagaaatttcaggccgggcatggtggctcatgcctgtaatcccagcactttgggaggccgaagcggatggatcacgaggtcacgagatcgagaccagcctgaccaacatggtgaaaccccatctct

SEQ ID NO: 36437 - DNA, 1147 bp, Homo sapiens
agtctgtcgccaggctggagtgcagtggtcccatctcggcttactgcaacctctgcctcctgagttcaagcaactgtcctccctcagcctctcgagtagcagggactacaggcgtgtgccaccatgcctggctaatttttgtatttttagtagagccggggtttcaccttgttggccaggatggtctcgatcgcttgacctcgtgatccgcccaccttggccttccaaagtgctggtattacaagcgtgagccaccgtgccaggcgaggaatttagcttttaaattattagttttatgcatcctgctaccttggttcaaagcttaagtatacttgtatctttctataatactaacaaataatgagtagtgcaggatttagctgagactgctttgggccctcatccaaagggagttcctgaattgaaatgccaagaagacttggtaataagttgtcttaatcctgacactgtaaaatacctgttaatgtattttagtcaaatagattatggtaaaacatactccctctttttcctagaaagtattaggttaatttcatattaaatctaggtacctttgaaataactaaattatgagccctgatatatctgttttcttgcttacccacttagaaactcatgctgtgatttcatatttaatctgtatgatcgaatttttttatcttgtactaaaacataaaattattggccgggcgtggtggctcattcctgtaatcccagcactttgggtggctgaggtgggtggatcacctaaggtcaggagttcgagaccagcctggcctatgaaaccttgtctttactaaaaatacaaaaattagccaagcatggtggcacatgcctgtaatcccagctacttgggaggctgaggcaggagaatcatgtgaacccgggagacagaggctgcagtgagccgagattgcgccactgcactcctgcctgggcaacagagcgagactccatctcaaaaaaaacaaaacaggcagggtgccctggctcacgcctgtaatcctagcactttgggaggccgaggtgggtggatcatctgagttcgggaatttgagaccaacctggccaacatggtgaaaccccatctctactaaaaatacaagagttagccgggcgcggtggc

SEQ ID NO: 36438 - DNA, 1050 bp, Homo sapiens
caacctgtacgaagcctttgctcaggttctaaaatatgtttgtccttgcacgaattttgtatatttcaaatatttctgtaaaggtttcttcttttctgttagagtgtggtgttaagccagagtcagtggtttgtgttctcattaaaatgtttgtttaaatcctatgtccaattcaagcctatctaactacatttggtaggattaacatttcatataacaaatggggcttaattaaaaactttaacttggaataaaggaacagggatcactttatcttctgccttcatttaccttagtccaagattcttgcaaaacaggcaactgaacaaacattaggtttatgtaggtaaaatgtgaaagcatttctcctccactttttaaaatttaatttacccagtacagcggggcaccagattacttgatctttgtattttgcagttttgagcctttgtgtcaatcccaagcacagagaggatctgccaaggaaaaacatttgcatcttcggagtagacattttgcagtttgtttaataacaacttctaaagtaagttgaattcatccattgtcactgattcaccaagtggatgttgcattgtggaatttgcctgagtactgttgtcattctgctcagccaggcacggtcagtttcttggccagggacattgctatgtgctgtgtgcaagctctttagaagagagattggattttcttggcattatcagcactcatgctatttagtctacttctattttgactgactctttaaattagtacaatttttctacttgtcatataactcctggaacaatagtacgggaagccgtgatccttttccctgactcatgattttagtctttttccaaatcgctgttttttttttttttttttttttttttgctgctccaacgaccagcatgtgttggagcagatctccatggtaagccaaaagtggacttgtcagcctataactactctgcagctgccactaactctacaggcacagtaactacactttatacaggagcacatgccaaagtgcctgggaggtgc

SEQ ID NO: 36439 - DNA, 1034 bp, Homo sapiens
tcaagaggtcatttgttccccatagcagcatatctcatttttaaattgaagcgaattaaataggattttactactcaacattcattatactgttaatctttgctgaaatatatgctaacaaatgttaagcaagggaaactgaagacttagtcatgtggattgttagcagtgatctgcattctgtaaaagaggtactttcccatgatgtaggcatgaagtggtgccagtaagcgtagagcggaaatgttgactttagttaacattgggtttagcatttccagtgcagcattatcagtgggcctttaaaaatacttcgtaagtacattagctttcactttgttgttaaattatagcagactcattatagagaacaagtttgccttgattttgtttaaaatgacttctgctaagcacccagaagataaaattgacatatttttataatataagcatactttttttgtacattgtgttcattcttgaataaaatgagttctgtgttggcttgtagatactaaaaagaaagtattgattttgattcaataaatgttttctttcaatcctggttggcctttcctttaaattttgtttagtttttcttttctttcaaggaaggaattatttaccagaattcagttagagcaccttttttgcattcttatattttcagtcatgattcctatcatgcaaaaaacaacttaaaactttttgatttaaaagagaatttaaatttctatcattgtaatctttaacttcacagttcacctcttaatttaacaaatacctagtcagaatgaaaattaaatggatagaaataggactaataaaacatttatgcctggtgcagtgactcacaactgtaatcccagctcttttggagatggaggtgggtggatagtttgagaccagcctggacaacatggtgaaaccctttctgtaagtttttattgcctatcaaccacatgatttttaacagaggtatcagatatctacacagctttccatgatgaagcatcttgtccttatagtatatg

SEQ ID NO: 36440 - DNA, 1048 bp, Homo sapiens
caaaataaatccagagatacacagaaataacatgactaagtaggaagtttattctaacaaaacgaatggtgaggtaggagggcaggagtagacacggaggaattaacactatgaaatatattattaattcactagactaacaggtaagagaaaaataatttgatcatctcaataaattcaagaaaagcatttgacataattcaacagcatatactttcttagcaaggtataaataaaacttccttaaactcataaataccaccaaaatcctacagcaatcactatgctcaacggtgacatccgaatgcgttctcgctgagatcaggaacaaagaaaggaattccattctgaccactttttgagacagggtctcactctgtcacccaggctggaatgcagtagtgtgatcaaagctcacctcctaggctcaagtgatccttctaccaactaagccttttaagtagctgggaccacagctgtgcactggcacacccagctaattttttgtagagatggggtttcaccatgttgtccaggatggtctcgaactcccgggctcaagcaatcctcccacctcggcctcccaaggtgctgggattacaggtgtgagccactggatctggcccactctgaccacttctattcaacactatactgggcattttggccagtgcagtaagacaagaaaagaaaccagcactttgggaggccgaggcgggcggatcacgaggtcaggagatcgagaccaccctggctaacacggtgaaactctgtctctacttaaaaaaaaaaaaatacgaaaaattagccaggcgcagtggtgggtgcctgtagtcccagctactcgggaggctgaggcaggagaatggcgtgaacctgggaggcagagcttgcagtgagccgagatagcaccacgcagtccggcctgggcaaaagagcgagactccgtctcaataacaacaacaacaacaacaacaaaagacaagaaaagaaaatacaaaatgactagaaataaataagttattatgaacagatatgagtatgcaga

SEQ ID NO: 36441 - DNA, 1080 bp, Homo sapiens
tgcagggtgccacaggagtgtctaacagaggaggtcaggggcagcatccctgagaaggtgaagcatgagcgagagtgggaagatgagtcgaaagtagccagctgaggggtagagaggagaaagaacatccaggcagggagaatagcaagtgctaaagccggggctcatgaaaaggcatgggagcaggacaaagtccgtgtggtagaggtgcggagagtggtgttaagatgaaggggagaggcaggcagagccctgggcagatgagcaaccagggcttagtggatcacagttaggactttgggcttcagccacagagcagcggtgggctactgagattttttaaagcaatagtgtgacaatcagatttgtccttttttttttttaaagatgctttgacaaccttgtgaagaaagaattgaagggaagcaaaaggtgttgtagagagaccaattaaaaggttgtcacagtagttcatgccagagatgatggtggcatggcctagcatgacggtggtagaaatggagggaagtggtaagaggtaaaatcaacaagacttgccgatgggctggatgtcggaattgggggaagaaagctttctggcctgagtaactgggtgaatgaaggtacacttctctaagacagagaatgctggaaaagaaccacgttcatggatattgagttcaatttgtgtgtactaaatttggggtgactatgagacccctaagtggagaagtagagtgtgaagctggctgtatggatatggtactgcatgagaggttttggctagagaaacacatgtaggatttgtcagcatatagaaccctcagcagagccccagatagggatgaggttgcctggggagaggggagtggggaggggaggggggaactgggggaggattgtgctatgcttagaggccacctgagtggacatgggagattccttctcacggagctaagtgacagctgcggctcagaagaatgcccttgatgtgaaaaggagataccccaagttcagagtagaaatgcagtgtatttttctgggtcagctgtgtcatgggtcagcttaagaaccttcttg

SEQ ID NO: 36442 - DNA, 1131 bp, Homo sapiens
ggcttcgggaggaatacttagaggcctccttggaatgtggccaccgacaggaatatgtgggggtgcagtgaggaagctgtcagcctgggcctctgtcttcctgtacccttgagggactggtcacttacttttcctcattttcattcactctgatttgttactgacaaggcctagggaagttttcacagcctaaaacacagtcagtatacttactgttcttagaaacgtaacactccccgacgctgagatgcagacagctaagatgccagggattcaagtatgttattgtgtgctctgagtctctgaccacctcttcttcccatacacttatgatgttgttcctgcagttacaagacctaagttccaagaagcagcagtcccacaacattctggatctgcttcgaacctggaatatccggatggtcaccatcatgtccataatgctgtggtatgtaaaagagacctgcctgaggcttccagacaaagcttcttgaagtggccattgggcctcttgtttacagacatgcctcagacaaaattcaaagcctatgtcatcagagagtgaaaaggatatgtcttgtgttagatggaaaaaatgggcatgtcacaattcttaatgggatggaacctcagaaaaggagaatgaaaacaattgtggaggctgttgtgggaaatatggactcttgtggggaatctctccagatcttaagatgaatccttgcccaatttgggtcatttagttcccgtctcctacccagttaccgacagtggctgaggaggccaggtagggcttttaagaaggatctgagtgaagacaccatgtcctgtaggctgcagaggctgccagttactttctggaaatgtggaagtgggatgtgctcctcctgggatgtccataaacggtcctggagtcagggctatagcctagatgtccttaccaggttcccactaatgaggcaaagtatgtcagaaagggatttgtgaattaccagggagaggaaacatgtccaagtgcacatcgctagcttttgctcagcggccgaaccctgggattctaggcgacttctggagcctggtgggttagcggtgagaagatgggcgaggagggcggacttcatctcagagtcctta

SEQ ID NO: 36443 - DNA, 1096 bp, Homo sapiens
tttgggggagcaggcatgatgggttaagacttattaatctggaagtaagcactaggttttcctttagggcaggaagaccttccttgcaaaatccctttctggcaagtctcactgggctgtaaaattgcaaacgcactgttatcacatcccaataagtgcatgatttgattttaaagtaagataatcttgcgttcattccagcctcatagggaacatacagttttctccatccttttctcttacttactccccttcctctgtttccctctgtcatctctaatccccagagtatctggttatcttttttatacactcattactccttcaaaacactccaatatagataacaatacttgattatttggaagttatctcaactatacatgagctgatgaaaaccaggaagtaagcaataagcaaaacaggcagacagagagtccaaagtccaaaataaattaacatttgttgaggacttgtggacttactatgttccaggcattatgctaacctcatcacagtctctattttgattaatcttctgtttgcccctgcagatccactctccgtcctctctacctgctctgggttgggaggctgacctgaatgggccacatcactcatctatcttgcctctggattctagttagatttggtccatggggagcattagcaagagatggaaggactcaggaagatgaggtcaggagttccccgaggagggcaagtggttaagttattcccccgggtccctatcaggtcgctttaggccaactgcatcctccactggagcccacagctcctgccagacacccttccaatagctgcctcctttgggtccccttacccatttattcccttccttcataccttcaggttacaagtggtaacagctccccattgttgctagcccccatatgcttcactgtctcatcttgatttccctgagccctccccacacctttgtaaacagtcccagtccaagttcaccatctgtttcctacccaacttgatgatacaacgaggtaagcactgtattagcccatcttaagacaagtaacctgagccccagagaagtttaataacttgtcccagaaca

SEQ ID NO: 36444 - DNA, 1100 bp, Homo sapiens
gggcacagagggctggggttcctgtttgctctgactctaaagtgtcaccttttcccttaagccagaatgttggaggatgaggactatttagacaacctgctttcaaggggaaagaaaagagcagggatcagagcctttaaaattattattatgaaacatcatacatacaaaaaaattacaatctctatgtatagtttaaaacataacaaaaacccatgtgtccaccacccaactgaagggaacattccctctccccatgaaggtgtccctccaacagcttccatgtccctccccaccaaagggaaccattatccttatttttttggttaatcatttatttgttattcttgttttattatatatataaatatcctctaattatatatgatttcatttttcctatttttgccctctttataaatggaatcatgttggatgtatttatttaatatttgcttttactggtcaacaaaatgttttcagactcatccatgttgatacatataactgtagtttatttatttactgtatttactttactataatcttctaaatgagtaagccataatttatttatctattttattactgatggacattttgcagatttttttttttttttttatgatatggagttttgttcttgttgcccaggctggagtgcaatggtgccgcctcggctcactgcaacctctgcttcctgtgttcaagtgattctcctgcctcagcctcccgagtaactgggattacaggcatgtgccaccatgcctagctaatttttttttttttttgtatttttagtagagacgggctttcaccatgttggccaggctggtctcgaactcctgacctcaggtgatctgcccacctcggcctcccaaagttctggaattacaggcgtgagccactgctcttggcccattttgggggttttaaaagttttagttgttaagaacatgctgcaaaaagtaagtaaaactaaagaaatctgaataagatatggactttagttaacaataatgcatccatattgattcattaatgtgacatgtatagcatactaatgtaagatgttaaggactgggtgctgtggctcacac

SEQ ID NO: 36445 - DNA, 1076 bp, Homo sapiens
tttaaaggaagcctactcagtcgaagctctcaatgtggcatctacaatgtgcagaatataattttaaaaattaatgggaatatgcaaaagaaaatgtggtctatacctgagaagggaaaagtgagtagaagcagatccagagatgacagattttggaattagcagacaaggatttttttttaaattttttttaaatttttttttttgagatggagtctcactctgtttcccaggctggagtgcagtggcacaatctcggctcactgcaacctgtgcctcccaggttcaggcaattttcctgcctcagcctcccgagtagctggaactacaggtgcccacgaccatgcccggctgattttttatttttttattttttatttttagtagagacggggtttcaccatattagccaacctggtctcgaactcatgaccttgtgatccgcctgcctcggcctcccaaagtgctgggattgcaggcatgagccacgacgcccgaccggatttttttaaagctatgatagataagctcaaggacttaaaggaaaagatggacataatgtgtgggaagacatctaaacagagtaataaaaactataaaaaaagacccaagaagctgaatgcatcacaagcagcataaacataactatgttgtacattacattcaaattgttcaaaactaaatataaaatcttaaaaacaggtggaggaaaaagtaacacatcatgcagagggaaagaataatgagtatgattacttcttaggaaaagcaatctaaacctgaaaacagtgggacagcacctttaaggtgctagggaataaaagttaaactcctatatccagcaaaaatattctttgaaaattggaggtgaaatggaggacattttcagatttaaaacaaaatggtagaggtaatttgttacagacaggcttgcactatagtaattgttaaagaaagtttttgaggctgaaggaaaatgtcgaaaatgattgtaaattagtcctagagtaaaagctgctctaggtccccctttacagaccttaacaacaaaggttcaaaagaatccaactgtttgt

SEQ ID NO: 36446 - DNA, 1045 bp, Homo sapiens
gaaataataataataaaagtaggttgtaaaaatgtcttagaagaagagttggtcagttttggaatcatagaggcaaacactagaagaatatccccagcatcatccaataagagaatgccccgaaccagatcccagtattcctgggagatgaggcaaccagctgtctctggaagcgagcctcagagcaggccactgagctcccttgttgtactttacttgctcagagtcctctgtggttgagcaagctttggattaaagtatactcttcatgtaaatttgcctataggctcagaatgcattggtaactcaccatgaatttctagccttctcagtagtcctgacttaaaaaaatacattaaatagttacctttttaaggattaagtaactctaaatgcccaatgaatgaataatgacttttgtggcaggtgttgaggacaggacatggtgtttggagttagaagtggaatttaattcctgcttctctctactagctgtgaggacttgggccaagttacttaatgtctctgaacttcagtttctctaggcctgctctacagtgttattgttagccttaaatgagatcacttttactaaatgcctggacctggagtatcttacttgtcttcatctatcagccatgtaagctatagtgagttttatttatgtaatgtttctttattttcagaatcgtctaaaagaaattgaacataatctctctaaaataatgaaacttgacaatgaaattaaagccttggatagccgaaagaagcaaatggagaaagataatagtgaactggaagagaaaatggaaaaggtttgtggtggtagaattttgttctgcttcaaaattttgggattattgtaatgaactttatttgaatccattttgccatccacattggaaaaaaacaaatacagatcttgttacttctatgtatatgttaaaatgaaggatattgaataaggtttggtttatatttgatacctcaaagtgatcatattttcttatgtttgtacattaaagctttttattttggtgttaca

SEQ ID NO: 36447 - DNA, 1788 bp, Homo sapiens
gaaattcaggagattggaagttgttgctatgtaagggatactcaaagtcattagtatgtcaccttgagagagttatgcaaagggaaggagttacaattagattcctgggaagcacaaacatttaaaatgttagcaggcaaaggaaaaggagcaagtgaaggaaactgggatgtgcccagggaaccagggtgagagccagatagctgtggtgtctaggtgccttgggaaaatagtcttcaaggagaaggtcaacagtgtttggtgctacgtagaggtagagtaagatgaagactgtacttggcacttaggtcactggtgatcttgatgagaagtgctcaagggagtctaggataatgaaaatatcatcatattagttacttttttccaaatgtttactgtgactcaggatgggtagtcatgatgaagaagcatgtgtgcagtcacacacatttatctgaaacaaatttctcaaagtagtacatatacatacagcctactccaatatattaccgtctattctgtttcatttttaaaaaatatgctgaatacattaaattgattacatggtagctaatgcatctaaacctgcaaattgaaaaaccatgttatgtgtgagtattgaggttggctaggatgatgtttaagaattaaagtggggataaattgtactagtaagcaaaatctttgatgaatgagagggaatgactgatctggacgcaagtggatgacagcaacaaggagggggaggatacaaaagaaacagtatttacaggagagtaaggaagtagtatttgtgaaaggactaaagggaattacggggatgttctcttgtcttctttctgtccaatagtcctagcaagcatcttgctgaggcttaacctgggatcaaagaccatgaacccccagaaaccaggcagaattctgtgtacatttttctgggagcaggcccatgagtaggactggcaggtgagtcagtgtcctagggggagagttaaggcagaagtggactagtccctcaacttctgaaaaaaattatttggtcataccaaactcttgtcatgatttgttggcagaatttgtcttgtttttgcctactcaaattttcaaactaatttctcctattttaaaatgaaaatccatatttgctcttattttagcaaggaactagcttcatctgagcagaataaaaatcatataaataatgaactaaaaagaaaggaagagcagttgtccagttacgaagacaagctgtttgatgtttgtggtagccaggattttgaaagtgatttagacaggcttaaagaggaaattgaaaaatcatcaaaacagcgaggtaagttgtctactttatattatcaggatactttgacacctttgaattttcattcacaggtaactgttaaggatggggaatttaaaaacctggttatggagcctaatggcttggatttcagtcctggctctacaacttactcactgtgtgactttaggcaagttactgaaaccttcctgtgtttcattgtctataaaatgaggacacaactaccacctgtggtactgaggtgtgaatgagattgtaattataaagcccttagaacagtgcctggcacatagaaagctctcagtaggcattttgttatacttataatgtgttaccaaaaaatatttatacaaatctgaatgtatcatgctctttggaagcgaatatcggaattttaaatatcagaatttttatttcttttataatatatttataaagcaagaataatcatatatttatagaaaaag

SEQ ID NO: 36448 - DNA, 1029 bp, Homo sapiens
ctcgctcactctcccccactcctcccctctctcactcactctgtctccctctgtctcttgtctgagggaagctagctgccatgttgcaagcagccctctggagaggcccatatgccaaggacctgaggcctttgagcaagtgagtttggaagcagactttgtagcagtcaagccttaagatgactgcagtcctggctgacagcttgattgcgacttcatgcgagaccctgagtcagaagcgtatctcttgatcctcatatctctgagaaataataagtgctgttattttaagctgctaagttttgggatactttgttatgcaacaatagataaccaacacaagcatcaagggtgaaaaccagattattggggccacagagatgaggagacagaggcagtagtttgagaataaaaaggaaggagaggaataaggtagtatcttgaaaagaaaaagatcaaatggataaaatttgaaattggtagaaagtacacgtagtagaaatatgagcttagttctgtgttagactgttatacaataaatggcagaaattaacatcgtattatattttaggaccctagctatcacggctccttttttttttttttgagacagagttttgctttgtcgcccaggctggagtacagtggcgcagtcttggctcactgcaatctccacctccccggttcaagcaattcccctgcctcagcctcccaagtagctgggattacaggcgcacgtcaccaggctcggctaattttttttgtatttttagtagagagagggtttcaccatgttggccagactggtttcaaactcctcacctcaggcaatcgcctgcctcagcctcccaaagtgctgggattacaggcgtgagccaccgtgctgggccacagtttcccctctaagagtaaggtgcatgtcttactcgttgtatctccacagttccttgtatattgcaactttgataactatttgctaaatgaatgagaactgtaatgtctgttccaattatttattgctatgtaaca

SEQ ID NO: 36449 - DNA, 1002 bp, Homo sapiens
ctctctctctctctctctctatatatatatatataaagatatatatatataaagatatatatatatatagagagagagagagagagatatatcttttttttttttgagacggagtctcactcagtcgcccaggctggagtgcagtggcgccatctcggctcactgcaagctctgcctcccaggttcacgccattctcctgcctcagcctcctgagtagctgggactacaggcgcccgccactacgcccggctaattttattgcatttttagtagagatggggtttcaccgtgttagccaggatggtctcgatttcctgacctcgtgatccacctgtattggcctcccaaagtgctgggattacaggcgtgagctgccacgccctacttctatatttttgtctaaaagttttaaattttgcctttcacatgtaagtacatttaagtatttaattctaagttgaattttttccgttatgaataactggttgtcttggctctatttattgtagactatccttctctcagtgacctacagtgtcatttctgtcatatatcagaattccctatgtgcctgggttggcctgggttctctgttctacttaattcatcactttgtctatctctgtgccatttctctcaccatcttaattacatatagcagaattttctttatccagtgtatgtctgtcttttaaccagtgaatttaggcctttcatattcattctgattactcaattgagttggatttatttctgccatctttttttcctttcctgcctttttgagatggatttatttttcttgactcctcctttttcccttctttgggttatccagttgaccatataacatggggattagggacactaagccccccacgcagtcagaaatccacatataacttttgattccctcagaacttaactactaatagcctactgttgactggaagccttactgataacagaaacagttgattaacatatattttgtatgttat

SEQ ID NO: 36450 - DNA, 1025 bp, Homo sapiens
acacctgtaatgccagctactcaggaggctgaggcaggagaatcgcttgaactgggaagtagaggttgcagtgagccaagattgcaccactgcactccagcctgggcaacagaacgagactctgtctcaaaactaacaataacagtaataataataaccccaagtttagtttgtctgtcaggttacatactgactggtctggttttcacttctatcttcgtttctattatgtagggatttccctttctttcttgtgagctcaactatgaatttaaaataagttttgttataagtctatctagtagttctgttcatttgtggcaggagaattattacttaccttagattttggtggtggttgttttttccagaatggcaaatatcttccttagcactaagagagttacacagagagcttctcttctaagacttctggtcagatacagcatagtcaacagaccaacctgagcagtggcattcagaccacagggctcaggaagacaggagaactctggtttcagtatgaggacttttttagttagtgatgataacaaaggtggtcccagaattgcctaggcatatttttggcatatacaagttttaggaagtacgtaatcatgtaagacaaattagatccatttactgtgaaatattgggagtgagccaattaacatgttattttttaaaaataaattatactaagatttttgttagattaagtttaacttttaaaacaattttttgagagtattccatggatatatcttttgtcccatttcattgtgagtgggtacgttaacattacaatgttccctgggtccaaaatggctcatagaattatatgcctgcaccaaatgagaacttttgttttttaacttctttgaatattgccatctctcctagatattagatccagcagtttaaagtggttagtcttggaatttaaggtgctgaaacaagaacataagcaaaacttaaggaattcttgcccagtagactacacatacatatatttgttttttgtt

SEQ ID NO: 36451 - DNA, 1056 bp, Homo sapiens
tcttttttttaaaaaaagttttattcttattttttatggctatatagccggtatatttatgtggtacgtgagatattttgatgcaggcatacaatgcataataatcacatcagggtaaatgaggtttccatcacctcaagcatttatccttccttttgttacagacattccaattatactatttagttatttttaaatgtacaatacattgttgactgtagtcactctgttgtgctataatatactagatcttattcttactatatttttgtacttgttaaccatctccactgcccttcctagtctctggtaactatcatctccactatctccatgagttcaattgttttaatttttcactcccacaaatgaatgagaacatgcaaagtttgtctttctgtgcctggcttatttcacctaacataatgtccttcagttccatccatgttattccagatgacaggatctcattttattttatggctgaatagcactccattgtatatatgaacaacttttttttttttttgagacggagtctctgtctcccaggctgaagtgcagtggtgtgatttcagctcactgcaacctccacctcagcctccgagtagctggaattacaggttcctgccaccacacctggctaatttttgtatttttagtagaaacagggttttgccatgtaggccatattgatctcgaactcctgacctcaaatgatccacccgcctcagcctcccacagtgctggaattagacgtgagccaccgcgcccgagaggaaccacattttctttatccatttatctgttgatggacacttaggttgcttccaaatcttaggtattatgaacagtgctgcaataaatatgggagtgcagatatctcctcaacctaatgatttcatttcctttgcgtaaatatccagtaagtgggattgcagaatcatatggtagttctgtctttagtttttttaggaacctccatactattctccatagtggtgattttgagtcctgactgaagatatttagcaaattatttagacactctgagtt

SEQ ID NO: 36452 - DNA, 1062 bp, Homo sapiens
ggcttttctctctttttttcatttctcatttctttttaggtagggatttgaatcgtgaaatccctgaatcgttagggatttccaggaccttattttagagcagccataataggaggcatctttctcttcttagttttaggaggaacacttctatagattttaaattaaatttgatgcttgctgtggatatctgagggagtcattttgtccagttaagaaaacattctttgatttttcacttaagatattttatcaaaattcagtgttacagtgtatcaaatgtttttatgacatctattgaaaaattatttttttctttttaatctgctactatattagttgaattattttccccagttttactgtttctttcttgttgtaaacactacttggtcatgatatattctttttactacccttactactaaatttcgttttatttagaatgtttatattcataagaaaaatagccttgtacttttttccccttatgtttctccttgctgtgtcataccttatatacttgggagctaggtgtgtcttgaagatttgataacattccctcataaaactgagtctggtggctttaaaagatggaattttgactgccttttcaattttaactgtcatattcaagggctgttaatatcctagccacttttctctgatcttgaacaagtcactgatttcattgaatcttagttttgttaatggtaaatagagataacagtatctaattcccagtattgtcgtaaggattaaatgaaattgattatttagcatagttttgtctcgcatatggtaaatggtcatcaataataatcattattatcattgttattcccttatgtagattactgtagcgaccttagtcatccccatctcttacacagtacagctgtaaattccatagtagacagagaggatacgaagatgagttaatggtccgtcccacagtggtagtcatcaactccatccgacacactctttggtgggttgagacctctccctgaactagatctttttcccgcagtgctgtgtctcagcagacctggccatggg

SEQ ID NO: 36453 - DNA, 1067 bp, Homo sapiens
tgcttaaagaacatgccatgcagctgggcatggtgtctcacacctgtaatcgcagcactttggaaggccgaggcgggcagatcacctgaggtcaggagttcgagaccagcctaacatggtgaaactccgtctctattaaaaatacaaaaattagctgggcatggtagcatgtgcctgtaatcccagctactcgggaggctgaggcaggagaattgcttgaacctgggaggcggaggttgcagtgagccgagatcgtgccattgcactccagcccaggcaacaagagcgaaactccgtctcaaaaaaaaaaaaaaaaaagaacatgccatgcatatatgtattatgttgtcagcctagacagctgatcccaatttaaagcatctgcagattactgtctaaatcatagtctacaaaaatgacaaacttgtgatctgtaatcagtatccctacgtgctttgatgatttttagtggtaattataaatgagaaaatacagagtttgaaacatggtctctttgaattaaaaatactttcaaaaatatcttgaggaaaaagattttttgtagctattctgagttatgaaaattaattagcaataattgtctccttggtgtgaggggagagaacaaataatggaggtgggcctccagcctacctaacactggcttttgctgaggctctagcagccagccaggggctctgcatgtgagtgggtggtggtagagttgacagcagtttggattcaaagacaggaaggaaatgcctgtccctcacagggccaagctgtggccctgtcttctggcttgcctaggcattaaagaaaagacataaactattctaaaattaccaactcactgatgtgtgcgcacccacccacaaactgagggggaaaggggacttacagctcacaccagagtagtttatacttcctagaatagccctactctctcaattctgtgtgtcttgtatcctcagatggtttcagtgggtctgagggttttagtattaggtttctagtaaccacgaaaatgcctaacagttccagttacttggattttctacaggtaa

SEQ ID NO: 36454 - DNA, 1023 bp, Homo sapiens
ttgaggtggagtcttgctctgtcacccaggctggagtgcaatggcaccatctcagctcactgcaacctctgcctccctgatacaagcaatcctcctgcctcagcctcccaagtagctaggattacaggcatgtaccaccacaccaggctaatttttgtattttagtagagacagggtttcgccttgttggccaggctggtcttgaacgtctggcctcaagtgatctgcctaccttggcctccctcagcccctttttgtttcctccagtgagaagatactcagttctatggtcttattctagagccccgtccttttaataacaataactgcacccctccaaaatctcagttttaagcatctcactctccaataaccccatggtgtctacaattttcctgtggtcctcaaccccagcaattctttgaccccactgagatttcaatccattgattctatggctttttcacaggttgtttccctgatgcctgtacttctctccttattcaacttaaattccatggctcatcattatgtcaccctccactgcattgtactcaaactgtcccgacaatccccagccctactggaatccagctctgcctcctccctgcaacacctgcacatcccgtttcctttgctgtttcctcctcatttccctggcccctcaatgtcacaggttttagtactcagagtctgcacctcttttcttctctgtgctcacttatttggtgatctcatccagtctcatagctttaaattatcttagtttgggttctcccagaagcagagcgtaaaacaatgcttcacgtgaaagtaatcagtaggaaattggggaaattgtgtatgaaagagaaagcagccaatgaaaagtttactattaagccagctacggtaagtgggcaattagagtttggtgccccagggagactctggggagtttggcaaaatatatacctcagaattatcccacctaaggggcaagagacctggagtatttatataacaacttgccagggttactga

SEQ ID NO: 36455 - DNA, 1025 bp, Homo sapiens
tattcatgaacttatgtggctatacacaagtacttactttaaaaaaaatgagggacaaggacagcacttctttatagtagaattacaagtaataaatgtagaaggaaagggaaaaagaaaagtcatcactaggcaaataccacaataaaaatcatttcagacaagagtcactgatgaagctaatattagtaggcacaaatctgagaaaaaatttatataatctcaaactatctttcccaatatattaactaaaaagggaaagatagtaattttatcatggaagaacctgacagaaaccatcttaaccaagtggtcagggtcaacatcaccaataagaaggcatgtacctcatgaaccctgtgacctgatgcagtgagaaggccccaacttcatctctgtgaaaatgtagaacctcagtgcaattaggagaaaacaccaaggggaccaaactgaggaacatttgacagcataactcatcagtattcctggaaaatgtaagcgttatgaaagacaagactgaggaaccattcagactgcaggagaccaaagagaattaactcaatgcactgtgagatcctgggttgatcttgaaactgaaaaaggatgtgaatggaaacactggtgagattagaataggatccagtttacttaataaatccatgctcatttttctgtttttgatcattgcactatgattatgtaatgtgttaccattgggagaagctgggtaagtggaggggatatggaaactgtctgtactatttttgtatcttttccgtaaatataacgttaattcaaatttttttaaaaaaagaaaaaaggtaaattgagtcatgtcactcctctgctcaaaacctccagtggctccctatgtcactcatcatgaaatcctcagtcctctcaatggcttacaagtctccatatgctctggacatacttctctgacagtatcttctcccatgcctcccctcactccttctggctttccttgctaattctcagcacagtgggcattttcctgcttt

SEQ ID NO: 36456 - DNA, 1049 bp, Homo sapiens
ctcccctctgagcgctggcggccgggcaggcgctctgtaacttgccgtacacacctttctcattgaatattcctgaccgcccttaagctggtcatattatcctccccatcttacacggggaaaactgagctacagaactgaaatgactggcccaaggtcactcgggtgattccagcatgttcctctgaggtcacctttatttagttcttaccagtggtgaaatgctttgtgttaaacgtgcagcagatagtgatgatagttgcatggccttggatatgctaagaactactgaagtgtatgctttaaagaagacaagaggactgagacctttttttttcttctatatgtcttatatgtgtgctctctgtttactctcttaatttttaaagagtttgtagtgttttatcttatctacacatgggggactgaagagttcgagagatccaagaggaagaatccagctgcctatgaaaatgacaaatgagcaacgcatccggatgacggttccctgtctctgaaagacctttctctggaagaggagtctgcattgtagtgtctcaaagacacaataaacttcctatggtctgcactgttgtgatattacatttttgtgagtagaatcctgtgtgaccactaatattcaagttcatgaagcgcccctcctcagcatgagtcttgaagttttgcctggtctcgggttttggtgaaagagcagggctccccctttgttccattatctacaagaaagtagctgcaggtactcctgcatctaaccatttgtgggtgacatgggctatggcgagtgctggttcttggccctctgctcccatagcaacaataaagtctactaactatattgtaattagtatgtgtcagggacgcttttattttttattttttgagatggagtcttgctctctcacccaggctggagtgcagtggtgtgatctcggctcactgccatctgtgcctcctgggttcaaacgattctcctgtctcagcctccgagtagctgggattacaggtgcaggacaccacacctggctaat

SEQ ID NO: 36457 - DNA, 1035 bp, Homo sapiens
cgtgaatgaatttgatttttcttatctcatattaatacagcagaggatatcacttagtgacattgaaccaatagttttttaaatttctcttgtcttaaattctttaattttgcttttgagtgtctacaccttgatatttctattgttcttttttttaatcccacctacaaaactctttttgatattcaaagtctgtcaaggattagtcttcccacttacctttgttatgtgacttgcagaactaaaaggatttggggaagaaagagtctctacttttataattatattggtatttaagaggaaattagttgtcctaatgtctgatttatacataatatttattctcagggtaagatgatcatgcaggataaactggagaaggagcggaatgatgctaagaacgcagtggaggaatatgtgtatgaaatgagagacaagcttagtggtgaatatgagaagtttgtgagtgaagatgtaagtctgccacaatatgcctaactactgtgtgtcttctgtgaacatctttaagtgggttagaagggaagtgtgcagctatatgtgtatagtagaattattaaaaatggagtttttctggggggggcaaaattttatatttttttatatatttctctattagtacagtgtttagtaaggtttggtctttgtgcatcacgttcacaaatcacttttgacacattcgaatattgttatttatcttgtatctttcttttcttttcttttttttttttttttgagacagagttttgctcttgttgctcaggctggagtgcagtggcgtgatctcggctcactgcagcctccgcctcccaggttcaagcagttctcctcccccagcctcccgaatagctgggattacaggcatgtgccaccaagcctggctaatttttgtatttttagtagagatgggatttctccatgttgatcaggctggtctctaactcctgacctcaggtgatccgcccgccttggcctcccgaagtgctgggattacaggtgtgagccactgcgcccagc

SEQ ID NO: 36458 - DNA, 1044 bp, Homo sapiens
gctattgtgagtagtgccgcaataaacatacgtgtgcatgtgtctttatagcagcatgatttatattcctttgggtatatacccagtaatgggatggctgggtcaaatggtatttctagttctagatccctgaggaatcgccatactgtcttccacaatggttgaactagtttacagtcccaccaacagtgtaaaagtgttcctatgcatcaattcttgaagagataatattgaaagagggatgattctcaagccctttcaatttttagataatttggagaggtatttaataagtatatatacctggttaatatatttaagtcatatggttcattttagttcacaataacaaggaaatggagttagtctgtgtctcaaaatagatggtatagtgtctgtaggtgtttacgtggcctccttagtggccttaatgttcaactttttaaattaccacgctggatttccaggttacaagaggacccacctgtgggtgtcagtggcgcaccatctgaaaacaacatcatgcagtggaatgcagttatatttgggtgagttgaaaggtttaacaaataataggtgtgtgctgaatctttaagaaaagtaaacatataacaactgtctaggaaaagaaactgaggtggaatgagagatcttaaggactaaaactgcaagataaattagaaaaaaaaaatatttcaattagagttttggcccagcacagtagtagctcaacgcctgggaggatcgctggagcccaggagttcaccagcctgggcgatatagtgagacagtgagactctgtcccctccccaccaaaaaaagttttggcccagtctgggcaacatagtgagcccttgtctctacaaaaagtataaaactagctgagcatggtggtgcatacctgtggtcccagctacttggaaggctgaggcaggaggatcacttgagcccagaagtttgaggctgcagtgtgccatgattgtgccactgccctccaacatgggcagccagcagagccaagatcctgtatcaaaaaaaaaaagg

SEQ ID NO: 36459 - DNA, 1041 bp, Homo sapiens
aattacaggcgtgagccaccccacctggctacagttatttttaatgaagattttctgagttaaagtttttttgtgtgtgtgagacggagtcttgctttgtcacccatgccagagcatagcggcatgatctgggctcactgcaacctccacctcctgggagggtcctttgccatgtggtagtcagaccctctcaaaatcctttaaccaactcccattctaagctataataaactatttgtagttcttcaaatatgcattttaaatcttggtagctagggcctagttgccttccaaaaatatgacagttaacactcccaccaatagcaacatgaatgtgcttgttccccaaccgcttgccaatgctgcgtgttaccattctaacataaatagagtatatttaggatgttttgtatgccgaaccaacgttgacatactaacttttatgtggttgtacaaaaaccagtatgcagttgagaactgatgaagagattaaaaagtcgtgcttgtctttactataattattttgttttctctctaggtacttttaaactagtaatagaattttctgaagaatatccaaataaaccaccaactgttaggtttttatccaaaatgtttcatccaaatggtaagtagcattttatagattttgcagatgatagtggggaaaagagttgtttccctccttttagctctttcaccttactttttactgttagggctcacttgtaggtgttgcttccatgtccatgtgagccacgtattttgttgtggatttttttttttttttttttttttttttttgagacggagtctcgctctgtcgcccaggctggagtgcagtggcgcgatctcggctcactgcaagctccgcctcccgggttcacgccattctcctgcctcagccttgtgagtagctgggactacaggcgtccaccaccacgcctggctaattttttatatttttagtagagacggggtttcaccatgttagccaggatggtctcgatctcctgaccttgtgatctgcccaccttggcc

SEQ ID NO: 36460 - DNA, 1447 bp, Homo sapiens
ttacatctattacatttatatttctgtattataaattaccatgtgaaagacttctccaaattcttgaagctcctcttcagtctcacagcctttgctcatttaaatgtggcgttccccatcagccaactcactttcaggaagaacattttcagaggtcctcttggtcgtgtctctagtactgcagaatacattatagagctccctacccagaggagagatgtgtttcgtttgtgtctggaatcaaggtgactttccagtaatagatactacctttggcacttcatttctgtgaagttgctttttccttctagctgccttttttgcttttttttttgtccaagacaggtttaattttattttctgtttctctttttggggaagttcccaggtcatttaccatttattccactgtagctttatcttgcttagacttgttattgagtcaaaccaaaccaattatgataagggggtctttaaataaaggtgggaaagactgtagaatgagtaagggatataaatatagggttatcacttaagcaaatttttaagaaaccacagtgtatttggttttcacatctcttcatatttatagcatggtttcccttttattctgctgagtacttttttataatttaactttctggtttatttttttaaaaacatttattgaaatataatttacacaccaagctgttgacccacttaaattgtacaactcaaatggtttttagcataatcataaccatcaccatgaccactttaaaaacaacaaaaagccccataactattatcttagcagtcaactctgtttgtcttaaccctccccgcttcagtcctaggtaagtgttacccctaacgtgttttccctctagatttgactattctggatatttcatataaatggaatcttatactatgtggtcctttgtgactgacttctgtcacccagcataaagttttcaaggctcatctatgttgtgatataatagtatctgtgattcattttttattgttgaataatattccactgtatggatattctgtattttgttcattagttgataagatatttgagttctgatttacttttggattctcagaaatagttactcagaactttaaaattgttttacacttttatgggttttacagagttactaatttttgctttgggcagctaagtttgatgtttctgtgggatggacagtaagttggctttgaagctgagagatagatctaggctaaggccaatgattgggaatactgagcacatggatggtaactgaggccacaggagtcaataggattgcccagtgtgtgtgtaaagggtaagaaggaaaagggcttaggatagagtctggaagaatcacagtgtttaagtgtgatttgctccccactctctgttatggtttgctccatgaaatggtatctgtaacatttaaatgaa

SEQ ID NO: 36461 - DNA, 1078 bp, Homo sapiens
cataatttggtgaatacaaaaagaaggaatctgagtcacagtcttaccacctgagatgttgaaaacagctggtttaaggggaattgggttctgtagtgagctggggcccaaaattcacagccagagtgataaggaatgtagccactttgtaggacaaaactccaggacagggcgtggtggctcacgcctataatccctgcactttgggaggatgaggctggtggattacctgaggtcaggagtttgagaccagcctggccaacacgatgaaaccccatctctactaaaaaaaacaaaaaattagctgggcgtggtggcacctgcctgtaattccagctactcaggaggctgaggcaggagaatcgcttgaaaccaggaggcagaggttgcagtgagccaagatcgcaccactgaactccagcctgggcaccaagagcaaaactcccatctcaaaaaaacaaaaacaaactccaggataagcctcctgccacatagcaagtgctggagcaaaggccatgcccacaatgaaaggcacatacccacaggctgcacaagctccagacctcctagatccagtgatacaggggtgacaaggcacctagtattgaggtgcggttgcatgggggcagggtgcagtggtgacatgagctctggccaaggtttgccacctggtaaccctttcccctggaggttttgctacttccccctacagaacaacctgacattttggttggtgctgcattgttcagtgcctgccaccactcatcagtcaacgacatttacctagtatctaatgggtgccagattgcatgttgggctgggcaccacaaactgaaaaggtccacttctgcagcacttttgcagggatggagcctggttgcgtggaatgattgtgggcacctgttttgtgtaaatcttagttgaaaagctttcctatcttccgtccttgggcttagagggaaactagggcaggaatgaagcagagagagcctactaagtgccaggtactcatagacattcatttttccactgaatcctccaataaagtttgaagtaagaatcatccccactttgcaaa

SEQ ID NO: 36462 - DNA, 1046 bp, Homo sapiens
catgcagaggactctgaccctactgcagtcattatgaaaaccttccaaaccaaaataagaagggtagccaacaccaccaccacctagccccaggagtcctaactttagaaaaggcagagtgagctgtgcgcagcatgcatctgtaatcccagccactccggaggctgagatgggaagatggcttgaggccagaaggtcaaggctgtagtgtactgtgactgtacctgtgaacagccactgtactctagcctgggcaacataccaagatcttgtctctaaatttaaaagaaagggaaaaaaaaaaaagaataggcagagtgaactttggggaagaaacaatcttgcctggcttgcttttcattacatatgtatatatatgtatgtatatacatacacatacacacacacacacgcagatacacatacccaatgacagtagagattttttttaagggtgcactctttgttgaatgaagtttccatatgaccaaaagtcttcaataagttctaaaactcttgcctctgaagatctgtgtttactcttaattcctacagaaaggaatccctaaactagttaagaacgatagccataactagatgttatagggcacacaggtctcagataccagaagctgacagtctccttccagacataaagggatacccagcagagattctttagagctggagagctgggaaacaccaaattatctgacatttagggtaacacaattctcattttttatatgggacagtatgtattttactacaaactacaaagactcagaggatggacagtgacagttaatatgattcctctcattgcccataggtaggccaccgatccaaatggatcctgagttcagacagaatccttacctcctgataaggttgagtgaggattattaggtgagccacagactaaggaatgtttcagaaagcagttttctaggtgtagtttggatttacaaaaaaaaaaaaaaaaaagttctccaggccaggcgtggtggctcacacctgtaatcccagcaatttgggaggccaag

SEQ ID NO: 36463 - DNA, 1050 bp, Homo sapiens
gaaatcttgggccagggtgtttgttcctgcaagccacaggcaggccagctggactgtgtggtcccgacacttcttgggggagggagcgagagcacactcagcactccctagtatgtcactggggttctggctggagtctaaatggaatgctccttactcttcatggaatatacattcccaaggagaacgacatgcaacaagtagctcaacaagcacagctgggatgggtattccgtggacactgggtggtgaatttcttcagatagtgtgatgagcatagactgacatgggccacactgaagcttaaacctgaaggttgaaaagtcagacatgcatagaccacatagaagaatattccaaacagagtggagtacagcgtgtgcacagggctcgaagtatggaatatttggcttgttcaaaggaatgaaaggagcccagcatggctagaaggtggtgaggaaggggatagtggtcagtatgaagctgtccaggtggcaggggccagattgtgtagggtcttgtggtcaggagcttaggctttgtcttttgatctatgaagcctttgaaagattttcttaggggcatgatatgatctgatttatgccttttaaaatttttattttgttctaattttttttagagatggggtcttgctgtgttgcccgggcttgccttgaactcctgggcccaagtgatcctcctgcctctacctcccaagtagctggaactacaggtgcatatcaccatgtccagcttctgatttatacctttttttttttgagacagagtcccactctgttgtccaggctggagggcaatggcacaatctcggctcactgcaacctctgtctcccaggttcaagcaattctcttgcctcagcctccagagtagctgagattacaggcttccgccactaagcctggctaatttttgtatttttagtagagacggggtttcaccacattagccaggctggtctcgaattcctgacctctcaagtgatccacccactttggtctcccaaagtgctgggaatataaggatgagcc

SEQ ID NO: 36464 - DNA, 1083 bp, Homo sapiens
tgggcagtcaaggagtcctttcgagggcaccttccttactgtatagggtcactgcctcttttttaggagcccctcctccaggactttccgacctggtccaaggctgccatggtattactatctggcacccatatggatctctagccactgtgctgagggctttacactgttcttatttattctcaccagctgattctggcccacagatgtgtttagtttggccctttcaaagtgttgtaaaaattctgactcagttgccaacattttaaattaaggacatttatgtaaaaagccagttccagtttatctcctctgggaggtatgtctttcccaaggtccctggtctatgaggagaggagctaggatttgaacccatcaacaacttctgcttttaatactgtgggagatgctggctcggaagtaccttctttgcaggaaatgaagagaaatggaattcgcttacaggattgcaaaagaaaatgggtgggtgcacttttagcacctcccccccactccacccaccgatgtcaggacaaagctgggttgcgctgggctgggctgagctgaggaagacgtaggctagaatcaggagtcaggattctgtcagtcagcctttgtcacactctctcttttttttttttttttttttttttttttgagataaggtcttactctgtcgccaaggctggcgtgcagtggcacgatcatggctcactgcagccttgacctccctgactcaagctatcctctcacctcagcctcctgcatagctaggacctcaggcatgtgccactacaactggctaatttttaaattttttgtagagatgagtccccctacgttccccaggctggtctcgatctcttgggctcaagaaatcctccagccccggcctcccaaagtgctgggattacaggtgtcgcacccttgacacgcagactctggaaggcagtgagggtggcagctgtgggttgctgagctgtttgtactctgctgcgcagagacggagaagtcagaaggtcaagagcacggtctcctgaatcaaatacagtcactgacatcttgggcaggtcacttaacctc

SEQ ID NO: 36465 - DNA, 1079 bp, Homo sapiens
tattataggacagacatggtggctcacacctataatcccagcactttgggaagccgatgcaggaggattgcttgaagccaacagttcgagaccagcctgggcaatgtagcgagacccaagtctctgcaaaaaatttcaggaattgtggtgtgtgcttatagtcccaggtacttgggaggctgaggtggaaggatcgcttgagcccaggagttcaaggctgcagtgagctgtgattgcattgcatcactgcactccagcctgagtgacagagcaacaccttctctctaaaaaaaaaaaaataataatacaaattttaatatacagtatagcaactatttacatagcatttatgttgtattaggtattattttaaaaatctagagatgatttaaagtatacaaaaggatgtgcataggttatatgcaaataatacactattgtatgtaagggaattgagcatccttagattttggtattcgaggtgggagatcctggaactaatctcttgcagataccaagggaagattgtatactacatacccagttctgactgtggctatttgatgctttttactgaattgagaacaaatctttggatttggaagtttaaaatacagtcttggccaggtgcagtggctcacacctgtaatcccagcactttgggaggcagcgaaggcgggcggatcacatgagatcaggagttcaagaccagcctggccaaaatggtgaaaccctgtctctactaaaaaaatacaaaaattagccgggcgtggtggcgcgtgcctgtaatcccagctactcaggaggctgaggcaggagaatctcttgaacccaggaggcagaggttgcagtgagctgagatcacaccactgctctccagcatgggggacacagcgagactccatctcaaagtaaaaaaaaaaatacagtcttatgtttttatgagatttggctgtaatttgttgtttaaataaccagctgaagctaacttgtaactttcagagctataatttccctaaattgtgaaatccaacaaacatattgaaaaatcaataaaacacaaaatattcagattacca

SEQ ID NO: 36466 - DNA, 1024 bp, Homo sapiens
tttttagtggagatgggtttcatcatgttggccaggttggtttcgaacacctgacctcaagtgatccacccacctcagcctcccaaagtgctgggattaaaggtgtgagccaccgcacctggcctcccgatctcttttctttgtttttaaatagagaagggggtctcactatgttgcccaggtcagtcttgagctccttgccacaagtgatcctcctgcctggacctcccacatgccagcccagacattttttataattctgttcaagttcagttatacggcttcctcagtttcaaggaggaatgaaatattacttggaaataatttgcttgatgcttatatcattgaatataacactataattctaatttagctcctcaaaccctttctggaaccgtcttgattgatcagggctgtgcctcatcaaattctgcacatttgttactatttgacagttatttccattattttcagttgtgtgtaaaattgttttaaggaagtctagggctcagagatctatgtctgtgcagatatgcagaagaacttcctctaatactttaaaattattaactagtggatgtccctgggatttaactttcatccaatcaagggtgaaagttcagtctgtatattctttgagctccttatgttgttgaatccaaaccgaagtttcttttgttttcacttctttttcagtattaatataaatatagtattttattatcttctaagtggtatttcacccacttccttattttgagggtgattgtgtggcaggcttagttgcagggggcccacccagtaagctgcttcaaaaccctcctcagcctcaggtgtgaactggccatgctccctgttagcaagggttgatggattcaattccttcattcatctaatcattcacttagtaagtcattactgaatgccaaggctgcattatgactttcaagggccctaagctcttttgcctttgtggctccttcctgcctgaaaacatacttaaaattatattttatgactgtat

SEQ ID NO: 36467 - DNA, 1034 bp, Homo sapiens
aacagcgcatcaaccggatcatgggctttcacaggcccgggagcggcgcgggtaagagcctcgatttcccctcagtctcccgcccatcaccttgaatcttcagggtcattcttccctctcccacctccactcctctgacctttttgaccaagccttgctctttgatttcctctctgtcccgccccttcggtgatatcccaagttctcatccctgaaccccaggatgttcctagtcgctcccctcaattttcccggggcctcgccgtgagattttccccaccctgcctgcagagctctcactccctcttcccagttacgttgaacagccccttttttccttagccactcctcgcctttcttgaagggcgcacgttgtatccccagactgtcatgtctactgctccccttaggaagatggctttccttcttaaggttccaagtgcttttccttacagtgccttctctagcgtctaccttcttttgccttttgctgtgtaactcctgtccgcccacatcagcctgtctttactgaactgcccgctagttcatcctacgtgtatcagggactcttgtgctcatatcctagtgtttgtgttcagtgccgtcaacactgtcacctacgggccggctagaaaaggtgggaaaagtgagagtgagcattcttcagagacccagcaagtgcgaagtgcacacctgagagtttcctctcctcatgaggggatattgttgtgattgatgtctggagctgcatttctaaggagagcgcctccttcctcccccaaacacatgtccaatgattttctttaaaaaaaatttatttcacgtgagtataattgagcaattagcgcgccctagtgttatctaagtttccagtgtttcctttagtaattggcctttagtcactggtcgcaagctccttatatctttgtgacttttgttctgtaaggctttaggtgtatagctctgaacttttaggcagttcaaatgagaggtaagaaaaccatttcaaattcttctagaacaatagaagaaac

SEQ ID NO: 36468 - DNA, 1049 bp, Homo sapiens
ctgctggggaggctgaggcaggagaatcacttgaacccagaaggcagaggttgcagtgagctgcaattgtgccactgcactccagcctgggtgacaggtgtgagactttgtctttaaaaaaatgaaagaaataaattagtattctcatttttttcgttgagcacttataagacttggctttacttcattgagacctccacctttaataatggtagtgattaagattctttcaatgtgggacagaatcccctgatctgaaatagtagctccatttggtcatagaataaatgaaaagtgtccccctttcagacgttccagaagtagagagagagacagaagccgagagcgaagaagatctcgaagtagagacaggagacgctcaaggagtagaagccggggccggcgatcccgatcctccagtcctggaaataaaagcaagaaaactgagaataggtaatgttatcattgggctgcatctatagtgcagactggggactgcttcccttctctgcgccttttttttttttccctgtaagtttgtatttatagagaattaactgcatttggctcctaccatgaactgttggcagtgttttattttaattggctataatgtttataattcaactggaaaataatagattctgtcagttttaacattcaatacattgtattcttacttaatacataactgtcaatcagaaatgtattttatagacatctttgtagaaactctgtcattttcttttcaggcagggtctcactctgttgcccaggctggagtgaagtggcaagaacatagctcactaaccttaaacttgtagactcaagcaatcctctcacctaggcctccaaaagtcctgggattatatgaagaggcagacataatatcccagctaatttttatgtttttagtggagatggggttttggcatgtttgccaggctggtctcgaactcctgacctcaagtgatctgcccacctcggcttcccaaagtgctgggattacaggcctgagccaccgcgcccagccaagacttgtcttaaaa

SEQ ID NO: 36469 - DNA, 1920 bp, Homo sapiens
gcctcagcttcccacagtgctgggattacaggtgtaagccaccatgcctggccataaacttgtatttttttaataacacagagtctccctttgttgctgaggctgatctcaacctcctgtgctcaagggatcctctagcctcagcttcccaggtagctgggaccacagacatgtaccatgtgcctggccataaaatttctttatcatgttgatgtcgtttattttctaacttgtaatagaaaattgcttttcatagaggcaattttggaggcgtttaggggattaaaattgagaataactgggaaactttgcttgctaattactttagtttctgttgttaggaagaaataaagtttatgtgtgcataatgcttgtaagtaaaatgagattgatttatagtgtttgaaatctatcttttggctttcttatttgaagatgctttttttgtgatttcattttggtaatatatttgtgtgtatatttataaaggtatgtgatctaagtctaccctgaggggtttgtatatatgccttttttccccttctttatactttgaagaacttactggaatgtcacttggagcaaaattattaaatttggttttgctttttattttcccccatctctttctttcttttattcccccaagaactttgaccagaataagctggaagaagaaatgagaaagcgaaaagaaagagtagaaaaatggcgagaagagcaacgtaaaaaggctatggaaaacataggagaactgaaaaaggaaatcgaagagatgaaacaagggaaaaagtggagtttagaggacgatgatggtatattttttagcctaatagcctgtataacacctcatgtagaatattatatgaataatatttcataaggggtttttaatcttttttattgttgaaaactatgcataatatgctgtttaccattttcatcattttcaggtttcaattcagtgataaatacatttgcagtgttgtgcagtcgttaccactgtctgtttccatgactttttcgtcattccatacagaaactctgcaccttttaaataactctatgacgccttttctcgctacttcttgtgacctttgctctattttctgtctctgaatttgtttagtctagctacctcacataagtggaatcataatacatatttgtctttttgtgtctggcttatttcacttagcataatgtcttcaaggtgcatgtatgttgtagcatgttggaatttcctttctttatatggctgaataatatttcactgtatatatatgccaagttttgtttgttcattcacctgccattggataatttggttgtttccacccttttgttatcgtgagtaatgctcctgtgaccattggtgtataaatatctgtttgagtctctgtattgagttctgtgaactatatacccagaagtggaattgagattgtaaaagctccttttaatatttatgttgtaatttgaaatatagaattgtgtttagtaagcatcactgattttactttagaatgaatcattgagtgttattgggcatagccagtaaatagttctttaatatattataccaatgtgaacgttagtaaggagagtaaattaagggcatgctttcaagtgcctcctctgatttttcttttctttttcatgtttttggagatagagtttcattctcttgcctaggctggagtgcagtggcacagtcatagttcactgcagcctcgacgtcctgggctcaagtgatttttctgcctcagcttccagagtagccaccatgcctggctaattttgtctttttcttttttcttttttgacagagtcttgctctgtcacccaggcggcactgcagtctccgcctcccaggttcaagctattctcttgcgcctcagcttttcaagtagtcaggat

SEQ ID NO: 36470 - DNA, 1435 bp, Homo sapiens
attatgacaatgaagttgtctttatgtacattttctttatcaatttggcactttggggctgatttccccttaccagcaggtggagtgagaatcttcagagctctggagtgacatctcagaagtacaaaaacagcctctcctggcacagctcagtttttaaactctgacttggcaggtagactcctcgtgcatctatctgtttatttatattgaggtttgttagcccagtatcagtggatatataaaagcgacatggaagatatcctagggaaacatattttcctaggtagtttttggccttaacaggctataatgccagcatttcattcaagattacttgtttagattctggtttcttgattcatcttggcagagataactcttggaaagttgagtagggttttggaaagttgttcagcttctctcttaggaacacggggcatagtatatctctcctctgtctgtgcccctcagaccaaggttgtttctggaagcagcagtatggcttctgtggcacagtgagtcacttgattttctttgttctgtgatttgcattagaaaactgtttgcattcttttgaaccaagtattttcctgagggttggatgaggcatttaactgtcatttatcttcttttagcatgtttttaaaaatctgcttatatttatccttccccacaacctctgctgttatacaacttttgaaatagttttcagggatgcataacaaaacaaaaattaggtgaaacaatctgaactttattgtaaaggttaaattgaacactataaagcacagccttaagaattttggtggttaggctactgatgtatttatctttccagctgtcatcatgactccaactcgagaactggctttacagattactaaagagtgtaagaagttttccaagactttgggacttagagtggtctgtgtttacggaggaacaggaatcagtgagcaggtagttatataagaaacattcatgttttccattcttttctcaagttggatgattcaataaagtaaaagtgacttttacttttagttttttgaatagtgattgcttctaaaatcatttaaaaaatgaagtataaaaataatagtaagaattagttattttatgtaggatgaatacctttggagatgtaatgtacagcatggtgactagttaatgttatattgtgtgctgaaaattcgctaagccagtagatctcacatcatgttttttttttttcttttttgagatggagtctcgctctgtcacacaggctggagtacagtggcgcgatctcggctcactgcaacctctgcctccctggttcaagcgattctcctacctcagcctcccaagttgctgggactacaggtgcctgccaccacgcctggctaatttttgtatttttagtagagacggggtttcaccatattggcca

SEQ ID NO: 36471 - DNA, 1031 bp, Homo sapiens
accacatccagctaactgtatttttagtagagacagggtttcatcatgttggtcaggctggtctcgaattcctgatatcaggtgatccacccacctcggcctcccaaagtgctgaggttacaggcgtgagccaccgtgtttggccctgataatttcttttaccctgttgtcaacattatcgttttttttttttttgtcatcgcctatcaaattctgttaagcccatctagtgaatttttgaattcagtttttgtatttttttagttctaaaattacaaatatgttctcttttagattttcttgtttgtctgattagattttctagacgttccttgtaagcatttttaaaaagtcttgatcataattattatatgtgctttgaaatctttgttaattttaacatctgggtcatactggtgtcagtctctattgactgtcttttttcttgatttttgttttatggttttgtctttgtatgtctagtaatttctgtttgcatactggactttgtgaatgatccattgtagagattctaaattctcaattctctgatgtccccgtcaagtggtgttttgtttttgtttttgtgtggtttccaaatagggcattaacttggcagaacccagcatccaaactctgtctgcctttaatgggcagcatctgaaatctcttactttttaattttattattattttttatacggagtcttgctctgtctcccaggctgtgtgcagtggcgtgatctcagctcactggacctccatctcccaggttcaggcgattttcctgcctcagtctcccaagtagctgggatgacaggtgcgtgccaccacgcccagctaatttttgtgtttttagtagagacggggtttcaccatgttggccaggctggtctggaactcctgacctcaggtgatccacccaccttggcctcccaaagtactgggattacaggtctgagccaccgagcctagccctgaaatctctgaatttttttttttcatcccaactgcttagatttttgcctcat

SEQ ID NO: 36472 - DNA, 1045 bp, Homo sapiens
tgccttgatggggaaacaacctgcatttgtttcctttcttgattcaaaggaataagggaataagccttttctggttcagttacccagtttttaaggcaaatccaattggattttatgggttgggaagagttttgagagctttaccttaggaacatgttatatcactccccctgagaattattgactatatttttagtaggccactgaccttgagttatagtccttcttccagcctgtttcattgcagtataatttggtctcaaggcctgagccctggggtaagtcagctgcatcctattggctattctgtcttgaaagcacatgtttcctcatttattgaacagggatgaagtttctggtcctctcaggagtctgatgacgtggttcatgcaatgttgtttctctgttttctatttttctccctaccatagacaactgattttttaaatgaaatgtgacttttaacaaataggtggtatattttcccatggatctgtgtagtaggatttgtgtaaatataactatctgattccagccttttggtggaaacattccttatttatttctgtagaataacttaatttggtatttctaattcagttttttactagtcctttttttccttttgatctagattgatgagcaaattgaaagcatgtttaattcaaagaagagagtaaaggatatggctgctcctggaacatcaagtgttcctgctccaactgcaggaaatgctgagaaattagaaattgctaagagattggctcttagaatcaatgcccagaagaatttgggcatcgagtctcaggtattaagtaatttgttccaagtctcagtcaatacttttaagaagttctttgattttacttttcaggaattatgttgaacacaagtaaacaagttgtcctagacattgagtttgtgagaatttaacattctcaatacagaattttttgataattgcatttggatgatttctcagtgctattgactgaggactttgggcctattctggaatttctaactgttagccactggtagtttt

SEQ ID NO: 36473 - DNA, 1928 bp, Homo sapiens
gaatagttgagtgaacagagaattcattagttattgaatagtttttcctttctcaatgcagtaatagtaacatttaaaattttaaataaccaatagttttataagttggcaaaggaaatgatcttaaatatttccttttgggtttgtttggttggttggttggttcgttttttttttttgttttttttgttttgctttctctgatgacatatcttttatttcctattacagcaaaattcataccaaccaacaaataaaggaagatacaaagtcttatagacatccggaaaaaagatttttacctgtgctggtctatgatgtatgtggcagttgctgtctgcagtttacaatgtattgtaaatgaagattttttaaattctatcttgctgattttttttaaatataagaaactggtacttggtaaagaaatctgtccgtaagtacccccacaatcagtcaaactatatttaaagccagcctgttttcagagtatgatgtcctttaatgtaaactcaaatatcaatattttaaatgtccggataatattctagaggtttaaaaaatggaaatatttgaactttctattgaagacaataaagtacacaagtcgttaaggggctattcactttatcctgtactttcaatgaaattgtgatcatttcctaagaaaaggtaaaattcactatcatattttgtgtccccaccttgatgttacatgactctggaacaatatgaactggatttaagaatgttataatagaagtcttacaaaatgggttgagagtttttgtttcaatttttatcatcataaatgggcaaaaagtagttggactaatttcggtttttatacaagtaaagatttaatagtataaggatttttttgcatttctttacactgagtgtaaaactctacaaagagttatagtatttactactttgaggtttccctcacaacttctggctccatacctagcccctcttttataatcttccttaaaagaaagagtgtagcctataaatactaaatatgataccttttccttctagaaagtgtttatttatatatctatacatgttgtatgtacaaatatcctactacttttaatctgatttttcttcaggattattgagtaggttgtgaattttctttcttaaaaattgtaaaacataatggtacccaagttttaaacttagatgtgcttcatcttagtgaaatttaattcacaaggaatcataaattgtgtttttgaggctgggcgcagtgactcacacctgtatcccagcaatttgggaggccgaggtgggcagatcacttgaggtcaggagttcaagactagcctggtcaacatggtgaaaccctgtctctactaaaaatacaaaaattagtcggcatggtggtgggtggctgtaatcccagctactcaggaggctgaggcagaagaatctgagccaagataacaccattgcactccagcctgggcgacagagtgagactatctcaaaaataaataaataaataaataaatagtatttttgagccttcaagatacagttcctgaatattctaatttaaattgttataattggattacctaatattcttttcaagactcctgatgtattaacttcatgttattgtcacttttcaaaaaaggaatttttttcaggagttaaataaagtcagtcttttatatccaagggtttcaaacccacagattaaaccaaccacagatcaaaaatagaaaaaaaaaaaaaaagaaaaaaagaatgtaaaattttaaaaatacagtttaacagctgtaaaagttttactataacatttacattgtgttaggtattttaagtaatttaaaggttacagtatacaggcggttaaagtatacaggaggatgtgcatcggttatatgcatatagcaagccatttcata

SEQ ID NO: 36474 - DNA, 1024 bp, Homo sapiens
ggtcagcaggagttccagcatctcagaattgtggtgaaaaccaatacaagtaaggaagttattaattccccatttggtgggttcctcaaccccagccactggggacggtccacgccggatcaccagcagctcaggcttaaggccacgacgcgcaagcgcagcctgccagcctggctccctcccaaagcttgcgtgcaggttggcggcgggagatcgggtctcgcgatgcgagtgagcgtgtgcgtgcgcggccctcgcgagctcgcgcacgccgcctctaacactacagggtggtagcggcctcttcgtactgcgtccggggcaggaccgtgcgcggcggccgcggcgggtgctgggagccagcgcctgcctcgccgccgccctcgctgcctgccactccgtcttggcccgttctccgcaccgtgcagaggcggcgggctggggagggagcggcgccagcacgaggttcccagccgctgggaagcccctagacgcgccgaggggccgggctacgagcggctgaggtaggtaggggtgcgcgggctggtcagccggccgggagcggggtagggcggcggcgagaacgggcgcctcgctgaccggggagaagaggcctcctgccaaggggccctagtgtagccggagtgagaggaggggccccggacgtagcctgctcttccccggtgtggagccattacggggggacattcctcctgcggcggggggagggagccccctttcttttctttgagaggtcagaatccgcagtccgcccttcgcctttaaataaaagcctgccggctcgagatcggcgtcgcgatggagtgcccgtggacttctacgcttgcggaactccgagtggacggatagcggcttatgaattttgctttttagagggtacacaaccctttctctagggtggcgtgcatcttctgcaaacttgttattgccaatacgctaatagtcgctttcagcacacaacaggtaatacattctaaacgcctcgtgtcaaaataaggagagt

SEQ ID NO: 36475 - DNA, 1098 bp, Homo sapiens
ttaaatcagataatgtgcaaagaaccaagcttattgcctggcacataacaaaatcctaaaaaattgctaactttcagccaatactatgtttggaactcatcttgagagtctccttttttctcatctgaaattagaatttgagctagtgaaatgataattaataatctagtcctttttgttttgagacggagtcttgcttgtcactcaggctggagtgcagtggcacgatctcagctcactgcaacctctgcctcccgggttcaaccaattctcctgcctcagcctcctgagtagctgggactacaggcacgtgccatcacgcccagctaattttttgtatttttagtagagacggtgtttcactgtgttagccaggatggtctcaatctcctgactttgtgatccgcctgcctcggcctcccaaagtgctgggatcacaggcgtgagccaccgcgcctggccaataatctagttcttgtatctgtggggaatgagtgaaaaaattattccacttaatatttgtgtttagcccagtcttgttttatgttctcaagtctaaaaagcttttgccataaacaagtagcttctcactgtagatatttttccatcaaattgagactttaagccagcttgccaattgctctgttgattctcagcaaatgtttcataatttaacagaatttgattctgtgacttcatgctcatttccttttgcctttacaaactaaagtaagtttacagtggttttcgctaaccttattacctgtttgcagcctctaggagtaactgttttcataactgaggttttggtgcactctcacatgtatgaagggtgcacacaaatatctcctaacaacttgaggctggaccttaatatacatttgtgactctttataaatccgaattggaacccatatctttatctcttttacctcatcacaacataatactgtagtctctataaaactgtcatttccagccaggcacggtggctcacgcctataatcccagcactttgggaggccaaggaaggcggatcacctgaggttgggagttcaagaccagcctgaccaacatggagaaacctcatttctatta

SEQ ID NO: 36476 - DNA, 1025 bp, Homo sapiens
ataacgatggagtgtccatcttgtggaaactgttgtcaggccagaagtatgcatgtgagaaatacaataaaaggccaacaggaggcattctaagaacatcaggcaaactgaaaaaaagaattgtgttaataagagttcttggctttactattattcttttgaggtttagtaatctagaagagaaaagcccacagaatagaacatttgtttttgacttacacacttttctggttcctaattggagagcattatagctatgaaatcagtattataatagagttatcttgtatgatgtttgtcccatgattaaattgagaagaagtgtccttgaatctgctgatgtgtgtttgtttataagtggtctggagtcctgcctgttagcctaattttatgtagcctgcatagttgttggaagacagactgttttctcactgaatgctgcatacaggtatgtatttgtgtgtgtgtatttatatatatttgtcttttatttttggtagaaaatgatgcatcctgttgccagcagtaatccagctttctgtgggcctggcaagccttcctgcctcaatgaagatgccatgagagctgctgatcagtttgacatatattcctcccagcaaagcaaatacagccacacagtcaaccacaaaccaatggtttgtcagaggcaagacccattaaatgaaacacacttgcagactacaagtggcagaagcatagaaataaaagatgaactaaagaaaaagaagaatctcaaccgatctggtaagcgtggccggccttcgggaaccaccaaatcagcaggataccggaccagcacaggcagacccctgggaaccaccaaagcagctggatttaagacaagtccaggcagacctttggggacaactaaagctgcgggatacaaagtcagcccaggcagacctccaggtagcattaaagctctatcccgtcttgccgatcttggttatggctgtggcactgctgcttttccttaccctatgatgcatggcagagcagttcat

SEQ ID NO: 36477 - DNA, 1050 bp, Homo sapiens
ctttctggtagttctttctctggcactgggtagtttactcacatgcatgtgatgacccgtaccctgctgtatacttgggggggcctctgcagatctctggagtcccctctctagatagctcctctcatctgcagtattctgtcttgcaaactatggcttcttggtctccttggactcttagctccatctcctcaactgggagagtctgctgggctctgcctggatttcccctccctgagccacagtgggaacgccatcaaggcagtaagttggagcagttgtagggttctcttcatttgtcgcctgtttctcggatgtcactatcctctgttgcctcataactgatttcctgaaactgttgttttatatatattatctatttggttgtttcagtaggtaaggtaaatctggttcttgttactccatcttggccagaagcagaattcccagataatgtttttgaatctctgaatgaatccacagagctctatgccctagtgtgaggtagatcagtagggtaactgtagttcataatagcctattgtatattttaaaatagctagaagagaagaatttgaatgattctagcatgaagaaaagacaaatatttaaggtgatggatatcccaaatacattgatctgatctttacaaattgcatgaatatattgattatcacatgtgctttgtgattatcacatgtacatctgttatgcatcagcaacaacaaaaagctctacagggatattctttgaaatcttatacaaatgtgcatacctgaggaagcccccagaccttcccaactttgaagtcagttggtcactgacactccagtgacatgctgttggcacgcagaactcatcacccagcgggtggtttcttaaccacatggtgagctttcgtgagggctgctggcctcactggtttctgctggttggtgcctggcacaaagtctggcagctggtgttgagttgatgagttggagggcaggaggcattgctatggaggtgagtggagttgggtaaatagatgtacgagactacctgggactc

SEQ ID NO: 36478 - DNA, 1035 bp, Homo sapiens
tctagctccaaagtgggggaaagttctcttcttcctcctgctgctgcctctgcactgccgagcccatctcccagcactcccaagggcagcagcccaagggtggcaggcaggagagcagagtccagctgtcagaggccacctcaggaaggagctgctgtgtggcttgaacagtgttcttcaggcagtgtggctcagcatccccgaggtatcatggcagggagcctacggctcgttctggagtagcagccagaaaactttgctcgcagacttggctttgctgcttactatctgtgtaccatcggacactgtgctgagcctctctgtgccttgcctcgttacctgttcagtggtcttggtaacccttgtcttgcccatctcacaggactgttataatgtgtgcaaagatgctttgttctagtagaatcttgcataaaaccatgatccttttcttggatattatcaaacaaatgaaactcttatcaaaaaatgaaagtgtttatattctattttcctaatgagatatctgaactggaatgtttttggttataatccacatggcaagcagcaagtttagggcagagctgtgtgtttgtctattatttgacattcattattttgtttgcttgtttgtttgtttgttttttgagacggagtcttgctctgtcgcccagactggagtgcagtggcgcagtcttggctcactgcaacctccgcctcctaggttccagcaatcctcttgcctcagcctccctagtagctgggattacaggtgcctgccaccatgcccggctaatttttatatttttaatagagacagggtttcaccatgttggccaggctagtcttgaactcctgacctcaagtgatccacctgacttggggcctcccaaggtgctagaattacaggtgtgaaccaccatgcccggccttctttgacattcattaatttattaatagtacctgcttgtgaccttcttcctaacctgggaaatggtgagtagctctctgatagtttaatgaaaggagacctttttg

SEQ ID NO: 36479 - DNA, 1050 bp, Homo sapiens
tgttgtgagtcgtgaaccaccatgcctggcccacagtttcgtttcgtttttttcttttcttttcttttcttttctcttttctcttctcttcttttctcttctcttttcttttctttcttttttttttgagatggagtctcactctgtcacccaggcgggagtgcagtggcgtgatctcagctcactgcaacctccatctaccaggttcaagctattctcccactgcagcctctcgccgaataactgggattacaggcgtgcttcacatgcccagctaatttttgtatttttagtagagacagggtttcaccatgttggtcaggctggtcttgaactcctgacctcaagtgatctgcccaccttggccttccaaagtgctgggattacaggcatgagccaccacacctggcctgtggcccacagtttcttaattcctttcacgaaagaattctctgtagcatgcaatgctgtttgatagcattttacccacagtagaacttctttcaaagttggagtcaatcctctcaaaccctgctgctgcattatcaactaagtttatggaatattctaaatcctttgtcgtcatttcaacagtgttcacagcatcttcaccaggcgtagatgccatctcaaaaacctactttctttgcttatccataaaaatcaactcctcatctcttcaagttttatcatgagattgtagcaattcagtcctatcttcagactccacttctaatcctagttttcttgctatttctaccacatccgcagttccattctccattgaggtcttgaattcctcaaagtcatccacgagggttggagtcagcttattctaaacgcctattaatgttgatattttgaccacctgccatgaatcacagatatttttaaagtcatctagaatggtaaatcctttccagaaggttttaaatttattttgcccaaatccatcagaggaattgctatctatggcaactatagccttatgaaatgtatttcttaaataataagagttaaaagttgaaatccctccttgattcatgggct

SEQ ID NO: 36480 - DNA, 1047 bp, Homo sapiens
agaactcttggttgaccaggtgcattgtcaacgagtataatattttgaaaggaatctttttttctgagcagtaggtctcaacagtgggcctaaaatactcaggaaaccatgctgtaaacagatgtactgtcatccaggctttgttgttccttttctagagcacaggcaaaataaatttagcataatttttaaaggccccaggatcttcagaatgggcaatgagcaatgagcattggccctgtggttgctcatacctgtaatcccagtactttcagaggccaaggtgggtggattgcttaaacctaggagttccagaccagcctggggaacatggtgaaaccttatctctacaaaaaatacaaaaacttgccaggcatggtggtgggcaccagctacttgggaggctgaggcaggaggattgcttgagcccagaggctgaggctgccatgagccatgattgcgccactgtactccagcctgggtgacagagcaagaccttgtcaaataaataaataaataaataataagatttattgttaaataaataaataagaccgcagctacactggcctctaaaaagagtccgcctgtcctttgaagccaggcattgacatctcttgtctagctatgaaagtcctagaagccaccttattccaatagaaggctgtcttatctacatgaaaattgatttttgagtatagccaccttcatcaattctcttagctagatgttctgggtaagttgttgcagcttctttttttttttccccattgatctttgatgttactatgttgtagcttctctatcagcacttgctgcctcaccttgcacttttatgttctggagacagcttctttcttaaacctcatgagccaaccccagctaatttcagacttttcctctgcagtttcctcacctctctcagccttcgtagaattgaagagagttagggccttgctctggatttaggctttggcttaaatgttgtgactggtttgatcgtctatctatagcattaagattttctccatatgagcaataatgctg

SEQ ID NO: 36481 - DNA, 1004 bp, Homo sapiens
tcccttgtgccagcttaccaaaccaattgcctactgtaagttgatcttttttgagggacagggatgggcattctgaagagttggaaattttttctgtcaaataagttgacacagtgtgctttgtccatgaattagagttttctggtctggtttgtttagacaggaacttaactagtggaataattgtgccattggtagatccatattataattgaaagcaactcagattgcagaaaaggagtgccccccagccatgacccataagcaaagaggtcagaaacaaatgaaaaagccaaaagtttcaagtatcagaaatctccgtaggtcacacgcaacttcctcatttatttctgtctattctgagatggtaattgtatgagaaagccctctattaataataaattcaggttttttgacttctttctcttgtagcctttctaccaggtttggcaccgtagctgttcctaatattttattatttcaaggagctaaaccaatggccagatttaatcatacagatcgaacactggaaacactgaaaatcttcatttttaatcagacaggtatgtggaagtaatgtgctgaggaagaagatattctattgctgggggtctgtgccttctgtgggttctgatctgctataatccttaagtgaaggattcaagactgactttgagttgtaaaacttctcttctaatgaactgttatgatcctgttaaatacttcccaatcagtatgaagtttaacatgaataggtaattttaattattatagatactttttttttcccttttttttttttttttgagtcttgctctgtcgcccaggctggggtgcagtggtgcgatcttggctcactgcaacctccacctcccgggttcacgccattctcctgcctcagcctcccgagtagctgggactacaggcgcccgccaccatacccggctaattttttgtatttttaatagagacggggtttcaccgtgttagccaggatggtctcg

SEQ ID NO: 36482 - DNA, 1090 bp, Homo sapiens
ggttaattttgcgtattggggtcattagtgttcttgtagttgaaatacaatgatggtttttcatatcattggtcgtggttgtagcccgtgcaagaataatgatgtatgctttatttctgttgagtgtgggtttagtaatggggtttgtggggttttcttctaagccttctcctatttatgggggtttagtattgattgttagtggtgtgattgggtgtgttattattctgaattacgggggaggttacatgggtttaatggtttttttaatttatttggggggaatgatggttgtttttggatatactacagcggtggctattgaggagtatcctgaggcatgggggtcaggggttgaggtcttggtaagtgttttagtggggttggtgatggaagtaggattagtgttatgggtgaaagagtatgatggggtggtggttgtggtaaattttaatagtgtgggaagttgaataatttatgaaggagaagggtcagggctgattcgggaggatcctattggtgcgggggctttgtatgattatgggcgttgattagtagtagttactggttgaacattgtttgttggtgtgtatattgtactagagattgctcgggggaatagattatgtgattaggagtagggttaggatgagtgggaagaagaaagagaggaaataaagtttgattatgcctttttgggttgaggtgatgatggaggcggagatttggtgttgtgagattgttttaggtagtagcttttctagtcaggccaggtctaggaggagtaggggtaggttttggcttgtaagaaggcctagataagggactgtgcggtgtatgatactagggtaaaatccgagtatattagagaagtaaaatgtatacagtggggattttattttgagtttgttggttaggtagttgagatctagggctgttagaagtcctagggaagtgacgcctagggctgtgagttttaagtaaagtgggattgtcatttggggggtggatgtggggagaatgctgttggtgatgagaaaccctgcaaataggcttccgattgttaggcgtttaatggggtttagtaggg

SEQ ID NO: 36483 - DNA, 1044 bp, Homo sapiens
tgaagaaggcgtgggtacagatgtgcaggaatgctaggtgtggttggttgatgccgattgtgactattataagtcctagttggcttgaagtggagaaggccacgatttttttgatgtcattttgtgtaagggcgcagactgctgcgaacagagtggtgatagcgcctaggcatagtgtgagagtttggattagtgggttattctctgctagggggtggaagcggatgagtaggaagactcctgctacaactatagtgcttgagtggagtagggctgagacaggggtggggccttctatggctgaggggagtcaggggtgaaggcctaattgagctgatttgcctgctgctgctaggaggaagcctagtagtggggtgaggcttggattagcacttaggagggttatttgttgtgggtctcatgagttggagtgtaggagaaatcatgctagggcaaggatgaaaccgatgtcgccgatacggttgtataggattgcttgaatagctgctgtgttggcatctgctcgggcgtatcatcaactaatgagtaaaaaggatataattcctacgccttctcagccgatgaatagctggaataggttgttagcagtgactaggattagtatggtgattaggaagatgagtaggtatttgaagaattgattaatgtttgggtctgagcttatatatcatagtgagaattctatgatggatcacgtaacgaacagtgctacagggataaatattatggagaaataatctagtttgaagcttagggagagttgggttgtttgggttgttgcccagtgtcagtttgagataatgacttcttggtctaggtatatgaatattgttgtggggaagagactaataacaagggtggatgcgataatggattttacttaatggggatatgagttttttttattagggttaatgagggtggtaaggatagggggaattaaggaagttagggctagggtgggtatagtagcgtacatggttattacttttatttggagttgcaccaaaatttttggggcct

SEQ ID NO: 36484 - DNA, 1034 bp, Homo sapiens
atattaagttattggctcaggagtttgatagttcttgggcagtaagagtgagtaatagaatattcagtgagcctagggtgttgtgggtgtagattagtgcgatgagtagggggagggagcctactagggtgtagaataggaagtatgtacctgcgttcaggcgttctggttggttgcctcatcgggtgatgatagccagggtggggataagtgtggtttcgaagaagatataaaatatgattagttctatggctgtgaatgtcataattaaggagatttgtagggagattagtatagagaggtagagtttttttcgtgatagtggttcattggataagtggcgttggcttgccatgattgtgaggggcaggagtcaggtagttagtattaggaggggggtcgttagggggtcggaggagaaggataaggagcagctaaataggttgttgttgatttggttgaaaaatagtagggggatggtgctaataattaggctgtgagtggttgtgttgattcaaattatgtgttttttggagagtcatgtcagtggtagtaatataattgttgggacaattagttttagcattggagtaggcttaggttatgtacgtagtctaggccatacgtgttggagattgagactagtagggctaggcctactgctgccttgcaggcagcaaagactagtatggcgataggtacaatattggctaagagggagtgggtgttgagggttatgagagtggctataatgaatagtgatagtattattccttctaggcatagtagggaggatatcaggtgtgagcgatatactagtattcctagaagtgagatggtaaattctagtataatatttatgtaaatgagaggcatttggtaaatatgattatcataatttaatgagtcgaaatcattcgttttgtttgaactatataccaattcggctcagtctaaccctttttataatcattcgtaggccagacttagggctaggatgatgattaataagagggacgatgtgactattagtg

SEQ ID NO: 36485 - DNA, 1048 bp, Homo sapiens
ggcaggtgagaggggctggagctgcagcccccatgagctacccaggggactgtacctggagggggctttggttataggcacattgggtcagatttgcatttgaagatcaccgtggccactgtgtggaagaagggtctagaagggggaactggttcagtcactcttgctgggatcctggtgggagcagtgtcaggggcatgaagagaaccagggtaggaggggcaggacttgccaatgggatggatgctaaaggagagggaggaggaggggcttgcatgagggcagagccactccagagttggaggtgctggtggaggagctggtctggaagggagacaaatgagttccattttgatgagccatgtttgaggttcatccagtaggaggtgaggagtgggcctttgggtggggctcagtagagaggtctggacagagcaatgggagtcaccatcgtgggagtcacccctatctgcttgcctacctctggctcttccccctaagctgttgctcttgagtcacctggaccagccccacctgggcaaagggtggtcctgcccaggaggctgccacggctcacctgtgtctgtctacctgtggggcgtgtgcacatgtgtgtagtagatgctcttgcatagctccagctgaagttaggttgaaggggctggaggtagagtaggcaagagcaagcagaagcaaggagggacttgccccagaaagatgaattttgctgcatggggttaggctcacctcatggatgctggcagatcctgggcactggctgaggggaggagggttgtcccagcctctaggctctgccccatgactggattgtttgacaaactcacttctctcagggatggtgttctgaccatcagcctgagggctgcctcattagaccagtatccctcggggtactagaactttggagtacaagctgaaattcaaggcacaccaaacccaatttaagctatttaggtgtgggtggtgttctaggaccttacagggtatggggcagcctaactctccccctttttggcccctgttcctg

SEQ ID NO: 36486 - DNA, 1050 bp, Homo sapiens
aggtgtggcccacttgagtgctcctgccatggactgccctctgctagcctcatctgtgctgggcatgggccgggctgtgactggtccgtccgtccgtccgtccgtccgtccgtccatccatccatccatccatccatccatccatccatccatcccctccctgccttttctgccttccctgcctgcaagctgtcccagagcacatggattacagaaggtaccaatggggcttccctgcagccagccctgtggggacccacggattgtggccaggatgacccttttattcttgacctgatggtccccatgtgtgacagtatccttgccttctctttggacatcacactctggaaggctctcggtgcaggcagctagggacagccttgcctttgtttataggttagttcccaatcatggtggtttagataaaaacaaaagagaatgatgccctttggccttgctgctggctgccaggtgtgtgtggcttgcagagcatttctacacctatggtggtattgaggactgctttgctgacggatattggagggtcatctggaacaatggccagggcttgtgtcacactgaccacaacagtctgaacaccaaggaggcaggatgtgagggcgggcaagggttgaggcctcagtgtcaaacagaccagcgccgactctagattgtaccgttttcttcttgtgtgaccttgagcaagttgcttaggcgcagtgcctttacctgtgaaatagcagtagtgatgacgatgatgacgatgacgaagacgacaggcactcacaatgtggagcacgtaagcccaaccaaggacctggattgtgcagggaaagcagcccctacatggtgcaagtggtggtcaggattctagtgtcgccctggtagcagtgggtcctctcagctctctccctccagcagcctgggaggccgatgatgctgaccccacaggacaggttcctccactaggcaggccctgcatctgcccagagcctcttctgcacgggagccacatggagatcgtgttaaagcctcggcgtccattgt

SEQ ID NO: 36487 - DNA, 1065 bp, Homo sapiens
tggaccacagctgggttcgagtctacaacattgctgctgtggtgcccagagactggggtaagggcaatggaagaagtggttgctgtgagccagtcaagacctgagctgggcctggtttggggagagcccaggtgtcttcagaatcattcttcatgacttctggtggaagaacacatttgagagagagcgagtgagtgagtaccatgaatcctagtggggcagggcagagcaggcactgcttttgagaagtgggctggctctcatcacaatcatggctagatgggctccctttccttgtagaatatgacatttgctttgcttaaagttagtaaaatgccattttattggtagtgtttttatttaggctgcttgactatcctgccaaggtgattttattattacaaaatgtggaaaactccattcaaagaagaaaataatacaaaacagattttggttcacatactaaaattcattggaaaattgagatctcaacccacaactattcatgacagtaaaacaaagacccctgacagctcccaaggtatccagcccctgagcccacaccagctccctgcactgcattgtcctgctgcccactgagtggcagaacctgagaactggcctgcctctgggaaggaactggaattggcctggactccctagccttgggctcttgggccaattcctccaaccccacccaagtcctagactgactctctggccagattccccctgaattttgtgggaagttgtgggaagagccctgttggaggccagttcttaacccacgggtcctggcttgcaaccattagggagcagaatcagccagagagcctgatacaaatctaaattcttacaccccaccccaaaggttcggactcagtacagaaagggcaaggccctggaatctgcattttagtaagctaactctggtgcttttgaagcagggcgccgtggaccacatcccagaggcactgctacgacaagaagcacagcatggtgtctaaagggcagggttattggagtttgaaatcctgtgtttgaatcttggcttgctgactatgt

SEQ ID NO: 36488 - DNA, 1050 bp, Homo sapiens
cggaggcgggctctccctggctcggaaggcctccccgcggagggcctggcttgctgtccgctcgcttttcgcttccagagtcggagagacgcgactttggggtcgatgtggagagagaaacagatgccctaggcgccccccattcagggattttcacaaactgcccagttcagctttgtcccttgcgtctccaaaggtgttttcaatctacatatatttggaaaacttcagttttcatatgatttatttaaaaataagcatacatattatgtttattaggaagtaaaaattttctttttaagtagatatgtcctagtaccacagagagacttgagtgtagaaaattgctaaaccagtgacaaaatgccagaacactgcaaagatggcaaccactgctttaggaaatatttgacataaatatttttcatgttttgtctccttaatatctcggtgatatttttatttgatttgatattttaaaaagaattgtaacttttagacttagaagggaacttagagtcttatgggctgcaaagtacataaatctgtttgacaacgtctccaacaaattatgttttgtcctttgcttggattatatttagtagaaagaggtgttgctccattcttttgttggaaaactgtgtgtttttacgtgttttggagcgcgaggcttcagccctcctgtccaggccatgcttcccctgcccttgcactggtgagtaggattccaggctccttaacacggaccgtctgcctggggcaacaatctgattgcttatcatgaaactttaggaaggagattaaataaaggacatttaataattatttccctttacttttgctgctcccaacaaatttgtccacccttttcagataattttgcatctatgttctgttatctgtggtattcacctattatttctattgttgtgatcactgaaaacttgaaactgttgaaagtcacttctgggtattcatttcaccaatctggaagaacctagtgatggtgcagaagagagctgcttccatggcctttagtgagttggctgt

SEQ ID NO: 36489 - DNA, 1078 bp, Homo sapiens
ctcagacattttgtatgaagaaaaaatactcatttatatgatagctcaaaggaatgaataaaattttgcaactgaattctactaaataattacattgccagtatttctgataaattatcttcaggaaattattcgagattaaaaattgtctgtctaggttgacagtagcgctgagtcagcagaagctgcctgtgatatactctctcagctggtaaattgttccatccagaccttgggcttgatttcaacagccaagccaagtttcatgaatgtgtcggaggtaaggatattatgcgtttttggtgagctatactaaaatccctaaagactgccaaactaggcaaaagccatttttttcctaaagacagaccatctcctatttgtattcaaagtattatttaaagctgttttctgttgactagcacttatttttgcaaaaatagtttatgcatgttttcattctttagatatattttgtaactgtagtcatggttaccacagtgtcattaatataaaatttggatattgtgcttattctacttaaataacaatttatgtagttactttgaacatagagcatgtagaggcaatagtgggtgtttttcctgtgattctgtggcctgtcttttggaggtggaacaatataatatttaactaaatgaactacgcttgttagcatgatgtttacattcatgcagtagaaactccaaaacaaaagtggtttaaaaacatgatcaaagtatatttctctcacattaaagaaattgataggtgagacagtccatagctggtatgaaggtggtaggaacctaggtttcttccagccactccactctctccagggtgtttcttcaagatgaccatctgagctctgaccatcacatccttgctctgggggctaggatgttagaaatgggggaagaagggtgtgccttctccttatcaaggagactacccgtaagtaccacacagtgtttctgtttacctctaagtctggccacaccagattccagggagtctggggaatctttgagctgggtggcagtgtgcccagctaaaaattgggactggattaaca

SEQ ID NO: 36490 - DNA, 1046 bp, Homo sapiens
ctcatgtttcatctgatgatgggttacattttttaaagctagaatgatatgatatttttattacaataactataaagatgcaatttccttttgaaaattatatacctatgaagcataaattatttaagttttttcaaaagatttcttaatctgcaaggtaggtatagttatagtaagtttctcctgagatattttaattttacatatatacatatgcttttcattatatacataatacctcctggcagccatgctctcagaagttgttattagatagctattttcacaaataatgaataattaatattaaatttaaatttacaaaatattatattaggatcagtatgattctttgttcttgagaatttttcccaacttcccacaggaattctttgtgtagctgaccgttgtcaaggccttagagaactggcgttgaattattacatcctaactgatgaacttttccttgcactctcaagcgagactcatgttaaccttgaacatcttcgaattgatgttgtgagtgaaaatcctggacagattaaatttcatgctgttaaaaaacacagttgggatgcacttattaaacattcccctagagttaatgttgttatgcacttctttctatatgaagaggaattcgagacgttcttcaaagaagaaacccctgttactcacctttattttggtcgttcagtcagcaaagtggttttaggacgggtaggtctcaactgtcctcgactgattgagttagtggtgtgtgctaatgatcttcagcctcttgataatgaacttatttgtattgctgaacactgtacaaacctaacagccttgggcctcagcaaatgtgaagttagctgcagtgccttcatcaggtttgtaagactgtgtgagagaaggttaacacagctctctgtaatggaggaagttttgatccctgatgaggattatagcctagatgaaattcacactgaagtctccaaatacctgggaagagtatggttccctgatgtgatgcctctctggtaatgggctgccaaagattc

SEQ ID NO: 36491 - DNA, 1026 bp, Homo sapiens
ccccacatcccccctgcccccaaaagttacccttaggttgtatgtatgcaagtgtctttcttccattgcaggagatcctgagcaccttggttcccaagcctcctgcatggtccgagattcttgttaaaaatgtgggcagtaaggcccttctgccaagcttagtgaatctgaattttgagggatggttctaaggaatttgttgatttaaaaaccccatgtccaattattttgtacaggtttgaattagaatacaatgggttgtgacccattatgggcatttattttcatgggatgatgtgctcaggagattttgttttggccaatagtgttgaggaaaatgtggggattggtttgcttgcctttttatttcagattgcagcagtcatagagatgttggagcacaaagtgaaagagttgtttctgtgaattcactttagaaatctagctgtgagctctgtgtgtgtgtgtgtgtgtgtgtgtgtgtgtctttctgtatgtttttctgtatgtatgtgtgtctcggggtgggtattgaagtcagtttgtgtgtgtgtttattatgaaagttggtcaggatgtagtacttccataaccttaggtaagaacaggacctttgggttattgattcaacatgaattcatttgaaatagaagctttgtgaagcttagcaacattttattcatatggttaatgtgtataaaacttaaccctgaatcttcctttagctttcttatctgcatttgccaaatcagttgatgtcaaaccccattcttccagttgtccaggctgataccttggaatcattgttaactcctttgttctcatacaccccatgatctccttcatcaggaagcttactgtctttcatatgtctgctgctcaccaccccactgctatcaccctggttgtaagccatcgtcatcttctcccctcccttagattactgcatctctgaactggtctcgctgcttttatcattgctgtccacccctcctcctgcttattctcaacataccagccaggatt

SEQ ID NO: 36492 - DNA, 1046 bp, Homo sapiens
agggttcataatatggctgaggtatagctgcactttaattttgaaacctgtttttcctctgactcttcaagaaatatgtttattttaaaaaatatagaattagatgaagcagaaagtgaaaagtacacctaaccccaccaccagagctaatatcacaaaccctttctttcattaaacaaatatttattgagcatatgtatcactaggcttacagtgatgagtgaaaacagatacagctcttctcgtggaatttacattcttgtggggacagatttgaaaggtaaatgtaaaaacataggtgtggtaagtgctacaaagtaggagtatgtgatgcggtaagcatataagagggggacttctagccaggacggtttgggaagacttccccgaagaagggatgcttgagctgaaagagaggtgaggtgtgtgtgtgttttgtaatgtgatagattcatttgtaattcatgatataccgtaattttataaggttttcatttatggctgaggtaccactgcatctcttttggtacactaatgacgttctgtgttcagtcagtggttgcagtttttcagaagaatcagggaacctcacgtacacaggaatttctaaatattatgattaccttggttttctttctagctttgaggtcatttctctaagaaatgacaaaatacatcaataaaagggtattatcaagtcaagtcttcataaaccaaaggtatactatgaaaggccaagataatagcagataatgggttcatagctgttaagtccctccagtttctagtgtaagaaggagcataccttcctgtctgttcaattattggctctctgtgcttggtgtacatttttttaaactcaattttaatgccctatttctgttggctatcatatggaaataaatataggataaaactaagtgataggctaaatggcatatgaaactctttatagcccctgttcttttttccattactctctaagatcttacagagattatggttagtgtcttttaagcctgagttcctagcatggagtattcctg

SEQ ID NO: 36493 - DNA, 1065 bp, Homo sapiens
ttatctagcttagtgccttgccttttataggcactcagtaaatatgtgttgtataaataaggctataagtgtgagcttaagtttagcactggttattatgtatatttgtgtctcagtagactctgaaagcatttagaaaaggagtatagaggaccaaaatttagctgtccagtaatctgtaatgtgtaaagactgttgcagttgctaagtacagtcttttgggattttctctattactggaataagtgtagaggtgatgtagaagagtattatggggtgttagatacacagctgatttaaattgaagataggtgttctcagtgtttctaaattcgttttatttagtgaaaggcaaagggggcatgaaaaattgaatcaacttttcaggaaagagactcaaaatgttcagaggtattgcaggttcacttgtggctcatgcaaatcagaacgtattttattttttgtatacataatgagaaattttttcataaccgagtacttatgtgaggatactaaagtaaatctattgctgtaacccaagctctctgatcattttatttcaaattttggaccaaggtgttattttgaatatagtatagtctgcagaaaagactaggacaaaatgcatccattatatgggtaccataaagaagttttaatctcagtttaacaattttacttttactataggtggtttagttcctttagaaacctagctgttaaatattaagagaatagatgagtaaaatatgattgcaccattaaaggcatttaaaaaaatctatatattcgggtgagggaagagcaaatgcttgtggtgttaaatagaaaatgcagaataccaagtaatatcatgttatatcctgttacgggcagttgtgggcaagactatatatatgcagaggaaacaaatataagcataccatatgttaatggtatgattataggtgagtatacttaggaaaaatattttttaaggaaaaatattttttaaaaagtggtacattgtctcatcatttctgagatcattgtgttccagtaataagtgtgctaaaaatgtcctaa

SEQ ID NO: 36494 - DNA, 1448 bp, Homo sapiens
agctggatttcttttaagacttctattcagatcaggacacaatcacgttcaaaattgacatagcatgtaacatggatttcagtgaagaaaagtacttcagaatcaaattttagaagagtgttttagggtttagtggcctaatcaaagggagtccagaagctatttttggataatacataggaggtagagcaacctggttttgcctctggttatcatttgacattgccagtgtcttacttgttcatattatggggaaggaatcgagtggtcacagaacttttggagaaaatttatcaattttttgtttactttgtaatgcttttctgttcttatttaataaaatatgcctttcgattatattaatttaaatttgtatatattgaattgatttaaactaggatcctttccccctttctctttcaggacttgacccaatgaaagaagcatatggcacttgtgaagataaatgttactcctccctttttaattggaacttctgcttaggacctgtgtatgacgtttcacctgtgatctgttctttcggtagccactgactttgagttacaggaaggtctccgaagatttgtgtcaaatgacgtcaatggccagcttgttttcttttactagtccagcagtaaagcgattgttgggctggaaacaaggtgatgaggaggagaaatgggcagaaaaggcagttgatgctttggtgaagaaactaaaaaagaaaaagggtgccatggaggaactggagaaagccttgagcagtccaggacagccgagtaaatgtgtcactattcccagatctttagatggacgcctgcaggtttctcacagaaaaggcttaccccatgttatatattgtcgtgtttggcgctggccggatttgcagagtcatcatgagctaaagccgttggatatttgtgaatttccttttggatctaagcaaaaagaagtttgtatcaacccataccactataagagagtggagagtccaggtaggtcttattcctgagaagaatttggaaaaacaaaaacaaaaaacctctcttcctgatatgcatgtaactagatttagtaatgaaaaggttgtattagctttgtgtttccatcttaaatattctaatcttggaagggctattggattttgagtttagctttttatatgtaggtgatacaattctcaggtggcttactctaattcattattcactgtaagcacccatatatctactctgccttttcctgtggatgacctgtctctgttttatttaaagcctaagctccaagtgtgtactatatcccattcctttttgtcaaatgaagaactttgttcctacagttatcatccttctctccagcattatattttccctttctaccagagtatttctgatagcatacaagcatgccatgatactacccatcctaaaataaaacttaaaaaaaaa

SEQ ID NO: 36495 - DNA, 1024 bp, Homo sapiens
gcagctgcctcttgttctgcgaggggaatagcagttgttaacacacagtagaacaaaacgattgtagtcagatgttaaccacatatttagtatactaatgcagtagaatgaaatgaaacaatagacaaaaatagcacaaatactgacttaacagaaacactggattgttgtgtacatccctacttcagggaggtgaagtgtgacttaggtagcttaaaaacaaactcattttgttgatgctgaatgatatcagaattaagttgagatttttctaagtgaaactacattgacagatacaggacaattgttaatgagatgagttgtaaatgtttgaagaatcaggtttgtttcagtttcctgcatggaaaggtaatcagatatttgaatgtgattggtcacttgggtctttagagaaagcgaatatttgaataaagtttatctcttaaaaatgtatctgttaaaaatgtttagactttgttgtgtatattttcattatggtcatatttagaagactgattttgattggaaggcttttacctagagaatattaccatattcaatatggaaaaccgtactgaacaacgtaaaacatgagatctttcaaactaagaaagatcaaagtgttcataattggaaatgtggaagtttttagggcattcacataacagattccaacttcactctgtagtcttaactccttgttcagtgcgtaggccaactgattttctcatctcctctgccaccctccccttctacctcttcccagccctagtactcccatgtgaaatcctcctgtatctttaaggttcagtcaggtatgtttttttcttacagtattttgtttgattctctgctagctgggagcgctcacctctgtttaactcctattgtgttaaattctctgttttatggttgttttttaatatcctttatctcatagaacaggagtggtatctttctctggattttctgtcttccagggtaccttatgcaggctaaatgcttacagagttttggattcagt

SEQ ID NO: 36496 - DNA, 1032 bp, Homo sapiens
taattgtttgatttccagaagagtttagattttattttgccaattaccgtatgtttaaaaaatggaagtagccctatttgacttaaatattttcttctattttatgacactcagtaccatttattgtcttttatataactgatactgtgatgaaagctatggcattcaatttaatcttcagaatgactatgtgagatagatattcctgttttacagatggaaaaagaaattctaaagtaaattttaaacttttaagtaccttacctagggtagggctaagaactagaggttcagacccaggtttgtctaactctaaagtctgtgatctttcacctttactgtgtggcttttcaaattatttaagactttagaagttaaaatgaatcctggttatctttagttagataactgatgaactgatttcactggagaaagataagtagattttgtaaagttctaaattttgttaatggcatgtcatatatggacatgtcagtatgtcactgtcaagaaatatttgaacacctgctgttgtcaggcagagtcatatataagtacagtaagtcctcacttgatgtcattgataacgtcttggaaactgactttaactgaaacagcatattacaaagccagttttatcataggctagttgatataaacaagagttaagttcttgtggtatatttctggtcacaaaaatatcactaaatttataaataaagacccaagactcttctaatattaaacattgaaataaatgtgagctgtgcatatctttaagaaagatcaataaaaacaagactgttatttacttaattattctaattcatggtcatgggtagccagagcacattccagcaactcagggcacaaggtggaaaccaatcctgaatgggacgtgattaaatcacagagtgcactcacacacaccccggcactcacactgggactgtttagacatgcatgccagttcatctgatgtgcacatctttgggatgtgagaggaaactcgggtaaccagagaaaactcaa

SEQ ID NO: 36497 - DNA, 1037 bp, Homo sapiens
gctacaatttaagatgagatttgggtgaggacacagccaaatcatatcagcatttaatattaaaattgctatttgagtctcttaacttcaacagttttgattattattactagatttcattagggtgacttggcagaattctttagaatactaaaattatttcattcctagctaagtactgttattaaaagtaatggcagaagccacaattacttttccaccaaccttaatattaaggatttgcaaagttcaaaggaacttttcaagtttttcatctactctcttcacctgactgtattgacattccaaagatttgtgcttaaaatctgaaaagaattttagtcatgtatttaagcaatctgtactgtatctacatatttaagcaatctgtactgtatctacatggttcttaagaatttagcacaagaagagcacctgtcacacgctgtgcatgggtttttttctttttggtattcagccccagtccagtgttttcatgatactttgctgtagatctattgtatacatcagtttactggttaccctgaaggtatttctgccttcttgtacagtaatgtgacttttgcatatttattttaatctccactccccaatgttcttcactcccctgaccgccctccctccccaacccagttttcctgggccaagactaccataagcagtaaaccagagaacctgataaatccaggaaaataaaagtgaaaaatttctatttcaatttttatctgcagttttaggctaaagatttcagctcagttcatcccagtaatttccaaccttaaaggataatcactatgtgactgccacattaaattatacatgcatgtattgatcaatatctacaatgccttatctgatattcaaacaacttgaaaataaaaaatttttcgttaaaaaaaaaaacctgggccgggtgaggtggctcacacctgtaatcccagcactttgggaggccaaggcaggtggatcacctgagatcaggagttcgagaccagcctagccaacatggtgaaacc

SEQ ID NO: 36498 - DNA, 1052 bp, Homo sapiens
aatatcaccggcaggatgtaaccagcaccccatgttggattgagattatcttcatgggcctcttcagtggctggataaagtccttactcagatgggctcccctctgaaccccatatcttctgtttcataatgcagaagtattcttttcaattatattgttagtggacttgttttaattttagagaaactttgagtacagatactgtgagcttacattgaaaacagatattacagcttatttttttctacataattgtgaccaatacatttgtattttgtgatgaatctacatttgtttgtattcatgttcatgtgattaactcttagaagtgttgtaaaagatgcagagtaagtattatgccccagttcagaaatttggcattgatcttaaactggaacatgcttttactttattgccctaacaattttttattaaatttatttgaaaatgcatcacatgatgaaaaattatagtagcttataagagggcatatacagtgaagagtaagttttccctcctactctcgatcttccagaagctgtacttttaccagtttctttgtcccaccaacttaaaaaaaaaaagtacaattcattgttttgcaaaagtgtatggtaggggcttaaaagaaactataaagttttatttgaatgaacactatgcactgctgtaactggtagtgttcagtaaaagcaaaatgatagttttctagatgacataaaatttacatttaatacagataagtgttcttcagtgtaatgtgacttcatgctatatatcttttgtaagacatttccttttttaaaaaaatttttgcaaataactgatctcaagtatatgtcatttactcaaaatctgtcataagcattactttatagctagtgacagtgcatgcacagccttgttcaactatgtttgctgcttttggacaatgttgcaagaactctatttttgacatgcattaatcttttattttgcacttttatgggtgacagtttttagcataacctttgataaaatacactcaagtgacttggacttagatgcttat

SEQ ID NO: 36499 - DNA, 1692 bp, Homo sapiens
tggatgattatcacctttgccacttaaaatatataaatatcctttttacttcatgaggaaggaagaattttttgataattactgagttcagccttttgtgatgacttatattttggacttacattttaactttaaagaatgtcagatcccttctttgtcttactagttaaatcctcacctaatctcttgggtatgaatataaatgtgtgtcatcgttatattgttcagctagatgagcaagtatcttagggtagtaggtagcctggtggttttagaagtgtttggtgatttttatggagagagttttcctaagtggtggtttataggtggtatcagatattattagggcagctttttggggagtaatctcaggtctcccagagcagcagcatttttctcattgatataagtaagattcttaggagcttttcttatcacacaagatgcctgaatcgaatgtgagaattgaaggcatttcttctgcataaacaaagaattctacctgctggacagaaacctggaaagttctttggaattcgctgaattacagtttagtatgtcctgattacagagtgacaatatttatcaagcctttgttatattggattatcttctctcttaaaatacaactgtattataattgaaatgacagcccaaaattggatggtttaccaaaaccaatgaaagggatttcacacatcaatttttatttctgttttgaagagcacatgctatataataattgctagtagcaactgcagtaaaacaggtgataagttattttctctgaaaagatccagtcctagagcaggattcttcgatcattcatggcagagtgaaaaaggtttgtatggttcttgtccaaataactcagttcttaaaattcttaaaatgatcgtaaaccattatcctttaaaggtttatttgaagatgctgttaaagtacagaattttgtgtacaggtagatttttccgtccctcattaatagtgccttcttaattaatacagactggtgttagctataacaaaactccagtaaggccaaagaatcccaagttctttgtggaaaaaaaaaaaaaatcttttagggtcagattttcccttctaatatcattgaagatgatgttgcattgatttattcataaagtattttaactataggaactctagaagataatggttaggcaagtgattttttttttaaatatggttggcgtaagttgtattttgaaattcacttattttaaaatcgaagaggattgtaatcatggaaatagaatgtttgtatctacctgcccacattttcttaaaaagatatttcatatacagataatgaagaccaagctagtggctgcactgtaggtctgctgcttatttgtatttgttgtgcttctgtttatgttgtagaagctgaaattctagcaacatgcttcaattctgttattttgatacttatgaaaatgtattaggttttactatattgtgcttttgaaagccataactcttaagaactttgtttttgcatattgtttgctaattctttactttaataaacctcaaaacctgcttaatgtgtctttttttgttttggctctggagttggcctgcctgcgtttgagtcatgggcctcatagcttagacaagttgcttaaccactctatgcctcactttcctgacctgtaaaggaaaagt

SEQ ID NO: 36500 - DNA, 1028 bp, Homo sapiens
aacattttaaatattactgatttttgtcattgagtttgtaagtctatcataagctttgcaaaaacaaaacttgttctttctatctaaatcagtttttctgtttaaaaaaagggtaatggggctatagggaaaattcaaagaagagctatgggcagcttgcttaaccatctccatgttaacgtatgttggatgggaggtgggaagagggatttagactggtggtgaagacttatccatattatatcaaatgggtgtgtgtataattcctagtgagagattttctgaggcagtttattgatgtttagagatggattttgaaaagatccttatactttgtcttaatcagttaccccttcccatctaataaacctccttcattatttcattttaaataatactttcatttgagataaatgctgagaattttaacagaaaagttaaaactgaaacccccaaaccagtagcaaaggtttatgagtgtgcccttctaacctgttctggtagtcactgtacattgatccttggctttctttgacagatactttgctgattatagatggagctctagctctttttgaaagggttctcagagaaattggtttggttctaaagtgtttcttgagttctttgtacctaagaaagcctttcattctgcatagcgtttatcaccatccaacatatatatttctttaccctgtttattgactgtcttacctcatgggaatgtaagatctgtgaggacagacctgtgttgccactgctagaacagttcttgatatgttataagtaagcataccaatatttgttgaatgaatgagagtactgaagcaagaagtgaattttttaagtattagaatttaccttttaaataatgtaatatttacttcttagttgaattgcttctagctcaatgttttattagctctctttatgcctgagaagtggtttgatgtggggtggggtattgtgggagctggctaaagtataattgagaagaaggggaaattcagctaagaaagcactcatat

SEQ ID NO: 36501 - DNA, 1044 bp, Homo sapiens
gggaaggagatatagtccccaagatcagcgagtaagtttatccatttagaaatttgggcttcttggccataaatgatagttgggaaagcatggaggaggtcctcaggggaactatgtgttctccttctttgggtacagagattcttagtgggccgtcccctctccagaattatacaaagggccagaaggctcataacatgtgaggcccttatgtcagatcctgtgcatcattctaggctgtcactctgtgatctggctggctcagagcgctgcaaagatcagaagagtggtgaacggttgaaggaagcaggaaacattaacacctctctacacaccctgggccgctgtattgctgcccttcgtcaaaaccagcagaaccggtgagcttttgactataattcctgggctctgcaatttgctaagagacttcctggacaccactggggatggtgctaggatacccaaagggctggtgttctgctcacagctctattatctctgattctctgccaggtcaaagcagaacctggttcccttccgtgacagcaagttgactcgagtgttccaaggtttcttcacaggccgaggccgttcctgcatgattgtcaatgtgaatccctgtgcatctacctatgatgaaactcttcatgtggccaagttctcagccattgctagccaggtgagaagctagaggtgtgatgggtgtgcgcacttggaactggtaactctaagaaagctcctagggactacttatggagtcaagtaagatattttttttccctctagcttgtgcatgccccacctatgcaactgggattcccatccctgcactcgttcatcaaggaacatagtcttcaggtatcccccagcttagagaaaggggctaaggcagacacaggccttgatgatgatattgaaaatgaagctgacatctccatgtatggcaaagaggtgagaatacaagaaagctttagtgtagcagcttagtagctacacatttttccatggtgccttccaggtgggcttgtgccttctgagggcatg

SEQ ID NO: 36502 - DNA, 1651 bp, Homo sapiens
ttgcatcagatgaggctaaaaacttagttgaacagtcatggagttgttgtttacgacgtctgtagagttgaaatgtattggaattaccctgaccatttctttatcttcccatttgataagaaaacaaacactgtatctattggaaaacaataatatatcagatgtttaggctgtgggaggacataaaatcctatgtactcaggtctaaagcagaaagtcttgcctacaaccactgttcttccttgttctcttattactatttctgtagtttaggagaagggtacctcttttcacttctgactggaagataaaatactgggctgatcttgatggaaataatcatttgggcatccctctctctcacttgagcagctgttttctaagtggtgctggtattccagttagaaacaacagagcatgaaccagtttaagggtagcaaataagtttcaacttgattgccaactctattttatttcatatctggactgccaagttcataatttctgaagctgtgtttaggcttagctggaaagagctgtgatcaattgatgtctgccagaggcctggcttaggggtgctgtggtatgtgtgccatgcattttccatctctggaccaggtgcatctctaatatcacttggggctggtccctctaattggcagactcagcaggcatgactggagagggaagtcccaatggtgctagaatggtgctgcagtggcagaagacggctcacaagtgaggtctggaagaacaacagggaagacatccatcatttgctccaaagtgtgcaagtcaaatcctggggagaatcatgataaccctgatcactgagcagctacagaagcagactctggatgagctgaaatgcacacgcttcagcatcagtctggtaaaagaccagtcttcctgcttctccacgaccccctcccccttttttctgaggctgattgttgctattactttactcttgtcctgtgctgtatgaatcatggtacttaacctggaagagcccactaatggctcaaaacccagcccaaaaggaagggggcagggatttttccaccgatagagaagggacagcaaaacttgggtggagaagggtttgagatgttggaagatgtggattgtttgacttactaactttgggaagacaagaggaagaacacttaatgtccctaacatccctgtagctcatgaatcgcagaggagaactgaagagggcttcctagaaatctgtcagtgtgtcctgaatccaaatcatgatggatattctctctttcttagcctttgcctgatcatgcagacatctccaactgtgggaactctttccagcttgtgtctggtaaggcatcgtgtgtgtttgtgtacgtgtgtgtacccattcctctctccacacatttctatcattggtttccagtgaccagggctagcgagcctacctctagaaccttcttgccagggtcaacttctgagattgacagttgtctttcatgttctagcatgaaagttatctggttggtttgctcttattctagctttgtggggacttgtataatctaattttttgaataggtaatacattcacatggttcaaaatttaaaaaataacaacaaaaaggttatgctgagaaaagtctctcttactctc

SEQ ID NO: 36503 - DNA, 1063 bp, Homo sapiens
gaactgctgacctcaggtgatccacccaccttggcctcccaaaatgctgagattacagatgtgaaccaccgcacccagccctagagtgattcttttaatgattattggttctgaaggttttttgtttcatactatacagaataggacagttttagagatacaggattcagaattaacatcgctaaaagacacagttggacatgaattcacttctttcattcattcacttaaatatttgaatgcttaccatattctagacctgttgtagcagtaaatgagacagtagagatctctgctctcatggagctttcattctagtaggtgagttgaatcaataaagagataattacattgattaggaaattatataattatgtctttatggacaaggcattaaatatctttttcccctcctactgtagagtggtgagatcaagtcggtagatcccagactaatccatgtgatgctgatggataattcagcgcctcaaagcgaggtacagtaatggactgcattcctgagcagactcatgagcttgcattatcttgctgtgtgtagatcccttatatatgtgttttccatggatgccttttgagttgttcagctttagccactgtacatttttttgctctctccacagtctgtctaattaaggggggatattctcaagaaagagacctagtttgagcaaacccttttaagcatgactatgttccctagttcttctaaagtgcaaggctggtttcttcctatattctgtcaggacaggtatatttgaaagatatagtagtcagttaaaagtgcaataagcagtagtaatactcgtgatctaccaagtaacaagaagtgaaggataaactacgtccactttttttttttttccattcggtggcagtgagctccaacggagtctgaaattctgtattcccaagtagaatcaattcaagctggtacctagttcagtgctcagcccccagtgcattggttactccataattgttatgaaccagcccaactcttggtttattcagaattaatatagccccaaaaaagatacattaa

SEQ ID NO: 36504 - DNA, 1032 bp, Homo sapiens
gcgcagtgctgagctgttgctgggcaaaagcaaagggaagcaggcccccaagggccggcctcggactgcccccctgaaaggtgatcctgctggggctatatttgggctttgctctggcactgggctcaaatgcctgtcgtgttcttgtgcagcagaggcactcactttgatggagagttctgtaatctcatagaattacagagccaagaggacctggcagaggcccctcgtcaggcctggttcagggcaggattgcatctaaaccggcactgtaggaggagtatctgtcccaaataatgataatcccccaaaggaggactcttgatcttccttggcggtcagttatttttggtcaggaactatttctttgcatttgtctcatccctttttacttcactttggcccatcctctttacttcagaggggttactgggaactggtatccattcccacatagcagacatttgtagacttgatgaagcagagagaatcacccctcagtttgctcctctctgaaacctacataaggattttaacagctctatcaaaatccattaacttgtgtggtgtgaggttatggtccagaagcgggtaaaacaaagtctcatggtaaaagcagctgttctcaataggaattgctatgttgtgggagctcaagaggtcctgatgaacagaatagccatatcgtgagagactagaggcaggtgatggctacattctggcttcttatgtttttcacatccatattcaaagttgttttgccatagtggggcacttcccacaagttctgcatggttcttagctcccaatggaagcttctttgctccttgctttcccttcctgtcaaggatggacataatgggtacatgcccaagcagggaaaggagtagcaacccaggtcagaacaaatgtctgtccccaaaagaatcatgctattggttcctgtttacacctcatgacaaacttttcttctctcccccttgccacagttggccagtcagtgctgaaagatgtaagcaaagtgaagaagct

SEQ ID NO: 36505 - DNA, 1114 bp, Homo sapiens
tctagatatgtcttttggcctaaaaacaggaagaatgagattgccatttactgataaagagattctttagggaaaagcaggtttggggaggaaaagggggagttttaacttggccgtgttaaatttgagatgcttgttagattttcaaaggaaaatactgagaaggcagctggggatacagctctagagttaagggaaggggtcctacctggagatataaatttggatatcaccaggtatttaaagctgtcagtctaagtgagatcagagcatagataaagaagaatagcagtccagggaccaaactctggtactctccaatgtttagaggtgagaaagatggaagcaactagtaaaggagactgagaaagaacagctagtgaagtagcaggaaaactaggcagtgaggtatcccagaagacaactaaagaaagtatttccaggaaggaataatgaactgtgtcaaatgttgctgacttgaatgggggcggtagctcacgcttgtaatcccaggatcttgggaggctaaggttgaaggatcacttgaggccagcagtttgagaccaccctgaacgatgtagtgagaccctgtctctacaaaaaataatagtaataataataatttttttttttgagacggagtcttgccctgttgcccaggctggagtgcaatggcgtggtcttggctcactgcaacctccatctcctgggttcaagcgattctcctgcctcagtctcctgagtagctgggattataggtgcgcgccaccatgctcggctaattttttgtatttttggtagagacagggtttcaccacattggccaggctggtcttgaactcctaacctgaggtgatccgcttgcctcagcctcccaaagtgcagggcttatgggtgtgagccactgcaccctgcacaaatcaatttttaataaaaaagtaaaaatgttgctgacaggtcatgttacatatggactagaagtgactgatttagcaaggtagaattaccttatcaaaatagttttgctagattggtaggggaattgcctgattgtagggaagaaaataaaagggaaaggaacctatggcaatgagtatagacaactcttcttttt

SEQ ID NO: 36506 - DNA, 1042 bp, Homo sapiens
tgagccactgcgcccggccaagtatagacaactctttagaggaactttgctcaagcagataaatggagggagggtatggcttgagaggatttttgtggtagaaattggagcaaatttatgtgctggcagcagtgatctgatacagaagaaaatagatgatgttgaaaagagaggagagatttagtggagaaatgcctttgggttggggaaaagtgataggatgtagtaggagatactggcctttgctggttcagagcagcgggaactcatggaatacgtgggccaagttgcagggaagtgtggtagtgtcgtggtgggagcttgtggaggttgttttctggctcctcttttctcagtggaatagaaaacaaggtcctcacaggggaagtaatattggaggtatgaatagaaggaaggtatgaaaataggcatctagaagagggaatgtaccaagaaactgtattgtgactgtcaggcaatattaaggactcacttgatgtaggtagacatgaatttaaagtgttaaaaggccaggcacagtggcttatgcctataatccctacactttggaaggccgaggtgggcggatcgcttaagcccaggtgtttgaaattggcctgggcaacatggcaagaccctgtctctacaaacagttttaaaaaatgaaaaattaggccaggcgcagtggctcacgcctgtaatcccagcactttgggaggccgaggcaggtggatcacaaggtcgggagatcgagaccatcctggcttaacatggtaaaaccccgtctctactaaaaatacaaaaacaaaatcagctgggcgtggtggcaggcgcctgtagttccagctactggggaggctgaggcgggagaatggcatgaaccccggaggaggcgtttgcagtgagccaagatcgcaccactgcactccatcctgggtggcagagcgagactctgtctcaaaaaaaaactaaaaaataaaaaattatttggatgtggtggcatgtccctgtagtcccagctacttgagaagctgaggtggca

SEQ ID NO: 36507 - DNA, 1068 bp, Homo sapiens
tcaaaaaaaaaaaaaaaaccaaaacatacactattgtgtctagtctagtgcatagctaagtaacttgctaaacagtttgattcttccaaggcttgctttacactttgttatgccttctgtgactagcccttttcacttagtgtaatgttttaaagtttcatctgtgttttagcacatgtgaaccattcattcctttgcattgccaaataatactccttttttggatatacttcattttgtttattcaccagttgatggacttttgggttgcctccgcatttggctattatgaatagtgctactgtgaacatttgtgtacagtttttttgtgtgaacgtatggttgcatttctcttgagtatatatatacatgtaggagtggaattggctagggcatatgacaattctacttttaaccttttgaggaactgccagactatattctaaagtagctgcactatgttacaatcccaccagtaatgtatgagggaattttccacattcttgccaacacttgtcctttgtcttttttgttatagccatcacagtggctgtgacgtagtatctgattgtgtcgttttgatttgctttcccctggtgactaacgatgttgagtatctttccatgtgcttttttttaacttttcttttttctttcttttttttttgttgttgtttttaagaaagggtctcgctttgtcactcaggctggagtgcagtggcatcatcatggctcattgcagcctcaaccgcctgggcccaagcagttctcccacctaagcctcctgcatagctgggactgcaggcatgtgctaccgtgcccagctaattttttttggtagagatggagtctcgctacattgcccagtctggttgctaattcccaggctcaagtgatcctcctgccttggcctcccaaactgctggaattataggtgtgaatcactgtgcccagccatttgtttattttcttaggaaaaatgtctattcaaattatttgctgcctttggttcttcctttatcttattacgtgccagaaaccctccttgccccttgactttttcattctt

SEQ ID NO: 36508 - DNA, 1034 bp, Homo sapiens
atcactttacccgggaagcagagggtgcggtgagccaagatcataccactacattccagcctgggctacagagcaagattccacctcaaaaataaataaataataaataaataaaagcaaggagattactaaaaacacactttgcatcctcttgtttctaagctgtatagttctgtgttcttaaaaaggcagttgaaatttctgttaggtggtgatctggcattgatatctttagagaaaaatccttaagtgtgattttaagatggggcagagaaggggttggaggtaggtagtacttttctaggcaaatgttttaaggccacacaagttttttgatagtgtgataacactccctagtttaaaaactttagcaggtgcttgaggaaggggagctcatggcattgtcattttcaatatgaggaagtgttctcaaagttggacttgtcagatttttgtcctttcaccttaaaacaatggtaggtattagggcaacagaagtgatttccccagggtgagaatgaagcataacaatggagtagaagcatttcctttcactttagttgacatgtggaaatccatggattatacaactaggaaagaacagtagagcttcctggagaagaggaggccctcctcaggaaaccctcctattctgtctcagccctagagctggaagtttttcctagattgctctgattgggatatttttgtttccacagccagtgctggtttcgggggtacataaaaagctcaagtctgagctctggaagccagaagcctttagccaggaatttggagaccaggatgtagacttggtgaactgcaggaactgtgctataatttccgatgtgaaagttcgggatttctgggatggtttcgagatcatatgcagtaagtagctttcatatctagttcagtgatagcagactggaaaataagcatctatacgcccagctctgcccttgaataataaattatattctggggcataatgggacttgaaaaaataaatgaataaaaaattaaaaacagac

SEQ ID NO: 36509 - DNA, 1051 bp, Homo sapiens
accctgtacccagcctattcttcctacaaggccgtgaagacaaaaaacgtgaaggaatatgtgagtggatgacccttcaccccctacccaacccacatggcacagagaggggagggcactgggtcctattacagatgggggtgactttgcaccaacactgtcagccactaacaagacccaccagcaaaggagggccctgggtgtcccacacagcgcctccaacatggctggcaggcagaagtggggtccttggtgttctccccagcccaggcatgttcaacaggcagagctggggtcctgggtgtccctggcccctcagccccgtgccccagccagcgcttccctctgtccctcaggtgaaatggatgatgtactggatcgtctttgccttcttcaccacggccgagacgctcacggatatagtgctctcctggtgaggtccagcgtcccctcctgtatctcagggcccagggcctctgcctttctctacccagccagccaaacaaaagactgggcctgggggtgaagctcctcccattcctgacaatttcatggggtccttgatatctcccctctcatgcctaacttgacctgcagaagaacagacatagtagtgccaggcgagggggctcacacctgtaatcccagcactttgggaggtctaagtgggtggatcatttgaggtcaggagtttgagaccagcctggccaacatggtgaaaccccgtctccactaaaaatacaaaaaaaaaatagctgggcatggtggcgcccctgtaatcccagctactagggaggctgaggcaagagaattgcttgaacccaggaggtagaggttgcagtgagccgagatcgcgccattgcactccagcctgggcaacagagtgagactccgtctcaaaaaaaaaacaaacaaacaaggagtaagaacaaacataatccccatgtttctttctggcggcagccagagcccctcagtggaattcaggaaacccgcttctgccatgctgcctgcgaccttaggcaggtcacagctctcgaggcctcagttt

SEQ ID NO: 36510 - DNA, 1057 bp, Homo sapiens
actttggaaatcctggagggcttttaaagttatctttaggagacagtagaggcagtgggcaagggccaaccaaaaatgctaaaagttattttccaacacaccatataacaatccttcataatcctacaatgttcccattgagtgttcatgtggttggaaacctgagcctagaatttttcacgaatcccaagaatcttttacatgggtgttaacaagcactgaatcttccaaaaatgttgtctaaatcacttccttcatacttgcaaattaaattgatttcttatactgatttttggaaatacagtaatctcatttctacatattacaaaacattataaaaggagccattgtgtctgatattctaagcccatcttgataacagactcttttgaacatggcatatgacattcatccatgaaacataagggaaatgtgctggaagacttttgggaaatcttaacattgaataaagatgtagttgcctttctgctcaggttgtcagcacatgataattattagaactacatcagagaatttgggacaagccagtacactgaggacagaaaagcagaaatagggaaagaaatctgggttccttttatttttgagccatagaaatagtatcttaggacttatttctagatgcagtttctttaatgtaagccaattctggttatttctacttggagctgaaagcaacctgaaaatagccaccttggttttcatgttagagatctaaaaactttcatgttagagatctagaaactttcatgttagagatctagaaactttcaagattctaaatgtaccaaaggtctaaggggagaaaataaaatccttcaaacaagatttgcacatgctgatactgctcattatttcattataacagcccttccaaatcttgaatttgcatttttaaccagtgttagcaaatcctgtatttccctctttgggaaatatgggaagcatgagccatggcatattcttgaagctaaatctcagggcatcacccctcacaaacaagagatcaagatgctttctgtatttatttaaaaaa

SEQ ID NO: 36511 - DNA, 1030 bp, Homo sapiens
ttaacctctttctggaacatcttggtgacatatagtagagacatctaacttgtctctaatcattttttaatttgtaaaatcaaactaaaaacctaatgatcatatttgagaaattaaaatatgtgttaaataattctctgtacacattaagaaagctgaattattttggaaattaaatatagcatcattgctgtatatcttaaatatggggaattgtatgttaatgttcagtggaatctcatgtgattttttaaaagaataacttaatcttgctgtctttaaagatattagtttgtcattttaattgactccagtttaatgttaaaaatgaaacttttaggttacaacccttgtaaacaccaatagtaaagggccctctaataagaagagaggtcgttctaagaaggcccatgttttggctgcatctgttgaacaagcaactgagaatttcttggagaagggggataaaattgcgaaggagagccagtttctcaaggaggagcttgtggctgctgtagaagatgttcgaaaacaaggtaggtcattactgctttttaggtaaagagaggcaggcctttctagaaaatcagtgtttgaagattttttttgtggtcagtattctcattcttatgcttgccaattgctcagtaacttacttagttattggagatgtattaagttggactggctcatattttaattctcattcttatgcttgccagttgctcagtaacttagttattggagatgtattaagttggactggctcattttaatcatgagagatgcttgcagagggacatctggagaatctgaatccacttctcttgggtatttcaagtaatagttaagtcttagaaatgttgtaacacaaattgataggaaagaaatgggaccgaagtttacttttcatcctgtgtaatacttctttttagttcatgctgaagagatgggtgtgataaaatggaaaaatatctacctactctgaaaatactctagaaattgtcctattgtgtcagaatagtatgtt

SEQ ID NO: 36512 - DNA, 1073 bp, Homo sapiens
tctgggtataaaggaatcatgttttgggaaattcagaattgataaaaagtaaaatggtaatccacagtttactaataattaatgctagaaaaattgtccttattatgttacaaatgtggaaggaagactttaaatacggaagataaacttcttgaaacctgcagtttttatttttagtagagatggggtttcactagttgcccaggctggtctcaaactcccaagctcaaacaatccgcctgcctcggcctgccagagtgctgggattgcaggcatgagccacagtgcccggccttgaaacctgtagttgtgtgttaggtttcttttccagtcggagaatttcaacaatgatgtaggttttttaggttattggatatcagctaaggtaaatcgagccctgctatttacaggtgctttactaacccttgggagaacttcatagatctttcgtgcctgatggtagattgcatagtccagagtcttatgtcaaattcatccctgtggcagtacccataaatgggcagtgccttagatggagataacatctccaattgttttctgaatttgtgaacaaataaccttcaatggtaaatattttttcagttttcaggctgaagataaatatttctaatactgaaaatgatgaaattattagaattccacagtactaattaggcaggtatattagtttcctagggcttctataacataaattattacaagcttggtggcttagaataatagaaatttattctctcatcattctgaaggccagaaatctgaaatcaaggtgttggcaggcttgattccttgttgggacttaggaagaatctgtggatgcctctttcctagcttctggtggttgccagcaattcttagcattccttggcttgcagacatgttactccagtctctgcctttgttatcatatacttttctttttttgtgtctctgtgtccaagtttccctcttcttataaggacatcaaccattgaattagggcccaccttaatccagtataacctcatcgtaacttgatatcatctgcaaagaccctgtttccaaataaagtt

SEQ ID NO: 36513 - DNA, 1023 bp, Homo sapiens
agtcttgctctgtcgcccagtctggagtgcagtggtgccatctcggctcactgcaacctctgcctcctgggttcaatcgattctcgtgtctcagcctctccagtagctgggattacaagtgctcgccaccacacccagctaaatttagtatttttagtagagacggggttttgccatgttggccaggctggttttgaactcctgataaatgaattcagcagaccactgtaaaaaaagaaaatccatgaagctgtagctgctacagcagcaagcatgaaaacccctgcactttttatgaaaataattttatcttgtcaacacaagataaaatgcagcttctgtgtgggtgcagggctgctataagaaaggcatacctatagactagtaagattcgagaaaaagcaaagtcattatatgacaatttaaagcaaaagggaggtgaaagatctagagttgaagaatttaatgccagcaagggatggtttgatactttaagagagatgtggctttaaaaatgtcaagataacaggggaagcagcttctgctgaccaagagaagggttcccaaatgccattaaaaagtgcagcagaaggccaggtgcagtggctcacacctgtaatcccagcactttgggaggccaaggcaggcagatcacctgaggtcaggagttcgagaccagcctgaccaacatggagaaaccctgtctctattgaaaaaaaaagaatagaaaaattagccaggcatggtggcgcatgcctgtaatccgagctattcgggaggctgaggcaggagaatcacttgaacctgggagacggaggttgcagtgagctgagatcgcgccactgcattccagcctgggcaacaagagcaaaactccgtctaaaaaaaaaaagtgcaacagaagggtgggcacggtggctcatgcctgcaaccacagctgcagacttcaattcacagtatgtatcaggcagttcggctttttcttacaatgtcatgacttttctttacctcttggtagtactt

SEQ ID NO: 36514 - DNA, 1037 bp, Homo sapiens
aacttaattcttttgcatattgcacttgtcctagcaccatttgtggacaagaccattcttcattgaatattctcggcactcttgttaaaatcagaatatatttctggattctcaaagttgattgatctctatgtttacatttgttttggttgaccagttttctcttacaagtctggccttcttgtttttgacagtcttggttctcttcattgtttcttttattgcagaatcttcctctccttactctgctgtccacagtctcgagggtcctaacttttttttttttctaaatctttcccaactcatgtgttttcatacatctctggctttcttctcccgctcagaaaggccctagcttgcaacctttaaataatgtactgtgcttaatcaaaggtgatcagatcttttgacccctgcctttgtaatttactactactctcttctgggctctcactgtagctttctgatccatctctctggttaggtttattgtatgtactttagataggttaatcctctttactttgacttcactctggttgagggaattgaattctgtttgtctctggcctttctactcccatcttctgcttcttctaagcatatcccttactcctcagttagactagataattcagactagatattatgcctctaagcctaattaatatatgaattatatattaatatataatatacaagccttattgtatacctcagcatgataagtggttctacaaagagcataaatactggcattacaaatcctgactctgccatttactagttaggtggcagggatttagttagttaatctgtataagctttagttgcattatttgtaagccaaggctaataccacttactctctaggtgggtgacagaattttaaaaatatgtgtagtgccatagagtagatgttggacttttttttttttttttttttgagacagactctcgctttgttgcccaggctggagtgcagtggcgcaatctcggctcactgtaacctccgcctcctgggttcaagtgatttt

SEQ ID NO: 36515 - DNA, 1027 bp, Homo sapiens
aaagtgatccacctgccttggcctcccagagtgcctggattacaggtgtgacccaccgtgcccggctacatttgcccattttaaaatcagattatttgagtttttgctgttgagttgtttgagttgtttgtatattctagatattaatcccttatcagatgaatagtttgcacatattttctcctgttcttcaggttggctcttcactctgttgattatttcctttgttgtgcagaagatttttagtttatataattccgtttgtctgtttgaatataacattccattttttcctggcctgtagcgtttctgcatagaaatctgcgttattctaatgggaattcccttttatgtgacttgatgcttttcacttgctgtctttagaattttatctttgtcttttgacttttgacaatttgactataatgtgccttgggtgtataactacccactaattataactacttttttgattcaatctctttggggactttttgggctttttggatctgtatgtccatatctctccccagacttgggaagtttccagctattatttaattaaataggttttctatgccttttcttttctccttctggaattcccatgatgggaatattggttgatttaatgctatcctataagttttgcaggctttcttcactctttttcattgttttttgtttgtttgtttttcctctgggtaatttcaagctacctatcttcaagttctgagattttctttttcttggtgaaatcttttgaaactttctattgtattttttattgaattcttcgttgttttcaccattaaattctttagctgcatgatttctgttggttcttcttcatgcattctttttgttgaatttctcatttacatcctgattttggtgaattttctatttgtattttattgtatctctttgaggttccttaagataattattttattttatctttttgagacagactttcgctgtcatctgttgcccaggctggagtgcagtggcatgatcttggctc

SEQ ID NO: 36516 - DNA, 1420 bp, Homo sapiens
cattttgccaagggtggtctcaaactcctggactgaaagcagtctgcctgccccagcctcccaaagtgctgggattacaggtgtgagccaccatgcctggccaagtagtttctaaagagaccgcatggccccagagcctaaagtatttgctatttggtcctttatagaaacttgccaatttttaatctgtttcaatcagctccccagtagctgggactgcaggtgtgcactgccatgtctggctaagttttgtatttttagtagagatagggtttcaccatgttggccaggctggtctcaaagtcctgatgtcaaatgctatacccacctcagcctcccaaagttctgggattacaggcgtgagccatggcacccagcccaaccaattaatttttctgaaggttttaaattataaattcagtttcttcagtagatataaaactaagttatgtattgtttcttgggtaaattttggaagattgtggctttcaatgaattagttcattttatccacttagttgattttgtacgcatggagatgtttgttgtaatctcttactatccttctactgtttagcatctgtagcagtattctctgtttcataactattcttgataatttgttttattttttctttctttgtcaatctggccagaagtttatcaattctagtgatcttttgaaaaatccagctttgggtttcattaatttttttttcctctaatacttccaatttcatctgtttctgctttttatttatttatttttctgtctgcttattttgggtttattttattctatctttactagtttcctgaggtgagaacttaggttattgacttgagacctttcttctttgtgtaaagatatagtggtatagatttccctaatctaagccctgctttgtctgcatccgataaattctgatacgttgtattttcattttaaaattatttttatttttttgttgttgtttgtttgtttgtttttaagagatcgggtctcatcgtgttacccaggctggtcttgaactcttgagttcaaatgatcctcccacctcggcctcccaaagtgctgggattacaggcgtgagctaccgtgcccggcctatattttcatttttgttcagttcaagatattttaaaattttcctcgagtcttcttctttgatcactggcttatttagaagtatgttgtgtaatttccaagtatttggagattttcttgctatgtttctgttactgatttctagtttaattctaattccatatggtcagagaacataaactttgcatgatttcaattttttttaaatttgttaattgagccttgttttatgacccagtgctacctttgtaatgttctgtttgcacttgacaaataatatgtattctgctttttattttttttttctttttt

SEQ ID NO: 36517 - DNA, 1050 bp, Homo sapiens
tttttctttttttttaagatggagtctcactctgtcacccagactggagtgcagtggcatgatctcagctcactgcaacctccacctccgggttcaagcaatcctcctgcctcagcctcccgagtagctgggattacaggcgcataccaggttgcctggctaatttttgtgtttttagtagagacagggtttcgccttattggccagactggtctcaaactcttgaccgcaggtgatccacccacctcagcctcccaaagtactgggattactggcgtgagccaccatgccccaccatgattttcttaataacattttcttttctccagcttatttttgtaagaataccatatatcatacatataacatataaaatatgtattattttgactgacggtattaaatatgtgttatctaatatggactgaccgtttatgttatcagtaatgcttctagtcagcagtagctattaataaaaatttttgggaagtcaaaagttatgcagattttcgactgtgtggagcagggggttggcacccctaaccccagtgttgttcaagggtcaattgtagtttaaaatcttcccttccttttcccatctgtactcactgagtcgtcatccagggtggaggaggtcatgtagggatcttcatggtcctagtgtgtaagcacctgtgggacctccctcctaggagtggcatggaaggtgctgctgggatggacatcaaccaacccccaaggtagaggccaagtcgctgttggctagatacaggcaattggtacctttccgaagctctctgtggtgttagttcactgtaatggaggattcagagaggggcagccaactccatgccctgtgagcctgggacagttgtttgtccacttgctcaggctcttgacagagcagcttcttactgcatgacagctttttaggcactctcccttctcaccactttacctttactttcttcttatcctagttttacctctctctgaagacaggtaatgattagctgccccttttttcagtggacacatttgacattgtag

SEQ ID NO: 36518 - DNA, 1069 bp, Homo sapiens
agccttcctaaaagactgaaaaagttgtctgtcatgtacagatgtctaatctgttgatctgacacaggggggctgtgagtcatttcctcaacagctcagatttgagcttgggttttcctgaaaccagcaaaacccaaggccgattgtttaaatgttttctgaaacctgctcttccgcaaggtccaaacttccacacagtaggcacagatggtacaaaagagggctgcctgatctcaaactagtggttgtggtgtcagtcttagcctacctcttcgaatagtgggaatcagagacattttagttgttaatacaagtaactgtggtaggaaagataataatttattctcctaacaaatccagagatacttctcactgttctacgaagtcttggctctgctgggttctctgtggaagttaactgctccaagtgtttttcttttctcttctcttctcttccgctcccctcccctcccctcttttctcttttctcttttttgagagagtctcgctctgttgtccaggctggagtgcagtggcgccatctcagctcacttcaacctccacctcctgagttcaagcaattctcatgcctcagcctcccaagcagctgggattacaggggcgtgccaccacgctgggccaatttttgtatttttagtagaggtgaggtttcactatgtggccaggggtgggtctcccaactcctggcctcaagcagtccgcccacctcggcctcccaaactgctggtattacaagcatgagccaccacacccagcctctttctttttttgggacatggtcttgcagtcatggcttgctgcagcctcgaccttctgggctcaagctattctcccaactcagccttccaattagctgggactataggtgcgtgccaccacacccagccaatgaaaaattttttaatgtatagagatggggtcttgctatgtagcccaggctggtcacaaactcctagcctcaagtgatcctcttgccttggactggaagccactgcacccagctcagagtgtttctcattctaacctcaggatcttctttagtctcatt

SEQ ID NO: 36519 - DNA, 1051 bp, Homo sapiens
tccaggtccagcagtttcctcttgtctttgcttccttcccaagttgcatgattataaacacatttactgggccgggcgcagtggctcctgcctgtaatcccagcactttgggaggccgaggcgggtggatcacaaggtcaggagatcgagaccatcctggctaacacgataaaaccccatctctaccaaaaatacaaaaaactagccagatgtggtggcgggcgcctgtagtcccagttattcgggaggctgaggcagaagaatcacttcaacctgggaggtggaggttgcagtgagctgacattgcgccactgcactccagcctgggcaacagagggacactctgtctctaaaataaaataaaataaaataaatacatttacttctaataacccataagcaccttgtacctaggaatcctactaattatcctctcagcgcattttcatactactctcattattcacttattcaatgaatacagccgaaggatctgaatagacatctcttcaaagaatataaacaaatggacaataaacatatgaacggtacctgacatcatcagctatcaggatggtggtcacttcagatccactagcatggctagaattaaccaaaaagggggaaaataacaagtgttagggaagatgtagggcactgtaaccctcatacacactggtgggatgtaaaatggtacagccactttagaaaaaggtaaagcagcttctcaaaagtttaagcacaaagtttactatatttcccagcagttctactccgttcccagagaagtaaaaacacagaaacgtgtatgagcgttcatagcaacatgattcataatagtcaaagagtggcaataattcaaatgttcattaactgatgaatggctaagtaaaatgtggcatggtaatataacagaatcttattcatcaacaaaagggaacaaagtactggtacatgctacacatgagtgaactttgaaaacattatgttaggccaggagcagtggctcatgcctgtaatccgagcactttgggaggtggtcaggagttca

SEQ ID NO: 36520 - DNA, 1055 bp, Homo sapiens
ctacataaagtatgaaacattgttttcattttctttgtgtgcagcagccctgcatacgctgcatgccataaagatacccagggcagagggtacaaagaagaggctctattgctacacgttgtagactgacattctgacatcttttatggagaatgccagttggcatggttcctggggggcaattaggtaccatacttctactttaaacatatatgctttttaactcgtgatctaactgctagacattttctctaggggagtgtcacaaatatttgccaaaatacctgtataaggatgttttcttcaaccagaatgtctaaggaaagactgaataagtgaattatagcccctccatctattcagtagggtactatgcagccattaaaatggatgaggtagatctgtagggccagacctagaaaggttttcaagtgaaaaagatacaatagtgtccataatataattccttttatattcatttacatatagttgtctgtattttgtatggactgttatatgtatgtgtatgaatttttttctattagaagcacacctataaataatgtattgaacagttgttcatgggtacagattgttgtgtctactcatagtggacctatgctgtttccttagctaaaatgatgtatggtttcagttaagtgtgggcagagcctgtccccctctgttgaacagtggactcgcacctccccccatcaggttcagttgtggagagcaggctgggtgctctgtcctgggtgtgtggtagcctcagcgaggctggggctttcctagagacaagtgtttcatgagggtagagaatattactttggtcagcttcctgaagtggggaatattactctaaaaaatggcacactctttcctggtttaggttcatctagaaggcggccaggatgaattcaagaaagtctaaatggattaaaaaaaaaaaaaaccgtagaagtatctagacaaaggttaaaaaatccttggtggaagtttgggtcacttttgaacggaaaggaatgccatacttcattgattctgaaatagggatg

SEQ ID NO: 36521 - DNA, 1041 bp, Homo sapiens
agccaaaattaacctctgctattgtctcttatgtctcagttccctctctccccctctgggcaggggccgagagcagccagaagccatgtggccagtgctgtggaaggctggtgtgcctagatgggcccaggtttcttcatcctcagcactgtgtttctcagccaccccgtcttcatccccctattccctcacactgataggtacaaaaatacggttcctaccgcctggaaattgtacaatacatttcatttggtgttttaagcctgatcaagagaagctctttctcagttacagtttttctctgtagttaacaagcctccccaccattttccctgaaatagccaaactctcagcctcatctaggccacaggatgtgtgagacacaagcctccttacacaagccaaagattgtaaaggcatccttgactcccacacaatcggtaatagggcctattgcttccattggccaaatgtatcttgacacaaaccagtcttgtcctttctgcagatctccatagccacttggactactgtggccgctcccgatttcctgttctttcctctctccacttccttctgcatccagctgtcaatactgtcatctgaaaatgcagatcacatggctctgccctgcttccatgactacttagaatacagctcatctccagtatggtctgcggggtctcagttcataccactctctgtggtgtactttgctccagcctcactggaagaaaatgtttgcttgctataaacacttgagaggtgctctgtgtttctccctttgggtaaagctttctaggctggtcctaatctgggagcctctaaaactctgagatgtggagcgagacaggaactgggcaggggccacccttttctctttgaccatccccaactgctttttttcttgctttactttactcacttgtcttccacctcagcctgcagtgagtggcttttgtcatcaggcattaataacgcaaagtgcctcagagcagaagagttaactatttgtttacttagctaaaaacatctggactt

SEQ ID NO: 36522 - DNA, 1098 bp, Homo sapiens
gtgacagtctgcatgtgcagttttcaggtaaatatccctattcattccaacattgactacctcctctgtgccaggcctgtgggctagttggtatctatcaggaaacaaatgggaggtaaattaacctgtatttgtaagatccatgaaggaaaggacaatatatcttgttttattcactgctagatcccaatcgcagtgcttggcacatggcaggacctccctgaatgttgcataaaacaactgaaaacacagaaggggattcctgttaaagggtttgacaacagggtctgcaattagtgcttccacgcctgttttgcagtcaatattcaactgatacgtcttctacctggagtgcctaggtatctgaaacaaataatgagaaagctgtttcaggaatcatccagcggttgtcagctatccaggctcatgtggtgcctgtgatggtgttacactgttggaagagcaaacactgtctttattgaggtttggctccaagcactgttttggtgttgtagctgagtacctttgggcagtgttttgcacctctgagagtggaatgactcctgtggagttgatcctagtctgggtgcaaacaatttttttctgtttgcagaaaaagacaggttgtcttagggacagcctgtcattctttacctctttgaatcctagatgccttcacctgaatgacatctacctccatcaggaccccagatgtctgacagccctgtgtgacaccaagataagtaacgtatgtagtcttcttgtcatgtaggtcccaattaaattactatagctcagatgggggtaggggacttaaaattatgatgtgaaaaattatgtagagtatcagacttttttttggggggggacggagtcttgctcagttgcccaggctagagtacagtggctcgatctcggctcactgcaacctctgcctcctgggttcaagcgattctcctgcctcagcctcccgagtagctgggactacaggcacctgccaccatgccaggctaatttttttattttaagtagagacgaggtttcaccatattggccaggctggtctgaaactcctgaccttgcgatttgcctgccttg

SEQ ID NO: 36523 - DNA, 1027 bp, Homo sapiens
tttttcgtactgcgtcgtggaacaagccgcctgcagtacagtgcgaggcgggtgatttgcacttgtttagtcaagtcacctcacatcctttttctctttatcaaaatagtattagtccaggttcctccagagaggatcgtgtggtgtgggaccttccggtttccagacaaagggttttggagtaccgtggtgtagtcgccgcatcgttctttgcatttcgagctctgtgccatgttctgtgttcggcatttaccgtggatgaatatcccctaggtgtttatcctgctctgtggccctgttctgtggaatattcctattggatcagttacagttttttagccagatatttctagaacggttatggtggttctgaaatggctagtctttcgggcgcgctggaataatgtgaagaatcgttgatttcgtaggtaggggtcacgagattttgtattggtactgcgttctgtgttttaaaccttggcttaagatttctgaatagtcggtaaaatacatttttctcccagggaaatctaaacagttgactatgcggacaaaaatgatgtttcaggctattttaataaatgtttaaaatttccctttaaaaacatttctttactaatggctcagtcatctacgcagtctatcgacgtttttcacagtattgttttaaaaatcaagaaaggcttgacattttcgttgcaaaaacgctctggatgatgccttttccacttaaatagaatgtttttgcaaactcgaaattaaacaacattaaaatactgcatgaagtttcttggttatgtaagatttggaaaagatcatttagccagatgtgtgttgaagtgctttaaatttgtatttcttcctttgcacttaacagtatatacttagaacattactttgtactttacccagagaagtttcgctttatcatctttatatatttttcagccgtgtacagcttttatatcacattttgaactaacttggaaggatttaactacccttgatctgtgcatttgttttagtc

SEQ ID NO: 36524 - DNA, 1050 bp, Homo sapiens
acttgaacccaggaggcggaggtagcagttagccgaggtggcgccactgcattccagcctgggcaacagagcgggactccatctcaaaaaaaagtaaagtggatgattgacttaacatttgggatggacagtgctaagtttgttgggatggattggaagggttataggctgggagtgtagttttgccattttctgtatatgtggttggttattctaaggcacaacgctgtccaagaaataaagtgctgtaatttataattattagctatgtagcaaacctttctcattggatcattaggattaagggctctgaagttcttgataaaagtttatgtgtagaaaatttaatggataattaaaagtaaaacagaaaacaagcctatgggttgagttttagatatgtacctttaaaggggttttatgtgtaatttaaaaaattgagtataagtgttaggttttaacgcatttctattataatcctatttgtaatacagtaaaagttacatgataaagtgctgttatctgacctaacctgaatataatttattactgtggcacttctgtgtggatggagtgcggagtgcctttgatgtgatgtataattttccagttgtacatcaagccctaatgttctctgtatagataaagctcaaggctctttggaagtggaaaataaaaagtgaagtagtaatgaaagcttaggtttgaaaaaattttaaagctattccaaaatttaaagtatgcttgctccccacccaccaaaccttaaaaacatcttatctgacattctctttaatgtggttcaggcagaaacaggttagtaggaaaacaagaggggagcttgcctgtggagaaggagagagtagttgcagatgggtaagaaaagtaaaagcagagtgcctatggtaaatgtcttagtgggccagcagtaaatgcagcaagtatggaaagtagtcatttaattaatattagggagcagtattatctgcatttacttcatgaagatgcataactttcagatcttttaggatgatgtgtttggtttttttc

SEQ ID NO: 36525 - DNA, 1034 bp, Homo sapiens
ttcttgaattgaaaataagttggatgcttggtttgaaagtcctgaccgcaggaatcaatatttttgtgtgatttatgacaaaaatcaagcagctaccttccaaatggtgctgctttgaaattactgacagtcaactatgtctgccatctatcagtgacataggttaagacatttttactaaattggtattgttgattgctacctaaaacatatttggtatattttcacatgaataagctaataaatgatcaaggtgattggccttgatagaacatttggaaaatctgagcatttcttgcaattcagaagaggaaaatataagaaactgtagttttctagctgttgcttgtaagtttcaatgtgaagttaaaataatgtcattatgaaggtatttttttccctgagtatctctagttttatggttaaaccataaataatctttcatagttttatgggtaaaccatctcaaattagttgttttttttttttttaattctgactacaaagactgagaagagaaaaattatttttttatttgttttgttttttgagacgatgtttgctctgtggcccaggctggagtgcagtgccccaatctcggctcagtgcagcctccatctcccaggttcaagtgattctccggccttagcctcccacgtaggtgggactacaggtgcgtgccaccatgcccagctaatttttatatttttagtagagacgaggtttcaccatgttggccaggatggtcttgatctcttgacctcgtgatcaacccacctcggcttcccaaagtgcagggattacaggcgtgagccactgcgccctgccagagaaaaattatttaaaggagtgattatctcacacagttgagagcatagctgaagatccatgtggagtagtagatacctcttagcattttgggaggtcaaggcgggaggattgcttgagcccaggagttcgagaccagcctggccaacatggtgaaaaccccctctctaccaaaacaatgaaaactagccgagcatggtggcatg

SEQ ID NO: 36526 - DNA, 1378 bp, Homo sapiens
attgggaagaaaaaaggcactttagaagagatagttttgatgatcgtggtcctagtctcaacccagtgcttgattatgaccatggaagtcgttctcaagaatctggttattatgacagaatggattatgaagatgacagattaagagatggagaaaggtgtagggatgattctttttttggtgagacctcgcataactatcataaatttgacagtgagtatgagagaatgggacgtggtcctggccccttacaagagagatctctctttgagaaaaagagaggcgctcctccaagtagcaatattgaagacttccatggactcttaccgaagggttatccccatctgtgctctatatgtgatttgccagttcattctaataaggtgagttaactcaacagatgcttctaatttcttttacattgtagtgcctatttacctatatctttgactctaattctgtagtctgatgacattgagttgatcaagcatttttaaacttttgagaacacttactttatttggaaggtaattgtttttgagcattttaaaccagggctttacattaatatattctgcctagattacttctggccacaaagctatcatccactgagattatcttgttggtttttggcatcaatatgttcttcttaatcatatatttaagcaggttttttttgtctgctttgttgaattgttttaagtattttttttgcagtcaatgtgctctgccattcaggatgctagatttcagctctccatctgtcttgattgctgatttgtatgtagtaaagatgtattcttgaacaattctctttttttccttatctgtggctacagggaaagagttaatgtagagccctggtgtttgtttcagtatgtttcatattttagattagttcattcttccttttttaatttccctttaacacaaactctcatactatgactgaaatttttcatcattttttttctccttttccacaactttcttaaacatacttcaaaactcactttttattatcccatgttacatctgtccctttagagacttggacaaatcaactactacagtatcctgctctgtgttcctcataaacaaattctttttctgagttaggcttagacttctgaaatagtcatttgaaaagaaaatctaattctcctttgctttaattatcacatctggcaaaatgggaactttttcaaaatgcccttttaaatatgttgtcctttctctttcaactttttcagtgttactcattctgactttttttcccccaatatatggtgcagttgacttaaagtcattgttatagcaccccactagcttgatctataatctgtgaccgtccattttttcctgatgtgctcta

SEQ ID NO: 36527 - DNA, 1030 bp, Homo sapiens
gcagtttttacatattttgatgaaactatggattcaagagtaagatacactaccctagtgcaagaggtacttttagcctgtaaaaatgcttaggtcctagctagttttggtattctgtcaaaatactgagtacatttgagaactattttagaggccttttgtttaattctgtggtttaaatgtgtaaattggaccaactttaagaagtttaaacacatggattatctgaatttctagttttctagttgctttactatgttttttacgtatatgcattatattgaaaaaatctttactcactttagcagtggaccctctataaccgctatagaaatgaccttagagaaaatttctgtgatggaagtagataatgaaaaatttttaaacatttaatcctgctctctggtattgctgcataacttggaaaatctgttctttttacttagtggtattgttaaatagtctacatgatcaaaaattcttactgtgaagtaagaaacttaagttgaaaataatttgtcatggagtgtcattatttttaggtgacttaaagtgatggtggtgtttttatttctttataggtcattttaggtcatcaaattgcttttcttttcttttctttttttctttttttttttgagacggagtttcacttttgttgcccaggctgtaatgagtgcaatggtgcgatctcggctcaccgcaacctccgcctcccaggttcaagcaattctcctgcttcagccttccgagtagctgggattacaggcatgcgccaccacgcccagctaattttatatttttagagccagggtttctccatgttggtcaggctggtcttgaactcctgacctcaggtgattcactgccttggcctcccaaagtcctgggattacaggtgtgagccatcgcacccagtcatcagattgcttttctatgcaatctcaagctttctcagcttcctttcacttaaagaaaattacccactacagcactttggctgtcttgtcacttgagtttatattaagtt

SEQ ID NO: 36528 - DNA, 1424 bp, Homo sapiens
acatgctctaaaaatgtaaaagatacggaaaagagggtaggttattaaaagattctaattcattgtccagcaaaatccttggtgatgaattttttttttttttttgcttttgagatctttggttttgagttcaggctgctaccatgaaatggaattcctaaagaaactccctgcttaagcagcacacagtgcccattgttcactggagttggaattttcacatatgcctaactctgttggggctattctttctttctaatgtcacaactcaactgtgctcttggtattaatattggagaaggaaaatctgtgctctgttcttgtttctatgtaacccacatttctaattctttgtgcggcacttcctccttacaatttaacaaatagaggaaaaacttaatttcaacattatctgcatttgcaagcaatacaaaacaagtttattctcgtggattattttgaagttctgaaatttttcttttgaaatatctattggaaatgctttaaaactatgtttctaacacttagactctcagataactttactaataaatgatctctattttagaggccaaacaaggctgttttgtgaaaaggacagttttattttaaagttaattttctggtctttttaaagctacccagaatggaatcctgacaatgatacaggacacacaatgtaagttaaattttttaagctaccatttgtaaaggagatcaatgtaaggaattcaggtttcactttcaacatttcataaacaaagtattttcagaatttctttactgaaaatgagactttgataaaattcactttggttaacaatttttagaatatatattatgtagtaatttgtattcttttattgttaatgtagactttgacctagttacttcacagatactctgaaagattgaagtggttgtggtcatatattggggtgctttaacatttaatcttaattctttccaatggacctctttattatgatttatattttatgtcttcactttactaggggtgatccattcatgttgcagcagtctacaaatccagcaccaggaattctgggacctccacctccctcatttcatcttgggggaccagcagttggaccaagaggaaatctgggtaattatataaaattcatgttacttttccctacagagccgttactgaaaatttttctttttatttatttatttgagatggggttttgctcttatcgcccaggctggagtgcaatggcacgatctcgactcactgcaacctctgcctcctgggtgcaagcagttctcctgcttcagcctaccgagtagctgggattacaggtgcccaccaccacgcccagctaattttcgtatttttagtagagacggggtttcaccgcgttggccagactagtctcgaactcttggcctcaggt

SEQ ID NO: 36529 - DNA, 1163 bp, Homo sapiens
aggcagccttatagtgtagctttgaaaaaaaaaatacaggacgtgagtttgcagtaagttaactgacccaacatagttaaaacttttgccactcattcaaaaattattgaataatttttcctatttgagaaatgttggcctggtcagataccttagtatcctttaaaacaattttatttgaacaagtaagtcatttagaagccatgtataaagtgaatataaatataaaaatacacacatgctataaagaagagtaaacaaaggacccacattgagctgactgcctagcttaaggagtagggcattaaaatgcctttgaggcaaactttttatgttaaatggctcataaaatgtcggagtcaggcgggcccagtggctcacgcctgtaatcccagcactttgggaggcccagcagatcagttgaggccaggagttcaagaccaacatggtgaaaccccgtctctactaaaaatatgaaaattagccgggcgtggtggcacatacctgtagcagctacttggaaggctgagacaggagaattgcttgaatctgggaggcagaagttgcagttagccaagatcacatcactgtactccagcctgggtgacaagagcaagactgtctcaagaaaaaaaaaaagtagagcgaaatgagatttttgccatcctattccatattccattggttccttttatgcaacattcaactcaaaaccaatatttacctcagtttttatttgatggcttggtcaaataacttcattaatttttctcactagagctgatcattatgtttacatttgtaaatgctaataattactgatgtttatggcatttaatgccatacgtttttctaagtttaaatttattaatttaatcctcacagtaaccatatgcatctcatactgtgatctccagtccataaatgaggaaaattgaaatatggagaagttaaataatcccatactgcttataagacacagagccaaaatttaaacttgggcagtcattcttcagagcatgattgttttttttttttttttttttggagacggagtcttgctctgttgcccaggctggagtgcggtggtgtgatctcagctaactgcaacctccacctcccaggttcaagttctgctgcctcagcctcccaagtagctggga

SEQ ID NO: 36530 - DNA, 1051 bp, Homo sapiens
ctggtgacaaaaatgatgatggtttggttgaaattaaggtggacaagatcgaggaacttgatcaagaaaacgaagcagcgttggaaaatggaattaaaaatgaggaaaacacagaaccaggtgctgaatcttctgagaacgctgatgatcccaacaaagatacaagtgaaaacgcagatggtcaaagtgatgagaacaaggacgactatacaatcccagatgagtatagaattggaccatatcagcccaatgttcctgttggtgagatttaagtctttgttcttcaccttcctcactctcctcaaaacaaactcttaggttttaaaataagattttaaagttggtcttacataagctgtgatagcattttaaatttgctttgtttctatggggaacaatttataaatcttaattgatatattttcctctcatgcatgtctctgattttgtattattttctgttgttattccacaatgtgttcccttttttcgtaaaatttcttgcaagttacacgcttttgttttgcttttctgtgttgtttttctgtattatatttctttttttaagaatacagttaggtgagacctcaaacatcaattaggtaaaagcaaaatatggttcggtttttgttttttatcttaggctgtattggacttctcaaaaacatgttgtttcatttaaattatgttgacaggtgaaattgtgaatactaaataaaatcttcagtttaatttgtaagaatgtatgtttgtatttctaggtatagactatgtgatacctaaaacagggttttactgtaagctgtgttcactcttttatacaaatgaagaagttgcaaagaatactcattgcagcagccttcctcattatcagaaattaaaggtaaggttgaatgtaaaacagttcttttgtgaaaacttaacaagttatggaaataagtggggtatataagtaaaatgtgtatagtgttctctctagactcagtgcagtgctttctcctgaagataactttttatttacttttttttttttttttaaagacagtttctc

SEQ ID NO: 36531 - DNA, 1546 bp, Homo sapiens
cagttagtgaaagacaggatatttggggaaaattagtctgtttatactacttgtcagttgtgaacttgaataaaactttttcacacacacacaaaatcacaggataggtaacttgacaagaactatagaacccacttgtgtttctttaagggatggaggttagggaatggagatttcctctaatgattcaaggctgtgcacgttgctccttaggaactcaaattgaggtaggtaatttcaccctcttttggtcagaatgagtttatagcaggcttttccttaaataagcactctgcactttattcaggtttatcactttatgactctagagtgtgatgctccagttttagtgaaaaacttgaacacttagcacagcaatttggttgatactgtgggagattaaagaatgtggaaggcaagacctctgcccccttgtaatctaataaccttttgtgcttttaaaacattttcttgtaatttacatcctattgtcattcattatcatgaaacgtgaaatgggcagagcaagtttttttttttttttttttttgagatggagtctcactctgtcgccaggctggagtgctggagtgcagtggcgcaattggctcactgcaacctccgcctccccgggttcaagcgattctcctgcctccgcctccctagtagctgggactacaggcgcttgccaccacgccggctaattttttgtatttttagtagagacagggtttcaccgtgttagccaggatggtctcgatctcctgactttgtgatccgcccccgtcggcctcccaacagagcaagttttatcttgcccatttgggaattaaagaaatagaagcctgaaagattatttttatttagcaaatatttatataacaataatgccaggcattgttctcattgcctttacaaatattaactaatttgatccacaacatagctagaaggtaggccctactgtaaaatgaagataacaaatgagacgtgaagtaactttcccaatgtcacagagctatgatagtcggaattcaaatccagatagtccagagattctatgctcttaaccattatgtggtgctgtgtgatttagtgacaggtctagggtactttaaggtggctatgtagcatagctgggatttgaacctacgtcttctgactgtggtctaagattaaagttgtccaagtcattgcctttgtgatctagaccacctgttgcacaggtgcatgaatagtttgcatttgatataggctaaggttcagttccaaaaaactcccttttttcttaattttttcattgtttagagtggtgctgtccaatgatgtaggtactgtgtgtggttatgagcacttgagatgtggctagtgtaaatgaagaactaaattttaattaaatagatctgtgtagccgatggccaccatattggatgggcacacgtttggagaatttgaatagcctctgcttcttatatcagtttgtataaatttgggtggcatttctaatgtacttgagcttttatcagttaggatgacccattcttgc

SEQ ID NO: 36532 - DNA, 1131 bp, Homo sapiens
atttttctaagaaaaactacatttgacatgtgacatcttcaggaattcaatatcttgtttctttgacagagggacgctattcatgtctgtgaatttggcagtctttgaaatgccatgtcttttttggaaaaagcttttgatggactttattttgatatacatcttaaggtcccctgacctatactataagcagagcatagcaaagagggtcattatgaacattgtgtgtagttctgggcagggcttgggatcctttgggattgttggtatctacaccacatggccccaccctgctatgttttaaggttttctgctgactttttaggtcttcagccttgattttgatgctttgagtgcctgcctctagcagcaccacccccagcccttttccagttggctgcatctcatctgttgtgggctaagaaaccagatcacagagcttattaaaattgtgtctaaaataagatccagtaggctcttgactgaagagggcttcatgtgctctgtgaactgtgtggtttccttggctgatcggagacctttctgacttgcttcctgtttttcttctttacttttgctatacagatgtaggaggctttttggtgctcttagagtgctgtaatgttgaagtatttggttaatttctctattcttgggaagggtaaaaggctaaataaatatcttgattctttgaggagttgaagactgaccagagttggatactaaaagcttttcttaacagtaatagtgcattgtacattttaatggtgtcctactagttgcagataacgtttggcatacatagctttcaaacaaagtaatgccaggattatcacttgatctatttctgtgatagagattttttttctttctttttttttttttttgaggcagtcttgctcaggctggagtgcagtgtcatgatcttggctcactacaaactctggctcccagggtcaagcagttctcttgcctcagactcccaagtagctgggattacaggcactcaccaccatgcccagctaatttttgtatttttaatagagacagggtttctccctgttggccaggctggtcttgaactcctgacgtcaggagatccgtccgtctcggcctcccaaagtgttggga

SEQ ID NO: 36533 - DNA, 1021 bp, Homo sapiens
tggagatcgcgccgctgcattctagcctgggcgacagagcgaaactctgtctagaaaaagaaaaaaatgaaaataaaaaatactgtaggccgggcgcggtgactcacgcctgtaatcccagcattttgggatgccgaggtgagtggatcacgaggtcaggagttcaataccagcctagtcaagatggtgaaaccctgtctctactaaaaatataaaaattagccgggcatggtggtgagcacctgtgatcccagttactggggaggctaaggcagagagttgcttgaacccgggaggtggaggttgtggtgagctgagatcgcaccactgcagtccagcttgggcaacagagcaagactccgtctcaaaaaagaaaaaaaaatactgtactagaggtgtggtaccatatattagattaatattagaggtaaggactgattgaattcctatcaaaatgatgaattaacaggtagtcctgtggagtattgggaactttaataaatggttgtctgaatatggctatttaaattagttctatcttggatagttctatcttggataccttcttactccaaaaggtgagcttcttcacataagttctgggaatttttttttccccactaaaaaagtattttttatttcctttacaaaagatcattgaattaaggcactttctttggctctactagattgttatttaaatataattcaaacagccatcgaggataactgttaataaatctaggttttctctgaagtctcccagtgtatattactgtactgatgactgacaaggaagaggttttgacaaggtccaattctgtatatttctcttaaaatatcctaggcagttcccaggataggagtatctgactcatgcctcatgctaccaggaacctttgcagcctcatcccagaaatgcagaaacacacttgttttgtctgtagaaataaagttttgatggttagatttccaggcaaaccttcaaaatcatgttaaactataatatagggaaataaag

SEQ ID NO: 36534 - DNA, 1901 bp, Homo sapiens
aaatcatgcatacttgtattaaaattgagagcactggctggatatggtggctcatgcctgtaatcccagcactttgggaagccaaggcaggaggatcacttgagctcaggagttcaataccagcctgtgcaatatagcaagaccctgtgtctacaaaaaattaaattagctaggtgcagtggcatgtgcctgtaatccctgctactcaaaaggccaagacaggaggatcgcttgagcccaggagtttaaggctgcagtgagctgtgatcatgccagtgcactccagcttgggccacagagcgagatctgtctcttaaaaaaaaaaattgacagcacaaattacctcagataaattaattattattcttttttttttttttttgagacagagacttgctctgttgcccaggctgtagtgcaatggcgtgatctcagctcactgcaacctccgcctctcaggcccaagcaattctcctgcctcagcctcccaagaaaagaagctgggattacaggcatgcaccaccgtgcctggctgatttttgtatttttagcaggtttcaccatgttgaccaggctggtcttgaactcctggcctcaagtgatccacccgcctaagcctttcaatgtgctgggattgcaggtgtgagccaccatgccccacctgatctcagataaattaattaaaatatataatcaaaataatgtcacaaacagaattattaagaattatcaagatgaggctgggcgcggtggctcatgcctgtaatcccagctctttgggaggccgagacgggcagatcatgaggtcaggagatcgagaccatcctggctaacatggtgaaaccccatctccactaaaaatacaaaaaaattagccagacgtggtggtgggcacctgtagtcccagctactcaggaggctgaggcaggacaatggcgtgaacctgggaggcggaacttgcagtgagccgagatcgcaccactgtactccagcctggacgacagagcgaaactccatctcaaaaaaaaaaagaaaaaaaaaaaagtactatcaagatgaaacatctgtcattcttattttgctatcagttttaagaatagtatttttcttacataataaaagtcatcctcatcaggtactcctttaaatgtcttactgtatattgttttcattgcagtataatatgaaaatttgtttccaacagatacattgtagcaaaagaaagaatacagactgcatattttgcagttaggctgctgctgacattattaattatcccatcatggataggtcaccctaatttttctgaaaaatgcctgttctttgcttgtgtttattttgaaataatacgactacttgggcttaggaatcaaaggactctgctttccatttaaaatgtctttctcggccgggcgcagtggctcaagcttgtaatcccagcactttgggaggctgaggcgggcgaatcacgaggtcaagagatcgagaccatcctggctaacacggggaaaccccatctccactaaaaatacaaaaaaaattagccaggtgtggtggcgggtgcctgtaatcccagctacttgagaggctgaggcaggagaatggcttgaactcgggaagcggagcttgcagtgagctgagatcacgccactgcgctccagcctgggcgacagagcgagactgtctctaaataaataaataaataaataataaaaaatgtctctctcctagatataagtcaattgggaatgagtacacttgaaatatttaatatataataagcttcgattaaataacttctctcttttttttttttgagacgaagtttcgttcttgttgcccaggctggagtgctatggcgtggtggtgggggcctgtaatcccagccactcaggaggctg

SEQ ID NO: 36535 - DNA, 1030 bp, Homo sapiens
tccttgtctgtagaatgggaattgtaccctgcaagcctgtggggaagattagatagaagagggtttagcattttggactacataaaagataattttgttgttattttttacaaatgtgcttggcagttttattcacagtacccgatacttagaaacaactcagatatccatcattagctgaatatgtaaacaaaatgtagaaaatccatatactggatggagcattacccaccaataaaaaggaacaaatagtgaaacaaccctgccacttagcagtttattagttggctccaagttcaccctcccgtacttgctctgctttgactaaataacttctgaagtatgtatttcagctggtgaagagctggactctttcacctttgcagtgaacaacatgttgggctttgtcaatagagggcactagagggacattacagaggaaaggggcttcttagatttggtggacttttctttttttaagtttttaaatattatcatggtgtcttaacatgccaataatgttgacctacggaattggtataatctcaaaatcttaggtgtcagtgttaaatatatgtttcacttttacttcatcgtcaccccaagcaaaaaaagaaaaacctgaatgtgaaaagaatgaagtcttataatatttctaaactaaaaaagggattgaatcccagtattcttcagcaaacttcaaaatactgtcaccttaatatgtttttaatacatgtgatatttttgtaggtctagaattgtgaaatcaattctcttaaacatcttattatagaagtgtctgctgctatcctttgagcactaaccccaccacctgtaatgcatcatgccaatataagtgatagaattgctttgctaaattcttaagggcttatgtcagggaaaaactttgaaattagctgggtacagtggctcatgcctataatctcagtgctttgggaggccaaggtgggagaatcacttggctgggagaccagcctgagcaattcagcaagaccccttctctacaaaa

SEQ ID NO: 36536 - DNA, 1047 bp, Homo sapiens
gttgccataataaattaccacaaaccgggtggcttaaagtaacagaactatattctctcacagttctggaggccagcagtctaaagtcagtctgtcttcaggtccatactctggatgttctaggggagaatccttccttgcctcttccaactttggtggatgtcagcattccttggctcctttggtttgtggctacatcactccagcatctgcctccatctttgtatcaccttctctgtgtgtgtcttctcttttgtgtcttatatggccacttgtcattaaacttgcccatccacgtaacccaaagatgatttttttttttgagacggactacagacacgtgccaccacgcccggcaaattttttgttttttagtagagatggggtttcacgttgttagccaggatggtctcaatctcctgacctcgtgatctgcccgcctcagccttccaaagtgctgggattacaggtatgagccactgcgcccagccagtaaattctttttattactgtagtagatgatacttgattaaatgccatctcgggtgctttcattgtcaacaaaggtgctcccatctctaagcttacataaaatgtaattttaaaaagacatttctttagatgtacctgttcacatttttgttaatagtctctcatgtctagttttggaggctggaatgttcaagggagccacaaaaatctctgtcagttggtgttttgaataattgttctgaaatatactcccaggcttgaaacttggatctggccttttttttttttttttaacttgaatttttttttttttttttgctcttatgttattcatatgaattttgcaaatagagagccagtcttgtagcatagtaaaatttaacagtttatgtgactattgatctacccatcttatagagattgtctgtctgtaggaagacggtggtaaccgtggtcagactcatcattttgaacactctaggttagtgttggagaatttgtaaaacagaaacttaaccacctgtgctttgaaagagtaaagtccatgaaaagtat

SEQ ID NO: 36537 - DNA, 1032 bp, Homo sapiens
gagttcgagaccaacctggccaacaaggtgaaaccctgtctctattaaaaatacaaaaattagctgggcgtggtgtcaggtgcctgtagtctcagctactcgggaggctgagacaggagaattgcttgaacccaggaagtggaggttgcagtgagctgagatcatgccactgcactctagcctgggcgacggagcgagactccatctcgaaagaaaaagaagttgtgaaatgaacaaaggatagttaaaggtaaaataggaaaggttcttgaatgaatagagaatatggtcatatgccacataatgacattttggtcaatgacagatgatattatgacagtggtcccataagataatggagccagaaaattcctgttgcctagtgacatagctcttgtagcgcaattccttttttgaaaaagtaaattaaaaaaataataagtttattatagcctgagtgtacagtgtttataaagtctgcagtagtgtacaataatcagtaatgtcctaggccctcacattcattcattacggactcatccagagcaacttccagtcttgcagactttgttcatgatgagtgccctatagaggtgtgccatttttttacctttttttcctcatgtttttaccataccttttctgtttagatatatttaggatacacagatactattgtgttatagttgcctgcagtattcagcacagtaatatgctgtataggtttctagcctaggagcaataaggctgtataccatgtggcctaggttataccatctcggtttgtgtaagtacactttgatgttcctacagctacacatttctcagaatgtatgcctttcgttaagtttagcatgactatattctcttcataacacatttccatctcagtggttgctaaagtactcaaagaaactccttgttctctcgtgttttacacatttaccccaaaacacctttttcttttttcttttcttttctttttttttttttttgagacaagagtttcgctcttgttgcccagtctggagt

SEQ ID NO: 36538 - DNA, 1038 bp, Homo sapiens
tgttgcccaggctggagtgcagtggcgcgatctcggctgactgcaacctccatctcttgggttcaagtgattatcttgcctcagcctcccatgtagctgggattacaggcatgcaccaccacgcccagctaattttgtatttttagtagagacagggcttctccatgttggttaggctggtctcgaactccgcacctcacatgatccacccacctcagcctcccaaagtgctgggattacaggtgtgagccacggtgcccggctgcgtgcaggtcttttttttttttttttgagacagagttttaccccatcccccaagatggttggagtacagtggtgagattatagctcactgcagccccaaacttctgggctcaagtaatcttactgcctcagcctcctgagtagctagtactacaggaatgtgctaccacatccccgctaatttttgttgttgttgttgttaattttttgtagagacagggtctcactttgttgaccaaactgatctcgagctcctgggctgaagcagtcctccagcctcagcctctcaaagtgctgggattatagccatgagtccctgtgcctggcctatagactttctgtttcctgccgctattggtgattgggctgaatggactagacttccttttggaaattttttatgtgcctttgtaagtatttgagcactaattctggttggtaccctactaagcattaatccactcagacatttgagtgcctctaatgttccagtctctacagaatgcagtgaagaatatgatataccttgtctctcattcaaggagtcataattaaacattaaaggggtagagaagagtttgtgcagaggttaacttttggtagttgtggataaattaaaaatgaaacatagggaggctgagggaggggaatcacttgaacccgggaggtggagattgcagtgagtcgagattgtgccactgcactccagcctggcaacagagcgagactctgtctcaaaaaaaaaaaaaaaaaaaaaaaaaagaagaaagaaat

SEQ ID NO: 36539 - DNA, 1085 bp, Homo sapiens
ataacatctgttttatgtagtattcagtgaagttataagaggaactagataggagagggtggatagttcttttagggccgggcgcagtggctcacgcctgtaaccccagcactttgggaggctgaggtgggcagatcacaaggtcaggagtttgagaccagcctggccaacggggtgaaaccccgtctctactaaaaatacaaaaattagccgggcatggtggcgggcacctgtaatcgcagctactcgagaggctgagataattgcttaaactcaggacgtttaggttgcggtgagctgaaattgcaccactgcacttcagcctgggcgacagagcaagactcacgtctccaacttgagttctagtggattagagaggcatagatacgtttttgtttttagtggaggtaacactgggaatgggatattctaacagtagttggttcttgctttttcctatttgtgaatttattgtcaaatttttttgattagagaactgttttgtccgatatttagaattgtgggtctgaatgcttaccagaagtcatttcccaagtcatcatggagtaatgttgaacactgttgaacagaactttcccaaactgcactgcccccaccctctaaccccccacttttttttttgcagagacagggtcttgttcttcagcccagactggagtacagtggcacaatcgtggctcactgcagtgtcaaactcatgggctcaagtgatcctcccaccccagcctccccagtagctgggactgctagtacatgccactacacctttccagcctccccagtagctgggactgctagtacatgccactacacctggctaatttgtttttttttttttttttttgtagagacaggatctcactatgttgcacaggctggtctctaattcctggcctcaagcaggccttctgcctcagccccccaaagtgctgctgttacaggcatgagttaccgtgcaaggccagcatacccacccccacccccccccctttttttttttttttttttttgaggcagggtcttgctctgttgcccggactggaatgcagtggcacaatcacagc

SEQ ID NO: 36540 - DNA, 1246 bp, Homo sapiens
tgggctcaagtgatccacccgactcagcctcccaaagtgctgggattacaggtgtgagccaacatgcccagccttctgtcggtttaatcattattagtatatgagttcaagaactatgtaatgtagaatcatataatttcaagtactttaaatgaatgaattgagtggacatcttttgtagaaataggccaatcaagtatggaataaggtatatgccaacaaatactaaaatttaatcagaaccctctataagtagcaattaaaggagactttcacattttacagctccttcccattatcattgaattaatccttatcagaaatttgggatagaaaggggcctttccttgaatgtcctataagctactctcttcaagttacttgatgggataatgaatggaatctgttgcttactgactccacacctatgttaagccaagcttctctttgtgtgtacaggtacaacagaatagctcgggaatggactcagaagtatgcgatgtaattaaagaaattattggataacctctacaaataaagataggggaactctgaaagagaaagtccttttgatttccatttgactgctttctatgagcccacgcctcatcttcccctgtgcacatgtttacctgatacagcagtgctgcgtgttgtacatacttggaacaacaaactagaaatactgtacttctgtaccaacattgcctcctagcagagaagtgtgtgtgtgacaagccagttctacaggcattacctaggtgtgagactaaaagcttttcttattgacttaaatttggataacagcaaggtgtgaggggggtggtgggtatggtgtgtgcttggatgggaaagaaaaggctccactcacctataggagattatttttaagtggaatccatttaaactcaaaacagttatgaaaagcaaggtgaagaacatgaagctgtgtctgtattcattttattccgaaggagctacgtcttaggtgaaagttatgaccaaccagattaaactctacccacatcctgcattttaaggtctaagtttaactggtcaacatttaaatggattggagctattagtacatcaagtgtgatgggctttgttcccaactcttttacatctccctaccccttcaacctttggcctttcagcccttctttctctcttccatattctttggtttgtatgtggtttctcagttaatacatagctaatagctcttatttttcttatgttttta

SEQ ID NO: 36541 - DNA, 1094 bp, Homo sapiens
ctgagcaacatggagaaaccccgtctctactaaaaatacaaaattagccaggcgtggtggtgcatgcctgtaatcccagatacttgggaggctgaggcaggaaaatctcttgaaccggggatgtggaggttgcagtgaaccgagatccgagatcgcgccattgcatccagcctgggcaacaagagagaaactctgactcaaaaaaaaaaaaaaagggcggggggcacttccttttgaagtttcagatgtatattggagggagcagaattcctttgtgatttcttccttaatacattgtgtccctgaggtggtccctgttcttcctgtctcctgtcagccccctggctcagaggacggctgaatggagttgcatttcagtgcccacagatggaggtgatgactgaagtgtgtttgcttatgtggggagtgagatgatggctttggtgtctgagtggatgctagtgccttgagtggccagcagagggcagtggtgacccatagctgtgacaaccgtgaggcgtgtggtcagtgaatctgcatgggcacaacctgagaggggcttttgttggagtggggagattctttcggacttaagctttgtgcgtggtatatccagaatcagatgggccagtgccaagttcagtcaggttctcagccttacagtgaaggaaaaggttagtgacttgtatttcagcccaaagcctactggaagtgtcaagctgccagctcccctctgccctccccgttgctatggcagccatgtctctgtgtgtgaataggtgaaccaggctccaggttaggacctctgcccacctagctccaggttacatgcaggaaaagatctgtctattgctgcatgtgaacaaggagatcccatatttctagcaggtcacagaggcagcagtccattatcacttgcctgcccacctaccctgggcaaccagcacatggctccttagaccttgaagatggaggcctggggacagaaggagcagagttgggggctagtgatagggcctgggaaatgttcttgtctgtttcaagtttatcttgtattttggggccctggtctcctcagtcttccagcccaacag

SEQ ID NO: 36542 - DNA, 1061 bp, Homo sapiens
gtacatgggggagagatacaggggagctgggaaaaggaaaggctggagaaggagtgccagggaaagtcgatttccccaggaccactaagtggccagctggttccctgacctggggcatggggtccttgggaggtgacagggtgtgccagagatggggggaagaatgagacctctgatcaaatgggcccaggagtctttctgcctaccttccctgcttaccacacacctgcttctccctgtccccttagttgccaaggccctcattatccagtgcccccacttagattttggccatgtccctggttcttagtctacagccctgcaaaatgggtacagagctggcttatgtataaggaagtcctggggtgctgagagctgagggtatgccctcagggagcctttttaagcctctgcccgcctttggggttggggcctgccttccttgcactgggcagaaataaggatataccccttttccatatgctgccaaaaaaaaagccgtttttcagatgagagaagtgagtctgatgggaatggcttcatggtcatgaagggctttggatgcaatctcctaacacccagactaccggtcattctgggcctacagtactgagacagcctagcagtggtcaaagggcatgtggctataaggactcaggcccagttgggctccctcctcctggccacacagttctccataaacgactggaccgtggttgaggaggagagagggacccaagcatcctgagggacacaaacagcagtggccagtcaggaaactggatgcccgtgccgcggactctggagttggacaggcctgggctccacacctggcttggtcgctgcctgctatgtaatcatgggccagtctgctcacctctctgacctcatgtttgtcacctgtgagatcggtatgactctcatctctgtctcaaaaccgcaggacctgaagtagatggtggggtgtgttgtcatcagttctcattatgtcacctggatctccaggcgagcatgcccctccacctgctccactagacctggcatttttctgggggtggcat

SEQ ID NO: 36543 - DNA, 1035 bp, Homo sapiens
atacctcgataaaactgttttttaaaaatcctgccagccaggcgcagtggctcacgcctataatcccagcattttgggaggcccaggtgagaggattgcttgatcctcataggaagacctcatccctactaaaaattaaaataataataataataaaaattctgcccttggcctcaaggccctgcacaactgggaccctgacagcctcatagacacacctcacatcttcttccccacctgcttaggctctctttcatgcctttgtcccctctcattgcttctccttatccttaactctcaaactagcagtcccttcctccaggaaggcctcagatagctcattgtgtccccttccggctcttgtttcacgctggttcatgtgactgtgggcccagctcctgtgcactcctggaaggcagtgctggggtctgggtctgtgtgctctgctgtctctccggtatcataaggtacagggctgctgtcgaggtaggtgcagggaagatgtgtgcaaaggaatatctagaacatccagctgtgggccacctgtgtacatgtctgtgtgcagatggcactatgtcatcccaggatgtcccctccttcccagtgctttctggcccgagagttcaagattgaaccctgcggggggtgaagtgaggctcttctagggctgagggttgaataagggcactgccaccacctccagtgacctcactgccagctggcattatgatgtcactggcttagcattccaggccctgggcatctccaagtgccccaggtgggggcactctcctggggtctgtgacagcttgcccccaaccacggagaggtgacaggcacggtaacaatcctggggagtgagagcagccttaggggtacctaggtcacctgccttgggccactctgtcaattgcaaaagtggccacagaacagggtgactaacacttgggctctgggttcaagctctacccctgctaggcaccagctgtttgacctgaggctgacagcttgaacctctctgagcctaaatttcct

SEQ ID NO: 36544 - DNA, 1048 bp, Homo sapiens
ggccatccatgggggaacgtctttgctccaggcctacccggaccctgactgaactctctccttgtttttgtctcccgcccccgccagaaggtgatgcttccgacgggagccgccttccggtggtttcagtgacggcggcggaacccaaagctgccctctccgtgcaatgtcactgctcgtgtggtctccagcaagggattcgggcgaagacaaacggatgcacccgtctttagaaccaaaaatattctctcacagatttcattcctgtttttatatatatattttttgttgtcgttttaacatctccacgtccctagcataaaaagaaaaagaaaaaaatttaaactgctttttcggaagaacaacaacaaaaaagaggtaaagacgaatctataaagtaccgagacttcctgggcaaagaatggacaatcagtttccttcctgtgtcgatgtcgatgttgtctgtgcaggagatgcagtttttgtgtagagaatgtaaattttctgtaaccttttgaaatctagttactaataagcactactgtaatttagcacagtttaactccaccctcatttaaacttcctttgattctttccgaccatgaaatagtgcatagtttgcctggagaatccactcacgttcataaagagaatgttgatggcgccgtgtagaagccgctctgtatccatccacgcgtgcagagctgccagcagggagctcacagaaggggagggagcaccaggccagctgagctgcacccacagtcccgagactgggatcccccaccccaacagtgattttggaaaaaaaaatgaaagttctgttcgtttatccattgcgatctggggagccccatctcgatatttccaatcctggctacttttcttagagaaaataagtcctttttttctggccttgctaatggcaacagaagaaagggcttctttgcgtggtcccctgctggtgggggtgggtccccagggggccccctgcggcctgggcccccctgcccacggccagcttcctgctgatgaacatgctgtttgt

SEQ ID NO: 36545 - DNA, 1035 bp, Homo sapiens
tcaggtctagtaaaagagaaatcaggtatctctgagctcctctactcctgagcccctaataccagagaagatcctttttagctatcaccgtccaaagactcactggttaattaatggtcagcaacttagctgtctgcataaaaaccagcgaccacttaatatgttacttttgggagtgggatctctccttgacacaagtttctgggaagagtaaaaggggcaagcgaacctgctttaatgaatcccgtaaggaactgcgtttcccaggaaattcctgacatttttagctcatgaatttccgaaagcctgcttggttttctcctccattctgggtccttccagaaaggaagaagagtgggctagggtctgaatgctcacagggcctggttcatccgcagagctggccagcaactcaggctgggctcagccctgagcagggtgccccccttccccaaatctcagaaggaggagggggaggcgggcgggcaggcagtcagtcgtggtcccaagggggactggctgcaggtttttgggtgagtgtggagtttctttttgattgttgcatgtggggaagggcagagtcgacgggaacagtcactgcgggcaccctagccctggtgcgtctactgtcctctgctcggctccccccatcggtgagtgcgcccgcccgcccgactgtgcggggctgcggttggggggaggggggagcgggatcatctgaggccagagccactgccgtgtgtgcggggagggggagcggcgggagagagaggggagggacaggctaggtgtctgctgctccacgccactgctgccggcgccccgacctcatccccagcagccccctctgcagctaagggttaccaccgcaccacctctcttctttgcctgcctcagcggccaaggctctgcggtaggagacaacccagccgggtggcgggtgggcctgtctaggtttgggtttgggtcttgctgaggcccgcatgagagggggtggccgtgactcggtgtcccctctttgcagggggctctgct

SEQ ID NO: 36546 - DNA, 1049 bp, Homo sapiens
aaaaacaaaaaaaatacaaaaagtaataacattatatgaactgtgtttcctacttgattaaaaaatataaagaactgagtgtttatttccctaattaaccaagaacttttgtacacgtttaagctattattattaaaaagtgtttgcaaaatggtcaagattataatattgctgaattatataaaagtccttttcatgttgagctaacatttgactttagcacaaaaaagagatattttagaacacgtaaaataatatttttagtttttctcattttgttaccaaatttcaaaccttacatggaggttattatagtatatttgacaccctatatacctgtgattagagatgtgtatatatatgagggctaggcatgctgtgtgtctgagctttgtctaaatgttatgcagaagtttgtagagttaaaggtacgtaggtttaattcatgcaaggtaaacaataagtgctctcttttatacaatatgcattgcatctggaccttaaacttataaaaatggtcagtgaaacttctgtgaacatgaagaaattattaaaaaaggcatttaaatgaaatttgctaagttgtgatttttatggttggaaccaaagttattcaaatagtaaaaggaaaaagaaagaaaaaggagatctcccataatatttttctgcatctgtttgctttgactgagtaggcgttttgtcattattgtgtatatgagatgtacttgtatcgttcataatatattttttttattatgtgtagaaagattttaaaaaactaacgtgcagcaatttccagtgaacctgtacttggacatcaggtagtgagtctatttgtggtcactagcactgtctcctaaacttgtaagaggtctgaagctattctttgatttttgctagtgctattaacttatgtagacctgttaaaaagcagagcaacacaattatagttatcctactgagccatggattctgagttttgttttaaaagtgaaagccaagttggtgtatgtaaaggatttccatgtagctgtggtgctagttattac

SEQ ID NO: 36547 - DNA, 1021 bp, Homo sapiens
aatgttcatatagtttccttatggtctaagtgttacaactggttttcaagttgttatattgaatattcctttttggaattcagggttgaatcactttgagggggaagggaagcaagggcaagagactttattttaaccagatgcggtcttatgacctcaaagatgtgctctagaaagaaaataacaaaaagtgtacctgtgaacatattttttgtcttggtgatattatgcaacacagtgttcagaattgcaaaaaaatttaaaaattgatagttttatcaatggaacagagagatgtgtttttggctaaaattattttttgtaagttatttggttatttcattttatattccctttcccatagctttgtacacacctcatacttaaaaccaagtgagaggcctcttttcagatctggtttatttttggaatgcctgagtgtgtttccagattggggggggagaggtggtgttttactttttgacatgctcttagcatgttttgctagtcattctggatcttatgtttgcaaattctgttgaacattcagtgatgtatttgaaatgagaaagtcctttataacatagtgtgaatgtttgtggccaattcaattgtggaatcttatggctttgtttttactttgggtagaagtttaacttccattgttcagattttaggtttatctagtgaaattgtgccaggtagttgtctaaatatggaccaattttgggaaatgaagattaataagtgtatatttgattctagataatcctttactcaaaatcataagttaaagattcacatcattaagagttatctaacttttatgttgtcaaatctttaaatgtggatgatattcagcattctatctatgaatttcctttaggaaaagagaaaaattcagtctccaaaccttttcttggagacaaaatttaccacatatcgaaaatgaaaaaaatttagaaagcgatttgattattttttaatggagtttaaccagcttaattaatgatttttccag

SEQ ID NO: 36548 - DNA, 1027 bp, Homo sapiens
cccagcctcccgccagattcttgcgtgacctcgggcggcacccagtgctgctgtggacagctcattccgccgcggcggcggctgcggctgcggcggctacaacggctcccggcgtgtccccggcgccgccagggggcgaatggggtgcccgccggctcctcggactccgggcgcgccggcactgcgctccggagaggcccggccagggaagaagcaacttccctccgccgccgcagaccagccgggcagagacttccagccccaccctcaagccctctcggtggctctgtgcgcccaggcctaggggtggggggccgtaggtgctgcgcgcccgcacaggtggtcaggccgtcagcatgcctggctcgtcgcgcacagaacactgcccaggggttcacccagctcccctccctcccctccgctgccctcctggcagctccagctctgctctcgcggctttccaggttttggggtgggtgattgagtaggccgcacctgggacactgtgactggaggacgccggaatttaaggaggggacgagggagacgcagctctgtttctcgctgtaccccctcacccctccgaagcagccgcgggcggtgcgcaggccgttctctgcgtcctcgggctctgggtgaggctgggtgcagcgggagagacccggggcgagctgctgggggctgtgtggccggccccaagctggccgcgcgcacacgctgcgcacctgttggagcgggcctctgcctgttcggacccgagccgggcctccacgacacagtccccttgggcggcgaaacggccacatctagctttaggtttgaaaggaaaacaaaatagggggaaaaaagtgggtttacagttgcatacatggactctctgggtcagctcttgatgaggaccaaatatcagtaggtcttttggggctgcagccaacaagctggcagctgaggacagagacctgctccctggccttggcactgctggagatctttcagcttgatgagatgcagttttcacagaaaaatt

SEQ ID NO: 36549 - DNA, 1024 bp, Homo sapiens
ctgctggacggctctctgttgctgctgtctctgggacatgctcacctgaccagaccagcccagccgtcctgtcctgccagctctgctgccacctctgacaggtgtgcctgcccccatctcttctgattgctgttaacaaatgactagctttgcacagacacctctaccttcagcactatgggattctagattaatgggggttgctactgtttaattcagtgacttgatctttttaatgtccaaaatccatttcttattgatctttaaagatgtgctaaatgacttttttggccaaaggcttagttgtgaaaaatataatttttaaattatacattcaaggtagtggccaaatgtaacacatcaatcatggaatgatttctctgctaacagccgcctgtatgtttcaataaatttgtccaaagctcaactgtctgtctaaatgattccaggcctaagctaagctacctggagtctgtgcttgtctcctggactgttaccatgtctaactaactactcatctgctcactgaggcttataaaatgtgggtatctatctcagctagtggccaccatccaatgtatgaccagcagccaatctacctttttattctggtggtgatgcaaacagtgagggtgctacaaaggcggccagttctgagggccaggtgttctccagctgggtcatgggctcccggccaagctactctccccgtagtcccactcagagataggctcagggaggagcatttgccacatcttgcacctgcctttacccagagcctaggaaagggccttttggtaaccaggggctgcccctggagtggcttccaggcctgctccctggaaacccaggaacctacaattacatggggccagccaagaggttttccttttttttttttttttttttttttttgagatgatggagtttcactcttgttgcccaggctggaggacaatggcgtgatctcggctcaccacaacctccccctcctgggttcaagcaattctcctgcctcagcctc

SEQ ID NO: 36550 - DNA, 1043 bp, Homo sapiens
taccttccagattctcctaactttcttttgatgcattatattaatgagtttaattagttgcttataaatgcctctttcaaactattatagtttataatccatagttgatcttgttggaaaagtttttttttttttttggctgttttttttttggtttgtttgagaacggagtctcactctgttgcccaggctggagtgtaatggtgcaatcttggctcactgcaacctctgcctcccgagttcaagcaattctcctgcctcagcctcctgagtagctgggattataggcggccaccaccatacccagctaatttttttttgtatttttagtagagatggggtttcaccatgttggccaggctggtctcgaactcctgacctcagactatctgcccacctcagcctcccaaagtgctgggattataggcttgagccactgtgcctggcctttttttaaatttttttttttttgagacagggtcccgttatgtcacccaagctggagtgcggtggtgcaggagtgcagtggctcacgatcgtatggcgcaatcacggctcaggcagccttgaccttctgggctcaagcgatcctcccctttcagcctcccaagtgtctgggaccacaggcgcacaccaccgtaccctgctaatttttaaattaaatttaattaattaattttttccgacacacagtcttagttgcccaggctggagtgcagtggcggatctcagctcactgcaacctccgcctcctgggttcaggcaattctcctgccttagcctcccaagtagctaggattacaggtgcgtgccaccatgccccgctaatttgttgtatttttagtagagatggggtttcaccatgttgaccacgctggtctcaaactcctgaccttgtgatctgcccacctcccaaagtgctgcgattacaggcgtgagccaccgtgcccggctattttttttgtagttacaaggtctcattatgttgtccaggctggtctcaaactcctgagctcaagggatcctcctgcagtggcctccca

SEQ ID NO: 36551 - DNA, 1043 bp, Homo sapiens; identical to SEQ ID NO: 36550

SEQ ID NO: 36552 - DNA, 1043 bp, Homo sapiens; identical to SEQ ID NO: 36550

SEQ ID NO: 36553 - DNA, 1043 bp, Homo sapiens; identical to SEQ ID NO: 36550

SEQ ID NO: 36554 - DNA, 1027 bp, Homo sapiens
cgcgagtagctgggattacaggcatgtgccaacactcctggctaatttttgtatttttagtagagatagggtttcaccatgttgcccaggctggtctcgaactcctggcctctagtgatccacttgccttggcctcccaaagtgctggagttataggcatgagccatcatacctgtcctactgccaattctctgcagctgtactatttaacattcctaccagcaatgtacaagagttccattcttctcatcttcactaacatttgttatttttctttcttttctctcttttttttttttattacagccattctagtgagtgtgaggtggtatctaattgtggttttgatttgcatttccctaatgattaatgatgttgagcatcttttcatgtgcttattggtcatatgtatatctttgaagaaatatctattcaaatatttttcctgttgattgggttttttttatagctatgtgtttgttttttcttttcttttttaaatttgttttaggaaaaaaattctggatgctagttccttaacagatccatgatttgcaaatattttctcccattctgtgagttgtcttcattttctttctttctttttttttttttttttttgtttttgagatggtctcactctgtcacccaggctggaatgtagttgcccaatcatagctcactgaagcctcaaacttctgggttcaagtgatcctccaacctcagcttctggaatagttgggactatcagcatgtaccactgtgcctggctgatttttaatttttttgtagatatggagtatcagtatattgcccagactggtcttgaggtcttgaactcctaagctcaagtgattctcctgcctgtcttttctttctttctctctctctttcttttcttttctcttctctttcctttctttttctttctttctttctttctttctttctttctttctttctttctttctttctttctttctttttctttctctttctttttttctttcttttctttctttcttct

SEQ ID NO: 36555 - DNA, 1027 bp, Homo sapiens; identical to SEQ ID NO: 36554

SEQ ID NO: 36556 - DNA, 1027 bp, Homo sapiens; identical to SEQ ID NO: 36554

SEQ ID NO: 36557 - DNA, 1027 bp, Homo sapiens; identical to SEQ ID NO: 36554

SEQ ID NO: 36558 - DNA, 1034 bp, Homo sapiens
tcaaaatgtaagattaaaaatggcccagataggccaggcgcagtggctcacgcatgtaatcccagcactttgggagaccgaggcggacggaccacctgaggtcaggaattcgagaccagcctggccaacatggtgaaacctgtttgtactaaaaatacaaaaaaattagccgggcatggtggcgggcccctgtaatcccagatacttgggagaatcacttgaactcaggaggcggaggttgcagtgagctgagatagtgccattgcactccagcctgggcaacaagagtgaaactccatctgggagaaaaaaaaaaaaggctcagataaatacatatcttaattattcaatacagaagtaatgccattgttctaacataattattcatttttatcttgcaatctatttttacattcatatttacatgaaattatagacacaatatataatacagttgttttctattttttcactatgtgttcttgtgttctatcataatctttaccatattactatatagtctctataactcttgcatcatattccatcaagttgatgaaccatactcgttcattaattatggaacttttgcttttcatttttcactattacaaatactgttagatttaataactctatatgtataactttttaccttttcttattttgaattattttatatattgattttaagttttaaaaatgtatagcctcttccatgcttttgctatttgtggactgatatcttaattttaatattatttcttttcctcattataaaaagcaatactgttcttcatataaaatgtggaaatgctgggcttgtagtcctagctaccaaggaggcagaggtgtgaggattgcatgagcccaggagttaaaggctgcagtgcacaatgagcatgcctgtgaacagccattgtatgctagcctgggcaacatagtgagacccttctcttaaaataattttttaggagaaaaagaaaatgtggaaagtatgggaaagtataataacttttatatttaaaacctat

SEQ ID NO: 36559 - DNA, 1034 bp, Homo sapiens; identical to SEQ ID NO: 36558

SEQ ID NO: 36560 - DNA, 1034 bp, Homo sapiens; identical to SEQ ID NO: 36558

SEQ ID NO: 36561 - DNA, 1034 bp, Homo sapiens; identical to SEQ ID NO: 36558

SEQ ID NO: 36562 - DNA, 1022 bp, Homo sapiens
atgtgtgtaatgtatatatgtatgtatataatgggaaccaataatgggaatatatatgtataatgtatgtatataatgggaatcaatgtactcctatatatatacatacatatatatgtatataatggggattttccatatatacatatatagatatattattatttttttcttttttctgcttcttgcacagcagggctaacccatagggagtgtgcccacagtagcctgattcccattttaaaagaaagatttagtagtcagatattttggggcaaatattgtgtgttgtgggatatacattattcattttaagacacaaaatgttgtaatacagagttgtggcattgttttatcaacttttttcaaatgtgattatgttattcaaaactaagggaatgaatgtatatttatagagaggaaaataaaataggtagcttttcaccccttttatttcaggaattaatatgttgaattttgaaatgacttggtgtgaggatattgggactgtactttctgatttcttgtcttttaacaactatggtaatattttaaatatacagaattaacagttattttttaaagtttattctaaatcagggctgaaagctttgaaatcatttttcatgatttcatttgaaatgtctttgccatgactcacgggacctaattatgttgatatgacctaattatgttgatcactgccaggcttaagaaataagaaagagaaaagggtaaagtaaggataagtgacattaatattgcccaactatgttctaataataacatatcagttgcagataatcaatgtcttactctcgggcttaactactactcttaatttcttgtttagttgactttcctttctcttatttacctagtagaaaataataaaaacttcaaacctcagtgctatgagagggaagatttgcaagttcagttatgcttggtttcctgcatgattaaacaatatttaatcactccattgtttaagcattatgtgtacagtggcaagcaaaaaa

SEQ ID NO: 36563 - DNA, 1022 bp, Homo sapiens; identical to SEQ ID NO: 36562

SEQ ID NO: 36564 - DNA, 1022 bp, Homo sapiens; identical to SEQ ID NO: 36562

SEQ ID NO: 36565 - DNA, 1022 bp, Homo sapiens; identical to SEQ ID NO: 36562

SEQ ID NO: 36566 - DNA, 1035 bp, Homo sapiens
atctcagctcaccgcaacctccgcctcccaggctcaagcgattctcttgccttagtctcccaagtagctgggactataggtgtgcgccaccacgcccagctaattttttgtattttagtggagatggagtttcaccatgttgcccagggtggtctcaaactcctgagctcaggcgatctacctgcctcggcctcccaaagtgctggaattacaggcgtgagccacatgcccggccgagaaagcattttcttaatacctcccaaggtagtattaattatcctagagatagtgacttttgtcaaccatgaaagtataggtaacataagcgctagaagttcattaaagtaacttttaaacccaccttaaattatggagcttttactagtatattaagttggtgaaatctaaattcttttctacaaagtcattctgaaaactgctagcataccccaattgaagaaatatattacatttttgttttcttttgatccatgtagaatttgaacaagggtaaattggctagtggatagtgaatatgtgacttgtacccctagctacaattggaaccagcaaggcgttctattcagcaagggagtaatgttatttccatttagcttaaaatcattgactatttgtagattccccgactgtctaatcattagtctcaaaaattattgcttggtgaaagctttttttaaaaaaagcttcaggaaacaaaagtgcatttggtggtatatgaagataacctaaaacaggatatctgtttcatttatgggcctttgtcttattctttggtctgagatgatttttttctgagttgactttttaggtgccacgtgtgccaacgcatacacttgccatggttgtacctccccaggaacctgacagaacttcacaggagaactctcctgcccttttaggagtgcaaaaaggttagttattgaattatttttcttaaaatgggtattttttcacctaattgataaatccagaaatgtactttaatgatacagagttactgtgtacccatggcta

SEQ ID NO: 36567 - DNA, 1041 bp, Homo sapiens
gatagaagaacttaaaaagaacagagaagagcaagtccagaagaagaagaaaatattgaaagaactgcagaaagtggaaaggcagttgcagatgaaaacacagcagcaatttaccaaagaatacttggaaaccaaaggtcagaaagacacagtgtctctacaccaacagtgctctcatagaggagtcttcccagaaggggaaggagatggtagtctcccagaggatcacttttcagagttacctcaggttgacacaatcttatttaaagataatgatgttgatgatgagcaacagtctccaccatcggcagaacagattgattttgtcccagtccagcctttatcatctccacagtgtaacttttccagtgacttaggttctaatgggacaaattctcttgaacttcagaaagtatcaggtaatcagcagattgtaggacagcctcagattgctattactggacatgatcaggggctgttagttcaagaaccagatggactaatggttgcaactccagctcagacgcttaccgacactcttgatgacctgatagcaggtgggttaagaaatatatctgtaataatttctctttaatctgtgtgctgaacttctttatatacccctccaaaaacgtagactttgtacgtttccattttagaactttgtaaaattacccatttctcgaagtattttggaagtgaattaactatgctcaatagcactaacacacaaaagtgtgttttcccctcttcttttttgtcatattgcaaaggcaaagaaataaagttgccacaatcctttgttttaaaccgttggtatcaaaaccactgtgtgctgtgacttgggtaggagatctcaaagtagaatttctttgtaggcttttagaagtattcgtataagattatacttaaaattttcctgctgttgattttcatgtctggaaatttaaaatcacacagcttttttaatttgtaattttattagatcaacttacgtatttccaattaaatgggatgttcagataaaactaagtattccat

SEQ ID NO: 36568 - DNA, 1042 bp, Homo sapiens
attgtgcagaggaggaatgtcttagttttcttaaagaaaattaaaattctgggaaatgttttaaggagttaggctctttgttctttaatttgggtttttatatcttcagttggtagacacaaattaactttgtattattagcattgaaagttgttataaattgtgaataaattcttgtagttcatttggaattctaattttaatctgggtaaaaacagattttagaatgtgaagtatgattacgaataataatgatgaaactgatgaactgggaataacatttttaacatgtagtgttctgtaactagcattataatgttcctaattaagtgcacagtttgcagttatgaaatctgtgttactgattagttcagttatgttagaacttttttttttttaaagaatgtagaaatagctctaaaaggaacttgtaagtgttaaggaacatcaagttttatttcactgaagtatttgttaaattagtcttttacaaagtttgcatgaaacttagaaaattggcttagaaattatctttttattaatataaacaaaatttaatttgtgttagacattaatacctaccacattgtacaatattcttttattaataagttttaaattttaaatcagccaacaggtacaaaaattatcttcatgtaaaaacttccatttttgtgaaggctatgtgttttgaactatatggcagtaattatattttctttattcaagatgatgtacctgtcttaaatttaaatattatattttcttaagtcaaagtttgtcttaattttcttagttgaaggtaaaataaataaggcaagggtgaattaggttaatacctaatgctgtaattgtaaaacatattaacatattggtaagattatagagtaggacaaatatataattaattttacttaactctagttcttaccactcatattagtaaagaatactgtacatcttaaaattctactttagaattttactttagaagtaaattttactttagaagaattttagatgtatgataacagtacatttt

SEQ ID NO: 36569 - DNA, 1042 bp, Homo sapiens; identical to SEQ ID NO: 36568

SEQ ID NO: 36570 - DNA, 1042 bp, Homo sapiens; identical to SEQ ID NO: 36568

SEQ ID NO: 36571 - DNA, 1042 bp, Homo sapiens; identical to SEQ ID NO: 36568

SEQ ID NO: 36572 - DNA, 1033 bp, Homo sapiens
ttgtgataataagttgtttatataatttattaatgttgcaacttgattagctgattaacttagccctttagtgtgttgtttgatacgtgtcatacatgatgtagttccaaacagactatataaattattgattaggaacatggttcctcaagtccttctgaaagtgagcattgggtttttagcagttaccataatagcaagtgattctcaaagttcaaatgtctaggaatataaagtaatttaaagaaattcaaaatagcttttacctttgagcagttctagaaatacttagtaaaattttctttctttttttttttttttgagatagagtctcactcagtcatccgggctggagtgcagtggcttgatctcggctcactgcaacttccgcctcctgggttcaagtgattctcctgcctcagcattccgagtaactgggattacaggcacctgccaccacacccagctaatttttgtatttttagtagagatggggttttaccatgttggccaggctgctttcaaattcctgacctcaagtgatccacctgcatcggcctctcaaagtgttggttttacgggcgtgagccaccgcgcctggccaaaattttcaattctaatatagaaagaagattggttaaaaatcacctaatatcaatttatttacatttattgagcatttaccatgcaccaacttctatgataaatgctaaatatactttatttcatgggctaattataataatactttaaataagtccttttcccacctctatttttctgttgaaaaactgaagctggccgggagcagtggctcatgcctgtaatcccagtactttggcaggcagaggcaggcggcggatcacttgaaatcaggagttcaagaccagcctggccaacatggtgaaacccatctctactaaaatacaaaaattagccaggcgtggtggtgcatgcctgtaatcccagctacttggggggctgaggcaggagaatcacttgaacccaggaggcggaggttgcagtcagccaa

SEQ ID NO: 36573 - DNA, 1033 bp, Homo sapiens; identical to SEQ ID NO: 36572

SEQ ID NO: 36574 - DNA, 1033 bp, Homo sapiens; identical to SEQ ID NO: 36572

SEQ ID NO: 36575 - DNA, 1033 bp, Homo sapiens; identical to SEQ ID NO: 36572

SEQ ID NO: 36576 - DNA, 1075 bp, Homo sapiens
ggctcacacctgtaatcccgcactttgggaggccgaggcgggtggatcttgaggtcaggagtttgagatcagcctggccaacatggtgaaaccctgtctctactaaaagtacaaaaattagccgggcatggtggcacatgcctgtagtcccagctacccaggaggcagaggttgcagtgagccaatatcgcaccactgcattccagcctaggcgacagagcaagactccatctaaaaaaaaaaaaaaaagatttctttatttcttagtgaatactggtgaaaggaaaatatgatgtaaaacactgaattattatgaattatcaaatatattctgtcagaatttgttttgagatctgtgactcagtatgatttttattctttttaacaatttcagtggagcaagaagttcccatagaacctcctagtgcaaccaccaccactacgattggaatctctgcaacatctgcaacattcacaaatgtgtttgggaaaaaaagggccaatgtggtgacaactcccagcaccaatcggaaaaataagaagaacaaaacaaaagaaacccctcctacagcacatttaattttaccagaacaacatatgtctttagcccaacaaaaggcagataaaaataaaataaatggagaacctagaggtggtggtgcaggtgggaatagtgattcagataacttggacagcacagactgcaacagtgagagtagcagtggtggtaaaagccaagagttaaattttgtgatggatgtgaattcctctaaatacccctcactgctccttcattcccaagaagaaaagacaagtactgctacttccaaaactcagacacggtaaatttttctgatttgttaactctacctgcacctttccttcttcatgcctggtacaagaatttgaagtatattaatccaagtacaagttgtgttaaacaattgaagtctaccacattatctatcttcaatattcaaaactgaaattcacccatgtcctctttatcatttgctagttaggaaatgagattattagaaatttttataggattcatagtctgaagttgaaaata

SEQ ID NO: 36577 - DNA, 1026 bp, Homo sapiens
taacagagacctggtatttccttataggcttaatcagatctctgggggtggggcctgggcataggtattttttttaaacacttccatattctaataggtaattagttgttttttgttttttgttttttaatgagacagagtctcactctgttgcttaggctggagtgcagtggcgccatgttggctcactgcaacctccgcctcctgagttcaagcaattctcctgcctcagcctcccaagtagctgggattacaggtgcacaccaccacacttggctaatttttgtatttttagtagagatggggtttctccatgtttgccaggctggtcttgaactcctgacctcaagtgatttgcccgcctcagcctcccagagtgctgggattacaggcgtgaaccgccttgcccagccagtaattagtattgaccctctgatttaaattcttgtttcttcatccagattgcatggatgatgaatctggctttctctctaaagccaattacctattccccagcccttacagcacacagtgactccagaagagttagctgcaagcagtagtcattatagtagtagtaactgtggctattattttgtggtagagattagtagaaggaagacctcacttcgacaatgaccgttcttgaaaacttttgatacttttctcctgattttcctatttccgactcatctttctcagtctcttttggtgaattctttttctctactatcttttaaataaataaatgttgatgtgcccaggcttctacactgtatcttctccccagatgatctcatcccacatttatttatttataaatagagatagggtcttgctgtattgcccaggtcttgagctcctgggctcaagcggtcctcccacctcagcctcccaaaatgccagaattaacagatgtgagctaccgatcctagcccatccccacactcttgaatttcacaccacccaaatttgagccactaactcagagttctccccatggcttcactatatctagcttcctcc

SEQ ID NO: 36578 - DNA, 1011 bp, Homo sapiens
tcccgaagtgctgggattacaggcgtgagccaccgcacccagccttgacccacgttttaaacagaagatgtttaaaagggcattaagagctggagaggatggtgaagttcagtggaaattaactgaggagtatgttcctgactcctctctttaaatttcagggaagctggaagagaagaaacctcctgaggctgacatgaagtatgtatcctagcccctggcatctgatcagagggagggggtctgtacatttcttgtgtctggcattttggggaggtgctgacatgagaatctggagaaatggtcagggggagtgaaggtgtatgtgtgaatttggccagctagtgatctccattttcccagtatttttgaagacattggggattacgtaccctccacaaccaagacacctcgggacaaggagcgggagagatatcgggaacgggagcgtgatcgggaaagagacagagaccgtgaccgagagcgagagcgagaacgagatcgggaacgagagcgagagcgggaccgagagagagaagaggaaaagaagagacacagctactttgagaagccaaaagtagatgatgaggtgagatgtgggcccttagtaccaggtgatggagttgcccctctctggaaatgtgagcaaggttgggtaaggaattgtttcaaacttgggggagggatgagtaggaatctctcatggtaacactaacttcacattttgtgttctttccagcccatggacgttgacaaaggtgagttgtacacacagcatctcacagttgctctagcagtcctgctttcccctggtagggctcagagctggcaacggtgggattgggggacctcctggttctgggttcttgtaagaactgtgtcttgctttattgaataggtggagttccctccaccttcctgggccatggcagggcatatttgctcttagatataattcctgtggccctggggttctgaggaggtgaggtagaggtcaagtatggaatgttc

SEQ ID NO: 36579 - DNA, 1029 bp, Homo sapiens
atgctggccaggctggtctcgaactcctgacctcaggtgatccacccgcctcagcctcccaaagtgctgggattacaggcaaaagccaacacacccggcctggatatgaatttataataccctacagtgcaacacaagaagatgcactcaaagcactgatgtgaggaagtacttgccccgtagcagctattcactctaccagtgtaaacaaactctaagctagggcaagacagcacagacacaagtatatactaaccaggggtttaatataaatacaaccagcatagaaagacccaaaactatacagaaaccaaaaccagaatgccatgtggtggaggcaaagggcagaatttctgacccctttggctcagctgcccttccccacaaataaaaaccaacaaagaggacaaatcaggacaataaagaagattcatgctaagctgtggcagaggggggaaggtatgatcgggtgggggtgggacaaggaacggccatggaagatcactgggtcaggttggaccctgggctgggagcgggagggcaaggcccctcaccacaacttaacccaaacctaagctgcccccaggtgccataggtccctgtcccagcagggaggctgatgggcctgggcccatgcccctccccacctttgggggtcagaaagtggccacccaggcctgctgggatggggcctgacacaggctctgcatgcccattcagggtgcctgtggagaaagaatggagtcactgtttaaccatggtacctgcctcagccccagcagaccacaggaggttggccccagactcactgagtgcctgcagcagccgtacagacacagcatccttggccacctcatgcccatcccggccatctagggtcagcacaacccagatgaggccgctgaagggcaccggatgcccaggaatcaccacctggtaccagaagcggtgccagccagcaggtcctatgcccaaacacttggtgaggaacacagggctgcccagcttcattcgttggcacagcaactg

SEQ ID NO: 36580 - DNA, 1011 bp, Homo sapiens
ctgcccacccagcctgtgggaagagggtatgcaaggccaccgtcaggcgacgctttcgaattctgagcccacggacccagcgcgcgggggtgggaggcgatgtgaacaaaggtctgtgaaatgggtttacacccgtaccctgggtggttggcataattaggtgactgcgctaacaagggggctggcacagagtaggtacaccttgagattggccccctccctcgacggggcgggtggacgtggagccacagttcctcctttgctggggggtataaatccgggtagttcgcagtttctgacagtgaaggctcggagcagcccctcccccaaagggggctggtgtagccggacaggcggaggggctgggactaccgtacctgggggtggcccgccatacttcctctgcccgttcacctgcaccaggcggatgcctgtctccctgacccacgcctccagcgccgccttgttctctggattcaccctctcacaccacagctgagagggaaaggaaggttggaatggcggatcgccaagcgcgcccccacctctcctgtggtactggggtccctaaagccgacccccgctccggcggggctcgccggcccccaagtcgccagccgcttacctcacaatcccgcttggactgcatggctctccagctggccccctcgtaccctctttataacttcctccccaccggcctctggaagcttccctacccctccaccccgcaagctctcattggctctgagcgcgaccccgcctcccaggggggtggaggtatccactgcacgtgcgccgcccgggcttcgctcagaccttcaggtgaaagctgcaaagtcgcgggtgcgtatgtacgggggctgcctcccgaggaggagctcccaagccgcagggtggacgctggagacaagaacctcagggtcacaagtttactgtttttctcccttttccatccctacattggtctgctggggaaggcggggctaggcatcactgacacacgcagac

SEQ ID NO: 36581 - DNA, 1020 bp, Homo sapiens
ggtcaggctagtctcgaactcccgacctcaggtgatccgcccgcctcggcctcccaaagtgctgggattacaggcgtgagccaccatgcccggccaccccatagacctttctataagactgctcacaataaagcaactggcttccccagagcaagtaacccaaacaaagacagaaggcatggtttttaaaataacctaattttggaagatactacttttgacatattctattggccaaacagaccaactctggtacaaattgggaagagactacacagagtaggaataccaagagggtggggctcatcctggggctgtcttggaagatgactgctatactctctcgaaagctaaggctttatagaaatgaaggcttaacacttctaaaaagaagtttacctaaaaatttgagtttcttggttgaaaatgataagatccttaaaaccatatttgactcaggtgctgtttcttcctgttagatattactgcaatgtctgtgactgtgtggtgaaggactccatcaactttctggatcacattaatggaaagaaacgtaaggcttggaggtagcttgtgactagggctggaattgggttttggaggtggggtggaatggaagggtagctttttttttcttctttttactcatcaaaagatggctggagtaagaagggtagtttctactgggctcttttttgatgcccctattagaactctccagttgtttcagcacaggccgtcttttacttcattatgtaatatttctggaggccgtgaggtaagaggcctcattctggaggccatgaggctttcaacagcacccaaaccatgtgctgctcctggacccagctggccaagggagtttcttttagccataattatttttgctgtgtgttttatgagatgtcagagaagtcaggaaaataatttttgaggggctgaggatgttgtaatgaacttgccttcttcactgttgaccctatgcagatcagagaaacctgggcatgtctatgcgtgtgg

SEQ ID NO: 36582 - DNA, 1064 bp, Homo sapiens
aagcataacaggaagtttcacctgggccggggttggaaggtttatctagtttagcagcgaagttctaagataaggtctgaaatacaatttacaccttgtaaagacgccactcccctggcccaagcactagttgtaaaagtcgatttgatcacaaagtgaccctgcgtggttgttttgggagcgcagtggctgaaggcgaaggaggtgggggtgtgtcgagacttgtggaccaggtgactgctgagaaggagaaaataagccaggtacacaactgcggaagagctctccagggttaggggaaggctgtgtccttgtcactgctgtgtgtccctggctgtacactccaattgtctggaggcggtggcgtgttggacagtcctggttgctgagtcatgctaaaacactgttgttttgactcactttgtgacgtaggtctttctcaccagtcaagaaaatataatccggagatagcctctgggctggctttagctcagcggttacttcgagtacattgtaaccacctctctgggtggttcgagacccgcgggtgctttccagctcttttactgctgaagttcagctccttttccatggggaaccatggagaaatggctgattttagcactgggcaggaaatacagagatggacagggtgcatctcacagtgctagaaagtaaggaagtgcttgaaaaccaaaaacaggccgggcgcggtggctcatgcctgtaatcccagcactttgggaggccgaggcgggcggatcacgaggtcaggaaatcaagaccatcctcgctaacccggtgaaaccccgtctctactaaaaatacaaaaaaattagccgggtgtggtggcgggcgcctgtagccccagctactcgggaggctgaggcaggagaatggcgtgagccattcgggaggtggagcttgctgtgagccgagatcgcgccactgcactccagcctgggcgacagagcaagactccgtatcacaaaaaaaaaaaaaaaaagaaaaaaaagaaaagaaaacctaaaacaaccaaactcttaactttaaaaatatttttc

SEQ ID NO: 36583 - DNA, 1052 bp, Homo sapiens
aatgagatggatactcacagatcctgacactggagacttagaagtattttccttcgctttctgatatattttggatgtagtcggcctaggacttcatagatacataagccgattcacaaccaaccagctcgagaaaccgcggaatatcggcttagagcctgccatggcgaatcggctacagcgcggggaccgcagtcggctgctgctgctgctgtgcattttcctggggacgctgcgggggttccgggccaggcagatccgatattcggtgccagaagagaccgaaaagggctccttcgtgggcaatatctccaaggacctggggctggagccccgggagctggcgaagcgcggagtccgcatcgtctccagagggaagacacagcttttcgctgtgaatccgcgaagcggcagcttgatcacggcaggcaggatagaccgggaggagctctgtgagacggtgtcctcctgttttttaaatatggaacttctcgtggaagacaccttgaagatttacggagtggaggtggaaataatagatattaatgataacgcccccagcttccaggaggacgaagtggagataaaagtcagtgagcacgcaattcctggggcgcgatttgctcttcctaatgctagggatccagatgtgggcgtgaactccctccagagctaccagctcagccctaataattacttttccttgcaactgcggggcagaacggatggggccaagaatccagagctagtactggagggaagcctggaccgagagaaagaggctgctcacctgctcctcctcacagctttagatggaggcgatcccatccgaaagggcgcagttcccattcgtgtggtggtcctcgatgtaaatgatcacatcccaatgtttacacagtccgtatatcgcgtgagtgttccagaaaacatcagctccggaactcgggtgctgatggttaatgcaacggatccagacgagggaatcaacggggaagtaatgtattcatttcggaacatggaaagcaaggcttctgaaatattccaattggatt

SEQ ID NO: 36584 - DNA, 1066 bp, Homo sapiens
gcaagcttgggattatatccaagatttgtaattccaatgtacttacttctgtcagtgtaaacaaagtacgatttctggactagatgacttgggcattgtgggggaggtggaaattagaggtattctctgtttttcctgtaggatcttgcatttcttcctcttgctgcttgtctctttgtgtcgggaacaggccccccaaaatctggccataaactggccccaaaactggccataaacaaaatctctgcagcactgtgacatgttcatgatggccgtaatgcccatgctggaaggtagtgggtttaccggaatgagggcaaggaacacctggcccgcccagggcagaaaactgcttaaaggtgttcttaaaccacaaacaatagcatgagtgatctgtgccttaaggacatgcccctgctgcagataactacctcaatccatccctttatttccgcccatctcttcgtttcccataagggatacttttagttaatctaatatctatagaaatgatgctaatgactggcttgctgttaataaatatgtgggtaaatctctgttcagggctctcagctctgaaggctatgagacccctgattccccacttcacacttctaaaaaaaaaaaaatttttttttctgagcttggagaaatatatcccttagtacacttggcatttataaagcagacatcaataaatttatatatatgtgacagataccaacaacaatccagtccccttccctcataccttatttatgtacatatattttatataatagatataatttattaacaatttataaaattactttgttaatactctatatcattttctagctgaatttatcaatgataatgctcttttcccacttttatttttttcccattgaccatgcagcagttttgtgtagaccgtctgataacaactgatctgtttatctaggggggagaaatctaattcaatggaaaatataaataaaattgtgataaacttttgtaaatagagtggcttttaactacacttgagatggctagcaaattcataaagtgaatttactttctt

SEQ ID NO: 36585 - DNA, 1035 bp, Homo sapiens
ttaacagtagccatttttagtggttgaccaaaaaaaggatttatattttcaatgccagcacactcgatgttctgttgggaaaaataataatgatttttgtgtgcttctccatatggtataatggaatgatttgtggatggaaataaaactgttctaaaatttttgtgacagctggtttaaaaatcttaagtgcctaggcacattcttgattgagaagccacagttttaggccataaaagatgggggaaagatttttatatgagacaattttgtgagtgttactttttctttgtctgaaccatagtgaaatctaaacaaggatcttgtgaaacttattttaaagaagcagtttacttcaatgggatcttagataatttcaccagaaaatggatcaccgaaaccagaaggctggtgatcattatttggtttgggccatataagaattgaaactaacggcttagctttaggatttttaggacacttgttgataatttaggattcataattaacatatgtgttgattgttttctgagactaactgggcaatgggtttggatgtgtttacatttattctgattccagtcataaaattatgtcaaggactttccttgtctttttatgtgtatgacagatgtgtatgtatccatttcatctaacaagttaaagcgttcagctataatttaaaatttgtagcttcactgttttatagtacctaaaattggaatgtaatcagtcagaagacattcatccactgctttcattccagaagtattatgctttttgaagcagcaatagcataggaatgttgaggagactatactatacttttatagcatatttaatctcgtagatcacttttcaatgaattataaggctgatgacaaatgagcaaattgtatcagttttctttatgacatgtaacagagtatagctgtgatcatgaattggatagttctggtgtaaaaatctgctttatccccatataagatgtcaggttcagaaaagcaaacacatagtttcgaagagatgttgatc

SEQ ID NO: 36586 - DNA, 1078 bp, Homo sapiens
caaaaaaaaaaaaaaaatatctagagatgggagaatcatatggctggcataaaaaggtcaagtcaaagatatgtaagattaaggctttacgatgctccagttctagtaaaacagaccaggtacttgttttggtgtgaaattgccaatataagtatagtactgtacatattagttgtttagcttaggtaagtcttttaatctctttaaactccagtttcctcatctataaaataaagagaatatctactttgcaaacttgttgtgagagtgaaaagtaatgcatataaagtccctgtatggagcaagtactcaataactatttgttgaactaaaaatgataatactgatattcaccatttattagcatccctatgtgccagacactgtaaacaattaaaagttatcattctggtacccagagtacagtatgagacagacatgcaaaaaaaaaaaaaaaaaaagataatggagatctgcatagcataagatgcagtgggaccaaacgggaaaaaacacctaaatgagcctggagaaaggaagaaatgatagaggtggtgatgcttgagctatgatctaaaggttgagtagtagcttgtcagacagtaaaggggaaaggacagggcagggaggggccattgcaagaaattccatgcagagggattatggtatttcattatcactgaaccttaaactgtgtgtgtggccgggtacggtggctcatgcctgtaatcctagcactttgggaggccaaggtgggcagatcacttgaggtcaggagtttgaaaccagcctggccaacatggtgaaacctcatctctattaaaaatacaaaaaattagccaggtgtggttgtgggtgcctgtaattccagctacttgagcagctacttgagaggtcgaggcaggagaattgcttgaacccgggaggcagaggttgcaatgagctggtgtcaggccactgcactccagcatgggcaacagagagagactccatctcaaaaaaaaagtgtgcgtgtaaaacagacagtctttgtaggagatgaggtgaagcaagtaggcaggagttagatcctgagtta

SEQ ID NO: 36587 - DNA, 1029 bp, Homo sapiens
gggtactccagaggtgccactggtggaagggtcagcggagccccagcaggaagggtgggccagccaggccattcttagtccctgggttggggaggcagggagctagggcagggaccaaatgaacagaaagtctcagcccaggatggggcttcttcaacagggcccctgccctcctgaagcctcagtccttcaccttgccaggtgccgtttctcttccgtgaaggccactgcccaggtccccagtgcgccccctagtggccatagcctggttaaagttccccagtgcctccttgtgcatagaccttcttctcccacccccttctgcccctgggtccccggccatccagcggggctgccagagaaccccagacctgcccttacagtagtgtagcgccccctccctctttcggctggtgtagaatagccagtagtgtagtgcggtgtgcttttacgtgatggcgggtgggcagcgggcggcgggctccgcgcagccgtctgtccttgatctgcccgcggcggcccgtgttgtgttttgtgctgtgtccacgcgctaaggcgaccccctcccccgtactgacttctcctataagcgcttctcttcgcatagtcacgtagctcccaccccaccctcttcctgtgtctcacgcaagttttatactctaatatttatatggctttttttcttcgacaaaaaaataataaaacgtttcttctgaaaagctgaacgtttctgtataagcgatggaagctcctggcatgtgtgcatgaagtgatgagctgaggtgggtgctggaagaagggcggaatcgggaggccactttgtgtcattgcgcgtctagatgtttccgaattgcgtgtgtgtgtgtgactgtgcaatatggttgtgtatgcttgcaatgccgttgtgcctatgagacagtgtgcgattgtgtgcctatggatctgtgtaccgtgtgccattgtgtgatcggtccgctgtgggggtggggatctgagtgcggcgtgtcagtgtgcagtggagtgtgcagt

SEQ ID NO: 36588 - DNA, 1047 bp, Homo sapiens
ctcatgtttgtcacagctcatccctgctgctttcgtgctgtgtactttggacaaatgacttgacctgtgtgacccttggctttctcatctgtaaattggtgtcatcagcagagctgagcctgggatgtctccatgacagggttacccctctatggggagctgtggactaaggccatatcataccctgaagagaggagcattttcccatgttgccaaagaagatctgagccctagggctgtcccatagtgagaagtaggaagtgggcctggattccagaagtcccaatgccatccctgtgctctgtcactactgctcatatgaaagggtctgcacgcaagctgtcctcagtaccatggatacttgtctctgttcttcacaatgctggtgccttttcttctggccttagcccacacgtcacccccacagacaggctttccctgactccttgtcttgtcaggaccccttttatgctctgtgtaactctctgattagtttccttcttggcatttaacatcactagtaattactctatttctctctgtagttgtgttttgtctttctaaacacaagatataaacttcatgagggcagaaattatgtctgtcttacttgctattgtatgcagtgcctggagcaacaagtaagtatctgggtcaacctgtgtgttttttttaggctggagcgcagtggtgcgatcctggctcactgcaacctctgcctcccaggttcaagcaattttcatgcctcaacctccgagtagttgggattacaggtgtgccccaccacgcctggctaattcttgtatttttagtggaacagagtttctccatgttggctggtcttcaactcctggcctcaagtgatccacctgcctcagcctcccaagtgctgggattacaggcatgagccactgcacccgaccctgggtcaaccttcttaagcataacataaggagagacaggagacagggaaaaccaaggagtctctgggataagagctagctcaggtcttctgcagacctgtcagagaagaaacacctttacaaa

SEQ ID NO: 36589 - DNA, 1039 bp, Homo sapiens
aaagtgtttaagcctgagtgtggtccgaaggtttagagcagacacaggatgggagctttgatggtggaggcggaaagaaagatcccaggcaggagagacaattgaagcaaaggccttgagttgagaattggccgtgccctcatcctttcctgtttcctttttgtttgggcaatgaaaagagcatggactttggggttggatgtgcctgcattcaggtcttgacactgctgtattaccgctcccaatttcttcatgaaacaagattaacagtatcacttgtatcagttagggtttgttggttatgagcaacctaaacccactctggctaacttaaacataaaaggaatctattgggatctattgacctgccaagcctcagaaaggacaggaatcagggaagcttcagagacctaagaggcagcagctgatagtatcttcagagtgctgctgtcagaataaacctacaagggctgttttctctccttgtcccaaccagatcaaggttcagattcctgagaaagaacctccgtggttaggaagaacacaagcacattgattgacagcactaggggaggtgttgttcccaatgggaaatctagatgctactaccaagagaaggaggaatggtttatagtagggcagaacccactgctgtccatggcaaaccagtgaaatatttagaagatagaaatatatgcaaaggccaggcacagtggctcacgcctgtaatcccgacactttgggaggccgaggcaggtggatcacctgagatcaagagtttgagacaagcctggccaacatggtgaaaccccatctctactaaaaatacaaaagttagccaggcatggggtcaggcatctgtaaacccagctacttgggaggctgaggcaggagaatcgtttgaactcaggaggtggaggttgtagtgagctgagattgcgccactgcattccagcctgggcaacagagcaagactccatctcaaaaaaaaaaaaaaaaaatatatatatatatatatatatatgtaaagtgtctggca

SEQ ID NO: 36590 - DNA, 1048 bp, Homo sapiens
ttgcaactacatcctcagcctagaatagcatcttgatgaatggattaattaatttttaaaaagtgggataagaacacaaagaggttatatataagaatgtatttcgtagagttgtatgtgaaggcaaaaaaacccaaaaaaacctgaaagtttcttcaatggaaaactggttaattacatctatttgggccttaaaatgatgtgctagatctgtatgtcagggaaagacattcatggtgtactattaaagttaaaaaaataggttataaagtagtatagagtgatctaagtctctctctctctctgcccccccccacacatatgtgcgtgcaaatgcgtagatgtctaaaaggtatgtgtgtgagtatgtctaacacatatatgtgagaagatatttgcaaggctgtacgctaaaattttaagcaagaatgatctttaggaggctgaatttcttgggattttatgtttctatttttggtttatatttttaaattttagcttatctgaattttctgactagtctataattattatgtattagttaattaaaataatttttaaaaatttcactgagtgcaaaagatgcttacagagttgccagccgactgggtgtttctccctttgccccaggcggtcctttattatcagttggctgccagccagggccacagcctggctcagtaccgctatgccaggtgcctactacgagacccagcctcttcgtggaaccctgagcggcagagggcagtgtccttgctgaagcaggctgcagactcaggcttgagagaggtgagtgccattggcagggtctgttcaaggtctctgaggcctgtggagcctgaaagtgaccaagatgccttcttttccttcctccttgaccacaggcccaagctttcctcggggtgcttttcaccaaggagccctacctggatgagcagagagctgtgaaatatctttggcttgcagccaacaatggggtatgcgatctcagtggacaagcatgttggggatgaagcctgataagagaagggattttggaactggtact

SEQ ID NO: 36591 - DNA, 1050 bp, Homo sapiens
gtttttttaattgggagagtgaatatgattcatgtagtgaatgtaagcacttttcatatagtgtatttaatccttgcaacaacctaataaggtaggtgctattagcatcccactttataggtaagaaaactgaggcaccatgaggtagagtcacgtgcctgagttaacacagctggtaagtggtagagccgtgatgggagtgcagacagtctggctatgcagctggacacccagcctctacctgatcctgttcctcccaggagcatagttctcagagagaggagagacaatcgaggatccagagctggggcaaagagcatagcgttttttgttttgttttgttttgtttttttgagacggagtctcacactgtcgccctggctggagtgcagtggcgcgatctcagcgcactgcaacctccgcctcccgggttcacatgattctcctgcctcagccttctgagtagttagggttacaggtgcacaccaccacacctgcctaattttttttgtatttttagagacggggtttcactatgttgggcagactggtctccaactcatgacctcgtgatctgcccaccttgccctcccaaagtgctgggattacaggtgtgagccaccgcgcccaggccaagcatagctttttaaaggagaagagtttccttttctgtcagccctcccaggcagagattcaggaaggcacagggcctttgggaagacaaccctccaccttcgcctccttgctgtttcagggcaacataggagcccgactcccaggtttgctataactggcctgagtgtttcctgtagccttcgttgtgcatgctttcagccagcctatgcaagagaagcctccacactgccctggctggaatctccctgggtggagggatccccctctcctttgtgttgggtgagctctgagcctctggcatttcgtagttgagatcccttgctatggggcgggccaggactgggccttgaccgtgtgtggatgaagtcccagcatgcctgacttcatcttcctcctcccttagcatgtcagttc

SEQ ID NO: 36592 - DNA, 1085 bp, Homo sapiens
ttgttgaccagatgtaagactatgttgtagagaaggcaaaatggtgtcattgaattattcatttattcatcttttcattcattcaacaagtacttaataagtgccaggcagggtggttgctatgggagtaagaaggagaaggagccccagctgctgccctcagcgtggtcacatctgtcaggatgtgaaggttgcaggcagccccacagggaggctggctggagatcagggcagcgaagagtgtttaccacaggggttgcctctgggcatagggaaagaatgggggctctgtgggagcagagggcccctaacccaacttggagcagggaggaagcaggggggtggtactggattaagttaattcattcatttcaacagatgttactgagttcataccacatgccaggcacctctgctgagacccaaaggctccataggagtttggcaagtggaaagagaatgaaggtctgggcaaggggtggggaggttttcaggcagaagcactgcacactgaaaggctggaagagaaggtagagtttcagaaagactggagaatggagtaggggatgggtgagatatcacggccagaccctataggccattggaagggagaggcaacagatcaagtcctgggaggcggagttctagttcaaggccatttgtagcttattgtatagcattagacaggtttttagacctcctcagacctcagtttcctcatctctaatagggggctagaaatacccacacgccttcttctcagtgttgtcacgattaaatggtttgaaaaagttaaaaatcctctgcaaaagcaaggagtttgcactgttattcctagaaacactgcttcctcctcctgggtccatccccattcctcccttaggaggtccaccatgcccctctgtgcagcttgaggtaggaagtgtcaacctcagaggagagttggaagaggagatggccaggactggggtttcactgtgacttgggagactcggggtcttattgcctgcctcagggaagatcccacctcccagcccaggcccagaagccctcctaagatacctgccaccctttgctcaagtgac

SEQ ID NO: 36593 - DNA, 1079 bp, Homo sapiens
gtttcaccacgttggccaggctggtcttgaactcctgacctcaagtgatcctcccgctttggcctcccaaagtgttgggattacaggcgtgagccactgctcctggccagttttttgttttcttattaaagcataattttacttaaaataaactacacatttaaatcatacaaggctagcatggtagcttacacctataatcccagcactttgggaggccaagataggaggatcgcttgaggctaggggtttaaaaccagcctgtgcaaaatagcatgactccatgtcttaaaaaaaaaaaatcaggcatgatggcaagtgcctgttgccctagctacttgggaagctgaggtagagaatcatttgagcccaggagttcaaggctgcagtgagctatgattgcaccactgcactccagtctgtacgacagagtaagaccccatctctaaagaaataaaactaaaatataaaataaattggacactttgcttagttttaacaaatgtgtagacccctataattgtcatctcagtcaaaatgtacttggtttgattttgaagtgaaagagaggttttaatttatgtgcccatctggtttacactagcatcctaagaatcgcctcaggttcagaactggttgtggaatcatcaaacctatggtgttttgtatttccctccaggtcaaagagttagtggaagcagagttatttgcccgttatgaccgccttctcctccagtcctccttggacctgatggcagatgtggtgtactgcccccggccgtgctgccagctgcctgtgatgcaggaacctggctgcaccatgggtatctgctccagctgcaattttgccttctgtactttgtgcaggttgacctaccatggggtctccccatgtaaggtgactgcaggtatgttttaactgtgaacccaaacccccatccccagtctctccctcacatttcactctactaccagggccttatgacttcattcttcaatttggaagtattcatttagcagatatttctgtgtcagtgactatctcaggccttggggctgtagtagtgaccagaagagac

SEQ ID NO: 36594 - DNA, 1050 bp, Homo sapiens
tttgactagtcatcaaatgctttctccttgagcccagagaggcctcagaatcttcctcaacatggcacttcggaaagctaccctctgatgaagtagacacaggagtgaaatgtgtttgccgtttccagtctacgtaaggaatcataaatcaggcccttaacgtcgatttaattggactttggtggcttagtcttcttcagactaacagggataatgataacagctacctcacaaaattgcagctagagcagataacaataacttcacggggttattctaaggatgaagggaacgaatatcatgctattcaaaattgttatatttgttacactggtgtataatatatagaaattgagagggttagaaacttttatagtgatttcacataattttatgtcaaatctaataaaaatttagactttttttcatttttctaataattgattgttagctgactgtggtggtgcacacctgtagttctagctattcagaaggctacagcaggaggatcttttgagcctcagttgagactagcttgggcaacgtagtgagactctgcttctaaaaaaattaaatcaagcaaacctggttatatcttataaaagtgttgatctttgacgtatcagagaaaaaataaactgggcctttaccataaatagtttgagaaacagtgggctaatacatgtaaaatgcagaatggggctgggcatagtggctcacctctgtaatctcagcactttgggaggccaaggtgggcggattgcttgagtccaagagtttgacactatggcaaaaccccgtgtctacaaaaaaatacaaaaattaacgaggtgtggtggtgcacatctgtagtctcagccactcaggttgctgaggcgggaggatcgcttgaaactgggaggtagaggctgcagtgagccagattgcaccactgcactccagcctgggggacagagtgggaccctgtctcaaaaaaaaaaaaagaggaaaaagaaaaatagtaattattaatgctattattattgtagttattacttgctaatgttagca

SEQ ID NO: 36595 - DNA, 1053 bp, Homo sapiens
ttacaaagttatataaaagttaattttccatttcactttgtagagaaattaatggacttacgaaatgaatacctgcaagcggatgaggctaataaaagacttttggatcaaaggtatggtaagagagtgattcagaaggcactggaagagatggaaagtaaggagtggctagagaagaactcaaagagctgcccatgttgtggaactcccatagaggtaaatgttttgggacagacttggaggccatcagacttgcaaggatgttatgattaccttaagaagccttactagtcaattttatgacttacaaaacacatgctggtattattacaccttcttacgtggaaggtggaaatttcactattagatcttgttatcgaccttaaatgtttgtagacttcccttttcaaagtatttgcttacagtgaccattgttctcacattgtatccacctcaaaattgaatgggttgtaaggagggcatactagagctatggtcaactcttacctcatctatgtgattaaaaaaaatcaaatctgatctctcagaactatttatcctggaatgctgcacacctgtttaagatacactcaggaattaatttgagtcaaaataattagacagatatattgcttcttgacaaaaatcttaatatgttttaaaatcaaaatacatcttagcatttgattctattgttctaatctgttatgtctgaactgaacatagtgggctccagttaaggaaactaggactatatgtaatcacttttttttttttttttttgatactgagtctctcttgcccaggctggagtgcggtagtgcaatctcagctaactgcaatccccgcctcccaggttcaaggaattttcatgcctcagcctcccgagtagctgggattacaggcgccagccaccacacctggctaatttttgtatttttagtagagacagggtttcaccatgttggccaggctggtctcgaactcctgacctcaaatgactcgcccaccttggcttcccaaagtgctgggattacaggcatgagccaccac

SEQ ID NO: 36596 - DNA, 1072 bp, Homo sapiens
gctagaggttcaagaccaacctggccaacatggagaaaccccatctctactaaaaacaaaaattagccgttagccgggcctggcggtgcacgcctatagtcccagccactcgggaggctgaggcaggagaatcacttgaacctgggaggcagagattgcagtgagccaaggtcgtgctactgcactccagcctgggtgacagagtgagactcagtctcaaaaaaaaaaaaaaaaaaaaaagcagaggttgtaagtatacagtttggtgaatgttaaggtttgctttttgctgttttttgttttttttgctttttccttttgagacaaggtcttgctctgttgcccaggctgaatttggagtgcagtggtgtgatcacttctcagtgtacccttgacttcctgggctcaagtgatccccccacctcagcctcccaagtagctgggacttgcaggtgtgcaccactgtgcccggcttttgtttgtttgtttgtttgttttgtttttttcagtttttgtagagatgggtctcactgtggtgctcaggctggtctcaaactgctgggctcgggatcctccaacgttggcctcccaaagtgctaggattacagatgtgagctattgtgctcagcctattaaggcgtttttgaaagtgactagcagtagacataagtgtgtaaaacctgatagggaggagtttttcttgtttgctttttggggaaagacagaagaatggatgttttagaggaggtatggtgacggttgtggaggacaggctgtcttttatcctttggaaagtcatttaaacagaggcaggtgtaaggcactcttgttcttgggtaacaggacatgtctaacatctttcccctcctctgcttttgcagtggcattcctctttaactggattgggtttttcctgtctttttgcctgaccacttcagctgcaggaaggtatggggccatttcaggatttggtctctctctaattaaatggatcctgattgtcagggtaagttgtataacagaaaagatgggctctacagagaggcaataatcagaatatttttgaatattc

SEQ ID NO: 36597 - DNA, 1727 bp, Homo sapiens
actcctgacttcaggagtttttagaaaaagcattccagttttttctagttctagaggccttgataactttaagaactgaaattttaatgtttattgaataccgtgatgtcagtatacagtaatcttaaaactatgttaaaatgcacttgtgtctccaaacatcctgccttcttttgtgactacatccttctcttagccaaaataacaagctaactagagtttcaatattcaatatccttctctggcagatgttttctggcaaaggccttcctgcatttatgaattctctctcaagaagcaagagaacacctgcaggaagtgaatcaagatgcagaacacagaggaataatcacctgctttaaaaaaataaagtactgttgaaaagatcatttctctctatttgttcctaggtgtaaaattttaatagttaatgcagaattctgtaatcattgaatcattagtggttaatgtttgaaaaagctcttgcaatcaagtctgtgatgtattaataatgccttatatattgtttgtagtcattttaagtagcatgagccatgtccctgtagtcggtagggggcagtcttgctttattcatcctccatctcaaaatgaacttggaattaaatattgtaagatatgtataatgctggccattttaaaggggttttctcaaaagttaaacttttgctatgactgtgtttttgcacataatccatatttgctgttcaagttaatctagaaatttattcaattctgtatgaacacctggaagcaaaatcatagtgcaaaaatacatttaaggtgtggtcaaaaataagtctttaattggtaaataataagcattaattttttatagcctgtattcacaattctgcggtaccttattgtacctaagggattctaaaggtgttgtcactgtataaaacagaaagcactaggatacaaatgaagcttaattactaaaatgtaattcttgacactctttctataattagcgttcttcacccccacccccacccccaccccccttattttccttttgtctcctggtgattaggccaaagtctgggagtaaggagaggattaggtacttaggagcaaagaaagaagtagcttggaacttttgagatgatccctaacatactgtactacttgcttttacaatgtgttagcagaaaccagtgggttataatgtagaatgatgtgctttctgcccaagtggtaattcatcttggtttgctatgttaaaactgtaaatacaacagaacattaataaatatctcttgtgtagcaccttttactgtagattagtgcttaatttcttggcttgcatttgttgattgctaaggcaattttttctaatcttagggaatcattcagtagatgcgattaaaaaactaatgttgggtcaatttttttcttcattttcagcacaagaagtcctcttatatcctactaaatacattcctaaaaatgtatttgaacattggttctgtaaaagataatggactaaaaaagtagagaggagttgtagagatcttaaatcattctggaattcctaattatgcttcaatttttagacataattttagataatttatttccagtgttttctgcatgttctcatttgttctttttctcagttgaatgcaccaactggtttgagtcctgtgagcattcagtcagttgaaattaaagattcctcatttctcctgatttctattctt

SEQ ID NO: 36598 - DNA, 1030 bp, Homo sapiens
tttcattttctatttaagaaatatgaagaaaaaatacaccaagatggtcaaattactacacaaatcagcaccagcacagtctgatagctgcaaatgtccattcatctgctgtgtatgtatatccagaatcagcataggaagtcgttcaggatatcagtatataatgcacagaagtgtgggttgtttgaaagccaaacaggaaaattaggagcctcctggattgacatttcaatgatccctctaaccagtttatggattattatgaataatagtgtagtgtgttctttttcagaagttatatttgataatagagaagggagttttatggaagtttctttgaagatttttttttttccatttcgaatcagattatagcaacaatggagtttggaagtttgtatggcctataatgttctaagttccagaatgaaaagatctgtaacaatctgaatagatgtggacacatatagcagagagaactatgtaaattatcttgcagaacaaaatagaagggtcctaaatcacgttaactcaaacattgtagactagctttgtgtttattcttcaggtccttgcgccttatttggttttgtatattcaacgaactgaaatatttggaattcctatttctacgtatttggtggtccataagactttgtcaaatgtaaacctacagtttgatacgctttaaaatacctagttaagaggatgatttctctttaatcgtttaaatgttctgaaaattaaaatcttttgaggcacatgaagtgggcaccatatatcatctagagtccttactggtattcaggatgaaaatgttcacgctgcattaattgtcatttttctctcccatgttctttctcactttgatacgttaatactgataatggataaagagtgagtttttataataaatggttttggaaaggtattcataggaaccgcggttatttacttaaggttatggagtaaactagcttggaccttgggctgcaggacgactaggattcacccataacgacacagtgcc

SEQ ID NO: 36599 - DNA, 1024 bp, Homo sapiens
cttatttgagtagtttggcagatgtcctttagtcttgttttctctttcttcattcattaattcaatatgtattgattagtatgcttaaagcatacatgtatgtgaataactctcccttaaaggaggataccatggggggacagtgagatccagaaccactcggtgtgctaaggacttttcacgtcttatctcagaacaaccttatgaggtgggtaggaaacctaagaaggggtctgtgaaaaaatgggtagcggggggtgattcatgaagggccccatgtggggctgccagagtgagaatctcagctctgttgcttgctctcggtgcaccttgggcaaatcactgtgcctctctcaccttctgttttctcatctgtgaaacggggataacagtgcctgtctcatgggattttgagagtcaaatgaaacaatgtttgtaaatttcacagcatttctctgatacacagtaagatctcaataaaaggtggctatttttaaaattactattattaggtactgttatctccttgttttcaatatacagaacctgagccttggggaagctgcctcagcttaggtcacacagcgaatacagcaaaggatggagatgtcttttttttttttgagacggagttttgctcttgttgcccgggctggagtgcaatggcgcgatctcggctcacagcaacctctgcctcccgggttcaagccattctcctgcttcagcctccggagtagctgggattacaggcatgcgccaccatgcctggctaattttgtatttttagtagagacggggtttctccatgttggtcaggctggtctcaaactccggacctcaggtgatccgcccacctcggcctcccaaagtgctgggattataggcgtgagccaccgtgcccggccaggatgatgatgtcttaactgccattaggtggcacaaatagagtgccacgaagaggctcaagggagagaagcagcacctgtgttgtatgggtggtgggcagtgctgcaggtggactggc

SEQ ID NO: 36600 - DNA, 1031 bp, Homo sapiens
cataatggatgatataatggccagtcatgtctcaccagtcagcttcatcaaatcttgacactttaccacatttatttttgaaaaaggaattaaagcattgctgattcatatcctctgataaagcaatgctagggtaaaggaaaaaggaggcgaaactgtttaaaacaaaagtgacttaagacacctaatgaaatgcaatgtgtggacttgggttgggacttgatttaaccaaagcaattatacaaagacctttttgaggccattatggaaatctcaatgtgggctgcctatcagatgatatcaaggaattattaattttgctaggtttgataataccatggtgaagatgaaaaaaacgttattagcttaaagaagataggaatttgtaggagagaagtttgtctttttaatgtttctactttctgcctccttaataaataacagtgttaccttggcagtttcatctgggcgttgtttctctcctctctatatcatcccccaagtctactgaattttgaggtcccagctggtgtcagagttttgctctgcaattgcttttttctggctcagtctgtgtgtccagttggagtgagtctgctcagaaagtggattcttccaccttgggaaccctgtgcatccagagactatgggacatattccttttgactcaatgtttcacttgggatctggcaaacatagacgtatctcttgagggctaggagtgccactgatggggccacattatcaatccctgcagaagaaaacagcaggaacaggctgatggcttgtgaaatatttttcaaatttcttccatacacaatcaaggaaaaaggaaaatgcagaagtggaggccccagcttctgttctggctgtattgtttgccttccaggcaaagagagtatttgtgtgagaattaagggaaagtgtctcactgtgagcccaatcccagaaggtaattccatatgaagtttattctctgcaggcactgttgtgggcgtgccagaggggagggcggagtatgggaggtgggc

SEQ ID NO: 36601 - DNA, 1061 bp, Homo sapiens
ttgcattgtggtctgagagacagtttgttatcatttctgttcttttacatttgctgaggagtgctttacttccaactatgtggttaattttggaataagtgtcgtctggtgctgagaagaatgtatattctgttgatttggggtggagaattctgtaaatgtcttttaggtctgcttggtgcagagctgagttcaattcctggatatcctttttaactttctgcctcgttgatctgtctaatgttgacagtggtgtgttaaattctcccattattattgtgtgggagtgtaagtctctttgtaggtctctaaggacttgctttatgaatctggttgctcctgtattgggtgcatatatatttaggataattagctcttcttgttgaattgatccctttaccattatgtaatggccttctttgtctcttttgatctttgttggtttaaagtctgttttatcagagactaggattgcaactcctgcttttttttgttttccatttgcttggtagatcttcctccatccctttattttgagcctatgtgatgggtctcctgaatacagcacactgatgggtcttgactctttatccagtttgcaagtctgtgtcttttaattggagcatttagcccatttacatttaaggttaatattgttatgcatgaatttgatcctatcatgatgatgttagctggttattttgctcgttagttgatacagtttcttcctagcatcaatggtctttacaatttggcatgtttttgcagtggctggtattgttgcttccttcaggagctcttgtagggcaggcctggtggtgacaaaatctctcagcatttgcttgtctgtaaaagattttatttctccttcacttatgaagcttagtttggctggatatgaaattctgggttgaaaattcttttctttaagaatgttgaatattggcccccactcttctgacttgtagagtttctgccgagagatccgctgttagtctgacgggcttccctttgtggataacccgacctttctctctggctgcccttagcattttttcctt

SEQ ID NO: 36602 - DNA, 1050 bp, Homo sapiens
gttgaaataaaggtggtcttttttgataaagaatatttgtattataaatgaatggatcttctaatttctcagtcttggctaacattccttaaaattaaaaacattcttacacctccgtattttcattttttgtgtaaaaatagattataaagtgtctttttctgttgtatgaatttttaatgtcatttttggcattttaattttaaaaattggttaaatatgacatatttaaaagtgtacattttgcatcttttagaactcttcagatgctgcctttggcaagagaaaggaaagcttctttcgccgctgatgactgaactaacatgagggctgaagtgtgcagcacatccgtgaaatcctagacagctgtaccaaatcccactcgtttgctaagagctgagctgagtgacaggggactttaattagagcagcttttaggaggactgagaaaatgaaaaaaaaaaaaaaaaaaagtgcatttggctggattggcctgacttgtgttctgacgtgcctctaattaaatcatcactgtttctttcctcagggatcaacgagcaagggctgtatcgaattgtgggtgtcaactccagagtgcagaagttgctgagtgtcctgatgggtgagtgccgcagtggctctgctaggcaggtccctggatggggggcccactctgaaaagtcaccaggtctgtgagtagatacagcctgtggcaaaggaatcggggtgtccgtgagctgtcacctagaagtcatctgccccatcggtcagttgtcatggcttcagacactgctgggaaaggttctgagtaggactggacaaaataaaaaatgccagggcccagacaccacaccctctctgtctgtaggctcagtgctctggtccaagtggcactcagtcactcatgtgaccaccacaccctactctgtctttaatagcttatgactccctccgttctcttttgggacaggtatttagtgggacacacccaatgcccaaggaaaggcatcattctgggctccagaggacctcagagttcatgttcctgat

SEQ ID NO: 36603 - DNA, 1034 bp, Homo sapiens
aaatgtatgtgagatcaccaagcataatgctccccagtgaaaacaggactcatcgaatgccaagacgctcagtcatggttgattaccagaccacagaaaacctggcagagctggcacgtcagtagcagacacgtacatgtatttgatatgcatgctcacccatagctgccttggagacaaggtgctgtcggcagaccagaagttgggaaaaatttctgataggcttaggatctggctggcactgctgtcaggaataacaataatactacaaaatatatttatagtgcttttcagttttcagagccacttgaaacagtttgcagagtgtttcatttgattttggcactaacccaaatcatagcacttggcatactgtactatagttgcccattttcttctctgattcctgctctaagctgtaacgtaggtcaggcccacacctgtttcttgttcactattgtttccccagcacttgagggtgctctttccaggtgtgtgataaatacggatggaaagcatgatgagtgcagggcaactactatctcctacattttctaaatgagggacactgaggctcagagggcataagtggcctgttcaagtctgtgtggcagtccttttttttttttttttttttttttttttttgagacagcatctcactctgtcacctgggctggagtgcagtggtgtaatctctgttcactacaacctccgcttcccaggctcaaatgattctcctgcctcagcctcccaagtagctgggattataggtgcatgccaccatgcccggctaatttttgtattttcagtagagatgggatttcactatgttggccaggctggtctcaaactcctgacctcaagtgatctgcccacctcagcctcccaaagtgctgagattacaggcgtgagccaccgtgcccagcctgtgtggcagtcttaacctgtaagctcctgttcaagcctggacctttggattcaaagttcagtgctctttctgttgaatcagtacccagaagaaggagcattgtg

SEQ ID NO: 36604 - DNA, 1032 bp, Homo sapiens
gctctgtcttgaaagctcacaccagggacactcatgagctcagactccaggactcaaatagtagctgagttcatctcagatctctgtcatttcttcgatcttttttccgagtacaaacaaaacaggcaactcatcttatctctgaatactgtgctcagagcacccagcccacagcttggcccatattaggaattttttttaatggaagagtaaataaataaacacaatcatgcctgtggtagacctcatgggatcatgaaataactcctcattatgcagaaatgaaccctttatgaattgagccattacagagctatttgagaaacaagtggcacactatattaggcataaagtcatgtggtgactgaaacattcttgctgtgaatcaccttattaaatacctttttgggtgatgaacatcattctcgggaaaatacagtgggccagcttcaagatctcttagctcatgagtcgctaaccctaagaagataggcagtgccactctgcatatgactaaactcttacatcatacaccacaaatttcatgtgctctttgatcttgagagaaacacttcatcttaactgacacttagtcatagggataccagtgacagaaaggaagaggctctgaaagaatttgccactgagtttatgagttgaactgacctggcctccaatatgaagggaagacagtgtttccagtagaaacatggcccctgtacttgtgctgccaaagccctaattttatcagttttttcaacaattatattttttattgtggtaaaatacacataacataaaatctaccatgttagcctttgctaagtgttcagttcagcagcattaagtacattgatcttgttatgcaagtgtcaccactatccatcttcagaactttttcatcaccccatactgaaactctgtacccattgaacaataactttccattctgtcctctcccatatatatatatatatatttaaaataaaattatatatatttaaattatttctgaataataggaataggtat

SEQ ID NO: 36605 - DNA, 1085 bp, Homo sapiens
tgaatggatgaataggaatgtgaataatacacatttatcagttgatttagctattggtgatgagaagatatcatttaaaataagtatttactgagaaggagaaaagtaagtatggcttctcaatctaaaacataggattacatattttttcctacattttacagctctttttgtagaaacaaagcaatactgacagaattttttcccagtacaacagctacttaaaaaattcctccccagtacagatgttttcttttctaaatgtgttaatttacattacttgatttacattaaagatgagtcttgtgaaatgtagagccatgacaaaagagaaagcaaaacatatttggggtaaaaggccaaatgaatgtttagacgtccaagaattctttgttataaaaagttagaaaggattggccaggcgcggtggctcatgcctgtaatcccagcactttgggaggccgaggcgggtggatcatgaggtcaggagattgagaccatcctggctaacagggtgaaaacccagtctttactaaaaaaacacaaaaaaattagccgggcatggtggtgggcgcctgtagtcccagctactcggcaggcctggacgacagagcaagactccatctcaaaaaaaaaaaaaagttagaaaggattttagtaattaaaaaaaaaattacataggtaatatatatgagaaggaactatacactacatttttaaaaggataagaaaataagtaaccataaatttgccaccagagataaaatcactgttatcagcttgtgtgtgtctttctagactagcactgtccaatagaactttgtgcatatggtctatatctgtactttccatttcagtagccattagccacatgtggcttttgagcacttgatatctggtaaataggccagagaaattgattttttttttgagacagagtttcgctcttgttgcccaggctggagtacagtggtgcaatctcagctcactgcaacctctacctgctgggctcaagcaattctcctgcctcagcctctcgagtagctggaattataggcatgtaccaccacacgtggctaattttt

SEQ ID NO: 36606 - DNA, 1784 bp, Homo sapiens
aagtgatctgcccgccccggccacccaaagtgctgggattataggtgtgaatcactgcgcccggccgagagggaccattcttattttgttttttgtttgtttttgagaaaggtctcactctgtcatccagcctgtggtgcagtggtgtgatcatggcttaatgcagcctcaaacttctgggttcaagcagtcctcccatattggcctcctgagtagctgggactacatacaggtgcatcccaccatgcccagctaacttattttatttattatttttagtagagatggagtctccctgtgtttcccaggctggtctcaatatcctggcctcaagcagtcttcccacctggacctcgtaaaatgttgggattacaggtgtgagccaccgtgcctggccctgctcttacttctactcaatattttcatataggtatttcaggagccagcagaggaagaacgagatggcagaaaaaagaaatatcctagtccccagaagactcgttcagaatctagtgaacgaaggtttgtgtttatctttaattaggaagacattgataactcactttttagttgccttgcaaggacattaaagggatttttaatatatatacttactcctctctctgtaaactcattaaagaaagatgttacctttcttcctttcattctttctgttttttgtcttttgtcttactttctgttccttttataaacagtcattattatgtgttttccccaagagctcaggggtgggagcagtccccttagagaatattaatgaaatgttccatttggttaggggtgcttagtattaaaatcatccaagtcatttttttatgacaagtagtacaacttgtatattgaatcatcagcctaacatcaaaaattggtctttgtttaggaacacttttttttgagccttttttcttttctatttcaaattttctgttttcccctgcccacccctccccatactttggattcacctctttttttcatttctccccacccagtataattgcaggagggatgttttttctctgtatatatttgattagaggaattatgtggtagatttgcaactttctaaaaaagcatagatatgcatttggatgactcaagagtagtatttatactatagatttgtttgcagacttggtttctatagcctgcatatggcttttatatctgtatattataggacacgtgagaaaaaaagagaagacgggaaatggagagactatgaccggtactatgagcggaatgaattgtaccgtgagaagtatgactggagaagaggcaggagtaagagtcggagtaagagtcgaggcctgagtcgcagtagaagccgaagtagggggcgcagcaaagaccgggatccaaataggaatgttggtgagtagatgagtgtccccctaaaaactctgtagttatttatctgtctctatcacaggggtgcaagaaattctcttaaagttgtacctttaatatgtctgagcagtgtaaaaactggaattgtctcaagaagctcaatatccattttgttagaaaacagggctctattctggggatggagtcaagggagtttgattaaaaaggagctattcaagtgtatcattgtacatgtctagacttaactcattttgtataatggatacaaatatcctttaatcaataaagctatcacgtgaggaagagggttgcctgcttttcttctttgtttggttttctaaaagtaattgatttgctgtaagggtgcttgaagtttataaaattaaatggat

SEQ ID NO: 36607 - DNA, 1083 bp, Homo sapiens
aaatctctaataggaatgtcattgtgataataatttattaaaatttctgtgccattgttctctgaggaggacagtacagatgccccaaatgattaattttcaacatcatttaacattttattagagggagacagttcttaatctagtgatgccttttttgtgtgtaattccatgagctgttttcaaaacctgaaaaaaggggaaaaatgggggtgggaggaagagaaggaatgccaaccagcagttctagttcttatattagatatctcagaatcacctgtgctttaatggcattttattattattgcctcattatagcttctggatgttttgtgcaagaaggaaattagcttgtgaatctgaagttaggaggagcacaatattcgtgggagaggtttaatctaagagtattgggggtgagacgttttctggattgaggacttctgaatcctagttgtgctgcttattggccgttgactcaaatgcctgtagtggccaggaagatcccctaaatgaggataatttgctgatcttatattctgaatcacttctatactgtaaatcatagaagtgactgacgtgtatgtgcgcgtgtgtgcttttttatttgaaatatggtttatgtgtgaaaccagctgttctcactctagtttgaagaagtgtacataaccaaatgaatacattttcttttcacctcaattaaaaaggtacctagaaattggagatatgatggataacagaggaaactcaattcttcacatatggtgtttgtgtatgtgaaaatttgtattaacaaatgtgcattgggctgggcacagtgactcacacctgtaatgccaacagtttgggagactgaggtgggcaggtggctgaagcccaggagttcaagaccagcctgggcaagatagtgagactccatctccgtttttttaaaattagaaaaaaaagtgcattgacatttggattaggtaattaatatatagagtagaaatgagtaggtgagtgaatctgaaagtatcagtatttaagaatggatgcatatatctatattctgtaataggagcatttttttttttttcagtt

SEQ ID NO: 36608 - DNA, 1050 bp, Homo sapiens
ggctccaaagggcaaaatttagtcttggaacagggactgaatcttttttcacagcaactcaaaatgagacaccttttgcattgcaacccagtatacacacacgaaacaaaagtttacaaaacaatacctacccaatatgcacctgatattttcatcctattagataaaaattcttgtcaggacccactatatggctttcaaaattacagtttggaaaaacagcctattgagttgcctgatggagtgcattttaaagtcactgtcttccttgccgtgacattgtagaaactattttgaatataaaatgttattactttatcttctgtttttcctttttttttttttttacttgatgttttttcttgaagggtattttgtagtttttaattttagaagcaagacaactcagtgacgttttaaacttgcctacagttttatatttttgtcattacttgtcttgggaagggagtggaatattaatatattggtgctacattttatgcaattcaaatcactctgcagtacttatttgtatattttttaaaaagctgtgaagtccataaaactacagctctttcttcttttttttttttttgagacggagtctcgctctgtggctcaggctggagtcagtggcacaatctcggctcactgcaacgtccgcctcccaggttcaagcaattctcctgcctcagcctcccgagtagctgggactacaggcatgtgccaccacgcccgactactatttgtatttttgtagagatggggtttcaccatattggctaggctggtctccaactcctgaccttgtgatccacccgcctcggcctcccaaagtgctggcattacaggcgtgagctaccgtgcctggcccacaactacaactctttaagggctataaatcaataaaagattatttggctttgaattaaattttgcacttaatttagagttcacttagccatcaacaatttaaagtgaaccaattttgatatctaaaaatatatattctaacattgtgccattgaatttcacctttttcaaacatat

SEQ ID NO: 36609 - DNA, 1023 bp, Homo sapiens
gtgctggaaagtaagaggaatgggttgtaaatattttttgtcatctccattggtgttcttttccacttgaaatttgatgcccttatttattttcctgactatagtactttggatcacaattttagcaattatctgaatactataataatatttaaattttaattttctgagctacagtatagatctgtggggtaaatgggactaaaaattaagaatatattttaatcccagttgagcataaactcattttgtgcaagtttgtgaaaaatgatgaagaaatcctacttctcagggaagttgggaacaatgaccagatacattttcagccagtatagtagattacaaatgctaaatggtatatgtatgggactgggcaaatgttgcatgtactttgtatttttcacactgttataaaattatattaatatgatactgtaccctaaggctaggtctatgctagaccaacaattcattcctgggcccctgaagatacttgtttggccctgctgtctatttagccaaggtgagtccctcattaacaagtacgaaattgctcacatcttcccagcctaagtgagtttttcattattagaagctagaaaaagatactgacagattttgttgtcagttggattattgggtgatttgtattaaatagtgtgcttttgtttagaacaaagttggcataaagattgggaaagcactgttttcattttatttcatttgacaaattcattcttagtccgatacaggtagacatttttttctttacatcaaaaaaagatgaagtatttgttaccaatgaattaccaaaatgaattttattttggaactagatgggttatgaataaataacaaaattgttttgtaacatgtgagaattgaaactgaaaagtatgaaataaggattttagtttttagtttgattttaaatgcaattactaggaatgggatgttttattttcgatatttaaaaataatgtgttagcagaacccaaatgatcctgaatttcacattttcct

SEQ ID NO: 36610 - DNA, 1040 bp, Homo sapiens
ttctaatttctgcttctggcctacctttccagccacacaactcactagttttgttggtatgcctactgtttcactcattaattgcttgccttcaattttctaaacaattccttttggttctttactctttgccttattcatacttttctcactggtttatttttttcttctaccccttcctgctgtttttcttgttgaaatcttaatttttcaaggcgcagcatcccaatataaacttttctataccctctcacagttagaaatgttctttgggtcttgatttttactcctatatgtttatcccattttactttgtattcatttttgtatttcatttaagtattttcaagcttcttgaagataagaccttttgacaaatttcttgcagtgcatagaatggtcccttaaatacttaaattactgaatgtgtaaatgatgaatgaatatagtaaaatgatttatgaaggagtgatacatgtttttgttttatcttttatcagcacccacaacacaagatcagaccccaagttctgctgtttcagttgccacgcctacagttagtgtttcaactcctgctcctacagccacacctgtgcaaaccgttccccagccgcaccctcagacgttacctcctgctgttcctcattcagtacctcagccaacaacagcaatacctgcttttccaccagtaatggtacctccgtttcgtgttccccttcctggcatgccaattccacttccaggtaaaccaacagattataatggtctttccagctatgttttcatattgtcagttagtttgttctcatgtgtctgttgcgtttgaaatttgccttgaatctcacctgtttgaaacgtttttgaaagattcatggctaactgcaatattttctcttaagttttggtaaatgtcctttttttgttgttgtttacatgtcctaaaattagagccacatttaaagctacacttattttggataatgccctcaatgagttaaaaatgattatcttttcatgtaaataatgttctaaatgcaata

SEQ ID NO: 36611 - DNA, 1016 bp, Homo sapiens
cataattttctatatcacaagctgctattattattgttgtttttaaaatttgagacagagcctcactgtgttgcccaggctggtcttgaactcctgggcttaagcaatccttctgcctcagcttcccaggtagctgaggattataggtatgtgtcattgtgcccagctcaccaaacccccttttctattcctaagtatcttagtatcttatcccttttagcaaaatgaatgattgctacaaatgatatatgaatgacctgaaagatttaatgtgccttcgaagtcagtaggtcatcttcaaatcagatagttacctgattggtatagcaaggtatttgaagttgtgcattacataagattcaaatcaaagatataaggaaagacattttatcttcatggttaatacttgggaatggaatatcttaatggcttattctctgaaagttcttagaaaattacgtcaaaacctttgagtgacattatcttaatttttttcatagaaaagttagaagagaagattaaagagccaattaaagaaccctctgaagagcctctgccaatggagacggaggaggaggatcctaaagaagagcctataaaggagataaaggaggtaaagggccatgacctgttaacctgggagccacattaattgtttcctacagcttacttgtatctgagtatctattggatagatttaaaaataattgttataaatttgatctctgaaattttaggattcttgcaagttcttaattcagttttttctttgaaagtgtcattaaattacttcttgtactaaactgagatccatagaaagacagggccttggaccagagcttggacctgatctctaaccttctgacttataaactgagtggtatttgttaaaattataagtgtaacttcttacttggggaatgttagatatattttatctgtcctttctgctgttgtgttcttgcatagcatgatccatgtatagcactaaaagagttttttattcagtgaaggat

SEQ ID NO: 36612 - DNA, 1051 bp, Homo sapiens
attaaatttaatgtaaagggaggataaatagaggaagtgtagaattatgctttgtttaatgttttataaagggatgaatattaagaggtgaatatattatgtaaacagtaatttttaaaaagaaaagtttgtgaaatatatgcaaatgactttgtaacaatatttgaaatgtttttgccagggcacccaactccgacaatgctgtcgatccaaaagtggcaattctctatgagtgcaagtgagtgaactaaccataaattgcagcttctttttaatactattaaagcaagtgttctggtagtgattagcagaaggattcattcctaaatattttaattaaattttgtcttatagttaaagaggaacaagaattaatggaagaaattaatgaagatgagcctgttaaagcaaaaaaacggaagtaagtaatacatacgatttgattgaggtagattatatcttttaaaagtcgatttggtaataatttgtgattggaagggacaggtaatgtgaatgttgttaggaggcatgattgctctcttaggcctgataataaatagctttgtttttcattgtagaaaatgtgtcccttcttttgctagatttgtagaagatttgggtattcatatatgtattatgactccaaatgatagttttggaattaattctttttggaaatttattaggtctcaattttatgaaaagttagtttcctccctcatttagaccccaatggataccattccagagatctcataaaaacagacacagacttctccctctttatatggttatcttacgacttacctagtccttgagtctggtcattaactccttggtgaggagagaacccataagcttaggaagtgctctgcgagaaagagactgctaagaagtagaggcattagcttggccagtgctctagagttgggtaaaatgtaaatgttatggcggggggaaggatggggtagagggtatgcatgtatggggaatgggaccattatttagcagcaaaaaggaaagtttgaagacattaacaggaactggttaa

SEQ ID NO: 36613 - DNA, 1027 bp, Homo sapiens
tcacagactatctcgctaagttcctgcaggtcacggactatgtcttctatttcttttgattcattgcctaagttgctaagtacctctcacttgcatttgtgggttagccttagttccatttaaatctctggggctacctacagtttcctgtatagcatgcttttgaatttccacatgttctgttttcctaattcccttaagtttgtatagggaataagagccaatttttaaaatatacttagcagatcatatttaagaaggaagatctgctaaaatacacccagatattattgaattacatacttttttggattatttacgtgaatgggcctttttcatagtgcatatatttgagaggtgccgtgattccatgtttacaatttcacttgagtaccacacagaaacagggttgcccttacacctgaggtgcatttttggaggaacaagaagtagtttagtcattgatgaacagttctaattccacctaactactcctgggcccatgttgctctctgggacctgtccttcaacttaaatctcaacttatcacccagaaagtgagtaataaaaagtcaggtaggtaaggtatatatcttacatattcacttggccaagattgcagatattttagttttatttttaaaatgaatgtttgagattactaaaacattataccacttaataccaatttttattagattttacaaaatattttatgtgtttataatgtaaaacattttggaaaatactgttttttctatatttcaagaactaaaaaaattatattttgtgctgtttgattctgacacatagaggtttactgcagtgttaaacttttttttttttaagtaaggttgctccctttttatgttattaaccagtgtcagggagagacagcccattaaaggtgtatttttttcctaataatgtagccattgtaaatcattagaagcccattttaattttgttattatgaaagttatttatcccttagagttcatttgaaaccctcaatataatttgtttt

SEQ ID NO: 36614 - DNA, 2314 bp, Homo sapiens
aatacgtttttattttaaaggtgtctgctttttcaacgtgggagaaggagttgcacaagatagtttttgatccccggtacttacttctcaatcctaaagagagaaaacaggtaaaaggaaaatggcattaactaagaatgtatatctcttgccaacatagtttttaaattataaggaataaagtaccatcccttttttttctgatacagcatttcaaaaatatagtcttgcatcttagaacatattatgtgtctgtgtgtggacatttctacttcaaaattcttggatatttttgcccttatgagcatggctgttgtcttgtaaacattttgtccttatgcctcatatacctaggttatgtgtagtatggttttaaaattgatttcaaatgcatttactaatttgcttgtttgggccaatgatgcaaatttagagtagaaaaatagcaaaatacagatgagtaaaaaggataaaaaagctactgtaatcccaactaatagatatgactaccgttgaacactggtttattattgaatactgaacagccttcttgaccattatgtgtcagtatgtacatatatatgtgtgtgtgtgtcctgtagatagtacttgaacataggtttatgtcttatacacaactgcatatacaaagttcacatctaagtagcatctgttaaaatatctgtttccatcataaactcagaaaaacagtggatacttaagggtccctgttgaattagtgttgctttttattcccatgatgattcagtgacacatatcatttcgtgattgcctcttctaaagcattgcacacttccaacttacttaatttctgaattacctgaactatcctgacactgatctccataaaatggtgagtatgtggaaccacttgctatagtgctgttaagctgtaagatttcatttggtaacagtagtgcccatctttgatatttttaatgtaacaattgaaataattcttcacatggtgtgtaccattatgcatgtaggtctaatcatggacttgaatgaagggagaaaatttacaatgtgccagatatgtattttagtacttggaatagaaagacataacttccttaatgtatttgcatcttcattttaagctttgtatcttttttaaaaaacaaactctgtgtgagttttttattctcatttcagtttatggctctatcaaaatttataaattagccttgattccttacttttcccacttcccctttacagtcttatcagcaaatctataatctaccttcaaaaaattttcaaaatctcaccttttattaatcatttcccccattaacaccctaatccaagccaccataaacaacccttatcatctgtgtagcctattgttgatctccttcattccatctgttcttgttcctctttagtcaagttctttttccacacagcagccaggctaattttaaagtttaagtgatactaaattaagtcactgttcccttgcttaaaactgtttagtgctttccatttcattgagaataaaattgaagctcttttcatggtctctaatattctacatagacttacccctgtatacctcttgatggtcttttttaatgtctgttgattacagccacactggccctgatattacttgaacaagccagtcattctggtgtttgctattccttctgcctggactgtttttcctccaggtgttagtacagccagcttcatttcattaaggtacttgtcccagtgccttctaatcaatctaagtattgtctctttgccttttctaatttctttatggtgctcatggctctaattgtataaaattatgtttttattatttgtctcctcctcctgcaaaatataaattgtatgaggctagaaactttgtcttcattgctttatttgtagtgcctggaacattgcctaatctaaatatctctgaaggctttaaaacttttatgacgtattcctcctggtactgagtgttatagtgaaattagaagtaacatattgagaactatagttctttcccaatttttgaagcattctataagctgatggtggtatctccttaatagaattacgtttgaaaagagaaaatattattctagtgttctgttttcaataaaatctctagttaaaagttctcatgccatttatttatttatttattttatgcatctatttatttagagatggagtcttgctctgttgcccagactggagtgcagtggcgccatctcatcttactgcagcctctgcctctcagggttcaagtgatcctcccaccttagcctcccaagtagctgggatt

SEQ ID NO: 36615 - DNA, 1016 bp, Homo sapiens
gaaagttgatgtcatagaagtcaaaagtagaacagaggctactgaaggctgagaggggtagggagaacttgggaggataggaagagatttgttaaaggatacataattaaaactggataggaagattaagtcctggcgttgtgtagccctgtaggatgactggttaacaatagtaagtagtttcgagtagccagaaggaggatattaaacgtttttccaacacaaatgataaatgtttgagattgatatgctaattaccttgatctcatcactacatgatatgtatttaaacacatttcgattgcacatgtattgaaacacagtaaccccatgaatatgtacaattattatttgtcaattaaaaaaatccctgcccttgaactctaagagaaaacaccaaaataaacttttaaatatctcatttgttattcagagctttttaatattgacagtattacagtatggtaatatgttaccaacatgattactcggaattgtcaaccatctgggccactgttactgaataatttgtcattgaatcagtgtgaaattaaaaatatgagaatcaaataatggagacttacttttagtaaatgtattttgaaacagaaaagataaaatcataagtgaaatttcacaaaatgaatatatcatgatccaaaaaatggaacattccaagcactccagagctgccttgaaggcttaaagggtatagccccttaatatacatttttgttcatgcctataaaagtgaacttaacagaattatttttaaaatttactcattttcattgtattatgaaattttgttcatgagttgaagttatcagaaaataaccacttaacatagggaacataaagccaagcgtattggaaagcatgacacaaattaggagcaacttggaagcataacacaacccctaattttctatgagatattaatcttagagagtgattcctaaccttggtctggggtagcccagcagagggaatacgaagttctttctagattctca

SEQ ID NO: 36616 - DNA, 1062 bp, Homo sapiens
tccctagtattctgaaatgccatagtggtatttttcctagaggaagggtctattgtgctcagtacttggctgaccttttcagtgtggaaactcagctcttttagttacgggaaattctcttgtgttactttaaaaaatttgtttccagttttctctgttttttcattctgggacagaatttgaatttgccttcatggattggttcttcaactttttctctttcctgttaattacctttgtctttttatttaactttttggataatttccttgcctttattaaccaactatttagatttttaaaatttattgtgtcttttaattcctaagagttcttttatgttttttgaggtttttcttgccttatgggtgcattatcttagctctgtgaggttgtttaggaacatttttttcttttatatttttatttttctgtatagtttctgattccactaagtttgttctctttagggctctatttttcatgttggagagtttccttagatgtcttgtagaccctgactacttaagtgaagcactaaaatgctgtttgggtactcttttttttttttgcatgtagagatgggattttgccacgttgcccaggctggtcttgaactcctgagctcaaatgatcctcctgccttgccctcccagagtgctgggattacaggtgtgagccactgcccggcctatttgggtattcttagcatttaggtgggccctcgtgctttggggctgtactgcagagtggtggttctcaaccacgagtagttttgcccccaggagacatttttgtcaccattgaagtgagtgctgctgggatctagtgggtagaggccagggatgctggtatacatcttgctcaaaacatcactgtgccaaggttgagaaacatgctgtagggtgagttaggctggtttgttgagaacccctggagccaatgttttaggctggtcagattcccaataaagacttctaatctggctggagggcacagatctctctgcttcggatctgagagaactaactgtgtcttagtatttggtatgtgtttggttaa

SEQ ID NO: 36617 - DNA, 1930 bp, Homo sapiens
cctcagcttctcaagtagctgggattacaggcgtcagctactgtgcctggctggagtctcactgtgttgcttaggcttgtctcgaactcctggcctcaaatgatcctcctaccttgccctcctgacgtgctgggattgcatgcatgagccactgcacctggccagtaatagttgttttaaagttattgtctacttagaacgacatctggacatcttgggtttggtttctattgacttcaaaaaattttttctatggatcacgtttctttgtatatttagtgatttttgattgaatattggactttgtggctaatatatagagactctggagtctgttacctttcattgaaaagtggatatttttgttttagtaggcagtttatttactggttgccaccttaattttaggcttgactttatgttttgttaatgtgaatctctgaaagtgtaatatgtttcttttagccttccagctctgttttccttgtggatcttttgtggactttgttggcctgatcctattctccctttaatactactgactctctgttatctcttctatgctcttaaccctgtagtagcttgatatatagagtgatctttccctgctgttacacaacttggccttagctgtggactcatgggtaatcgctaagtcagatttttcttgggtaccctctctttgtagattcctcttcacccaagctctaatctttgcttcctccagttcattaagactatggtactctagttggacttgagctctctctgcacctcataaatttcccttctttcaggcatttcagtcttactctttctgttgtctactccttgaaatcggttgcctcatatacttttgtccagttttatagttgtgtatggagagctaatccaataagaatttttctattatggctggaggaaggacttagcttcatcgcagagtggaaattgatgagctcttgtctcttgaggcatgcaaattctttactctgtgatctctttctttttttttttaataataatatttattctcctaattctatgctgatagcatacaaatcccttaaccacatttttgctcattacctctttttactcctttctgaaacttactgttcactgttaggtagatgttgagtcccagtgtctctttgtcatatactcttgttggaaaaatggtatcttctgctatgcctttatacaagcagaagtaactgccaaagttagcacacttgtaattttgttacagagcaacttttagtgaatttgcagccaagcatgctaaagattcaagattcaaagcaattgaaaagatgaaagaccgagaagccttgtttaatgagtttgtggccgctgctaggaagaaagagaaagaagattcgaagaccagaggtgagaaggtaagatggttttagttccagtggtgtgattgatgggagtgtgaatgggaaaggtctatgctggtgttatgtttctaaccttattcattggcataaataataggacgtacatggactgttcttttaagttaacttttataattatttatgtatgtatgtattctatcactttacttacataatgcttattttagtagcttcactaaactatatacttttgctttaaattgtgttaatattaagatgcctggtaaactcagaacaggttgttaggactgcctgctcagtggtgccttctaagatttcaagattctttataggttgtaatatttgaatttcaaaaagcttctttatcttttttgccctctaaaagatagcattttagtgactttctattctttcagtaaacatatcttacatataaattattgcttatcagaattaaaggtcagctattaaagattaatgaattccaaatgtcatttgatagcagtgtcaggagtggagaggagcttaccactggggag

SEQ ID NO: 36618 - DNA, 1467 bp, Homo sapiens
tacttattgaccaggagtggtggctcatgcctgtaatcccagcactttgggaggctgaggcacgaggattgctcgagaccagcctaggcaatatagcaagacccccatctctacaacaaaacaaaaaaatagctggttgtagtgatgtgcttctgtagttccagttactctggaatctgaaatgggaggatcgcttgagcccaaacagtcaaggttgcagtgagttttgatggttccactgcactccagcctggacaacagatgggattctttcaaaaaaaaaaaaaaagaaaaaaaagtctacttattttgtttgccaaagtaactattcttaagctattttattgtaatatattattataaccaatttttataaaattgtggttcaaatactttaccttttgaaatagcacatttgaggttgtatgtaattggagttaatacactgttacaaaattgacatatttttctcttccctctcttttaaatttcctgtgcataaattatttttgttatagtaaggaatggggagaataataaggccttgaattgcagctaatggtaaatgacatttttttgacatttatgcagctgtcaggcaattgttctcatactgatagccttagtaagccatttataacctgtcatggtaatatccacaatgaaaggaagttaaagtttaattttatttaaagttcacttgtttatacatcacacatttaaaaacctatatgataatccttactttataggtttcgtgtctaatatatgaaaattgttttaagctaatacaaattcctgtggcttagaaagattcctatttgatataacttgcatgttttatttaacataaattttgtaaattttgccttccagttgtcaaatgcatctaggaatttggtgttcatcatgtcagatacaaagtagacaagatgaacagaaaaatttaagttacatcactacatcaggtggtttcttaatcagtgtctggaaatactgggtttatgagtatttcttattagttcaaagtgaaaggccaagtttagtagtggagaaatccacagccaattagctgttgtctttagaaacatttctgatgcagatattctgtttcttataaccttaaaagtattttccagaaagaacatcaacttcacttttttttttttttttttttttttttgagatggagttttgcttgttgcccaggctggagtgcaatggtgcagtctcagctcactgccacctctgcctcctgggttcaggcaattctcctgcttcagcctcccaagtagctgggtttacaggcacctgccaccacacccagctaactttttgtatttttagtagaaacggggtttcaccatgttggtcaggctggtctcgaactcgtgacctcaggtgatccacccacctcagcctcccaaactgctgggattacaggcatgagccaccatctcactttta

SEQ ID NO: 36619 - DNA, 1900 bp, Homo sapiens
caaaatttttatccatctagtttttaaataaatcatttttaccttgttgatattaaagaattgtcagcttcataagcctgactcttagctaaaaagaaatgcagctcgatgtaaatttatattccctatgaatacatggcagttctgagatctaaagttatcaacaatctgaaaaagcctttttctatattttaataatttctttataaaatattatttatcttgaatttggcaaattttagatgaaagcctatatgcttgtcgatgtttacatttctagtaaaagaacacttctgatcttttactgtaattctactctaaatgcctatattttaaaagttattattctcatatttaaggtaggtgaactttttttctagttgtaaatatttaagatatgatgaatttctcatggtacattattttccctcccatcccactacctgttttaaaatacagattaaatcggatttctttgaactattatctaatcatcacttggacagtcagtctcgatggagcaaagtaaaagacaaagtagaaagtgatccacgttacaaagcagtagatagttcatcaatgagagaagaccttttcaaacagtacattgaaaaaatagccaaggtaactgttgtgtttacttgtattgctttcattgaataatacaattcttgtgtttaagggtatatgttgttgttggggatttttctattgggggtttggattttttcttgttagtattcttaacataagagtctagttgatttggagatgagaggtacacagtgtttaggtatattctgggcaaaaactagatttggaattttttatttggcaagctagttattctgtaaaaacatattttgatggagttggtaagaaggataatgtagtttttgcttttacagaatttagactcagaaaaagaaaaggagcttgaaaggcaagcccgcattgaggcaagccttcgagaacgagaaagggaggttcaaaaggcccgttcagaacaaacaaaagaaatagatcgagagagagagcagcacaaacgagaagaagctatccagaatttcaaagctcttctgtctgacatggtatacgttaatcttttactttttttctctaaagtactggatattggaaatttattatgttactgttatgaatattttaatgttctttaattctgagggagataatttgctaaattagaaagcatttaaaaattgaatacttggtattagtactgttagtataggaaaaaacccaagttattcaacaaattcagaagttaggcattttgcatatatggaaagtcataatcatttagtctcacaactttattatttattgttcttgatgaaagtcattgtaaactattacacacttacctgccatagtgataaacaaaacgtgctgaacacaatttaaccttttcgttgatgatttagggccatcattgtgatgatcagttatacttgcagatggtatgagattgtaggactggaggtgtaactgactgcaggagataccctgaaactttgttgaaaatctttctcccttacccctcagagttgttgaggtatgtagggttttttgtccctacagtgaatgaccctagactaccgtcctacttgctaatatattttggagttgggggtggcttctctttgtcatatctctcctatgctatttcttttctctttttcagtggagcttgctactcttgtcacttctgatttcttcccttgcatctgtttcttactctacccaggagtatccaatcttttggcttccctgggccacattggaaggagaattgtcttgggccacacataaagttcactaacatggctgggcacggtggctcatgcctgtaatcccagcactttgggaggccaag

SEQ ID NO: 36620 - DNA, 1035 bp, Homo sapiens
gtgatatgcaagattactttgatatgagcaagctgaaaccaatagaaactaaagaaaggcatgagaaacttgaagggcagggaagcccttgaccagataggatcattgagaatatagggaagtttcaagtgagagggggtatttttcacgagggtaaagaaaagtaatttgagtttgggatgggaaggagatttgaattgacgagataggagaacactttttggaaacaactctggtttaagaatgtgcttgcaacaccaagacaaaagtaatgcttcctgtggctaaggtcagctaagcaggcagccacagagtgactgtaatataccaaaggtggccatagaccactgcatgggagcctaaattaaatggaccataaatcctaattggtgaaggtagggtgtggtcagatgcagttctatcagagcatctagaagcctttctccaagcactagggcattgctctggaatgcaggaagacaaccacagtgacagaggactgacttgatgatagaatgtttactgtaacctgggaagtctgtatcccagcctgaaccttgacactatttaatcttgggcaagtgatttgtcaccttatcctctctggttctgtttgttcatcttaaaaatttgggatcactagatgagcttcgatgtctgtgaatatgaaccccctgaaatcgtgtatgtatttctgcttgcatgagtctggaaaacggatgtgccactttcatcgtattctcagatgggtttgtgacccacaaaaaattgagaactgtgtgattaggtagtgtctctggtcctcttcaacttttaacattctgggattctgtaattctgtcatttctgacatttccttaaggttcagagtcttagggtctagaagttgctaagcctataggtaacacctggtaccgcaaagtatagtctttatatataatactctcctccttatttattcaggcatagctcagagatactgcaggtttggttccagactactgcaataaagcaagtcacaaagtttttggtttc

SEQ ID NO: 36621 - DNA, 1036 bp, Homo sapiens
tcccatgaatcacagacgttcttaacagcttctagaatgtgtatcctttccagaaggttttgaatttagtttgcccatatccatcagaggaatcacagtctatggcagctatagccttagggaatttatttcttttttttttttttttttttgagatggagtctagctctgttaccaggctcgagtgcagtcgtacgatcttggctcactgcaacctctgacaccctggttcaagcaattctcctgcctcagcctcccaggtggctgggattacaggcacatgccaccacacccagctaatttttgtattttcagtagagatggggtttcactatgttggccagactggtctcgagctcctgaccttgtgatctgcctgcctcggcctcccaaagtgctgggattacaggtgtgagccaccgggtccagccaggaaatttgtttcttaaataatatgacttgaaagttgaaagttcttgatctagttgatctattagctgcagaatggatattgtgttagcaggcatggaaacaatattaatctccttgtgtatctaatggacctcttgaatgactaggtccattgtcaatgaacagtaatattttaaaaggaaacttttctgagcagtagatcttagtagaagtcttatttagtatactatactgtaaacagatgtgctgtctttcaggctttgttgttccttttatagagcacaggcagagtagatttagcatcattctgaagggccctaggattttcagaatggttagtgagcattggctgcaacttcatgtcaccagctgcattctctaacaagataatcagcctgccctttgaagctaggcatttacttctccctagcagtgaaaatctgatatggaatattattccaatggaaggctgtacgtactgaaaatctgttgtgtagtgtagctactttcagccgttatctaagttagatcttttggataacttgttgcagcttctccatcaacatttgctgcttcaccttgtgcttttccgctatggagacaa

SEQ ID NO: 36622 - DNA, 1034 bp, Homo sapiens
agctggaagaggttttgattcctcatttaatgatcacacgttacatatgaagaaattgatacttggagaaattgagtgaataagctaagaagcaacagtacaaattaaagcacaatactcatgattcctggatttttgctctttctaagtaatgcatatttatattatcttcagaagttgattatccactcatcttgagaaaaagatgttctgtgctttttgcacagaacaaattaatatttttattaatttgaatgtgatgtgtaccattatgatacctctgcttgtgtgtgtttgaaaataaacattgtttaacctgggttttagtagggggtgtgtttttttagtctacttcgttctgtttgcttttcaggtactttgaactcaagtaaacaaaagggaagattttctcgttgatactggagactgcacaacaatggggccacgaaagaaaagtgtgaaaacatgtatcatgaataatgaaattccagaagaaatgacagcagatgaaacaaaggactatatgaatcaactttcacatgaagtactttgccatatttttaggtaagattgtgtttggttggcttacctgcctggaatggataagagcaaaccctgaggcagtgctgtctaatgtggtagctaccagctacatgcagcatttacatttcaattaagtaaaaatgtaaaatttagttcgtcagttgcactggctacatttcaagtgcttagtagccatatgtggctagtggacacggtgtataggacaacagagtatagacaaaatatttcttttgtcacatatagttctgttggacagcctttctctagactgttaacatttctaggcttcttgggatttttattggctaatagatttgttgacttttgttactgcattataacagtactgtgtgtttacactgcacaatataaggcagtgtttctgactttttctgactacaacccacagtgagaaacataacatgtaagtgattgtaactaagttttctgagataatacccatcataact

SEQ ID NO: 36623 - DNA, 1027 bp, Homo sapiens
ttggaggttcgaaatttggccagaaatggcagggtttctttttttacaattctctcatcagcttctgactttctaaaaatccttacttaacaatgtaaatcttttagagtagttttcagatgccatcagtgtctttgcaaaatgagggtctgctttcatttccttttaggtcaccagtagttataattcatcttaagatattaatttcaatgcaaaaacaaagcttagatttacttttaaatcagtaattatcatctcagataatactttataatgtatagtatataaatacttcactaaaaatgctatggtcaaacacttgtttttgttcctcgtctttaggtggttttagaaatttgcacactattgttctgggagcttgcaaaaatgctcttgaagtagatcttggttacctcatcattactgctgcccgtaggtatgtttcctctttgtattgtgtctctcactttagaagtaattatgtttttccctattttacaaaaaattgtggaatgtgtgtgtatatatgtgtgtacatttgatcaagccttgttcaaatttaaaatacgaagaagtccaaataacagataagtataacatcatggtagtcttaatgttataactggtaaccagttgagctgcatactagcaagctccagagtggcatggtctcatatcagagaaaagcagtggaatttctggaaatggctgagagtccaatagaagttagcattgaagctctggtgtctgtagccctctcaggaccattgtctccatctctggatgattttctgaattgttctagttacttggtgataatatttgctattcagaaatcagtgttttaaatcagcttttccaaagtctgaccttgtaacacctctatattttttaaccaagtggttatatcactttatgccacatttactatttcttacatatcaatggtctacctccacttttattttataatattttctttaagcatttttaaaatttattcagaaacaaagctttttccatcaag

SEQ ID NO: 36624 - DNA, 1047 bp, Homo sapiens
atttaaaaatgatttatattataccaaaggatcttactctgtatacactgtcctgtagcttgttttttgtactaagtataatttggagagttttccatgtcagcaagcatattaagctctccttaattcttttgaaatagctacataatgttctattaaataaatatgccataattttttaattcagtgtcctattgttgaaaagccatgtaggttgttgagtggatcacatttaaatcagggctgattggattcaaattaatgttccccaggccatttagttctcacaatggaattaggtatgtaaacatcataatttagaatcatcgggttttagaagtcatgaaaaaaaggaaaagttattttaaaaaaaaggatttgaaagtctttgtgacctgtatcaaaattcatcagtaatggggaaaatgttacttagattttctctggtcatgtcatttctttaacagaccactcaagatggactcgattggttgatatcaacctagtacggtgccatgctttgaagctggactcttttggccagtttattgaattattacccagcctagagtttatttcactggatcagatgtttcgtgaaccacccaaggtaagatacatttgagggagtttttgtttattttgataggaaagaaaataaaaacagcctgtgatttttttttttttttcttttcaatgatatgcctttacggtgttacagtcggactttttactgccagcctcagtgaaggcataaaggttgtaataatgcatagcctctcattcttctaaatgagaattaagggttctctggggaagggtaaggaaaaaataagtggaagctgtctgttagtatataaacaaaaggtaaggtaagggtgaggctggaaatttaagacagaaattattacgtgggataattcattggtggattaaatataattaggttggtagattaaatctaattaggaatccaaagtataaacaagaattaaggatttatttggggaatgttttactttgctgctatctttctgttaagttgta

SEQ ID NO: 36625 - DNA, 1046 bp, Homo sapiens
gtaattatctgtccagttcattaatatatattgaatacttacggtgtgccaacccatgtgtgaaggtgctccatccatccttctgttgatgagtgaagtgatgtgagattgttttgttaccaaattttccagtttcccagttgacgcttaggaactggaaaaggaatcttttctagccatccttttgttgttccccatttgcctactcttgcacacagtaattaatgagaaatagggtgccctgatatgtacctgcttttacaatgaaatgtactgtgtacagggcatgatttcctttaggggcactctgagtatacagttcctgacaaaagaatcatctgtaggcaatgtcttcactttctcatctcacttggtccctatagaactctccactttggctcttggcaaagtcactagtgattgtcttactgaatctggaggtcatttcgccactttcatctaatttgacatctcagcagcattagacattgttgcctagacttgtacactcttgagacactttattctcttggcatctctgaaacgattttgctggtttttctcctacctcattttcctttgcttgtagcacctcctgtattccacttttgtccatgatatctttctctacacattttcactcaagctcaaggttttagtaccaactatatggtattaaatccaaatctttgtttccagccttaacttgtatacttttctgaagtaaatgcagctatatctagctctgtactttatgtccatggtatactcttaagcatttcaaacctaggtaaaatctttccccaaccagtctcccttaaaaatgcaaaaatgaaagtgcagagccaacaggtgttaagggaaagagagggcgagacagtcacgtattgtctctttgctttgttgtcctgagtgctatggtacatagtacaggttactaccactataaagatctgcacttcagaggacatggactgtacgtgggaaacttacagcagctgccattcagaactacccaaatcctgtgaactcatttgtggtttgag

SEQ ID NO: 36626 - DNA, 1048 bp, Homo sapiens
tctgccatatggtgaaagtacttttcccagcttaaattgtaaatgtttgataatatcttttttttaattggtggtaaaatataactttaccattcagtgtacagtgtataattcagtggcactaaatacattcatcttgttaggcagctgtcaccaccaaccatctgaactttttcatcatcctgaactgaaactctgtgtccattaaacagtatctgcctcctatgacaccttttgttgtgtggtttttcgtatttgcaaagtcagatatgcatgttttcctttatgagtttatttttatgctgcgaaaggcctttcctacacttggttcagataaatgtgcgcatcttcttattcctttattcattgatttcagtttagttccttagttcagttggaattttatttcaatatgtgggagctaatttttttttttttattccaaactatcaccatcttgtttcaatattggttatggatgtccattctcgtgctatgattttgaaatgctcttttatcatctactaaattctttgacatacttaggttgatctctggtcattctattctgttctggtgctctgtcttctttcattattctttttcaaaatttccttgactagccatgcatttgccatttatttttatagatgtgttttgtaatatttttatcaagttccaaaaactaagcttggtttttgtttgaaattgcattcaattgataactgaaacataattgtcattttaacagcactgtgtcttcctgtttagggactgttatgtttgtcgttttacttatgtctcttgataaaattttaccgttttttgttgttttgtttttaatacagagccttcatattagccattgaagttttgatgttattttttgccttgtgttctgcttatcccttaactattttattcttttttcatgtctagaactttttcttaagttaaatcattctctggatttaaaataaagaaaatatcatttatgtagtgctttttattgcttttattatgtgatttttttcaatttgagaagact

SEQ ID NO: 36627 - DNA, 1053 bp, Homo sapiens
tggattttatgaactacatgtgcatgtgtctgacttgcctttggtgcagtatttttaccttgagactttaagcatgtattctgtcttaggcatcaaacataagaacaaactggtggtgacccattccttgacctattcatgcatcagttacattatagtgcagtatatgggactgtcctatggaccagcttatcagtgattttccaaatgattctgattatcatatgtatctctccttttatttctaatttcaaaggcactatctatgctcctagaaggaaaggacagctgtctgcagacatctgtatggaaacaataggagaggaaatttcagagatgcgtcagatgaagaagggtgtatttcagcgagtagtggcaatttttatccactattgtgatgtcaatggagagccagttgaagatgactacatttaattggtccctcctcctttccagctattttgtcagaaagcaagtagggccatccagctgccagagtgctccacagggacttgaggcatgcagttgggaggtcctggctcggtttgctatatagggaatatataaggaacatcgaaattgtatacaaagatttgtacataaaaaatatacaaagacgcttcctaaagtaccaactttatatcatatgtttatacaatttaatttaaaaattcattttaaggaagacagataatttgaaagacttttgtttttcttgacttaattcatgaagtatcattttttgactgagtctccatttacttcattcttaatgattattgtcatccctttaaatctgtgcctttttcttcttgagcgaagctgtttgagtaaacctgttgaagagtgtttgtgtcttttgtgcttttttgttgttattaaaacaccaactaaaccttatagtcaagacaaggctctatgtttctgtacaaagctgtagttctttcttagtattatagttgccatgtttcttaaaatcaagtaaaaagacttatgagcttaaaaaaaagtgagtttgagagggaaatggaaaagtttccagagtatttctag

SEQ ID NO: 36628 - DNA, 1038 bp, Homo sapiens
gaagagaagctgctggaggtgggcagtgtgacctaccaggaggaggccgcccggcacacataccaggcactcaactcgctgctagtggctgagctcccacagtttaaccagctggtcatgcagtggctgggccagatcatgtgcacattcgtgaccctccagagggaccttgcaaagcaagtgctgcagagggcagagggaagcatggcccaggtaaggcctctgagacttggacacctgtggggagtagccaggcaaggccctgcagccccatcagccagctgtgtgtaggggctaggatggagggaggatgggcctgaaaacaggtcatcaggcccttaggaagaggcagtgggaaccttccagatctctctcatgcccagtctccctctgttagtgaagtcagaccatgaaagcaaggataggactgagatttcagaccattcccaagtcctgcaactcagaagcagaagaagctttgctcatacaatggcagatcttgggactgatctctggagtgtactagaagttgatgacagagacagaaggtcgtttctacacagtaaggagtaaatgtctcaagccggtgttactattactacttccagcagccatcttctcatgagtatttaggatgtacctgtttggagcactctccatgcatgatctcattcaatcctcacaacaaccctacagaggaggtataattatactcattttaaaaataaagaagccaaggcacggagaggtaaagtagcttgtctagggccacacggctaatagcaagcattgaactctgacagttcagctccagggcctggactctgaaccacaacactcaagagcctgtaaaaggagctaccggctgaaagcataaataggttccacagaggtttggataaacctccaaatgcaaactttgattttagaatttggaagactggagttgatacaagaaagaacacccaactgcttccagatcttgctctcagatgtcaacatgagagctgaattgctgttgggtcccaccttgggagc

SEQ ID NO: 36629 - DNA, 1050 bp, Homo sapiens
caggcgtgagccactgcgcccggccttcgaacgaggtcctattccttctcgagcctcagtttccccagctgtgcagaagaagcaggttgtctcgcaggacccgcccagcgctaacgcaacgtgattcgctctggcaggagccgggggctgcccgcattgctgcgcaggcatcgggctgctggctggggcaccgccacctggctgcctgcgctttaccccttgctgagggctgcgtgagctggtcgcggcgccagacacggcgcaggaaagtgggtgagcgacccccggctcccgcgggcgccgcgcggccccgcccccgcagctagcggccctgcggcagccgggggctcgagctccgccctccgcctcccgccggcctcactccctcctccctcctcccttgctcgctcgctggctccctccccccgggccggctcggcgttgactccgccgcacgctgcagccgcggctggaagatggcggggaacgactgcggcgcgctgctggacgaagagctctcctccttcttcctcaactatctcgctgacacgcaggtacggccggctggggctgcgggcccggggccaggggtgctgagctgcgggggccgcagctgcagccgcggaggccgggaggcagcggtgggagccctggggtaactgggggttccaggctgcagagccccccttccaggcgccctgcgatgcgctccgttaccggggcagggagccggaggtctcccggcgcgtgccggagcgctgggggcgctacggccgctggggagggtctagccttggccgcttggagtctgccaccccgcgggcaaaactggggggtaccgcgcttcctttgggaggtggaggcgcgccacggtgtggggtaccctcaggctggcgctgggtgctggaggcgcgccgtcagcgcccggcacttgctgccgtactttcacgtggacttgtggccccggcacgggtgcatgcccgggtctccggagtcccctagtcctccaggctgtagtccccagagtgctgttgctggccccccgcggct

SEQ ID NO: 36630 - DNA, 1053 bp, Homo sapiens
ttggatcttaagtggaatgaaagatgttaaacgcttggtgtgtttttcttttcttgtcatcaggggctgttggtcatgaagagtggagttcaggggcagggggaggtgtttggagtctctcattgaggcctctgtgagctctgtcctggctgtggctgagtggaatgtgtaggtcctgagggttcagagcatgacagctagaagggccttcagaggccattcactcctggttttttttttttttttttttttttgcagaggtctcactctgtcacccaggctgcagtgcagtggtgtgatcacagctcactgcaacctctgcctcccgggctcaagtaattctcccatcttagcctcctgagtagctgggactataggtgcgtgccactgcacttgactaatttttaaatttttcattgagataaggtctcactatgttgcttaggctggtctcaaactcctgggctcaagtcatttctctgcctttttttcttttttttttcatttttgagacggagtctctgtcgctcgggctggagtgcaggggtgcaatcttggctgaccgccacctctgcctcctgggctaaagggatcctcccacctcagccttccaagtagctgggattacaggcgcagcacttccaaagtgctgggattacaggtgtgagccactgggcccagccactcctggggcttttcccctttattggtcatagccccatcagagactctaaagagtatggactctcttaatgtaagaatgtcaaaacataaaaaagttcgcatgtgatttcatagactctctaaaagccatgcacaagcccagagtaagaacttctatttgagtccttctgcattctttatatagatagagaaactgaggtccagagaggcacccacacacctcacagtcattgataggagggcagagggggcctggattggctcagccagaggcagggctgggccatgtgtggatgggagcaggattagcagtggggagatgagcagggaagaggaccagagggacctcagcccggcgagcagtggcct

SEQ ID NO: 36631 - DNA, 1034 bp, Homo sapiens
tcagctttcctgtttgaaaaatggcttaacctctgccctgttgtgagtgtcaaatgggagaatatctaatttacagcataaaggatttttatgagccctgagacccaccagtcctagtagagtgggagaaacctagtagggcaggaaagtgggttctcgtggtacttacatgtgcgtatggcaggggcttcatttgacaaaacacctccttgttctgtcattgagagagttcctcgcctcctgcctgtttctcttagtcctgggtggcaatcaagcatctgattttccccctttcctagttcaggtgcctgttattctgtcattagcacacagtaaggaggcccaggggtggggagcctgctgcagtgccacccccaccccaggacacatccctattacttgagaagaagggagtgtggaaacgtgtgattcagttgacacagattcattgtactcgcccagttcttcgctctggaacgcacttctacataaggcaggctcagctgtggcttaggaggccagccagagcctcgagtctgcaggacctgagcgagtggtggtctgctcagcaggcctccttggcttcccttggcctctggccctcactgaccacatgaccaaggagagcctgctggggccaaagagaacctctttcccaccagctttatctgggagcctgtgggtctgcgtttctcatcatctgacccactggaaaaggaaaggcaggagtttccataagggaataaatggatgcggaaggaaaccacccctcaacccccggtaaaggggggttagtgtgagagagactgcagccttcacgatagtgtgaggcagagatgccaaaactgtcctgggaaatagtgcctctgcgcctccaccccacaccctcccgtcctgcaaaggtttagtaagcacctactcagtgcttggcacctttccaggtgctgggactcagcaaaggacaaggccaggtgcttggacagtttatattctggagaggagacggatggtccctggttccatgctatgcttaa

SEQ ID NO: 36632 - DNA, 1050 bp, Homo sapiens
cctgggaacatgaatgggtgtttctccagaacctagcagtcacacaatactgtcagtcattattattgctgttttttgtttcattattaatatagaggcattgttagctttaagaagtccacttataagtggggacatatgtgtaaaggattagctcctctatttacagtctttaataaagttttcaacaaaacagttctggtaacaggaggacagagatgtatgtgggcagggccttgagggatatgtaggagtgcagaggggagagcagcagggggttttgtactgctggggcctagcttagctaccagaagattcaaccaaggggtgaagctgatctttccatttcttggtcatttggcaaaatcgggccttggccacgggtccagattagctgcatcattattgagagggcccctgcttgggtctagccagcctcagctctgatccacctctttccttcctgtctcctcagggtggagggtccggggaggagcaactctatgctgactttccagaacttgacctctcccagctggatgccagcgactttgactcggccacctgctttggggagctgcagtggtgcccagagaactcagagactgaacccaaccagtacagccccgatgactccgagctcttccaggtatgccctttccagtctcccctcctcccaccctgccaggcctctctctcctcaaaatcccggctctgccctgctctgccttctcctgcacttgctcatgcagagaaatcccctcacccaccaaagctgttgggccccggtttctcgtgctggatgggcccctgatctggcgcagcgcacatgcctcacctggcccttgctgtgtcacctccagaaagtaagggtgagatgaactgctctctaggcctcccgagcagaaccaagccccttcgtgtgccacagaggtccaagtcctctgttccctacattatctcatccagtcttcgtccccaccctgcaagacagggtccagtattttcccattttacagataaggaaaatgaggcttggaaaagttaagt

SEQ ID NO: 36633 - DNA, 1074 bp, Homo sapiens
ccggtctttgtaagttgctcactgccttcccctcttccctgcctcttcacccccatgcccagattccaattcagaagaggcccttcctgcgtcagggaaaagcaagtatgaagccatggattttgacagcttactgaaagaggcccagcagagcctgcattgataacagccttaaccctcgaggaatacctcaatacctcagacaaggcccttccaatatgtttacgttttcaaagaaatcaagtatatgaggagagcgagcgagcgtgagagaacacccgtgagagagacttgaaactgctgtcctttaaaaaaaaaaaaaatcaatgtttacattgaacaaagctgcttctgtctgtgagtttccatggtgttgacgttccactgccacattagtgtcctcgcttccaacgggttgtcccgggtgcacctcgaagtgccgggtccgtcacccatcgccccttccttcccgactgacttcctctcgtagacttgcagctgtgttcaccataacatttcttgtctgtagtgtgtgatgatgaaattgttacttgtgaatagaatcaggactataaacttcatttttaattgaaaaaaaaagtatatccttaaaataatgtatttatggctcagatgtactgtgcctgggattattgtattgcttccttgattttttaactatgcactgtcatgaggtgtttgccactgagctgccctgctccccttgccagattgccctggaggtgctgggtggccgctaggctggtctgcaggaaagcgcggcctgccgtttccgggccgtatctgccaagccctgccttgtctcttactgagcaagtttggctcaaattataggagcccccatcttgtgcccagctcatgctccaagtgtgtgtctatccatttgtactcagactcttgagtaccttgtaaggaaggcggggcaagctgcatcattcctgttttccaggggaggctggcagctcctcaagaggcgaaatgactgtgggaggtccggttaccagtgaggaggcagagcggtgacccagaccaggccttctggttcttggtccc

SEQ ID NO: 36634 - DNA, 1037 bp, Homo sapiens
attgagtggtgttgagagtgaagtttcactagcagggaagtttccttgagcctaaaataaaaagaaaaaattaaaaagaatcagtttttttaattaaaaaaatagaaagctgttaggctcctaattcgtggggtttttttttgtaaaaacagtttagataatcctgaatgcaatcattaacttggttgctaattacaagaatgaaaattataatggaaaaggacaaaataatataccagctggtttgttattatagtccgtgtattaaaatactattgaaatacgttaaaggtaaatttttaaggtttaaaaaaaatttagtaacttacagggatggagaatttagatgtcagaggtggggagatttatttttataaggtaatttttatcctgataaggacttaaaaaaaagttttgcaactgaaattttaaagtaaacatgttaagtacagttaaaaagtaagcattgtagtaaatagtggattctctggtgtgtattttttatctcagtgttgaaaattggaaaagaatggactgaagtctaaaaactggaataatgaaggacactaaatgcctttattgtagatactatgtttgtaagtctatagctaagcaacttaagccaaaaaggtctttcaactgaagctttaatcaacttattttggagatgttctcttcccttatctcatgcgtcatccctaaaataataagatacatgggatcaaatagcccttgccttttcaacacaaatcagttggaaaattatggtttgagtcctgttgctgccatggcttctgtttctcagaaatgagtgtgtatgaacataccaatctatgtaataggctacctttttttgtcttctttggaactttgtacacaaaccaagacaatatcagggtgacaggtgaatgaacttaaattctcagtcttgtctattcaccaaaaaagtatactgcctgttttttctttaattattcaaggttgatgacttttaggaacatgttttatactgtattttttaattaaagcaagtgcct

SEQ ID NO: 36635 - DNA, 1025 bp, Homo sapiens
cttgccaagtgcaggctccagtgatatgccttctagtctataaaatgagtatcattcaggccttccaggtttctttgtgcttggatttgttaagtccaggccatgctgtgtgtatttgccaccatttagtcttgttctcctaacatggctgcttcaaagggtggcttgagaatgccatttccccattacctctccaataaaggctccataaaagattcagtccatctgcttttatgtttcatctgagtgctgcttttaacttttcatttctgagtgcttcctttatgccttaagtagtctcatcgacttcttgcttttgatttattgaagaatccttttgtagttgactttagtgttcattttaaaagatacttctgaaatttttttttgttctgtttaattttaggtctcatttaactgttcactttgaacttttctgttttccttattgggtgcctttaagtttaaattgaaaaaataaaacataaatgactttttcttggtgccaattagccattcaggactgtgctttttagtacctggccttcttgatacttagaagacctggcctggagtcccagctttactgtttactaattttgtgtttagggaaagtttacctccctgagtttcatcctaaattttctcatttgttaaatgggaataataatcttatctaacataatagtgttgtttttaagataaaatcagataatgtgtttgaaaacattttctaaacctgaaggtactgggtcattgttaatattcacatttttttccgtagtatattcaggaccttgtcacataaccccttctatatatactttctgtcacgaagccttctaatgaagacccttagctttgtgatctgttcatcctcttctttgtaagtctggggaaaaccagtgaggtcagaatgcttacttgctgccttgagtttcatcttagcctgttaacttgtattttatgctttttgggtttttattgagcgttatacattctaatgtttgaatcttatgctgctt

SEQ ID NO: 36636 - DNA, 1021 bp, Homo sapiens
tttctttctgttttttcgtggatatctccaatactataatattttgctttttttaatttaacatatcatgcctttaaatagtcttcaaaatagtacctgtttcataatttccatgaactactacaccatgtttatttacttgtttctgtcatccccccgtctgtatatagagatgtctgtatctatatgtctttaacatttttatttaacactcatcatcagttaacaatgtttctgtttatgtcacattgtgagttccttaatgaccttggtatctcccacagcctttgcccatagaagacactcaataaataaatgagcatcactgctgtgcccttctgaagttccgtttaacatgttgtcacctgtgtatgcttggtgcgaactagataaaacatatatacttgccacattttttatatgaaactatacattttaagggctaaaatggatggaagaggcagtaaattctcacctagttcagagaggagagacatttataaggactgagacagacaggcaaggtattatagaagagagagagttgaagattcaacagaatttgggtgggtagaaaaggaaagagaggacattattttagtgaaaatggcttaggttaggttcgtgattatcacatgtttaactcagcatggtccaaacttgtatgtgtagaaaaaccttgtatagcagcataccttaaacttctctggggcaattttcacatctctttgagaaatactgggatggtgacttttgccctctggatgagtgttttggcttctggctaagttcagggtagcactaattccaggagacaggataattaagaacacaattctggagttagctacctcagttcagacccctgcttcccaaggtttttaactatgtaatcttggtcaagacattctatatctgttcctggatttaagttttgtctcatctgtcaatggaagttagtacctacttcattagggatgttagcagggtcaaataagattatccatatagactaaatggc

SEQ ID NO: 36637 - DNA, 1030 bp, Homo sapiens
cagccagcctatattgaatgcctgctatgggccaggctttcagagatgaataggacgtggccctttcccttgaagagcttacagtctagtgggagagaaagataaccaagctattacaaatgaaagttgtcataggtatgcggagttaataaaaagctccttattaagtgtcctagtctgttttgtgttgctataaaagaatacctgaggctaggcaatttataaagcaaagaggtttatgtggctcataatttggcagtctgtacaagaaccatagtaccaacatcttttttggtgagggcctcagactgcctccactcatggtggaaggcaaggggagccagcatgcatagagatcacatacagaaaaaggaagcgaaactcattcaccacctcccttgctcctgccccacgataatctactcatgagggatctgcccccctgacccaagtacctccctttaggacctgcctccaacgttggggatcacatttcaacatgagatttggagacggtaaacatccaaactatagcattaagcatttaacttctacagagccatgtataatatgtccatcacatatgaatcagtatcttatgtgtgtctcaggcatcatgctggttgggaatcagtaaataagcagaatcctacccttactgaagcggggagggtggtggtttagcagctgtcagatgatgaattctgcagtcaaggggtgcactcagagaacacaaagcggggagtgatttatgctgccttggcaaaaaggatcagggagaagctccattgaagagagacctgcttgagaaagacctatttttaatgagtatttcagaacattgttcctggaagcctctgactggtatacaaaattaccttgtacccagaagccaccgagaattaaagacagataactttaagcagtgcagatacttgtttatgtatcaaaactatcattcatagagccttcattgcaccataggcattgtgctaagtgctttacttataatatcttacttaatctgtat

SEQ ID NO: 36638 - DNA, 1044 bp, Homo sapiens
gatcaatccactctcttcccaggaggtgagctcaccactcccagatgtactgaatgccacagagcccctgagcacagcccagagggagatccagcgccagtccacactgcagctgctgcgcaaagtcctgcagattcctgagaatgagtcagagctggctgaggtcttcgccttgattcatgaactcaacagctctcgacttatcttgtccaacgtgagtgaggagacagtcaccatcgagcaaacctcttggtcgaattattatgagtctccgtccacgcagtgccttctctgtagcagcccattattcaaagggggacaaaagtaagcaccccttaactctgcccctagctaccccatcccatttggctcatactgctcttttcttcagaaaacattaaaactataactgtgaagatgttattctctgccgtttttaggcttcctttaactttctgattgctgaaagtaaagtaataattggtaattatcatttctgttgaaatgcctgaaagttatcaccagattaggatttagtttacatctggactgccccacacaatgtttaggtttgggagttcattgggattggttaaattatgtaataaattcagagttacattaattgtagggatgattccacagattccaacaaagtggaaatacctacctagaaaatcctaagctccagcaaatgagaatttgccattgatcactgagccctggaactccataaagaagtctctttcccttctttttttttgttggtgatgtttctggtactagctccctggctgggccccaggagtgctggctgctgacagccagccgtctgcagacagtgactgcccaggtgaagatgtgtctgaacccccattgtctggccctgcacagcttcatagacatctacacaggtgggtgccaaccttctcttccctcagagcatcccaaagcaggcttgggaactgcctctatggatgagacctctggccctttgaggactgggccttctcagatggggcttctgaggaagggggagtcttc

SEQ ID NO: 36639 - DNA, 1023 bp, Homo sapiens
ccagggtctggcacacagtgggtgccagagcctggttgtcaaaagcctgaggatgctgtgggcctctgagaatcacagaactagctggtaaggagcctttgtgtaaagcagagaggcagcctgtgttgtgcacagggccgggcatcatcccccggggcagcctcttgcacagcaacctcaaatggatagactgtgtctggagcaagaggggagagttggagaaggccgtccttagctggccccgagctggagatggactgtttccttgctcattgcctgcctccctcatcagcctctgagctctggggaggcactgcttccctgcatagggcacgtccctggcacacggtgcataatgcctgcacatacttgtgaatagatgcatgagttagagtgcagggacaagagtgggggccagtttcttcaggctgctttctctctgctttctcagagactaccccgtcctactgcttcgggggacctgccaggcaggaggggcttggactggcccagagaggtggaccttggtactgctaggatctgctccaaaggtggagccaaccccagctccctcggtggggggtgggggaggagccgcctaaaggagcaggggcggggggcgggcgggggggcggtgcgggtgcgaaggctccctctcacctgcagagatgggtatgaaggcccaggagccactccccacgctgttgtgggccctgcactcgtaggtttggttgtgctctaaggtctcaacagtcagcaggctctgcaccgtcaccttgtggaagggctcctggctcaggacctcagggtatgggtcatcccagacctgcagcacttgggcctcatcacacctggcaaaagcagaatgtggctcagagcttcagggttcccagcgccagcatgtccctcccactcacagggtgcccagcccctgagcccaggtgagggaggtgagtggagcccacttacctatcagtgtggccactgcactgcagccatgtcacgttgggctgggggtaccca

SEQ ID NO: 36640 - DNA, 1506 bp, Homo sapiens
cagatgggggactctgagttcaggaaccttctccagcctttctttggtgtcccctcaggcaaaaccagctctgaaaattcctcagaccaaggcctgcccaaagaaaaccaataccactgcatctgccaaggtcgcccctgtgcgagtgggcacccaagccccccggaaagcaggaactgcgacttctccagcaggctcatccccagctgtggctgggggcacccagagaccagcagaggattcttcaagcagtgaggaatcagatagtgaggaagagaagacaggtcttgcagtaaccgtgggacaggtgaggcctgtgttttctgggcgggcctcagggccgcccctacgtggtcctttggactcctggagacacctctcttccccttgtcatcccaggcaaagtctgtggggaaaggcctccaggtgaaagcagcctcagtgcctgtcaaggggtccttggggcaagggactgctccagtactccctgggaagacggggcctacagtcacccaggtgaaagctgaaaagcaggaagactctgagagcagtgaggaggaatcagacagtgaggaagcagctgcatctccagcacaggtgaggcctagaaggagcaggcccatcccacccacacctgttcctgagccagggctgaggatgggcttgactgggggctagtgttgcctgcaggtgtgcagaagcctcagaggtagcctcaacacagcttccttccctatctttcactccatgtctcctctgcccatcagagctccagggtctctgtcttgtttgccttttgaggtcctcctgctgattgattccctgtggttttcacaagctctggagttcccaccctgccaggtgctgcccttgtctggggttgctgaggcgctgttcctcagggaagtcctgtctctgtggagcatggacatgctcctgcagtgtggagcgatggggttgagatagagggtgtgagcctgggctgcgcagcatgacaggtgagagcatctaggccttttacaggaggtggcagcatctgagccatgggctgaaagagttggccaggtgaaatgggcagggagagtgttccaggcagaggaagcagtctgtgcgaggccagggaatgagagagtgcctggcttgggtgccttgccacaggcggcacattgtggtgggatggctggcagttgtttagagccagaccgcctgggttcaagtttcagctccacagcctggcaagtgctgtaagccctcagagcccttactctcctataaacaggaaatcagccctcacaggtttgggtgagaatttaggtgagatctcacctgctacacccagcaagggagctgcacacagcaagttgtctctgtcaccctgacgatgggccaggctaatgtggaacagatcaggagtgaggtctccaagcctggaagagctgagagaagatggctcactccctgcactcacccacccactgtttattatttttaattgtcgctctgttt

SEQ ID NO: 36641 - DNA, 1050 bp, Homo sapiens
tggctcctgccatcttgaagaatccccagaggatggaattgggcctccagccgtcccgggggcccctctgcctaacctggcctgccctgcccagtccacctcccccagcccaccgcagctctagagccaaaagtcgccagaaatcctggttggggctgaggggccaagctcactgcatgctgcagggggcagccctagcctcagtgtgacatgagtaccacatagagtgtgacatggagtatccacctgggccttcctccaggcaaacacctccaggaccaaaccaccaagccacctttcagagcccagcatgcaggagtgttgtgcccatgagacccagaatggggcagagacctccaagtcacttggaagttagagccggtgaggagacccagtcatggggctttcagctgcagcttgccccaggctgggtcggaagaggaattgctgctcactttcttccccaacattctctgtgagaggcggtgcgacaaggagacattttagagggggctgtggaaggtttttttttttttacacgtgtagtcagcacacaattatcaaaggcaagcagaggcgtggaaaattctaaacaaaggctgcaccagaagtctctctggcaggcagtaaacctgcttagtcagccaccacgtgtatatacactgcacccagagctccccaccttgcctggaccccctgaccaggaagggccgagtgtgggtaatcatcagttgaatgtctgcatggcccccacttttattataaatctacaatgtatcataggaagccttactgttcatccacccctcacgttatagacagggaaaccaaggccctgggaggagatgggtcctggccagaatcacactgaaagtgggtgggaaagtcagacctagaacccaggtctccttcctcccagctccagactccatctccctcctttctgaattttcattccattgatagatttcaggccctttcattaacattctggagtcattttctgtcccccaccctaactggagtttttagtataaagagacagggaaa

SEQ ID NO: 36642 - DNA, 1069 bp, Homo sapiens
tgtggtcagagcaagaggaaaggcctctgggggaatcaacaagtaaagggagggccccagcaagcaagagaacatggatagtgagcctcctgtcgcaaggaggtatgcgacgaacagttttgtaatcacaagttgaggatgtggtcaagaatttaagatcataggctgggggttggcgtctgacaaactcacaaatgggctctggtctaggcagcccagagctctctctgccctaggctttggacctgcttggctgtgctttggccgcccttccatgctttgggaccaaagccaggcctgcaagtctctggaggctgggccgacttctactggcctggaatttggatttgagtatggcttgaaatatctggactgtttggaggacttggacattctttacttgaaatggaacattagggtaatttgtgaaatgtgtatggaaaatgtctgtggctgagggtgacaggggacatgaaatggggtgcagtcctgctggattcaggagaggctgttctgatggaggacagaagacaaggattcaaatgatggctatggggcaggatctgatcagttatagatgggttttggaaggtcagtggaaggaaacgctttctgcttattaatgtcagcaaggcctcctggaggaggaagtgttttcgagggtgcagactgcgggaaatgggacaataggagacaagattaggtcatggggagcctgcagtgccctgctcaggagtttggattttattctgtagcctatagagaggacagagggttgtaagtagctcattgactcgatgcctgttcctgtgccttgtgtcaggcaccatgccaggctctttacagacaccccattgaaatatcacaatactctgcaaagtagctgctgctgctggtcccctatccctgccccattttcagatgaggaaatagaggctcagaggggtggagtcacttatagagctggaatttgaacccaggcctgaactatttctgccttactgtgttgcttctcaggggtcttttgaccaaagatgggagcaagactggcagagttaagaccaggcca

SEQ ID NO: 36643 - DNA, 1067 bp, Homo sapiens
tcatggtcctgcagaaagctgaccacaggctgactcaggcagcggactgacagggaaggagggggaagctgcaggactttgtagctgtcttggcatttggggtcgtcacaggtggttttaaggtttggggaataacccttaaggggcaatattactgctttcaaatccctgaaaggccctctacaggtagggggcatagtcttgtccttcagggttcctgaggatggagaaagcaacaagggtgacagctccaaggaagctagtccggaagtaagctgcccagaaagaaggcgagaacagcatggctgaaggtatgcaaagagcctgagagctgcagaggcggcaggaggatgcatcagcaggggcaggcctgggtggccactctcagttcccttttcacccaagaatctcagcatttggatggtgcctggcccacctccaccctctgttttctcatagctttggagctgcccttcctgcacgtcctggggagttccatatggcctggcctgcagagctccactgggagagtccttgccgtttggaatacactcagcccagctgactgtcaaggggccccttggggatgtctggagcagtggccagagctgggctaaggactgtactttcacagaggatttgaaccctctgcttccatttctcatctgtgaaatggggtcagtctctttttcctcacctgtgaagaaataaggctaaatcatgaatcaggctgaatcagtagggcttagggcaaaagggctggtgagtttgtggatttgaaagtgaagacgcaggcgggggttgttcccctccttccctgcagtggaggttaaaggaggctctcttggtttctgggggtcaccagcaaagttgctttctctgtctgtggggctcttacaaagctctgcctcacagcttctgtcttggaggtgtggagctcagtggaagaggtggatgtttgggggcagcggtcctggaccctgcggcctcagggctaaagccaatttgccatcaaaatccttatctagatggaggagagtttgtgctaagttgcctcctggcccttt

SEQ ID NO: 36644 - DNA, 1047 bp, Homo sapiens
cttcagcctcccaagtagctgggactacaggtgcccgccaccatgcctggctaatttttgtatttttagtagagacgaggttttgccatgttggtcaggctggtcttgaactcctgacctcgtgatctgcccgcctcggcctcccaaagtgctgggattacggcgtgcgccactgcgcccggcccatctacctacatttctaacatctccacagtctcttgtctaaaatctagtgtggtcagatgaattattggaagtcaacatttttcaggttttagaaaggtaatgtggtgcgaaaccatatatttagtaacatcttcagcgacacctggggcagcaccctgttagcaaattcattaatatgtctgtagcaaagtatgtgaatatttacactaagtaagaggaataagtcaggttttgttgccaaatggctttgctacaaacctaggaaacaaagcctgtgttttcaaagctttctcaattgagatattgtaaacaaaggattgtggacatgcaaagaaaattcagaaagatgagagaagacgtaattccttggcccaattcccaagagcttgattttgtaggtaggtctaaagtggggtgcaggaatccagcaggcccccagaacgctctgatgaagcacatccttgggaccagcctggatcagccccacctcacaggataggatagggaccctgtacccttcatgagagtggactttgcttcccacaagccccagaagttggaccctgagtttgcataggtagattcccctgggagggtctggagtgttcctttggtttccagaggttccttcatccagaggtggccattgctctggtgggatatgggcattagtctggaaagccgtgctcacccacagcaggctggggaggggttgtgggtagcaggaggtcctggtccacagtgacggcctagaaggtgttcccccaggtcaggaaagaaagtccgccctctggaggccccctctgctctgtgccagcctccctggggcagtcctggagccactctgagccccagctcgcc

SEQ ID NO: 36645 - DNA, 1074 bp, Homo sapiens
tctctgccattcctggggtccatgaacatggctttaaggtcggaagtgggtggctgagccagctcccatccaaagactttcccacctccacaggtttgatccaaagaaaggattttggtgccaactgcttgaaggaggaaaaaccaagtgtctgggcaaaagcaagggccggaaatatcccgagatggacttggatgtaagtggtggacacactacctgtagcacctgcataagggtaaggggtccctgtatggagttgagggggattctctttcctttaccatgcactcagcatgttcatggccttagcatttcttggacagtatttgtaagaggaggaaaatgggggctgggacatggtgggtcagacctgatttcgtcaaacaagtgttggttaccttctactaagggctgagtgctgtggggttttgaggatgagccagacatgttctctgccttcaaggaactcctggtcttggaggggtatgagtcccaacaccactaagtagaatacaggcagagagtgctgcgcgcagtcagagagggcacacaagtgctatgggaattcagaacaaggggatgtcacttgaacctgagaggggtaaaaaaggctccttaaaggagggatgggggtctctggagttgcgcctagaaggatgagatccattttgtaggatttggacatatggaatgggagggtaggtaagaacagcatgtgtaaaaccatagggggaaaaaagaaattttaaaaatatatagaaaaagggtcacagactgggggtcttgttacttcctccttttcctacttgcttctgtttttgttttgttttgttttgttttgtttttgagacagggtctcgttctgttgcctaggctggagtgcagtggcatgatcatggctcacagtagcctcgaccccctgggctcaatcgatcttcccgcctcagcctgccatagtgctggtattataggtgtgaaccaccgtgcctggccctggccctgcccgccttgggttttgattattaattctctctcctctccctatcagaagaattttgacttagtgagctatat

SEQ ID NO: 36646 - DNA, 1063 bp, Homo sapiens
ctgctcctggggaggccgcttcctggtaggagggagtccacgagactcttttctgtccctcactgtgttccgccgactgtcccctctcgtcacccatcactccctgcttccgcagggcgcccctcagtattcgctgccatatgtccctgtcctccaggctgtaggggaggagagcctggccgggggagacagactggacatttccctgtttcgagccaggctcttccaaggggccagctgggtccccggagtcagtcctaggctggatgggagggtggccccctcaagaggactcccagcctccacatctggttcctaccttcacatctcaccctcccgttctggggaagaatttctggttcctacagtatccactccatcctcaaggcttcccgcagggccttggggcactgccttgccatcgggcccagttctccgggccccacctgcacccctttcttccccctgggatatgatgtgtggtgtttcctgtggtaaaagactgaggcaggccaggggtctgccagtaacatgttcccatgtacagacacggtccccacaccctcccagcctcaggcccaggcagacatgggcgagctggtgagactgccagccacggctttgcttagccacctgtggccgagggctctcagagacccccttaacctcccaaatactaagaagctaaaatattttaatattttgtttttttttttcttggtgccagagtttataccctgggtgctggggtcgcactgtgttatatatatatatatatatatataatgtgtatatatatatattctattttttttggttgggttcgtttttaattcagtcctacaaaatggtggtaagccccagtctcaggggtcaccctgtcttagagctagagatgaggtggcagggagggaggctgtgtcctcagtggcctggggctgagcagaccttaggaaggggccctccccagtgccgtggctgctctggggctaccccaggtgaacagaggtggtgagatgcgcagggaagaccagctctctccaggacatcgggctgcgtgaag

SEQ ID NO: 36647 - DNA, 1027 bp, Homo sapiens
agattctagcaggggacaggattggctcagatgacccctgagggctcttccagtcttgaaatgcattccatgatattaggaagtcgggggtgggtggtggtggtgggctagttgggcttgaatttaggggccgatgagcttgggtacgtgagcagggtgttaagttagggtctgcctgtatttctggtccccttggaaatgtccccttcttcagtgtcagacctcagtcccagtgtccatatcgtgcccagaaaagtagacattatcctgccccatcccttccccagtgcactctgacctagctagtgcctggtgcccagtgacctgggggagcctggctgcaggccctcactggttccctaaaccttggtggctgtgattcaggtccccaggggggactcagggaggaatatggctgagttctgtagtttccagagttggctggtagagccttctagaggttcagaatattagcttcaggatcagctgggggtatggaattggctgaggatcaaacgtatgtaggtgaaaggataccaggatgttgctaaaggtgagggacagtttgggtttgggacttaccggggtgatgttagatctggaacccccaagtgaggctggagggagttaaggtcagtatggaagatagggttgggacagggtgctttggaatgaaagagtgaccttagagggctccttgggcctcaggaatgctcctgctgctgtgaagatgagaaggtgctcttactcagttaatgatgagtgactatatttaccaaagcccctacctgctgctgggtcccttgtagcacaggagactggggctaagggcccctcccagggaagggacaccatcaggcctctggctgaggcagtagcatagaggatccatttctacctgcatttcccagaggactagcaggaggcagccttgagaaaccggcagttcccaagccagcgcctggctgttctctcattgtcactgccctctccccaacctctcctctaacccactagagattgcctg

SEQ ID NO: 36648 - DNA, 1138 bp, Homo sapiens
ataattgtcaggtttttcaaggtcaaaatgaaaaaaaaaaaaaaaagactgttaaaggcagctagagagaaatgacaggtcacctgcaaagaaaacttcatcaggctaacagtggacctctcagctgaaaccttacaagccaggaaagatttaaacctgcctcacatgaggtcttgaaaggagtgctaactatagaaaggaaagactcctaccagctaataccaaagcactcttaaatacagagaccagtaacactataaaccaaccacaccaacaagccagcataataaccagctaagagcacaatgacacacatcaacaataaccttgaatgtaaatgggctaagtgcctccacttaaaaggcactgagtggcccgctggataaaaaagcaagacccaatggtatggtgtcttcaagagcatatcacacataatgacacccatagtctcaaaaaaaagggatggagggaaatttaccaagcaaatgaaaaccagaaaaaagcagggattgcaattctgatttcagacaagaaaaaacaaacaaacaaacgaaaaacagactttaaaccagcaaagatttagaaagacaaagaagggcattacataatggtaaagggttcaattcaacaagaaggtctaactatcctaaatataaatgcagccaacacaaaaaaagcaagttcttagagacctacaaagagacacagactcccacataataaaagtgggagactctaacactccactgatattgttagatagatcattgaggcagaaaattaacaaagatatttaggacccaaactcaacattggaccaaatggatctgatagaatggatctatagaactctccacccaaaaataacagaatatacattcttctcattgccacatggtgcacactctaaaattggccacataatttgacataaaacaatccttggcaaatgcaaaagaacgaaaattataccaaacacactctcagaccacagaataataaaaataggagtcaagactgagaaaatcactcaaaaccatgaaaattaacatggttctgaatgactatggggtaaataatgaaattatggcagaaaccaagaagttctttgaaactaatgaaaacgaagatacaacat

SEQ ID NO: 36649 - DNA, 1048 bp, Homo sapiens
gttcagactttttccccaaatattccataattaccaaacaccactttcagaatgaaaatgattatttcaaatgtcaacattgcctgcttaaaagcctcctttgttttcttctttgctaacacagtctcatctcagtcatctcaaatctcaagctttctctcatcccacaccaattccatattcactctgtcaagctgccaaacagttagttgtccataacaatcctgttaattttcctattgtacatataagaaaactgaggattacagtggttaagtaaatacttgccaaagatgattacatactaaatatatgattgatgaactctcttatctgcaagatttattctcaatagtctaggttcttgactactgcagtccaaactgcctccctgatactgtaaacatcatgatcttttatattttatcacttcaataccaaccttagtcgacctttccatgaagcactctccattttagtttcaaaattctcagccttcctaaaatcactctgccctttctacttttacaaatgctgcttcctgtcctcagcctacttccctcatgagccaaagttcaataatcatttaagcctattacctacttccttagaaatctggttgttcccccctctctgctataacagtacctgctcccatgtctgctacagaacttttatgtgttaatgttagtttctacatctctttacatctctgccgatgtgttaatgttggtttctacatctcttttttctctgcagtccttccagaagaaaactatacgtaaatctgctcaggatattcaacagctagccagtgcatatgacatatactgggtacttaagaaacgtttgttaaatgaatcatgattataaagaaaaaataaattaaaacttatgtttagttaaacactgttttgtgtattagtctaatttgttttatctgaagaaaagtaacataagaaagataataaatgtggaatacagaggaaatccattctgagaggtaaattcatagatgttatcattctaacattctgattttgcttta

SEQ ID NO: 36650 - DNA, 1054 bp, Homo sapiens
tctttaaactaaatatagctttatgaaaaacctattgcaaaagacccatttcactggtactgttgaaaacttagtcattgacaggccctcatcctcaaaaagaattaggggaaaggatttggggaactgtttaatacacaccctcattttacagaagagagacccatcaatcaactgtgacttcgcaataatacacacacagatacttgcccaaattatatacctaatctggggattctcctataaggctttgtaacctcctagggttccttcagttaattcaacggtgttatcagatcttcaaaacgatattcattctagtttaattatgaaaagaattacacttatgccttgattcagaagggagggagggaggaagcgatgcaaactccaaagcaccactgagtctcaccactgggggatcctacagagaaactgggaatcctggccctggtttacatagcagctcccaggcatcgtctccacccatcaggtccgcacctgccagttttcttcctgctctttgtgcctgtacttcccaattctcttcctgcagggctctcttcctattcccaacccacatcttctccacccccaccctctacccactgaaaactaaaatctacctaaaaatggctggtctctaattacttgcattttgtttccacactatttcagctgtttttatagcatgtctggccttagccgggcagacagtttcatttctcaaagtgtccgctgggaattctcaagcttgacataaaaaaatggcactcagtcatctttttgtctgatttcctagttctggatcctttttcttaacagttccaatttgtgagaaaactcatttatttataaagtcgtgactgcccccacctcttccattctttgaagtcttggtttgtcttcaggacattccaccctgttagagaccatggagcccatagataacaaacccctatttgacagataggtaaactgagtcctctgtctagaaaaggacttactctaggccacacacattgagtgacacaaccagggccttggaatccag

SEQ ID NO: 36651 - DNA, 1015 bp, Homo sapiens
acgcccggctaatttgtgtatttttagtagagatggggtttcaccatgttggccaggatggtctcgatctcttgacctcgtgatctgtccaccttggccttgcaaagcgctggattacaggcatgagccactacacccagccgatttttcctttttgattaaagatgctattacaatgtaaatatttcttacacagaaagtcacagcacatgtgcccattgatacaaggctgctgaggcctggtctccagttggaaatataattaagggtggcaaggactggagtcagttggagagtgcatagccagtctgtgaagacaactgccagatactggcaatactccagcctggtgacagagtgagactctgtctcaaaaaaaaagtttcaatgtttactcctagagaagccaaaaatccagatttgtatatgaaatcttaccattttaaaagattggcagctaattatttttttaaaaagctgtgcagtgtgatgtgtcccaaacggactggctcatgggtggccacgtcacaacctctgatctcagaccgtgcatgccttgtcctcttaagacaactcctgtggcaccgtttctccctccacagggccaaagccatagtgtccggtcccaaggacaaggctcttccagtgctaggagaggtatgagcagcctctcacctgtgagctgtggggatcacaaggctgcctgcctcagtcttggagtcctgttgggtgaatgaggcagatgggaaagagcctcaccagcagctgcttttggagcaggggtccaaggaagagagggtggcctcgacatcaaactgcctggatttttctaccaccctgttacatcataacaacttctgaaacacacaccagccctgagttctgggctcatttgaagcctggaatagcaataaatctttttaacttgcggacagtttccccttgccttggctgcatatttcactgatcacatctcaggatttcaaaagcatttttggggtggggctcttttggt

SEQ ID NO: 36652 - DNA, 1032 bp, Homo sapiens
ctctgttggatcttccagccttattctcaacagttcatttttagttcacattcttgaccgaatctcagtagctcagttaatctttttatgtctgctctgctcttgggtcatatgttccgtgaggtttcttaggggtgggggatgaggagttaaaggtggcatcttcaatcgcaggtcaaagcagactttaataaatggtgctgagccaactggaaagccccttggagaaagttgaagttagacctgtacttcacaccatatgcaagaatgaactccatctggatccaggatccaaatgtaagaaaatgaagccatataaatacagaaggaaacgtggtggaaatatccagtggcaacaaaatattgacacatttgactacatgaagataataaaaatgcttagtaaaaacacaataaaatcaaatgactgggagaaaaatttatccagcctatataatagacaaacagttagtgttcttactatataaggaattaaaaattaagggacaaaggaccaaaaacttgatagaaaaactgggaaaagacatgaacatactcacgtaaagatataaaaatggctctttaaaatgaaatattcaaactaactcattagagaaatgtaaattgagataatactgagataccatttatcatctctaagactggtgaaagaaagaacaacacatttctgttaggcaaggctatagggaaacacactgtcatcactgttggtaggaatgcaaactggtatgacttctggaggggaatttgtcagtacttaacaaattgcagaagcatttaccctttgacacaaccatttccactgtgggaatttcccttgaagatgcacctccaacagtacaaacatacagatgcacaagattactcattgcagcactgagactgcaaatattggaagcaaagtcatgttcatatacacgagaaagcctgagtaaaccatggcaccaatggcatacccacatgatggaatattattgagctataaaaaaaatgaggaagatctctatgaat

SEQ ID NO: 36653 - DNA, 1005 bp, Homo sapiens
tggggaatcaggatattttgtcctagctctgccgcttacctggcaaccttaagtgactcgcgtttgggtttctcagtctagacagtgatggaattgaattcttaagggccccttctgctgtgatctggatgttgtgcatctttctaggcttgtttttttgtttgtttgtttttaaatagagatgaggtctcactatgctgcccaggctgatctcaaactcctgggctcaagtgatcctcccaccttggcctcccaaagtattgcgattacaggggtgtgagccagtgcccctgaccagggtctgtttgtttttttattccgagagattttacccgctgtgtacactgagtatcagccttgcaacaagacttaatctaattgtgtaggaagcagtttcctctgcttattcctctgttgctataaaatcctcctcctctttcttcctatctctgtattatgtctaagctaaatactaacagctgaaaatgatttttaactgtctgttattattttaaacatgatcagggccctcttctgactcttgtctagagcctcgtttacagtaattaacttacttgtacatttagaacatgttttcgttaaaaatgttcttgaagtcaagtggaaagggacaaactttgtgtttgtctggggatggaggctacgtgcagcagaggctgtgctgataacagctttaagcctctccctttgttttctgattgtatcgtttatattcgcctgctctggagtccttgttttccctttaaggcatgtagctgttcattcagcctcctcttgtggcagttcgaagtgctcagagttttctctgttccaaaggcggtgtaagaaaaagggattccatttattttataatattctggagactacaactgggaccaatagatgaaagtgccataagggaagggtgtttggtaagtgttaaaaactttcaaagaattagtggtctcctgtattagaacactgagcacggagctccctgtcact

SEQ ID NO: 36654 - DNA, 1027 bp, Homo sapiens
tatatatacacacacgattgaactattgcacaaggtccaagacattatctcagaaaggagtagataatcctgacctaaggaatagggaatgcggaattccaggaagcacttctctttcattttcccccactcctcccaagcagtgcctcacttctgccttgtctagctgtactccggaaaattaagaaatttatgagtgtagcaccacgtataccaatgggaaggatgggagtcagaagtcaagtgaactcagcccgcctctgtgtactttgcacttttccatttcccttggtaccaggcactttcatacttaatccatagtggagctgtcacagtgagcaactctgacaatgacagcttctaccccagaggccaccccaaatatggagctaaaggctccagctgcaggaggtcttaatgctggccctgtccccccagctgccatgtccacgcagagacttcggaatgaagactaccacgactacagctccacggacgtgagccctgaggagagcccgtcggaaggcctcaacaacctctcctccccgggctcctaccagcgctttggtcaaagcaatagcacaacgtgagtagctgttaccttctcctctcctgggtgggattcgtgttcctaagcctcccttggacttatttttccccccaatttcatcagtcctccactttacagatgaaggtcagcagtgaagagattgggcgagtgactgcgctgagatttgccttcctgggctgccactctctaggcagtttcttactcttttttcctttcagctgtgttggccccccaaggctggtgccaagtgagagcttggacttaaaaaaagcttctacagaggacattcttttaatttaaaagtgtgtcatctgtgctagaaccccaaataatttccaagcataatcggaagcttcctttgcaaagtctccccccgaattctgccccatcaccaaatcagtattcatttgactgaagaagtgggaagagagaagaattaacttctgcacttaaaaa

SEQ ID NO: 36655 - DNA, 1047 bp, Homo sapiens
agttcttcacgtcccctttttatgagactggaaggagggcctgtgaatgcactatagaccatttccattaccaaacaaggaagggtaaatatttacccatgatttcatgttgtaattagaactctcaagagcacctaggatatactccactgtacactaaagatgaattgagtgaggccacccccatagacagacacacctgctgcatttacttttaaatcattgcaggtagtcgggctgtggtggttgccatgatcagagggctgggataagaatttgggttcttatagcgtctcagtcccaaccaactggtagtatccatccagagtgatgtctatgcatagtacaaccaggacacagagcaatgtctgcataagggcagccctgctgatttcttgagagcaattctgagtcttcctctgggcttagccagaagttgtgctgtgatcaaatagtgccgtctgcctggagtacagcatgggggaagaggtttggctgtgttttgatgtagtcactgcccatagtgttgtagttgcttcattttgatgtgtcatacagctaaagatgctccctttaggtcatttttgttgccgctgcctctgcggcttgttactactgttctgttttggcattgtgccccacttaccatgaggattcccctactgttcaatgtttctgaattttttccctaatcctaagcatgtacatgactgttcctcttgcccctcatgcacgtgccattgtaggtagcagaccaaggtcttccacagagagcaggttcctctctgtcttcagcatgtggagtctcaaatggaacagttctgggcagagtgctttgcacagagggtgctcccaataaatgttttatcactgcatatcgttgcttctgagatgtattttttcatagttataacagtttcaggattgcaagagtacatctcacaatccatgtgtacctttaacagcattttctcaaaatactgttattataattgataatatggtaagacctcacttaatatcattgatacattcttagaaactgca

SEQ ID NO: 36656 - DNA, 1064 bp, Homo sapiens
attcttcataatgatttcccccttttgtattcatatgattgcaatacatttgtataaaatctcaactggtctgtatgggctctgtttgtttttatgatgtttgttcatgttttaaacgacttgctgaaatgatcttgtctctgagttggtttcagctaaatgattcggtcttttcccctgtgtttgatccttcaggtttggacatatttgactcttttccccccaggttgaattgaccaaagcaatggtgatggagaagcctagtcccctgctggtcgggcgggaatttgtgagacagtattacacactgctgaaccaggccccagacatgctgcataggtaagacatttttctcctgcatcatctaatgctgtcttttagtatgtggtacttatctttgagattctcccactcatcatcttatgctttgtagggttgttgcataatacttatttacatataaatatcccccaattttttatttgagacagagtctcgccctgttgtccagactggagtgcagtggtgcgatctggactgactgcaacgtccacctccccagtttaagtgattcttctgccccagcctcctgagtagctgggaccacaggtgcccacaaccatgcccggctaatttttgtattttttttttttttttttttaagtagagacggggtttcaccatgttggccaggctggtctcaaactcctaacctcaggtgattgatccgccttggcctcccaaagtcctgggattacaggcgtgagccactgcgcctagccccaaaaaataatttttgaaagttaaactaagttatctaaacttgtacattattggaaaataacaattgaaatgtaaaggtatagtcatgcattatttactaagaatgtattaaagattgctggagctgaggtggatgtaaaaaataagaatgtattgaagacaatccatgactgttcctgtaataccatacttttgtgttgatgcgctttaaaaaattagtgtctttagtagaaatgatgcatgcttattgaaaattagaacacagataaattatgaaagta

SEQ ID NO: 36657 - DNA, 1048 bp, Homo sapiens
cgacttcaggtgatccgcccaccttggcctcccaaagtgttgggattacaggcgtgagccaccgtgcccagcctttttttgtatttttatatttggttaatttctttctaccccatagaataaaactgacataaaacataacaaaaagaaaaaagcataggccaggcatggtggcttatgcctgtaattctagcactttgagaggctgaggtgggcggatcacttgaggtcaggagttcaagaccagcctggccaatatggcaaagccttctctctatactaaaaatacaaaaaaaggcggaggttgcagtgagctaagattgcgccatggcactccagcctgagcaacagcacaagactctgtcttaaaaaaaaaaatgtatttatctggaagacaaatgtcaaatcttaatagtggttatccctggattagagcattttggtgtgttgctttcctggtagaatattgttttaatgaaaatggatcaaaggaggacatagatgggtgaaaaccatgaggaattgactttgacattcttaattgcatcagcagaaatagttaaaaagtacttctaaaaccacttgcatgaactaggtgtttaaggggaaccgctcacgcttattctcagatacattaataaaaggacacttgaagtctatgaagaagatagctgttccagccttaccgcacattttcttcctgagtgaaaataggaacttatgtattggtggccatcttgacatgaaactacaagatccttcccaacagtatcatcctacactgaaacctggaaccaaatccattcccattcagcaaatgttgatcaagtggcatgtaggggatacagagatgattgcatacaaagatgaaaaagaaaacgtttctgccagggccaggcgcggtgactcacacctacaattccagcactttgggaggccaaggcaggtagaattgcttgagtttgagttcgagaccagcctgggcaacatagttgaccttatctctacttaaataaaaataatcagccaggcatggtggcatgtgact

SEQ ID NO: 36658 - DNA, 1050 bp, Homo sapiens
gtctatccttaaggctgggcgcggtggctcacgcctgtaattccagcactttgggaggcccaggcgggcagatcacgaggtcaggagatcgaggccatcctggctaacatggtgaaaccccatctctactaaaaatacaaaaaattagccaggcgtggtggcaggcgccttagtcctagctattcgggagactgaggcaggagaatggcgtgaacccaggaggtggggctttcaatgagccgagatcgcgccactgcactctctagcctgggcgagagagcgagactccgtctcaaaaaacaaaaaacaaaaaaaagtctgttcttcaaagccttagttctgtccttaaagtcagtgccatgattttaccaaattgtcctactttgtttatttatatatgtttttcttcactgttgttttgtgaacattgcgaaagttaatgtatatgtgaattcagtaagtacaaattactttaaatatctttttctcacttagagtctgaagaagaagtagaggaacctgaagaaagacagcaaacacctgaggtggtacctgatgattctggaactttctatgatcaggcagttgtcaggtaagaagattttgttcacatgtccggggctgcataagaacttgcattgtctagtctttccctttgttggagggcatttacatattctgagaattacctcaaaataataatttctcagaagaatggttttgtttctggtaattttgactaaacaaaaatatgtaacttgtttgttaatagtaaattgtactatgaaggcaatctactattgcttagtttaaatagtatcagtttctttttggtttagttttttcttggtgttaagtgaaaacttgcatattgtttatcaagagttgaatgtattgaggtattaaatgctttgagggaatatgaagtggacagagacctatttaattagagatcgggcataaattgatataaataccaatatgtgagttaagtagcaataaagaatttcattacgttagtaagtgcatcattatacctttgggtttttt

SEQ ID NO: 36659 - DNA, 1062 bp, Homo sapiens
atttttattctattcctagttattttttttaaaaaaagtttctgttcttttgtattgctgtttggttgacttgtagatacattttcatattggtggttcatttcagggaaatttcttagatattgagccatatgtttgataagagagaggtaagatgtgtattagtttatttcatcaaaagaaaccactcccttccccgaggtaacttgaatgcctgttagaccagaaattttaggtgccactgtagcaccctatcagtgattccttttctatttaatatttaatcttttacactataaattattacatacttgttactacaagtgcataacatcttttcaagaaaaataacatggcagaatatactttttctatgaaattttattgaagataactttatagtggaagtagaaatgaactgctgaagtaaaacttcttttctagttggcatacctgatttcagaagttttcagtttgtccttctgagtctcgtcagggtgattgttaactgaactatcgttgaaacctttgcatttggtgctctggaaaggaatataatttttagtgctgtgtttataggctcagggttatgtcatttgtttgttcaataattcaaattcctgctgtgtgttaggcattgttcaaagtgtaggttttatattggcaaaacagataggggttcttgttctctggcagctaataggtgagtaggaaagagcaatgttgaaatgactttagcttgcaagtggaaaaaattagctgggcatggtggtgcctatgtgtggtcccacctgcttgggaggctgaggtaggaggatggcttagcctgggaagtcaaggctgcagtgagctatgattatgccactgcattccagcctgggtaatagagtaagaccttgtcacaagaacaaaaccataagaagcaagtggaaaagtaggttggctggaccagctgaccacttagttggttattatagtaaccctagtgagagagaatgatggcttgaattagagttgtggcagtggaaatggaaaagaaataattaggtagaataacaggtt

SEQ ID NO: 36660 - DNA, 1041 bp, Homo sapiens
ccagcctgggcagcagagcgagactccatctcaaaaaataaataaataaataaatttgaatagaacacttccgcgacacatagtaagtactcttagatactcattttaagaaattagaaaattacattgctggtgaagagcataaattgaatatattgaaatgtttcgtagccccttaactactttggctctgttaggaggaaacgaaggccaagactatccaaaattctcaggaggtgttaaagagcaaattaaagtttatgtcaaattaatgaagtttttattttaaatgtatatgtactttgcataaatatgtacagtaccatcttttcacactggtgatgatgaggttttattctaagcctccaaatctatggagaaggtggcaattttttttattttttattttttattgggacggagtctcactctgtcgcccatgctggagtgcagtggcacgaccttggctcaccacaacttccgccacccgggttcaagttgcactccagtctgggtgacgagtgaaactctgtctcattaaaaaaacaaacaaaaaactgaactgtgagaacttagctgatttataatctgctggttcttttttttttctgagtcggagtctcgctctttttcccagactggagtacaatggcgtgatcttggctcactgcaacctccgcctcctgggttcaagcaattctcctgcctcagcctccttgaatagctggaactacaggcgtgtgtcaccatgtctggctaatttttgtgtttttttagtagagacggggtttcaccatgttggtcaggctggtcttgaactcctgacctcgtaatccacccgtctcggcctcccaaagtgctgggattacaggcatgagtcaccgtgcccagcctctgctggttcattattacagctttctttatctttgatagtgatagccagctcatcagtactcttaagtctggtcaccttgattcttacagcccatcatgttcagaggtgaggtccgtctgaatgtcgaagagaagaagactcgagct

SEQ ID NO: 36661 - DNA, 2003 bp, Homo sapiens
tgttatgccttattctaaaattgagtctcaaactggaatgcctttgaagacagatgcttctatagaggttctttgacctaaatagttcagcatttgtatttttattctggtatctaatcagattcctaatcatagcccgtaagaaggaatgttactttaatattggactttgctcatgtgctcgtgtccgcatttttttttttcttaaaatcatagccatatggtaaattttctattttgttatggttctcttttattgatgggcatgcagtgggtgttacttggaaatggccaatttttattaaaatatttctggaagaaaatttaatctggcaatatagactaatactcgtttcacatatgtgttatttgttgagtgctgtgtgtgagatgggtgaaggttttgtttacacgtgtgaaacaaacttttgtgtgattgtcattactaattgaagggcaaccaggttgtaaaattcagcgtatttattttcttaacagtattcatctttaggactgtcgtttgaggatagcataggaatatttggtttgcattactgagaaactctaggtttgctgtgatggttaagaccacagtgaagttggtattaccagtttggttccagttcctcaaatatttgaaaattggcagcatctcctttacataaacttaatgtaactgaatcacatggcttttttgtagggttaaagtaactttggtaaccacttttggcccagatcactgataataggaagaaatacaacttatacttttgtagcttatattaagcatgtggtgggtggaaagaaaagtttagtctgagtcactttggaaaaaaaaattactttgtggtaacttcaaggtcataaattatggatagcctagaaattatccttcatgagtgaatactaaattatacatttcaaaacagaagttcttcctacttggagacttaagggcattaactagatgcagcaatcctcagcttggtgttatcacatactagaggacatttggaaatgtgtgaaatttggaagggttgttggagagacatgcatctggcatttattgggtggggtctaaggataccaaatgttgtgtaaaaatgaagcaaccccattgagaacactgatagtccctattcctgtgggtgggtggagctgtgggattaggaaaactggaatgaagactcattcttttgaaactcagcctcagataaataacaaactaggaaatggaaatctgtttcaagaattgcagtaacatctactctaaggaattagtaatttcactttttattatttgtaccaaatgtatgtgtgtgttgtgtatgttggtgtaaatgtggagaggtggtagcaatacatactgatgctgcttgtaatttgttgcagggaattactgcacaatctcagaaaatagaaagcttccccagtgctttctgtcatcagagttgggatgattgtgaggttttgaatgatagtattggacctaagaaataggattagcatcatgatcagaactgttgagaatccttgtacaattatgtacattattgcatgtagagtaaacctgagagcttagagatgtatacgtttccactgctggaaaatcattataagttagggcaacattttctataggtggcagcagtaggagctcatcacattgaacattttcagattttaaaatgaaaattttcatccgtaggaatggcccaatgtatagttattagctactgagcttagaactcttgacccatgagattttttttttaaatttttatttttatagaggcaaggtcttgctatgttgtcaggctggtctcaagctcctggcctcatcagttctcctgccttccaagtagccggaactacaggtgtgcaccattgcacctggcctcatgagtattttagttagataagatttgtttggttcagtgggtcttagttttttaagacctgttaatttgtaattagacatcttgggccttaaactgtatttt

SEQ ID NO: 36662 - DNA, 1907 bp, Homo sapiens
agcaaggagcacatttgcctcccaaactgatgctttttctctagaaccataatgcccccctaattacatttcagtagcatagaccgcaatgaacttcctactgtagggagacttgagtctggaatacattcagaacaaggttaacattacagttcttaatttcctttagggcaaacaagataattaaacttgggttttgtgagtctttttttgatttgcagattatatatggtaacacaataatggtggtttgtttttaagttttttctcatcaggtttgataatttaatgcaaacttcaaatctggatgtgaataataatatttttattatagtataatccaggtgagtttatagaatttgtgttttgtgcttataaactgtcaccttctgatacttttcttcatccctctatttgaaaaacccttgtagaatttaacgatttaatggaaaatgttgcactttatagaaggccattttagaacttacaggtaacctttttgaagagcttagatttgtagaccactgtttatgctgagtgacatttcttttaaatggttgcatttgtcaaatctataaagatgttttttatattgcagttttctttttgtgctacttaaaggaatctttgcaatgctgcatatagataattgttgacctttttagttcagcagtttttaaacttgaagtaacatcagcatttatttgaatatcaggttttagctaactgcctaatgtaccaaaaaaaaattagcaatgtcttatgtgggatgaggggttaagttaaagttgctgatcaagtaatggccgtgtggcacaagatgataactaagaatttctggttctaaggtagtaatgccttttgggatttatatttgtttaatgttgagattctggggaccataggtgggcctgtcaactcttaacagactatagtaaaggagagatggtggcacatgtgagataaaacttgtttatatttacattcttattagtggatagatatcacctcagtacaacactgaaattaaactgccttgttcatgctttcatgtctcaaatcaaggcctaaatgagtaaaaagatgattacagattacctaaaacccttaaccagttttggtttttgattatgcatatgtgttggcttgcaattaggtttttagtttctgtttatgtgacttgtttgaaaacattggattcgtcttctctccacagtttctacttgaacctagtagcttattttaattccctgtaagaggaaaataatatagggaatctgttcaactattcctttaataaatcatgtgacttggccaattacagaaattcctaagtgtagtattttgaaatgtggccagtgtcccagatttgtaaggtacagtgtgcatacagtgtgtcttaggatttttttaagtaaattaaggatgtttaccagaaattattgatttactgaaccaagtatttattttcagaagcccacttttggggaaggttgcctatatttttgatagtaattagatggaagattaaatcctgtttaacctggatagaaacagttttaactattgctgaagttaaaatcactttggggtggggtggggtggctcatgcctgtaatcccagtgctgtgggaggctgaggccagaggattgctcgaggccaggaatttgagaccagcttgggcaacatagcaagaccctgtctctacagataattgaaaagtgagccagatgtggtggcgcattcctatagtctccgtctctcaggaggctgaggcaggagattgcttgagcccaggagttggaggctgcagtgagttatgatcataccactgcactctaacctgggtgacagagtgagaccctgtctctaaaaaacaaaaaattagaaaacaacaaaaaccact

SEQ ID NO: 36663 - DNA, 1030 bp, Homo sapiens
acctcccacattttttttgtctagataaagagactgaagtccagggagaattgagactggctcaatgtcactctgaaaatgtagggccagagctgattttagaacccaagtgttctgacttctagctgagagtttgctcagttgcctcagctgatcctagaggaactgaaagagtccattcagtttctattcacaacgtgaggagctattatggtatgggtagatctcaatagcagaaaactgggtcaggcagttaagaaatatttccattaagaaagtttttggtcaggagcgatggctcatgcctgtaatcccagcatgttgggaggccaaggtgggaggatttcttgagcccaggagtttgagactagcctggccaacatgatgatacctcatttctaccagaaagtacagaaggtagcagggtgtgatggcacatgtgatggcctgtacagtagcctgtagtcccagctactcaggaggctgaggtaggaggatcacctgaacccagggaggtccaggctgcagtgaaccatgatcatgacactgcactccagcctgggtgacagagtgagaccctgtcacaaacaaataaacaaaacaaaaaggaaagttttaaattttgttacagagacattgtaaacctggagttcatgaatatcatgacacaagtagagtttagggtatatttgtgtttcccaagcaggaagggcatagctctctatgttggatctcccaaagggtctatagttccccaaatgattaatatcctcagttcaagtccaactttaaatgctttcctccaaggaataatctccatacatgaggacctgctattcccgagggtgctggataaatgaggtcatgcaatattttcttttggaatgctgcttataaatcctcatcagtcttgatctgttatcagcagggataaactaaaacaaacaaccttcctccccactctcaccctcacccctgctcaattcctcctacagctcatgcctcagtctgtttgcctatagaaatatca

SEQ ID NO: 36664 - DNA, 1020 bp, Homo sapiens
gttgcagctcacgttcactgggggacctgccaatcaagagagattcctgcttagccccaaggccatggaagaacccacagggtaggactcattcccagaacactgacttctggaatggatcgcctttggtggaggagatccttgcttgctctccaccccacccccaagcacctgggattcccagccaccatttaacatctctatgccagacttcctggtccccaagtgagcaccaggtacagaataccagaggctgagctgagatgtactttcattaacacaggatgattcatcagccgccatatggttgaaattccttccccaagtcccattggctgcctttcagccacaaattagtggctgaaatatatttatgtctacaacatttggaggccatcttgggaattacaaggaacagcaagctccttgccttcaacttatgaaccaagaatgattgtctgaaaggcattgatgggaattaccagctgaggaatccagaaggaacctcaggggaagtccacagactttgttaaatactttctgagcaagtcttttgaatcctactgcaaagcgtaggaaagaaatggaggattattcactggtttgctgtctcattcctagaggagatgttgtctcattgaagcccaatctcttcactttatagtattaattatagcagttgccatttactaaacattacgggggttcctgctgtgctgagagtattattaacatcatttcatttcatcatttcaacaactccaggagaaggtatggttattaccttcattttacaggagagaaaacagaggctcagagaagctatttgttcatgcctacataactagtaaatgggtgagtcagagtttgagttcagatttgtctaactccaagggtgctcatcttaatggctattctgtaggaaacaggtttagaggaaggaaggggcatgctcacgatcacacagacagtggcagagtccagaattttcagcactgggtttccaaataagctgacaaa

SEQ ID NO: 36665 - DNA, 1024 bp, Homo sapiens
tagacaacttggagaaccaaaagaagagtttagtgtgtgtatgaaggagggagggagagaagagaatgggaaatgatgagaaatgaggatgaaatacttgtgggtaggctctgtcttgttcagtgcctggcatgtagtagtaattaaaaattcgatttgactggcctttgccctctaattatttactgtccagtagatagaatagtttaggtacttaagaaattataagaggctgccactctgcttaggtggcaaaattggactgctatggtggctcagtggtggaaggcagtatttgaggggaaggcggggattaatcagaaattgtctgagttttattaattgtagcctctgtgtgcttttagaaagacccaatatttgccattttcaaattgtgtattcaggggagaaagctttctcctgccccattgcctgtgggctggtctttttctaaatgaaaaagaaatggtggatggtgaggagtggtgggtgtcctgggcttctgggaagaggtggggctgagctgggctggcactcttggctttctaggctgagccagtttcccatccccggctctgaccccaagggacttggggattgttgtgcagcctgggccctgctggtcaccctcagctttgtctgagttggatcatcaggtcagcatctggcttcccgcagccagctgtgcaattctgattttatttgattgcagtaaggggcttaggctggccagggagtgcttgacattttattactgtcactgtcacttcatgatctgctaagcacccctgggaacagaatgtcacagttggcatgccctgagcccaattcacctcagggtcttatggaacaagacacccctcccccttcctgtcctacctcccacagttatgactgcttcctatagggaacgcttatctgaataagaagcacatgtatttgaacatgattttcttcttgtagcaaggtaaaatcctggattcttggagctggactaaaccttaaaatctcatctggttctgcc

SEQ ID NO: 36666 - DNA, 1030 bp, Homo sapiens
ggctctggtcattctgtcccatagacacagccaactctttgctatttttttagcaagtgtttcttgagcctctaatctcatgctataagctttgggggatacagaattggcagataagtttctgtcttccatagttaccttctagttgaagaacatgtaccaaagttaaataatgttataagcctatgggagagacatcactaggtagacatcaatgtatacagtaaatgtttattaactgcctactctatactgtgagctaggcgttggtttatcatcagctgaagttcactggtcagggtgcacaagggttctggaaaaaggaaaaatctcagtagggtgcaaagttttattattctaatagcaacaaatatttatttatcccctgcatggtattaaatgtattatgtagatacaaatattatcttgtggaggagggacaatcaccatctcactttacaggtgggcccaggagtccaagaacttcccctaaggctgctagtcggtgagtggcagagctgagatcaaaccccatatctatctgactccaaggtagcaatccctaaaggcttggctcttctgatgggaactgagctggaatttgaagaagaacaagcagatccaagaaggaaagattctcatgggttgaatagcctcagagctttgaactttgctaaatatttcaaggttcccctccattcttaagataaaagaaaactggtaccaacataaccttctaaatggcccttccagatgggccagctgttcaaagcaaggacattaccttctccattattacacttattcctgtagaagaacaagcaagaactgactccatcttcccaaatgcattttctctatatgccatattaggtcctgtaggctgcctcctccgcccaggtgctacctgcatgaacttgatatgagctttattaggacttaatttctttataattggatatgataattacctttgaggtgtagtgaagatcaaataagataatattaaatacacagtttctagaacaga

SEQ ID NO: 36667 - DNA, 1048 bp, Homo sapiens
ttctttttcttttggggatatacttttacttctttttctttttgcctgcttcatatgggggtatacttttaaataactttaaaaaagtgaatataggccaggtacagtggctcatcctgtaatcccagcactttgggaggctgaggtgggaggattgcttgaagccaggaggtcaagacaaacctggacaacatggcaaaacttcatctctccaagaaataaaaaaaaattagctgggcattttggcatgtgtctgtagtcccagttactcaggaggctgaggtggaaggatcgatcgagcccaggaggttggggctgcagtcagccatgctggaaccactgcacttcagccggggtaatagagaaagaccctatctcaaaaaaagtgaatacgaatagtatgtttctcttagcccttgcttatctaatacaaactggctgagtatatgattcttgggttataactcattttagagcaaaaatatgagacttgcctgattgttgtttcttcacagaaatcccctttttttctttaaaaaatctctgcatgtatgtagcattcctcttgttacaaatcacataatttttgaaaaggtagtgctatttttttatatgagggtggcttttaattgaattgatctggaaatcagtggaccctttcaatttgtatatgaataagtcttttctatctgagtacatttaatttatactatatctttggttaatgttttttcttttggttttgatgacatttttagaaatgctaagtatcttcatattagcttttgtttttttttccaatttttttcatggttttctctttttccttttcctttgcagtctgggagaatgtcccacattacagttgtgattttatgctttatcagttttgcttatttactgcttcttttgtgtattttgattttacaattacagctatagtgttttttaatattaaaaatactaccttttattttatccttttatctcattgagtcataatatttgttatattttcattttagctatttgtcctaatggcttcctg

SEQ ID NO: 36668 - DNA, 1048 bp, Homo sapiens
agctgagatctaaatttccacaccaatgtcataatgcacagaggtttttgaaaaacatctgagtgtttttcagatgttttgccatgtggagcatataatgatatgtgcaagattgaatcttttcaatgtagcacatgtctgtagggttatacagatgtcagagagctaactgctctgtaaactactttccatgagtaaattggtccttggtgggggtgtatcatatttttaacttactgagatatcattttagttcattgaggttggcagggattgcctaactgatcttccaaagtgagcagtttatttctaaggtataacgtctttgatgcttttagaataagaacagtgtcaaatcatctgtcttctggaaaatcatggattttcatatttctgttaacagaatttctcaggctttccctttttaaaagtattggactctacaaataggttctatatttgggatctcatcctaggagaaaacccaaaactggattcctcttaagacctctgtcaaccctcctgccctttgtggtcttaggtatggtgctataggttgcatgcgtctttatcttgtttgtttggttaatattttgttgttgaggtttttatttttgtttacttcagatacataattctgagctatggctgcttttgtagcctttccaagaagcactaacctgaaataagattagataattgtgagggtgtgttactatattaaaatacacacacaactgatctagacatcaagaggaagaaaaatgatggatgatgccacctgcttcaactgtatataataaacacttatgatgacatttcttgcctggctgagatctgatataatggaattgtaaatactcttcagaacaatttcttcagctacaggaagcgtggtgccatataattttaagaacttggcagtggagctccatttggggcttcacgtttcttcatatgacttctgattattgaagcattacttcagctagaggctcctgagggaaatgttcagaggaggttttatcaggattttaatttaaggttt

SEQ ID NO: 36669 - DNA, 1056 bp, Homo sapiens
gttactgtacctctgtcctccctgctgagcctggagatcatttcctgatccccaaggagacccataatctgacaaagattccaggtagaaaaagtagtctgggagttgtaatttaaattctgaaatatcagaatttccagacatttaaaaaatttctccgggcaaggtggtgtgtgcctgtagtcctagctactccggaggctgaggcaggagaatagcttgagcccaggagtttggggctttagtgcactatgctgatcgggtatctgcactaagtttggcatcaataaggtgacctcctaggagcaggggaccaccaagttgcctaaagaggagggaaccagcctgattggaaacaaagcaggtcaaaactcctgtgctgatcagtagtgggattgtgcttatgaatagccactgcactccagcctaggcaacatagcaagaccccatctctgaaaaaaaaaaattttttttagctttcagtatgttagtgtttatgagtcagtgggaacagactatttgaaattagagctgagaccagtaatgcaggatgtctggtcaccgtggttatcagttatagaagaaccataagccctggtccctcctgaattccaggagctgtgttgtctgttacagtagccactagccacacatggctattcacatttaaattaaaattcaataaaattaaaacgttagttcctcagtcacacaagccacatttcacatgctcaatagccgtatgtaactgagacagcacagatacagatcatcacagaaaattctgtcggacagccctactctagagacaagtgtggaacacatgacacagccgtgaacatttagtccctggctgctctgcctatgcagtagccatttttttgtttctttacttctctaataaagttgctttcctttaaaaaaaaaaaaatgtagtccccatagaactggagacactgagaatggggtaggggccagtggttgttctataatgtcaggacttgctctgttcttcagcatggctggggcatggtgcaggatcctgggtccgcagtc

SEQ ID NO: 36670 - DNA, 1056 bp, Homo sapiens
accagccccctaaataaaattaatattcacataagggtaatgttcaaaatatgtaacaactgtgataacacaagcacatccagtcagaacagataccagctataaacaatggtgcatccactccagcgtgtaacaagtgaagttcggtcctgatcatagctaacaggacagtgtgccaagcccttcatacatgctgacttgtttaatcctcacaacaaccttaggagagttgtatcattattatacccgtttcaccaggaaggcaagcaaagctcagaccaaggcctcgcacagccggaagaagcagaactggggcccaaacgcaggtctgcttgactccaaagcccacgctctgacctgctatttttgttgttgtttaaatcatacccagactgttctgaaaacctgccatgttttatggacctctgcctcaccctttctgggattttttttttttttttgcctcttctggtattattcctagtttacttggatattctgcaatttcttagttaatggaattaataacaatctaagtcggaagtggcaaatagggccaggaatggtggccgagatgggaggatctcttgagcctaggagtttgagaccagcctggacaacacaacacgaccccatctcattaaaaaaaaaaaaaaaaagaaggaaagaaagagagagagagaaggagtggggagggagagagggagggggaaagggagagagagagacagagagagagacacagcaaataggtttctactccctgccaggccaactctgatccattggtaggggctgccccaggtgggtgttgatatgcattctgaggctgcttccaagcttatcagcaaagagtagtcagtgggggagggatctttttgtgtttcactcaccgccatatcccaagtacctaaagcctggtccaacacagaaaagacactatgagaccaatttttatgagtcataatttttattattgtattaaatcttttctaaaattatatttatataaatatcttataaatattctaaaaatatgtaaaatgtataaaagtc

SEQ ID NO: 36671 - DNA, 1052 bp, Homo sapiens
tcctgctgaactcatgttccttttgtgttggcctcatgctgaaggtatcaaaatggcttccagaagcttcaggctgaccaacccctactgcttggccaacccagcagaaagtatatgcctctttcccagtataccagtaaaggtgcaggaatcaagtcttattcttggatcctgcacccatcactggggccatcggggaagacgaaaagcaagggtaggatggacactacggctggccacagggcgcgtgaggagcagtagccccatggaaagtcagggtggtgttaccagaggaaggggagaggcatggtgggctggcaggaacaccagctgtgatttgctcaaattcacacagcagtcacagagcccttgcctggctcagctgcctggctagcctaccccaacatcacctccagtttgcaggagcactgctgtgtggacttccctcatgaggctctttggctctttactagtttgttggcttcctcacttgtgttagttcaagtcctccaagaagcagatgccacagtgggattagacacgcaagagatttatggttaaaacacttgagaggaaaaatgaagacacctggggagactaggagagccatgagaccacaacagtggtcttacatctgtgaaggggtgagggaaggaaggagagccgggataggaagagtccagactgcagtaaagctgtaaggaagctttggccaggttgatgaagagtccccaagccaaatcaccagccagaggagttcaacatctcgcaagagtgggtctgcctcacccattggctgggatccatccatgggtggacacagtggtggattcagaatacaggatctgggtgcaatgagactctctgcaacaggaaattgggtggtgcattttcatagccaccacagccccctatccctcagataaagtaggattgatatctgtaaggttggaactacatgatgtgacgctatgcacctagcacaatggcctgcccacagtaagtgcccaatcggtatttgttggctaagcaagtgagcagcctagggcttc

SEQ ID NO: 36672 - DNA, 1048 bp, Homo sapiens
tcacagatgacttaatctgagcaccatcacagagaagtcaggactaaaccccctactgagcagggcggcggagtgtccaaaggtctcagttctgtggagcagagtaccacgctttctgtggaatggggacagggtcaccacgctcactaaaatgcagtatgttccattgcagcaaagctttcgcctgtgttcaaaatgcatgtctagcagattgcagccttttaaattaaatatatataaatggttgtatatagaatatactctggactgtgagggcatcctattttggtatgcctcctggctgtggatggcatgtccagtgctctgtgagtgttttcagtcattcacattcactatgtgtttagagattctctccctgcttacagctgaaggatgttgatacaggcatcaagaaggctgaggggcagatggggcctgcaggttaaggcattgttaacttgctccatggaaatgtccatatcttaatgagtaaaaaagtgtatttttctgatacgtaaaccagaattgtgggcgtgtaggtcacatcactatttctttagcagcaaatctgttttcccagttgagagagacaatagcttctgcacaagaatatatgatggtaggatccatctgttcaattgtgtctgaaagaatctttattccaaagcgaaacctggggaaatgttttaccttcagccagatgctgtgtgtgtacttgggtcccttgtctttcctctaaggagaggtgcttgtggaaagtggaggttgtgggcatcttttcaaccttttcaatctgacctttcaacaggtcaggtgagagaaaagacaaagctatttgaacctatgtttttcttatgtccagaaatctgttctttcatcaaaccactaaaccactcgccttagcctcttctgcagtttctggtggctctatctgtgggcaagggactcctgcctgtgagaagtggccaggccctccagagcaacggggtctggcttcagggagcagtggggtgtggggaaagcaatgttcatcttggctgctccattt

SEQ ID NO: 36673 - DNA, 1035 bp, Homo sapiens
gtaatggcagaagaagcagttggttctcaccctcacactccattggcttgtacctttcttgtatcatctgtaaatcaaagaaaatgaccaaggcaggtatcaatcattttaggaagaggtttacttgccaaagttaaggacgcaagcctgagagaaggatctatgcctttctccaaagatgattttgagggcttcaatatttaaaaagagaaagtgtggatattgggggaatgcacaattttcatgtgagaggggtgtagaggaaatcgtccttcattccttgactggatcagtgaatctgcatttttacataagataatgtaaacaatagggcaaaggaagcaatctgatacgcatttgtttcagaggagcagagagttgactttgagttctgtcctatgtcatgcacctgtgatgataagctgtcaatttacattgccagggtgaaattcaacagaattgttttagggtaaagatcttggggcccgccaggaatttccttgtgggcagactgtgagggaggtatgtagctttttatctttttttttttttttcttctctttgtagccatcttatttatgaaccaaatggggaggcaggtttgcatgacccagttcctagcttgacttttccctttggcttagagagtttgggattccaagatttattttcctttcacacatcctgtcagcataaggaattatgtgcgtgtacctgtcttagcacctgtgtctactagactaggagcccttcaaaagtgaaaggaagaaagcacatccacacaaaaccttgtgcacaaatgtttgtagcagcattattcataatagcgaaaatgtgtcagcaacccaaacaaccatacttggtgactggatagacaaaatgtggtagattcatacattggaatgttattcagccataacagggaatgaagttctgatatatgctataacgtcgatgaaccttgaaaacattatgctatgtgaaagaagccagtctcaaatgaccacatattatgattccatttatatgaatgtc

SEQ ID NO: 36674 - DNA, 1050 bp, Homo sapiens
ggcctgcagttctggttctgcactgactagctctgtgacctcaggcaaattgtttacctctttgaactcagttttcccagctgcaaaatggggattgtaatctgggcaatgcttgcctaccaggattgttcttatgaccaaacaaagtctgttccatggaagcttagattccacagattttaagataaattcagatttaaaaatacattttgggattgatgaggtaaggtaatgaatgttttgtaaaatgcggcctctgtagtaattattttctccaatcactgtgtgataataattaatgtgataaaagaattactgattatgatggaatcgtggctgcttgtttaaatccttttactttaaaaaaataccatttactgggactttttgaaatgtacaatcatataaacaaaaagaaaggggaaatagctcactgagtcatggtattttctaacgactcgtgggatgggaacccagtcctggaatgtggccccattggaagcagcaggataatacaatggttagaacaggcatgttggagtagaggatcttgggctcaaatatatactgtaagacctactgatgaccctgggtgtaagtcacttttcttttcaaagccccttctgtgcagtcacttgagcttcagccaccctgttctctcctttcctgcagctccctgctgagtaaataaatctcagagaatgttggtttcaagggttgtggcagcaccctctctcggggtagagcctatggtagaaggagtggagtgaaagtgaaagccaaaacagtttctaggaatagggaactcaggcaggtatttgagtaacaatgtgtgtgagcgttgtgtgcgtatacgcatgtgtgcatgtgcacaggagctaatgaaattaaaaatgaagccgggtgcggtggctcacgcctataatcctagcactttgggaggctgaggcaggcaaatcatgaggtcaggagtttgagaccagcttggccaacatggtgaaactccgtctctactaaaaatacaaaaaaattagctgggcggagtggtgg

SEQ ID NO: 36675 - DNA, 1030 bp, Homo sapiens
ttcctgcctgtaagccagatgggcaggtatgcttcctgtttcatggatggaaggctcaggaggctgcccaaagtcattcagcaaactcggagatgggacccaggttataaaccaattctcccagctctctagtctctcatgcagcctgctgtgtctctctttaggaagttgtcagcacaaggagcaaacaagcacataattaattacaaataggtttttgttttgttttgttttgtttttgagacggggtctcactctattccccaggctggggtgcagtggtgcaatcatggctcactgcagtctcaacttcccactctcaggtgagggtctcactctgttccccaggctggggtgcagtggtgcaatcatggctcactgcagtctcaacttcccactctcaggtgatcttcccacctcaacctccccagcagctgggactacaggtgtgtgccaccatgcccggataatgctttgtattattttgtagagatggtgttttgtcatgttgcccagactgatcttgaactcctgggctcaagaggtccacatgcctcggcctcccaaagtgttgggattacaggtgtgagccaccatgcccagcccaaataggtatttggacccattttattaatttggtgagttttattttttgagacaaggtctcgtctcactttgttgcccaggctagggtgcagtgatgcaatcacagctcactgcagcctccacctcccaggctcaagcaatccttccacctcagcctcctgagtagctgggactacaggaatgtgccaccacacctggctaatttatttatttatttatttgtagagacagggtctcactgtgttgcccaggtgggtctcaaattcccgggctcaagcaattctcccaccttggcctcccaaagtgccgggattacaggtgtgagccatagcacctggcctagtgtttaagcacatgatgtgtttaaactctaggcacaagttagcctgatccttgtcactttctgcctaaagcatattttgtc

SEQ ID NO: 36676 - DNA, 1060 bp, Homo sapiens
aagggtataatcatccccgggagagagcactccttttaaatggggctactcatcctggcttggctaatggtgaacctaccttgtgggttttaaatcaaccgtgacatcaggtggtattgggtgcctgagctggcattttgtgtaagtccaggagcccttgatagtgtgcgtcactggggttattgatcgtgggaagaagacagcttggctggcatctcaccttttcctctgagtggagaagctgacttgctttaagtgcccaaagcaaaattctgagtaagggtagatttgctctgttattgttttttggaatcttaaggcaagagagtgtctacttgttggtttagaacctttggaataggttttgacagcctaactcaagttaatccagtagcttctctctctaagcctgttgttagggtttgtgtgcattttgagagagaattctatgattgggttgtcagtctggtaaggctagatgatgaccctttctctggagcctacgtggatctctgaagtgcttttccagccctggttttatttacagcttcgacaaatttaaacgtgacactagtggagtggctgtgtggtcttgggaatttttgtgttctgtgatgcacatgtttttgggagtctacagaaatgagtacctcataagcaaactaaaagctttccaaagcttgctgtaaatgcctatttttagccttacttttggctcaaatgttggtgttttagttctttaagggacacatgcagtaactagtaataaaatatgtttcgtgatatctctactttcttgtggggttctgtattctggtttaagcgtccaagtcttacatttgtagttttaagtcttgggatttgcattttggttttttagatctccctccctccccagagtatttttaaatgtttaaaatttttgtcttatcctagccataccccttttaagtataagatccaagacgtctaagttaagagatgatacatagcgaatattctggggtcaaactgagtgggttcaaatgccactgtaccacttgttagctgtgcttccttg

SEQ ID NO: 36677 - DNA, 1047 bp, Homo sapiens
ttgggcaattattaactgtcatcacttaggggtagagagtggccgaggtttatgggatatctcagacccttcagaaggctacattatccagaatgcatctcatttgctggaagaggcacagttgctgatgaactggttgagctcatgcttgcctgcttgcccctgctgcagctggctgggtgggaacaacaagaggccctgaaagttgtagaaggggcagtggggcaggcttccaggtggcagtcggcccccttctcctggggtggtccacatggctaggcttctaaccatcagctggttttacagctatgctgagaacagtgggtttgcatttgcctacagataggctgctaccctgagttcttgagaacattgggctatagttaggcttacccagcccagtttcctagttgtcagcactgtctccattgctgtgccctcagggccttggttttcccttcctcctttcagagaagagggaatatttggaactggaagggactcagaggtcattcaatctaaacctctcatttacaggttaggaacttcaagcccagaaaggaaataggagttgttcaggattccagtcaattcaaagtgaggctgagacttgaaactgctcccactacagttctgttttaactctacctctggaggaagaagtaaaatggggtagttgagcatgaacttgggacagtcagtcacagttagcgcagccatttacccactgagtgcccttggataggttgctaacttctgggcttcagtaaatggggctatagctggagtgcccacgtactaggatcattgatgaatgtgagctaggtgaatatataaaaatactcaactggagcctggcacatagtaatacgtggtaatggtaagaatgttgaatgttcttcttttgaggccctgactttggcccaggtcttcaatttgcttaacagaagtcaggtgctatagctggccttcctctgttgtcctgggtcctcttccccttgattgctgcagtttggtcctgagtatacacaggaaggtagcctacgt

SEQ ID NO: 36678 - DNA, 1041 bp, Homo sapiens
ttactcaaacccttggatataacgggttggtactacctttgggaagacttaatctcttgcatttcctctgaggtgggattggagaggcagtaaaggtccctattggctgttgctgggcttgtagttgctctgggatgttctctgctgtccctgccccaggccttttctgcccacatatcatcactgccattgcccctctgaggtgccagctctttggagatcctagacttgaagcaggtcagaatctaaaagggctttggtcactaagaagccgtctggtcacttcttttacagaaaaccaagtctgtattttgaccaaagtctctcaggtggcaccaggggggatcacagtgcctgcattaggatttgtaggctttgtttccttgaggaaagaaacagttgaaactcagtaatttcagggaaaaaaagaaaaacaggaggccctttgaatggtcggtgctgccagggggagatcagaagaggactagggctggatatagtggctcacacctgtaatcccagcgctttgggaagccagggcaagaggatcacttgagcctaggagtttcagtctagcttggacaagatggcaagactgtctctacaaaaattaaaattagctgggtgtcccagctaatttagtcacagctacttgggtggctgatccaggaagatcgtgtgagttcaggagcttgaggctgcggtgagctaggattgtgccactgcactccagcctgggtaacagagtgagacctcgtatctaaaaaacgtaagtgaataaaaacaagaacttcaaatacaaaaattagttgggtgtggtggcaagcacctatagtcccagctactcaggggactaaggtgggaggatcacctgaacccggggaggtcgaagctgcagtgaactgtgatcatgccactgcattccagtctgggtaacaaagtgagaccctccctcaaaaaaaaaaaaaaaaggcgactcccctgcggctttggtgcttgctggagcccaggccttcaggttgcagatggttctagagcatt

SEQ ID NO: 36679 - DNA, 1109 bp, Homo sapiens
aattacctagcagattcctgactccaccattgctgagcaaaaaatctctgaaggatgggacccaggaatctacgttttgacaagctcctcacatgataattcgaatgcatgccaaaaatcttaatagcttatcctggaaagccggctgcatttatggagatcaatgggtataaggacaaaatcacaagatgttagaactggaaggactgtggatgataggattctgcccacccctaccacaggcctctgaatagagagactgaagacactggagggtagttcttgccaagcatccatagcaagagctctggtgtctgcgccaggactgtcaaccagtctcttgacttctagcccagggctctggtcactcttccactttcagtttggaacatggggcaatagtctttcctaactatggtgtccagttctaacaaactaaaaatacaggggacacccagttaaatttgaattttagataaatcaaatatttagtataagtatgtcccagtattgcatgggacatatttagtctataaaattactgtttatctgaaatttagatttaacagagtgtcctgaattgctatttgctaaatctggcaaccatattctctccccgcttaccccacctttttttgggcaccagtcaggttcaagaattgccccaaagaaatgaaaaataattaccatgcatttatggtactattacttcatttaatctgttaatcctgtgagctagctgtcatggaccccattaatagttcaggaaagtgagaggttaagtctgactcctgggatcatctcggtaagctgtcattttgcctcctcatgaacctagttgcttggctctcattgatgtgtggcccagttaatgcctatcaagttacaagctacatgagagattgctcagttttgactcatctgcccctggccttgtgagttacttaattgatgatggctcttggttagtacatccaagaatggactccaaagtccacgctgttaactgctgctctaacctgtctcttaactccgtggcatagtaaattgttggtagggtggctttggggtaggggtcggaccccctctacattctctctttttttttt

SEQ ID NO: 36680 - DNA, 1682 bp, Homo sapiens
ctcaggctgaaaagatagcttttctcattgtttattaaagaagtgataccacattctcattgtttattacagaagtggtacaacatttaccttaagaaagttagaaactataccattacaaaaaggaaggaaaatatttagaatctacccccttctgttcttccatttgtaatgacaacattgacagaatactaacatttattgaatccttagtatcggccaggctcagtgtttattgttgtagaggcattatcttagtcctgcagttcttatctgttgaattcctatgagctgagtcttttagccccagtttatagacaagcaaaccggcccagtaatttgcacagaatctcacagctagtaagtaacaaagcacagatttaaatccttttctgtcctattatagaacctttgttcttaaccactctgatatattgtctctcagtccagtaaggaagtcatacaagaaaataaatggttgcaatagagtgtttataagtgttttaggagcagaagagaaagtgaccaacaatatttggactggaatttaaaggaggatgaggagtttgacaggcatgtcgaggggcttagggcagagggagtgatttgacccaagcaaggtagggtgtcatgaagggatcacatcatttcttttcagccctcaacactgttggtatataggataaggatggggtaggtcagaggctgtgtgagattgctggggtgtgtagcagaacaaggaaggcatactcataaaactgatgcaccaatccctcggtgataactacttcttccctccacttagtgaatactacttcagcgtggacaatttagagcgagacttcttcctgcgaaggaaaatggatgctgatggtttcctacccatcacccttattgcttccttccaccgagtgcaggcccttaccactgacatttcactcatctttgcggtatgtcttcctccctggagctgggatgcaggggaaagaaaggtccttagggagctggagtttgggccaaggcagaaagccctggaagagtcatcatctgatgacttctgctgaagtctcaaggcttggctagtctcctcctctccctccttccttcctttctctccctctcttgctcattatggaaaatgtcagacacttaacaaaagtagagtagtataatgagcccatcatcagcttcggcaggtatcagtttatggctaatcttattccatctgtaccctcatctgtttattctcacatactacattgaagaaaatcctagaaaacctagcattttgttcacaaatatttcagtatagatttctaaaagatagacttgttaaaagaaaatagccacagtatcattatcatacctaaattaacagtttaacatattaacagttccttaatatcatcaaatatttagttcagattcatcccaattggcgccatatatatatttatatatatattttatatatatttatatatattttatatacatttatatataaaatatacatttatatatatttatatattatatatttattatatatttatatttatatattatatatttatatattatatatatttttatacatattatatatttatatattatatatttttatatatattatatatttatatattatatatatttttatatatattatatattta

SEQ ID NO: 36681 - DNA, 1056 bp, Homo sapiens
ttgtgtatccattcatcagttgattggcatttgggttgtttctactttttgtctattgtgaatgatgctactgggcatattcacatacaggtttcctgtagacgtagtttctcctttattttggttagaagagtagtattgctgggtcatggggtaaccatgtttaaccctttgacaaaattaaactctgttttccaaagtggaaattttggaattttatattgaaatataaaattttcgttttatatttctaaaagcaatatgtgagtcttctggtttttcacatccttccaacacttgttattgtttgtctatttttctttatttttattatttaacatttatttttgagacagcgttttactctgtcacccaggcaggaatgcagtgacttaattatagcccactgcagtctcgaactattgggctcaagcaatcctcctgcctcagcctcctgagtagctgggactacaggcatgctccaccataccaatctaattactaaaagttttctgtagagacaggggtctcactatgttgaccatggtggtcttgaactcctggccttaagcagtcctccctcctcagcctcacaaagtgctggaattacagacgtgagcaaccttgcccagccaagatgcttttttaactggattgtttttctagttattaagttgtaggaattcctttatcaaatacgtgatttgcaaatattttctctgattctatgggttatcttttcacttttttgatgcacaaaatttttttgttttaatgatattcattttctcttgttttgttgcttgtgcttttggtgttgtgcattttttgatattactgttttgtacttgtgactattgtaggactcttgaggtaaatattggtaatgagctaaatacagtttgttagaatttacaaacaatttgttcatgccttgtcttgtctcgacggcacttgaaagtagtaccagttgaggtgaagagctagactgccagcctggttcagaagctgctgccacctgctcctggaaaagtacaggcccagctcccagcatca

SEQ ID NO: 36682 - DNA, 1028 bp, Homo sapiens
cacccttcatcctacccttggaaccccaaggccaagttggttcaaactgttggagaacagagttggcctgcatctggaacacacttgtcctcagcttaccatctcctcacaccccagagtggaaaggtgaacacctgcagctgaggcttggaaacgtttcttgtgttgccctgaaaaatctttgagacctcagggaggctctgtctctcttaaaaggtggagaaagatgccattctctccctaaggtctggtggagtctccccatcttgcatacccttctgcaagccatctatctctgctcactctccaattgacccgcctgggaacaagggatgaggaggagttgggggctggggggaatcctgccagttggtgaagccctgtggcaggaaggtatatgtggacatagagtatacctgattctctttcttcagccactgactgcttgggttgggctgtgaatgataatggaatggctggagtctgctgttgtcagaaggcagggagggtgatgaaggactgacccacatggactgggatgtgtgtcggttatgggcatgactgcacgttcactctcagtgggatctgggcaacatggagttcattgtcctgttgcttacttactgcaatgtctttggccctccttttcaactggttcctctgttgggcccaaaggttgggagtaggagacagtatcccaggctgacaagggcttgccctttaccttgggcaccttgttaatttttagcctgtgcccttccccacctttgccctcccagtggttggtatgtgggaagcccatctcagttcctgtgacttcatgtctcaaaccaaggatgagcgtctggtctctgctatgatggtggtatccgaggcctttccctgcccagtctggtgcctgccccacattgtaccggacactggattcctggacccccttctcctttcctttctttccttcaggtcacgcagccctgtactgtatccagcaccacagaaacctcagtgtttttcctctgctggtttgg

SEQ ID NO: 36683 - DNA, 1162 bp, Homo sapiens
tccaaggttggtccatgccaacataacctctgggcatcagacatcagcaggtctgtgtgcctcagccctgttaaggggcaggtttctctttagccctcttcctgcacttgggagcaaaggcactaccagtagagaagggccatccagccgtgccccagcctggacccctggggctcagatagaggtgctgagcccctgtgtcaaagttgttaaatgtttttgttttgttccattgtagctctttttttttttttttcccctttcctggtgattgattttacaaaagaaagtaagctgcttagaaggccctggaagggaagtgaggaggagggacaaggaagatgactagttacggagggtgagggttgttttttgccaaaaagcctgggtagagtgatctgaattatctggcaccctcctgaatggaaccccagagtacctcctgtgtggaagggtccctggattttccctaacacccaccctctcccccttcagccatgctgatggcagagaagataagaacttggagcccatttctcactggagaggaaaacttgtcatctggctttgcggagaaggttccaccttacgctcgtagtacattatctttactatgtgctaggatatcatatttaaaaggacaaaaaaatgtaaaatacttgaatgagcttgtattataacattaatattattgagagtatctgctttccaggctgaagtgattcattcattattctagtcctgctttagtcctttgtaatttgtggtaattatgcttttctttttaatacaaaaaaatgtataaaaataaacacttgaaaaggcaaaatactggctggtcttccatctaggttactgctattgggtgtgaaggatgggtttctggtagagttcccccagatccggaggaaccctgcactcaatgtgcacatgaaacctcggcaggggttctgccattgggcttcgaggagtctgcctaaggcaggggcttctacaagccttgagttcatgtccaccctgtgtcttaagtgagacgtgacagtcatagccagtgccacaaaacagcagtccagcataatgccaggatttcagcgcacttgtcagcttccaggttttccatcccctggctgtggcctgcattgtgttatgagacagccaagaa

SEQ ID NO: 36684 - DNA, 1074 bp, Homo sapiens
gcatggtctcgatcttctgacctcgtgatctgcccgccttggcctcccaaagtgctgggattacaggcgtgagccaccgcgcctggccttctcaattttcttaaacttatactctcctgctgggcgtggtggctcaggcctgtaatcccagcactttgggaggccaaggcgggcagatcacctgaggtcagcagttcgagaccagcctgaccaacatggagaaactgtctctattaaaaatacaaaatcagtcgggtgtggtggtgcatgcccgtaatcccagctactcggaggctgaggcaggagaatcgcttgaacccaggaggcagaggttgcggtgagccgagatcgcgatattgcactccagcctgggcaacaagagcgatactccgtctcaaaaaaaatgaaaaataacaacaacaacaacaacaaaaaacaaaaacgtataccctcccaaatgagatttgttcgaacctgactttctatagtttgcagctcaaaaacaataggggccaggagcagcggcatgcacctgtaatcccaggcactcaggaggctgagtgaggaggattacttgaggctgggtgcccagggattcaagaccagcctggataacgtggcaagaccctcatctcaaaaagcaatagagttttcttctcaaatatgaaatgatgtaactgaatatattcttttccaactaccctctcattcattaggggcttccttccgactgggaagcagtgacttctggaaaattattctaattttgcgatatccatgagtacagcatcatatccaatgttcaaaacgttaacactctaggccgggtgcggtggctcaggcctgtaatcccagcactttgggatgccaaggcgggaggatgacgaggtcaggagatcgagaacatcctggccaacacattgaaaccctttctctactaaaagaaaatacaaaaaattagccaggcgtgatggctggcgcctgtagtcccaggtactagggaggctgaggcaggagaaaggcgtgaactcgggagccggagcttgcagtgagccaagattgcgccactgcact

SEQ ID NO: 36685 - DNA, 1042 bp, Homo sapiens
cgccaggctctgcagggtgggcctgatcccagagtggtgcttactgtgctgactgtgtacttatcttccccaagagaaaatgcttcttttgagcacactgtacctaccatctgcattgagcagaaagacttttgttttactgaagacaaaagatgtttttattttagacccagaagagaggagtttgctctgaatttgtaaataagtcttccccattcctcatactcgagcctctcctctctggttgcctcctgccaccagcatccatggctcatttgacacctttttaaatatcaggacaagtctgaaacaaagtagtaaaatgtatataactcttacctgttgtcattctttttcttttaaatttgttgctaatctctgataatgaagattcttactctgattctcagctgagctgtgagggcttccagggaaaatggaacaaaatggtgttcttaggtaatgggttgtagatactgagtcttcctttccttttctgacccttctcgaggacatttgctttcctcacacttttgtagtctctctttacatattactatatggaaatgaattgctctgtgctgaaatttgaagaccagataatgaaactgaaaagcaaacaattttactgaatctgtctacccttcattcatgagaactccagaatgagtgttgaccactgaagcatcttttaagtctgtgttccattgtgccattcaggtttgctgtcacatatgcatcatctgaaatcatttgaaatttttgtacaataaaatatcctggatttgatcctgaaggaaactagtaagatcagatttttgggtcatgtctgttgtattttcagtaatgtgatttcagatggtcatctggattctcccacttctctactccattatttctctacttttccttccagcaaacctgaaacgtgagggagatggattaatgtgagtaacaggaatgtgtctttaaaaagctagagtggttacatttaatcaggcagtaagataatttgggttcttgagttgttttggagtaatat

SEQ ID NO: 36686 - DNA, 1001 bp, Homo sapiens
tagtagagacggggtttcaccattcacaggatggtctcgatctcctgaccttgtgatccggccgcctcggcctcccaaagtgctgggattacaggctgagccactgctcccggccaagggtctcttctatatgaaagatttcattgagtggattaatttttgcagattattattatcagtcatgatagttctttcctctccctgtctccccaagaaactttattgctgaaaatgtaattaggctattgctatagtttcaggctgtctgcttctattgcaactgaaatctgccacatattaaaagatggccacttgagaaaactgctctttctaaggcatttgaaaatttccagcaggagtcagaatgttagaaagttttgagacctccttgctatagttttccataacacatgttttctaatttttttttaaatggcagtttggtatagtagtggaaagaaagtgggttttagagtcaatagaggaacttttgaaagtagatgtgctagacattgtatcaggtgtatcatacttctctgttctttgaattccaactttgtctcttgcaaacctctggtcttagacaagtcacttgatttctctgattttcagtttatatgtaaaatgtttcatccctcaactcatagagttagactaaatgaaataatgagtgaaaagtgctttttgaactatacattgtaattaaacaggacatacctacaactttaaatagaagataataaaagctaacatttactgagaagttaccatgtgccaagcactataaaatggtttcttgaaataggttactttatttccctctaattatcgttttatttattttacagaagaggaaaattagagagaggttaagtagcttgctcaagattatgtagctagtaaatggcagagttaggattcaaatccaggcaggcagtctgattctagaacctatgctgttggccaaacacctagaatattggcttttcacatgaaaacac

SEQ ID NO: 36687 - DNA, 1104 bp, Homo sapiens
ttattggagctttataacagccctgtgacttgcaaagggatcattatatccattttagggatgagaaaactgaggcctagaaaagttaataagcaggttgctcatgatcccacaaccagtaaatcacaggactggacctgaaatccaggactgattgccagtcctgatctctttctcctgttccgtgctgtctcacacagttagaattttaccagtcagagatgagacggggagagcacaccatgtggaagagctggtgtgagcaaaggcacagggcaaggattttcgaggagtgactggtatggactgtaaagtgcatatagggatattgtttacagattccctacaaataaagggtcggggcatagagggtgtattcgttggcttggataccttaacaaagtgccacagactaaatggcttaaacagcaaaaatgtatttcctccccgttccggagattagaagtccaagatcaaggtgtctgtaggttcggtttttcctcagacttttttccttggctcccagatggctgtttctctctgcatcctcacatggtctcttctctgtgtgcacacatctctggcaccttctttctgtgtgtccagatttcctctttttataaggacaccagtcagattagatcagggccctctctaatggcctcattttaacttaattacctctttaaaggccccgtctccaaatacagtcacattctgaggtcctgtggggttagggcttcaacctataaatttggggggcacacaattcagcccataacagaaggctttagtttatttaataaaaaattaaaaacaatggaaaaatctttatccttaaaagagatatgaacagaacgcagcttgggggacagattccatgtgttagtcatatgtagaatgagttgcaagtaggaatgaggcaaataaattagtcaagataattaaagttatctacactgcaggcattcaaggctgaatgagggtgatggcactggggtacagctaagaggatatggatgtgagggacactggcttagcagtcacctgggactgcactgactgagttcccaggaagaccaggtcaagacaccaacagagcag

SEQ ID NO: 36688 - DNA, 1050 bp, Homo sapiens
gaagcaggggctacccaagtctcctcactaggatgagcatatcagttatcatccaaaatcaggtgtatttgagagtgaaaaagggccctattaataagacagcagggccgtgcatggtggctcatgcctgtaatcccagcaatttgggaggctgaggtgggaggattgcttgagcccaggagttcaagactagcctgggcaacatagtgagacaccatccctacaccaactacaaaaattagctggatatagtgttgcatgcctgaagtcccacctacttggcaggctgagttgggaggatcacttgagcctgggaggttgaggtttcagtgagccatgatcatgccactgcactctagcctggacaacagagcaagaccctgtctcaaaaacaaaacaaaacaaaaaacagtaataagacaacaggtgtaaaccaggatgtgtgtgtccccattatcccccacaggtgaaatgcaacgagcagcccaaccgagtagagatctatgagaagacagtagaggtgctggagccggaggtcaccaagctcatgaagttcatgtattttcaggtgagtggggaggggcaggtctgcatctggagaactgaaaaggcccctagttttctaaccactggggtctgcagttttgtgccatgttatttattcactaagcaaatattttttgactgtgccctacacatccctgggtgagcaagacggatgagtctccccaccctcgtggaattttcatcctagtgagtatgtgagtgtgttttgtgtaggaggagagaaagacaataagcaatacacattaatattcagggaataataagtgctgtgagtaaaataacattttgaaaaattctgggttatagagtgcctgtgatgtgagtgctgctttagggacagcctctcaggaggcggcatttgagctgagactcagagagagaggctgacgtgtgatgaccaggaggaaaggtttcaggcagaagttgccacagaggcaaaagccttgaggctgaggccggaaggagcttgctgtgtttaagaaa

SEQ ID NO: 36689 - DNA, 1050 bp, Homo sapiens
agcttcgggccaggtatggtggctcatgcctgtaatcagtcccagcactttgggaggccgaggcaggtgggtcacaaggtcacgagattgagaccagcctgaccaacatggtgaaaccccgtctctactaaaaatagaaaaattagctgggcatggtggcacacacctgtaatcccagctactcgggaggctgaggcaggagaattgcttgaacctgggaagtggaggttgcagtgagccgagatcgcaccgctgcactccagcctggtgacgaagcaagactccgtctcaaaaaaaaaaaaaaaagaaaaaaagaaattagcttcggatttaaggactcctctgagaaaaattgcctggcagatttgcctttctcgagagggctggctctgaggagggccctagaggagcctggaccctgcccccataagggagcacagtggaccttactcactgcccctctgcccccagcgcaaggccatcgagcggttctgcagcgaggtgaagcggctgtgccatgccgagcgcaggaaggactttgtctctgaggcctacctcctgacccttggcaagttcatcaacatgtttgctgtcctggatgagctaaagaacatgaagtgcagcgtcaagaatgaccactctgcctacaagaggtcagggcaacctccccctctcccctttccccatccaggcccctcctccagggctgcctgtcaagtggaggaagagaatggagcccctctcacctgctttttctttgataccaaactagccatcccccaaacatagtgaggcttggcctgtttcagtgtggtttgaggaacagggcatagagctgggccttggaagaacttgatctttgtagagttttatatctcaagatggaatcaaaccctcagttcccccatctctggagcagcagcattttatgttgccccatgtaatatgggaccagtaagatcatcacaaaatggttacattagtcattttctgcaagaatcataaagccaattcaaacagtgtatgtaaaagaaggaaatgaattggctc

SEQ ID NO: 36690 - DNA, 1179 bp, Homo sapiens
aatgtctctcggctcccgcaaggatgcccagcccgggcagagagccgaggggccacttcagcccctcctccctccccagatccctgggcaggtggattccatcagaacacaggtgccggccggaggggagccgcgagggtgctctgagcccttttgtatccgccctctgctgccagcttcaaaagggctcagagcacagccacgccccttgtccagcccagcagtgactcgcatgtcctctcagcaggacagcaggagtccacctcgttccctgaagagtggccagccctcagtggtccagtgaggagaggtggcgttgttcctcctcacactgatcctctcaggttaggtgaccgtgcgctaagtccatcgtgcagtcgacgtgaattgggtgggcagcctcaccttcggccgctttataaaccacaattctgggtcatctatgcaaaggcctggggtgtcagtgcttcactgaagttggggggctccaacctctgctgctcttttggtctctgaggctgttagggaggttccttctgtgtgcttctcgcccgaagttatggcctctccacacagaggggaaccagccgtcctttagtcaagggcgagtgtgttggcatcttaagaagatatgaatggagtgtccttgaactgcatccgcctggagcctctgcgaacaagtgtccaaaggaaagctcatgtagtcgcttcatcaccctctggctgctagcgcgtgacggggttttgcaggaaaagcagggaatggagaatgctgaactcattcctcacttttccctgcctgacttctcgaccagctgaagctggctgggagcggaggctagggaagtgactggggttgggtgtgaggggccgtgtgctcccctctccacaggtaactctttgagtgatattgaagggaggcctgaggaaggctgtcactgttctaccattcttgtgagaaccatatcagggcttcttttgaaatagtaaattctccccagaatctttcttctgccttgtctggtgctcatgcttcatctgtctgctgggtcaccagcacctgagggtagaagagggtgaagggagtggtcctttttctcttggggatggagagtgaagatgttcattcattcatttcctctctgacttaggatggttttcctaatgacatcttttcac

SEQ ID NO: 36691 - DNA, 1048 bp, Homo sapiens
aggcaggagaatcatttgaacccgggaggtggaaattgcattgagccaagattgtgccactgcactccagcctgggcgacagagtgagactctgtcttaaaaaaaataaataaataaaaagtaaaaaaatatacctacatggaaggctatgctcagcatattgttaagttaaaaaagaaacaattaaagaacagcatatctgtagttttcatgcagacagggaagatgcaaaaatatatctagaaataaatatgcatatacacataaatgtggatatttttaaatatgtaaagaaatatgtaatatgtctaaatacgtatatcaacatataaaaaataaaaatccaaatatagacatttagaccaaaaacagaacagcatataaaatgattccacttataccaaaatataatatacttttatatatttgtgcaaaactgaaggacataaatatttatgatgtataccaaaccatgaacagtagtaatttctggaaacaggtctgtctgatttataaccttttgtattgtgttttgtttgattacaaaatgatgtttctatttgggaggaaaactcctttacactaggttgtgagtgacagctatttctttgaggaccatttgacacctacaagagacgaatctagaaatcagagacctggatcccagccccgggccctctggtcacttcagctctcagagcctcagattccttatctgtaaaatggagctaatcaaccttcccctgccccatcccagggttattgtggagaatcaaacaataattgtcaagtaagataatggatgtagatgagctctgaaaacttaaagggccatacaaatgtaagagattagagtcgtcatctctccaagcttcactttaaaggactgaggctcggtggcataatttcataatcacacttgacattgtcctgagtggctccagaccccttggcacttctattactaatgggcaacctggaagaaagttttgcagtcatcaccagaggacaaagtcatcctcaagcctatttaaagtgagacagtcag

SEQ ID NO: 36692 - DNA, 1045 bp, Homo sapiens
gggtacaagtagagggcagtttgccagggagatccgttctttccagaaggaagcactgagttgacaagaaatgaggccatatgtcccaccacagggagagctcagccagacagaatcatttaattcagccttgcagataaattctgaagtttcccagcccaactgcccttcctatgccttgtcagcctcataacagctatgctcagaaaagaatcatctcaggagcaggtagcttgtattcttaactgctacctgatgtgttttagtcccaaatgaatttttacaagtcttggttttatttgcaccctggactttttctttggactgactgtaaagtaagttgcttctaagcggtggaggctcaaggaacgtaagagagggatgaaagatggtcttttcctgactgtgaacttgtttctatttcccaagcaagtataaagctgtcttccttaaggggggttattagcaagcggctggctgtgtttttccctcttcaggtatgtcctctaccctctggatctgtacaacgacagcgcctactatgctctgaccaagtttaaaaagcagttcctgtacgatgagatagaagctgaggcaagtgatgtgcttctctttttgctcctttaatcttgttccaaattccggacttttccagtcttttgctattagcatgaagtaggagtatcagtgacttgttctggagaggaatctctgtaaccatggccatcagaaggcctgtgtaacctctgagggcagaagtacaaactgagacacccagctcagggcctgctgcctttctcttcccacccacaaactctgtgctgcaccatgaagggcttcatgtgcatgtgtataaatacccaagctctgcctgccaactctgctcaaaaacagtggcccttggctagacctaaaccctagggtcacacacacccatagtggagtccaccctcagaggggaagccagggaagagagcacgtggccctggaagaggcttgagccgcctgtagaaggcttctcagaactggttctagaaggggagaa

SEQ ID NO: 36693 - DNA, 1088 bp, Homo sapiens
tcagcttggtcggtgttggtgtatagcatgagcctttagggttttctaggtatacagtcatatcatcagcaaacagtgacagtttgatttccactttactcacttggatgccctttatttctttctcttgtcttactgctctggctaggacttccagtactatgttgaatagaagtggttaaagtgggcacccttgtcttgttccagttctcgggggaaattcccccactttaaaaatgagaatattataatgcctgtcttgtagtgttatttgtaacagatgaacccatgtctgtaaagtcctgggcttacgaatagtagctgttattattaagaagaaaaggtcagtggttcagagccatttcctgagttggtcatagcttcatccagaggctataatgagcaaagtttacaccctgaattgcatagcacttccttgcttttcctctcttaaatcacttttattggttttattttttaatgtatatgctcattgtacataaataatattgaaaagttcaaagatgacagtaaaactcatacaactcagaaacttgggaactttttctgcatttaacatgtgtgttctcgttttacaaaccacatgacaactccttgagatcggccttcttatcaccattgtacaacgggagagactgaagctcagcggggccggcttggctgctctcacaaagcaaggtcctggcaaacaatggtgtaagcctgggcctgttggccactagagctggagatcctggctggcctctttgatgctctgctgctctgcttgtaccatcctgtaacctgtgattcttcagtccatagtagccctttgctttgtgattagcttcccttgagaggtagggccaggacttcatagtatggtggactccagaatgctggagcaggtgaagaactaaaagctcttacagagaacatctaaccacctgatgtggtagcgtcagggaagacatcaactcatttggagaaatatgaccagcaagtgtttcctcttctgaacaggccctactctggagtctaagttcttctgtgcaagagctctgtcacttagagatgatgctcaataa

SEQ ID NO: 36694 - DNA, 1031 bp, Homo sapiens
atacaccaggagagggacctatttgtacgtgtgagggaaggcaggcctgagtcccccgggaaggacagagccctttagtctgccttttactgcaaggcctcttgcctggagtgttctttgccttcatctctgttacttcttctctccttattagagtggaccacagaaacactccggtcagtcatttgagagcattactgccctcaccagaggtgaggagagtctagacccaaactcacagatccgaatgccagtcagatctggaaaggcccccagagaccatccagggttggtttctcaacctcagcaccactgacatttggagccagataatcttttagggggttgccctggactttataggatgttgaacagcatttctggactatattccagtagtacccttcattgtggcaaccaataatgtctctagatattgtctgatattccttaggagggtaaaacctccccctgttggaaactgctcatctagtgcaacctcaaattttgtagataggaaaactgaggcccaagagggagctgattttcccagcattacagctagtgcaggagtctggatgaaaaccagatgtgccttggagtccaaagatccttaaggttagcgtattacagtacagacagatgcccagctgagctttgccgattgtttttgttcttttcaacagttccatctccacatctgaccttctgtctcctacttctaccttttaatgtctttcctctaattgttttattacataattgaaataaattcattgattgaaaactcagagaagcagaaagaaaacaaaaaccactttgtcacactaagatgacctctgttcactttttttttttttttttttttaagacagagtctcactctgttgcccaggctggagtgcagtggcatgatctcggctcactgtaacctccgcctcccaggttcaagcaattctcctgcctcagcctcctaagtagctgggattacaggcatgcaccaccacacccagctaatttttgtattttta

SEQ ID NO: 36695 - DNA, 1065 bp, Homo sapiens
tatgtcctccggtgaggaaagggggccacatatgaaaggccccttaggtcagatcctgagagtagcacatttgagtgcagattcctgggccccacctcaaacctactaattctgaatctctgggaatagggccaggaaatctgccctttctacaaactacccaagttgttctgttgcacatcaatgtttgggaaccactgctgtaagggaatcattctggtcaccttgagctttgagctaccactaagccatgaaagaaaatacatcatacagggaagagagaagggaggaggttccaagtagtaactggcagatcctcctgtctggaggtaccaccttctattctggtttctgacttttccttcttgatgaccatagatgtgttccagaggcaaaagagacacattatcccagatggcagaacatgctttcaaaacatataaaatgtcaaagttccagatccttctacatctttagtcctgtctgaggatggtagctggctctctgtagctgatagatggctagagttccatccaaatccttgaccacgacttcatggagatttgaataatctatttgatgagatttctatttcaataacccacctctctcaccccacattcatatccctaaatttgaccctctgggccgagtcacattaccttcaggagacttgatcccagtagactgaggtcttccctttcagcagaaagatttcatttccctggcttgccagtggcactgatttccgaacacccaatgagtttaatattctttcctccttggcattactgccccagcctctttttattttttttgtgtgtgtctaataaccaggaaaaaaataaagcttaggttttaaaaagttttaaaaataatctgtttcagaaactgtcaaatgtaccatatttgtattaagagttgttgggaatttttgtacaatgaatttacatttatttatggtgacatatttacgcttgtgatcaaataatgatgttaaattcttaaatcatatttgctatgcagctgaagatgatattttgatttgtattttgggggtacctg

SEQ ID NO: 36696 - DNA, 1069 bp, Homo sapiens
cctttgagaaaaaagaaatagaaacttacttgatgcagaatggatatttatatttctgcttgcaccatttccatagcagctgacaaaggcaaaatcatgaaatagaatcatttctataaattgcttctttaagttttctctaaattttgcctctaggaaaaaattaaaactattcaatgacagctagctgtcactggtgctaccccaaagctttccaatcttttatgtattttttgtgaatgaaactgttgctgtaggaaagtcaaggttcatgtaagagtatcgtggtgtaaatataatggtttcacagctgtttgaatttttcttttcctgtgccagatatagaatgcagtcaaccctttttcagtaacttatgttcaccagtctgtgcttttcttctcccagaaggcttttcttagtggttgtaaatgcaagaatcctgagccctgtgttgcaaaggtgggtggtctgtcagcactttctggcaaattgagttgatggatttaagataagcctttggggttcctgtcagttttctgggccctgaggaagggttgggcctcctttactctcagtattttgagtgtttttcaaatgtttgtacgttatcttgcactgctctaataaaaatgaaagctctctgacaagaaatagttctggatggtttgaagatctgcggggaaaaataagtgtgcacctgagaccttcagttagtcttttatttatttagaataaaaaatagtttgataacctaccagagttagtgcttctttaaaaacactccttggaaagatggggactgtcccttaggaaagccataaaagtgattcccaatactttgcaattgcttttgatttttagtcctttggaacaaatgtgtgatgttatgtctgatgttgtgtttttagagctgtgaaaagtctgaaaaatttcaaggggtattatttaaatgatgattatctggctgaattatgtgtgagctagaatctagggtagctgtccacttctttttctgttgtcctgacagtaaagcaaatagtaagccatgtcttgaaagtgatttgcttgt

SEQ ID NO: 36697 - DNA, 1050 bp, Homo sapiens
ctcctccatcccagtgtagccatggaaagcttttagcttactcacctttggtattagccattgttgggttatattagaaaaatcaccgaagtggcttgggaatgaggcttagcatggagaagtcaccaaaagaagagaattcttttaaataatagcaataacaataatcatagttaacttttattgtctgcgtgactatttgattaatgtctccccctctagcctggagtttccagtagtgaagagaagacaagtattttcacactcttttatatccactgtcttgtggccattccatatttactgaatgaaagagtcaactgttaattgtgagttaggcaccattggcatagatcctcttgttcagtcctgacaataatcctctaaggcaaagactgttattacccccatttgattgacagagaaaaaagaggcagcaagggttttatagttattaaagcagggtttcttaactctggcaacactgtcattttcggtcagacaattgttgtggggggctgtcctgtgcattgtagaatgtttagcagcacccgttgcctctattcacttgaagccagcagcacagcttcccctccccatttgtgacagcaagaaatgtctctagatgttgccaaatgtccccttgagggagaaataacccccactttttagtaggaaagatggcacgtcttgcctgcccttcaccgtgtgcatgaatggtgatatgtgctacatttattttaggtgatgtgttgctctggtgcagcttaagtgggggtcttttgttaggctgcttgagtgtgtttttgtgtgtgtgagcaggggatactcagccaggaggcatatcatgtttgggctctgggctcatggcacatcagtgataaactgggcaggtccctcagcctgaaacctggaagaagggagaagactccagggagtttgggaggttccttctgagaatcaaattaggtctgagagaaaattgtattgtctgtcctggaatgatttttgaaggcagtctaatatatgtaaacagcaaagacttaggag

SEQ ID NO: 36698 - DNA, 1047 bp, Homo sapiens
caaagtgagaccctgtctctacaaaaaacccaaaatattagctgagtgtagtggtgcatgcctgtgatcccatctactcaggaggctgaggaaggaggatagcttgagccccgaatgtcgaggctgcagtgagctataattttgccaccgcactccagcctatgggaacagagcaagaccctgtatcaaattacaaaaaaaaaaaaaaaaggcaaaacatacctttaaaataaaggggggaaaatctacctataatctactttaagtcttctgtgaagtagtattgcacactgatagctaagattgagatttcactgtggagggcaatagaaaaaagcaggtaacaattttttttcacattcacggtctgtttctaacatatacatgccttcttttgagggatctttgtcttaatgttagcaactactacagtttgtgtccctgcaggtgcccaagaaatgttgagtgaattaaatttcattttgaacccagagatactaattaaactgattttaagtgatgttttaaagatgaaaaagggccaatgactatatatttctccacaaacgatgaataaaatagttttcagaaagtttggagtgtgtgcttaaaactatatttggggggtggcctgatttttaaaatttcctgtaaccacattttggattatttcaaggtccaatgtgatacaaaagttggagaaattgaaaataaattttataaaaattataatgaagaaatatacagcatagaagaataaaagggaaacaataaagggttaaaagtacagattccagagctgtccagttcagcagccactagccacatgtggctattgagcatttgaaatatggctagcatggactgagatgcattgtgagtataaagtacacaatggatttaacatgatttagtataaagaaaagtctgtgaaatctctctctttctgttttccccccatcagaactctacttttgcattcagacaggcaggggatgcctcatcctttgaatactggcacattaagagcagtgacataggtaagaa

SEQ ID NO: 36699 - DNA, 1048 bp, Homo sapiens
taaagatgaggatttaattttagtattaatgatctcaaagctggttaatgtctgacaatgagcagatacatgatgcaggtatacttcatgaatttgtctcatttcttgttagaagctgctagactcagtgagctttaatttgctgagactgacaaaatgcagattttcactgaacctgactagctggttttcaacataaacttttgacacataacaatatgcttatattgacactatgtatacctgtgcattgcctagaagtaggaacatggaaaaaagtgatccaggcacccaagtttaagtttggaattgatagagtgtcagggctgatttaaaaagagagtttaggtcttgatttataaatttcctaggttcagagttcttttgagcatggattacctgtatcttacagataaaagttgtttaaaatttattctgtcttgaagacacactgcagtaagtttacttttatcaatatttaaaagaaaattaccataagtatgctagggactgttaattctgatgcatttaaacttttagttttgcttagaaaacttacttatacagattttttttaaagaaattcaagcttttcatatgtattgtattatcattcctcgtgttttagctgcaacaaatatgaagtggattgaagctaaaatgaaagtaagtgttagaaagcaatccatttaaaaatattttcaaactgcatttgtcttgttaaaagttctagaactgaattaattttattcttactggagggcacttagtagatagataaatgccattattgggagtagaggtgtttttaaagtgtgtttaataagtggattgtactgaatccctaagtcttttttaagaaaaagtataactaagcttgtcccctcccccacattcttcctcattttacaataatactttattttccttcttttgctctagtgtgcaatacttaaagagtcagtattctcctaaaatggtaaattaggaagtaatctatttctattttccttggtttaccatttattgacttggctaagtgaaacta

SEQ ID NO: 36700 - DNA, 1023 bp, Homo sapiens
tctcatactgtaacttaatgtcaggataagataaaacacatgtaaaaatttcataaatagtattaaaaattaccagtaacttgagtgtagcagagaaattagaaaagtttatcctactaaaaaaacaattactcataattttcctttttaaagataaccactgttaccatcttggtatatagtctttcagtcttttatctaaacccaaatgtttgcacaaatctatatagacgttgcctataaacatcaaggttttgagacagagaaaagtccccagagaagtggaaggtattactatgtattacagtatttgggggggaattagatctttgaggatctggttccagtaatacagcaccaaaagaaactatttgtgtaataataacactttggcttttcagattccacttttgacttttcagatcagtttgacacaagtcttctaagagtctataatcctaataggaagataaagcagacatttttacccccatctttaaattgcaaatgatgtaactgagtcatggagatagtaaatacttagtgcagtgccacaaagtgagcaaattgtaccagcaaaacatgtccaagtttgctgattttaggaactctttccccatccccacaccaccaattatagtagtttgtaaatgttagaaatagagatcaagtttttaatttagtggtagatttctattaaacaatatgaaaaacacttgtttgcttagtaatgtcttatatcttttacactcttgatcaaagacctttagcatcttttgcccactgtcttgatgtaacaaaaataagatctttatggagtttgatctgtatttggaagttacaatactagttaatatagtgactttcacattggaagtaaggcagtatggagtggtagtcaatgagtatgacctctggagccttgttttgaatctaggctcttccactttctagctgtgtgaatttgggcaaattgcttaacctctttgtgcctgtaaaataggaataattctaatagtaact

SEQ ID NO: 36701 - DNA, 1061 bp, Homo sapiens
gttctcagacccctgggcagcttgtgtggtgtgctttatggcagtagcagtggtggagcaaccaacccacttagacccagttagtccatgttggtgttgctggtggctgccatggattggttgaaatagttctcagtcccccagctgcctgtagcagggtagtgggtattgtcctaagtatgcttaggagagcttggtccatcttgttcctcttctggctgggtggcagctgcagctgtgtcaccttcaacttggcctgagggcaggcacagcccagaattaaactctcaaattgatgccttggccttgagactagagaggttggggcccctcccaggcaagcagcatgaacaagaagctgtggcgggtgcagtctgttcatgtctcaatctcaacagcaggctgcacagagtggtaggcattttctcatggggtacgtgggagtgcctgatctcgcctctccctccttgaagaagtgcaacagcagcagccatgtctgtagatctgtggtatctagcttctcaaaatggtgtccagctgaagctgctctaggcttggatgtctgtggaactctgtgtgtgttcccttcctggcgcaatgcctctgtgcaatctctaggcagctctctatgtcaggcctgaggccctgatgggttggaggattctcccatagccaagattgtaatagtctgttttggagtgtgaagccctgggggttactctcttactgtttccccacatccaggagcctctcccagctctcagctagtcccttgcctggcaagctgccttgaaccctctcctcacttacttctggtgattcccatcacttctctggtgaatcctagtattctctcctagatgatctgtttgaaatgtgagtatctactttactatcctggttctgctctatggacaaagacctatgtctagtcagtcgtcttgatcacactaccctcattgtttttgtttgcatttcccagatgatatatgatatgaagcatcttttcatatgcttatttgccatttgtatgttttcttatttgcgatctgtatatcttg

SEQ ID NO: 36702 - DNA, 1145 bp, Homo sapiens
ttttatgtcacttcctaggtaaaccttacttccccctataggaaacatggttcactcaaacaaagtaaataaaagggctttcctgaaggtgtgggcagatttaagggaatctgacaagaaaagtacgagctaagaaggtctggcagccactcccctgctaagctagaacaggcaggaagggagcacttactggggccaggtggtggtagctgtagggatgtaggacagggcaactcaggggacctgtggcctcatgcagagggaggcagccaatctatagccacctatcagggagggagctgggcaaataaatgtctccatcttgttctcctccttcttctctccaatctcctgccagtgcctccactggttgaacctagctgggagccagtggatcaaagatccagtggaccaaaggatccataaatgtgatcctcctgggggtataaaaaaggatagaaataggtggaaagtggatctgggagtggctaaatggaaaatatccaggatgttccaaattgcattcctctgctatatgccttcccagaccattgcactgccccatcacaatgctcatcctagtttgtcatatctgctgaaggattaggcatgcagagcatatgcctcatggaagttaaggactgtatctgacttgtcattgctgtatgcccagaacctatccctgcatctgattatcaatgatgtgtaatggagcttggaacgtgaatgggcacatatgtctgatgtcctcacctgaccattctttgggagccctttggggatagtgaatctcccagtaccctacttgggcacaataaggactatttagtgaaagaacattcacaattgagtgaatggatgaattctaagggtggatcactttgaaaatacctgaatgtcaatctcatggtaccaagtttatatcagaattcaacctcaaattaactaacttccattccagatctgttcctttcttggtgacatggcagcatatacatgcctcattttctcctgccttatatccatatcctcttggtctggtggcacaccttccatttcttcacaagcaacctgggatgattagcttaggtccccagcccagccctactcaatggatgagcttcaactaagatggggacaaggag

SEQ ID NO: 36703 - DNA, 1085 bp, Homo sapiens
ccacctctacaattaatttcacaataggtctacagttagaactgagcagtgctgtggtgtgtcgctaacagacgaaggaggaaggagaagggctgagggaccaatcctttatcttccagtgctaggccctttcccaaacaccaagctactgccctggcgcccctatacctccaagcctttgcttgagctccctctacctggagttccctcttctttcttcgttacctattgattttgttctttagaactagagagtatcacctggaagaaatcgtttctaatcttgcccttctccgtgggttaggagtctatcctctatgtagacccgtattttatttcatcattaaaagatgtattgtttgtaaaaatagttaacataaacacacggtaaaaagttcaagcacacaaactgatataaatggaaaagttgggcgttcctttgcctctgaccccagtttccctctcagaggccaccactgtttcctgtgtctccttccagaacacacacgcacacacacacacacgcacacacacctctgcacacacccccactgtaaatggcctacctccccagactccgaaccctccgaaggcggggtctccttgtttgcctccagggccctaacgactagggcagcctgattccctgcacaaattcagcaacagactgctgaaagccatgctcttgcacaaggaaaagtgggagggaaggggatggattctgtctgagatcactgggtgccacgctctatgatctacgagttgcttttaatttcctgtgctcggccgccggcagcctgatgaaatgaagcagatagcagggcttcagatctagcccttcctgggctagggcttgtctgcttgctgcaaggttataatctccagactctgaagagagaagagctacgtgcactgtacccccacaaccaccccccaccccaccctgttgctgcagcctcctgagccagggaataggcagaaatgaagctgcttgatgttgcctatggttcctagggcagtggttctgagttggccatttaggctttgaggccagacagagatggtttggatcctggttctgttgc

SEQ ID NO: 36704 - DNA, 1055 bp, Homo sapiens
gtagctgggactacaggcatgtgccactgcacctggctaatgctcctttctaagataaaaaccagaaaagtctaagaatagtccctgtgaaggagggaggcagcaggaatccaggactggaaggtccaggcatcacacagctaactgaggcctgccttcctcaggctggaagatagaagaggcaggacaacaaagtttgcttcctctcctgctaagaagggaggatgggggttaaactggatttgctttcagctcttgaatcaacatcgagcgcccgtcttgtctgccagaccatatggtatgcagaggcagacttggactgggttttggcagatggagggagctatgctgaaaatgacagagtctagcaactggggaggcatgggggctggcaggtgagaacctcaggaggaggctggttgggagcaggaggaaaacgcaagaagcaggagacaaagcaaaaagaaatcattttccagtagagaaaaagggaagaagcattatttgtcttggagagtagcaaggaccgctgaataaggatgtgtgtacagtgcaacacaatgttttcccagatcttttattttgccacatttgtgtgctacctatactatattcagttaagattttttctgtatactgacttttgaagaatgtaaacaaatttattttaaaagaaaggttttatcactgccacaggtgaaaagtttgtcataactgtatggtaatcctaagcatgaataaaaagaaaactttgtgacgatattaaattctaaccacatactacaacctactaaagactggactttcatctactgtttctttaaacgaaaatagagtatggaagacataacatcatcaaattcagcgtttttctttgatatttacagaaagtttgaaaaagaatatgatttgattgattttggagacagttagaagatagtggataggaaacagtactaacatgcagctctcacttggatggaagaacagcatgtggagactcacattgtgaacttttgcagtgaaacacaccaggaaaactgaaagagttaaca

SEQ ID NO: 36705 - DNA, 1064 bp, Homo sapiens
ctctgcccctggtagttggctgggtcgaggaaaggcaagccaaataaaacctctgacaaacttaaagtttcctctttagctagagggtacttttagggtaagggactatttgattctttagtataagatttttagaaacagaggactttagagtcagaagagctcttacacatcatccagtcatttggcagaagaaaaatggggagcagaaagtttaattccctctgacattggaactatgcactattctgagtaccaaggcaaggcaatctcatgtgcataaaatattattttacactaggcactatagtaggttttatacacaaattaattttatttcttcctcccaacaattttagaaaacaaatgctgatatcactgtattgcacaagggataactgaagcccagagtttcaaaatctttagacaatgtggtagcttgcattgttattttccattttcacctccttctccccatattggtatttatcactaccacatagatgttggtcttggcaatttgacttgctttgaccaatggaacatgagcaaacacagcataggtcacatccatccaagtaaaggcttttaatatgattgcatgattcaacttggtttattgttcctgtgccctctgttatgagaagtcatgtcccaaaagctgcttctccattaacttgggtcttgcagtaagaaatgaatctgagcccaccaatgcctgaggaagagctacaactgacctgtagccaacactatgtaatatgagaaagaaagaaatattttgtaagccattgagagttggaatctatttgttacacagcatggcctagtgaaaggtaatgaacacaaatggacagagccgggatctatatccagacctatctgcttccaaatgccatatccttttccccaccaaacagtcctttctgtccactccggtatgctttagcctcagtagcaaatactgctttttcagacccatacctttaaactcccctctccagcacccaagacattttccttgaccattttctttaggctcaatatcttgctcacacaagtgc

SEQ ID NO: 36706 - DNA, 1095 bp, Homo sapiens
gtgtgtctgcttaacaaagaaattttcattattttctgtgaaccttcagttatgttcatcttgtacttcaggagtctgtaatgtaacagtctttttgtttattttcaaaatgtatatatactttttagttttctgttatgaacttttctacggttggctgctgagatttctgtaatgaacatttttatgtttatgctacatttatgtttatgaacatttcctgtttatgctaatcccttgttagcaaaatatgactgcctgaatatcttggtggggttttggttgcagaggtcttgagaaacagaattgtgtatgattatagctagctatcctttgttgaatgcctacaatgtgccatccactgacttaaaatgttacttgtgttttcattaatcatcacaacatgcctatgagatacatactgttatttcccataaggaaacagcttagagggatgaagtaactagcccaagatcaaacacctaatgaattgcaaaactaattctcaaatcaaatctgttggattccaaagctagagtataatgtataatgtaataacaaaaacatctgtcttcctacaaagcagatagactaataaaatgtacactctcctgtttctttgccctggggccacacccttaactgggcaagccttcacttttggagactgaagtcctgctgtcctacttccttctgattgcacaagcaaggtagtctctgaagagttactgtaatgtcttgagtttgtctacaaagaacttgaactagattgtagtttatgccactaaggagctcactcactgaacaggttgtgatacattggtattgagatgagataataaatgttcagcctaagcctaacagtgggggtgggaaggtagcctggggtgggtaggagcatcttctctttctctctccttagacgcttttcattatcaaatcagttagctttaatgtgaacgtgttcgtttttgtgctagtgtgcaccaccagaacaggaggaaaaagggcaaaagtgagccaagttcataaactaccacagcaaatacagctcaaaaaaattaactactgttccataacattataacaggtttc

SEQ ID NO: 36707 - DNA, 1045 bp, Homo sapiens
gctcaagtgatgctaccacctcaagagtaacagtaataataatagaacagcctaagtcctgtggtccaagcccttgattcagtgaggaagaggtttgtttttgttttgttttgctttgtttttttgaaaccaggtcttgctctgtcccccaggctggggtgcagtggcacgattccataattccactgtagcctcaaattcctgggctccagtgatcctcccacctcagcctccagagtagctgggactgcaggcatgagccatcatgcccagctaatttttgtatttttatttttatttttttgttttgtttgtttttgagacgaagtctcactctgtcacccaggctgaagtgcagtggtgcaatctcagcccactgcaacctctgcctcccaggttctggtgattctcctgcctcagcctcccaagtagctgggattacaggcgcctgccaccacacctggctaatttttatatttttaatagagatggggtttgaccatgttggccaggctggtctcgaactcctgacctcaggcaatccacctgccttggcctcccaaagtgctgggatacaggtatgagccaccgcacctggcctaatttttgttttttagtagagacggggttttgccatgttgcccatgctggtctcaaactcttgagctcaagcaatccaccctccttggcctcccaaagtgctgggattacaggtatgggctaccacaccaagtgagatttatttttaacataggtctcgaaatgactataggtcagagctctggaactgaataacatgttttggagcagtgtcatccccttttcaaatgccctagttcttgacaccaagggaattaaaagtgactttttctttagaactatgaagcatataagttctgtgagttcacctttttgcagcagcttctgtgcattactcagttctacttcctgcaaacaattctttatttccacacctgtggaagacagtatggtcttgtagttaagaggatgaactttgttgttttgttttgttttgctttgcttt

SEQ ID NO: 36708 - DNA, 1031 bp, Homo sapiens
ataaataaataaaaaataacctcagaattacattctggagcctttcgctttgctacctcaactttcagtccttcaagttataaaggcaagatgagggctgggcacactggctcacacctataatcccaacacactaggaggctgagatgagaagactgcttgagcccaggagttcaagaccaacctggccaacacagtaagaccccatctctactaaaaacagaaagaaattacctaggggcagtggtgcttgcttatagtccccgctactcaaaaggattgcttgagtccaggagttcaagtttacagtaaactcttatggtgccactgcactccagcctgggcaacagaaggagaccttgtctctgaaaataaaaataaagacatggtaagtatttctcgagctggctgctcaggccggcccgtagcactgattcctttctgtatacttgagacgtggttttgcccattgggaacttgatgttataaatttcccaaagaatgattggtctcctaaaacatgaacacacatacacacgcttacttcacaagagcctaatccggcaatctgattgattcatctgtgttcatagaatattcctaatgagttggctctgaagagaagattatagatcagaaaatagcttaagatttacagtcaatgctaaagaaattgaaaactcttaaagagtgggcattaagatctagtaacttgatgatttaacccctctctaaagaatttgtttcttaaataactgttaactgaatttgttatgttgtcttggctctccaacatccaacaccccttcctatttggaggaattctcttgtgttgtgatcttgttgagtggcagtaccccatgtctctcacttcatcctctgataaccaaggcttgtgatcgatgcttggtatattagatgcttctgaccaagatcttaaatctagattgagtgaagcaaagacaatggaatggttagagttgatttgctgtcattgcagccctgtcctggcaagtctttcactaaaagac

SEQ ID NO: 36709 - DNA, 1027 bp, Homo sapiens
ccaattgggccgcgagttgtggtttaaaccaggagtgcgccgcgtccgttcaccgcggcctcagatgaatgcggctgttaagacctgcgtgagtgaatgggagggtcgcgggtggttagttgagccggctccggcggggaaggaggcgggctgcggctgcggctggggctgaagctggggctggggttgggggactgcccggggcttagatggctccgagcccgtttgagcgtggtctcggactgctaactggaccaacggcaactgtctgatgagtgccagccccaaaccgcgcgctgctcgggaccttagagcctctgactcaggctggaagatttgagagctggattaagtacttgttggctcacgcccgtgactgttccgctgtttagctcttgttttttgtgtggacactcctaggatagaaagtttggtatgttgctatacctttgcttctcccaccttccccaatatctaatatgtatttctcattcttagaataatccagaatggctactctgatctatgttgataaggaaaatggagaaccaggcacccgtgtggttgctaaggatgggctgaagctggggtctggaccttgtaagtatacaaggctgcagtcggatacactggtattgtggacgtggcctggagctggacgagacatttagtgtactttttgggcaattggagtcgtttgttattggtcctttttcatttttaatatcttaatgagatgatttaaggaagttactgaatctctgctattaggcctatcatagccatgccactaccaaaagtggggggtgggtttgggggtgagaggtcaagtttatatacacagtatttaagttgtacaggtattttgctgctggaatattcttatggtaagactttttcttcagcaatcaaagccttagatgggagatctcaagtttcaacaccacgttttggcaaaacgttcgatgccccaccagccttacctaaagctactagaaaggctttgggaactgtcaacagagctaca

SEQ ID NO: 36710 - DNA, 1070 bp, Homo sapiens
ttttccttgaggtgatagacttctttcattcctttaagaaaaagtgtgacaagcacccaggtctgagtgaccatgggatttcttgcagttgttaattcaagtaaaaacagtattccaggaaaatgttctctagttttagcttgcaactcatatagttgcacaaatccttttaatcgtattttggtgtacagtggaagtgctttatggcatacttctcattttatcacacagaacattaaaaagacatctcaaggatggagagctaataaaattaatactttctactgcatatggtgaagtgacagtaagtgaaactggcatttttaaactacaagcgaagaaggatgcagaacagagagactgctaatatggtttactgtcactgccttgatttgtgttgaggcaccagcagctttctccaccgctgccttggtaccatcattacaaatgtcaacccagtggaaaaaggtgtgaatattgtcttgaaaatagttttgacctcatggaccccctcaaagggtctcagaccacaagggatctacagcccacactaagaactgctgccctgacaaaaacgctttctctctgtaacagactttgagagttttgacctgcctgaagagcaccagattgcgcacctccccttgagtggagtgcctctcatgatccttgacgaggagagagagcttgaaaagctgtttcagctgggccccccttcacctgtgaagatgccctctccaccatgggaatccagtaagtgagcaagtgcccttctggaagggctgcaaacaatttgtttcataacacttccattaccatgggaagagttgtgcgggaggtgagcctgtgagtaatttctgtccttcaaatgacaaggattagttttcagaaaaataaactattctcgattaatattgcttttcagtcccaaatgccccagtaaaattgttattctggaaactggatagtcttactacagccaaaagattaattctcacttacatcttcttaggctataagttgaagcatatataataaacttgcttggaatgatgattccatgttatatc

SEQ ID NO: 36711 - DNA, 1055 bp, Homo sapiens
tgggcgcggtggcgcatgcctgtaatcccagctcctcgggaggctgaggcaggagaatcgcttgaaccagggagtcggaggttgcagtgagccaagatcgtgccactgtactccagcctggcaacagagcgagactccttctcaaaaaaaaaaaaaaaaagcatggttccttccctctaggaactcaatttaggatgtgaccaacttgtagaagggaaataaataacagatggcactttgcaatgacttagatgcactagccgcattgggggatgggaggcttataaatcatttcttggcccagtgcaaagatggccaaggaaagcaggaaggactactcttacactccttgctggtctttttttctatatatagatgatagaggtactgacaacaactgactctcagaaactgctacaccagctgaatgccctgttggaacaggagtctagatgtcagccaaaggtctgtggtttgagactaattgagtctgcacacgataatggcctcagaatgactgcaagactaagggactttgaagtaaaagatcttcttagtctaactcagttctttggctttgacacagagacattttctctagctgtgaatttactggacagattcctgtctaaaatgaaggtatgtttgaagctacatttttgtaattttgctcagtgtgttttggagatggaattgttaccttttggctggtattcataaacttgaccttttttttttcagcacgtagccaaaacattaattttgtctactacagcattaatatttcttatcataatcaagagtagtacatcaggtattagacttaaattctgaaatgaaaaatagtctaatatcaagtaacaaattgcagtttcctagtaagaaaattggctgtttttaaaaaacccttcttgataggttggatttgtccatttatttactatttttagatataaacaaatttattagtggcagaaatttattagaggctacattgtggctaagaattaagatatatttgttaatcactacccatatataaaattgtaaatgtt

SEQ ID NO: 36712 - DNA, 1792 bp, Homo sapiens
agtcagctaatatttgaaggcctttactatatacaaggtacaacatcttaggagtaaggaattatccaacctctgatacatacgttagccatttcattaaattttcagcttagagaacagcatcctccttgtagcactaaaatcatgcttttttttaattgcacatgatcttgctgtatgtatctgactgatttaaaattacataagctgagcaggacaacagcaccaaaagtctgaaccaagtatgaactaatttgagactgttagcttataagcaaaatcaatatgaacttggatattgtacttaaaagaaaaaaaagtaggccggatgcagtggctcacgcctgtaatcccagcactttgggaggccaaggcgggcggatcacgaggtcaggagatcgagaccatcctggccaacatggtgaaaccccgtctctgctaaaaaatacaaaaaaatttagccagtcgcggtggcgggcgcctgtagtcccagctactcgggaggctgaggcaggagaatggcgggaacccgggaggcggagtttgcagtgagctgagatcgcgccactacactccagcctgggcgacagagcaagactccgccacaaaaaaaaaaaaaaaaagaaaaaaagtaggatatgatagatggtctctacattgggtatctggaaactgccagagtgtgtcaacactatactaacctatcattgctatagcagctggactactgcaaagtagttatatgcataaaaaatgtaaacttgctttctgcatatgtgatatacattcttgccatataaatttcctaactcagtgatgatttattctactcaaaactaaatgttaacatttaatacatctacatgtgattatgaatattagatatgaacatttcaattttcttagtagtatttaggcagactggcttctgttaagttggattttgtttgttttctttatttaaataggattattacagcaccaaaaaacttctctgaagcctttctccacaaccttgttctatggattccataatgttacaatggatttaagctatgaagcctcaaaacatcacgagataagcatgatggtctcagacttgggaaaactgcctaatattatgctgtagtggaattatgtttagatttgaattcatctgtgaagcattcaaatcaaagctaaaagcctaaatgtgaaatgctaatgacaagcctgagaaggtaaactgtgaatcttcatttctatcattgatctaactttagatattggatcaatatatttaggtggtattgaaaatgctattggaggagtcacactaatactatcaactatcagtcttcccacagcttcaatcactgtcattattctaatcctactcctacttaaattttaagttatgaggtttatgtcaaaagcaacatttcacaaatgtacttttaaggcataataagggttaacattctaggcagtataaacacaccccataatgcaagtaataggtaatctagagatgtggactttattgctatatgggaattacatttaaatttgagggcattttatataaagaaaaatacagacctataaagtttggcatattcattaagttatcttttaatatttttttctagaaaacaggtgacatttgtatctacgataaaaatttttatacagaacctactgcctcaaactgaatcccatcaagaaaactagtttctattgtattagtaactcaaaataaattatcacttcgaaaacttgctttcccacactaaggtaagttcagactaga

SEQ ID NO: 36713 - DNA, 1885 bp, Homo sapiens
aaccccgtctctattaaaaatacaaaaaattagccgggtgtggtggcccgtgctggtagtcccagctattcgggaggctgaggcaggagaatcgcttgaacccaggaggcggagcttgcagtgagccgagatcgtgccactgcactccagcctgggcaacagagcacagagcaagactccatctcaaaaaaaaaaaaaaaaaagtgaatagatagcttaattgtacttggaacttatggcaactaaagttcttatgttcttaaaatgcattaagacttttaagatgtatcataggtaaatatgattattcaaatagctagtaacattagaatatctacaagcataatgtcaaaatcagagatttttccagaaactttaggggtgattattggtagcatctccttatgttggcattctatcagtgaatcatttattatcaccttgtttttgtccagattcgtgttcttctacaggaacgtggtgcccaggacaggcggatccaggatctggaaactgagttggaaaagatggaagcaaggctaaatgctgcactaagggaaaaaacatctctctctgcaaataatgctacactggaaaaacaacttattgaattgaccaggactaatgaactactaaaatctaaggtatctgagcctcatgataatatttacaattgaataaatataaacacgttttttagggccgggcacggtggctcacgcctgtgttcccagcattttgggaggccaaggcaggcggatcacctgaggtcgggagttcgagaccagcctgaccaacatggagaaaccctgtctctactaaaaatacaaaaattagctaggcctattggcgggcgcctgtaatctcagctactcgggaggctgaggcagaagaatcacttgaacccaggaggtggaggttgcagtgagctgacatggcgccattgcacttcagcctaggcaagagagtgcgactccatctcaaaaaacaaaacaaaacaaaacaacatacaccaggcgattcagattcattttgttaagcaaacatgtttcaagaaatcctttctcagggacttgctttagagtcttgcaatggactttccagcatatagaggtaagtgaccacccaaacaacctttcaaaaatgaaccaacaggccagccacagtggctcacacctgtaattccagcgctttgggaagctgagacggatggatcacttgaggtcaggattttgagactagcctagcctaacatggcgaaaccccatctttactaaaaatacaaaaattagtcaggtatggtggcgtacacccgtaattccagctactcaggaggctgaggcatgagaatagcttgaactcgggaggctgaggcatgagaatagcttgaactcgggaggtggaagttgcagtgagcaacacggcactccagcctgggtgacagagtgagactctgtcttacaaaaataaaataaaaataaaccagcaagtcacattaaggaaaagagggataagaacagtagactggtacagtggctcatgcctgtatttccagcattttggaaggctgagggctggagaattgcttgaggccaggagtttgagaccagcctgggcaacatatcaagaccccatctctataaacaaattgaaaaattagctaggcatggtggtggtgcacaccggtaatcccagctactcaggaagatgaggcaggaggattgattgagcccaggagtttgagattatagcgagctatgatcatgccactccactctagcctggacagcggagcgagacttgatctcttaaaaagaaaagaaaaaaaaattaaatcaatcagtaattatggtgtaggtcaaagactgttctctctaccaaagta

SEQ ID NO: 36714 - DNA, 1031 bp, Homo sapiens
caaaatcaagagaagtctgagaaactgtcatagtcaacagacgcctaaggagagatggctaataaatgagatgtggtatcctgggcggggtcctcgagtagaacaaggccattaggttaaaactaaggaattctgatggatgttagccgatggtaatgtatcgatattagtcacaattgatattgtgacaaatgaaccacagtaaagtaagatattagaaacaggtggaattgggtgtggagtataggggaactctctgtactaggttcacaatgttactgtaaatctaaatctgttctcaaattaaaagttgactttaaaatccgtgacaacaaataaaaacagttaatgaattgcaacaatcgactatttcaaataagatagcacaaagccgtcattaaaaagttcaaatcagccttgaaataccactgtgtgtaattataaaacatgatttaattgccactttagaggatcctgactttggtgtaaggtaaagtatatctgcgttttgaattctgtgaaattaataccaaactttatgaaagtaatatttatttggtttatgcaaagtggcaatcaatgtgtagagattacaatgctaaatcatgtgcgttttcttctagatcatttttttctcccaagtctgcaaacttaacttcattttgcctgaatgggatcactgacatccaggcccttcacagattcttagtaactgtggttttcagggctttttataagagtcccttgctgacctcaatgctaaatctctctccatattcaccttccaattgccttatctgttactctaatttagaaagtaattatgcattcttcctcttcctctacatgtaacactaaatgcaatccatctgataagtatctcaccttttccctatgtaaaattccagtacaaacaagtacaaagtctattccatataactgcttttttttttgtatttcactcaggaaaaataaaagttactttttttttctgcctctggtagtgttccctacatgtgcaaagaaatgaa

SEQ ID NO: 36715 - DNA, 1038 bp, Homo sapiens
ttttacaaatggtgtgtgtgtgtgtgtgtgtgtgtgtgtgtgtgtgtatgcatatacatatcgagagactaagagattatttcattgctctctaagaatattctataagtcagaaatcacacttctgaattttctgagttaacatatagcatctatccatcatagtgttaggtactcctaaagtcttcacacagttaagatatcttatttttaatggaacttgtgtgcacggctctacagtttttcatattttgaagggggggaaatgggagatgctccagtgaaataatttagaaatgagtattgctacttggatttttctgttttaaaaacatactgtatagaataaattaattgtatgaattctctctcgggagaaaacatcaaatagccttaactctgaagaacacaataaagtttgtgattaagtatatctgtgatcatcttgtccagaaaagccatagacttttcagataaaagcgattactcatggagtaagacttgtaatgtttttttttcttaaagaatgcaggtggtagaatcatactaattgcctagagagttacagtttttgaaaatgaaattgtactctcatcaggcattatacatattgaacaagaaaggccaaactggatatactcttttgaaaattgctgtataaactctactagacattagagtttagctgatacatgctaagagtagtattttgcataaatattccacaatattgaatgtgtttttcctgcctgtaattagagctctgatttactgatagaaatactaactatgggataacaattagaatgcatgcctcataattgccggaatgtaaatcgagtctcttgatttaaaagaaaattaaataaatacacaagcacacatacacacacactttcttgaaagaaagcacaaaatattttaaggtaaaatattagctataagcatataacctttacaatttcatttgaatgaatgtgaattaatttaagttttatatctgtatatccaactactagacataactttaggacaagc

SEQ ID NO: 36716 - DNA, 1054 bp, Homo sapiens
gcttgaaatgttcataaaattatagatcatgccaagtttatctccgtaagccaaggccttccattgtgttagcttttacactccccaaaagaaattccatggccctatgtccttcctcttcagaaatagagtgacctcttattcctgccttcatctctcagaaaacatgctgttttctggaaataatcaaatatctcttctttgaagcttgttctgaatttttgactacaatattttcctccagggatatcttcagctacaggaactgtaaattttagcattttctactcttatcagtattacctgttaccttgttctcttccaccaatagtattgaacaaaccagccatactctgagattacagagaaagtaagagacagacactgtcttcaaggagctcacagtctagtgggggagaaaggcaagtcagagaagtttgcagtacagtgtcatagctaccaaccacaactgaggttggagtgaggtctaacagaggataaggaagaaacactttgcctgggaacatcttccaggaagtaacgtctgaactggatagtagactgagatagttaagactgtgaagaagagaagggtggttctgtctgaaggaactgcagatgaagaggtacagaagctggaaggcatagtcaccagggaaaacagtgcgatcactgagtgtttaagttcagctacaccccagggctcctgtggaggctcaaagggtattagataacggctgggtcaggaagtggtgcatgtgccttcctgaggagttctgactttgttctaaatgaggtgttgagaaattactgaaggattcggaagaggagaatgaaggctgtttacttcactctgcactgacacttctgcctgaaattgcaaccctcacagactcttgctttagaggtagtactgtctgtgaatgataggtgtcacctgactaaaatcacaggtgctgtggctggtaacccacgagaaatcctggataaaagttaaaccaatttatttactacctaactgctcagagcttttctaatgctcatgcacgtggaa

SEQ ID NO: 36717 - DNA, 1051 bp, Homo sapiens
gagtgtagactcagagagatacttggggcacaaagcagaccatgctgggcctttttgcccatggcaaagccttggggtttaaatatgagtgttatgagaagtgttgagtgggtttaacatcattccagagtgtaaaactataatcacatgcatgcataaaagaatcatctacctccagatatttctcatgttgatccaaatagaaatgaaaatattccttgctttctctagagctaatcataaaaggtgatcatcatctgccaaggagagtggaaaagtgtgacaattcttcaaattaaatgaactcatagggtatttcctacttggaaatcttatgattctgagtctgtgggatgtacactacacactaacaagatttatcttccaattcttatgtttctcggggagtagaaagtaaggcaacatgatgtattggcataaagaaaaggacattaggcttagattctggagactttagttctaattcacactgtgcttcccattaactgtaggacattggggacattgtgtgtgactcttgtttactattccaggctgtggcatctaaacaaaaaaattttaagtaggtaaacttttaggattttcagtgttaccaaaattccattattcaataaaatgcttatccacattcacctctgctcatttctttttcctttttttctcacagaatttgtgtcttctgcttgtcatgcttgtaaacttcagagaaagttgacttttaagaaagatattatttaaagaatagctagcaattaatactacttattttcatacttcagacttatcaaaaattagaccatctcatttccacatcaaaataactccatgtcatagtagaacagacgttgctactagttttaatagaggggcaatttaaagtatcagtgttaaagaatttgttcagcatcacataactaggcctattaagtacataataaatcctagggattatataagctttttcattaaggccaaactctggctgaagtaggataaaagtatcattcaactctaaacagtcttccctagg

SEQ ID NO: 36718 - DNA, 1035 bp, Homo sapiens
atgcttctttatagaaatgtaatataatattcgtttttctctccccttcagttaaagtctagtatttgctatatagccacgtcttagaaagttccaaacaacaataataatcccttcttcgagaaaattataatttacaggggccagtcgtggtggctcacgcctgtaatcccagcaccttgggaggccgaggcgcgcggatcacgaggtcaggagatccagaccatcctggctaacacagtgaaacctcgtctctactaaaaatacaaaaattagccaggcggggttgtgggcgcctgtagccccagctactctggaggctgaggcaggagaatggcgtggacccgggaggtggagcttgcagggagccgagatcgcgccactgcactccagcctgggcaacagagccagactccgtctcaaaaaacaaaaaagcaacaacaaaaaaccaaacagaaaattataacttatattggtaaaaatattaaaaagtataaatttaaagaattacaactgtaaacaacccctaaatatttcagtgggaacagtttacaaaatagtacatgaataactagcaaataaattgtatagataatcattatactttctatgaatacattaagggaaagagatcactttagcactttaggctaaattattttctgcttctgcaaggaaaagaaaggcttccaaaaacaagagaattttgaacattaccagataaataattgtgaaactattaataaaatgttattgttaccattaagatgattgtcttagcacttttacaaataatttcggatcaaaaagtgtttgaactttcagcaaaccataggtaatgctgtttctgttccttctggtcagtcagcttattactgagtacccatgctgtatcaagcatgtgacctgatgggaggatggtggctgttgacaagtcgaaaggtctgtactcctggaattcactccagagcctcaattcagaactgatttccttcactctcatttttttctagctggctcttcaccatctgtaac

SEQ ID NO: 36719 - DNA, 1033 bp, Homo sapiens
aaactgtttaaaaaaatgcttgtatcaacaattaaataaaccacctctgatatttagaaaactttccttagcttcctacttgacactttgcacattttctcccacaaagcaagtttctcctcttaattaaccaaaggcaagaatgatttctttcaaaactcaaacctatacatttagaaagaaaaacaccaacccgagggtaaattcattcacatcggtgtgtaaaacagaccacttctgttcaaagcccaggaagtgctgatcacgctcctggcctcaatagaagatacagatcattaaagctcaacccagtgtctgtagctaggttgtttattacaaaagtaagaatcactaacatgtcctctttgctagaaccataaatctgaaacttctctttattaaaactgagatttgacaactgcaataccatagctccccctgctgttctgatgcatattgtcagctgcctttggcaaaatcattttatgcctttcccttccattcggccctcctctgagctgtttctgatatctaagtttccgtttgcttcttaattcttcatctcacctccctgtgctatttagcaacccaatggcaatttggaaatcgattttttatgatcctcatgttaatatcatctttcacaggcagtgttggaatgattctacttttatttaagatcatttcaactgctctgctagagcagcttggagcctcggaaatggagtttctacttgcatggacccctcatacatacctccctgcacacacatacagtagtttaaacaaactggaaacaaaagaaacgtacataacagccaaaaatgttgctaagaactttataaagcaacgacagagcagcatcaaagcatctgcaaatgctttctctttccaaattaatactctatcagtataaaggaggccactcaccactggctatattttcatttttataaagtatttttatgactgtttagggaaagcctgtatacagccattccctccattttgtgtgtgtagttttcttgctctg

SEQ ID NO: 36720 - DNA, 1050 bp, Homo sapiens
cctttgagaaagaggcaaatacttatttaatgaaatgtaatgtaatctattttttttttttttttgagacggagtttcactcttgttgcccaggctggagtgtaatggtgcaatctctgctcatggcaacgtttgcctcctgggttcaagtgattctcctgcctcagcctcctgagtagctgggattacaggcatgtgccaccacgcctggctaattttttatgttttttattttttttagtagagacggggtttctccatgttggtcagactggtctcgaactcccagcctcaggtgatctgcctgccttggcctcccaaagtgctgggattacaggcatgagcctccgttcccggctataatctaatattttaagtgcttcaccagtttaaacaaattaccaagatggtcaataaaccgagtgtcatttttgctaggttaagaaggatttagaagccttcagacagcatggtttcacttgagatatgccttgaacattgagtagaattacaaatagaaaaaaaaaggaagaatatagaaagaagaaataagataatgcataaattatgagaggaattaacagatatcatatgtttaatgaatgggaagtattaagaaggagcttaaatgttacttgggtttggttttgttttgttttgtttttgagatggagtctccctctgttgcccaggctggagtgcagtggcgcgatcttggctcactgcaacctctgcctccggggttcaagcaattctcctgcctcagcctcccgagttgctgggactaaaggcatgcgccaccacacccagctaatttttttgtatttttagtagagacagggtttcgccatgttggccaggctggtctcgaactcctgacctcaagtgatctgcctgccttggcctcccacagtgcagggattacaaagccgcggtgcctggccttaaatactactttgaaatagaaaagttgaaagtgacataattgtttaagtgaggtatataagtttggttgggtgtagtcagatatggtatagtgagggacactca

SEQ ID NO: 36721 - DNA, 1059 bp, Homo sapiens
tagaaaaatttatggtgacaatattgtttgagtagaaagctaaaaatttcattgagtatgaagttggtataatactattacaagctgcctttttccgttgagttttgactgttataatcaatttaaaatgtaacttttctttttggaattataataaatacaattcttattttagataaatcattcgtcacacttgtaagatcacttcacagggaaaagtattctttcttgtcttctctatttttttactggaagaaatgatgtactttttcaagttttgctaagaactcttcaatggtaacaaatatttgatgttatgagattgacattaaatatttaatattattaatatataaaatactgtgtcatatcttgtggaagagagagaaaaacgatttgtgaaaacatactgcttcttgcatataaccatgtttctgctccttagtaatcttaatttcaattttgtaaagcttgtctttattattatcaagaaaagccataatctagacccagaattttgatcagatggcccttacctcagattttgaatcactgctctaagaaggcagatagataactgttaaaatttggataaaaatgaaataaacaaaaatatagttaagtattaagtttcagccaaggcacatgccaagagataaacgaatgatttgtagaattattggatagactctaaagaatattcagcaatattgtatattctacccattacttgatactgagatataaagatgttgataacaatggaaagcagatggacagcgcatgtttacctttcaaaatatatctgtcatggaggtagcatgttcacctattgataagtttgccagacttagcaaattaaaatacaggagactcagttcaaatcagttaaattttagaaaaacattgaaaagaattatatgtggaatatgcttattctaaaaaagtttaatcattgtttttctgaaattgaaatttaactgggtatccttcgtttcatctggcaactgtaactatctcgagtggtgtatgtatttatatgtgtgtgtttgtgtagtt

SEQ ID NO: 36722 - DNA, 1034 bp, Homo sapiens
gcctcctttctgtcactgccccctcttcttgcatgggccactattttatttaacagcataaattagctttgcttctttttataatatgtatacattgtgtatattattttgtatttggcttctttctcataacattatacttatgaaatgtttgcttcatgtaactataaagcatccagtttcatggcagcaaagtattctttgaatcctcttagagcaaatatcattcacaacttactaaaataaaagggcttttccttcttcttatatatgccaattttggattgtgtcactcagttccatatacctggactactcttgctctttttttatccccaatctattgtaaaaaggtaatttgtacaaagctataagtgtgtccctcatataaatataaaatgtgccatagattcatgcaacttattaataagggcaacaacaagatggtgaagctaattcaaagagcgtttgaagaaccaaatatgtacagagattaaaggaaaaaacgttagaacaagattgctaggtgagattaaaacctggaaatgcttttacaggataaacatcaatctgcaaattaacatgtaacttcaaagtctggtatctaaataataataaatgatatgtcaaacaaaattgtatcctcctagagattaagataataaataattcttgggtgagcctgctgcacattttttcagcataaccctgaagggacacacagatgccattttgccttatttcttatccctcgaggtcaatgttcatgccacttcccctctgaagtctttctgatctcctagctggaagtcatctctctggccaaagagcactggtagtacgtggagtatgtacaatatgaagtttgtgaatgaataatggtaatctgccactctagggttatatcactccttgagcagaaagggctaattaagaacatgattaaattttaaattatagctgaagaaattgcactgtagaaaagagataaattagaacacatcatggtgtggttagcacgtatatgttcttaa

SEQ ID NO: 36723 - DNA, 1026 bp, Homo sapiens
atcttctattccttctaccaagaatgctcttagcctccttatccacttagaaaacctgtattgaccattcaacagctgtctcagatactacttccctctccacatctctttgccaattgtccatctctccatttctaagctaccttcaggccttgtattggtcctttccttccacttagaatataccattatgacttgtttctttactatcttgtccaccaactacatagtgatctacttgaggcagaaaacatgtcttttctatctccatgtcccatatagcagcacagaacctagtacactgctgaaagtatggcaaatttttgacaaaggaagcagtgaactcaagaatatttgagctccaagaatcattggcttaaaaaaataatttatgaaaaggatatggaagtattaatgaaactaaagattggaaagggaagctggggctcaaatgagcagttgtcagtttcatgactgattctctccatctctcactgttaaaaattccttggtttctgtgacactggacacatctatttccttttttcctctcttcagcctgctgtctttgcatctcaagcaaaagaggcaagaagataggtaccccaaaatgaccaccttagtctcctctgtattatggttctctagaggtacagaactaataagatataaatatatgagtttattaagtattaactcacataaacagacagtcccacaataggccatctgtaagccaaggaacaaagagagccagtctgagacccaaaactgaaaaacttgggttccaatgttcaagggcaggaagcatcgagactgggagaaagatgtaggctgggaggctaggccagcctagtcttttcatgtttttctgcctgctttatattctagtcttgctggcagctgattaaatgatgcccacccagattaggggtgggtctgcctttcccagagcactgagtcaaatgttcatctcctttggcaacaccctcacagacacacccaggatcaatactttacatcctt

SEQ ID NO: 36724 - DNA, 1027 bp, Homo sapiens
aagcacggaccttgccccaacacattcctgagataacactcccccgcccgtctcagaagacactcagtccgttggtgtgagggaggctgctgacaccccccagattcatttccagtttgtttgacgttggcatgtatgtctgtgtaacatgactgaagaacgagtcattagtgagctgtccaaagtccctttgggaacattccaggaaaataaaccaatattccatcaaagccacaaataactttttttttttttttccattccttcaaagcaggctttctcagagtgtggtccacagacttcctgctttagactccccagaggagcttgtaaaatgcagattcctgggccgccaccctaagcctactgaatcagaatcccagtggggcttctgggaactgcatttttatatgctacccagatgattctaatacaccttaatctcgaaaacctctcactctctttgcccctttgcttgatcgttcctttgtgtcaacaccgtgtgcccgctgcgctctgatactacctccctgtgctgccccacctggtgaacttcagctgaagggccacctctccctgggagccttccttgccatctttgtcccatcttgtgtaggggcccactgtgttttctcctaatatgaatctaccacaaagtagtagtttctttctgcctgactgctcccctgaatggggaagcatcctgcccagtctctccaggcccagcagaaagttttgcctataattggtactaagaaaggaatcagtgcaagtgaagggtgctgagcggcaacggaagggctacagagtaggggtgacgaatggtcgcttcccgttaagaagctgtcaccttctgactcctctcctggtgagtctgaactcctaggtcaagtctggggccagagggcgagcatcagacccaagaagaggccaaggctctggctggcaggaggcacagcccacctgtttgggactgcggtgtccctggtgtaagctcagatccctgtctgtatttcagggagactcc

SEQ ID NO: 36725 - DNA, 1004 bp, Homo sapiens
gtaaccttgtatatataggcgtgtatgtgtaaacaaaaattcatgtataatcagaaggcagtatctgtgtgagactcaacaacagttacctctgggcaatgggattggagagatggaaactctcttatttcacaaacttgtcatggtggaattgtgggatttttcttttttgtacttttcattattttgtggtgaaaaatcagatcttctaaaagttgcaaactttaagaaacattgccagcctgctcaagataggctgagctgcttttttctgtgggctgtgccagctggaggtgtagggcagatccctcagggggacccacgattcctgaacgccaagggaatccacagctgctgatgggagatgggaacccacagcagctgttctgtagcccagttttacaaattccatctccgccttgtttttttgttttgtctttgtattatttttgcatttgttcctgcctcttgtttggtttgaagggatggaaagctttcctcatgaggggcagttttttgtagccactgtaagcagtcttcagaccttactttttttctcagaaaaaggaggaggaaaagcttgaagaattgctattcacagacgattcaaaaattggtcctaggctgggcacagtgcctcacgcctgtaatcccaccactttgggaggccgaggcaggtaggtcacctgaggtcaggagttcaagactagcctggttaacatggtaaaaccctgtctctactaaaaatacaaaaattagctgggcgtagtggcaggcgcctgtaatcccagctacttgggaggctgaggcagggataattactggaacccaggaggcagaggttgcagtgagccaagatcacgccactgcactccagcctgggagacagagcaagactccatctcaaaaacaaaaaaaaaaaaagaaaagaaaaaagaaaaagaaaacaacaacaatgaaaactgatcctaggcaatagtttgggttttactttcactatcatt

SEQ ID NO: 36726 - DNA, 1028 bp, Homo sapiens
gaaagacactgacattgaggattcctggatgaaaccaaatcaagtccagccaaatcatatgctgtggccaggcgctcatgcctgtaataccagcactttgagaggccgagatgggaggatcacttgaagccaagagtttaagaccagcctgggcaacatagtaagaccccaactctacaaaaaatttaaagaagaaaattatccgagtgtggtggcaagcacctgtagtcccagctattcagtaggctgaggcaggaggattccctgagtccaggagttcaaggttacagtgagctatgattgtgtacattgcacttcagcctgggcaacagacacctgtctcttaaataataaaataaattttaaagatagaaaacaaataacgtactgtgcaactcacagtccacaaaccacactctagtcagcattttgggctcccatccttaaatatgagcagaaaaccaagattccagatatccgaggaaagcctctaacagagaaaatagagactcaaaccaacacgtggtgaagggagggcttggaggaaacaaggagtatgcatgaagaagagaccgttaagagaagctatatggtcaggaaacaagaacacggtactacattgtttaaaaaggaaccttcagagaataaaaaagagctcatggaaattaaaatatgagagtagaaatgaaaactccaaaggaagactggaaaataaaatggaggaaaccttctaaaaatcagagcaaaaatacaagattgaaaataagaggaaaaaaaaatagactacaaggacaggaaatctactatctgaggaaaatatgttccagatagaacagaggaaacagaggagaaaagcatcgctgaaataattcagaaacatttcccagaactgaaggaggagaatttttagactgaaagggttcactgagtgtccaacacagtggatgaaagtcagctcacaccaagatatctcactgtggaacttcaaacactgggacaattcaagatcctaaaagctttcagagaga

SEQ ID NO: 36727 - DNA, 1026 bp, Homo sapiens
agagcaagctctggtctttactgcagggcgtgtgctgggggcttggatgtgtgggtagagggatggcatgacttggcttttccatggaaatgagccctttctcccaggccccaggctgggttagctgtatcctagtttcactccctagtccagggatcaactagtcagtcatcccctcttcagcaggttgacatgaggggatggaggccaacagtggaacacatctgtccatggaaggtataataatatgcaggtctttcagcagagctcataaactgtgcctggcttcatctggagaaaaagtcatccattcagcaaatattgagcatgtctacatggtgggcactgtgctgggtgctaggtgctgggtgagcaagacacagcctctgcctctctgccatccccatacagtgcagcaacttgcaaaccttggtgtgcctaaagatcacctgggaggcttaatgaaaagagagatttctgggccctacccctgggctttttgattcagcaggtcaaagtagggcccaggaatgtgcatttcaataagcactctccgctttctgatgcaggtagtctgtgggccacaggcggagaaagactagtctagtagacacatgagagcagcccaggtcacgagtttgtgagggcacaggcttgctcgatagggccctttattttgtagtgggcccactccaggggttggagagccattccaggggcaaagacacaccctggagtccacccaagctgccctccatgggaggtttcaggagaggtcagggctgagatatggtccaaaagccagaggtctcttccaaacacaaggatttgtctccagggagatagtttactgaattgggctttggtgtcaggcatgcctgggtgaaaatctttgcttccagttctgtgacattccgtcacatccactaacttctcccgactctctggtcccattctctccagctcctttgctgactgttgccagtccatccaacctcagaatgttgtgtgtactcagagcttggt

SEQ ID NO: 36728 - DNA, 1021 bp, Homo sapiens
gagaccatcctggctaacacagtgaaactccgtctctactgaaaatacaaaaaaacttaaccggctgtgttggggggggtccctgtattcctagctactcgggaggctgaggcaggagaatggcgtgaacccgggaggcggagcttgcagtgagcagagagcacaccactgcaccacagcctgggcgacagagtgagactccgtccccctacaaaaaaaaaaagtgaaagcggaacagttccattaccttttatgcccaggtggggagggatggtaggaagatagttcacagtactctgtcctgttacggctgtatacttaatcagcagtcacaaagtacaagttagtcaagtaaattggcaagctctttacatttctgagccatttatttatcggtatgtatttatctttgcctcacttggttgtgataatcatgaaggtaatttctgaaaagtgtttttagctcagctcctggaacataatgtatgctcatttttggcaatttggttttggctgtagctatctcccagtaagtattctgaaatttcaggtgaggaactccccctgagttttgcagtttaagttggaagctttatttctttctgaattgacatgtctttagttttagatgttaaactacaaagcctggtctggtctagtctaggacctaagacactggaaacaggaagaaatgggaaaattgtttagtcccagaaagggtgaaaggcagacccttgagctattttgaatgtgacaaaggacatttgggttttttaagagtcccaggtcataggatttgggaataaaagcaggttggtcaacctgaaacttaactactcttgctaaatcagagtgtttatcgagccaaagaaaagaactagggatatgagacatgaggcatatcccattatatacttactccgattcctgtctcccaaaacacatgtatgtgtggttaatatattctttttctttttctttttttttgaaacagagtctcgctctgtcaagcagactggag

SEQ ID NO: 36729 - DNA, 1032 bp, Homo sapiens
gcttatctgtgatgtctcccgccaaggtgagtttctgggctttgttccttcgtccagcaaatactatgtatatcatttcctggagtcttcattttgatttgactttgagtgatattttaaccttctaaggacaggcaaatagattttttcttaaatgtatttctgaaacaaccaataaattttgaacctgccataagacaggcaggttcaaatcttaactttcttagaagtcagcaaaaattaattagaaaataaagtggaaaataaaaagaaatcttattcacagtagcaacaaaacctataaaacacttaggaatgaatttattcagaaatgtgtaggaccaaaatgatgagaagtgtacaatgagatgtaatagaatgtttggatagagtgccagacccagttccctagttctccaaatttatttatgattttaaggcgatttcaagttttctaacttgacataatagttttaaagatttctttgaagagtaaatgggtaaagaacaaccagtagatctttgaaaaagacgattaatgatgactggcttgcagcactaggtaataaaatgttttataattacagtaagtaatactgtgtcattgatgtattgctacatagacaggtaagtggtttaaatcaggaaaaaccagaagaaaattcagtaaatattgatcactagataggaagagcttttttttcttctcatttacattttttaagaattaatttttttaaaagttatacaagaaggacatgttccttatataaaaaagtaaatgttgggaggccgaggcgggtggatcacctgagatcaggagttcgagaccagcctggccaacatggtgaaaccccatctctactaaaagtggaaaaattagccgggcgtggtggcacacgcctgtagtcccagctacttgggaggctgaggcaggagaatcgcttgaacccgggaggcggaggttgcagtgagctgagatcacgccactgtactccagcctggctgacagagcgagactccatctcaaaa

SEQ ID NO: 36730 - DNA, 1059 bp, Homo sapiens
aaaaaaaaaaaaaaagcagttgggaaccaagtttagtgtttaagtgtggaaaactgccagaacatctgacctgtgctctgatagcaccctgagtatccaggcaaccttgatggttaacattttccaaggtttctaatagatcatggtgaggaaaaaattatgtgctttctttagctctctaataaatatatttcaaaatattcttagaataactaaatatttacatagtagaatgagtaagcattcattttccttcagggttcttttaactttattaatgaagtgttttttaccccctaggatttgtgcaggtggatgatggcagaaagattgtatttgtcccagggtgttccataccattaaccatagtaaaatcagatggaggttatacctatgatacatctgacctggctgctattaaacaaagactatttgaggaaaaagcagatatgattatctatgttgtggacaatggacaagtgagtttgtaaatttgtatgtgttttacattgactgattagaggtaagacagtatggtgaggttggtgacatctgacactggatgactgtaaattttccccaaagactaagattcaggacatcagtatagcatagaagaaagaagagggtttggacccagccaaactggacacttcctagttttccagcttgcctccacaaactggaacctctgaacttcagcaattgttcctatcagtagggttattgtgagacctaaaatgtaattgaagtttttgcatgtgaccctgcccttaattcagttgctttaaaaacgtttgaacatagtagaaaatgtaacagtgttgctcttagtgtttctcatatatagggaataaaagaagaggttttataatagcacttgtctcacaagatttatgagcgatttgaattttacagatctattcctaagcaaaagagccttaagtctttttttttttctttaaagaagactagcaagtaactttccgtttctgttgtagtctgtgcacttccagacaatatttgctgctgctcaaatgattggttggtatgacccta

SEQ ID NO: 36731 - DNA, 1001 bp, Homo sapiens
tctgaacggggccctagcatcctgaggtttttttctcttttttctttctttcttttttttttttttaaaggaactggcccaggtgcagtgtctccagcctgtaattccaacactttgggaggctgaggtgggaggatcacttgagaccaggagtttgataggagcctgggcaacatagtgagagacaccatctctataaaaattaaaaaattaaccaggtatggtggctcgcacctatagaattagctacttgggagggtaaggtagaagtattacttaagcccaggagttcaaggttacagtgagctgtggtcatactacttcactccagcctgggtgacagagcaagaccctgtctctaaaaataaataaatgagtgaatgaagcaagcaagcaactggctgctcaagcatctttcttaaaccttgccaggcgattctggtatgaatcaaggcttggttaccactgaacaagaggaattagtatacagagaaattcaagtgagattttgtcaaagaatttactgactttctcaacaattctagaaacatatattttgattagtaatttttctaaaaaggtgaaacatctaagccaaacttagtattccaagaaagcaaacaaattaacaaatatcttctttctctgttaggaaacttattaaaggtaaatatgtagagagtgcttttgagggctagagcataggatgctttgagttgagggctagagatgaaagacacttgaaagcacagtgtttcatgtagtactctccttgcttgatgactggcataaggcattgttaccattggcatcaaccctctcttaatagttctcaggggcaatatgtaccttagagatttaaaacatatgttgcagttttgtggtcaggtctctcaaaccttcattttcaaagatttctaagttgaaaagtctgtttcaaaatctgattgggggttttacattttttaggaaaaagtttaaaacacgttcgggtgaaacag

SEQ ID NO: 36732 - DNA, 1801 bp, Homo sapiens
ctctttaatttttgatcccaaatcagtaacagaattgtcagaacagttcttgctcttggaacaagaatgcaaatttgactacttattagtcaggaagaaaattttaatgtttttatacgacagtagtattgagtagatatgtttcttctgttattgatattattgcatggagttttttgtataagcttaagtagttttatttcctctatttacagttggctaaaaaaaagaaaagaacatggaggcagatataatcacaaatcttcgatgcaggctcaaagaggctgaagaagagcgactaaaagctgcacagtatggtttacaactagtagagagtcaaaatgaattacagaatcaattggataaatgtcgtaatgaaatgatgaccatgactgaggtaggactctggactcctctgtctgcaagagtgtgcttagctattgaagatttgtcctgtttagcaattaatagtagtagtagtttattcttttctgaagattttagatctagttcccgccctgccccgtccctgttaaaaaagaatgaactaaatgaattcctgttattctttccaccctagtgtattcagagtttgaaagatcaagttatcattactctctttgccacatttactaccagattttgctttgtctgcacacttcctagaagacctcacttgttttagacctctaaacatctaagtgccccatgacactacaccaagcccttagttcccccatgaaatctaggtttgtgttcaactgcccactaatagacttctcaaacttaacacagacagaagagtggattccctgtccgttaaccaaatattcttttacgattttttttagcttatttagtaaatataatagcattcagtttcttgaacaccaaaaatctttatataccaaagatttttggtatatttttggtttctttatataccaaaaatctagaacttttagtcaatatcttccctttatttctcacatttcactcattaataagttctaagaactagactacaaagcatgtatctttgctactggcactgtagtccagatcaccatcatcactcctagacaagtattgtagccttctggccgggttgcctgcttccattgttgccattcatgccattcattcttcactcagcgtctaagtggtcgtggaataacacaccaaaggtcatgccacagccctgctaaaaaccatacaacagcttctgattttatttacaacaaaatctgagctccatccttgggtttgtagatccctatgtgacctgacccctgccaagcttctgacctcacctcaaactgctttgccttgttcttgactatactggtcctcccttatgggctttacaccagctattgccttttttttttttttgagttgtttacccctcactgctcttgggttgagtcctcagatttcagctttcatttaaatgtcacttcagcggagaggtcagcccttactatgtaatgtaaagttgccctgattcactttttttttcttttttcttttttttttttgaaacagggtctcactctgtcgcccaggctggagtgcagtggcgcaatcttggctcactgcatcctccacctcctgggttcaagagattctcctacctcagccttccgagtagctcggggttacagatgtgtgccaccacatccggctaatttttgtgtttttagtagagatggggtttcaccatgttgaccaggctggtcttgaactcctggcttcacgtaatctgcctgccgaagtgctgggattacaggcatgagcc

SEQ ID NO: 36733 - DNA, 1044 bp, Homo sapiens
tgtttgtcacatttttgggtgatttttttatatctttctagatttccaagagaaagaaatttgtacacaaatgtaaagatggtgaacagacagggctgaaagtatggactgccaggcatggtggtgtgtgcctgtagtcccagctacttaggaggctgaggtagggggatcacttgagcttaggggttctgggctgtattgtagtgtgctccaccgatcaagtgtctccactaagttcatcagtaatattgacctcccatcaatatgggaatgggggaccaccaggttgcttaaggaacgatgaactggcccaggtcagagacagagctggtcaaaactctagtgctgatctgtagtgggaccatgcccttgcatagctattgcacaccagcctgggcaacatggcaagaccctgtctcttgaagtatagactaggacatcatctccaggtcgatgatgatggaaataaagagtggcaatttgggcaggttgggggagacaacatgtatttggggtctgtagacttgtatttgactcagaatttgattatttatcattaatcttgaggaatttatgtatatttgatctcagctttagttttttaaatctgtagaataaatatactgaaaatacatacttcacaagagcctatttttcaggattggtttgaaaaaaaggtggaaatacttttgtaaactataaagcactaaaataaatattatctattttattttaagaaggaagaattccaagagatccagataaaagccttcagggatactcaggaaaaggtagtaagaggaagaaaaaaagagtttgtgggaaatgagtaacttcaaaatgaaggcagtttctgtttattgtaatcaagaagcttaattccagaaggcaggaaagatacaggaaagtaattgaaaagatctttaaattcaattgaagaggatttttgtggcttattaatgttttactattagggaacatttatttcctgaaacaaaaacatttattctcttttttcagctttactgaagtacaattgataat

SEQ ID NO: 36734 - DNA, 1029 bp, Homo sapiens
ccgttgattttgtattgtgagacttggctgaaattgcttatcagcttaaggagtttttgggctgagatgatggagttttctagattgtaggatcatgttgtctgcagagatgatttgacttcgtctcttcctatttgaataccctttatttctttcttttgccagattgccctggccagaacttcccatactgtgttgaataagagtggtgagagagggtatccttgtcttgtgccagttttcaaagggaatgcttctagcttttgcctattcagtatgacattggctgtgggtttgtcataaatagctcttattattttaagatatattccatcaatacctagtttattaagaatttttaacatgcagggttgttgaattttcttgaaggcattttctgcatcattctatttttctgcatcattctattgagataatcatgtgatttttgtcattggctctgtttatgtgatggattatgtttactgatttgcatatgttgaaccagctttgcatcccagggatgaagtcgacttgattgtagtagataagctttttttttctttttttctttttttaagacggagtcttactctgtcacccagactggagtgcagtggtgcaatcttggctcgctgcaacctccacctccagggttcatgagattcttctgccttagcttcccaagtagctgagactacaggcacgtgaaaccgtgcccggctgatttttgtattttagtagagatggggttttgccacgttggccagactggtcttgaactattgacctcaggtgatccacccaccttggcctctctaagggctgggattacaggcgtgagccatggcactgggcttggataagctttttgatgtgctgctggatttggtttgccagtattttattgaggattttcacatcgatgttcatcagggatactggcctgcagttttcttttcttgttgtgtctttgccaacttttggtatcaggttgatgctggcctcataaaatgagttagggaggag

SEQ ID NO: 36735 - DNA, 1022 bp, Homo sapiens
ccgcctactcaagcttcagtaatggtggacgcccctccccccaccaagctggagcatccaaggttgacttcagactgctgtgctggcagcaagagtttaaagccagttgatcttagcttgctgggctacgtgggggtgggatcctctgcgctagaccacttggctccctggcttagccccctttccaggggagtgaacgcttacgtcttgctggctggcgttccaggtgccactcggcacatttcttttaaaggtgcttgaagatgaattcccagaagtatgtagatttatgacctccatttatccttccggtgaggaggatgtcataacttgacctcataatggcatcttggcaatgaaggaacttaatgagcaagcagactgtgtgttgcccattgacagtctttatttgacatcattagcaaagtcgacctcatagtgaattctggaaagttgggtacaactgtagacgacttcaagtgctgtggctttaaaaagcagaataagccctttgttgcagtcaacaacattgtggcaaatttgctcaacctaacaagctccgcaagatttgaagggtcccttaataaggaccataatgaaatcagcatgaatttagttccttttcctcagcttcattatcttgtatcaagcctaacacctctatacacactggcggatgttaacattcctactaaaagattggatcagatgttttcaaatgcctttagtaaagatcaccagctgcttcaggcagaccctaaacatagtctttacctcacctgtgtgctcatggttagaggaaatgtacagattttacatctttgcagaaatattgaaagattaaaaccatctctacaatttgtctcctgaaatcaagaaggctagaccagcctgtccctcctgtggaccatttttattcattattagctttagcaaataacacatatgtgaagcccacattcatggaaatgaaagagagattcatgaggctctacaagaaaaaagctcaccttcatcactgt

SEQ ID NO: 36736 - DNA, 1047 bp, Homo sapiens
gttcagtatgaagggtcatcatgagaaagaaaaaagtttaatatgaagagttggcaagagatgtcaacatatctttcagggttataaagagaatgaattagattaagtgacctagaagaggagagttgcaacttgcttatagaaagggataccaagaaaaaggaagctaatttgttctcccatgttccagaaaaatggtggcacctaaggtacctctgaactcagaattgggaaatggggctgacggggtttgataaaaagtctgtactctgaacagttaaactctccaggatcttctctaccacctgtgcagctaggtgactgccttttcctcccttttctctacctgtgctacttctttactttccaagaccagagtttttttcctcaagaaataaaattggagaggcctcatattcatggataccagatataatagaggaacagtattaattttgtgaaaaacttctaatatggagatcagagactacaacaacaaagggggactttgtgttctgtatcttgactgtggtgatggaaacatgaaccaatacatgtaataaaaaatttcacagactgaaaacacacatctacacacacatgagtacatgtaaaactgggaaatctgaataagattgtggattttatcaatgtgagtttcctcgttgagatattatactgtagttttgcaagaaattaccattgtaggaaaatgggtaggagttcacggggtctttctgtattattttttgcaactgcatgtgaatctacaattatctcagaaagtttaattttaaaatggagggtagttaatagcaacagagacaaggtgaaagtagaaataaacttcagaaagatataaagaatatgcccagagagatgttgagataatgcatccctgaaacaaggacaggatattgttcagagaatgttccaaatttacaggacagttgtcaaaataaaacatccagtggaaaagttgtaagacaaagttaacccaatctcctagaatgtagaacaaaaaagcaaggagatgtttgataggag

SEQ ID NO: 36737 - DNA, 1025 bp, Homo sapiens
tttctttgcttgctcttaaactactgaagtgattaattcagtatgtccaccttatgaactagaagacataatataaatctgaatgttaatattggagcaagtggccttaaattatgaaattatgttttcttgccctcttgtggacaagtaagagtttgtagattttaaaattttttctgcattaactttagagcttcattgccaatattcatttcagagaattgcaaagctgctattgagtaatttgggtgcttacataaaatattttgttttactttttattttgattttggtttaaaatatctgtaaaatacagatttttaaaggttaaatgatttaaggaggtttacctaattctcttggttattaataaattttggggggtgacatatatcttcagtaagaatgttctacaaaaagcaattgtttttgcatattctcagaagtgttttatgggttatgcatttattttatcttttcaatgttagtatagttgtgaaattttctgttttgctgataaagaggattttaccaatatactttaaaatgtttagttgtttaactcactatcatcaaccaataggtggaagataatatgccgattcctgataatttctcttaaatgattttccaacatccttacgttaatgtttcatggctgtaaaagttggtatgaatattagattgttttagaatcacaaacatgttttaaagatgtatgattacaaaatttttttggttatttttctttaataggtactattttctatatatttcatggagctcctatgaatgaaattgcttagagactttcagttttacaaagatactttttgaattctgtttcatcccagctacagtgcatactaaaactgttttcaaggagcttacagacaactgggcagaccttttttgttacttccttttaatctatactcctccaaaatttacctgggtgaattttgtttttgctcaactttagttatttgctcaactttattccttacattgcagtaatttgtttg

SEQ ID NO: 36738 - DNA, 1298 bp, Homo sapiens
atggtaaatgtatgtttaatgttgtaagatactactaaacagttttatgaagtggatgtatcatttttcattcccattaacattgtataagagtttcacttactctgcatccctgccatcatttgccatctgtttaggcactctactgggtgtctagtgttatctcactgtggttataatttgcattccctaatgattaatgatgttaagcatcttttctattcttttttgccacttgtatttcttattttgtgaaaagtctgttgcccatttttaaattggattgttggctcttttgtatgtgttagggaattgcaagagtgctttatatgctctgtattctgtatacaatctctttttcacatatatgttttacaaatatttcctcccagtctgtggtttgtcttaactatttttcaaaggtgaaaagtttttaattttgatggtctactttttcacttttttctttatggcttgaggtttttgtatttatgaaatcttttctaacctaatgctatgaagagttctatgatttctgtaagtttaatagtttcagctattatattgaggcctgtgatccatttggtgttcatttttgtgaatgttgtgagttaagggtcaaggcttacagttatccagttgttctaacaccatttgtagaaaagaatatctttctcccccattgaatcactatgacaccttggtcaaaaatcagttgaccataaaatgctagagtctattagtggactttttgttctgtaccactgatctatatatgtttatccttatgctaatactatattgtcttgattactgtagcattaataattcttgaaatcaggtaatacaaattatttaaccttttttttttttcaaaaccgtttggctattctaggtcttttggctttactaattaattttagcatcagcatctcagtttcttcaaagtaggtgctagcattttgatagggtttgcctcaatctatacatcagtttgggccaggttaacaacattgaggcctgcagttcatgaacatttagttttctttgcaatattttattgttttcagtgtacagttagtgaaattgttcactgagtttattcctatgtatttttgatgctattgtaaatttcctgattattctctgctactctattaaaccagaattgaattttgtctttgtgtcttataactttgcttaatttattagttctaataactatttcatagattcttaggattgtctatgtgatcatgttgtctgcaaataaagatagttttatgtcatctttccag

SEQ ID NO: 36739 - DNA, 1006 bp, Homo sapiens
aatgactgctagtatccatgggagaacagaaagaatttgttctttttctaacttttatttgtcctttctgagtcttctaacaagcagatagcctcttttcttcattattcagttccataccttttaaaaaaacatttttacttgaaagcgtttcttaatcagaaacaattgatttcagtattatgaaatagccctctcatctttgaaaaatcagtctccaagaatagcataaaatttgtttttagcaagataattttatgttgttaattatttgtaaaggtctcaaaagtactgaaggatcacctagatcaatgaatccagagatataaaataatataccttaagcaaaaatcattgaataaatacctccatttctaaattagtcaatttcagctgcccccaaagtaagatttatgaaaactgtagatgttgccatttgtgccactgccttaaatctatttaatcctctactactatcagctgtgaagttaactctaccatcaaacaatgtgaaatcttggattttttaatacatcatgcataaaaatacagaaggaacaaatttattactatctattatgttccaagcaggggaaatatttaaaatgatcacactggtactatcatgacattgaccattcagaaaagatgctggtccttggatcatgagagtacatcctgactgaataacagatctggtcctagacagtttagtgttttgtactcaaatttattttcagtcatgtcttcatggtagacattgttttttccattttacaaatgaaaaccctaagacttaaagagataagtaacttatgcaagatcacatagcaaattagtagagctgggattcaaattagttttatttggctctaaattctatgccattttcagtgttctactgccttgataaacttaaaaccgatctgctttctatccagaactgagttcacaataatttatcactcatttggaagaacagatcattgtgctgattttggaattt

SEQ ID NO: 36740 - DNA, 1066 bp, Homo sapiens
ataaacgtatcacacatcctattaggaaaaaaacctcaaaacctgtttataataatctaattcttaaatctaattcctcagcaagttctccataaatcttagcagtactgagaatatttggtatgcaaagggtacttttaaataagtagctttatttataaatataggaaataatcactataaaaacgcttgtcaaaatattttttcttaacatgttggcaatacgtagcaagtttttaaaaattttcgtatgctgtgacctagacgttttgtttcgagaagtcattgagggtaaaggaggggaaagtagttatgttttacttagaaatatgaatttttatccaaaataagatgattaaattttgatgtagccttaattttatgcaaccattaaaaacagtgctttggaaaattatttaataacatggtaaaaataattggtcaagatatatttagtgtgatggattgtagaaaagaataaaaggttcagtaagtgttctgaatgcataagtgaatcctagtatatatgataaatacttcataatggtgaacaaaagatagtctgtacaggaaataaatggttttgaagcaactgggtaggcatctttaaaaaataatgttagctccttgtctcacactgtataatcaagatgaatctcagtgtatcatagaggtaaatgtagaaaacaagaatcacaaaaatacctgattcaggtaagaccttgctattatgcaaaatccatgaaagaaaaaattgaacaaattttctgcatgagaaaaacaataacaaaaacttctgcatggcattaaacattataaagcagtaggccccagggactggtttagtagaagatggtttttccatggaccggggcaggggatggtttcaggatgaaactgttccacctcagatcaccaggcattagattgtcataaagagcacacaacctagatccctcgcatgcacagttcacagtagggtttgcactcctgtgagaatctagtgctgcagctgatctgacaggaggcggagctcaggcgataatgcttgcttgctcattgccca

SEQ ID NO: 36741 - DNA, 1052 bp, Homo sapiens
gcctttttaataatcccagatgtgatacttgaagattgaatataaatcaaatgatgataaattttcttgtttaatatgtccagagagtatctttgcttttgcaaaagggttactctcaaaatattgctaatacagtatccatttggtgtaggtcttaaatcaaaacagtataatatggagtagaaaatccttctaagtgttgttttgaaggcacctggaaggaactatgtaaaatgagactagttgttttagggctatgggatttcggattttgtttcaaaacttttaatataaggtaattgtgaaaaaaagcgaattacagattagtttttcgtttttgaaaaagcttgcactttaggaaaaagtaaacacatcaccagaatggtattgactcctttattgtaactttaacattgttggtgtgtgtatcttaccctattaaaggaagttagtcctaaggtgacaaaatttctaaggcatttctattgcataaccccagagtgaaactaaatcttcctactttttggtttctctgacttacctgccaatctgtcttaatagaaatcattttcagaagtccttaattatgtgtcccgtcactctcctaggtactcttcatgctagctttattccttacagtaggcttgcaaggttggtattaatgtcctcattttactaatgaaagaacagactctctaagacatttcgtaagtactatatatacaatttttttagcaaccaactacgtaaggaagagtgagtggaacatatttcttggtgggtgtattgtctgattccaaattgtggcaaaaagtgggagaatactagataatagcaaatgaatgtttaacaattaatgcgtgcttattttgtaccaggaactgtgctaagcacttttgagcagtctcatttaattgtatcatgtagagtatgacttcaaggttcttcccaatctcttttcggcatatgtcaccagcttcatacttcagtacaccatacttgcactgcatactttatatgtggtaaacttatttcaggttcttcagcagtct

SEQ ID NO: 36742 - DNA, 1120 bp, Homo sapiens
tgcttatgatgaaactttgcctacctttgaaatcatttcttttcattccactttatgacatgattcatatgtgctgctgtcttttttcctttggtttattcctgttcattactcagtgactattgataagtaaccactatgtattaatgccagggatgcaaaagtgaataggatcatccatctcccctgtaagtttttagttaaagggaacatggacaagtaaggaaaaaaaattataaaattgattcatatatgcatttaaacagcatatgatgaaatgaagaccagacaaactattaaatacatactgctgggatttttggttatctgtatgtgaaaatttggattaagacttcatatcatgcaaaaatcaatttctagtagaagacagactctaaatatgaaaagcagaatactatgatttagggatagggaagaattttttaagacataaaaaagctaagctctaaactcagaagttggtaacttctacctatattaaaagtaaaaactcctgtgaatcagaaaacacaatagacaaagtaataaagaaaagctgtaggaatacattcataatacatgtaacttatagagaatcaacattcggttatataatttctgtgaataaataagagaaaagctacctactagtaaaatggccaaaatacatgaataaacacttcacagaagaagaaatcacaatggccagtaaacatggtcttagtcctctgggctgctgttaacaaataccataaacaacaaacatttgtttctcacagtttgagagcctgagaagttcaagatcaaggctagcagattttgtgtgtggtaggagcccttttctgttttcatagttggtgccgtctctctgtgtgttcacatagtggaaagggcacacaaactctctcagaccacttatgaggacactagtctcatccatgagagctctgccctcatgacctaattgtctccaaaggccctacctcttaatatcatcatgctgggaattagatttcaacatacgattttgtcagggacacaaacattcagaccatagcatttcacatttgccccacaaagtgcatgtccttctcatatgcaaaacacgccattccattct

SEQ ID NO: 36743 - DNA, 1034 bp, Homo sapiens
taacccatttttcatgataattatggaaaattattttttccaatgacatattttggaaactttcaaacccacagaaaacttaataatttaacaaatgccttcatactgtgcattttgccacatttgttttacctctctctttctacatctatatatacatttatgcatacatatgatatataacctttttttggtaaaccatttgaaaataagttacataacatcatgagagttaacccctagtattttttatatacctcctgagaacaagaatattctcatacacaaacgcaatactatgattacactcaaatgttgtaatgatataggaatattatttaatacatagttcctagttgtttctcgtttgtcccagtaatgtcctatataactttaaaaaaaatatctgaaccggacatgcattggatttaatgtctctttaatctaacatcgttttgctaccttttatgttttttcatgattttaacatttttgaaaagtccaagccactgttttgtagaaagtcgtactatttgagctattctggttattgcctcagtaatatatttgtttaaacaaataatatatttgtttaaacaaattatattatttgtttaaacgaatatattgtttgtttatttgtttaaacaaataatacatttgtttaaacaaataatataatttgtttaaacaaatatatttgccaagaatactgtgtggctgaggaaagataattcttaataaattgttttgcaaaaagagcacttcagagcaatgaactatggagcaaaaggcaaaatgacggaaacagcaaccttaagttcatatggttatcctggagatactgattctgcattgcattgtcgttgcttgcttttcatttagctggtcttacatgaaggaaatgaactgatatttagtatttatccaaggtaaaattctatagctgtttttgaattgccagtctttttggtttacataagcccttgctgaaaacgaaaaatctgctgcctggaatctatatattatagtta

SEQ ID NO: 36744 - DNA, 1026 bp, Homo sapiens
tcttagaaatgttgtctgtaccacttgtctccatgccctcatcaactgctcatttctcagcctgttctagatatttttttaacatactagtatcaggttgttgcagcactattagttgaaaaggctatcctttcttccatttaattatcttggccttttttgaggaaatcaattaactatatatgtgtagatctttttctgaactctctattttgtcccattgatctttaagcctatcctatcccaatatttggattactgtagcttctaataagtcttgaagtcagatagtgtttaaacctccaaattcgatattcttttttaaaaatggctttggctattttagttttgtgcctctccatgcaaattttagaattaacacatgcatttctacaaaaaatagaagagtatggtgtttattggaattgcactgaagttacagatcaatttgtcttaaaatttgacattttaagaatattgagggtttttgtattcttcctgattctctttgtacttggttctctcagttgttgagggagaagtcttaaagtgtctcttactatggatttatcttctcacacttctatacagtttcactttatatattttgaaactctgttgttaagtccacaaatttttatatccttgatgaattgacctctttattattttgaaaagaccctctttattcatgctaatattctttgctccaaaatctactttgtttgatattaatatagcaacttctattttcttttgattaatgttggcatggtatatctttttttcatttttttatctttaacctatctatgtctttatataaatagggtggtaggcagcatatgattcagccttctttctttctttatcctagatgaaaatctctaccttttaattgagctgtatagaccatttacatgtactgcaattattagtatgcttggatttaatctactgttttccctttttatctgttttattcaatggatttttgcctttctttggatcgaacatttagtattt

SEQ ID NO: 36745 - DNA, 1050 bp, Homo sapiens
agctatacagagggatgctgccttctcctgcccagggaacttagcgtgttaggcagttgtgagtcccagtgttgtttcatacgcctcccacaaggagctcaaatggcttagacagcaggcaaccgcagctatggtgctggttgcccctccccctgggagcttggtaggcttaagcagattccagctgagaggcggttgacaatctgtagggctctggggttgggatgctagccccagtggtgtggttttgtgagtgagatcatccaatccatgggttgcacagttctgtggaaaaagcacagtttcccttgctgggtagcatgctcattcactgcctcccttcactggtgggagggggctcccctgccccatgtggctcagatgggccactacaccacattgttcttccttcctctctggatcacactagtctcctagtcagttctgatgagagaacctggataccttggttgccagtgaaggattcacatgcctattatagttctttttaatgggaccctctgaacgccgctgttctgtttctagtcggccatcttggccctgcccccaatatgcatctttatctacttcctcaatggtattacagtacttcacttctaatgtaagacttttataacttttatatttctgtcctttgtactattgttcttatagattttacatctacatcaaacctgtcaaaacattattattttttaattgcctattaagaaattgaacagtgagaggaaaatttttgtcacatgtgtgctatttacacttcttttctttgtatagatctaaattttgatgtgatatcctttttattttctatttgaaaaactctttaacatatagtacagatttgatgaaaatggattctctcatctactttttttctaggtgaaaaatttattttctccttaattttgaaagacattttcactgggtataaaattccagtttggcattttgtttttctttcagctatttaaaagtgtattccactgtcatctggctttcatagtttctgacaagaagtctgtgaca

SEQ ID NO: 36746 - DNA, 1699 bp, Homo sapiens
taggttgcggactcctcatgagactctaatgcctatgatctgaggtgggacagttttatcctgaagctcccccactatccgtccagggaaaaatttggtcccttgtgccaaaaacactggggacctctgctttagaacatgcagtaaaacttgaatggattgtttaacagattgtttctttaatgaatttatcacataaaatcaggcattgctttgaaaaagtgcagtttatttcactctgttattactgcgtggttccagattgttaaagattcagctactttaaagcagtgtcttaaagaattaatttttgtcctttcagcattggcagattcatttttgtcatggaacatcttatctccttatgatgcttttgaagtattaatataggtggaattacctatgatagtttggtggaactaaactctttgtcactttttctatttgtgagatttgcatatagtattgtagcttttttctgaaattttttgttttgcaacgtgccttcataagaaactcatcgatttgtatatttaaaaagaggctgtaaagcatttgaactagccccagtaggatcatattataattaataataataataatattaatgtcaccagggcttgcataacaattcataataattgtctttacacttaagtttaactactaaactttgtagcctaatatagtgatttttatcacaatgataaacttttttatttacctcttgaactgtatgtaagaacagagaccagtagacctagtttttcctggttattttgtagaacgggaattgggaactggaattgaggaagtgatttcaatttcatgtaaatttttctgctattaattagttggcctattaaatttttagagtagctattgaacttttgcaaccagttttattttgagtactttattaaagtatcatctgttagcttttcatatcatctcaccatattatcttactgaggtaaaatggaattttttgcttactgattttttacataagaattaagtgatacccatacataccaataacattgaaattccaggctttcccatgaaggaaaacagttaaattaatgctagatttataaggcactacaaaaaaaagcactaaataaatttttaatttaaaaataaaaaattaatagtgttgatggggggtggaatagacattgtagaatcctaatactatttaatgttgttcatatgtgtaagaaagacacattatattttaaaatatagattctaatattgaaagaaaaaaatcatcagttttggagatgaaacgcatttttaggaatcttatatggaaacttcaataaggacatttttataccagtggaaaacctgattggaacaccttagagacatattaggcactgttgtttggaatgccagataagttaacctctgtaagatatatattcttataaatcactgctagcatagctgtaatatgtgaagataatttattaatttggactgatgctgaatgtagacatcttccatatctaaccttaagcatttaaaaaaatattttaggactaattattttgtccaaaaaagcaatcttttgattattgatcttcacagaattgatttgtaagatgtcatgatcaattgtggttagcatctttattattatatccattccaagataattttaggcttttgataccttgataccttt

SEQ ID NO: 36747 - DNA, 1024 bp, Homo sapiens
tgtttatgatcatcttcacatttagttttcaagacaacgcagtttagttttcattacagtttggaataaagaggacagggagtaattgattgcttcaagcagattaaaatcaatggttttcttttcaaagaaccagttcaatgcagtaattccaactttaaacattgatttagaggactcaacacaaaatgttttgtgctgtgtgaacttttatataggaagactaatattaattttattcccctgtatatctgtatagtgaaatatagaggttgttagtaacatgtgcatgacttaatagtgatctatattaagtcattttgatattattgcagtcatataatgaatcagtgagattcccgtcatcactgtaatactgtttgtaacccattagcacagagaaattacagcccatcatacatcattactgtgattgaggctttattaccatattctcaaattgcttgcttgctataaaactaaatagacacaagacaactataggtagagtagagactgcgcattattgtgctacagtaatgagggattattgtaccataatgggttgaaacttatgaggaaaataaacttggcagtaatagaaaactggagactctttttacatttgtttttattactttaaaggtcaaatatatttgttatgctcaggttattgtttatgtattacatgaatcatagccttttaatattttctaaagatttttttcacccccacccccacccccaattgtatcctttcaaagtctgtggcctgatgcactttgaatgcttaggactggacttggaatctgtgtttttcctgttgtgagatgagacgttttactgctactaagcctaccatttctgagggtaggtagaaagctttaaactttaggctattttcagcatactatacattttgtttacagtgtggataggccagtggtcttcacgctcttcagttgaaataaatgtattaatgcagcaatattctaagcaatgaatacagatttaaaatatggaa

SEQ ID NO: 36748 - DNA, 1026 bp, Homo sapiens
gcagtgcaaaagcagaaagccagaaataatagtgagaggcaaagttagagaaatgtgcatattaaatctttaaaatactctatgactttttcctgcccagcatcttttgggggaaaaagagagaagatgaataaattaaaggtttttttctttctttgtttttttgagacaaggtctcactctgtttcccaggctggagtgcagtgttgccatcatggctcacggctcctggcagcttcaacctccaggctcaagtgaccctcctgcctcagcctcctgagaactgggaccataggcatgagccaccacaggtttggtttttttttcttaataggttggacatatggctataaataaaaaataagaaaattaaaaaagagtaagtgctaagaagaaaaataaaatgaaattataagtataagaaatgctagatggggttgttatatatatgattttttgtagaaggcctttctgataagatggcatttaaggaaaaatctaaataaagtgcaggacaagccaagatatttatctatggtaaaaaaatatcccaggaacagtgaatgtaagtgttctgagagagaagcatatttgatatgtatgcagaacagcaagactgctatggctcagcagataaagggggaaacataagaaattaaacatgataccttagtaattttttaaatgaatttaataacattaaagtctttctgtgtagttaggtttttgctattagagaggtggttctaagtcaaatgatgcttctaatatctttcttaatatattggatatgaccttgttttttaagtatttaaatatgcttgaacatgttaacccgatcatgtatcttttgtggaggtctagagtttttttttgttttgttttttagggtttttttttttaatgatacaggctttattatcttccccattttgcagatgagaacactgaggcatttacccagtggcttataagctgataggtgctaaagccaggaatcaaattcagaaagtgtagcccagattc

SEQ ID NO: 36749 - DNA, 1049 bp, Homo sapiens
tgtctatttattctgttgatagtttcttttgctgtgcagaagctctatagtttcattaggttccatttgtcagttgttgtttctgttacaattgcttatgaggacataaacataaattctttcccatgactgatgtccagaatgatgtttcctaggttttcttctaggattcttatagtttgaggtcttatattaaaatctgttaatcggtcgagttaatttttgtatatggtatatacagctacatatagctagccaactatcccagaaccacttattcaataggaagtcctttcccgattgcttagttttgttgaccttgttgaagatcagatgtctgtaggtgtgtagctttacttctggctcctctattctgttccattggtctatgcatctgtttttgtaccattaacatgctgttttggttactgtagccttatagtgtagtttgaagttgggtaatgtgatgaatgcctccagatttgttctttttgttcaggattgctttggctattcaggctctttctgttctgtatgaattttagaatagtttttttttacttctgtgaaaaaatggcatggtagtttgataggaatagtgttgaatctatagattgctttggacagtgtggccattttaacaatattgattcctccaatccatgagcatgcaatgtttctccatttgtttgtgtcatctgatttctttcaacagtgttttggaattctccttgtagaaatctttacctttttgtttagatgtattcttaggtattgtgtgtgtgtgtgtgtgtgtgtgtgtgtgtgtgcacgtgcacagcaattataaatgtgattttattcttgatttgtctctcagcttcaatattattggtatatagaaatgctagtaactttttgtacattaatttttgtatcctgaaactttactgaagttgtttatcagttctaggagccttttgacagacttaagggtttttttcaggtatacaatcatattgttggccaagagagatagtttgacttcttttcctatttgcatgcctttt

SEQ ID NO: 36750 - DNA, 1050 bp, Homo sapiens
tgtatgtgtctttttagtaaaatgatttcttttcttttggttatatacccagtaatgggattgctaggtccaatggtagttctgatttaagttccttgagaaatctccagactgtggagacagtgcctgaactaatttatcttcctaccaacagtgtgtaagagttcctttttctctatagccttgctagcttctgttgttggttttttttttttttttttgctttttaataataactattctgactggtgtgacatggttttgatttgcttctctctgatgattagtgatgttgaacatttttttcatatccttgttgccacctgtatgtcttcttctgaaaagtgtctgttcatgtcttttgtctattttttttaatgagatgtatttgtttttgtttttttgcttattgaattaagttcctaatagattctggatattagacctttgttggatgcatagtttacaaatatttcctcccggtttatagattgtctgtttgttgatggttacttttgctgtgtagaaactctttaattagttcccatttgtcaatatttgttttgttgatttgatagactgctagctagactaagaaagaaaaaagagagaagatccaaataagtacaatcagaaatgacaaaggtgacattacatctgatcccggaaaaatacaaaggattctcagagactattatgaacacccctgttcacacaaacttagaaaatctagaggaaatggactaattcctggaaacaaaaccttccaagtttgaatcaggaagaaattgaagccccgaacagaccaatattgacatttgaaattgaatcagtaataaaaacctaccaaccaataaaagccgcagatcagatggattcacagccaaattctaccacatgtacatagaagagctggtacaaactctaccgaaactattccaaaaaatcgaggaggaagtgctcctccctaactcattccgtgaagccagcatcagcctggtaccaaaatctggcaaggacacgacaaaaaaaactacaggccagtatctc

SEQ ID NO: 36751 - DNA, 1034 bp, Homo sapiens
ctggctcttccaatgtagtatatgagtctgctaaagtttgtgaagtcttgttcgtttatttatttaggttgctgacaagtggaaataggtgagatatgaagttttggggattttaatcctgtagaaggggtccttgaattgaaaaaaagttttgagaaccagttgccttcttcccagggagaagatggagcagaggtcccaaacatggtaaaactgaggtagaaaagaagaccttaggagaagcttgaggttcaaagagagggaataagttaaaaatgtaaaaagttaacttttgaaacagagaagaggaaactagtgaagaaggaattcttcctcgctgcattctgcattagttatctattgccgcagaacaaattacccctaaacttagaagttttaggaaaaatcatattctatttcacagacttcctgaggcacaggaatttcggaatggcttagctgagtaattctcacttaaggtcttttatgaggtttcagtcgaaatgttgatccagggctgaaaattctgaaaacttgactggggttggaaggtcagcttgcagaatggcttgctcacgtaactgttaacagaaggcctcatcagttctagcctgttgttgacaggaggcctcacctccttgccacatgaagccctccatagggctgcttgattgtccccatgatatggcagctaatttccccaaagtgagtgatgcaagagagagggtgggaaagctactgtaaaaattgggggtcatgttattaattatttgttatttatttattattactattaagcagtaattgatagcactcattttcttcatttatattgtgattcctcattgtttttgatcatctcagggcacaaaataacaatctcccaaaacaaagaaaccaagctaccaccaccaacttgtgataaatacaaaatatacataatttatgtattttgaaggaagtcctgtaatatcctagttgaaattatttcttgaagtacagtcacacatcacttaacaacaagagtatgttct

SEQ ID NO: 36752 - DNA, 1175 bp, Homo sapiens
ccaggctggtctcaaaatcttaacctcaggtgatccacctgcctcagcatcccaaagtcctgggattacaggcgtgagccaccgtgcccggccatgtctttctatttagttaagccttctttaatttctttcaacaatgccttagaattttttttttttaattaggcaagttctcttttttctcaacttttattttaggttcaggtagtacatgtgcagattcgttacatgggtaaattgtgtgttgctgaggttcagtgtacgaatgatcccatcactcaggtactgaacataaaatctaagagatagcttttcaactcttgctcccttacttcccttctaatagtccccagtgtgtcttgttttcatttttctgcccatgtagaattttcattgtacaaatctttcacctcccttgttaaattcattcctagatattgtatccttttgaatgctattataaatggaatttttaaaattttccttttggattgttgattgctagtatataggaacttaacagaatttttgtttgttgatcatgttccctgcaactttgctgaattcatttattagctgtagtagattttttgtagacttttgtagattttctatatatagaattatgtcatctgtaaagaggtagttttgttttttttccccactctgcaatttgtaagccatttatttatttggcctaattgctctagccaggacttccagtacaatgttgaatagcagtggtgaaagtggtcatcctcttgttactcatcttgggggaaagctttcagtctttcaccattgaatgtgatgttagctttttttccttcaaatcctgtcagtgtttagttcatatatatatatatatatatatatatatatatatatatatatatataattgctgtatttgatgcatatatgcttatcattgttatatattcttactgaaatgactattttatcaatatgtctttctttgtctcatgataattctctacttaaaatctatgtattctgatatttgaatagccattctagctatcttttagttactgtttgcatagaatatccttttttatcctttcactttcaatttgtttgtgtctttggatctaaagtgagtctcctgtaagcagcatatagttgactggtgtggtttggttttgttttcgg

SEQ ID NO: 36753 - DNA, 1033 bp, Homo sapiens
ttactcagaaaacatccttcaatccatactgatataaacaaatgaattgatgaattcttcggagaaaacagacaaatcttccttaaggaataatttttaataattatataaatactatccccttctggaggtgagcttttctctctccttgtggactggacttagtgatttgtttccaaagaggacaatatggaaaagaaaaaaggaataactttatagttaggaaatcagtcagactccaccttagtcaagtgttaagtgttaaaatcaccagtgataactcatgtggtagcacatctgtggtattagtcccataacccacaatcccagcctgatcatgagaacatattaaaactcagattgaaggaaattttacaaaatatgaaatacctgattactactcttcacaagtgtcaaagccataaaaaacaaggaaaagtctgaaaagctatcagattggagagaccaaggaaacacgacgattaaatgcaaatggaatcctagattggatcttagaatcaaaaaaagatattagtgggaaaactggtgaaatacacataaagtctgtaattcagttaataatattattgtaccagtattaatcatttaattttgacaaatgtaccttgattatggaagatgctaacgttaggagaagctcaatagaggatatctgggaactctctgtactctctttgcaactttcccgtaactttaaaattgtttcaagacaaaatgtttatttaataaaggtacattctgtcaacaaatatttatgcaaatgaatgagcatctcttcgttgatcatccttttattaattgcctattataatctttgtccattttttaggttaagtgcactattacatgttattgctatctgtggcttgttttgggctctttataaattatatcaatacctgaaaaagcttgtttatattatttacacactatttttgagactttgtgttctaaaaggaaggcttattttaaaagttggttgttgtcttctctgctttagatgctgggagct

SEQ ID NO: 36754 - DNA, 1072 bp, Homo sapiens
ttcttttgagaagtgtctgttcatatcctttgcccattttttgatagcgttgttcatttttttcttgtaaatttgtttaagttctttgtagattctggatattagccctttgtcagatggatagattgcaaaaattttctcccattctgtaggttgcctgttcactctgatgatagtttcttttgctgtgcagaagctctttagtttaattaaatcccatttgtcaattttggcttttgttgcaattgcttttggtgttttagtcatgaagttatcacccatgcctgtgtcctgaatggtattgcctaggttttcttctagggtttttatgcttttaggtcttatgtttaaatctttaatccatcttgagttaatttttgtataaggtgtaaggaaggggtccagtttcagttttctgcaaccccgtttcttaaatagggaattctttccccattgcttgtttttggcaggtttgttaaaaatcagatggttgtagatgtgttatttctgagggctctgttctgttccatttggtctatatatctgttttggtaccagtaccatcctgttttggttacagtagccttgcagtatagtttgaagtcaggtagcatgatgcctccagctttgttctttttgcttaggattgtcatggctatacgggctcttttttggttccatatgaaatttaaagtagttgtttcctaattctgtgaagaaagtcaatggtagtttgatgggaataacattgaatctataaattactttgggcagtatggtcattttcacaatattggttcttcctatccatgagcatgggatgtttttccatttttttgtgttgtctcttatttccttgagcagtggtttgtagttctccttgaagaggtccttcacatcccttgtaagttgtattcctaggtattttattctctttggagcaattgtgaatgggagtttgctcatgatttggctgatattggtgtataggaatgctcgtgattttcgcacgttgattttatatcctgagactttgttgacgttgctttttggcttaaggagattttgggct

SEQ ID NO: 36755 - DNA, 1045 bp, Homo sapiens
gtgctataaatttccctctaaacactgcgttagctgtgtcccagagattctgggacgttgcgtctttgttctcactggtttcaaagaacttacttatttctgccttaatttcgttatttacccagtagtcattcaggagcaggttgttcagtttccatgtagttgtgcagttttgagtgagtttcttaatcctgagttttaatttgattgcactgtgttcagagagaccatttgttatgatttctgttcttttgcatttgctgaggagtgttttacttccaattatgtgatcaattttagaataagtgtgatgtgatgctgagaagaatgtatattctgttgatttggggtggagagttctgtagctatctattaggtctgcatggtccagagctgagttcaagtcctgaatatccttgctaattttctgtctcgatctgtctaatattgacagtggagtgttaaagtctcccattattattgtgtgggagtctaagtctctttttaggcctttcagaacttgctttatgaatctgggtgctcctgtattgggtgcatatatatttaagatagttagctctccttgttgcattgatgcctttattattatgtgatgcacttctttgtctttgttgatctttgttgatttaaagtctgttttatcaagggcgaagattgcaacccctgctctttttttgctttccatttgcttggtaaagcttctcccatccctttattttgagcctatgtgtgtctttgcatgtgagatgggtctcctgaatacagcacactgatgggtcttgactctatccagttttccgtctgtgacttttaatttgggcatttaacccatttacatttaaggttaatattgttatgtgtgaatatgatcctgtcattatgatgctagctggttattttgcccattagttgatgcagtttcttcaatgtcagtggtctttacattttgatttgtttttgcagtggctagtactggttgttcctttccatatttagtgtttccttcaggagttcttgtaaggca

SEQ ID NO: 36756 - DNA, 1050 bp, Homo sapiens
tcataaggtagttctatttgtagtattttgaggaacctccgtattttctccatagtggctatactgtcacattcccaccaacagtatataaacagtattttgtccacattcccaccagcattttttttgctctttttgataatagccatcctaatgggatgaaatgatgatatttcattgtggttttgatttgcatttccctgatgattagtgattaaatatgtttgttggccatttctatgtcttcttttgagaaatgtctgttcagattatttgctcattttctttttttattattattatttttggaggatggagtcttgctctgtcgcccaggctggagtgcaatggtttggcttactgcagcctccgcctcccaggttcaagcgattctcttgcctcagcctcccgagtagctaggattacagatgcacgccatgacgtccagctaatttttgtatttttagtagagatggggtttcaccatgttgaccatgctagtctcgaactcctgaccttgttgatccacccgcctcagcctcccagagtgctgggattacagacgtgagccactgcacctggcctctttgcccattttctaattggattatatgtggggttttgttgttgttgttgttgttgttgttgttgttgttttgctgttgtgacgttagagttccttgtatattctagatattaatcccttgccaattaatagtttgccagtattttctcccatcctgtaggttgttcactctgatgattgtttcctttgctgtgcagaaggtatttaatttgatataatcccatttatttacttttgtttctgttgcctgtgattttgaggtcttatgcataaaatattttccagaccaatgtcctgaagtgttttcttctggtagttttattgttttaggtcttacatttaggtctttgatctattttgagttgattgtcatataaagtgagagttggaggtctagtttcgtacttcagcattaatttggattaatttgggagttctctattcagttttattggtccatcttt

SEQ ID NO: 36757 - DNA, 1058 bp, Homo sapiens
gaaaatatatacatatatccttcataatcctttagggctaagaagtctactttttattttgttggagaagaggtatagtgtgctaggtgaatgtacagttgctagagttgaattgcttaaatttaaattctaactctaccacttattctcttacatcaaattgtactatcacagtttcctcatttataaaagtagaatagtaatagtactatcttatggtatatgtgagcgttaaattagtaaatatgtgtaaattacttagtgcagacagcagtttccaaaggacatttgatgatatttaaagatatttttggttgtcacaatttgggagaggggtgccactgtcatctagtgatagaatccaggtgcattttgcagtgcacaagacagccccacaacaaagaattatctgaccttcagtgtcagtagtattgaagttgagaagcccctggttagcacaatgagtggcatatacatttttataaacatttgctattattttgtgctgaagtctaaaaaaaaacatggaagaaaaagtagaattattatgtaatcatcttttcttggttgttttgtgtgtgtgtgtgtgtgtgtgtgtgtgtgtgtgtgtgtgtggttgtttgtttttttgtgtgttttttttttttttggttttgttttttgttttgagacagagtcttgctctgtcacccaggctggagtgcagtggcggtatctctgctcactgcaacctccacctcccaggttcaagcaattctcctgcctcagccttccgagtagctgggattacaggcacccgccaccaagcccagctaatttttgtatttttggtagagatggggtttcaccattttggccaggctagtcttgaactcctgacttcatgatccacccacttcagcctcccaaagtactgagattacaggcatgagccaccgcacctggccataatcatcttttctaagcagctaaagaaaggtaaaatttttaatctcaggtgggggggtcagccccccgcccggccagccgccccgtccgggacgtgaggggtgcctctg

SEQ ID NO: 36758 - DNA, 1036 bp, Homo sapiens
actcacgcctgtaatcccagcactttgggagtccgaggcaggaggatcacttgaggtcaggagttcgagaccagcctggccaacatggtgaaacttcatctctactaaaaaaaaaaaagtaaaaaattagccaggcatggtggcacatgcctgcaatcccagctactcgggaggctgaggtagagaatcgcttgaacccgggaggcggaggttgcagtgagctgagatcgctattgcactccagtctgggcgacagaacgagactctatctcaaaaaaaaaaaaaagggccccaaaaagatacaagctttacccctctgactctgaactatcatgcacaatgtagtcagacaaatcttaaacgtcactcttgtcctagggttcttcccacttagaaatctccctgttgctcatgacatcaagccagtactctggcttttaaggttctccataatctagctccatctactgtccagtttttggtttccacagctcccttctgtcatgctgactcccatttttaacttggatcatactgttctcttcctccttctgcccacactcatacaaactcatacctggatcatatttgctgttaaaacttaataatggcaatgctcgcactcatttattgtttattatacaccagtcactatgatgataaaccttctatgtgcattatatcttaataagtctcaaaataatcttatgacgaaggtgtcattaacctcatttctatagtagagtaactcaactaagagtacataggtaggaagtggcattcacaagatttgaccttaggtccttctaactctaaatccattaaatgatgaagtgtaattcctgatcttgctcctaaagcattttatgctctgtgtccttattttcttagcaaggtttgagattcttgaggaaaggggcagtgtctatacatatcttgtatctgtcatacaactaggacagtgctagattatcacctattttctcattgattgattggatattgattagagtgagatggtcagactttatggtga

SEQ ID NO: 36759 - DNA, 1109 bp, Homo sapiens
cctggctaacacggtgaatcctcgtctctactaaaaaaatacaaaaacttagctgggcgtggtggcagtcgcctgtggtcccagctactcgggaggctgaggcgggagaatgatgtgaacccgggaggcagagcttgcggtgagccaggatcatgccactccagcctgggcgacagagtgagactccatctcaaaaaaaaaaaaaaaaaaaaaaaagaaaaaagaagaaaatttggacaattggatggacctattgatctgaatggggaaaactttgataacttattggacacagtgatcatctacttactcagtgagttgaaaacttaccttggagataggaagcaggaacttgtattgactcaaaaaatgaggatgaaagctttgaatctggcaatataggtgatgcagataagttcttgagataaaataacaccaaataccacagatcattctgtttttctcctgactttttttctatcacttttcttactactttatttctttgcaagactcaaagactagacccattatttaatattagaagttatgttacctttcattaagaccctctcccctctaactactactaaagctactcacatacccacttagaacatatatctgttttctagtatctagtccagataaagcacaaagaaaagagacattccaataaaaataataggtaatacttatgaaaattttactgtataccaggactgttataggtccttcacataaattaaccattttaatctcaaaaattccacagattaggtactactctcatcctttttatatttgaggaaactaaggtttaaagggtaagcaacttgctcaaaattacttagtaagtggcagaatctcactagtcttgggcttcagaatctattcctaaccacttcactagattacctcctattttgtgatattatactttgtaaccctagttaaaagatgtacttttgccaatcagaaggttactttgcctgcttaagtcattagcctcagttgccacacttctataatgaaagtgcttcatgggaaacagtactaagagattctttttggttttttttttgagatgaagtctcactcttgtcgcc

SEQ ID NO: 36760 - DNA, 1035 bp, Homo sapiens
ctaagtagttacagttatatttatactcacccaggctaataaatggttatataagaaagtccacatgtattttagttcatgcttttttgtaattgtcagaaattcgtgtcctaaaagaaagtatgtaacttaattttaaggaggtcaaaatgttctaaaaatattaccttataaaaactgcattcctgtgagtaaatatatctctaatattcttcagttgaaaagaacatcattttcattagttgaaaggcacaatggagtaatacaaagaaaataagttttttgaccatttctttgattattgcccccaccaaatcaacatctaatctaatctaaaataagattccccattatacattaaatgtttagatttctctgtctagcagatttttaaaattctaaaaccaagaatcttcttactaaagtctagttgacagtattgtcatatttctaacaactagagagaatcatgtagattttcttttctacattagctatcaaatatataggacttgtgaaagataagtgttggattaatcactaagattagctgatcttttaatatgaggacaaattctgaaaatggtggcattgaatggaaacctttaatgtaggttcattccaggaatatgtttatgttagttaagtttaaaattgtattccttggtaaaccataaaagatttccaaagtattagacacccacttttgtgctggaatttaatatgcaactttttattggaaaataatcgtccttgtctggcaaaatccaccatgcaatatttctgttagtaggtataatgcaataaagccagggagggctatttatcactacaaattttgaggatttcaggattctttttattattttaatatatttctttgatattaaatcagaaaaatgataaattacacctgtctaggctgtttttcctttttactggaaagtgatgtacaacccaattccaatggtcatttggctttttaagatatgtattttttcttattaaaaaaaaaactcaacccatatttttttc

SEQ ID NO: 36761 - DNA, 1013 bp, Homo sapiens
tccaccttaagcaagacacttaacctttctctgcctgtttcttcagtagagtgcagctcgtagctccctgtgacttaggatgaatgagtgaattcaatctctcatttaaaagaaaccccttttgaaaaagaatactatataaattatcaattgtgcatatccatgtgtgaagtgaagattctgctttgacagaatccttgaggaaactgcagtctacctttaaagtaaaaagttaataggaaatgtctcttttccctcttctctatttaaaaaaaaagagaaaaaaaaggaagcttagtgtaagaagtgtacccatggagaatgtatttaaaatccaaatgacccataagggaccccatcctttttggcagataaaagtttccctgccatttatttgataaattaattaaaaagaacataaataaaagagaataataacttagagctatctgggcacctgagtctttgagccctttagggccttggcacccaaagagaagggggaaaaaaaaaacactgcgtctctgaggctttgaaagtggtcttccttgaggcattagagaagctctaggggccctaggagctaaaggactgagatgcctggggcatgagtctattagatccactaaagaaccaggaaaaaaaaaatggctggtaagtaattttgctatttcatttgatgcaaaagagaaggcacaacaccagaatattcagtgagcaaaagtacaaaatgtggcatggatgtgaatgcaggctgaccccttctcgggaatatttctaagcctaaatgaagcactcaatgctgaggacaatgtacaattctatgcattttaaaccgtagtgacccttttgtttctctgataggtgaagatgaggatgaatttgagaatttcatgctgcctcttacagttgcttttgaaacagtattacaaatattcaacaacaactttaaacaagaagatgtaaaggtgggtttgtttccaaatatgaggaatgacagttttgttttttct

SEQ ID NO: 36762 - DNA, 1034 bp, Homo sapiens
aaccatcttcctagagtcatttttaatggagttccagtgatatatccctaaaccagcaagttcttaacgaccctggaaagtgactgcttgattacactttaacggtatttgcaaataaaatcacaagtaattaaggggaaatctccaggcttttgagcaagtttgatgcatgataactgcctgattcagcttcatctagagtaatgctgtgtaggcaacagctactgagatcaatagcaacgtaatgatagtggcagaattaagtgagtaacctgagaactgtgcctcagaatgcatgcagctgccacgaaccaaggccacacagtgcactccgtgcttccgtcctaaatgttcatcaaaagacgccctgcaggaaaatggagttagatgctctttattgctgatcgtgtctcttgccacatttatcagggaaattggattagcagttggcagctgcaggtagacaagattctgcagtgattaaatatgcagcttggctgcatttgttgtgacagacctttagtaaattctactgtaagcaccatctgtctaatttgtataaagaaaacttggtgctttaagctaccgataaaaaactaaatctgttgctttatcataaacaaaacttttgcactaaatgcttttaaatgtaatttattaggttaaggctatttttctatcacgatgaataaataatacatgcaaaagtgctttcaggtacttcattttgcaagtactagagataaaaacatttctgttttgttcttcaataaagtatttagtattccaatccacaggaggtgatgctgttaaaatatctctatgaaaatgccgcaggactgccaaattcatttaatttgcacctcttaccagcattttctaactccctatttatagatagtttcaaatgcagatttcaggataaacttaaacattaaggacctgtgttgccaaattgaaatacagttgttagaggaggaaatgcagcaaaagtgttaaatttatagctttattttcttacttattcttaataa

SEQ ID NO: 36763 - DNA, 1015 bp, Homo sapiens
aaatgattgtttatgttggagttgaagggataatctggctaacatctttagggatcaatgaatcctaccatttgacatttttgaggggagatttgaatctccatctcaattagcaaggctgggaagatcattttatctcttcaaggcctaacccatcatgccacagtttttcattatcatgaagataatgaatggacatggaaagggaaaaataaataagtcaaggtttgtcatttggtgtaaaatttgaattgacctttgccaagggttagtacagacaggaaaaaaaaaaaaaaccccccacagaaatgccttatcatgtaagagttaaaagagcatagactttggtgatagacagacccggcttaaaatcccagctcttcatttactgtgttgtgaaccttggcaagtcatttcacctgtctgagtcttggttttctcatttgaaaacagatacaattcagtatcatggtatattgtaaccattaaaataggtaaagtgtactctgtataatgtctggcacatttttggtagttgtaaatggtcgttaatattgttctaatagtgttgtatgacttatgtttgatcccagcaggaagtgatattgtatgcaagtcatctaagtgttatataatgctttcatgtcttttatgcatgaaaccatcagagcatgtgaaaaaaattatataatctgaaagctaatttactttttaatctaaactatttctcagttactttttttaaaccctccttatccaaagtttcctgtaaattaaattgcaatagaaacttcttaaaggtaactgtcaactactatgccacagttatggccaaaaatataactaataggggatctaggcatgttttagggagaactctacatattataaaaatttttaaacattaatttgatactgacatatctttaattattattaaaatatacttcatcagatttatgtacccagagaagggttacagataaaatttttatgtcattgagtaatcatgcac

SEQ ID NO: 36764 - DNA, 1050 bp, Homo sapiens
gaaaggcttccagcagcagtccccttgtgaacaaaggtccagatgtttacatattcatggagtacctttaagctctgaactggcaagctatttctattctggaaccacatccccaaacccttgtctcctaacacttttaatgaaaattcttttgccttctggtattaacaactgatgaatagatggacggacggacagacggacggatggatggatggatagatattgtaaagaagcaaacttgatacttttcacattttcatatttggtatcctgtaaggcagtgtcacatcattaatgcctttgatttttaatttatctgatgtggaccttagaaattcatagagaagatctcagtgaaagcaattagatctgtgcttcttctacctaagggctcccattctcttcttcctactcatatgtacatagtcctcacaaggccattggaaaattaaactcctagagtgggttctggttctcaccctgtaattgagcctggcactctcactctgcagcccttttaacctctctattgtgctttccaataatccctcattttctctgtggcagtcacctctgtcagaagcatattagaattggcaccactctcattccacacagaaaaaggagcatccccttatatctccctgccttatcccgtagtgaatactgtgtgctctgaaaaatatcctggtcctaatgccattataggatgccttgcagaggcctatgtgtgcctctgatattcttaggttctgagatttgggttgaatccattttctcatgagccttccagatgcattcccactaatgagtttgtgctcaggaggtcccttggtggaatattttctcacctgtacccctgtggcattggttcagaatttctgtactcaaagcatccctattatatgttggtcaccctaatttgagcatgtgttccccaagattaaaagctatatcttcctggccgggcatggtggctcatgcttgtaatcccagcactttgggaggccaaggtgggtggatcatgaggtcaagagatcgagacca

SEQ ID NO: 36765 - DNA, 1094 bp, Homo sapiens
tcattctttccttaggtacctgatttaagaacgcaatatataaagattctaaactttaaaaatggatagtacaagctatgattattcactgtcataagaatttacatcaggatccttttaagcagtgtatgctctgggtgtatgtaaggtataacttaatatgcataaattgaatttgtaaagtgttatacaagccactgttattcgtcaccacctagataataggccattggttttcacccttggttttgcagagctgtagaggcctgtgaaagtgccacagcagccctccagaaaaagggggaaagaggaccactttgccaccttgaccagaaccacccagctatgtagttacactagacttgttcgtaaaagctatcacctgttaggactttttttaaaaaagaggctgaaaatcacttgcatgtactattagaagtgttgtaagaatggaagattaagattgtatacaggcatacttctttttgttgtactttgcagatactgtgttttttataaattgaaggtttggagcaaccctgcatggagcaagtatatcagtgccagcatatgatttctttgtgtctctgagtcatattaataaatgtgtattctgactgctctgctttggccattccccatctcttcccttctcctccccactccctattctctgacacagcaatattgaaatcaggccaatgaataaccctacaatggcctacaagtattcaagtgaaagtaagagttgtacatgtctcactttaaatcaaaagctagaaatgattaagcttagcgaagaaggcatgtcaaatgctgagacaggtcaaaagctaggcctcttgcaccaaacagccaagtggtgaatgcaaaggaaaagctcttgaaagaaattaaaaattctacactagcaaacacacaaatgataaaaaagtgaaacaaccttattgctgacatggagaaggttttagtagtctgagatcaaaccagtcataatattcccttaaggcaaagcctaatccagagcaaggctctaactctcttcacttctgtgaaggctaagagaggtgaggaggctacagaagaaaagttgg

SEQ ID NO: 36766 - DNA, 1026 bp, Homo sapiens
gaaaattgcttttgtatagtgctcttcatgacatgcatcccaaagtgaattacagcaaaagggaaatcatctgctcttttttcatttctgtgtttagactgaaatgatattgctcaacattttgacatactaaccaagacatctttcatacttaagattccattccataatactgagtaggagaaaatgcagtcgcatatttaactgatgttgagattttggcctacaggaaccttagcaagactattacagtcaaaaacacttaagcagatgaaatacagtcatatctcttgtcctcttaaaaagaatagtcagattttctaatgttaataaagacatttccagtgatccttaaataaaaaatatgctctttatgtaacccattagctctctctggttgatttacaactttattctcaataatacagtagtatattgatatcaaaaacaaactgaaagaacattcacaactggatcaggtaataacggatttaaaaagtttaaaggaagccagggatatgtcattagacactgaaattggaaaataggaactcaaatttcataacagaatttttgcacatggtgctacaatcttggttttaacagcaatcaatgcatatattatgcatatacatagtgggaagaaaaataatattggcaaaatgtaagtgcttctattcacaatagcacatggaatcaacctaaatgcccatcagtggttgatgggatagaaaatgtggtacatatatacaccatggagtactacacagccatcaaaaagaaagagatcatgtcctttgcagcaacatggatggagctggaggctattatcctaagcgaactaacgcagaagcagaaaactaaatacagcatgttctcacttacaagtgggagctaaacattgagtacacatggacatgaagggaacaacagataccggggcctacttgagagtggagagttggaggagggtgaagatcaaacaactacctattgggggtactgtgcttattacctgcgtgacaa

SEQ ID NO: 36767 - DNA, 1033 bp, Homo sapiens
cccggccctttcctatgcttagatgcacaaatactgtgtttcggttgcttacagtattcagtacagtaacactgtacaggtttgtagcctaggtgtgtgtagtaggctataccatctaggtttgtataagcacattcttatgattgtacaaagatgaaattgtctaacaacacatttctcagaacctagccctgtggttaagtgacgcatggctgcatataacatttagtgggggggtgtaaaataggtggaactcaaaagttgaagtagtattttttttttgttcacaggtcagtttaggggctggtgcaaaggatgagttgcacattgttgaagcagaggcaatgaattacgaaggcagtccaattaaagtaacactggcaactttgaaaatgtctgtacagccaacggtaagggcacttacatactttggatgttgtgtcaaggtttaattctgttttaaggtaggtttggtgtcatttagttgtgccaaggagatagaaagtggttctttatcttctgtcactggagttcgatggtcaactcttgaacatgggggcttctgctgctacttttatcagaggtggaaaaacaggttcactggtttgttgatttggcttatgtgtttgcctgtaatgtttattgttcattttcttcacatgtttagtgatgaaaaatttctcccttctaggtttcccttgggggctttgaaataacaccaccagtggtcttaaggttgaagtgtggttcagggccagtgcatattagtggacagcacttagtaggtatgttatttttatatattatactacttagtttgtcctctttagtgcagttgcttggttcccagtttggacttaaagcatgggtatagtactactgtctttttaataggttccaatgtgagtctagaaattggagaggacaaataaatttttggggcgggggggagaggaaatcttgctgtcacccaggctagagtacagtggcacgatcttggctcactggaacctctccgggattcaagcgatcc

SEQ ID NO: 36768 - DNA, 1256 bp, Homo sapiens
tttttttttttttttaaatagaatagaagtctcagtttttagagtatttactatcagtgttctttttttttctgacttcttgctgcttgagttttataatgtctaataaattgtattttagctgtggaggaagatgcagagtcagaagatgaagaggaggaggatgtgaaactcttaagtatatctggaaagcggtctgcccctggaggtggtagcaaggttccacaggtagagatggcaattttattataggttttgtattatagcttttagtttggtgatagaacagctcttgttcatgagtacgtatcttttcttttaaaagaaaaaagtaaaacttgctgctgatgaagatgatgacgatgatgatgaagaggatgatgatgaagagtaagtatgattttagaaacttgatatacttccggaatcttgacaaaaaaaggaatttgacatagttatatgcatgagggttttataaaagtcatttacaaaaagccatcctatgtaatagtttataataaaagggcaggtggtcatctgttgtcagtttaagttaaatgagctgagttgaaaggatattgggtctgtgagcctttacaatgctgtgacttgtgactcttcagaagggtagactatagtgtttgtgaagtttgattatgtccctttgttctgaagatttagtggatgtgttatacccatcaagcctggtatgttttatggtgagcagttaatgagattgggttgaaagaaaatatgattaaatagctctatattcattttacaagttgttactcaaggtttgttattccctaaaaggattttgtcttatggttttatgtagatatttattgacaaaaataagattctaaaagggatattaagattttcttgggatttaaaatatggttggaaacaatatttgatgactttatattaaactagatcaaactattgttacaaacagttaatacgcacactggtataaagtactgtttataattggtcttatgtgtgccagtaccagtaatgcattgaatactttgatttggctctcagctttgtccttcagttctgaggttggtccatatgcatttattgaaaacaaatataagaacatgcactttaaaagagaacctgcatgaaagatcaaattgggagtttaggttttaagctggtggttcttcaaaatctttgagcatgacgatgaaggcagaaaacaggaaaaaggccgaaagagccgaaagcttaaaaattca

SEQ ID NO: 36769 - DNA, 1057 bp, Homo sapiens
ggcacttgccaccacgcctggctaagttttgtatttttagtagagacggggtttcaccatgttggccaagctggtctcgaactccaaagtgctgggattacaggcgtgagccaccatgcaccgccgcaagttttcatataagttgaagaaagtgtactaaggtctgcatagtagtaaaggatgccttgagggaaacaaatattaatagaaacttcagtggtgagatggcaagggcccagcatagatagatggcaatgaaaatgcaaagaggtgcatgaaggttcgttatagttacttagaaatctaaccttttgaacacagatcaaaggggaatttggttcctttttgaggatggaatgggtatatggtgtgggctcagatgactcttgatttaagcaagaaaggctatgtaatgtgcatagtgctgatgtatactatacatagatgtatgtaatacgttgatagtatgtggcccttaaatgtcttttttaatttttggggaatttcttaagtaaagctgaatttttttttttttttttggagacagtctctgttgccccggctgaagtgcattgttggctaggctggagtgcagtggtgcaatcatggctcactgtaacttctgcctcccgggttcaagtgattctcctgcctcagcctcccaagtagctgggattacaggcatgtgccagcatgccaggctaattttttgtatttttaatagagatggggtttcgccatgttggtcaggctagtcttgaactcctgacctcaggtgatctgcccaccccagcctcccagagtgctgagattacaggtgtgagccaccacaccctgccagtaaagctgttttgatagtagttttgatagctattttgatagtagtttaatagacttgttttaacaaataagaaaaaatgtttaaaaaaagcattctcatcttgtttctagcacaggggaggcacctgcagggattgggttctaatgccagaaacttgtactgacaaaatcactgttaaaaagccacttgaagggctatttgtgacagctttttaag

SEQ ID NO: 36770 - DNA, 1889 bp, Homo sapiens
taaattcaaagttgtgaaaatttgcccccttaattctgagttttgtcctttatatttagggctttgttccattttgagtaaacttatgtgtatggtgtgaatggaggggtctaaatatagactttggatgtagattagcagttgccccaacatgatttgttcaaaaactattttttccccattgaatgatcttggcaacctttaaaagagtcacttatggctgggtgtggtggctcacacctgtaatcccggcactttgagaggctgaggcaggcggatcatgaccaggagattgagactatcctggccaatttggtgaaaccctgtctctactaaaaatacaaattttagctgggcatggtagcgtgtgcctgtagtcccagctactcaggaggctgaggctggagaattcgcttgaacctgggaggcagaggttgcagtgatctgagattgcaccactgcactccagcctggcgacagagcgagactccgcctcaaaaaacaaaaaaatcactgtttctggactgttctgttgatgtgtctatccttaacatgtaagaacagtacaacactgttcctctgtggtttttatttatttatttttttgaaatgagtctcactgtcacccaggctgtagcacagtggcgtgatcttggctcactgcaacctccgcctcctggttcctcctgcttcagcttcctgagtagctgggattacaggcgcccgccaccatgcccggctaatttttgtatttttagtagagactgggtttccccattagccaggctggtctcaaactcctgacctcaggtgatctggccgtctcggcctcctaaaaagtgccgggattacaagcgtgagccacggtgccttggcccctttgtaggtcttatagctgattttttgaaatcaagtgtgagttttctagctttcttcctttccagattgcatttggcctctttgggtcccttaagtgtcttttttgtttttgttttttgagatagggtcttgctctgtcacccaggctggagtgcagtggcagaattacacagttacagttcactgtctcaagcagatcctcctgccttagcttttcaaatagctaggactacaggcgcacaccaccacgcctgctaattaaaaattttttttgtagagagggttctcattatgttgcctaggctggtcttgaactaaaacgatcctcccacctcagcctcccaaagtgttaggattataggtgtgagacactgtgccagttcttgggtttgtttataaattttaggatctgtttctacagagaaaccagcttggggagtcttctaacgattgtatttaacctgtatattcggggagtgtttccatcttggcaatatctgaacatggaatgtttctatttaggtctttaatttttttttttaacacaaattcactctgagtgtacagtttaatagaactatacattacttaaatatacatacattatacagtggtatagtgtgtatttatgcaaaactactcattgagcaacttcatttcccagcccctagcgatcacaattataccttctatttctttgagtttgactacttttagatacttaatgaatagaatcatacagtgtttgttcttttgtggctggcttatttcactttgttcaaggttcagtcatgtagcatgcaagaggattttcattgtgtgtacatatacattttcatttagtcatttaacacttgggttgctttcacctcttggctgttgtgaacaatgcttcgataaacatgggtgcacaaataatcacttcaaggtcctgctttcaattcttgtgtctactcccaaattttgaaagtgcttaatgtcttgacatttcatttgtagtgatgatgatg

SEQ ID NO: 36771 - DNA, 1077 bp, Homo sapiens
agatcacgccactgcactccagcctgggcaccattgagcactgagtgaacgagactctgtctgccctgatttccttttttgaactgacttagtactgtgcataaaagcaaactcccaagttactctttttttttttatttaaagagatgggtggcctactcttgcccaggttgaagtacagtggtatgatcatagctcactacagcctccagctgctgggcttaagcaatcctcctgccttagcctcctgagtagctgggattacaggcatgcaccaccatgcctagctaatcatcttattccttccttaaaggaaagattttaagaacaaaattatatggcgtgaatttattgatgataattccagttgtataattagctttataagggagttttgtgagaatatttgaggaaatccagatagaatgggttttaattaggaattgtatttattcttatgaccttttggaaattcatttctttttcagggacaagaatccttcaagaaacaggaaaaaactcctaaaacaccaaaaggacctagttctgtagaagacattaaagcaaaaatgcaagcaagtatagaaaaagtgagtaaagttatcttaaaaaaactttgtctcccccctcaaattgcacgtgtctggtttgcatagacttgaatgtttcttgtttttttgtttgttttggtttaatatacttgcctggttcgtggtatgaattttttcaaaaatttcttataaaacatttataatcgtgtctgtggtgatttttgcatatgcaaaattaaatatgccttattttccattatgcaaggaacgtagtgcactggttgcaagataacattctgaccttccatgttaaaatagatcagtgaaaaccctttgcctattctggttgtaagatatgctagagaaccaacagagggcgtatgagacttcattaaaattacaaacagctggaaaagtagatgctggctgttgcttggtattatagttaatattcatgattgaccctagtcagaagtgattttcagcagattgagacatttctctttgccctttacaccaagttgtc

SEQ ID NO: 36772 - DNA, 1060 bp, Homo sapiens
agcataagagatgcattcttcaactactgccaaggaaagtgatgataaatttaatgattaagttgcagtagtcttctgtactttataacaaaggcttgtagctacaaagtcttgtagctattaaattactgaaccagcacttctacaagaagtattttctttttataaaaagtatttttggccaggttggtcttgaactcctggcctcaagcagtcctcccatcttttcctcccaaagtgctaggattacaggcacgagccaccttgcccagcctaccagaagtatttttttgctctagaattgaaagtgttctcaagtgtcagaatgaaatttctggaataaatagtaaatgtttaataacttgaacttgaattgctgttacagagattatcaaaactaaatgcttcctgtttttgacatagagatgcatgatgcaagcaacgacaatgtatatttgtttgaacctgatgataagatctctggctgggcgtggtagttcatgcctataatcccagcactttgggaggcaacatggcaaaactctgtctctactaaaaatactaaatttagctgggcatggtggcatgtacctgtaatcccacctactcaagaggcggaggcaggaggatcgcttgaacctgggaggcagaggttgcagtgagcgccactgcactccagtctgggtggcagagtgagagtctatctcagaaagaaagatttctatgatatttaatattggcattcggtattcagttaccttgtacctgagaacccattggctgtgaaacagtgacagctgagagaatcctgagtcatctcatttctagttcttggtgaacttctggacttttcttcagaaccaccttgccatgttggccaggctggtcttgaactcctgacctctcaggtgatccaacaccttggcctcttaaagtgctgggattacaggcatgagccaccatgcctggccagctgttttttttgttggtttgttttttgttttggtacccatctgtagtgtgatcttggctcactgcaacctctgcctcttgggctcag

SEQ ID NO: 36773 - DNA, 1832 bp, Homo sapiens
gtgagccaccagcccggctaatttttgtatttttagtagagatggggtttcaccttgttggccaggctggtctcgaactcctgagctcaagtgatctgcccacctcggcttcctaaagtgctaggattataggtgtgagcaactgcacctgacctcaacctggattccttatctgaatcaaagcaattatttcagtgactatttgctcaagttgcctagtacttcttacagatgtataggagaaaatttatcacgtagataatgaggatattcagagactaattagcacctttatatgttctgccttaagctgattacatgatctgagtcagatatactgatttgatttctattgttttgttgtgctttatactccagtagtttgagtaggtgagggaatgttctccagttctgtgccgttttccttgggagattttcatctcccacttctatccattcttagtctggtttgattgtcttggatggtttttctcattcctttttgtttaaacttgggaaagagactttgattttgtctttaaatttttgtgttgattttaatataccaactgcttgctgctttgggcgtgtatctgaaatctaaaaaacattactcaacattttatttattccaacattttgaagtgatcgtgaattttttttctttcttgttttgagacctattctcgtctgtcacctaggctggagtgcagtggtgcgatctgagctcactgcagtctcctgtctcagcctccaaaatagttgggattacaagtgtgtgccaccacacctggctaagtttgtatatacatataaaaataaataaatatataaatatatagtatatagatatactaaaatatacatatattttagtatagatggtttcgccatgttggccagtctcgaactcttgacctcaagtgatctgcccgcctcagcctcccaaagtgctggcattaggcgtgagccagtgtgcccagacaggttttcatcctatgtgtttttgcctttaactttctagtagcctgtttcatttagcaggttggcatttgttaactaggctgatagttgtattttgaatcggatctgtagatgttaacccttctcacttctaggatagttctccactttggagagtggagaaaagtttgggtacagtactatcttgtctcataaccagtttctgggtgtcatatatgtgttctaattgtttactgtgggttgtggtttccttcattaattcagtatcctctatcctctatccatatctgtccatgtttttctatacctttattttaatgaagactcaagagaggatggtatgttgattgcctcactggaaagtacttttttttttttttttttggtgccaccatgcccaactaacttttttgtcaagacggtggttttgccatgttgcccagactggtcttggactcttgggctcaagtgatctcccacctcagcttcctaaagtgctaggattacaggtgtgagccatcacatctggctggaaatgatattaatgtgattttttttttggccaatttttagagtgatggattgatacctagcagcctgtgaaaaggaatcagtgaatttatccttaattcagattttcatgtatttgtatgtatatcaacccactgtgtttttttggtgctgatattttctttttgaccaagggaatccccttcaagcttgctcctaccatagcaggtctcaataatctgatcactcttcgatttcttgtgtgacggggtgtttcatcttgctcattttcttcctcagacctggaggggccatttcccccaaagaaccttggctcc

SEQ ID NO: 36774 - DNA, 1067 bp, Homo sapiens
cgcctcctgggttcaagccactctcctgcctcagcctcccaagtagctgggattacaggtgcatgccaccacgcccagctaatttttgtattttgagtagagacggggtttacaccatgttggccaggctggtcttgaactgctgacctcgtgatccacccacctcagccccccaaagtgctgggattacaggtgtgagccaccacgccctgctggacctcctgtaactattaagcaaactttgtgcggcgggccacaaccaccctctctcctgtgaggtctgaatctcagcctagggggtgtggggtgatccttccttgggcacttgctcagccctaaagttattggctattccctgtaactgctaattctgtattctttttttttttttttaaagacagggtcttaaaaaaaaaaaacacagggtcttgcaatgtcacccaggcgggagtgcagtggcacaatgatagctcactgcagccatgaactcctgagctcaagcagtcctctcaccacagcctcctgagtagctgggaccacaggcgcatgcctccacacacacctaattatttttttttttttagtttttgtagacacggaatcttgccaggttgccaagctggtcctgaactcctgacctcaagtgatcctcccgcctcagtctctcaaagtgctgggattacaggcatgagccactgtgccctgccctgtttctttacagttgtctttgcccctttgtacttaatgcctgtacatttttgagagggagttttgctcttattgtccaggctggagtgcagtggcatgatctcggctcactgcaacctctgccttccgggttcaagtgattctcctcccttagcctccccagtagctgggattacaggcccctaccaccacacccggctgattttttgtatttttagtagagatggggtttcaccatgttgggcatggctggtctcgaactcctgaccttaggtgatccacctgcctcagcctcccaaagtgctgggattatagattgagccacctctcctggctaaatagtcttattttaaactact

SEQ ID NO: 36775 - DNA, 1145 bp, Homo sapiens
aaaaccttatatgcgttggtgacatcagcattatgtgctatgtagaccaggagtcgtcacccagatttctcataaatccaggccttcactccttcacctgccagcctgtttccctcttccaggcaggcatgtggcccaggggtgagaagaattgttctactgccagactgtgccagttcaagtcctggccctgcatcttgggcaagtaaaacagaaagaatgctactgtctaccatacagggttatgaaagtgatccgagatactgaacgcaaagtgtaagccgaggcttcgtgcgcagtaagccctcgcaaggggggtagcagcagtcatagctgtgattgttactattatattattattattattcctccctcaaagttgctccatctgggctggagacagagatggaccttttttcctttggacagagggagagagtggtatgaactcatcttagtagtatgaatgtcaaggtcaggatttgaggggggcgatgagaatgattctagggctccctcccgcctgcctccacttggctctggtgtgttcatttgccttcgtgccccccaacacacatacacgcatgcacacacatacactagcacagcccccgggccagtggttctcagtaaggtggagggaatgagtaggtgaacaaacgagtgagtttttcgcctcactccctggcactcggcaccgagggctccgacaggctggtggccagggctgaccagccagagtttcatctaaaagcctcgatggctatttttgggacaaatgacccaccacttccaatgacttgctccgaaatggcatctaatttcattaagccttggaaacagtgacatcacaagtgcctgcccggtagccgcccacatatggcgaaccacagagtgatccgagattcgtctgcaagaacaggggagaactaaggtcccaagcagcaaaagttaaaatagcaaagctgaggcattctgctatgaaaagaaattacagatgaaatccattagtcagacatttccagcggcagtttccttgcttgggagcaggggaagacgtgtttattcggggttgggctctgcagccattcctcactctgtaggcaagatgtggcccggaaagtgggtttctgttaaggaaatcc

SEQ ID NO: 36776 - DNA, 1035 bp, Homo sapiens
ataagactcagtgaagaatcggatgtgggggtaagggcacatgtggaagcaaagaaacctttgacgtctttgtcttgacaaccgggtggtcctgtttctagacatggaagcttagaaaagcctggagtctgtgggaagtaggtagggctgggcactggtcattccactctggtttcctttggggttcccattaggtgtctacagggagaggtgaaattggaagttggaggtgtggagagttcaggagagggttctggaccacagatgttgaggtgggagtcattagtgaatagatgatgttggaagtcatgggtcctcagagtgggggctccttaagcctccaggccagcagcatcagcatcacctgggagattgttaggaatgcagattctcaggcccccctaagacccaccgactctgtgctagaacaagcgcccctcagagattctgatgccactgaagtttgaggagcattggtttaagcaagattacctacggagaggctgtagatccgtgttctaaacctggggtccacagacacccccaagaagagcggattgaatgcaagagatctatgaagttggatgggggaaaaattgacatctttatttttgctaaactcgatctaaagtttagcatttccatctgcgatgaatgtaggccacaaaccacagtagtattagcagtgcctgggacctcctcaacaacagaaattgccggtatttatagcacgttacagttgttgcagataatttccagagactgtttatatgcaccactgttttaaaattacggtgattggccaggtgcagtggctcacacctgtaatcccagcactttgggaggccaaagtgggtggatcacttgaggagttcaagaccagcctggtcaacatgtcaaaaccctgtacctacaaaaaaatacaaaagttaaccaagcctatgcttgtagtcacagctactcgggaggccgaggtgggagggtcttctgagcccagggaggtagaggcttcagtgagctgagatcgcaccacca

SEQ ID NO: 36777 - DNA, 1038 bp, Homo sapiens
tgtggtcatttaaatgccccttaaatgtggcatgggggaaagagtgagtgccacatgcactgtgtgacctcggacaagttacttccctctctgtaccccatgggtacctcagtgaagaggcatctccttcatgggctgtagggctcctgctgctccgaggcctatggctgctcctaggatgggaggtgttggttcttataaatgacataaagtagatgctcaagaggaaaatatgcttaaagttttcttgcaaggtctggaacagtggttcatgcctgtaatcctagcactttggggggctgagacagatggatcacttgagtccaggagttcgagaccagcctgggcaacatagcgagacctcacctctacaaattaaaaattaaaaaaaattagccaggcatggtggcatcacctgtaatcctggctaccccggaggctgaggcaggagaatcacttgaacctgggagttggggtctgtggtgagctatgatcacccactacactgcagcctgggtgacagagtgagaccctgtccctacaaataagtttccttgcaaaccttctgtgaacttcatttgtcttccatcatccatgctttgattctctgaagtcatcagaaggcaatttgtaggccataacattttgagtaaaacataacattagtttgattagtcccaaatggtgttctgacaactgcaaagctttgtgattcaatcaggtgggtgttttgtgcctgagaagcaacagggtgtcacattaagagcacagactccaaagttttgaacccctattcagccacttgctgtggcattggacgagggattcagggtctctgtgcctcagtttccttggctgtgaaatagtctaagaatagtacctactgcctagggttgagctggggattcactggggtggtaggcatggagcactgtaacccacctggcccagggaaggtgctgtgtaagtactgtgtattttgttgtggttagtatattatgatgtggcagacagttatgaagtacagacataacaggt

SEQ ID NO: 36778 - DNA, 1020 bp, Homo sapiens
cccagctactcaggaggctaaggcaaggagaatcgcttgaacctggaaggcagaggtttcagtgagctgagatcgcaccattgcactccagcctgggggacaaagcgagactccgtctcaaaaaaaaaaaaaagaaaagaagaaagaaagtcaagcccccttagattaagtcattcctttattgagtccctacagaatgttcttgggtctgtcaccttctagctgtgcagcttcagtccaggtccttaacctctcagtgcctcagatttgttgggtgaaaatgaggatagtaataaaactaccacatagggctgtttcagaaatagaatctataacgtgcacagaaattatattagaatgagattgtctatgtagaagagtgtttattgctggtacacagtaagttttcacaaatggtgattggaccattatgagcattcccaaataggatataatcttgagaaaagactaactttagagctttgagctaagggctccataaatgaaaggtgattcataaattcttcttgatttcaaaggacctggcactcctttttcaaccctaagctcagcaatgagagatcatcatcagctatgagcaatggacttccatggatctttcccatcttgctgccaagtcctacaagactttcatcagaacagccctaacacggataaacacaccagggatgaatgtgggagggaatcagtctgtgagaaattcttaactctccccatgctctcgctcttacatcctgatacttgagttatgtgtgttcccaaacgtgtttataccagttgtgcttttatactggtaggatgtgatttggggaactattagttaaaccaatgagctacaagaaatgaacctagtaaaactaagttgaatgctttagagagacttgattaaggtgagttgttacccctcccaactcaaaatgctgctgaatgagaagtgaacaagacaactgtaaaagatttgggaggccggacgcgatggttcacgcctataatcccagc

SEQ ID NO: 36779 - DNA, 1040 bp, Homo sapiens
ccttttacacccagggtccgcgcaaagtgtcggcctagccagtggttgggtggcgcccgggcctccaggcagtcttccaggggtcggcgaacgaaacgcggagctcgggagcgacccggcggggccaggcacgggcagaagggccaagagggccacaggtgggcgcggagcggccggagtgggcggggactggatgagaggggcggggtctaggagagaggggcggggcggcggccacaaacccgcaggcacgccgccggccgccgtttagtcccagagatagaaaaaagtagaggtaggagggcgcggcggctcacgcctgtaatcccagcactttggaaggccgaggcgggcggatcacgaggtcaggaaatcgagaccatcctggctaacagggtgaaaccccgtctctactaaaaatacaaaaaattagccgggcgtggtggggggcgcctgtagtcccagctactcgggaggctgaggcaggagaatggcgtgaacccgggaggcggagcttgcagtgagccgagctcgcgccactgcactccagtctgggcgacagagcgagactccgtctcaaaaaaaaaaaaaagaacaccagtaagcctctaccgcaggccctacacaagcaggcccttgtactcactggcatcgccctcccggggccgccaggaatgaggcactgagatcccaccccaagccgctgggggcgccattcgacttcgctcctacggaaatggggcttcgatgtctttctgcgcttgcgcggcacggaaactcacttccggccctgcgcactcagggtctgaggcagctagtagccgggtgagtggaggctggagttttctcggacagtgaactctaccgccccgtgagaccctgccctatgtgtcgcgggaacacatgtcaccccacagctctctttgagtgacctcccgaccacccattcctgcctaaccctagcattccttcctcagcctcaaggtcccagtgctaccctctcccccacgacccctttagacgggcatgcgacctccaca

SEQ ID NO: 36780 - DNA, 1093 bp, Homo sapiens
aaaaaaaaaaaacactaaatcaaccactttccaatttattcttggcaagggtggctagttctagaataggcttttaaaggtctcatcttatgcagcagatgatgtctgaatcttgtgaagttgtgtgtaatttaggattctctgtatgccgacttatttcttgaaatgggagaggctgtcagtcggcgccacatgtgggctggtggctctgtggcagtggtggcggctggactccggcaccatgagcggcttcagcactgaggagcgcgccacgcccttctccctgaagtaccgagtcttcctcaaaaatgagaaaggacaatatatgtctccatttcaagatattccaatttatgcagataaggatgtgttccacgtggtagttgaagtaccactgtggtctaatgcaaaaatggaggttgctacaaaggaccctttaaaccccattaaacaagatgtgaaaaaaagaaaacttcgctatgttgcgaatttgttcccgtataaaggatatgtctggaactatggtgccatccctcagacttgggaagacccagggcacaatgataaacatactggctgttgtggtgacaatgacccaattgatgtgtgtgaaattggaagcaaggtatgtgcaagaggtgaaataattggtgtgaaagttctaggcatattggctatgattgacgaaggggaaaccgactggaaagtcattgccattaatatggatgatcctgatgcaggcaattatactgatatcagtgatgtcaaacggctgaaacccggctacttagaggctactgtggactggtttagaaggtataaggttcctgatggaaaaccagaaaatgagtttgttttaatgcagaatttgaagataaggactttgcaattgatattattaaaagcactcatgaccattggaaagcattagtgactaagaaaatgaatggaaaaggaatcagctgcatgaacaaaactgtgtctgagagcctgttcaagtgtgatcctgatgctgccagagccattgtggatgctttaccaccaccctgtgaatctgcctgcacagtaccaacagacgtggatacgtggttcc

SEQ ID NO: 36781 - DNA, 1042 bp, Homo sapiens
ttctgggaatacaacttctgtttaattggcacaaatgttaaagcttataagtagctggaaattatgattatactactttatattttactatggtgaagtatttacttatttatttatcttttgagacaaggtcccgctctgtcgcccaggctgcagtgcagtggtgtgatctcagctcactgcaacctcggcctcctgggttcaagtgagtctcatgcctcagctacctaaatggctggggttacaggcacacgccgccatgcatggctaatttttgtatttttagtggagacgggtttgccatgttggccaggctggtctcaaactcctgacctcaagtgatccgcctgccttagcctcccaaagtgctgggattacaggcatgagccactgtgcccggtatactattgtgaagtatttagatctacttattttactgaaatatctcactaatggagctaataaagctattctttactgtgacttttgtttatctgatggacagaaattgagctagaattataaccaagtagactaaggataattttttaacaattcattgtaagctgtatcaaaatatatgtattgatcacataccataaaaataatcctaaggatttctttcaatttaggtttttgagacagggtcttgctctgtcacccaggctggaatggctcaatcatagctcactgcagcctcaaactcttaggctcaggcgatcctcctgcctctgcctcccaagtagttgggactatagtcatgcgccaccatgctcagctaacttttttatttttgtagagatggagtcttactgtgttacccaggctggtcttgaactcctggcctcagtgatccttccatcttaagcctcccaaagtgctaggattacaggcatgagtcactacacccagccaggatttctttctagagtttagaaccagtgattctctttttttgaagagaactttctagcttcctgagacttcagagacatggaaagtgttggtgttcacagaagtgctgtttagtgcccatgtaagg

SEQ ID NO: 36782 - DNA, 1133 bp, Homo sapiens
cttttgtttctttgaaatctgatcatacatcctatttagcatgatatctgagtgaaaaatgtggacggaattcaaaccccaaatattttacacaccttattccacaaaagagtgagattctattaaaaaaattgaaattcaaaggaaatttcactgtttggcactggtacattttcttgaaaatgccccttttcaagtaaggcacacccaaagagactttggctttcaaagtcatgttttgaaatgcattcatggacttttaaattgccttctgtttgttgcagttttttctggtgccagtttgttctagtttaaagtttgattccgtgaggctcaacttgtttgagctctgtataaattaggttctctgccagtagaatccagtttctgttaatagttcagcagaggaaaatctgaatgttatatctggttccctctttaaggcacaagatcacttttgtctcttaaacatacaatcttgttaagttactatactatatttctggtcttaggttaatttttaatgttgaattatattgttgtttactcagagtcaccaagctcacatgaaattagaaatgtaatgtattgtgaagacacagttgtttcttggaaaacatgctgtgtcttagcacctgactaactgtaaatcttactggcatcatgatataggaaaataaatactatctaagaatcacgagacctaggttcttttaggcaaaaggatacttggcacgattatgttgtagggtggttttgtgagttttaagtaagatgctgtgtgtgaaaacttagagtaaagcacaataaaaatcaaagtaatattatcagtgatttttttttttttttttgagatagagtctcactctgtcgaccaggctggagtgcagtggcgagatctcagctcactgcaacctccacctcccaggttcaagtgattctcctacctcagcctcctgagtaggtgggactacagatgtgcgccaccatgcctggctattttttgtattgttagtaaagacagggtgtcaccttgttggccaggctggtctcgaactcctgacctcaagtgatccacccaccttggcctcccaaagtgctgggattacaggtgtgagccaccgcccctggcc

SEQ ID NO: 36783 - DNA, 1059 bp, Homo sapiens
tcaaagtgatttcttttctttctgaacatatttagctctccagtttttgccattcatttggtacattgccttgaattgttaaatacatgcttaactccttgtatttaatctcctacaatatatagccttacatatcatagtaaagaaggaattattttgcaaatttatctaaaatttttaaacagataaaaattaagcctaatatatcgtttaagaagaatattcacttacttttccccgaacagatttcttggttctagacttaatatttttatgttatcttcattgtcagttttttgtttttttttttttttttgaaacagagtctcactctgttgcccaggctggagtacagtggcatgatcttggcttactgcaaactccgcctcctgggttcaagtgattctcgtgcctcagcctcccgagtagctgggattacaggaatgtgccaccatacccggctaatttttgtatttttagtagagacggggtttcaccatgtttgccaggctggtcttgaactcctgatctcaggtgatccgccccgcctcccagagtgctgagattacaggtgtgagccactgcacctggcccattggcaggtttttgtttgtttgtttgtttgagatggaatctcgctctgtcacccagactggagtgcagtggcgcaatcttggctcattgcaacattgacctcccaggttcaagtgattctcctgcctcagcctcccgtatagctgggactacaggcatgcaccaccatgcttggctaatttttgtatttatttatttatttatttatttatttatttatttatttgagacggagtcttgctctgtcgcccagactggagtgcagtggtgcgatctccgctcaccgcaatctctgcctcccgggttcatgccattctcctgcctcaggctcccaagtagctgggactacaggtgcccgccaccatacctggctaattttttgtatttttatttgagacggggtttcactgtgttagccaggatggtctcgatctcctgacctcatgatctgcccgcctcggcttc

SEQ ID NO: 36784 - DNA, 1051 bp, Homo sapiens
attcttatttttacaaatctaatgggtgtgtgatggtatctcattgtggtcttaacttttcatttctctgattaataacattgagcctctttcctgtgcttattggctgttcatatgttttcttttgtgaagtgtctgttcaaatattttgccatttaaaaaaattggtttctcttctaaaggttctttattctgggccggtcgcagtggctcatacctgtaatcttagcactttgggaggctgatatgggtcaatcacccgaggtcaggagttcgagaccagcctggccaacatagtgaaatcccatttctactaaaaatacaaaaaattagccaggcttggtggtgagcacctgtaatcctagctactcgtgaggctgagggaggagaatcacttaaacccgggaggtatgggtgcagtgagctgagattgtgccattgcactccagcctgggcaacaagagtgaaactctgtctcaaaaaaaaaaaaaaataagtaagtaaataaataaacgttctttattctggatataagttctttggcttggctttttgctttcctcattggcatcttttcctttccttttcctttttcctttcctttttgccttcccttccctcccctcccctctcctcttcccttcccctcccctcttcctccctccctccctccctccctccttccttccttccttccttccatccctccctccctccctcactccctccctccctccttctctcctctctctctctctctctctttctttttctctctctctctctctcctcctcttccctccctctccttccatctttctatctttcttgtctttcctcgctctgttgtccaggctggagtccagtggtgcgatctcagctcactgcaacctctgcctcccaggttcaagcgattctcgtgcctcagcctcccaagtagctgggattacaggtgtgcaccaccacacctgactgattttttttttttttgagacgaagtctcactctgttgcccaggctggagtgcagtggcgcaatcttggctcactgc

SEQ ID NO: 36785 - DNA, 1053 bp, Homo sapiens
gtctttctgagatttcttgttctgcttccctccctcattttatttggaccatctctgtttcatatctttagttcctttcttgctcaatgttaatttcaaccccagggttttttgttttgttttgagacagagtctcactctgtcgcccaggctggagtgcagtggcgtgatcttggctccctgcagcctctgcctcccaggttcaagcgattttcctgcctcagcctccccagtagctgggattacaggtgcacaccaccacgcccggctgatttttgtgtttttactggggatggggtttcaccatgttggccaggctagtatcaaactcctgacatcaagtgatctgcccgccttggcctcccaaagtattgggattacaggcctgagccactgcacctggccagttttttttgttttatcacggcttgctcctgtcctgcaagagtcctggctggtccattttcagagttcacagaggctcaactgtgggccccttcacttctgactgtgggctccttgtactcaccttgtattcaatattgggttggagaaaatccctcacagcgttagctgcagttctcaagttgactctgctgtacttgccagtgggtaacctattcgctatatggaaatttttttttgttctcatgtccattacttccttttggcccatccacataaatattgataaatattgataatgctgttgccatacatgtcttaaagcttttggtagtttgttcctaccttcttgaatgttcctagggataccttatcacttgtaaatgttttccatgggtttatggttttgccatttagttgctctgtttttatatggggaaatgaagattaaaaatctatgtggtggctgagcacagtggctcatgcctgtaatcccaacactttgggaggctgaggtgggaggatcgattgaggtcaggagctcaagaccagcctgaacctggaaggtcaaggcttcaatgagcagggtgattgcaccactgcactccagcctgggcaacagagtgagaccctttctcaaaaacaaca

SEQ ID NO: 36786 - DNA, 1054 bp, Homo sapiens
gagtgcaggtgtgatctctgctcactgcaacctccacctcctgggttcaagcgattctcctgcctcagcctcccaagtagctgggattacaggtgtgtgccaccacacacagctaatttttcgtatttttagtacagacggagtttcaccgtgttagccaggctggtctcgatctcctgactttgtgatcagcctgcctcagcctcccaaagtgctgggattacaggcgtgagccaccgcgcccggtcaaaacttatactgttaagtataattttattatacgtatattggaaatttttccatttcagtaatcagagactgtcctcatttttctttttttttctttttttgagacagggtcttgggctgtcacccaggccagagtgcagtggcacaatctcagctcaccacagccttgatttcccaggctcaagcgattttcctcctgcctcagtcccccaaatagttgggactacaggcgtgcgccaccacacccagcaaatttttgtagtttttatagagacagggttttgccatgttgctcaggctggacttgaactcctggactcaagtgattgcctgcctcagccttccaaagtgttgggattacaggcaggagccaccacacctggtctctcattcttttctaaataactgtcatttttttttttttttttagccagttctctatcaaagggcatttatttggactgcttccacatttttttttaagctaacttattccctgacagacttttcttcaactcagcatgacttcaactctccaactacacctgttaccttcagtgtgagtatttgtatgttctttttaaacatctgggtgcccacccagtgtttatttccttcactcattaaaatgacctcaccaatacgtgtacatttacatatttattatggcacctaggaaggacctaataagcacatggccagtaaatgaataaccccatcccagttttaatctgcgtttcttaagtatttacatactctttttgtatctggaaataaatacaagattcctgtttgtttgccattt

SEQ ID NO: 36787 - DNA, 1047 bp, Homo sapiens
ttgagggatctttaaatatcattaagtctttaagactcagagtcggccggcagctgcctgcgtgtctggctgaagccttcctgaactaggctggctctttcttgctcggtttggatgataccaagtaattcaaagtagcgtaacaggggagtgacttaagtctcctaagaattagaaagttgccttaattctcaaagcctcataagtaatggaggacgttaaatagcaaagagtataatttaaactgggctacaattaaatgtgtgtgtggctatgtaggaatgaagcgtgtttcttctcctcctgtactctccctctcttgactgcggaaatggaacatcctaaacagtctttctcttgccttggcttagctgtgctgtaggatgggacctgggcttctgtgttgaggtaacttctattgtgaggaagaagagggcgaaattgtgtggcatgatttttttgtatgaaaagtgaagggcctattcttaattttgaacaactgcctgctttctgatttacttttgatccggatttgttggattcctcactgtactgtgtaggttgagcttacaaaggtgtggattttgagcagtgcgattaccccctttcagatttggggttgctgttgtttttgtctttgggtttttataaggcggggagggtaaggggaaatgcctaggaaagaaaatcatgtgatgtatgtgaatgccgacatcgtcataggatcggactgaagcctttctccctctagcctctgaatggaaaccaactcagttcaaactaaatgcatcttgtgcatgggccagatcctcatctgccccgtttacttacataacacatactagtcaatcgaaaatagtgatcctctgccctctacctgccacacattcgtgattgaatatttaacccttgtttttatttggtctgaaaatcaaataagcagttgccacaaagggggaatttgtcttatgtcatccatgatgtgggtccgtaattacttaagcagcccctttatcttaatcctgaacattgaacacaaggaatcct

SEQ ID NO: 36788 - DNA, 1667 bp, Homo sapiens
aggtttttatggtgtaatgactgaaagtagcccatgaatatcatgtgattctgggtgtggcagtatttcatatggagtagtttgtataagggctataatcagagatcagatttagtcggttgagtgaaggctttgggtctaaactacatcttttctttttgagataggcctaaaaatattatgtttagaaaacagttgtttaaacttggcctcgtgaaatgtttttgttctccatttgtgaaccatgggcctcttcagccatgggaattatttgatagagcctgtgaacccattagtgaccaggcattccagttagatgatagatgtcacttgtgtatgcatgattatcttccaaaagcatgtggatgctgatgtaatgcaattaaaatacatttaaaggtgttgctgagttcatagtagccttctgatattaagatttttttttgtttttgttctgttttacttagggtagagacaggggtaggagtcttcagttattattatggaggaaagcctctctgaaatattttgatcaaagtaggtcttaatagttattacaacagattatgaaatactgctctagagaacttccctaatttttctgctttatactcttgccattagaatgctccttgttacaaaaaagaacataacataaaaaaggaatttaacagaggaaatggtgaggaggaggacagggaggagtgaggaggctactgacgctctcctaaattgtcctctccaccaagtagcattttggagcttcctgacatctgaagccatctttattcctttgtagcagggttaagaatatgggctgctgaggctacatcctgcatgatgccagggggtagagggagccatctgacgagatgggtgcactccgtgttgtataacatggcagttcttgttaggagggggaggcaagtgctactaaagcctctttaagccacatggtttggaagtgtcttatattttagcttctgcttatactccacctccacaaatatttgaacatattcaatgtgccaggtagattgaaggatagttttgatgctgtgctgcatttttccttttcgaggtagacctggacattctgtatgggaagcagcattaaccagtttcaagtgaaagggtgcttacctctgataccatttctcttttattcagtgccccttctgagaattatttgtaacccagatccttacggtaacctgttatgtgagttttgtggtcttcattttacagttgaaaagaattggagatcccaaagatgcaacagcttctgtaaagtcactcagattcctggtacctacaagggtcaatataggaggaacacacagcttctggctcctggttcaatggcctgagtatttattgtgtagcctctgagaaggaaacaaacataagaaaatggaaacatttttgtctagtatgctttgacagagggtaggcattcaatttttttttctctttctctttctttctttcttttttgagacagggtctagctctgttgtccatcctggagtgcagtggcacaatcttggctcactgcagcctccgcctcctgggctcaaacgctcctcccacttcagcctcccaagtagctggaactacaggtgcctgccagtgcacctggctaatttctgtattttttgcagaaa

SEQ ID NO: 36789 - DNA, 1023 bp, Homo sapiens
tgggcccagcttaagcaaataacatctgtggagcttctcctgaagtcttgtggttgtctaggtcagaaactttcgaagagttcctgtggtctggactctttctgcttgacttgtttatgttccctgccaatccccatccgtatttgaatttgggacctctgacctaggactctgttggtgtgcatatttgggaatacactgctgtcaacccatagcctttggtgtgggcatttgtgacagttagaaaatgtgaacagttttaaatgaggtacatgattcttgattgacttatctaatggatacactgaagtatttgtcataaaaaaaaatctattgcaaatatcatcagtatttttactttgaaaaccattttgaaataatgcatcagatttgatagtatcaggagtagtttgcatttcctagacatacactgattggacacacaattcttgtttacttagtattgtatattgattggcattggataccatgctaaaaatttaaattatgtagatattgaggcattggacagactaaaggcccaaataagctgaaaaacagtgaattaacttacaaataattgtggacatgttaagtaatttggcttataatagacaatcaaattgaactttccaccttggtttagtttacttctaaaaatgaaacgatgggttgggatacactgtttttaaatcttctagtttcccagctttattgacttgtaatcataggattattgcttttaaaaatactttgtaataattgttaacttttttgcccatgaattgtctgtattgagaatgagacattttggtttgtacattccctaggtccagattcggccttggaatctcagtgacagtgactttgtgatggatggttcacagccacttgacccacgaaaaactatatttgttggtggtgttcctcgaccattacgagctggtatgattaaacaaacgacaaactctctaccctatagcgcaagaaatatgaagatcttcaggataaatttttcctaag

SEQ ID NO: 36790 - DNA, 1040 bp, Homo sapiens
cataaatctagcaagtggcagagctggaatttgacgccgacagtctggttccagagactgtgtccttaattcccatactatactcacaattattaaggaagatgcttaaaaactcatggaaacaatgtcaaattaaaaatcgtaagtgaaaacaatgtgtatgatactatagtaaaaacatggaggatttaaaatagtctttataagttatttatagtgaaagccatctggcaatatcagataatgttcaaatgattaattatttctgtgtttcatccatgtcagtgccaatgcatagccttaaggatgtattattaggctaagggtaaggttataaagtttgcacttctcggcatggcgctgtgatagatatctgttgattgtagttctcaacacccctttctgctttttagaaatgcttccttccttccaagaaatgcttttgcccaattcaaccatggggtttgcattggggttgtcatcttataagtctcctttcccttgtcagatgtgagcactggactctacttgggccgatcagagcctttcctcagaagttttgaacttaggactggagagagcaaatctcatgttcttctttggtgtggtggagaagcttatcttagcaatacttctgctgaaaacaactaacatcttggtcaaaataaaaaaacaggtgtttgaaacaataagctaccactatgcacatattagaatggctaaaacctaaaacactgatactaatgtggggcaacagaaactctcattcattgctggtgggaatacaaaatggtacgaacactttggaatacagtttggcagtctcttacaaaactaaacatactcttagcatacaattcagcagttgtcctctctggtacttacccaaatgagttgaaaaattattttcaaataaaaacctgcacaaatatttaaagtagctttattcataattccccaaatttggaagcaaccaagatgtcttcaagagatgaacggataaacaaaatgtggtgcatccagacgatgggacagtattc

SEQ ID NO: 36791 - DNA, 1034 bp, Homo sapiens
gaagacttacgttgaagtcaggcatctgtatcctgttgtgtagcagtggtgagctgcattcagttagagtagaaccatgagtgtgaccaatttttcctttgtggttaaaggtaagaaatcaaaagtagtgaatccattttttaaaaaggggggaacaaagggctgttgtccagaaagtgaaaagtcattaaattagaccatgtgtcaaacctgcacttaattacacaaagttcaaagttactaagtttttctttagcagctgttaatttgtaaaatagttttatagactttggtatatggcatctccgagttgattcttatacatggatggtaaaacttcatccaaatatgtctaaaattctagtttagtgttgttcattttttgcaggctgatatcaccatctcaaatagaaatcagaagatttttttttaactgtaataacatcacccatcctaagatactgcttaagaaatccatgcccatagttgatcttgaggactggaatatgagcaatggttgtaatgttacatccgtgtttttgttttttgttgttgtttgtttggtttttgagatggagtctcgctctgttgcccaggctggagtgcagtggcacgatctcagctcactgcaacctctgcctcccgggttcaagtgattctcctgcctcaacctcccaagtagctgggattgcaggtgcgtgccaccatgcgcctgttgtatttttagtagagacggggtttcaccacgttagccaggatggtctcgatctcctgacctcatgatccgcccacctcagcctcccaaagtgctgggattacaggtgtgagccaccgcgcctggcacatgggtgttttaaagttagtagaatagtgggatctgcatgggaggggagaacatggcagtgggaaaggcaggaggccttgattctccatgtcttcctgatgctaggcaggcccaacgtctccatgcagaactatcctggaacagggaagcatatgcaacacaaatccattgctgagtggaaatagaatga

SEQ ID NO: 36792 - DNA, 1016 bp, Homo sapiens
caagggatcttccctcctcgacctcccaaagtgctgggaacataggtgtgagctgccgcacccatcctaaaacttttcgtacctttattttctccagagtaattctaggtatccaacaagtaaatattaaaatactatgtacttataaagagaaatatgtaggaaactattgaaatttagttaagatcaattgagatttatagacaaacttagctttgaatttagatggcctttttgccatttatagcaaaattatctttataaataggaagagtatgtacatatttactcaaaaatttaaggtgactgtaaagtttctaaatacgtagtgacattgtaagccttacacgaacttgcctttttgactctttgcagtccgggaccatgtctggagaactaccaccaaacattaacatcaaggaacctcgatgggatcaaagcactttcattggacgagccaatcatttcttcactgtaactgaccccaggaacattctgttaaccaacgaacaactcgagagtgcgagaaaaatagtacatgattacaggtaacattaattattgttttttggtttaatgtataaatagatcatcatgttaggctgctatctttaaaccttcacttagtgattttacaacttttttttttgcaatggaattcttttgaccaaaaaaaaaaaaaggaagaaaagagtaaaaagacctgttatatcccccattgctcgcccttaacacagatatctagggttcatattaacctgacaatgggagtcatccctcttagttgtagataccaatccctttctcctggcagcttgccttctgttctccgatagcaccaccacctccactacgacatccacaacccctccgtgcatttttctgtctctgaacagaaacagcattatgcaaaaacaaattgccaagaatcaggggtaggttggttccttctgagttataggcccagtaagtaaagtcctgtaggtaggagctcagatgggaagggtgctggtggc

SEQ ID NO: 36793 - DNA, 1025 bp, Homo sapiens
atcccagcactttgggaggccaaggtgggtggatcgcctgaggtcaggagctcgagaccagcctggccgacatggtaaaaccccgtctctacaaaaaaaagtacaaaaaattagctgggcgtggtggtgcatgtctgtaattccagctacttgtgtggcagagacaggagaaccgcttgaacctgggaggcagaggttgcagtgagccgagatcatgccactgcactccagcctgggcaacaagcacgaaactccacctaaaaaaaaaaaaaagaaaaaatatgtaaaatatgcaagtgcatcaaacataaactcttcataaacccttcttgggtggtcaaaagataataccaaatagagttaaaaaaaataagccataatataaggtgattcctcagacagtgaaacatgaatcaccgtgtgacccagcagttccacttctgggaatatacctgaaagaaatgaaagcaagaactcgaacagatccttgtacactcatgtacatagcagcattattcacagtagccaaaagttggaagcaacccaggtgtccgtcagcagatgagtggatgaacaaatgtgctcccgccatacagtggaatcccatacaatgaaatagcattcagccttcaaaaggaaggagattctgatgcatgctacaacatggttgatcatgaagacattatgttgagtaaaataagctagtcacaaaaggacaaatattgtgtgatttcatttatatgaggtacctagagtagtcaaattcagagacagaaagtagaggggaagttgccaggggctgggggaagagggaatggggagttagtgtttaatggggacaaagttttagttggggaagatgaaaatgttctagacatggatagtggtgatgaccacacaataatgtgaatgtacttaatgccacagaattgtatacttaaaaatggttaaaatggctgggggtggtggcacatgcctgtaatcccagcactttgggaggccaaggtgggaggatcacttgaggt

SEQ ID NO: 36794 - DNA, 1052 bp, Homo sapiens
agtaaagtgtttcattttctctctccctatcaagaaaacagtcttcttccagcctgccttctcagacattactcgtgcctttggaggtactggtaggatgttacctccttctcaccctggagctcatggccctgtagaacacatggcaggcagcaccggcctggcctctgataagtgacaggctgttccgccatctaccctgcctgagttgacagacaccaacgttaagagtagaggagacaaagtgtggtctctgcagaaatcaaggggagaccatggcggtgtgaactttatatctgatatgtttttaaaatagctcatctgtggagtccaaaagaaagcaatgagttttaattttttgtcacctgttaaaaaaaaaataggctcacaagattagttaaccaaaaacgttagttagcataattgtattacacttgaaagaaaagtgcttctcttttttatcacttaaaattgcttttgacaacacatattcttctactattgttatatggaacaaaggatcttgaaatctgcagccaagtggtgtttattgcaattaaaatttcttttaaaagaagagagaattgcttgggctttatagtttttggatgataagacttagtatttttatacagttaagatatcattttttaaatggcagcacttcatttttgctttcagtgtgtatattaatattttgagaaatatttttaagcaaatatgccccaaacatttagcccaatatgcattcccctgtattcatagcttcctacacacagctcccctccttctcacgaatacaaagtctgtatgtttatttatttattttaaccaactcacttcaaagaatacatgtctacttttttggagttatagtcaagatacgtgtgaagaatcccattgtttatggatctgcttgctttttctctagattcccctacttgtggagtgatagtgaatgttgttttgtagactcttcattctgaatcatgctcttttatatttcccttttatttcttcaaataatgttgcaccagagtttcctgacatgc

SEQ ID NO: 36795 - DNA, 1027 bp, Homo sapiens
ctctagtccaccctaaggctgcttagagctaccttcagaccaggggcctaaagaaagttctcagactgagaaatcagagggcctggcagttagagtgctcttcacagaaaaaaaacagaaattagtatgtttaattttcatcatctaaactgaatgcaaacagcgcttggcaattaaaatgaagctctccaatgaagtatacttcatcagctgctgtcaagtcatccattgatactgttttgcggtttttaaattccttttgtcactgtgactgctcatcagcaggcaaggaagagcaggcaacaaaagttgaaaagtgcatgaaggaaaactttgaggaatatgatattcacattccagcaaattgggggaaaactgctattatctggtttaacacaggagtgccttggtgccctgcctgaggctaatgtgttctgtaggggtggctgcacagccacagtcctgaaacatgggaaagcatctcctgagtccagggaccagcacgtttgtcactaacctaaaaggaggctatggagcccaccccggtgttcctactgagccctgatttccagatttgctgaaatcgaggttgcggctccagcttctgccctgggtttggtttgttgttgtcgtcgttgtttttgagacaggatattgccctgtccctcaggctggagtgcagttgctgtgatcatggctcactgcagcctcaacttccctgagctcaggtgatcctcctacctcagcttccccagtagctgggactacaggcgtgcgccaccacacccagctgatttttgtatattttgtagaaacagggttttggtatgttgcccaattagtctagaactcctgggctcaaatgatccacccaccccgaatgctaggtatacagttgtgaaccaccatgtccggccctgggtttgcttttgattgtggtcttttctgttttgaattgccttactcctcttagagttcagccagtccagacggacaaatccatttctagtgatttggttattttaaa

SEQ ID NO: 36796 - DNA, 1072 bp, Homo sapiens
aaaaaaaaaaaaaaaaaaatatatatatatatatatatatatatatatatatatatatatatatctccaataagttacatcttataggctcctcccaacctgtgtccctgcctcccctgcagatttaaccactatgctgaatttcatgctcttgcattttatatttgtgtatgtatctttagtttgtcttaggaactttttagacaagggtgtcacactgtcataagatgtatagtcttctagtacttgttctttttattcagtgtcagaactaagattcatctacattattgtgtgtacctatagtccattcattgttgttgttgtataatagtgcattgtatgaatgcaccacagtttcccgtctcctatgtgaacaagtgataatgaaaacattctttattaacatttttgagaagcagcaaatgtgttgctttgagagatatttatagctttaaatgtttatattatgaagaatagctgaaaatcaatgcactaaatgtcccaacttaaaaaaaaaaaagcacaaaagaataaacatcagaaaagaaggaaggaaggagatgaagatcagaaatcaataaaataaataacagaaagagtagaggatcaacaaagtgaaatcttggttctttgaaaatagaaacaaaatagacagttgtctggtgagattaatcaaaacaaaaagagaaagagaaaagtacaaataatatgaatgaaaaagaggtataactgtaggttcagcagtgattaaaaataataccaacattataccaacagatttgaaaacaagcaaaatagacaaatttctggaaaaaatattagcaaagctgaaaaattagaaagtcagaataggccagatagtcattaaggaagctgaagcagcatttaatcttcctcctacaaagaaaacacaagaaacaggtagttttacaggtaagtttctcccaactgtcaagaaacagattattccaatttcaaacaaactctcctggaagataaaaaagagaatactccccatcatccaccaaggtttgaataactttaattccaagatcagacttgggccttt

SEQ ID NO: 36797 - DNA, 1040 bp, Homo sapiens
caggcacggtggctcacccctacaatctcagcactttgggaggccgaggtgggcagatcacaaggtcaggagatcgagaccatcctgggcaacatggtgaaaccctgtctctactaaaaatacacaaattagctaggtgtgatggcacactcctgtagtcccagctactcgggaggctgaggcaggagaatggcttgaacgtgggaggcagagattacagcaagccaaggtcgtgccactgcactccagcctggcgacagagcaagcgagactccacctcaaaaacaaaacaaaacaaaaacaatttggtatgtttttgcagtggctggtaccggtttttcctttccatatttagtgcttccttcaggagctcttgtaaggcaggcctggtgatgacaaaatctctcagcatttgcctgtctgtaaaggattttatttctccttcacttatgaagcatagtctggctggatatgaaattctgggttgaaaattattttcttttcttttttttttttttattgatcattctggggtgtttctcgcagagggggatttggcagggtcataggacaatagtggagggaaggtcagcagataaacaagtgaacaaaggtctctggttctcctaggcagaggaccctgtggccttccgcagtgtttgtgtccctgggtacttgagattagggagtggtgatgactcttaacgagcatgctgccttcaagcatctgtttaacaaagcacatcttgcaccgcccttaatccatttaaccctgagtggacacagcacatgtttcagagagcacagggttgggggtaaggtcacagatcaacaggatcccaaggcagaagaatttttcttagtacagaacaaaatgaaaagtttcccatgtctacttctttctacacagacacggcaaccatccgatttctcaatcttttccccacctttccccgctttctattccacaaaaccaccattgtcatcatggcccgttctcaatgagctgttgggtacacctcccagatggggtggtggcc

SEQ ID NO: 36798 - DNA, 1012 bp, Homo sapiens
tcatggatagtttctgaattttagaggaatcaaatagggacaaaaaaatgtttccacctttgttcacaaagtataccaaattactgtaaactaataagtagcttaagagaaagaaaaggtttccttaaagctagaaaacaaaatatttaaataaagaacctggctaggcatggtggctcatgcctgtaatcccagcactttgggaggccgaggtgagcagatcacctgaggtcaggggttcgagaccagcctggccaacatggtgaaacactgtctttactaaaaatacaaaaattagccagcatggtggtgggcacctgtaatccctgctactccagaggctgaggttgcagtgagctgagattgtgccactgcactccagcctgagcaacagagcaagactccacctcaaaaaaaaaagaaccaataatgtttcaaataaaagtcataaaaacgttatcttcaagaccaggtgctgtggctcatgcctgtaatcccagcactttgggaggctgaggcgagctgatcacttgaggacaggaatttgagaccagcctggccaacatggtgaaaccctgtctctactaaaaatacaaaaaatgagctgggtgtagtggcgcacattcgtaaccccagctactatggaggctgagaaaggagaatcgcttgaacccggaggcagaagttgtagtgagccaagatcgtgccactgcactccagcctgggtgacagagtgagactgtcttttttttttttttttttttaaagaaaaagagctaacttgactttaaagagatgaaatgtacatgtaaaataaaattttgttttctgtgaaattttacttcagaaaatatcctgactaaaataaattaaaaaatgagtactcctaaaaaaaaaaaaagaaaagaaaagaaagaaagaaagtaagaaagccaagagcacagaatcaggatatactggaggaaaacaacttttctaggccttcaagatagaacatttcagtgtcaggccg

SEQ ID NO: 36799 - DNA, 1048 bp, Homo sapiens
ctaacccctctgaactctagtttccccatctgtatgatggattgataatgcctaccttatcaggtcattgtgaaaattaaagatatgtgaaaatactcaacatgttcttagcacatagattctttcacatttgcttcacttcttatttagtttttgttgtaggttatcctgtgtatttgaccttccaaacaaaggttgcttttgactttatgacttaaggttggaatatctcctactactcccctgtcctccttggaccagaaaaaaaaaaaatcccactgtgatcctagtcatgcgtatgtggcatttggagaatttaagaaggtatagaaattgacagctttggcaatactattgcttatgttacacaagatgtgtaacttatcagtgaggtgaaatggtaaagtaatgcttatccttaaaagctaagacttaagtcatctcagataaagctaatactcccatcttgacctcttttcttcacacaatccttcaacaggacttcattgacttaactagagagaccagaccaaggacaaaagatcgcagtggactgtatgtgattgacctgacaagagctgagggagaaaatagacctattgccactcttgacttaactttagaacctgtcactccttcccagaaggagccaaccagtcttcagacatgtgccagcctctctggcaaagcggtgatggaagggcacgtggacagaagctctcagcctacagcacggagaatcattaacagtgatcctgtagatttggacctagtggaagaaaacacctttgtaggtcccccacccgctacatccatcagtggaggctctgtttatccaacagagcctaattgtagctcagccacattcacaggtaacctcagcttcttggcaagtctacagctgtcttcagatgttagctccctctccccaacaagcaataatagtaggagcagcagcagcagcagcaatcaaaaagcacccttgccatgcccacagcaagatgtatctcgcccaccacaggccttgccgtgccccctgcgacctttg

SEQ ID NO: 36800 - DNA, 1134 bp, Homo sapiens
atagctcattgcagccatgacctcttgaactcaagtgatcctcctgcctcagcctcctaagtagctaggactacaggcacatgctatcacgcctggataatttttttatttttatttttgtagagatgggggtctcactatgtttccggggctggtcttgtttcctggcctcaaatgatcctcccacctcagcctcccagagttctgagatcacaggcatgaatgactatgcccagcccacattatttaaaaaaaaaaagagagaaagaattatttggggaaaataggtattctcaagattcagcactattcttgagttgaaagagatataattacaggtagttaaaggaggggagaaaaaaacaaaactctagaaaaacaaaaaaacttcacaagaaaggaatgattttcttagtatactatatggatttactaaaagtagttagtaaacgtattagtaaatacttttaacagaatcctgacactgtaaacactatgtagttataacatttagaatcaatttatatacaaagcataggagacaattttattagccttgacgatgtaaaacggaaagtatagaagataaagtttgggagatgaaaagggacaggacctctgaaaatagcagggctggtgtaacatccttatcttccaaaatggggagtcaagagatactgtctatagatgatggaaatacacttcttttaggaagagaagaggtgggggattggcctaagtaaattcttatctagcatagcagaaagcaatagataatgtctacagttgataaatcaagaaatcataataaaagcctatttctttagagatgtttatggtgacttctagaagaatgagttaaaaattattctaggatactggagaacacaagtagtggtggagagtggagtcagtagaagactttctttttatcaaaaatctagcacaaggccaggcgcagcggctcacgcctataatcccaacactttgggagaccgatgcaggtggatcacctgaggtcaggtgttcaagaccagcctcaccattatggtgcaaccctgtctctactaaaaatacaaaaattagccaggcctggtggcaggcacctataatcccagctacttgggaggctga

SEQ ID NO: 36801 - DNA, 1034 bp, Homo sapiens
tcatagtgacaatgtgtagtaattatttttaatgtgtcctaaacttgtctttgtcaaatgtgaaagactttttcctcattctagcagttgctaatccaacaaacccatttctaccctgtccacaggttttgtgattctgtgggcttccatggtattccttcttaactgtcttttttaggacaaatgttgtacattcagggtgaattgtggctcatgttctttgaagcatagttgtgatgattaactccctcttcctcttctccacacagagaaatgttctttactaccatggaaagccaccttctgcgctgcaaagtgttagaaatcatattcctccacagctgtgagacacccacccgcctgcctctgtctctggcccaggccctctactttctgaataattctacgtcactgctcaagtgtcaggtacattttttcctgcccaatttcaggcctagagcacctctctttgctctaggcccgaacccttcccataggattttagcttaaaacacaactgtttgagcattctgtaaaggtgaattgaaaactgtacaaaaattttaactggggaaggcatttattatcaatccattttactatctctgcagtcagataaaagccagtggcagacttgggacgaattggttgagcatctgcagtttctgctgtccagttatcaacatgttttaagaggtaaggagcatttgttcacaagtggagtagtggaaggtctcaatggacatttgtattagtcataactacacaggatattctgatttgttgacattgttccttggttgtatgtaacttattataagggataagaaatgacatagccggagtcaccactgtgaaaagaattcacatattcttgttatggccgacaatacatggtcctcatagttgtaagattgtgtaggtaagcagaagtcatcagaacctccagcctggccaacatggtgaaaccctgtctctactaaaaatacaaaaattagccaggcgtggtggtgtatgcctgtactcccagctac

SEQ ID NO: 36802 - DNA, 1026 bp, Homo sapiens
atttgtataatcctttagatgcctctgcataccgatttaaaatgcatcccgttgtttttgtggcgttttcgatcctttcttttctaatgtgtcccataaataaacagttttatttaaagtttcctcatcgtggccattttaattctaagttgttcctagtaaggttaacctgtttttctaaaaacaagttctgggtccataattttggtttttttttttttttttttttgagacagagtcttactctgtcaccacccaggctgtagcgcaatggcacgatctcagctcactgcaacctccgcctcccaggttcaagcaattctcctgcctcagcctctcagcctcccgagtagctgcgatcgatcacaggtgtgcaccaccgcccagctaatttttgtatttttagtagggaggggtttcgccacattggccaggcaggtgaggtgatttgcccgcctcggcctcccaaagtgttgggattacaggtgtgagccatcacacccggacttgttttgttttttgagatagagtgttgttttgtcgcccaggctggagtgcagtggcgtgatctcggcttactgcaacctctgcctccagggcacaagagattttgccacctcagcctcctgagtagctgggactacaggcatacaccaccacacgcccaactaacttctgtattttttgtagagatggggttttgccatgttgcccaggctggtctcaaacttgtgagctcaagagatcttcctgcctcagcctcccaaagtgctgggattacaggcatcagccaccacacccagccccataattcttacatataaaattagatggagtcccagactccttggattgaaacaaacccgttatcaaaaggataacctacccaatgcctctaactggatccatccagtttattatgggatgcagtccaatccaggacccagtccagtaaaaattgctcagataaacttggagagctcaaaacacaaatttatggagctcagaatcctaggaagaactcac

SEQ ID NO: 36803 - DNA, 1054 bp, Homo sapiens
gttttgttctctattaaatccccagggtgcttaggatgtgacatgttctcaataagtagttaacctaatgaatgggcttcgcgaatgaatttgttccattgccttaggcaagtttctttttattctttcatgccagaggaaaatggcactaccatttcttgaataaatgtgaggctacagccacacagttagatagtccctaaggcaaggagtgttatacccattttatagataggcaggcagagaaagatgaattgcttgcttttcttttgggaacctggattcttttaatagttgttgaagcctccagggggccaggcggatcacttgaggcccagcctggccaacatagcgaaaccctgcctctactaaaaccacaaaaatcagccgggtatggtggcacacgcttataatcccagctatttgggacgctgaggtgggatatagcttgaacccgggaaggagactgcagtcagggaagcctagggaagcctcagaccaaggatgattgaataacaaagaaaaggtgtaagtaaagatctccaactcttagggagtactaattaggaaagttaagggtagaaaaagataaattaaggaaaataccgttgagatgctaatgggttaatttcagagaaaaaagactgagtagagggggtatggggaatgtgtgctggggagggagtgtgacgaaggtcgtaaagagacccttgctcaacgtcagttgagcgttctgactgtggggaggtcgaaaactcggaagggcctgagggaaggaatgggcagtaccacgttctgacacctaggtcagtatggcgggggaagagtaaagaagacaaggaccgagaccctgccatgtcagtacctttctcttacggaggggcaccgccctgttggggtccacagccaaccccatctcggccaggttctgccgtaccgatttagcgtggtcccaggcatgtcggatgtgggagctaccggcaaagagagacatcgcggatccgtcatctcgcggaccgtcccggccgaggcccacggccacccggaaccccag

SEQ ID NO: 36804 - DNA, 1023 bp, Homo sapiens
cctcagattgggttcagatccttctcagaccagcaggccggccccctcccccccagactccaactgccctgattcccccggcccccaagcctctgttggaccctagccttccagccatcgctgcgggcagacccgcctcgtctgtgcctctgtgccctcagcgtgtcagcttccctggtttgccttagcggcgtcagtcctcagccatccttcccagcccggttatcggtcggaccctctccgcccaacgagtctatatctgccggagaagcttagtccccaccgcggagttggcgtcatttcgggtctctgacaggaaaacctcctgccagcatcccatgccatttccacatacactcccacaaactggggcctcttggataccaggtttcgtgttgggggttccggtcggggagggggcacctacacacagatctggtccccgccctagaggtgtgggaggacaccaagtgaggaaacaatgcaagatgataagtgtcatcagtggtctgtcgggatttattacttttggcttattcctggattcctgtgcttaactatgcttgaggagggtggtaacttgcagaaatgttatgttaatacaagatgttgtattaagaacatttgccactgatcacttacccctgagctggagaatggttggaggataccactagggtgggtaaccttggcactttgttaccagtttccttatctctgaaaggactgtcttaaaaatgtctacccccaggccaggagcggtggctcacgcctgtaatcccagcactttgggaggccaaggccagcgaatcacgaggtcaggagttcgagaccactctggccaatatggtgaaaccccgtctctactaaaaatacaaatattagccgggcgtggtggtgcacgcctgtggtcccagctactcgggaggctaaggcaggagactcgcttgaacccgggaggcggaggttgcagtgagccgagatcgtgccactgcactccagcctgggcaacaagagtgaaac

SEQ ID NO: 36805 - DNA, 1174 bp, Homo sapiens
tacctctcttccagaaatgctgatagccaaacattattttattgctgagcagagaattggtagcaaagctaatggaatgtctccagccaaaactgcaatattctttctctctgaacaaagctggcattgcaaaacttaggttggcactgaaatggcaatgaatattggcttgagacatacttagcatttgacttatgttgaatccagcccttccagtgtaaattggaatagtcctttcgaaatgcattttggcactgtgggtcaagaactttaaaaataatgtatattctttggctccaagttttacctagatccagaagaaatcctaaatagaggcaaactttataaatagtagtgttcatcatagtgctattttaatagtgaaaattggaagcagccgtaacatctatatgtaaattgttgtagccagttagagtattgtataaccatggttatgaagagtgtattaagtttatgaagagtttgaagggagtatttcgtaaaataatgtgcaaaattataaatatctgaaagagaggagtctcacacaggtaagagaaaatagagaaggctcctcaaaccttgacttgtatgtagtgatgtgagagggtggggtggaaaagttggttttccagccaggagagaaaacaccagaagattcctgtaaagatcaaaggcagagatgaatggattttcctcagcatgcatacagtctagaatggagaagaaaagaccattagacagtttcccctataataattttatttaattgtaaaagaggttgaatcaagccctaaacctttccttggagtgtggggaactagaaggaaatttgtaaatgtaaaccagttgtattactaatggttggaaccaccacagggtagcctctcacgctaccccatttctaatctttctctaatatttaaactttaccagccgggtgcggtgactcacgcctataatcccagcactttgggaggccgaggcgggcggatcacctgaggtcgggagttcgagaccagcctgaccaacatggagaaacccggtgtgcactaaaaatgcaaaattagcggggcgtggtggcgcatgcctgtaatgccagctacgcgggaggctgaggcaggagaatcacttgaacccgggaggtggaggttgtggtgagccaagatcgcgc

SEQ ID NO: 36806 - DNA, 1033 bp, Homo sapiens
aaaatcccaggaaaacagaaaggagaaggaggggcaagtaggacaaccagaaaatgacctctgttctagagcactgtccagtagaactctctgtgatgatagaaacgttctgtatctccgctgttcagtatgaaagccattaaacacgtggctgttgagcacttgaaatgtggctagcattactaaggaactgaattttaattgtatgtaatagatttaaattcagaatagccacatttgactagtggctacagtacttagacggtgccattctagagagtctgggtgcatagcctgacacatgatctttttggatactgtgtcttcccttccaaacccttctagccctaaattgttctacaaaaaatactcaggatttatgtaggccagtgttggaatttataatcccagtagtttgcattcttcctgaacaggcaatagaataacacttgctgctttatggcttttgaaccagactctactctcggatttgatggtccactcacagactgttcacctccctttgttgccgtgcctctggctctgttacaggaatctgtacaaattggcccactcgatatgcactgtagtaagctggattcatgtgatatttattccttcctccccaggtttgctcttcgttttatacggcctgaccctcgcagccgggtcactgaccccgttggggacattgtttcatttatgcactcttttgaagagaaatatgggagggcacaccctgtcttctaccagggaacgtacagccaggtcagtgccataaaccatatagatgccaacttaccgaaatgattctatcctcaaaggagagcacagcccagcactgatcatgtccttcttgtactcaaaaaccttaattagctcttcactgcttataggggtgggtaataaaaaagaccaaaccttttagctggcccctctttgatctaatgctgcccttcttttgaggtcttttctgcataacttattttaccataccctcagttccagctgactcattccctgaacatagtct

SEQ ID NO: 36807 - DNA, 1041 bp, Homo sapiens
attacaggtaaagaaatggcggctcagagggaaggagagacttgcctaacttcagggcaagctaacgcttgatttcaacttgataaatttctgagtatgcagtgggtgcacatagcagagacaggtaatgagaagttttcttttttccttttctttttttgtggggggtggggacagagtctcactctgtcacccaggcaggagtgtagtggtgcaatctcggctcactgcaatctccccccaccccacctccaggttcaagcgattcttgtgcctcagcctcctgagcagctggcactacaggtgcacgccaccacgctgggctaagttttgtatttttagtagagatggggtttcaccatgttctacgtttcaccatgttggccaggctggtcttggactcctggcctgaagtgatctgcctgcctcagtgtcccaaaagtgttgggattacaggcgtgagccaccgcactcggccgagaagtttttctgattaaaaaaaattttaaggcacacacttcagacagtggctgtgaaggaaccctgatgtgtatctaaactgtcgcctcgtgcacatcaccccattacttactctgtgctaagtgctgtcatgcattacatcattactccttagaacaggcctatgaggtggagtctgcattaggcccattttggacaaggacaccaatagtgtgggaggtggtgtaccttgcccaagcccccagcaggtaagtggtggtggggattaggacccaggtcacttgagtccatatcctgggctcttagtcccactctgcctggctgcctgctgctccgtgaagccaaccctggacctagacctggacctggatcgtcatagcccagatccctgtgtgcttcccaggctgccttgtggcaggtggatggtgcccctcgagatgggcagggcaccatctggccacacgtgcctcatcgtgatgggtccaaaggtctgggcaggccaggacacacctctgtcaaccagagcagtgactcagagctgtcggcctcagccgtaagggc

SEQ ID NO: 36808 - DNA, 1003 bp, Homo sapiens
ttatattaaatccccactcccacctcctgccctaggcaaccagtgacctgttttctgtcttgggtagtcttttgagtttggcttctctcagcatgtttttgaagttcagccaagtcatggtgtgtattagtacttcattcctttttattgctaaatagaattccattgaatgaatataacacattctattaatccattcattagttctagacatttggattgtttccagtttggagtttttgtgaatagtgctgctgcgaacattcatgcccaagtttttgtgtgaacatacatttcatttcttgagtatatccctaagagtggaattgctgggtcatatcgtaactctgacattttggagaactgccaaactgttttccaaaatggcttcaccttttatatttctgccatcagtgtatgagggtttcgctttttctataaccttgacaacacttgtcttttttgattataggcattctagtgggcatgtagtgatatctcattgtggtttcctaaagactgataatactgagcaacttttcaggggctgactacccatttgtagatctttggtgaaatatctattcacatcatttgcctattttgtaattgggctgtttgtcttctactgagttgtaagagttatctgtgtattctgggtacaagtcttttattatagatatgatttccaggtatttccccctgactgtgacttgttttttcattttctaaacagtgccttttgaagcacaaaagttttaagttttgatgagattaaatttatcattttttatcctatgtattgtgctttagtgtcatatctaagaactctttatcttaacccaagatttgagaaattttctcttgtagatcttccttattattattattatttttttttttgagatgcagtctcaccctgtcacccaggctggagtgcagtggcatgatctcagctcactgcaaccttcgtctccctggttctcctggaggaggtcaagcg

SEQ ID NO: 36809 - DNA, 1314 bp, Homo sapiens
gattgatgcctattctggacatttcatgtaaatagaattgtataaatatgtggcatttttgtgactggcttctttcgcttagtgtaattttttttttttttttttttggtttttttttgagacgacattttgctcttgttgcccaggctggagtgcaatggcatgatctaggctcactgcaccctctgcctgtagagttcaagcgattctcttttttctgttttattttgttttgagacagagtctcgctctgtcgcccaggctggagtgcagtggcgcgatctcggctcactgcatgctccgcctcctgggttcacgccattctcctgcctcagcctcccgagtagctgggattacaggcatgcgccccacagccagctaattttgtatttttagtagagacagggtttctccatgttggcaaggctagtctcaaactctcaacctcaggtgatctgccgccttggcctcccaaagtgctgggattacaggcatgagccactgcgcctggacacttagtgtaatgtttgcaggatcatttggctggatatagaattcttagttgacatttttattctttttcaccactttgaatatgtcattccagtgccttctggccttaattgttttcaaataagaagttgtcattaattgaattatttcactgtacatgatgagtcatttttctctctctctcaccgctttcaggattttctgtctttgcctttcaacagtttgtgatgtgtctaggtgtagctctcttcacatttttcctagtttgggttccttgagattttggaatgtgtagattaatgtttttcatcaaatatgggaggtttttggacattttcttcaaatatttttttctactctctctctcttctctcttcttctgaggctctccttacacatatgttagtatgcttgaagtttttccataatctctgaagctttgttcattattcttcaatgttatttctctttgttcttcagatcagctatttctattgctgtatcttcaagttcactgattcttctgccattttgaacttgctgttgagctcctccagcaaatttattgtattataatttcaactccagaatttccatttgtttgttttattagtagcagatcatcagtacccttacatttgctttcttcatgccttttcttttttcttttttttttttttttttttttttttgagatggattttcactcttgttgcccaggagtgcaatggcacaatctcagctcactgcaacctctgcctccagatccaagcaattctcctgcctcagcctcccgagtaa

SEQ ID NO: 36810 - DNA, 1071 bp, Homo sapiens
atgatctctgctcactgcaagctccgcctcctgggttcacgccgttctcctgcctcagcctcctgagtggctgggactacaggcacccgccaccacacatggctaattttttgtatttttagtagagatggggtttcaccatgttagccaggatggtctcgatctcctgacctcgtgatccacccacctcgaccttccaaagtgctaggattacaggcgtgagccaccgcacctggcccagttgatgaatttatacagagctcaattgtagattctaaggtcacatgtaggcctaaggaatagcaagtcatttttgagacagggtctcactccctcaccaaggctggagcatagcagtgcaatcctggctcattgtagcctcgagctcccaaactcaggtgatcctcccacgtcagccacttgagtagcagggataacaagtgtgcaccaccatacccagctaattttttgtagttttttatagagatggggtttcaccatgttgtctaagctggtctcgaactcctggctcaaatgatcctcccacctcagcctcctgaatagctgggactacaagtgcatgcaggctaccacacctggcttaaatttcctttctttcttttttttttttttaattttgagacaaggtcttgcagtgtcacccaggatggaggctgaagtgcagtggtgtgatcacagctcacttcactgcagccttgacctcctgggctcaagttcaaacgatcctcccacctcagcctaccaagtagctgggactgtaggtgtgcaccacgacactcagctaatcttttttggttttttgtaaagacagggtcccactatgttgcccaggctggttcttgaactcctgggctcaagcggtccttccacctcagcctcccaaagtgctgggattataggcatgaaccatcacacccaacccttaaatttgttaagtttattaattatcttgctgtcccacaaaagttctctgtgttcctacttcatcgaccctgtgaaaagcagccctgtgcttcatactctagatggcatctctcagcctctgcccca

SEQ ID NO: 36811 - DNA, 2010 bp, Homo sapiens
cctctgaccctcttttttttcttcttttttcttcttcttcttgtgtgtgtgtgtgtgtgtgtgtgtgtgtgtgtgtgtgtccgagttttgctgttgctcaggctggagtgcaatggcacaatctcggctcactgcaacctctgcctcccaggttcaagtgattgtcctgcctctgtctcccaagtagcagggattacaggcatgcttcaccacacccggctagttttgtatttttagtagagatggggttttaccatgttggccaggctggtctcaaactcctgacctcagatgatccacccaccttggcctcccaaagtgctaagattacaggcattaccaatcgtgcctggccacctctgaccctcttttaaaagttctgggccaattttgtttatagagtcatttctcttggtttttcagagcatagctaagacaggcaaggtctttcacaaaaatttaccatttaaaagaaaaatgcagaaataaaaagagatcattaggggcagaaatacagcccttctgcctaaaagggctgacataggtaagctttagattttgtggattaaggagagacatcttaaaagctccccaccaagaacctcttccagggcatcgacttttttttttttaagacaggggcttgctctgttatccaggctggagtacagtggcactaacatggcttgccatagccttgacctcctgagctcaagcaatccttctgtctctgtctcagccttagcctcccatgaagctggaaccacaggcatgtgccaccacccccggctagtttttggtttgttggtgtgtttgtttctatgtagagacagagtctcaccatcttgcccaggctggtctcaaactcctgggctcaacccatcctcccacctcagcctcccaaaatgctgggattacaggtgtgagccactgtgcctagccttgaccactttttggctgagaccaggagattaaaaatgtgggcctgccctcctctcccagttttagactctgcctctgcctctgcctcacattgccagcgccatgatagaactcatgccttggccgggcgcggtggctcacgcctgtaatcccagcactttggaaggccaaggtgggtggatcacgaggtcaggagatcgagaccatcctggctaacacgatgaaaccccgtctctactaaaaatacaaaaaaattagttgggcgtggtggtgggtgcctgtaatcccaactactcgggaggctgaggcaggagaatggtgtgaacttgggaggcggagcttgcagtgagccgacatcatgccactgcactccagcctgggtgacagagcgagactccctctcaaaaaaaaaaaaaacaaacaaaaatgaacttatgccttgggagagattttacctcctcttctcttctcaaaaaggtaagactgttctccaggcacaataatttaagcacaggttaataccatgtttcatatagtgtggcacttatataatacgttatgtgattttattttatttatttatttagagacagagtctagctctgtcacccaagttggagttagtggcacaacctcagctcactacaacctctgcctcctgggttcaaacaattctcctgcctcagcctcccgagtagctgggattataggtgcctgccaccacacctggctaatttttgtatttttagtagagacagggtttcaccatgttggccaggctggtctcgaactcctgatctcaggtgatctgcccacctcggcctcccaaagtgctaggattacaggcgtgagccaccacgccccaccctgttatgtgattttaaatgtttcaaagtcagatcaagaacaatgagaaaagtattcctttttcgagtctttcagtcctcctgattctatctgggaagaagtttcagttgggtgctaccatatcttaaaacctctcagcacagttgctgttctcttcttcctggggaatgctccaagcctcatttttatcatatttatttt

SEQ ID NO: 36812 - DNA, 1030 bp, Homo sapiens
ctgggattacaagtgtgagccactgcgcccagccgcctggctgattttttaaaaaatttttcgtagagacagggtctcgctttgttgcccaggctggtctcaaattcctggtctcaagtgatcctcccacctcaggctcccaaagtaccaggattacaggtatgagccaccacacctggcccttttctcacaatttataattcagaaaggcaagataaactctatgaccctgggcaagttattttacatatttgcaccctattcagagatcaggctttctgagagagatgctgggatccctttatgtagtcttgaaatacatggtttcctagcctaatcataatcaacaagtagaacgcaatgggaggctgggtgcggtggctcatacctgtaatcctagcaatttaggtggctgaggcaggcggattgcttgagcttgggaattcgagaccaccctaggcaatatggtgaaaccccgtctctataaaaaatacaaaaattagccgggtgtggtggcatattcctgtagtctggctacttgcaggggtgggtgggagaattgcttgagccctggaggtggaggttgcagtgagccgagatcgtgccactgcactccagcctgggcaacagagtgagaccctgtcttaaaaaaaaaaaacctaatggtccacttgttcagcaaactctgagcatctactgtgtgccagactccagctgggtgtgaaggataagaaacaaaaatgagtcaaatagtccgtgttccaatgtcacacttgagttcacagaaaagtctcctaagctatgacactgtcagtttagggtggcaagtggtatgacagaggtctatttaatgtactctgggagcacagaagaggagcagggttaattcttcctggaatacacaaagggacttgacagttgtttactgaatgatgtttttttttttttgagagaaagtcccccagaggaaaagcttatatttaaattgggtcttgaaggctaagcagacacgctgccaagcaggaaagga

SEQ ID NO: 36813 - DNA, 1034 bp, Homo sapiens
tttgctgtcgcctagactggagtgcagtggtgcaaccttgactcactgcaacctccaccctctgggttcaagcaattctcttgactcagcctcctgagtagctgggactaccggcacctgccaccacgcccagttaatttttgcatttttaatagagacagggtttcaacatattgctcaggctggtcttgaattcctgacctcaggtgatccacccacctcagcctcccaaagttctgggattacagacatgagccaccgtgccctgcctaatttttgtattactagcgatggggtttcggcatgttggccaggcagatctctaactcctgatctcaggtgattcacccgcttctgcctcccaaagtgctaggattacagacatgagccaccgcacctggccatacaattgccttctatatgttttttatttaatatgacatttgtatttccccatgttattaaaaaattctttataagcatttttagtgactgcatcgtactacatttaatattcgtctaatgctgaacatttaatctccccaccccccactttttggtgttacagataacactacagtgaacatctctgtagaacactttattacatttcaggttattttctgagaacagactctatatccctcattttattggatgcgcattaaatggttctagacttacttacactttcacttctgatgcttctgttcagtatctcaaagaatgaccgttctctcttaacaaccattatacctcttttctgatgttaaaaatctacattcattacagaaaagttggaaaatagtaggccgggtgctcacgcctgtaattccagcactttgggaggctgaggcgggtggatcacctgaggtcaggagtttgagaccagcctgaccaacatggagaaaccccatctctactaaaaatacaaaattagctgggcatggtggcgtatgcctgtaatcccatctacttcggagactgaagcaggagaatcgcttgaaccccagaggcagaggttgcagtgagtc

SEQ ID NO: 36814 - DNA, 1156 bp, Homo sapiens
attcattggccagaatcagggatgttttctgaaggcgtaagtaagagctatagccttcaggtcttcttgccacactggcagcctggcatagcaaagagagcacaggctttagggtcacagacctggcttcactcactggctgggtcaccttgggcaagccacttcactcatctgagcctcagtttttctgaataatgtggcaaagtgatacctacctcattggggtagttctgaggaccaaaggagaaaatatatgtagaaaacacatcactaatttttttttttttgaggtggagtttcgctcttgtcgcccaggctggagtgcagtggcgcaatctcggctcgctgcaacctccgcctcctgggttgaagtgattctcctacctcagcctcccaagtagctgggattacaggcacacgccaccatgcccagctaatttttgaatttttaggagagacagggtttcaccatgttggccaggatggcctcaatctcttgacctcgtgatccgcctgccttggcctcctgaagtgctaggattacagatgtgagcaaaacgcataactaaatgttaatggtcctcttttctctctactcagcctataatatgcaatgtagcctaaaaggcatccctagtatggttaccttttctgaatgaccttgtatgagctccaggaactcaagcctcaatttctgtatctgtgcatttgttcccagctctgcaactgtattactttaaggatgagaataaaactcccaaacttcgtgtcccacttgctgtgaagttctgggaagtactgaggtatccctgcaagagtgcaagtgtgcatctctagtctattgtaacttggcagcctgacaggagaagctcagggcctcctaagaatatgagaaccaccaggatttgtgggcttaaagtagttaaagccgctgaatgaaatagccagtctttgggctccctcaaatcttcccaggtttcccaattagagaatgcattcacctgtgtgactcacacaggcagtgccacatctgcagtaggattaactggtgtcacagccctttctattcagcatactcaaaagcctgacaccttctgggttttttcattgtttctgtttgaactctctcactgcagctctgtcaaaacgccttaca

SEQ ID NO: 36815 - DNA, 1050 bp, Homo sapiens
atagctatctctgaaattttgggcactaaaagaacttgagaaagttacttcataaatgtgtggaaactggaaattgactctatatctttggtaataaaggggtaatgtcagtattttcaacatcctggtgtccagtctagaaagacctagtaggagaaaaatattaggcttttccaaaggatctgtttctgatttcttaacataaatttggccttgttgagtcctttttaatttgaaccggcaaagtatctccccctgcctcagaaataacttattgattaaaatcgaaaactagggccaggcacagtggctcacgcctgtaatcccagcactttaggaggccaagataggtggatcacttgaggtcgggagttcgagaccagcctggccaagatggcaaaaccccatctctactaaaaatacaaaaattggccgggtgcagtggctcacacctctaatcccagcactttgggaggccgaggcaggcagatcacctgaggtcaggagctggagaccagtctgaccaacaaggagaaaccccgtctctattaaaaatacaaaaactagccaggcatggtggcatgcacccgtaatcccagctactctgaaggctgaggcacaagaatcacttgaacccaggaggaggaggttgcagtgagccaagatcgtgtcactgcactccagcctgggcaaaaaagccagactccgtctcaaaaaaaaaaaaaaaaaaagttagccgggcatggtggcatgcgcttgtagtcccagctactcaggaggctgagtcaggagaatctcttgaacctggttgcagtgagctgagatcacaccactgcactgggcgacagagcaaggctccatctcaaaaaaataaaaatctaaaaagaatctaaaaagccaggaaactacaggtgctggagaggttgtacagaaataggaacacttttacactgttggtgggactgtaaactagttcaaccattgtggaagacagtgtggcgattcctcaaggatctagaactagaaataccatttgacccagccatccca

SEQ ID NO: 36816 - DNA, 1132 bp, Homo sapiens
gccaggagttcaagcctggccaacaatggcaaaaccccgtctctaccaaaaatacaaaaattagctgggcgtggtggcacacacccgtaatcccagctactcaggtggctgaggcaggagaatcacttgaacccaggaggtggtggttgcagtgagcctagatcgtgccactgcattccagcctgagcgacagagtaagactctgtctccaaaaaaaacccagatctgtccgactctgacacccaacctttaatcactcactttctgtcaatgtcacctccgttttgaccagccaagctagacctccctggagcctgtggagaagccaaggtagaaaagggttggaaaagaatgataaaataggccaggtgcggtggctcaagcctgtactcccagcacttttggaggccgagacaggcagattgcttgagcccaggagttcaagaccagcctgggcaacataatgagaccctgtttcaacttaaaaaaaagaaatggtaatgaacaattgtcaattctgagcagctgggtatggtatgaccctgtgtactttttctgtattttaaaatgttctcaaaataaaacttgtttaaaaaaaaaaaagaagaggacaaagaagaggaggaggaaaaagaagaggaagagtaaggaaggaggaaagaagagggggagggagggaggaaggaaggaaggagaataaatgaagaaagaggccaggcagaatggctcatggctgtaatcccagcactttgggaggccaaggcaggtggatcacctgaggtcatgagttcgagaccagcctggccaacatgatgaaaccctgtctctactaaaaatacaaaaattagcgagtcatggtggtgcatgcccataatcccagctacttgggaggctgaggcaggagaatcgcttgaacccgggaggcggagtttgcagtgagccgcgattgcgccactgtactccagcctgggcaataagagcgaaacttcatcaccaaaaaaaaaaataatgtaaaataaaaaaatgaagaaagaacaagactgggtagggtgcagtggctcacgcctataatcccagcacattggcaggccgaagtgggcagatcacctgaggtcaggagttggagaccagt

SEQ ID NO: 36817 - DNA, 1010 bp, Homo sapiens
tgggaattttgacgggcagaggggttttaattttagttcatcccaagtgtccaccagtctacagaggaggaaaaagagacgggctgtttctatgtagcaggatcggcccagcttcgggaaaatggagttttcagaggctcatcgaggccattttttcatctccagtcgggggaactttttctgcccatggaagtgcagcagaaaggcatagaggccactaggccttgaagtggctgccattttaaagagtcgagtcagatggcctattaactcagattaattgctgtgcttttggattccaggttgatgccggcccaggatggatcagacctgtgaactacccagaagaaattgtctgctgcccttttccaatccagtgaatttagatgcccctgaagacaaggacagccctttcggtaatggtcaatccaatttttctgagccacttaatgggtgtactatgcagttatcgactgtcagtggaacatcccaaaatgcttatggacaagattctccatcttgttacattccactgcggagactacaggatttggcctccatgatcaatgtagagtatttaaatgggtctgctgatggatcagaatcctttcaagaccctgaaaaaagtgattcaagagctcagacgccaattgtttgcacttccttgagtcctggtggtcctacagcacttgctatgaaacaggaaccctcttgtaataactcccctgaactccaggtaaaagtaacaaagactatcaagaatggctttctgcactttgagaattttacttgtgtggacgatgcagatgtagattctgaaatggacccagaacagccagtcacagaggatgagagtatagaggagatctttgaggaaactcagaccaatgccacctgcaattatgagactaaatcagagaatggtgtaaaagtggccatgggaagtgaacaagacagcacaccagagagtagacacggtgcagtcaaatcgccattcttgccattagctc

SEQ ID NO: 36818 - DNA, 1026 bp, Homo sapiens
ataagtggattgtcagccttcatcattttcaatggaccaaattactaaaactttacaggttggttggttttttttcttttttcatttcctcatgtactcaatttctaaggctttttgaatttgagcttcctaatatctcatgcattaatttttttctccattctcaactttcactcttttaattaaggataataatttttttttttgagatggagtcttgctctgttgcacaggttcgagggcagtggtgcgatcttggctcactgcaatctccgtctgccgtgttcaagcaattctcctgcctcagcctcctgagtagctgggattacaggtgcatgccaccacgcctggctaatttttgtatttttagaagagatggggtttcaccacgttggttaagctggtcttgaactcctgaccttatggtccgcctgcctcagcctcccaaagtgctgggattacaggcatgagccactgagcctggccaaggataataaattataatggttttaggttggacatctctgactgcatactgcactgtgtttactggaagaagtcccttaatgtctctaaggcccatttcctcagttctaaattacggctagtaccttcattggagggttgttaagtctatgatacaagataactttttttttttttttttttttgagacagagtctctatcgcccaggctggagtgcaaaatggcacgatcttggctcactgcaacctccacctcatgggttcaagttgattctcctgcctcagcctcccaagtagcttggattataggcatgcgccaccatgcccgactaattttgtgtttttagtagagatggggttcaccacgttggccaggctggtcgaactcctgacctcaggtgatcgacccacctcggcctcccaaagttgctaggattacaggtgtgagccatctctcctggccatgatacaagataatttatatgaagtaatacactgctggttctgaagtaggtgtgcagtaagtgatgcctactgctg

SEQ ID NO: 36819 - DNA, 1059 bp, Homo sapiens
cattctggatgtccccagttttactggtagtctttcattgtgtgtatattaagttctttgtttttatcacctgtataggttagtatatccatgactcccgtcaactttctaaatgttcgctgggtgcagtggctcatgcctgtaatcccagcactttgggaggctgaggcggctggatcacctgaggtcagtagttcgagaccagtctggccaacatggtgaaaccccgtgtctactaaaaataaaaaaaaaattagctggatatggtgggtcatgcctgtaatcctagctactcgggaggctgaggttggagaatcgcttgaacccaggaggcggaagttgcagtgagctgagatcgcgccgctgcactctagcctgggtgacagagtatgtctctgtctcaaaaaaaaaaaaaaaagttgctaaacatttctaataccataaggatccctgctgttgccagccgttttaaaactacatccatcgtcttcttggcaaccttccatctctttttcgtatgtgacagcgtcttgctctgccgcccaggctggagtgcagtagttgcatctcagctcactgcaccctctgtgtcccaggcttaagcgatcctcccacctcagcctcctgattagctgcgactacaggcacttgccaccatgccccactaatttttgtatgtttttgtagagatggggttttaccatgttgctcaagctcgtcttgaactcgtgagctcaagcaatccgcctgccttggcctcccaaatggctgggattacaggcaggagccaccatgcctggcctagcccctccatctctagcctttgtcagttactaaactttttttcctgaagttttgtcatttcacaaatgttagataaacatgagtcatacagtatgcagccttttgggattgtctttttttcccttagcataatttccaggggattcatctaagttgttgactaaatcaatagttgttttttttgtttgttttttttttgagacggagtttcactcttgtggaccaggctggagtgcaatggcatgatcttggctc

SEQ ID NO: 36820 - DNA, 1018 bp, Homo sapiens
aatgatatatatatatatatatgaatgaatgaatgagatggagtctcactctgtcacccaggcaggagtgcagtggtgccattttggcttatggcagcctccgcctccggggttcaagtgattcttgtacctcagcctcccgagttgctgggattacaggcactcgccaccatgcccggattttttgtcttaattcatgaaggatgaattaagtctgcagttgttctttttccctttttctttccagtttttttttttgtttgtttgtttgtttttgagacacagtctcactcggttgtccaggctggagtgcggtggcagtatcttggctccctgtaacccatctccctggttcaagcgattccggtgcctcagcttcccaagtagctaggattacaggtgtgtgacaccacacctggttaatttttgtatttttagtagagacgaggtttcaccgcattggttaggttggtctcaaaactcctgacctcaggtgaaccgcccacctaagccttccaaagtgctgagattacatgcatgagccaccaagtctggcctaagtctgaatttttttttttttttttttgagacggagtttcgctcttgttgcccaggctggagtgcaatggtgcgatcttggctaaccgcaacctccgcctcccacgttcaagcaattctgcctcagcctcccgagtagctgggattgcaggcatataccaccacgcctggctaattttgtatttttgttagagatggggtttctccgtgttgagactggtctcgaactcctgacctcaggtgatccgcctgcctcggcctcccaaagtgctgggattacaggtgtgaaccactgcacccggccgaatatatttttttttttttaaatggagtctcgctctgtggcccaggctggaatgcagcggtgtgatcttagctcactgcaacctctgcctccctggctcaagcgattctcctgcttcagcctcctgagtacctgggaccacaggtgtgcaccacc

SEQ ID NO: 36821 - DNA, 1079 bp, Homo sapiens
tgatcagtgatactgagcaccttgtcatattcttgtttgccattcgtatgtctttttgagtaatttctattcagattttttgtccatttttaggaaaactttaatttgattgttatatttttcttttagatttgtttgatatcctcacatagtctagttacttgttttgggtttttttttctcttggagacagggtctcactctgtcacttaggctggtgtgcagtggggcagtcatggctcagtgcagccttgacctcccaagctcacgcatccctcccagtttaccctcccaagttgctgaaactacaggtgtgtgctaccatgtctgcctggtgtgggtgtgtgtgggtgtgtgtgtgcacgcaaggatgggatctcgccaaagttgatcttgaaatcctggcctcgagcgatcacccaccttggcctcccaaagtgctaggattgtgcaggcctgagccaccacgcctggccttttcttgtttataaatgagattatgtatttatacttgggttgatttgatgacgttattcttaaatatgggtagtttaagctgtggaaaagttttagtaggctttggatatcatataaatcaagcatctaaacggatgtgtttttgtcttatatattgctgtcgtctctttataacaacttaatattatgggagtttttggtaactaaaacaataactgagtccttagagttgcgataatttctatgataattgttatgtaaagcattagtacttcccccacttcccctcgtctttacctcaagttgtgtatcactatagattctcagcaagtttttctaaaaaactgtggctgggtgcagtggctcatgcctgtaatcccagtactttaggagggcgatttgggtggattgattgagctcaggagtttgggaccagcctgggcatcatggtgaaaccctgtctctacaaaaaatataaatgccaggtgctgtggctcacgtctgtaatcccagcacttgggaggcggaggctggtggatcacctgaggtcaggagttcgagaccagcctggccaacatggtgaaaccctgtctctcctaaaa

SEQ ID NO: 36822 - DNA, 1085 bp, Homo sapiens
taagatggaataatttagttgtacttattttgtaattctttttaggctagagtgttttcattctcaatttttcatacattgctttttcagaaggctaataggaatgacaataatgtttcaaaatattttgattcttattgatgccccatgttttgtctgtctaaagtgtcaacctaagaaaaagtctacgccactgaagtatgaagttggagatctcatctgggcaaaattcaagagacgcccatggtggccctgcaggatttgttctgatccgttgattaacacacattcaaaaatgaaaggtaatacttgcagtgattatacatgttaaaggcagttgcctttagaataactcaatttttgttatcttaataataatatatttttttccttggaacattttgtgaatgaattggtgttacatattttatcttttggggcttttaaaagttcgttttactctatgatttaaaccttctctcagttttttttttttgtttgtttgtttttgagacggagtctcgctcttgttgcccaggctggactgtagtggtgcaatctcagctcactgcaacctctgacttgtgagttcaagcgattctcctgccttagcctcccgagtagctgggattacaggcatccgccaccacgcttggctaatttttgttttttgtttttttttttaattttttatttgagatggagttttgctcttgttgcccaggctggagtgcagtggcgtgatctcagcttaccgcaacctctgcctcccgggttcaagcaattcttctggctcagcctcctcagtagctgggattgcaggcatgtgccactacgcccagctaattttgtatttttagtagaaacggggtttctccatgttggtcagactggtctcgagctcccgacctcaggcgatctgcctgccttggcctcccaaagtgctgagattacaggcatgagccctgcaccaggcctaatttttgtatttttagtagagacggggtttcaccatgttggccaggctggtcttgaactcctgagatgaggtgatccgcccgccttagactcccaaagtatgggga

SEQ ID NO: 36823 - DNA, 1024 bp, Homo sapiens
tcaagcagtcctcccacttctgcctcccaaagtattgggattacaggtgtgagcccctacacctggccagttcaatgtattgactcatgggagagtgatttaattctcaaattgactttaagaacctctgtataggtacacacatgtgtatattaaccagttccagttcctgtaggtgatttttattgaaggatttaattcagtaggtgggaaataaggagttcattttttttttcagtttgtttttaaaatgaaccagacaacacaaaatttaactaagttttagtttcattattaagctatgttttttaatagaaaaactaccatgtgtacacttttgaaaccagcatttacagagaagttaccgttgacagttcagtttataaatcccttctctcctttgtctttcttttttcatttttcattttgcattctgagggaagtaggcattccataattcttccaaaggttatttggattcttttctgtgttttgaaataagacatggttgttacaagggaactagatgtgagttaaaatgaattttcgtataaaatgatttttatttccttttattaaaagtgacaaattgttaaacatgtgttgtcctgactttcttttgtgacactttttagtgtaataaaagttgctaataaaattgtaaatgtgtggaagataacatatactagatgaattataatcttttctagatgggatttgtattttcatatttttaattgtatgtatagaactttagataaccaagaaattataggctaaactggatttatttttggttttattactggtaggctttcctttttcttttaaaatttccctaatttgaaatattgcatttcactttctttgcaaaaccagtgtttgaccatgcgcttgttctctctgaagttattgaacttactatatctaaaataccaaaaccatacattattttgggggtgtggttgtggggaggaatccatgcaaagcaccttgtgtggtgctcgtctatgagtagctacac

SEQ ID NO: 36824 - DNA, 1030 bp, Homo sapiens
atgttagccaggatggtctcgatctcctgaccttgtgatctgcccacctcagcctcccaaagcactgggattgcaggcgtgagccaccgtgcctggcctatttatttaaatttttttttttttttttttttttttttttagagaaggggtgggtctccctgtgtttcccaggctgggctaaaggcatcctcctgcctcagcctcgcaaagtgctgggattaaaggtgtgagccactccacgcagccttttattcatttattttattttttaaaatttgagacaggatcgtgctctgtcatccaggctggagtgcagtggcacggtttcggcacactgcaactttcacctcctgggcacaaatgatcctcctacctcagcctactgagtagctgggaccatatgcatgcagcatgtccagctagtgtgtgtgtgtgtgtgcgtgtgtgtgtgtgtgtttttagtagagacagggtctggttgtgttacccaggttggtcttgaactccagagctcatgtaatccacctgcctcagcctctcaaagtcctgggagtacagccatgagccaccatccccagcaatgatctgaatgtttacttgctctgcagaacatccccttcacaaatattaaactatttgtgaacactatgtggtagttagaatcttgactaatacctattgtatggaggtaaggaagaaaataagagtctgaaaaattagctgtatttcagagtctcaatgttttcatgctgtgaggtatccagaaaagataatgtaatacccatggtgtcatcagtataatagctctggattacatgatgaagcctaggagatggcttggttataatccaggttatatttaacatttatagtcgattcttgattagccaggtggctagtgataactagaatttcaaatttcaagttccctagggaggtagatcaaacctgctgattcctcttatcctgttttttctatattcatcatctttaacctttttttctttttcttttttttttcttggttttt

SEQ ID NO: 36825 - DNA, 1025 bp, Homo sapiens
caatctgatcctggtaaaatttctgaaaaaggactctcttttgaaaacggaaaaggcccagagctggactctgtaatgaacagtgagaatgatgaactcaatggtgtaaatcaagtggtgcctaaaaagcggtggcagcgtttaaaccaaaggcgcactaaacctcgtaagcgcatgaacagatttaaagagaaagaaaactctgagtgtgcctttagggtcttacttcctagtgaccctgtgcaggaggggcgggatgagtttccagagcatagaactccttcagcaagcatacttgaggaaccactgacagagcaaaatcatgctgactgcttagattcagctgggccacggttaaatgtttgtgataaatccagtgccagcattggtgacatggaaaaggagccaggaattcccagtttgacaccacaggctgagctccctgaaccaggtaaggacatctaaatgtgataaaaaaaaaaaaattggagaaagtgctgataaacattgtccttctgaaattggtctgttgtaatggtaaagtgaagtataaactagcggggaagaatcatcacttcaatgaagaaggagttttatgtagaaaggtctgaattttgaagatgagatttccatatatattcaaaagttaaactttaccagaagcccttttccccaaccttttcaagtaaatctctataacatctttctttctcactttctctctctctctttctctctctctcttttttttttttttctaattttttttttcttttgagacagggtctcactgtgttgcccaggctggtctcaaactcctgagttcacgccatctgccagcctttgcctcctaaagtgctgggattactcttgcctgacctgttccccgtttcttaccttttaaaatccccaagctttttgggactcaatatgtaactgcaagtaattgagaggctccgatcctaggatttaaatccagttgttaggttatagaaagcaaatagattctattggatggtagtttc

SEQ ID NO: 36826 - DNA, 1021 bp, Homo sapiens
gtttttttttttgagagggagtctcgctctgtcgccaggctggagtgagctggcacgatctcagctcactgcaagctccacctcccgggttcaagcgattgtcctgcctcagcctcccaagtagctgggattacaggtgcctgccaccacgcccggctaattttttgtatttttagtagagacggggtttcactgtgttagccaggatggtctcgatttcctgaccttgttatcctcctgtctccgcctcccaaagtgctgggattacaggcgtgagccaccgcgcccggccctgtcaaaagatattttcaaatttcccttgtgatttcttctttcttccattgattgttcaagagtttgttgtttaatttccacctattggtggatttttcagtttttgtactgatactgatttctagtttcacttgattgtgactggaacagatacttggtatgatttcagtcttcataaatttgttaagacttgtgtggctgggcatggcagcttacgcctgtaatctcagcactttgggaggccaaggcgagatcacctgaggtcaggagttcaagaccagcatggccaacatggcaaaaccccatctccactaaaaatacaaaaactagctgggcatggttgctcatgcctgtagtcccagctactcaggaggctgaggcacgagaactgcttgaacccaggaggtagatgttgcagcgagctgagatcacgccactgcactccagcctgggcgacagagtaagatcctgtgtcaaaaaaaaaagactctgtgtgaccatattggagaatattctatgtgcttttgacaagaatgtgtattctgctgctgtttggtattggtgttttatatatgtttgttatatgcaattgttcaagtcctctgtttctttattgatcttcattgtggttctctccattattttaacgtggagtattaaaatctccttgtgttactctatttctcctttcaattctgtcattatttgctttttatatttgggtggt

SEQ ID NO: 36827 - DNA, 1046 bp, Homo sapiens
ccaaagtgctgggattacaggcgcgagtcaccagccccggcctaggctgaatgatctagattgccactattaggaatggttttggggtttttgcctttttttttgtttctttaaacttttttctctgaggctccagaactaggaaagtcgaggtataaatagggtctaataatctgtattggaagagtgatgttgctactagtattctagtcctttggaaaaattcaccattttaatgaaaaggagaaaactgtatgtagttcagtcttgatgaaagagattttactttttaaaattaactttatccaaggtataatttacatactgtgaaattcgtacattttatgtatacaatcgaatactatttgcaaatttaatgtgttatgcaaccatctctgtaaatccatttcggagcatttctaccatcccagtaaagatccttctaatctgtatatagttaatccctcttcctaccactagtcctagagaaccaatagttgactgtctctgtagatttgccttttccctggacatttaatattaatggaatcatgcaatatgtgatcttttgtgtcttgttcttctcatttggtatatttttctgatttaaaaaaaaaaacttaccatctgtaatttgtccccttttttgctaaatagtattccaccatagatgtatgcctaattttatttattcattcattcattgattaacatttgggctgtttcaactttttggctgttttatcattttagttggtagtgtatactctgaggtctacggctattgctatactcatccagtatttgtcatttatctctttcttcacaatacagtgacattttgtagttgtatagtaggcatgacgtactggttgtgtggtaggaattagggcatatttgctgagaaccttaggggtagtgtgatttggctcttgctttgtttgatatttgctacatatcctgtattaaggtttgcataattactcctctttccattgacttgtgcagttttatggattttgatattttcttccagtatccaaaag

SEQ ID NO: 36828 - DNA, 1033 bp, Homo sapiens
ctaagaaaaaacaaaagaaggtacaggagcaggtgcacaaggtatgttgcaaaatttcagcaaactttcactggtccttaggaaactgcaattttatcttcaatgtcatactttatcttcatgaaacaataatttccttaactgagatcttgttttttattctcagcttctagcacagtacttaggatttagtggttattcaggaaatatataaatgaatctacatattgtatttatttatgtatatatttttccctctttgccttcaaagagtaatgacttaggaatattgttatgatttaatcttaagtaaaaatataggctataaagtgaaatatatatagtctgaccctaatttcaaaagtaaatatatcttatttgtcttatttttcaactcagttttttaaaatgaaatagagacatcttgacattctacccctacatagtttaatatgtagttaaaaaatggaacattttcctttataatcaatttaacatatttacatcttatataagatctgtttatctgacatcaactgtctttcaaatttcatcaattatcccctaacctttacctttggattattcataccaggactcaatctaggactgctcattgtaactggttgttatggttctcaaatcactttgaattcagaacaatcccttttttcatgatcatgatcatgtctataagagagtgacatataaagtcatctactttctgtatttgtgtaattgcttcctcataggtgtcacttagattgttttctctatctcctgttctctgtcaaatggaagatagaacctatcagtttgatagattgaaagttgaacatttttagctagactatatcagagatgataatgtggaatatattgtacattagagggttaaaaaatgttttattcccatcagccattccctgacagtttgttctttcttttttaaaattgagacagtgtcttgcccaagctggagtgcagagatgcacgaacacggttcactgcagccttgacctcctgggtttaa

SEQ ID NO: 36829 - DNA, 1063 bp, Homo sapiens
tagttattatttcagtacctactatgtgccaaaactctattaagtcagctcttttatattattcttgagtgatcctatgaattatcttttacctattgaattttatttacttaggggcagagcagaaactataatctttgtccatttatgaccatgatccaagttctatttcactccacttctccttattttatcctcaccaacaatcagttgttataaaggcagttccgtccttctgacttctcccttagtgattttgtgagttaaagtcaccacacacacatccctcacattagttggtgcttgcattgaaaactgtttacttgttttgtttactaatattttataataagcaaattaccatcctgcctcttcccataagatgacggggaaaacatcaaaaacattgagattcattttgtgtggtatacagattttttaaaaattaacttgtgcccagtttctaaatcatctaatgtaaagatacatgcatttcaggaaattatgaaagtaaacgtcaaagaaaaccaactaagaaacttcttgaatccaatgatttagaccctggatttatgcccaagaagggggaccttggcctttctaaaaaggtatgttatttttgtaagttctaaaagaaataaactcaggaaatgagaaattttaaaaatgacattttgagtagcagttataacattgatgtacatacatatagaaattagtgtgtgtgtcagcagtcatacatgatctgagatttcctacatgaaaggctgttttgcagttgtgtgaccatgtatgtgtataaactggtttcaggtttcctttccaagtgaaaaaaatttttaaatgctttgaagattaagtttgtgtttgttataatttcttttctgggttcaaatcctcttacctgttttctactaaactactatctcaaatatcactagtctactctcctattgccgtgtcgtcgtagcccttttgttttgtttttttgagacagggtctgattctgtcacccaggctggagtgcagtggcataattttggctcactgtaatctctgcctc

SEQ ID NO: 36830 - DNA, 1028 bp, Homo sapiens
aagaatgttttctctcccttagtgaaaccttaaaatggaacagctcagaaagttccagtggaacaaacagcctcagagcagttagtggcagggcatgaggcgcccactacccgcccaatcacagcagggttagaactaacattgcatgcagtccgcccgagtgattggctgaacatctgtaagtgcttaatggctagacaaatagcagcccagagggagggggtcaaatggaagagacatcaataatacagatgtgggacattattttttctttgcaagggagaactaatgcctcacaggacggccacaagccccaaggagactgttgaggaaggtgtagaacacgatcccgggatgcctgcctctaaaaaaatgcagggtgaacgcggtggaggagctgcactcaaggagaatgtctgtcaggtagagaaatgtttgcccacttgtgttttcattgcatgttcatctttaaagggaaacccactccatctctttatgatggtttcttggtagaataacaatgcttttggatgattccagtggagtcactttctttaaggatttgacccctttttttctccccacaaagaaagatacttggagaaatagtttagtgttggtgaaccacgtgcccttaaggcccatgaaggaatatatgccgcgaaacaagtctgagatggaatatgtgaatctctggttgcttattcaaatataattctccagtacttctcatggtgtcacaatctttgggtttgtaagaaacttttcaagggtaattttagctttgagatgtttttcctttaatgtggtgactttagaaagcctaccacctatattgttttatttatttaataaatatttgtagagtatttactatgtatgaagtattgttccaagcactttataaatattacattatttagtcatcctaataatctcataagtagagttctatgattattcccattttgcagatgaggaaactaaattacagagaggataaatagcttgtttatattcatgagaga

SEQ ID NO: 36831 - DNA, 1028 bp, Homo sapiens
aaaatatttgggctgggtgcggtggctcacacctgtaatcccagcactttgggaggccaaggtgggtggatcatgaggtgaggagtttgagaccagcctggccaacgtggtgaaaccccatctctactagaaatacaaaaattagctgggcatggtggcgcatgcctgtaatcccagctactcgggaggctgaggcaggagaatcacttgaacccgggtggcagaggtggcagtgagccaagattgcgccattgtactccatcctgggcgacagagcaagacttcctctcaaaaaaaaaaaaaaattgataaatcttacaatgttttatagtgacagatgcccattgttatttcctaagcgcctgtcttaagtgaggccctatcttagctgagattatttcagaaaagtgatctctctctgggatggttgtaggtatgtcccaaaagggctgtttagaccttggtgggagctcttttggaactttatgatccaactctagctagccagtgtctgttgcttgaaccattcagtagctttctggtttatctctatgctcttttctgacctttctactcttgaactcgttttccatgtagcagtcagaacagtctttttaaaaatgaatacctgattttagctttcctttgttaaagctctccaatggtacacctttgtaactagactaaaatctacaactacgggcccttgcctctttctcacctccttttctgccacttttaacctttgtttactttaacccactgacactggttttactcttgattctcaaacatggaaaaacagatagatgttttctttctcttaacagaattgtgaaaaattgggtgagctgctgttatgtgaggctcagtgctgtggggctttccacctggagtgccttggattgactgagatgccaagaggaaaatttatctgcaatgaatgtcgcacaggtaaagtagatatcgaacggtcttcctccaaagaaagtttgaattttaagtttttcaggaaagacatttattgg

SEQ ID NO: 36832 - DNA, 1049 bp, Homo sapiens
aatggaaaccgatagcttatcttcacaggtgtgggacagaaagtcatccctatgctcatctgagacaaatgcgtacctcattgcttcctctgccctatttatgtaaaaatgcagtttcactgagccagattaaattgtgtattcagtgaaaggctgatgaaggattcaaaagaatgcaaccttttgtcttttacctacttatgacctggaaccccaaccccctatcagaaccaatgacaatgttacacatactgatgtctcttatctccctaaaatatataaaagcaagctgtacccccaccaccttaggcacatgttgccaggatctcctgaggttgtgtcatggacgtgatcgtcaccttggcaaaataaactttctaaattggttgagacttgtctgacatattttgaattcacatcactaaggagatttgtattatcaggtgtatgtatatgccaataattctgtaaaagaagaattttccttacttgagatatattgtttctgtagccaaagactggagtttagttaattctggaagctttttttacttagttgaaatctgacagctagtacacagtcaatggattggtaaaactgctgccaccttagtataaaccaaggcactacctccaaaccaatacaagtaagcagtcatcgtgttctgtatcatcacctactcgcagtaaaagcatggcagtttcaccttagaagtttcttgaagtaaaacaccttagttttattatatcttgtccatgaagtcaacattgtttttctattctctgtgatgaagtgggaagtacacgtaaagcagtttctttgcatactgatggttatcttgagttaaagcactcatgcaactgagtttcaagctgaactatccacattgttcatggaacaccgtttttaattgtaagagttactgataaactatggttattcatgcttggatatttggcagacatttacttgaaaatgaacaactgtgagcctatcaattcaagaaaaagaactgcaaaataatggcgaatgataaaatttgagcttt

SEQ ID NO: 36833 - DNA, 1035 bp, Homo sapiens
tgctgtttatactctggtcattatgtgtcactgataatgtttttatttagtatatcttttagtgaagagaaagaaaatatatatatatatgtgtatggatgtacacatacatgacttgcagtcttgtgatctgaatgccacatttttttattcccacaggaggcagccttctgtgctgtgattcttgccctgctgcttttcatcgtgaatgcctgaacattgatatccctgaaggaaactggtattgcaatgactgtaaagcaggcaaaaagccacactacagggagattgtctgggtaaaagttggacgatacaggtaagcctgaagaatagcactcatctcttttaccatcctctgtttcttgagacctctcagatacaatgcttaacgtatttctaatgatctacttaattactcatggtactcctcccctcttcttcttgatttttttccttataggaagagaaacctaactttatgatttacaattataggaataatacatgttctctgtcgaaatttttttttcttttgtgtattttgtgaaaagtttttttttttttttttaaatgaaaagacagtaataatctcacaaggcaggcgcattgttaacatttcggcatatgtactcccagacgtaccaatacgcagttatgccccccaccatccaaaataactgtttttacagattatactctgttatgtgtcttgggttgtttgttttgagacagggtatcctctgtcacccagtctggagtgcagtggtgtgatcattgctcactgcaacttcaaactcctgggcttaagggatcctgccgcctcagcctcctgagtagctgagactacaggtacatgccactgcacccggccactttttcttttttaaaatattttgattgaacatcacacaccgggaactgttgtggggtggggggtggggggagggatagcattaggagatatacctaatgctaaatgacgagttaatgggtgcagcacaccaacatggcacatgtatacatatgtaacaaacc

SEQ ID NO: 36834 - DNA, 1055 bp, Homo sapiens
actgctgccctgagctggggcccaagggctgggaaatctgttggtgctaccctgccctaccattcacccagctcacagactgccaacaggaagtgctgtttggctagtttcctcccacttgtctacccctcctttgtccttagaccaacatgtttacctctctgctttgccaacttagccagcaggccatccccggccctaacgtctcctggccattatctcttagttatggctttcacgctctcaataggattctgtatttggtcccaatttcctcaagttcttattgaggttactcccatcaattccacggagggaacagtagttattatagaagcatttgcgctttatctaaagattaaaaatagaatctgcttttatttcccaaagtctgtctctgaggttgagacacttgaactcaggcagagggacgaggctgggcagggctgtcctgagtttaggggcctatccctgcatttcactgagacctcggaatctcctctgtgaattccacctgcctagttctcccctttcatcctctctctcttcccacatcatcaaagaggaaaagctctttgttcaaaaggaagagaaaacgtaaagcatcttattttcttttaaaagaattttaaaccatgaaaaagatatttttaaagaaattcaccgagaacattaaagttcattatattaagtatttatcatgtgtgagaataataaatatataactgcagctagtaggtccctttccctaatcttttaggtcatatgagtagggtttgcttggtgccagtcctgtgcccttttctctccagtcatctgtagttgtgatcagaaaaaggtatctgcactgcactgtcagagtctcctttcactatgttgtgtgttaaattaccgtagctctttgtttcatgaaataaactgtgaatttggggggggcggggggagggcgtgcaggccatgtaaaaattttccgtggagaagtttgattctaaagtagcttctctaaagtaggctttggtaggtaatcaacttgacagcagtctagatgtctcaca

SEQ ID NO: 36835 - DNA, 1025 bp, Homo sapiens
caattagaagcagagtcacaacaactgttgggaaatgtgactcttggaggaaggtggggagggagtggccttgccagccctgtgggacgtcccctgaagtttgtaataagaccccttttccaaagggatgtgaattggagtgaaaaggaaatctttcatcttagaaaacttctggtccttaacgcagggtggtatttgggtatgtgcttggaaattgagatctcaagagtgtttgccttggagccagctccccaggaggccttttccagggacaaggcaaaagttgaaattctccatgggtagctagaaagccaatacatctagccctgctaagtcagaaaaagattatgaaaaatgttgaaatttacattcaaagcctcatttgcttatcttgctggagccaacccagtctaatagcaaaatagctgtcattgatacagaaacatcctcatttttaaatgtctgctttaccctgttactgagtttgagatgacttaaatcactgtgttgaccctcttctgaaccaaatctttagcattgatgaaaatagttattttattctttacatccttcaccccacactatggtcagggcatgaaacaccctgttgatcccttcccaggctcggcactgtctgctcactggagccggactcccaggttgtaattctaatgttgcctcatgagaacagaatggcagaaagtttagtcctgacagattcccccatagggagtaatgaggacagcatgaaacttggataggttttacccttagtccctataaggtggattttactaaggttttttaaatgatactgtcatcctcttggggtttatcagccaggttagaggagcccagtgtcctaacctctctcagatcatggcagagaaggagctgcctccagcccctttcttgctgagtttcatttgagcagttccatgtgtagacattccaagtcactgcttggtagttgctgtgggagcctgtcattggctatggccagttagttctcagctgagcttcct

SEQ ID NO: 36836 - DNA, 1046 bp, Homo sapiens
agctgcttgggcgcggtgcggtggtgactgagctacgagcctggcggcgggtgtgcgccgagccccggcccggcccggccctcgcgtgcctcccaggctccgcacccctgatgctgcgcgggtgctgagcccgcttcggccgggacgatggtgaagtatttcctgggccagagcgtgctccggagttcctgggaccaagtgttcgccgccttctggcagcggtacccgaatccctataggtacgtggtatttggaagagcaaaaccgcgccatctcgctatctggagatcgaattatgggtaacccccaagtactgggaccaggaaggactcgatatcgaatcctaggtagaccttatcggggaagcggccaggccaggcctgcaaggtcctgaagggaggttgggcctgggtggtggtttacttgagaccttagtgtaagattcttttctcagtgtggtgagacaagaagaggcggcagtatgggagttgggagggatcttggagttggaaatcctatttctctgcccgtggcgctttcctggggtgcaataaatcatgaggtccattcctgctagaaggcaggaatccaggtcagtcagatggcgggagtgggaatttgccctgggatgggcccttaactctggtttgaaccatagcacataccaccctgcaaggttacgggaaggcgtggcctctctaggcccggagcctccaaatgggaatcccctcgggcagtctcttaggggcaagcttctgagggtcaccttcaccctgacacctgcagcaaacatgtcttgacggaagacatagtacaccgggaggtgacccctgaccagaaactgctgtcccggcgactcctgaccaagaccaacaggatgccacgctgggccgagcgactatttcctgccaatgttgctcactcggtgtacgtcctggaggactctattgtggacccacagaatcagaccatgactaccttcacctggaacatcaaccacgcccggctgatggtgagacacctcctgttgtgattctgcacctccc

SEQ ID NO: 36837 - DNA, 1032 bp, Homo sapiens
atggccagactggggactggtacctccactagagaacccttacgacaacctggctctgcccctcccacctgcatggcttttttttgagacagagtctcactgtgtcacccaggctggagtgcagggctcactgcaacctccgcctcctgggttcaagtgactctcctccctcagcctcccaagtagctgggactacaggtgcatgccaccacacccagctaatttttgtatttatagcacagatgggtttcaccatgttggcctggctggtcttgaactcctgacctcaagtgatccgcctgcctctggcctccctaattgctgggattataggcatgagccaccgcgcctggccgacctgcatgactttaaacatgtctcttctttctcaacttcagtacccctttttgtggaacggttgggggtgggacataaagactaaaggaaaccctgattgtcactgagtcctgagcccaggcgcctggacgggctgcatcagaaccacctcatgaactggcttttcatgagcttgaggctggggcccctgacggcttctcaagtgatctgaggccccaggtggggtttgggaacccttggtgtgtgtatacagttggcacctaatagatgccagccatgtttggggtgggaaaggagcttgggttgtggccatagggagctgggtacgaatcctgtacccaggattggtctctgggcttggtcatcttgggtatactctgggcttggtcatcttgggtgaattgattcctcacttcagaatctcagttttcatataaaattgggcctgctctggcagagttgctgtgaggatggagtgggacaacgctggggcttgagacctccctcagtaccccttctcttcccaggcactcagaggcatggggagggggcccagggacactgaaaggggacagggagggtggggaagagctccactgactgggcagcccaggacaggatatttgcatgtgactctttgctgctgccttgatgtggctgggaggggggaggagg

SEQ ID NO: 36838 - DNA, 1054 bp, Homo sapiens
ctatggctgagcctgcaggtggctaccgggggatggaggagagagacccaaacctgtttccgtggccccagtccctgccctccctgtgcccatctgtgagggaggccagtggaggggccaacatgaggccccacattccacctggagaccgagagacgcaggaggcagagtcctggctctgcaggctccgcctcttgccggttgcgtggccttgaaccagacactccgctgctcccggcctcactctgctccactggaaaacactcatcatacctgcctcccagggctgcctggaagatgaaaagggagagttcagggaaaactccccacagggctgccctggcaggtaggaggtattcagaaaataggagtttccttcttctcgctgatattaaatccagaagttgcaaaatggtagccacatgggcccaatttggcctacatttgtgtttaagtcaaactgtttttagtaagccagatggtttcacatacaaaatacagatttctgacttcttgtgtaaaatctgaagacccggggaccctgggcgcggcctcctgcagggccgtattcaccccgcttgatggggcctgtgctctcctactggccaaggtcccccctggccagcgggtgtgagtgtatcccagacctaacgtgcactggcgttcctggggcctgagggtccactgcccgcctcctgcccagccctaactcccatgccgcccgcccagctccggaggtggtgaagaatgaacggtacacgttcagccctgactggtgggcgctcggctgcctcctgtacgagatgatcgcaggccagtcgcccttccagcagaggaagaagaagatcaagcgggaggaggtggagcggctggtgaaggaggtccccgaggagtattccgagcgcttttccccgcaggcccgctcactttgctcacaggtacggcagctcacagaagcctggccagccagggctggggtggatgcacctttccctccctcccacccactcacctgcctggcctgcctggccgactcacccctgccacagctcct

SEQ ID NO: 36839 - DNA, 1008 bp, Homo sapiens
atggcctcttttctctttccagaggtgagcagtgtgggctccccgtgggttggccttgctgcctggcctcggggagccacgggcagcccttccatggcaaaggcaagatgtgggagaaagaagtctggtgcccgccccactccccctgcccactgctttgatcccctgcaccctggccccttcgagctgccagctttgcttcgcttgtctccccgtgccctgtctctgccagccccaggggagagggctgggcagaggccttgccctggcagaccgtgggatctacccagcccccttacttcagtctgttgccggcagcctctgcaatgacgcccacccacgtgtggcctgagctgctgctccaggctccttgtggagaggcccctccccagagtgcacccctcaggcagctcctggcctgccctggcagggtcggccccatgtgacgtccctcgtggttaatggcacctgctctgcctctctccctccctccgtgtcttccccgtccctccaggattgctgtggaaactgcagcgacagcgaggaagagctccccacccgcctctagcccccagcccgaggcccccaccagcagttggcggtagcagctactccgagcgccgtttacagttttgcacagtgatcttccccattgtccactcaagtcgtggcctggggaacacagacggagctgtccccagtgtcctccgtccctcagcccctggcctggctgagtttggcagggcctgggccatccctgggacaaaggtgcgtcccttcagctcttctccgtggagctcggggctttctgtatttatgtatttgtacgaatgtatatagcgaccagagcattcttaattcccgccgcagacctggcgcccccgccttggctcctgggggcagccagccctggctgggagagcgggagctggcagaggagccactgccaaactcaaggctcctctggcccagcttggatggctgagggtggtcacacccctgagcctt

SEQ ID NO: 36840 - DNA, 1047 bp, Homo sapiens
caacccatcctcccaggctgggggagaaaggacctcctggaactgacttcttctgtcaggaggactggtttccagccatacctgttctggaagggagaggggctggaggcacccacaggcacaagctgaaggcagcagcttggctaatactgagcaggtagtggggcaaattcctgccctctctctctggcctctgggccgtttggtagtaatcacccaagggctggtaaagcccctcctcttggcacctcagaatcacagtgttactgatcagggatgtgaggctgctgttgggggtggggggaggggaatgggcaggcaagccagtcttctgtcttcctttgctaacttagggttttgagcaggttggggtatggtgcctgtcatacccacctgccaccctgggaacctcactgttctctctttcagcctagacctgctgatccagggtgtgtgtgagttgagggtgggtggaggggtttgcagtgtgggaatgtggccctgcagttgacctgagctgcttcacatggttgtccattctggggcttaaagaactgggaccagaccaagtagaggccttggtgctggttggggtggggcctgcagagtcttagttactgatttcattttcaataaatgtaggtttgttacatgagtttcccaataaaaaaaaaaatgacttcttgtccagtgcaagtgactcagtcatcagtgggcacacactgcagggtgcctcagggaatgccagttcttccaaagagcaaagcacttcacattccaaagtgaattcccaccagtcagcttcattctttccttcttctccaggccttcctgtggcagggaatagtgggtttgtccaagattatacaacaagtaaattgggctggggctcaaatttacaccctttcctctgtgccagctccctggtgaagttccctctttctagagtcagtaagcaggattgtcatggatgctgccaggaagtgcctggtaaggaggtgcattgagcaggggagtgctacaggacagccaccctgggctggcagg

SEQ ID NO: 36841 - DNA, 1027 bp, Homo sapiens
gaggcagtaggaggggaaggggcacagcctctttggagggcactgtggcaatgtctgtgaaatgtaaacagtgtacaagccatttgccctccagttgagaatgtattctacaaagaaactccaacaaatacgcagagatgcaagtaaaagactgtccagtagagaattatttttaatagccaaaaccaaaactgaaagaaaacaaaacaaaactggaaacaaatgtccaccaaaatgggtctacacgaaccccagtacatccaagacatggaaaacattttagctgcaaaaaagaatgaggtagccccagatgtgtgggggtggaaaggtgcccagggtataccatgtcgttaggggagaaccggatgtgtgatatgatgctatttatgctgaaaatgaaatcttaccagagttaagatgaagataagttgtgaagtagaattagggggtcaggggacttcgttttcaatgaattaatctttacaatttgattttttaaaattatgaaaataagcaccttactatttgtttactcatttgaatacccaataatgcacaaaaattcagaaggtacaaggtggagatgtataattctgcagttctctcaactatctgatacagaattaatttattcccggcatgcatttagtgtatttagaagaaggaggagaagtgagtgagaaagggtgggggacacaggcagcggctgctctgcggtcggcagctgtggtcaggtgtggaggtgggctgccctttttggggtcactctatccttggtttcctggcatcaggccttcctaaccccgctggagcagtagtgaaggactttggtgatgccctgcccatggctcctggctgtggttcttcttggtctgggtcccacatctcagggctacaggcagtgaggcgctggaatcccccaggactgtcctgcttcttgccagctcccctccagccaggcctgcctggcggatgcccaaacactcatcaggcaagacaggtctgtaggcaaatattgatccctgtg

SEQ ID NO: 36842 - DNA, 1105 bp, Homo sapiens
cacagtgagaaatcaatattacacctaccagaatggctaaaattaaaaacactgttgataccaagtttgggcaagaatgtggagtaactgaaacttcatatactattgggaatgtaaaatagcacaactactttggaaaacccctgggtaatacctactaaaggagaccacacctgtgatccccacattccactcctgtgcatagacccaaaagaactgtgcactgtgcacgtgttcaccaaatgacgtgcgacgtgcactagaatgtttataccagcacccttcacaatagccccaacttccaacaggagaatggataagtacctctcaatatatttatagagtaaagttcttacagcactgaaaatggattaacagccgccatgcacagttggtgaatctcagcaacataatgttgagcagaagcagccagacacaaatgaatgcgtacggcacgattgtgtttctgcgaagccctaaaacaggccaaagaaacatctggtgagaagtcaggatagcgatgatcttagtgctctgggggagggtggctctggtattattctatttcttgatctgagggctggtgtcccagacgtattcactctatgataatttaccaagctgccctctggggactggtggcttctctgtatgaatattacacttcaattaaaataacaaaaacctaacagtcaaattcagaaatgagtaaggccgggcacggtggctcatgcctgtaatcccagcactttgggaggccgaggcaggcagatcacctgaggtcaggagtttgagaccagcctggccaacacggtgaaacccgtctctagtaaaactacaaaaattagccgggtgtggtggcacgtgcccgtaatctcagctatttgggaggctgaggcaggagacttgcttaaacttgggaggtggaagttgcagtgagccgagatcacgccactgcactccagcctgggtgacagagtgagattctgtcttaaaaaaaaaaaagcaaacgagcaaaggacttgaatggacatttttccatactcagcatcactaatcattaggcagatggaaatgacaacgagattccatttcactcctacta

SEQ ID NO: 36843 - DNA, 1058 bp, Homo sapiens
agtgtacagctggaagggaatgtcgtcagctcctccctctcacctgaaggctctcgactatgagccgtgccttgttgacagcctctgagtccacagagcacagggagaatctgaggacacaggacaaggcaggagaccttgtgtcctccacgtggttgcacatagagtagaagagctgggtgagtaactctctggaatcacctttctgctgatgtttgtgtctctacagatgggctcaaggacagcttgcctgactgcagccataaggatgaagcctcttcaggtagagaaggactccaggtggggcctgtgcagagggttcttacgggcgcagtaggattggggctataaaatcagtaaatggaaaaggagccaggtgcagaagtctgatttattccttttttttttctttttctttttggagacagggtcttactctgtcacccaggctagagtgcagtcagtgtgccactgtggctcaacctccgtctcctgggctcaatcaatcgttccacctcagcctccagaaagtagctgagaatacaggtgcatgccaccatgcttggctaagttttgtactttttgtagagacagggtttcgccatgttgcccaggctagtcttgaaatcctggactcgagatctgttcacctcggcctcccaaagtgctgggattataggcaagagccaccgagcccggcctccttttgtattttaattaagacagagtcctaagaggttgtgtttgcatggatgttgtgtgtgctctgcttgtcatattcatttcttgctctggtgtttaaagatgaccttttgcagaaaaccagatctttcctgcctgtgccacagaaagcactaaatccttgggttttgatgggatggcatcctttgtgaatggagaacacgggattagtatgtgggtgtggcatttggtgctatgcggggagtgatgtgggacacagcccctcacagcccctaagtctccctggagacaaagtctcccacgtgtgtgccaggaggtgggaggagtccaccctctccctctgcacccttgggacc

SEQ ID NO: 36844 - DNA, 1026 bp, Homo sapiens
tattataggttttttgttttgctttacttttagtcaaatcgttgaagaaatattatggggcatttttctaggctttattattaactattattattcgatgagacaacatcctaaactacactttttggcaagctactcaggcagtatctcttaccattttaaataaacataacgtttaacacagcaatcctaacttgggacagctatcccacaaaaacaaaagcacctggataagaggaaactgtaggggaaagtgttttgatggaaaccggcatgagggccctcctttccggttttgattctatcgggtctctgaggccttccgggcttttgggctattttacaacattgtagctgattgcaatgcaaaaatagcccggcccctagacaggtacgtgaattctgttccgtggagattcggttgactacgctccccaactgtggaagaggccagctgtgtgtccatttacacgttcactttgctattcatctataaatgtgtctgttctttggattgtccttggtttaaacatcttcattattgcctccataatgaattaagatatttagtacacaattattttgcatctctgagtcatgattttacctttaataaaaaaaaaatcctttagcaatataactgcagaggcacaaaacaaaacaccaaacaatgaactgccagttagcaatgaaaacaataaaatctgtatgagccactcgcaagatgtccataggttgttagttttaaaaggacattataacatatatggcaggatcccatttttgtttttattttttaagatggagtctcgctctgtcgccaggctggagtgcagcggtgagatctcagctcactgcaacctccacctcctgggttcaagtgattctcctgcctcagcctcccgagtagctgggactacaggtgtgcgccaccacgcccagtatctttagtagacacggggtttcaccgtgttggccagggtctcaagctcctgatctcatgatctgcctgcctccgcctcgcaa

SEQ ID NO: 36845 - DNA, 1038 bp, Homo sapiens
gataatccagtcagtcagccaggaggggcacagtggggacggtggggggcctaaggagagacaaagggaaggggctgtctgctgctccttcactagcctgggggctgggaaggacactaggtcatcatgccactgggctgctcctgctttgtcagtgtgtcctgtgggtgaccttgtgcacagctgtatgattgtgtttgctgctggacgtgaccgtctgcaccgtgtcctctaacatgggctctctgtgctgctgggtggggctgacatgtggcacaccgtggcgtgtgtggttgtatgcgctgttgcggccggtggctacctctagctcagggactttccctggacctgcgatgcctcgtggggaacctgggggtcggttatctcctcgagacaggaagtgagcatctgcccaccggaagctgaggcggtgtgcatttggggtgaggtgggcgtatttggcactgctgccaacgtccccgcccccagggccacacagggcttacatttcataagccctttcccctccatctctgactgtcagtaatcctttgaggaaagccgggcaggcggggtctttcccacttcatttttttttcctttttaaaaataaatagagatggggtctcgctatgttgctaagggtggtttcaaactcctggggtcaagtgatcctcctgcctcagcctcccaaagtgctgggattacaggtgtgagccaccatgcctggccctttcccgcttcagagatgcagaaactgaggcatggcaaaaggcggagcatttgtgtctggggtcccctggagagagtgagggcaggctggagagcaggtctctgctgtcccctccccaagaagcagcaacaggagttgagcgtgcttgtggacaaaccacatctctggctggatgggcttgtcgtggcaaggaggtatcagatgaggaggcaggatgcttccattctaatacttttggctgtagggaccaatcctaggtcccactagacattgggcagccatgaccagctacgaccttgggcaag

SEQ ID NO: 36846 - DNA, 1045 bp, Homo sapiens
tctcaaaataaataaatacatacatacatagatgaaaatttaaaaaataaagtccaactcagcggttttcagcatatttacagagttgtacaatcttcaccactatctaatttcagaacattttcatcacccccaaaagaaacctaacccattgactgtctctccatttcctccctctccctagcctctggcaaccactaatctcttttttgtctctatagatttgcctattttggacagttcatatacaaggaatcataccacatgtagccttttgtgtccggcttctttgattaatagaatgttttcaaggctcatctatgctgtagcctgtatcagcacttcattcctttctatggctgaataatagtccactgtagggatgtgccatgtttttccactagctgatggacatttgggttgtttccaccttctggctattataaatattgctgctataaatattcacttacaagtttttgtgtggacatatgtttttatttcttctggtatatccttcggagtggaactgctggatcaggtggtaactctaggtctaacctggcagttaaacagaatcctatgcatgctgtagtccatgagttgaaataaacacttgacccatagtaagtgccagatcatcttcatttcacagcaaccagtaatttcacagatgaggaaatgaaggctcccagaggtgaactggcttttcccatttgagcagttccaagtcagacagttaaaaagtggcaggacctggaagagaagctagttctttcaccctggcattcagggctgcctcctgggctacggggctggcatttagaatagagctaaggtctgctgccaaggcaggtgccccagtctgcctcctctgtgtccttattccactttctctgcagccctccaggggacccctctctcagccaccctctctctggtgatgtcacagtgctgccggaagatcaaagatacggtgcagaaactggcttcggaccataaggacattcacagcagtgtatcccgagtgggcaaagccattgac

SEQ ID NO: 36847 - DNA, 1062 bp, Homo sapiens
gccagtcgtcctgctgccagcccaatagcttccagcggcaggtgcccaggtgctaccggagcccctcataggggtaggggcagggactgcacctcctccaggcactcatcgtaagcctcctggtactcctcatggggcttgaccattatcacacaggtggggcgcttggagcctgcggctgcacccaggtcctacagaggggaaagaagtgctgtttggaaaaaagctgtacaacctgtatgccaggaagtcaccaactgatgacccaccagcctaatctggcccacaaccatgttctgttcggtccatgttctatttaaaagcatcttgaattggttgccatcatttaaactcaatcagactttgaaggcatggtccagccacacagggcctacattcccacatggcaactatgaaagggctccagcccagcaggggctgtcccggtccctgccacccccacttcctgtgcctcagatctggcccctgttacgtaagataaggacagctacaggtccctctgagcctaaacccacctaaccggactaacatgggtgaagcatcttagcttacaaagctctttcacatacatctatctctttattctcatagtccacagataactgactatttggttcttaccatcaggccaaacggtaagttccttcagaacagggcctcctgctttatcccaagaagtgatactgtaggtacccaagatccacccccagcctctattttttttttttgagacagggcctcactctgtcatgcagtctggagtgtggtggtgtatgatcatggctcactgcagccttgaactcctgggttcaagtgatctcctgctttagcctcccaagtggctgggactacaggcatgtgccaccacacccagctaattaaaaaaattttttttgtagagatggagtctcactttgttgcgcaggttattcctgaactcctgtcctcaactgatcctcctgtcttggcctcccaaagcactaggattacaggtgtgagccacagcgcctgggctgggattcccactttacaagatgggaa

SEQ ID NO: 36848 - DNA, 1021 bp, Homo sapiens
acatatctgtagtcccaaaactaagaagatgtggagctgagaatccatccaggcctgtcttagctccaacactcctggctctttcccacactctcctgctatggcagactatcccagacaccccagtgctgagcaaggtcagggggccacgtgctccttaccgtcttagaggggatatagacatagggcaaatttcggtcctcacacatgactgggagatggcagtatacctcaatgggcagtgtgtctcctgccaaaaccatgatcctgaaatgagagaaaacactgtcatctctggcttgctccttccttctttcagttttaagtgctgccctgggctgggtcttagggatagagacaaaattgtgtttggtgagcacactatttgggggtgatctctacctcttggcaacatacaggtgccaccaaagtgatgtagtgctcggacaggtgaagtacaggatgggtgccaaggtgtatgagctcagctctctttggagagtcaaaaaagggttcaaccaggaggtgacacttgaacagcacgctgatggatgactgtgtggcaggcagcccacggaggggctggggcgggggagagcatgtggtgtgagaatcagaacggcaccagacacagccgagagactggcaggggacacccccaagaccttgagtaccaggctaagaagcatgggctctgtcccaagagtgacagtgaggcaatgaaagcttgccagagactcagccagggttcctagctggccaggtgtcaaggctggggggcaagggcctcaggagcctaagacacagaaggaaaagtctgctctcccatgctggataacaggcggacacacaaggacagagccctcggctgaaagaatgcttccgcactcctagtgctcctctgggccctctgctggctccccttctgttaagcgcctttcactgtgagtgttcctcacagccttgtcctcggctgccctctcctctcaggaccttcttcctggctgaccggagccactgc

SEQ ID NO: 36849 - DNA, 1159 bp, Homo sapiens
ccgtagcggccggactcgcgcgcgttctaaaatgaggacaaagcccgcccaggtctagagcgcgcgcgccgtggcggccaatgggacgctgaagctaggttgagtgacggacttgagcagccaatgagtgtgcagtttgttgcgatgtggcacccggctccggcattataaagggcgccacgagtcggcattgtcaggcggcggcaccgcgcgggacggagcttggctgttggtcggtgggttcccgtgcggcggcggccaaggaggaggagacacagttggagcagctccgtgggctgactggggcgaggcctcagcagcgcgagcttgagtgcggccgagcctgcggcgccttcccctgcgggtggggacgagcgggccccgcggcgtcatcggcggcgaggtgagcggcggccggcgggcgggagctctggcgggagccgcgccggcctgacgcgctgtcgccgctggttgcaggagccgccgcgcctcggcctagcatgtcggaagcgggcgaggagcagcccatggagacgacgggcgccaccgagaacggacatgaggccgtccccgaaggcgagtcgccggccggggctggcacgggcgccgcggcgggggctggaggcgcgaccgcggcgcccccgagcgggaatcagaacggcgccgagggcgaccagatcaacgccagcaagaacgaggaggacgcggggtaggtgcggccgcgggcggacgggggcgccgcctttgttccggggccgccttttgttggcgccacgcggcggggggaggggcggcggcctggcccgggtcggggctggtgcggcccgcggactgtcgccgctgcgttcgcgggccgggcctggcgctgccactcgcgctggagtttgcgggagtttgttgggtcgactttggcgccgccccggggccgctcgcgcgctgccagggccagggccagggccggagccggcgcaggggcgggcggatggcccggaagagggaaagcgctcggacccggggcccggcggcgtcttgggccgcgccggcggctgcgtgggcggagttggcgcgagccggggcccggacctccctcctccgcctctcccgggggcggagtcacggtctgaaccctgggcgggcttggtccccggaaacatcgagt

SEQ ID NO: 36850 - DNA, 1061 bp, Homo sapiens
ttttttttttttttgctttgagacagagtcttgctttgttgtccaggctggggtgcggtaacacaatcatggctcactgcaaccttgacctcatgggcggaccggatcctcccatctcagcctctcgagtagctgggaccacaggcatgtaccaccatgcctggctcatatgtttttttaaagcctggtctcaccatgttgcctgggctcaagccatcctctgccttggccttgtaaagtgttgggattacaggcatgaactgcctcacttggtcttctgggcacctctttaagttaaccctaaacccaggcaaaaatccttccaaagatctcccagggtcctggccagcttaaatccagggtcagttgtgctttcaaatgagtggattcatgtgcagggaggtgtagctcttcccctcctgaactctggtcagggaaagggtagttcaggcttcaagttggcagttgggagttgagggtgcggcctgcagtggcagggtgtggcaggttctgtttctgagcaggagttggcagccagataaggtgggacaggtggaactcctggaagtctctatcctggctgggagtttggaaagagtggattaggatagtcttaaattttctataaaatgacagtctttgaggcagttaggggaagcagtggttattactccagtggacagtgatagaggcctttttctctatgtgccataatgggaaatgggtgggaagagcctctaaggcagagtttaagtgaaactactggtagtgagtcttaggagtaagtatatttagttggttatattcagtatttttaatttagtaggatagaatatatcagattgcattattttaatttgccaattaaaagtatgactgggacactgtaaaatgtactatttttaatgggtgtgcatgtcaggattttctttagaaatacactggtctggtctaatttatttaagcaggagcactttaaagtatcccaccctaccccattccacccccagtggacagaaaggaaattgactgacttgaggggatgcagacatctgggttat

SEQ ID NO: 36851 - DNA, 1042 bp, Homo sapiens
gctctatgcagatacacagtggttcaaattatttcatgcattttctagtccgccagtcagattatacattctttgagaacaaagatcatgtcttgtactcttccccaatatgcagataatttgatgctctttttcaccataaaaatattgcagggttatggtgtaaattttagagaataaaacatttatatatatacatatgtatatgtgtgtgtatatatatgtatgtttatggatacgtgtgtatatatatgtgcatatgtatgtgtatgtttatatagttgtgcattgcataatgacattttggtcaataaaagaccataaatgtgatagtggtcccataagattaaaacctagctgaaagattcctgtctcctaatgactaagtagctattgtaacattatagtgcagggctttgctcctgttttgtggtgatgctggtataaacagacctaccatgcagcctgccagtcctataaaagtatacagcatatgcgattgtacagttcataatagttgatgatatctgactgtgttgctgggttatatatttattgtactattcttgttattttacagtgtcttccttttgcttgttttttaaaaagttaactgtaacagcctcaggcaggttctttgagaggtatgcagaagaaagctttgttctcataggagatgacagctgcatgtgtgtcattgcccctgaagaccttccagtggggcagggtggagaggtggaagacagtggtgttgatgctgacccgtgtaggcctagactaatgtgcatatttatgtcctagtttttaacaaaaaaatttttaaagtaaaaataaaattaaaagcttttgaaataggagaaagcttataaaataaggatataaagaaagaaaatatttttgtacagctagacaatgtgtttaagataagtgttactacaaaagagtcaaagtttgaaaaaattaaaaagtttagaaagtaaaagttacagtaagctaaggacaatttgttaaagaaaactttaaaaaaataaatttagtgtag

SEQ ID NO: 36852 - DNA, 1027 bp, Homo sapiens
attgcaatgtctgactcctgggttcaagcaattctcatacctcagcctcccgagtagctgggattacaggtgcatgccaccacacccagctaatttttggcatttttagtagagacagggtttcaccttattggccaggctggtctcaaactcctgacctcaagtgattcgcctacctcggcctcccagagtgctgggcttacaggcgtgagtcaccacacctggcctgtgtttcttatttaataaaatgtctgggtattttgttcattttctagttgagttattttggagttttttactgttgagttttgaaagatctttatatatgctggatagtagttgccggatatgtggttcacaaatgctttctcttactctgtagtttgtctttttatcgtttttactggttcttttgaagaacacaatttttaattttactgaggtccagttgatcagtgtttccttttatggattgtgcttttggtgtcaaatgtaagaattctgcctgtacttagatcatgaagattttctgccatgttcttctagaagtgctgtagttttacattttacatttatattcatgacactttttgagttaatttttgtgttagatgcgaggttcatttttttgcatgcgaatcttcagttgctccatcattatttgttgaagtcgtctttcctctgcggagttctttggtgcctttgtcaaaagtcacttgggcgtgttgggttgtttctgggttttcttttctgttccattgttctgtgtttctgttcctctgccaataccacacagtgttgattgctgtatatatacaggctttaatgttgggtaaagtgattacttcttgttgttttttagaaagttttatctactgtagttctttgtatgaattttagaataatcatcaatctctacaaaaagaatcttgctgagattttgataggaattgcagtaaacctgtatatcaattttctgtgtttagtcttccaatctgtgaacatgatatgtcgttctatttattga

SEQ ID NO: 36853 - DNA, 1057 bp, Homo sapiens
agtaggtctttgggcgagtctgtgagaagagttcttaatgagaactaaaaaggttatttctgttcttggtgtcccaaactgctctggtattttgccaaatactacagatagtaaaattcttaattaaagctgacatggttatatttttaaaaatttaggtgcaattagtctttcaagatcagaagatatttagttagtatcatagttcagtctgttccaagctgtaaagtcagttatttcagtaatgtaatttctaagatctataaaaaatgaaaatattttattttcttatataactttctgtgagagcattgaacagtcaagaaacttgtatgttttccagcccccattctgcttcaagttacatggtgtctagccttttcagctctagaaattctacattattatgtaatatcctgctttatgggtcttggtggtatatggtatagatcaactcaaaatttaaaattttcatcgtatgaatttttgtgtagagatttcaagatgagttgatctgagaacaaaaagaactccaaagaaatcttactattttcctgttggtatatattgttcaataaaacactatattggtatatattgttcaataaaacactatattggtatatattgttcaataaaataattatgtattacgaattaaattttcaacctaaaaatcagattattccaggaagatggaatagacagatgtacctttccttatttatcccatacatctgaaaccttgtatattataaataaacataagactctggtgagtcttttttttttttttccttcaagacggtcttgttcgttcccaggctggaatgcaatgatgtgatcacggctcactgcagtcttgacctccgaggcccaagtgatcctcccaccccagcctccaaaatagctggtaccacagtcctgtaccatgcaccactgtgcctggctatttttttttgtaggggtgggtttccctatgtttcccaggctccaactcctgggttcaagtgatccttctgccttggcctcccaaagtgctgggatacaggtgtga

SEQ ID NO: 36854 - DNA, 1029 bp, Homo sapiens
gtatcagagagtgccaagagctaggttattcatccacactggctggtaatgagcacctgccccatgccagcaataatagcggggaccatgtgcagaaagggctgctatccccacccagtaggaagaaggcatcattccccttttctggtaggttggtgttaagtggaggcctagtgcagagtaagaccatttacccctgcccagcagtaatcagaccacattccaaccccacagtgtcattggaggctacatagggagcaggaataagtcacacttaatacctcccaaccatagttatatcagtgtaggcctagtaagctcccagaaatttcacccacacaagtaaaatggagacccttatgtggtatctagatacgtcaaatgaggaacatgagcttctagtccacctggtcaaataagattcagagtttcataacataatactaaaaatgttcaagtttcaacaaaaaatcatgtcaagatccaggaagatcacttgaatgaaaaatgacaatcagtagatactaacaagttaatgatagacatgttagaattatctgacaaagatttttaagtagccatcataaacgtttcaaagagcaattatgaaaatatttgaaataaaaactctcagcaaagaagtgagaaagaaaaaatggaaattttaggctgggcgtggtggatcatgcttgtaatctagcactttgggaggctgaggcgggcagaccatggggtcaggagttcgagaccagcctggccaatatggtggaactctgtctctactaaaaatacaaaaattagctgggcatggtggtgcgcacctgtagtcccagctactcgggaggctgatgcagaagaatcacttgaacccgggaggcagaggttgcagtgggccaagatcgtgccactgtactccagcctgggcaacagagcaagactctgtctcaaaaaaaaaaaaaaaaacaaaaaaaaaacggaaattttagaactaaaatacagtaaccaaaaattttaaaattcactgcatag

SEQ ID NO: 36855 - DNA, 1026 bp, Homo sapiens
caacctggtgcaggtttcgacctcggggaatcttttctttttttccttaagcgatttcactgtagcacaactggaaaattgagattaaaacaatcattcaaaatctatctccatctgcatggcagcgtggatatgtgtataagcatagaaacactttgtactttgtttttaaacagaaatatgaatattagcagctttttctccatctatcttttaaaactgagtcatgagatgcatttggtaaggggtttgaagtgcacaaatcttaagccttgtaattttttactggcctaaacacccaatgaagatagagaatacatctgaaaaaaacattggaatatgttgacaccatctacttataccagattttaaatagagctacgtcattttaatgagtgtgagggaaagtatggatgtgtcgtattgaatcctctccttaggtttttgtgttagggttttcttttttctttttttttttcagtattataaacagtataggccatctggctacatacatctttgcattttgtcttattctataaatctcttaaagtgaaatttctaggtccagggtacagtaaggattttgatacctcctgtcttattccctccagaaaagttgcagtttatataaacacttgcagtgtaagagtgccagatttacccacaccaactgtgaatgttagtattctcttgaacttctgagaggtgcaaaagataggattgtttacatttgcattttgaacactaatgaatattttcacgcagtttgcattttgtattttaattttgtatctgatacataagcatgtttcctgactgtgcagaaacgtcacaggttcttatggtcacacatgaaaaccttttcttcacgtttgggtgtttgacatcactggcagagaagctgtctgtcccacgagattacaaaaatgtttgtagtttctcttagtactttcattttttgtgtacatttttatttttttccaaatggtaagcctttgttacaagttacttagtaattttttc

SEQ ID NO: 36856 - DNA, 1031 bp, Homo sapiens
cagcactttgagaggctgaggcaggtggatggcctgaggtcaggagttcgagaccagcctggccaacatagtaaaaccccgtctctactaaaaatacaaaaaattacctgggcatggtggcgggcacctgtaatcccagctactggggaggctgaggcaggagaatctcttgaacccaggaggcggaggttgcagtgagccaagatcgtgccattgcactccagcctggacaacaagagcaaaactccatctcaaaagaaaaaaagacttatcaagggataatttcacttcttattctttcacttaggcactttgtttaacccagaatactcagaatggttggagacatctgagtattgcttatttcattcacctttgccaatacagtactttttgacaaaaatacttttagtttatcatgtatttcaaatccattttcatcaaatacttagctgcagtttgggctcatttaatttacggaaaatggccatcaagctaatggcacatcttagggttgtgaatattgactggttgaacataattacatagatttgtagggagaaaaatttaattttctaaatttaggacacccaagcagagggttagagaccacccctctgccccaagaccaagcttaactgaataccataaagcagtaaaaggctggtcttcatgtttttgattacttaatcatcaagggcgacaccacctccatttggtgtatggaacctagggcaccccaggtcaccgtatcaagaggaagacaggttatggagtgagttgcccttctttagagggaggagaaagagtgcctgtgaaacttgaaaatctggaaattgagttccttaaaacatctgggcatacctagctttggcaagactgctgtatatgtattccaatttcaagaccactagatgatagaactgggcttggtgtcttctttaaagataaatctttacaaattgcttttatggttattgctgtcttcagagtttctcccttctcttgatgaagttttacaagttttattt

SEQ ID NO: 36857 - DNA, 1034 bp, Homo sapiens
tgttgttttttttgagacggagtctcgttgtgtctcccaggctggagtgcagtggcgcgatctcggctccctgcaacctccgcctcccgggttcacaccattctcctgcctcagcctcccgagtagctgggaccacaggtgcccgccaccacgcccagctaattttttgtatttttaatagagacggggtttcaccgtgttagccaggatggtttcgatctcctgacctcgtgatccgcccacctcggcctcccaaagtgctgggattacaggcgtgagccactgcgcccggcctgtattttttttttttagtagagatggtgtttcaccatgttagccaggatggtctcaatctcctgacctcgtgatccacccgcctcggcctcccaaagtgctgggattacaggtgtgagccactgtgccttgcctgaagggtatagcttttatccccttttatcctgagctttggggagctgttggaggtttttaaaaagtacactgaaatgatcatgcctggatttgagaaagctcaatctagcagccattcaggttatgagttggaagtggccaagaatagatacagcaaaagccttgaggagactagtctagaagtcctgcaagcctggatggggagtaggaagatagagtcaggagagatttgggaagtcaggttgataaaatggcacaaaggagagtaaccagtaaggtgtagagtgctctgtgggaaggacagccctcttgggatgggctttcttcctgcataggagctggtgaccagagccaaggcctaaactcctggtggcagggactgtaaatgtgtgaggggaataggtaccctaacccattcctcacttccaccccctcttcggggcatccgcagctgtagctgggccactgcccagaaaaaagagattattttacactacctagcaaaattcccagcctttttcctgcattgtgtttggtgaatctaaagattccctgatccctccatgtgcaggtcagtgtttttttataacctctcctccctttaa

SEQ ID NO: 36858 - DNA, 1036 bp, Homo sapiens
cccagctctttgggaggccaaggtggaagacttgcttcagcccaggagtttgagaccagcctgggcaacatggcaacaccctgtctctacaaaaaatttaaaagttagctgtggtgacacacacctgtactcccagctactcgggaggctgaggtgagaggatcacttgagcctaggagttggaggctgcagtgagacagagtaacaccctgtctcaattaaaaaaacaaagaaatgtgcttaatgaaaagcgtagccctcttcagggtgtgctctctgcatctccagagagtggaatgggaattagcttatggtttttgcctgcttcttcccttcgggcaagtaacacgccctttcaagccttggtgtttctttttttgggcacagcagttaatgtgtagaaaccccaggcctgggttctgagtctaagtggagaggaattctcagggggtgtagacactgttgacagagaaagtgaggagttcagtgcttcgaggtccctccactagtgaatgatgccgagagccagccaagcaccaaggacagagatcttgcttctttctccccagctgcaccttcctctctgcaagctgtgtgatgaggctggaatgaggagggatgggttggtgtgtttactcatctgccttgcctcttgtgacagcctctccttaggcaggtcctggacagcgtcctgcttctctatgcttttccctcagccatgagaagtccttccaggggaataagaggtcctcttgggcatatcttcaatgatttgttttttattcctccctgcaaattctttaattctccctctagtgatttaaatatacttttaccgatcattagctggaaaaactggaaagaaagaagagtcaggaaaaaagcccataacccctttactaagtgacaactattcttgtcattttattatttgatttgtattgttcccaacttttcttttttcttttttgagacaggctgtggctttgtcacccaggctggagtgcggtggcatgatctcagctcactgcaacct

SEQ ID NO: 36859 - DNA, 1027 bp, Homo sapiens
tcaccatgttgcccaggctggtctcgaactcctgggctcaagcagtccacccacctcagcctcccaaagtgctggaattacaggtgtgagccactgtacccagccactccatcttttcttaagcatttttaacctagttgatttttttttaatacaggtgagagcataccatataaccttttttccttattagtattatatcttaagtatgttctcaagtgattaaaagtttttgtaaacattttattgagtacatgtttgttttatgcttccactatgatgtaactatttccctaatagtgaacattcaggctgtttctaattttttgtgtctataaatctttgtccacattcagcaatatgctatcatttttgtagagggagaaaatctggagagggcagagatggctaggggcaagggcggaggagagattttactacatacattttcatgtctttggaatttggaaccatgtattattacctattgaaaacaaggaaataaaatatcaaacctgtgaacatacattgtcaactgtgaagatgccaaattaatgtttttaatttgaacaataagattaattttgatgttaagaactgtaaaaattttccttaatcagctttcagctgcaacagaccgaatttgctcacttcaagaagaacagcagcagttaagagaacaaaatgaattaattcgagaaagaagtgaaaagagtgtagaggtgagaaattgacctacatttgggcagcatgtttctcactcagacacacctattgtcaatctcaagctcatggcttaacaacaacccagtcttcagaatgcaaaggtgccttgcttatgtcagaaagggcctctcactgcggtccctgcccacatcactctcagaccacctggatcccttggacggggactcccttcatggcctgtgggcctttgcatgccaaagttcctactcgttcttcagcatccactcacctgccatgtcctccatgatgtcatcccaggagccgtgggcgggcctgggcc

SEQ ID NO: 36860 - DNA, 1024 bp, Homo sapiens
ttgtatttttgtagagatggggtttctccatattgatcaggctggtctcgaactcccgacctcaggtgatctgcccacctaggcctcccaaagtgctgggattataggcatgagccaccacacctggccagctaccgtttctttaatgacaataccaagtgctgatgaggacacggagctaatggatctctcatactttattggtaggaatgcaaaatggtgcaaccactcaggaaaacagtttctcaagaagctaaacgtcctcttaccatatgatccaaatagaaatgaaacttatgtctacaccaaaactagtacatatgtttatagcagctccgttcataactgccaaaagctagaagcaatcccaatgttctgcattgggtgatggataaacaaagtggtacgtctgtgcggtgaagtatgactcagccgtagaaaggaatgaaccactgccctttcaggacgttcagagaggaaacaaaaggcatgaaccattgatacacatggaaacttggattgatctccaagacattattctgagaaaaagtcagtctcaaggttatataatgtataattacattgagattacattctcaaaaagccaaagccatattgttgcaggacagatgagtggttgccaggggctgaggtggggagttttgggagtggtgggaccgtcctgtattctgattgtggtggagctgaatctccacgtgttaaaactcacaagagttaattttactgtatggtaattttaaaaatgaatttcagccagcaaaagtcatcctttccttacaaagatttgcttcatttgcactcttgctggtgtcgcatccaggttgcagcactcggagcgggcgaggcagggggctgaggagcggagccacaagctgcagcaggagctgggcgggaggatcggcgccctgcagctgcagctctcccagctgcacgagcaatggtaggggccctgcagggagcctgggctggggtgtggctcaggagggactgggaagaactgggg

SEQ ID NO: 36861 - DNA, 1033 bp, Homo sapiens
agggctttggcccgcatggagaagggcttcctcaggcctgtgggacgcagtgcccgctgtccatcaccttctgtctctccacaaggatcagcgtcaacaagtgtcttagtctcactcagatttggcccttcttccgcgcctgccagttcagctagcacttcggccagtgtctcaggcagggtctagggttgcaggcaccagaagctcgctctgcttacttcagccaaagggaactgattgaaagtgggagtgtgcctgagtgagcagatgctggagaccgcctggaggccccagggcagcctgcagaggccaagaggtggagcacggagctaggatgcagaaatcccggctgcggccagacggggaaagagccccttgatgacagtcctgtgaggccccatctgatggagaaacagtgcctcactaggaaacaggtgctatgagggacaatggatgtggccagaacgcagctacccactcatcaggggcttagacagaaagtggattctagaatgtcctttcctcttcagggccacgcctggctgaaagatgacgaagcgacacactgtaggcagtgtgagaaggagttctccatttcccggagaaaggtacgtgggggctccacccaccctcccagtgccctgagtcgttgcccgctggattcccctttctctggttccagaagcccatatcagagcaggctcactgcccggtgactgtgctgactgtggcagatgggcagccccgcctctcctgtttgcctgtgcagatggctttccatcctggcaccctctttctgggaggccttggccagtcataggcccctggtctccagcacatcctttcagtgattgacaatgatttttggggagatggggctccttgtgtgcagagctgctctaggggagtgtcattgaaaattctctgtatgcggcaggaacaaaatctggcccaacttaggcaaaaacaatctatggggaacctacagggcagcaggtcaccaaaaatcactagtgatctaggcagcgtgctt

SEQ ID NO: 36862 - DNA, 1072 bp, Homo sapiens
ctgtggctggtatagctcactccacattctcaaacggttttaaaatgtttttcttttggctgggcgcagtggctcacatctgtgatcccagcactttgggaggccgaggcaggtggatcatgagatcaggagatcgagaccatcctggccaacacagtgaaatgccgtctctactaaaaatacaaaaaattagccaggcgtggtggcgggtgcctgtaatctcagctacttgggaggctgaggcaggagaatcacttgaatctgggaggcggaggttgcagtgagctgagatcacagcactgcacttcagcctgggtgacagagcgagactctctcaaaaacaaaacaaaatttctttttctttgattttctttttgtagagatgggagtctcattatattgcccaggctggtcttgaacttcttgcttcaagcgatcttcctgccttaacctcccaaagggctgggattacaggcgtgagccactgcacctggcctaaaatatctttctgtaattcaatctgtaggtcaaacctgccactctaatgtagtggtagaaactgaatttcagttaatttggaggttttcctgtctttcccacaggggtatggcactgtcagcggaagactgtcagatctctgcagcatgaccctcatccttgttcccaaccttttctgtcagtcactgtctgcctccctttctttggttggctgcccatcaatgacctattatcatcattgccatagatccctgagaagcactccccctcccacagttgccattccaatcttgctacacagtataagagccctcttggcttctgagggttaaatgttgccatccagaatggttaaatgccattccagaatcgtgtcatccccaagacactaaggagccaagttccatggcagcatctcctagccacagagcacagccaccaccagctttctatgacaccagtgccccctcacgtccacattctgcattgccttagtgaagagcgcctcctctgggcagctccatgaaacaccttctggtctcatgtaataaatccgttctaacattcccacttc

SEQ ID NO: 36863 - DNA, 1050 bp, Homo sapiens
ttttaacgggtaccccctgtaaattagtgtatgaaagggcttttgtctgttgtaaagcactttacaaatgcaaaagtttgttggaaattgtatttgaatgccccacatctgtgtaaccaatcctctctatatgaggatgttgtgtatgtttcagttttattttgaaattttccagaaatggaatcttttaactgattttagggaaaccctttaatctctctaggctgcctttctttatctatgaaatgaaatagtaagttctttttagctctgcgatttaaaagctttaattttaaatgagagagtggttagtgatcttcatgaagtttgataggtggcaatacatttaactgattttgctctttatgtgtagatcatggaagggaagtggttgctgtgtatgttactggtgcttggaactgctattgttgaggctcatgatggacatgatgatgatgtgattgatattgaggatgaccttgacgatgtcattgaagaggtagaagactcaaaaccagataccactgctcctccttcatctcccaaggtttgaaatggtctttgaatctattccttttacgtcttgagatgataaaattatgaagatacccgggtgcagggaaatgtagtctcaactactcaggaggcctaggacaggagtgtgagtccagccttggcaacacagggagatatcatctctaataaaatataaaagaaaaacatggtgaagataaatttggaacgttttcaaagggaaagcaaaattcgtgaaaatacttattgatctctctggcagcctttgtcttgctagaggccaattatatgggttgaatttgaaggccagctatgaaatttttgtgacagttgaaagcaaaccaggagaatagattctagataaaaaggcatgttgctgaaaatttaaatttttaattcatttatgtatttaacacaggttacttacaaagctccagttccaacaggggaagtatattttgctgattcttttgacagaggaactctgtcagggtaagtgttttccagagaaatata

SEQ ID NO: 36864 - DNA, 1765 bp, Homo sapiens
tatctgaataatatttgccaaataaagtgtgtttatttattatttatttacttttttgagacggagtctcattcttgccacccaggcttctggaatagagtggcgtgatcttggctcaccgcaacctctgtttcttgggttcaagcgattctcctgcctcagcctaccgagtagttgggattacaggtgcccatcaccacgcccggctaatttttgtgtttttattagagatggggtttcaccatgttggccaggctggtctcgaactcctgaccttgagtgatccgcctgccctcagcctccctaagtgctgggattataggtgtgagcgaccacggctgccccagtataatatatttatgcaactaggaggtgttttttttggcatttaaaggaccttcagaggtagagttaagcagtggaacttttttgtgttgtcttgtaggaaagtgggaggtagaggaaatgaaggagtcaaagcttccaggtgataaaggacttgtgttgatgtctcgggccaagcatcatgccatctctgctaaactgaacaagcccttcctgtttgacaccaagcctctcattgttcagtaagtgaaatgcttgttggataaaagctttctgcaaagggtaatcttagaagacattatgtaacttttactctatgttaaaaaattatgagattatataagtggtggtagggatttttgggtgaatttaaacaccttgtaattaatagtttttcctggctaatgcattattttgaaagaaactggttacttattttcctgactctaaataacttgtagattttgcagaacaaatttaccggaaatctgcattaatagtttttgtaattaattaattacaaaactagtaattaatagtttttcctgcctaatgcattattttgaaagaaactggttactcattttcctgactctaaataacttgtagattttgcagaacaaatttactggaaatctgcattaatgttcaatttaattttatttatttttgtggcatttgataactattcaaaaacaatagaagatggaatcctttgtaagggtaaacatttgacctatgataaaacgtgactaagatgagggagagaggaaatacattaagagagtttcgatctttcaaaatgccatacagttttctgcttttctctctgatattaggtatgaggttaatttccaaaatggaatagaatgtggtggtgcctatgtgaaactgctttctaaaacaccagaactcaacctggtatgtaattcccatttctggaatgtggctggacacccactattaccttgtaagaattttgtaattgggccgggtgcagtggctcacgcctgtaatcctagctcccagcactttgggaagccaaggcaggcggatcacgaggtcaggagattgagactatctggctaacatggtgaaaccccatctctactaaaaatacaaaaaattagccaggcgtggtggcaggcgcctgtagtcccagccacttgggaggctgaggcaggagaatggcatgaacctgggaggcggaacttgcagtgagccgagattgcgccactgcactccagcctgggcgacagagcgagactccatctcaaaaaaaaaaaaaagagaattttgtaataattgtgaaaataaaggcttcctcccctgctgtttaactcttttgatgagttgggaaaattgactttgacgctaacgtgctttttatttgaagtgtaaattacaaagttgttaccaa

SEQ ID NO: 36865 - DNA, 1032 bp, Homo sapiens
gttttaataaattggaggtttgtgtaatttcagtaacgtaataataccagctctattaaaaatgaagaaatggaccttttgtactgggaagtagttgtaagtccacgtatttgtcttctcactggtgtatatgtgtaagcccaataattgtgttagtttatgtagtttcttgttttttttgttttttttttttagtgtctataagtcaagtctttggtgttaaagattttaactatcatttgctgtaattcttagaaagccgagggactaatcatttatgtttcgtgcataaggaaatgggcgttagcttccccaagaccccaggagccaggcattgttcttaccccaaagcctcaggtcagacttctgctgcttcacgttagaagtcatgatcttttgtattatggtaaagggagcttggaaaattaagtacttttaattccatttaatgtttctttcagtcttgaatccagataatagttttgaaatactggttgaccaatctgtggtgaatagtggaaatctgctcaatgacatgactcctcctgtaaatccttcacgtgaaattgaggacccagaagaccggaagcccgaggattgggatgaaagaccaaaaatcccagatccagaagctgtcaagccagatgactggtgagtcttggggaactgtcttcaagtgtaagggagcatttcatatattccatgtggcttgaacaacgaaatgttggttgagtaagctctgataatttcagtaatccatgatgcagtctaatctgtagggaaaatatagagtactatagctggaaaggggccatagtgtaatcatctggattgactcaccattttacaagccacagaatgccacacttgataagagtttgtctgtggtgacactgttggtttgtggcagaatctcaggtcctttaacctggctactccagggcttctgtgaactcacatttaaagccaaagttctgaaatgctaaattttaatttgaaaaataacctttttcctatttaaacaacagtcaa

SEQ ID NO: 36866 - DNA, 1053 bp, Homo sapiens
tctaggtagttatctagaagtgaattgctggttgatgatcatgtgcgttttattttaaatcaccactgaagaagtacgtactgacttatgctcccactctcattagcagttgctaagagtggaggctgttgaatgggccaggaacttgaggggttggtttggaccaaggtcatgggtgacagtagaaattggaagtagttggaatcctgcagtcttagaggcagagtgcgtaaaataatctgtagcatttgttatttattttcctgttgcttatttcaagtttcatgaagttggcatttctctccattgttcatgcaaaatttctcttacggtagattcaccataaacttttgttgatcattatctgaaatgattttctgaaacatttttttttctagggaatctggaaacccaggaaaataccaaatccagatttctttgaagatctggaacctttcagaatgactccttttagtgctattggtttggagctgtggtccatgacctctgacattttttttgacaactttatcatttgtgctgatcgaagaatagttgatgattgggccaatgatggatggggcctgaagaaagctgctgatggggctgctgaggttcgtgtttgctgcttgtgcatttgtgtctgttattgtaaggagctgttattttgtgaaagtctgtgttaaggttttttttcttcatttggcaatattggcataaaaagtataaccatatgcctgcaaaagacacaatattgggttttggggcatgatttcattagtctaatgtagtggctttagagtctgtttgtgttcagggttttttttttattatttgtctgggtatatatttcgaaatttgtcatttaggctatattttaatacactcttatatgttgaatctcggtttacactacatacagaattttcaaacaactggtcatgtggccgatttaagaattggagagccagggatactgagataagaaattcactggatcctgaggttaagggagccttttgcaggtgatgtagaagccagcttttgcaccta

SEQ ID NO: 36867 - DNA, 1718 bp, Homo sapiens
gctttctctaatttcttttttacattttatgagcattttctctgaaaaagaaggtcctgcgtagtgccatgccataactgaactgcagaaaaacagcacggcctatgtttggtgtcaaaagctggaactttcaatcagccctgtcttgtttttcagccaggcgttgtggggcagatgatcgaggcagctgaagagcgcccgtggctgtgggtagtctatattctaactgtagcccttcctgtgttcctggttatcctcttctgctgttctggaaaggtaggaagtttttttttttagaatcaattttagagacatcactctagtgattattaaaaataactaagatatgttgcctgaggttttctttgtagtggctcagtaatgaccaagccatgtttggtgttgacttcagaaaccttacttactgttcctcagtggccgtttattgtgcccagatgggagcaggatttatagccccttggttgctattattatttatcctaatctgttactctccatagtgttcggcagcaactttctaaaaaaaaacaataaacttagataccaaactagccacttgggcaataatcagctttgcctgctggcatagctatttctattctttgtaattcagtctttgattcctcattatccattctgccttcaccttccccactctcaaaacagtatgttggggtaccacagccttattgttagtttttcttgtttagcctttttttttttgcatgctatcataaaaaaagaaagtcttattttggactctacttctgctaaatgaggattatgcttcatctggcattcatagcactttgtaactggatcccaagttccttttccagcctcagcctctgccactattctgtgtatcggtgcctcagtcaccttgacttttttgacctttattttcctgcctggcccttttgtttttattgttctaccttgaaacacacaagcacatgtgcatacacacacgtacatacacgctcttcagggtaggaattacatcctattcgtttctgtatatctatccctgtatacagcctggaacagaactttgcctgtaggcattcaggaattatataacataatacatgaacatgtaaacaaaattgtactttggggaacatttcagaaacagaccagtggtatggagtataagaaaactgatgcacctcaaccggatgtgaaggaagaggaagaagagaaggaagaggaaaaggacaagggagatgaggaggaggaaggagaagagaaacttggtaagaaacagagtccagaaaatctgctttaagccaagaccctacgatgttgttaaacctttacagtcaagttaaggattgtttttagccaggcgtggtggctcaagcctgtaatcctagcactttgggaggttgaagcaggaaaatcacttgagcccaggagtttaaggctgtagtcagccaggatagtgccactgcactccagctgagcaacagagtgagaccctgtctctctctctctctcttttttattttttaagacaaggtcccactctgtcactcaggttggagtacagtggcacagtcacagttcactgcagccttgaccttataggttcaagtgatcctcctacctcagcacccctccaagtagctgggaccacaggcatgcgctaccatgctcagctgtttgtttgtttgtttgtttattgatttatt

SEQ ID NO: 36868 - DNA, 2209 bp, Homo sapiens
gaaatcacagtgtctgatccttttttaagaaaatgtttatgggttagattgagaaaagtgtatgtttatagaaaacaataaagactaaactgaattagagtaggcataattccaccacctctgagacaaccattcttcttggtgcattttcttctcatcattttcctcatttttttcctcaaataagttaccctcagtctggctgatcttgaaaatatggtgaacttttattattttttaaatgtgctaattataatgaatttcttttcaatcaataggaggatgaaattttgaacagatcaccaagaaacagaaagccacgaagagagtgaaacaatcttaagagcttgatctgtgatttcttctccctcctcccctgcaagagtggtcctaggagaggacctggcacaccttaggttgacattcagaaaacttcaagacatcaccatcagcaggctccagttgaacactagtctgtgtaactttaaacatctagcagtaaatacttgcagttgtgatataaaggaccctgtttctgtagaaaagaaaacatttaacataatggttgtgaaatgtaacatgaagcaaactaacttttttttttttaacatctttgtttttaaaatagaatgatagaactttgccagtctttaagatcttggcttaatttaatgtattaatctgtttgtgcaaacataataccaccatttaaaaatgttagggagatgagttgcagtttttataatagattttttttaaagtttggtattgtaaaacattcacacctctgtccctcaaaattgataattacgtttaaagtgcagtcatttgtggttagaatcttgttttgtttgcttccattattgagttcctcctaaggaaattgaggagagggactgaatagaagcccaaattcatataaaagttgcgtttaagttgtattaaaaatagatatataagaaaaaattctttcacttgatgtttgttagaccagaaagtgtgtgtgttctgtagctcagttcccagacagctttttaggtagtggaggaggtggcttcatgtggcacttgggcatttatattccacttgggagggtcaggctgtggccttctggagcaggtggcttgttaaggaatgctagcagggcatggcacgtgagctccggaatagatgtcttcatcacttcttccactgtgtgttgacactgttttccttacctatttcctcagatccccagctttctcctctgctatgcattttcttcacagtgcagcttgcagtccgttgctgaaaatgattataagccctgcataatgttaagctttattgtgattacgtgtatgtttcttctttcttttaagcagacccatacctttccagggtcaaagtacagaatagaatacattgatacaaagtacagaaaaatactttgatttttatccatttcttttactctgtgtaaagacttgagaagtctaattcacaggcaaaccaatacagaattgactgcagttgaacagactagaagtatttgtgggaggagtgacatgaagcatgagttatctgattttttttgtagctgctatatattttaagccttcatttgcaattcatgtaacagttgtgtcataaattacacaataaagcagtcctgttcaaatttttttttaacgtggcttgtagaatttttaaaaaagtgatcttaggtttgttttttcatgcgggatgcagatgggtgctatcagagcctctcccacaccactatagtgtaataatgttattattactctacactgaaacgtattcagagttagatattattttagcttcagttgttctttagaggctttcaaatgtaccgatgatactgtttcttgcactgaatatataaacactccacagtgtttatattgggaagatattgggaaggaaatatatttgtaaaagatgaaggctgtatctatttttttttctttttaaagtttgttcacttaaattcttttgaggatgggatgtatttttcttgctgttcagtgctttttccttttcatctgttgttctgtggtcacagtgaccttagctacatagcagactttcccaaatgtattgattacaaataaacagttgttacttagcaagacctgaaaatatgtctgcaggtttctccttgaagcaaatgtgtgggatcattgcatttccagaaatctgc

SEQ ID NO: 36869 - DNA, 1035 bp, Homo sapiens
attccatattcttctttccctttgcccttcccacttgaacttctcatttactcattagcctatggtaatatgccttctacctcttctattactctgaagttgcctccgtaaaggacaccaaggatggacttgccaaatttattggcatcttttttttttttttggagacagggtctcactgtgttgcctaggctggagtgcagtggcaccattatggctcactacagcctcaacctcccaggctcaagtgatcctcccaccacagcctcctcagtagctgggactacaggcgtgagccaccacacccagcctcattggcatcttagtcatcattcttcgtgacttcttccttttcttagcttctcctctcttctgatttccttttcagctttctgactttttttctcagtctccttactattttcccttattaattcatgcagcaaatatttgagcacctgctgtgggccagagtacaatcagccctccgtatctgcgcattctgcatctgcggattcaaccaactgtagatagaaaatattttttggaaaaaaaagtaaaaaaataacagtacaacaattaacacaaattataatatgcagctcagcatggtggctcatgcctgtaatctcagaacttttgggaagctgtggtgggaggatagcttgagctcaggagttttagaccaggcttagcaatataacaagactccatctctcaaatagaatagaatagaacggaacggaacggaatagaatagaatagaaaaataaaaataaaaatatagctgggtatggtggctcacacctgtaattccagcacttcaggaggccaaagctggtggatttcttgagcccaggagttcaagaccagcctgagcagcatagtgagatgtcatctctataaaagcatggtggcatgcatctgtattctcagctcctcgggagaccgaagtaggaggattgcgtgggaccgggaggtaaaggctgcagcgagctatgattgcgccactgcaccttagcccctgggtgacat

SEQ ID NO: 36870 - DNA, 1079 bp, Homo sapiens
cggacaatcccagtccaaacctgatgccggcatcagcccaggcccagaacgcacaaagagcccttgcaggtgtggtattgcccagtcagggcccaggaggggcctcagagctgtcctctgcccaccagctccagcagatcgctgccaagcagaagcgcgagcagatgctccagaacccacagcaggccaccccggcaccagccccgggccagatgtccacatggcagcagacggggccctcccacagttccttagatgtcccttaccccatggagaagcctgccagcccttccagctacaagcaagacttcactaactccaaactgctcatgatgcctagtgtgaataagagttcccctcggcccggaggcccctacctccagcccagccatgtgaacctgctgagtcaccagccaccgagtaacttgaatcagaactccgcgaataaccaggggtctgtgctggactacggcaatacaaaacccctttctcattacaaagcggactgtgggcaaggcagcccggggtctggccagagcaagccagccctgatggcttatcttccccagcagctgtcccatataagtcacgagcagaactccctgtttctgatgaagccaaagccaggaaatatgcctttccgatcactggttccacctggccaggtaagtatgagcctttgctttctgttcctctgctgcagacacttcagtgaggttactcactactttggatgttaattggatccgaggtagttgtgggaagagggaggagggaatagctgctgtcatccttgctcctcttgggagtggaaatttataaaataaaccagggttgattgttaataaaaaatagggtaaagttccctggcatagcttgattattaactgcacgaaggtttcaggaatcacctgcatttagtccactgtctctttcgtgccgtaggatttaaattaagtaatttgcgactgtgttttgcagataaacattacgtttcacgtgcttcttagaggcttggctttttttttttttttttttttttactacctttcagatctccatgtacaaaattccctaat

SEQ ID NO: 36871 - DNA, 1060 bp, Homo sapiens
agtattatgtctccccaccttctgcagttttctctgaacatgtatgttgcccatggtgggagcgtggtcactgtgcagttgtgcacagatgtctttcctttaccgttggcctttctgtctgcctctccttcctctctgcagcccaaatggaaaacaattatttactccattggagggaaaggaagagtcttagaattcctaagggaaccttagcataaaggttttggggaaggaggccgtaggccggcccggaggaagcaattccacttggtttgacaacttctgccactcccatgtcagatgacttgcacttcttaaagagattgctttataacactaagacatcctttctaaagattcaagtggacttgactaagctgagggtccacgaaatagaatatgacatgtgagctgtttttggaaaacgaagatggagagagcacttccccgtaacgaaagcaaagtggtaagcacagggtgagacccttttacacagaatggtggagagaaaagagaatgctgaaaagtggctcagatgcagagtgttctgtggagaaactgcagccccacttctgtttccctggagtctcccaatggatcattcaggagtgtcctatgtgagaattgagccaaggaaaatactcatgcaaccagcctgagtcgcggtgaggggacgagaggttgtacacacattggtagttattttgcaccagcagtgcctttctcactgggggtacttggaccctcagatcttcttttctaatagccatttgccaccccaagtggtatgtcggccatttctccttaaaacaccttccctacctttcccatgtactcagtttagctctcaaagaaggggtgaatcataaagccagtgaaaatttcaccctctgagggagttccccaatctgaaggggaagagggtgacctcagcggcttttctcccaaaaatcggctgaaggctggttgtggatccttgttcctctcctgaccccatctggctgctgccccgtctcccacccctgtccccggggctcgctggccctgcactccgccttag

SEQ ID NO: 36872 - DNA, 1034 bp, Homo sapiens
cctggctaacacagtgaaaccccgtctctactaaaaataccaaaaaattagccaggcgtggtggcgggcgcctgtagtcccagctactcgggaggctgaggcaggagaatggcgtgaacctgggaggcggagcttgcagtgagccgagatggcgccactgcactccagcctgggcgacagagctagactctgtctcaaaaaaaaaaaaaaagaaagaaagaaagaaagaaaagaagaagaacagagaagcagagagaagccaggccagctgccccagtaaagactcaggttctcacgatcccaggccacttccagactgaatcagttctcagctgtacagcaggtgatctctgccctacagggatctgcacccatttactcaggaaactgtcttcttactatccagttttgagagtttttatatattttgaattcaaagtatttttttaatcatatatatgattcacaaatgttttctctaagtctatggtttaatttttctatttttttatttttgagacggagtctagctctgttgcccaggctggagtgcagtggcgcgatctcggctgactgcaagctccgcctccctggttcacgtcattctcctgcctcagcctccagagtagctgggactacaggcgtccaccgccacccccggctaattttttgtattttttagtatagacggcgtttcaccgtgttagccaggatggtctcgatctcctgacctcgtgacctgcccacctcgtgctgggagtacaggcgtgagccaccgcgcctggccctctctgtgcctttttttttttttcttttcttttcttttttttttttgttggagacggagtttcgctcttgttgcccaggctggagtgcaatggcgcgatcttggctcactgcaacctctgtctcctgggttcaagcaattctcctgcctcagcctccggagtagctgggattacaggcatgcaccaccatgcccggctaattttgtatttttagtagagacagggtttctccatgttggtcaggct

SEQ ID NO: 36873 - DNA, 1077 bp, Homo sapiens
cccaagtgccctttcccccaaccttttgttggtttacgagctctcaattctaacctcctagtacacgaataaaaatgtctatcggggtggtggcgtgagcctgtagtcccaggtacttgagaggcagaggtgggaggatcctctgaccataagagttcctgaccagcctgtgcaatactgactccatctcaaacaaaaaacagaaagctatacaactccgtttctcttgctaatttgtcttttgtcagtttaatttgcaggccccagatgctgaatctaagagggcagaggaaaagcttttcctccctgacataaccatccaggagaaagtctggaatggagggtcagaggggtagggaatggagttaggagaagtagatagattcaggacagtctttggagaatgtacatcactgaggtcaagatgtcctagggaatggcccttctgggttcacaattctgcttccgtcggttaacagcaacttagtcccttctatgcctgtggggataatcagtcaggataggctggattatgctgctctaacaaccccaaatttctctgatctaataaaagtatactcaaagctgtatacccttcaagggtcccctggggtctctgctcattgtagttcctgccctggctacaggcataaccatgtggaaatcaaaggctttcttggcaaagagaaagagagctctagaagctttagcactggcaaataaataaatgcttggcgtataggtgatatatggctcttctggctcaggtccttggccagaattaatcacatggtctcacctcaagggaacaggtgagttaaatgcagaaaaatattcaagctgggtgaggtggctcacgcctctaatcccagcactttaggaggccgaggcgggaggatcgcttgagcccaagaagatcatggttgccgtgatccatgatcataccacggcactccagactggggaccaaagtgagaccttgtctctaaaaattaaaatatttagaatgtttcctagcataaaagatgtgctacgtgtgtattattactgttgctattgccagaaagtacaatcaac

SEQ ID NO: 36874 - DNA, 1034 bp, Homo sapiens
ggccgctggggccgcaaggcgtgcggggaagggccagagccgggtgtccaccccagcttcccaaagactccctcttctgtgcttccttctcccctccccgccccccccccagtctcttcacatgcccctagcccccgcggaaacttcccgcgatcccaaacgggccaaatggcgagaaagcaaaggagctccttcttgggggtgagtggggcgccttgagcgcttcctcaaagctatgttcccagagccacaggccttccttgtgtccctcaccctgctcagaccgggccatagccgggggctggggcaggaaagccggccctcggcgggggccacgtggctctcaggcgcctgggctgctgagtcacgcttggccagcacctgtctgtaggccacagcctctgccagcacgcccctctgtgtcccctgcccctgtctgcaaggcagtggctccagcaggccctggggcattttccactctccaccgccggatgcagggagaggcctgaaccctctccacagggctgctctgggcagggtggaagccttgcccacttcggagccctccgggaaggatcattcacacctgtggaccagcccctgctgtgcgcacacccacacatcaccttcgcacctgactggccccatccagccactcttgcctccctctgggtttcctcccctgggaggtttctccagctcctgcaagccctgggctgaaatggcatgagttggacccagcaggttctgacctcctactcacaggaccttgcctgggaggctccagagggtgaccactcgtcctgcccctctccttgccccagttctggcggacaggttactctggtggcataaagcagtgtttcttccttcctagctgaggaggctgttggctgacccccttggctgcccacaaggccaacgggcctgagcccccacagggccatgggcattacctgctgaattgaggagcccataaggagtcacttggaccacagtgaacacttggcgaccactgacactcaggagacctt

SEQ ID NO: 36875 - DNA, 1121 bp, Homo sapiens
tggtgggttcagataatgccctggaggagccgggcgagcgccggcgaggggagggagtgacgcgggtaaacaagcgcgggggtgcgggggactcgcgagcgccgcgacagcgcctgggagaagggcacggatcgccggcggaacgctccgagccaggtcgagtacagatgttttcccattggcaagtggacgagaacgttcttcagaagtgttggtgttggcacagaagccctgtttcctgctgcgctggtgtgaccagtggctgctgggggtggggttagggaggtggttgtggccaggagggcgggaggtggccaaggccggcccctgggagggtgcagtgctaggacctccctctggagcgctgccagcataccaggccctctcctattcttaaaaaaaaaaaaattgtgatgttattgagctgtaactgaaataagggttcacccatttagtgtacaagtcagtggttttcactattttcataggtttgtggaccatattcagtgtgagagcttttcatcaccttataaacgccatacataccttttatcaccctcttatccacatgcccccagcaacctcctttctgtatctattcatcttgcaatcctggacatttcatgtaaatagaatcagacaatgtagtcttgcaagtggtttctttcacttagtgtaatgtgttcagtgttgtggcacatatcagaactagttttttttggaggaataatattctgttgtgtggacaggccatgttttgtttacctgttcattagttgacagacatttgggttgtttgcatctttgggtgcctcacctgtgccctcggtggatggcgtggtttggtctgcacagctgtgctttaaagccatttcagctcatatgtatctgtcacaaatggagactacatacaaatacgtgtctttcagctttgttagggaaggaagcaggcagatgcccttgtcttctcctttactcccaagccactagaagtctaaggcctttgtggggctgggcccctcaggagcaggtcacaggcagggatctcccacagttgaagacggacatgggcctggtcggatggggaatgaggtggcacgtttctgaaaaggcagctggcc

SEQ ID NO: 36876 - DNA, 1079 bp, Homo sapiens
gttcattctacctccaaaatgtatcttgtatccattcatctctctccatcttcaatctatttcaatgccccatcatctcttgcatggaggagtgtaataattggctaactggcctgttcttacattttaaaatcaaaagatgtgacaggtgaaatgcctatttcagtgtccattgatggttctgcttacacaccacctggctgcctggtgtcgcagtggcagagttgagcagtgtgaaaaagactgcttggccctttacagggaaagcaggtccactgtggcctgtgaggacgagagctctgggcaggctcggacactggcagaccctggtcctggctggccaaggcagcagggtatgtgtttcgggtcactcacagggctcagcaccactcctcatggcttccttactgtttcggcagaggctgacccgcggctgattgagtccctctcccagatgctgtccatgggcttctctgatgaaggcggctggctcaccaggctcctgcagaccaagaactatgacatcggagcggctctggacaccatccagtattcaaagcatcccccgccgttgtgaccacttttgcccacctcttctgcgtgcccctcttctgtctcatagttgtgttaagcttgcgtagaattgcaggtctctgtacgggccagtttctctgccttcttccaggatcaggggttagggtgcaagaagccatttagggcagcaaaacaagtgacatgaagggagggtccctgtgtgtgtgtgtgctgatgtttcctgggtgccctggctccttgcagcagggctgggcctgcgagacccaaggctcactgcagcgcgctcctgacccctccctgcaggggctacgttagcagcccagcacatagcttgcctaatggctttcactttctcttttgttttaaatgactcataggtccctgacatttagttgattattttctgctacagacctggtacactctgattttagataaagtaagcctaggtgttgtcagcaggcaggctggggaggccagtgttgtgggcttcctgctgggactgagaaggctcacgaagggca

SEQ ID NO: 36877 - DNA, 1034 bp, Homo sapiens
caggaggagactgcgcttggtggcgggatcacttagttgacaacatctaaaaattaggaggtgcggcagggcgcggtggctcacgcctgtaatcctagaactttgggaggtcgtggcgggtggactacctgaggtgaggagttcgagaccagcctggctaacctggtgaaaccccgtctctattaaaaatacgaagcaatgagctgggcgtggtggcgggcgcctgtaatcccagctactcgggaggctgaggcaggagaatcacttaaacctgggaggcggaggttgcagtgagccgggattgcgccattgcactccagcctgggtgacagagtgagactctctcaaaaaaaaaaaaaaaaaaaaaaaaaaaaaaaaaaaaaaaaagggaggtgctcagtcaagcctctgagaggagtggggggcggggcgaggagtctcttgctcagagccccctagggactgggacccgttgactctgagctgcttttgaggctggatcaggtaccagcggcctgggggtcgtacaggatgggagaggccggggcttgggatgttgccagatctacgttgaaaagtgaagcaggaagagaggcactgaggctgggcacatggggaaaaccgtggagagccggcctttggggactagaagagtgggaacaatggttgacaaatggtgagtgtggtgtagaacagcagtaacacaataccaggatccacagagtggccagggccagagtggggagaaggaacaggactctgcagatggggagggtaaggggctgggtggcgtgaagggtggttgcagaatttggggagggcagctagcctgtgacccaggttccaagggcactgaggtctgggccaggccgcttggaggcaccagagcctcagaggaggggtggggtagaggaacggatccagcatggtgtcccccttggccaccagagggagttttctaaatttgagcatggctcatcgctgcttgaaattctacgtcacagtgtggcctgcattgaggagggcccacacct

SEQ ID NO: 36878 - DNA, 1030 bp, Homo sapiens
atgcctggcctggatctatttttaacttggatatggtgtcttctgagtctgtggtcccttaagggactttagggctatgcccagttgctctataatacagggtcatttaaaatcaaagtgtcagtatgttttggaagaagttaaaagcagtcaaaacaatgaaagttataaaatgttactcatgaaagttcaggtgttgagaatacttgtcttctgagttaggcttaggcaggctatagaccttaagctggaaaattcaaccctatgtccacttgaaatcaaagccaccaagcttaaaaagttaccagtatcctgatggtttgctaggatatgggttgtaaacattttgtgaaattttggggggaaggcagttttctctctagtaaattattggaattggaatagtgagactagcttaaggtctaagaagttctcatacaactgttaatttatacagtcagttctgctgtaaagcaacatacaggttcctaaaaatcactgctttgcagaatcgtgcagtagaaatgacttacaaatggggttggggtacagcactctaaagctttatcagtgacacatttaaaaaaggaacctggtaaaaatgatagaacagttttacacgttgaatggttaagaaatatatagatactgtaataaatgtggcattttctttgaaaaagccctggtttgcttgtggaaagggatgtcagaaaggttgctgctggtgagttactgtgaagtggtagaagaattacttataatcagatggaaggttgtaacacgagaagcaaataggtgtggctcttaacccataataaactgacttagctggtgggtgtttgaagtgtgtttcatgtatttctacacagttcagttcggctgggtgcaagctttctcccttcatctagtgtttatgtgacagaatagcacataaataaacaggaaatatggattgtgctcaaattgttctctaatttgtgtatcaatcacagtggaacaaattcaccttttcttttctttttttttcccc

SEQ ID NO: 36879 - DNA, 1034 bp, Homo sapiens
gacagagcaagactttgtctcaaaaaaaaagctgggtgtggtggcctgcacctgtagttcagctacttgggaggctgagatgggaggaccgcttgagcctggggaggttgaggctgcagtgagccatgattgtgctactacactccagcctgggcaacagagtgagaccctgtatctgaaaaaaaaaataattttaaaaataaaaaatttttttgagcgacaggttctctctctgttgcccaggctggccttgaactcctgggctcaagcaatcctcccacctcagcctgctgagtaactaggattaccggcatatgccactgctcctggctccatttttaacatatcactgttttccttcttccctttccatcaaaagcatggcttggaactcatttctcttaatctgttttgaaatttgtagtttcattcagctgtcttctcttgtaatgtgtgaaaattatgaactgcaataaagacaggatctttggaaagatgagttgtattgtattttagtctacttgtgaaagctgtggatttcagaatggtctttgaagaatactcagcaaaacttcattattgttttgtttagtcttgctttgtgtaaggcattcatggttctggttttgtgagaaaacagcttgtgagcagacccactgtggaggctaggtgggaaggaggtgggtaacatttaacttaaccttgaattatagatagaatttcagtgtgaaaatggtatcactaaatgcttggagatagggaagagtggagcgtatctgaaggatggcagtttgtctgccagttgcatcaaaagatatagaaggaaatattgggacagaagtctggaaaggtggaatattttgaattctcaactgcggagtttgaattcttctcagcagtagagatcttaaaggggaagagaagggatgatatagaatcatcattttaagtgggtataggaccagaaatcattacagctaaacattcaaattttattactatttttattcttatttatttatttttgagacaga

SEQ ID NO: 36880 - DNA, 1044 bp, Homo sapiens
cattttttcatgtttgttggctgcttgtatgtcttgttttttgagacagggtctcactcttgcccacgctggagtgcagtggtgttatctctgctcactgtggcctggacctcctgggctcaagtgatccttctgccttagctcccaaagtaggctgaggtgggagagggcatggaagctctgcacccctgcgctgttcctcaccctgtatacaacttcatctgtctgttcatctgtatactttaccatatccttataacgaaccagtgaatgtgtttgcccgcattctgtgagccgttctaacaaattaatccaactccaggagggagtgttgggaacccagctttatagccggtcatcagaagtgtgggtgatgaccttacttgtgtctgaagaagagaggggcagtattgtgggactcagcccataatctcagtgggatctaactccaggtagatactgtcaggattgaattgagctataggacactcaggtgtgtggtatatgctggagaattgcttggtgtgtggggaaaaaccttcacacatctggtcacaagcgtttgtgttaagtgtgagcatagaggaaaaacagtttgtcttttacagttgcttctcaggtaccccttttcttttccccttagatgttcattttgaaggttaagtagagatggcttttcttttgcttactggggtggggcagggggttgtggcatatctgctggttaggggctgttaggatgggtggatttcagttctggtttttactattttgtaactacaaatccttttcccaggggcacactcaaatgtttgattgtccctaatttcactgaacatgtttgattcctgactgaaaaatagaccagaggctctccccctttcttagggttctcttttcaacaactatttcttttcacctctctcctaaccagaggaggttcaaatatatttaagtgctttaaatgtaactttttctgcttggtctttgtgggtatcttcattccagttggttttcttcactttcatttcttttcactttact

SEQ ID NO: 36881 - DNA, 1053 bp, Homo sapiens
gagggagtcacaagtacggttttcttaccggatatattgtgtagtggcaaagtctggccttttagtgtactcattgccctaatagtgaacattgtacccaaaaggtaactttttcacctttttcgccctcccgtgttttggaatcttcagtgtctgtttttccattctgtatgtgcatgtgtacccattgtttagctcccacttgtaagtgagaacatcggtatttgactgtttctgagttgttttgcttaggataacggcctccagttctgtccaggttgctgcacaagatatgctttcattcttttttataactcagtagtatttcttggtgtatatatacactgcattttctttatccagtcatccattgttggacacttaggttgaggccgtatctttgctattgtgaatagtgctacaatacacgagtgcaggttatctttttgacatgatgatttctttccctttggggatacccagtagtgggactgctggatagaatggtagttgtatttgtagttctgtgagaaatctccatactgatttccatacaagttgtactaatttacattcccaccaacagtgttcaagcgttcctttttcttcacatccttgccagcatctgttgtttttgactttttaatagtagcctttctgagtggtgtaagatggtatttcattgtggttttaatttgcatttctctgatgattattgatgttgagcatttttttcgtatttgttggcaatttgtcttttgaaaaatattgtttcatgttctttgcccacttattagggtttttttttttttttttttttttttttttgacagtctcactctgttgcccaggctggagtgcagtggtgtcatctcggctcactgcaagctctgcctcccacgttcacaccattctcctgcctcagcctcctgagtagctggtactacaggcacccgccaccacacccggctaattttttgtatttttttttagtagagatggggtttcaccatgttggccaggatggtctcgatctgctgaccttgtgatccg

SEQ ID NO: 36882 - DNA, 1047 bp, Homo sapiens
atggggtttcaccgtgttggccaggctggtcttgaactcctgacttcaggtgatctgcccgcctcagcttcccaaagtgctgggattacaggcatgagccaccgcatcctgccctcattaagctttttgtatctgtgagtttagagttttcatcaaacatagacattttctgctgttttttcttgtgtaataccttgagatacaattcacacactgtacagctcacccatttaaagtgccagtttagtgggttttgtatattcacagagttgtgccacatttgccacaatcagaacattttcatcatcccaaaaacgaacgctgtacccatttagcagtccttcctctgacatttaggaacgaagtctagcctcagttctgtgtgaacttgggggttgctgcctccaccatcctttcaggtgtttttttccctctggctcaggtagtttctcacatgcatgtgtcgatcaataccctgttgacaacttgagccagggagtggggggccccatcagatctccagacttctctctgttctcttctcttctctctgatgttctgcctcttgatttctaatcaccttggcttccctggactttctgtctctggaactcagggaggatcactgtcctctacctgggattcccctccttgggctgcctcctgtaagtgctgtccaaggagtaagctgagacagttatagggtctaccctgtttgtttcccacccttcaggaatgactctcctgcattggttggtgtctcatcttagaaatttgctgattcatgtatattatctgatacgatggttgtcacaggtggcatggtaaatttagttcctgttactcttatcttggttggaagtctcaaggtcgcgttttcttcagccaatagaaaattaatcagttctgaaagactggtatgtttttattacatttgtttcattctctctcagattagatcctgaaccagtaaggagattatggggaacattcttagattgtagaaaccattgacaatttatcaagaagtgtcaaagtgcagattta

SEQ ID NO: 36883 - DNA, 1368 bp, Homo sapiens
tcagtgtgcaggttattgtgtgaatatagttattcatttctctaggataaatgtccaggagtgcagttactgggtcatttgagggttgtatatttaattttttaagaaattgctaagtggttttctgtagtgtaagtactgctttacattgtaaagtgattcactttctctgcatcctcaccagcatttggtgttgtgactgtttttatgttagccattctggtagatgtgtagtcatttcatggttttgatttacatttccccaataaagatacccaacatctttgcaggtgcttatttgtcatctgtaatgtttttcttctgtgacatttcttcttgtcattgtccatgttctaattagattatttgcttttttactgggagtcctttatatattctaggtacgagtcgttggtggaatatgtggtttacacatatttctctcagtatgtagctttttacaaggtcattgcacagcaaaagtttttaattttaatgaagcccagtttatcagttttttcttctgtggatcctgattcttgtttcaagtctaagaactctttgaatagctctaagtcccaaagattttcctcttaggttttcttttaaaagttttatggtcttatgttacatttaagtctatgatccattttgacttacgattgagttaaaagatgtgaggattagctcaaggttctttttgtgtgtgtgtggcctgtcgatgtccagttgctccagcagcattattgaaagatgatcttaccttcattgaattgcttttgcatctttggcaaaaatcagttgagcatatctgtgtgaatctgtttctggattttttattctgtttcattgatctatgtgtccatccttccgccaacatctgcaaaaccagttctgaggccccaggaaggaatcggctctttgagcctcagaagggtacagctgtgcgtggccacagggaacacactccaggctactggggtctagtgatgaggcacttttgtcaggacgtggtccacagagaggagaaaagaaatgttctttagtctcagaggccaagacagacgcatgggaggagagggagatggcaaggacctggataactggaggcgtgatgaatggagagtctggtgcaggatccatgccacgggaggaggcccctgtggagagtgagaccttgggcggttagggctggccggactgggccccctgctcctcacagtgtgacctaaagccgcggcctggtatctagtgctttccagcgtagcccaggaaggcgcgccctccttcggcagaaacaccttaaaaaaaaaaacaaaaaacctgctattgctttttagacagaaacaatatggagacttttatttc

SEQ ID NO: 36884 - DNA, 1069 bp, Homo sapiens
acttcttcactgctgggcagttagggaagttcatctaaaccatgagacagtgtccggttggcagtttctacctcggatgcgaaacgccgactacagttggggaagggtggggcgtctgctgccctaacccgcgaagcgctttctcaggccccgcccccggtccgacccggacgaccctctgagtcctccacaacgaagtcgtctgcctagaagggccggaagtacttcagggcgcgccgcggacccaccccctcgcttccggcatcggctgtggggagtaccggctgcagtcggctgtgccgggagggtaggatggcgtctggccgatgcggtgatagcaccgaaagcagacggccgccaggcgctccccctaccccccgaagtttctccccagcggcgggggatgggggtaggcggttcctctgttctttctgcgttccccgcggcctcttaccacagagacgcgggcctccaccgtcctagccctcccgccctgttctctagtgcggactagagcgtctcctcgccatttcctgtcgccctggggccccgcggggaaaaagggggagtagcaggacagcggagggaagtcgcgagcttaggtggtgtgtagacgccggaagtgttgggaaggaggccggaagctaggggcggggccaggaagtgaggaggggcgggggtttatgaggagtccaagggagcattggggcagacttgtactcagagccacctgagggacttggcggtggcgcccagcactgtcccctcccctcgtagagacacggttgtcgtttgggagtagggaacactgtgttggggtgggttgtcggcaggacatctctctggctgctcttggggcgaggtgtggaggggcagggctgggggtggagccgggtcgccagggcgtcggtagggaagacccccgcccctcgcccccccaccgaacctctacactggctggctggacactaagatggctgccgttgccatgacacccaaccctgtgcagacccttcaggaggaggcggtgtgcgccatctgcctcgattacttcacggaccccgtgtcc

SEQ ID NO: 36885 - DNA, 1030 bp, Homo sapiens
ctgagagggggccagtgtgtttaagctggggcaggatttagtgtatgttagcactgcagagacctaatatttcctagtctagtgttttctcagcacaccccgacccccccgctttttttgttgtttttttccattattgctcgcccttctccaaggagtcttttaagatacattttccatccccacctcccgcctgttttcataaccccagcaggtcctgctgggatgggctggcactgtgagcttcatagaccaagccaggacctccccttctgtccctcttccctcctcccttcccagccagtgcctgggccttgccactacccagggcccatgctcactgccacctgaacgttagggactctgctgctggcgactgctaggcactgaatggtaggatctgtctgggagtaggaagtcatcgtgcttctggccagctgcccaagttgatacttttgggctctcctgggtatagaggtaacaggagctgtgtgcccctggcatagagtgaagctgactgtggcggctgttccctcacgcgtctggtcagttgggaccctcctctggcctgctgctcacagcgtctgcagccgatggtagctgtgtgaaaagtgtgcctaccacccaggaagggccatccctggcaaatagggtgggactgggcaggagttttttctgttacaggatattaagtccctacataatatccttgatttttgcctcttagcccacaaagcataaaaatacttactatctggaccttcacagaaaaagtttttccgagttctgatctggggcttttgggtgactttcttaaggtcactgtgtttaatggcgtcgggaccctaacttcatgttttgattcctgaattcttttatttattcatttcaaaaatttttaccaggtgcctactctgattggtactatgtcagggtccgaggaccctggcaaacaaagacattcctagtccctgtcagtgggagctcatggtacagtgggggaaaggatgttaacagttacgtcatttaa

SEQ ID NO: 36886 - DNA, 1025 bp, Homo sapiens
cgaggtcaggagatcgagaccatcctggctaacacggtgaaaccccgtctctactaaaaatacaaaaaattagggcgtggtggcgggcgcctgtagtcccagctactcgggaggctgaggcaggagaatggcgtgaacccgggaggcggagcttgcagtgagccgagatggcgccactgcactccagcctgggcgacagagagagactccgtctcaaaaaaaaaaaaaaaaaagtcccaaggagaaattggagaggctctcctatgaaaatccatctcaccattccttttctgaggagtccacaggacctgtacagttggaaccagcccctcaggcttccctgccagagcccttttctccaggagcagaggcatccatcccctcctgccagcattccagaccctggagggcttgcgcggtggcaggttttcccttgaatgctgaggcgaggctgagggaaaggtgcgtggccaggaccagagggcctgctgactgccagctaaaactctgtgcaggaggctttcccacgtactttacgtactttaagatgatgagcaaaatccttactgtctccctgcaaaatccgtgtggcttcctctggcgtgtcccatactcttgtgtttgtggccagactgggcctccgctcttcctccaaactcattagttctctcccacacagaacacacattgttctgcctggaaggcccatcacatccctccccaaccctctcggttcaatctaagctttcttggggtctcagcttaggttgcctgttcagggaagcctctgggaccctcaggtctaggtcacatttgtttcatgctttcacagcggtggtgtagtgtatactggttcttcttatccctcaggtgtctcctcacaaggactgctctgtttctgctaagtgttgcattctcaccacccagtggaggctttggcctgtggaagattctaattttggtggccagcctcatgggttgaaaagtaaaggtcaagtagttaaaggaagggcgttccaggcaga

SEQ ID NO: 36887 - DNA, 1035 bp, Homo sapiens
ctacctcaaaggagataacagaaaaacaaggagtactgatgatggaagcatctggtccctcttgcagagtgatgaatgattttattggtggcagctgggtggcaggacaatccaggcatccagttatgcctgatccccaataagtgaaatctttgttcattttctttttatacacccgtctgcttcctaaaacctgacaccatttaatggtgcccttggtcaaatctaaatgatcttactttcataattctttgattctagcttgcagagtcaagacgaactctaactcatgggatggacaaactggaagatgtaaaataagtaaggctttctgggccaaaaagcctcttcttacagaaaatcaaattttaaaagaacattgacctcaaaacaataaaactgtcctggttatgcaatagaaatagctatataaatggaatcatatccttaatgaacacctcctgtggctacccaacttttcacacatcttactgattataggccttgctgtgaatgctttcttgctctatctgaagtattcccaccagagttgtttccaactttatttcctatattatgaaaaatgaagtttttttaacattgtaacaaagtatatgaaagataatgtatactgtattaaataaaccattatacaaaaatagttccttgtactgttaactattattatgactttggtcagtaaaattctaaatcatgcgactataatttacatgtttaccaatggaaggaagtgacaatgaactgcctaaagaatgaaagagacacccaggcatggtggctcacatctgtaatcccagcactttgggaggccgaggcggggggatcaggaggtcaagagattgagaccatcctggccaacatggtgaaaccccgtctacactaaaaatgcaaaaattagctgggcatggtggtgcgcacctgtattcccagctacttgggaggctgaggcaggaaaatcgcttgaactcgggaggcgtaggttgcagtgagccgagatcgcaccactgcactcta

SEQ ID NO: 36888 - DNA, 1059 bp, Homo sapiens
actttgggaggcccaggtggtggatctcctgaggtcaggagttcaagaccagcctggccaacatggtgaaaccccatctctactaaaaatgcaaaattagctgggcatggtggcatgtgcctgtaatcgcaactactaggggtgctgaggcaggaggatcgcttgaacccgggaaacggaggttgcagtgagccgagatcatgccattgcacttctgcctgggcaacagagcaagataccgtctcaaaaaaaaaagttagaagagaaatggaaggttctctcttttcctcagcttcagtatactaaaacccagaagcataggacataagttttttccatgggatactttagttatcaccttgggtgaaaacatggtactaggatttgtccttcaagtcaggttaatgtaacagaggtagcagtgacttatggttagatttgtgccttaactgtgcacttcccaatatttgctataaaatgggggcaggggggtgataataatatctaatacatgaagcctgtaggacagtgctctgtgtttgtgttttgactgcaactcaaagaaagcaatatatttttagatgaagtatatacatgtatatatatataacttaaaagtttcataaagcagtacttacccttactatgttccatgtgttctaatattttctcttacttcattttgagataatgctaggcatgacccatttattttaagacacactaattggtcaaaaaacaatttgaaaaccactgctataggagaacacgaggaaatatattttataaactgtaaagcactactaagacgtgagcagcggctgctgcatatccaggtcaacctttatgggcctgaagacaacctctccttcgtttgggcactgctaggagtcaaatctacctagacttttggtaaggaagatggtactcatgctcattgtcattgagacaattatctaatgcttagaagtcaagactagaaagcaaggcattaaccatatcagcacccaaacaagggaagacaagttacaagaaagccaaataaaacagcaaacattt

SEQ ID NO: 36889 - DNA, 1146 bp, Homo sapiens
ctgtgtcttgaggctgaacttcttaacccactttatttttatgtgtccttatcagaacataagcagtgtctcaaactcaggccgtttactagtcgccaccgggcaaagctaaatacaacttttataagaacctggccaacggtagttgaagtcgacccaaacattttaaactttgccaattgtactagagccggagcaggcaaatggtggtagatcttcttagcaacaaacagttagaagacggaaagggctagggttagggtcttttggtcacccagcccttacctggttttcagataagaacttggcctgttacacattttcacgtagaagtgatcttcttggtacagccgaggtcttaagcttttactgaaacactatccttagctgccttatgatttaagtgaggattatagaacttcagccctaactttttcattatgtgtatttttcttcattcatgtcaggttggatttggtctagggagtcccagaaagaagtagaaaaagagagagaagcctaccgtcggagaactgctgcttttcaacaggatctggaagccaagtaccacgccatgatctcagaaaatcggcgtgctgtcgctcagttgtccttggaactcgaaaaggaacaaaacagaactgctagttaccgagaagcccttatctctcagggacgcaagttggtagaagaaaagaagcttctggaacaggaacgggcccaggtgatgcaagaaaaaagacaggtgcagcctttgagaagtgcgtatttgagctgcctgcaaagggaagaaaactggcaaaggagagccaggcttttgctgaaagaatttgaagctgttctcacagaaagacagaatatctactgcagtctgtttcttcctcgcagcaagcggctggagatagagaagagcttactggtgcgagcgtccgtcgaccccgtcgccgctgacctagagatggcagccggtctcaccgacatatttcagcatgatacatactgtggtgatgtctggaacaccaacaaacgccagaatggcagactcatgtggctctatctcaaatactgggaactcgttgtcgaactgaagaagtttaagagagtagaggaagccatactagaaaagtaagacaagagtgaaatcaa

SEQ ID NO: 36890 - DNA, 1078 bp, Homo sapiens
tgcagagatcacatggagagagaggaggcgaagggctgggggaggctccaggcccttttcaacaacaaggtctcatgggttggttagagcaagaagtactagagcatgaactcactcccttcagagggagggcattaatctgttcatagggggtccagccccatgacacaaacacgtcctatgaggccccatctccaacaatggagatcaaatttcaacataaggtttggaagggtcagatgtccaaaccacagcaaagagcaagctcccagggcagagcttgattagtgattgaaacaagatggctcagtgtgttttatagaagcccaaactcagccaaccacagcttgtctgctgaagttgcagataatttcaggtcacattctttatcattttcatgctctttatcatttgcattatttttgaatgaggctaaatcatttcaaaagcatctggtcttcctagggtgctttcgaaatgaattagcctcattcaaaaaaaaaaatattcaccactaaggttttaaacagcaaatgttcgctgtgataacgtcttagagttgtgaattactgtagagcacacaaaacacttcttcagtattacaccttacccctccaaagtgcctgtggtgtaggagtcagtcactcctatctctagaaaaggatggtggctaggagagttgtctgatttttacataatcccagaaagtacttaaggtagattttaaagatcgtggaatacagaccgatggcataaagggaaaagggaggggaaagaaagaaggaatgaaatgaagccagaggttctagtcatgtggcaagtcacttacaaggatcggacaatgctccgaaactgagcaagttaagggtgtgtgtgtgcacgcgtgcgcgtgtccgtgtccatgtgagtgcgtgtgtaaatattcttaaaggcattaatgaactgaggagacataaggaattctcaggccagggttgaaggcacagaggaacccaaagagaaatctagtggggagtgcagctggcctttgccctgagggcatttgtgaaacctggtcaacttcattttcaccttttca

SEQ ID NO: 36891 - DNA, 1045 bp, Homo sapiens
gccgtgtgcagaatatgtggtctcgggtcccccaagctgaggttaaggcagtattcagaatagaagcactctgtgtccaagggtgctgctcacatgggaatgatggtgggtggagcacagaagagagatggagtgagaggcaggaatgcttcccagctgtgggtgacagagacagatgggtaccaaagtgggagcccccagcactggagcaccaccaagaagctgcggtgatgggcagatgcccagggcagggtctgaagtgcccagaacatgcagcgagggacagtgctgtgataaaggatggaaggagattggtagccatggcagaagccacatgctgtgtttttaaaataaaatgctcaggaaggactgtgtgtgggagacagatgggaatagacgatgtgtgtgtggtcacacgtacaagtgtatggtgtgtggttgcacatatgtgggggggtgtggttatgtgtgtggttttgtgtgtagtgtgtggtcagttgtatatgtgtgtgaatggtgtgtgtttgttacatggactctgtgtccatccttcacaggaaaagaccagcgcggctgccggctttagggccacatatttctgttcctgctctggggtcagcttccagtggtttctgctgggtcattatttattttttagagatgagatctcactccatcacccaacatggatggcagtggtgggataatggctcactgcagcctccaactcctgggctcaagcaattgtcccacctcagcctcccgaatagccgaaagtacaggtgtgtgccaccacacccagccaatttattttttgttttttatttcttaagagatgggatctcactctcttgtccaggcttgtttggaacttctggtctcaagtgattccccaggctcaggggaattagaggcgtgagcctctaatagcacagggattagaggcgtgagcctccatgccaggccacaggctggtccttttgagcaggatttgtgagggggccagtttctggaggttacaggtgacttgtccttccctgtgggg

SEQ ID NO: 36892 - DNA, 1026 bp, Homo sapiens
tgaccccatgtcaggccgtctgctcccatctcccagcaggtgggggacctggttctgctcccatcttccagcggcaggggtcccgggtctgctcccgtctcccaaagagggggaagcccgtgtctgctcctgtctcccagtgggtaggggacctgcatctgctctcacctcccatcaggcggggactcatgtctgctcccatcatcttccagcgggtgggagcctgtgtctgctcgcatctcccagggtgcatgtccatggggcatgtgggctctgcactacctccagctgaccatggcattcagttgagaaaccccaggccccctagggtcactgagacatggatgtgtggggacaaaggggcctggggaacagttggcctgcgttcggtgccttggggcactggaaccatatttctgaaagtaggatgtgttatttctcactagagccttcctcagtggggaagtggtgacactgtgtccggaactggtgggttcttggtctcaccaacttcaagaatgaagccgcagaccctcgcggtgagtgttacagttcttaaaggcggcgtgtctggagtttgttccttctgatgtttggatgtgttcagaatttcttccttctggtggtttggggtatccctggttcaggaatgaagctgcagaccttcactgcgagtgttagagctcataaaggcagtgcggagccaaagagtgagcagcagcaagatgtattgcaaagagcaaaagaacaaaacttccacaatgtggaagagaacccaagcagtttgctgctactggcttgagcagcctgcttttattcccttatctggccccacccacatcctgctgattggttcattttacagagagctgattggtctgttttacagagagctgattggtccgttttgacagggtgctgattggtgtgtttacaacccctaagctagacacaaaagttctccaagtccccacagagcactgattggtgcatttacaaaccttgagctagacacagagtgctgat

SEQ ID NO: 36893 - DNA, 1056 bp, Homo sapiens
ctgagcctagcacaggtggtgcctgcccagcaggggcgcaggggccgcgggccggaccgttctcacgcgtcgtgactcccacccgtccgcatctctgctcacgcacattctcttccgccaggtctgaaatcgcctgctggcctccctctgacctgcctcagtttctcctcttcactcctcgctgcctgatgtgtcattgcttatttgtttatcacttgtcccaactgaaggcctcacgagggcaggacgttttatgtcccgctcagccctccaaggccaacctccaagcttatcaaaacctcatgcaaagcacgtgctgatgggctgggaagtcctgcgtgagccctgaaggtggctctgaggggcttccctcatccctttgctcccaggcgggccccacggggtgcaggttctcagatgactctctgaggtgtgtgaataagggtctctgttcaggcgcatccccacaggagatgagaccacagaacgcagccctgagtttgaagcatcccagaaggttctttctctctgacccgcacgcccaccactgttctgggtgctcacaaaacccaccattgcttctggtaatttctcagctgctcctcctgtccagcgacccctgctgcagaggcccaggggaaacacaggccaggcctgtgagaagctcctgtttcaaagaaatgttgtcagcgataaaactggaaacggttcctggctcgacacctgacccagcctttccacccccaggatcctgcccccagacggcccttccacccccaggatcctgcccccaccaggatcctgcccccacgcggtcctgcccccatgagaccctgcccccatgcggcccagcccccaccaggatcctgcccctgcatcctccgctgggttggcatctgcatttttggtgtcttccagggaaaggggtgagtgggtggggcctgaggcccttaaggtcttcagtgtagggagtgcccctggatttttttccggctgttttgggggaatttgtgggatctcaagttcagcaggggccacactcaggacccccacgat

SEQ ID NO: 36894 - DNA, 1065 bp, Homo sapiens
tcccttgtctccccagatgtcaagaatatgaacacgtggctgctgttcctccccctgttcccggtgcaggtgcagaccctgatagtcgtgatcatcgggatgctcgtgctcctgctggactttcttggcttggtgcacctgggccagctgctcatcttccacatctacctgagtatgtcccccaccctaagcccccgatccccccaaggctgggtggtcagagctgctcatcttacacctctacttgagtatgtccctaaccctgagccccccacgcctggggccagagtctttgtcccccgtgtgcgcatgtgttcagggtcagcctctcccagaagtgagatcatggacaaaaagggcaaatcacaggaagaaattaaatccatgaggacccagcaggcccagcaagaagctgaactcacgccgagacctgcaggagtggtgccaggtgcttgaagtaacaagtttaaaatgttcagagacaatggaatggaatctattaggcaagaacaggacattatgaaataaggacaggtggacttccaaaaacacaagtagaaattctaacaatgaaatatattacaggcaggtcacccactaaccaaacaactgaagcgagagctggtggtcttgcttggtctcacagtgggcacagcggtaggcggtcagtcatgttgctgaacgacggagggtaaactccccagccccaaggaaacctgtgttggaagtaacaacaacctccctgctcctggcaccagccgttttggtcatggtgggccagctgcaaagcgtcttccattctctgggcagtggtggccccgaggctgtggcctctcagggggtttctgtggacacgggcagcagagtgtgtccaggccagcccccaagaatgccctgctcctgacagcttggccaacccctggtcagggcagagggagttgggtgggtcaggctctgggctcacctccatctccagagcatcccctgcctgcagttgtggcaagaacgcccagctcagaatgaacacaccccaccaagagcctccttgttcataaccacaggtta

SEQ ID NO: 36895 - DNA, 2042 bp, Homo sapiens
tcatatacacagatggaaacaggaaagactgaggaggtcatggcatcttaaagacctgatagggtgggatgggcacctgtggtctctggggtctgtggcaggggctggttctcatgtgtggtggtgcagagaaggatggagtcccagtctgagaagggggctgtctccacatccacagatgggggcagacaggaggcgcctggggtccaccacacaggattgcgctgcaggccccggtgctgggcagccagttccccgggcatcggtccggttgtcataacacaggggggcccatccagccttagtcgtgctaaggggacctgaacccaacattacaagtcttcagtgtcatgactcacagatgctcctttcacttgaattgtgtgtgggagtgtgtgtgcattgtgtggtgtgtgtgggagtgtgagcattgtgtgttgtgtgtggtattctgtgggggttgtatgtgtgcggtatgtggtgtgtgtggtttgtgtgctgtgtgtggtatgcggtgtgtagtgcaaatgggtgtgctcggtggtgtgtggtttggtgtgtgtgtggtgtgtggtttggtgtatgtgtggtattttgggggtgtggtatgtgtgcagtatgtggtgtgatgtttggtgtgtgtggtgtgcagtgtgtagtgcaagtgtgtgtgctctgtgtgtggtttgtgtggtgtgctgtgtgtggtgtgtattctgtgtgcgtgatgtgtattgtgtgtattgtgtggtccctgtgtggtatggggagagtgatgcgtttgtggttggtgtctggtacttgtcacgtggtgcacgtgcagtgtgtggtgtgtttggtgtgtgtgttttgcttctgttgcatatgtgtggcgtgaggtgtgtgcgtgtggtttgtgtggtgtgtggtgcatgtgtggtgtgcatggagttgtgtggtgtgtgatctgttttgtgtattgtgtggtgtgtgggtggtgtgtgttgtggattgtgtggtctcgtgtgtttcgtgtggtgtggtgtgtaatctgtatgatgtgtgttgtgtggtttctgttttgtggtttgtgttgtgtgtctgtggtatgtgttgtgggtggtctgtgttgtatgatatatgtggtatgtattgtgtggtgtgtggcgtgtggtgtatggtgtgtgtggtgtcttgtgtgtgtgttgtgttttgtgtgttgtggtttctgtttggtgtgtgttgtgtgttttatgtggtatgcggtgtgtggtcagtgtggtctgtgttgtgtggtgtgtggtgtgtgtggtacgtggtctgtgtggtatatggtgtgtgatgtggattgtgtggtgtggtatatgaacgtgcttacaggccacggtggtatcgaggctgagcgtgggcctgaggggaaggagctgtcctggagtcttctctggctgatgtgacgtccgtgtcccctgctcgctgtcctccatggggtccatgccccttgcttgctgtcctccgcggggtctgtgcccctcgctcactgtctgtcctctgtggggtctgtccccccggctcgctgtcctcggtggggtctatccccactgctcactgtcctctgtggggtctgtgcccctcgctcgctgtctgtcctctgtggggtctgtgccccccggctcactgtcctctgtggggtctgtccccactgctcactgtcctctgtggtgtctgtaaccctcgctcgctgtcctctgtggggtctgtccccgctgctcactgtcctctgtggggtctgtccccccggctcactgtcctccgtggggtctgtccccccggctggctgtcctctgtggggtctgtgccccccagctcactgtcctcggtggggtctgtccccgctgctcactgtcctctgtgcggtctgtccccccggcttgctgtcctccatggggtctgtcttgccggctcgctgtcctctgtggggtctgtgaccccagcttgctgtcctctgtggggtctgtccccgctgctcactgtcctctgtggggtctgtgccccctggctcgctg

SEQ ID NO: 36896 - DNA, 1106 bp, Homo sapiens
tgttagcttaggcttgtgggtgtggcttcctccaggcccgtcaggaagaaattcagaacaaagaacggggtcagagctcagtcttcagtttctccttatctgagcccttcatgccagtagattagtttgttggggaggtcctaggtggagggtccaggtttctgaaagacaactcagggatatacattaagatgttatctttactttctttctttttttttctttttgagacatagagtctcactctgtcacccaggctggagtgcagtggcgtgattgtggctcactgcaacctctgcctccctgattctagcgattctcctgcctcagcctcccgagtagctgggattacaggcatgcgccaccacacctggctaatttttgtatttttagtagaggcggagtttcgccatgttggccaggctggtctttaactcctgacctcaaatgatgcatccatctcagcctcccagagtggtaggatgttgtcttttctttctacagggaacagtgctgggaggttgtctttactttctacagggaacaaacatctgtctccaccttccttgactgttgttttaggatactgttaccttcttgcttatcaagtcgctgatttacttctcagagttatctaagtaactggaatttcccttgaaggaactcaagattttccttgatttccatgcttggagggctcgcaggcccctgaagagagggttgcagccaggcgggagtccccaagcagatttctgcagctctgaggagcagccccctctgcagagcctgccccaccagctcgtggttctgactctgagctctggtcaccctcccgtgtcgtggcctgcaggctccttccaggcaggaagctggcccccccaacacagcgttagaatcaggcattgctgtggggtagggaaagtgaccccctcacagcccggaaatgggaaggctctgtggtttcctctctgggttccagttagattcctttcgggaaagtgaacttggatatggagttgagtgaccccgagtgcacccccgcagtaaatgatgctcaggactaaagtgactgaaggcttttggggaaacagatgcgaacaaaacag

SEQ ID NO: 36897 - DNA, 1054 bp, Homo sapiens
aaaaattagctgggcgtggtggcaggtgcttgtagtcccagctactcgggaggctgaggcaggagaatggcatgaacccgggaggcagagcttgcagtgagccgagatcatgccactgcactccagcttgggccacagagccagaccccatctccaaaaaaaaaaaaaaagcgtctgaagtcattgtcatctttgtttcccacatgtgacgtgtcttttcggccagatctgacctgaagtctgcttttgtacagaccacaagccaggaatgtcttttacatctttaaaagggtgtttacagaaaagaaaaggaagaagaagatgcttcgggcagcgtgtggctcacagagcctcggctgctcactcccgggccctcggcaggacgggatctggccggtgctctaggagcttttgaacttttatctttctttatcagtgattttcagcattgtattttccaggtgccttggtgggcttttctttgtgttctacttagcatttgttgtttcttggatctgtctgtagttttcatcatatttggaagatttttagccattactcaaatgtcattttccaccactgcctcttcctcctcctgctggactgtggcactctgaggacagctcgtgttatctcacatggcaccgacactgtgctgccgcaccaggctgctgcagattagtttctgatgctgttggctaagttcactcacctgttctctggccacacctgaacctgttatcccagatcagttttcactgatgatgtcgtcccgcgctgctcatcacttgggctccatttgctgcttttgtgtatcttctctcatgttgtgtgtatgtttttccttacatccttgagccacgttcgtatttattgctgctgcttttgaagtcctcagtcactgagtctgtcgcctctgccgtttccggttctgtttctgtttgacactttgctgcacttggagctgtgggccattgtgcacgtgcctggtggacagtcctgaccctcgctgtctgataaaaaagcactggccacatggccgctgggaaatttg

SEQ ID NO: 36898 - DNA, 1486 bp, Homo sapiens
catgtttgagcctgaagggaatgcctgcagcttgacggacagtaccgcagaggagcacgtgctggcgctggtggagcacgcagctgacgaagctcgggacaggatcaaccggttcctcccaggcggcaaggtagtgctctgtggccaccgagagagggtgccacgtggccccagactctctgtgtgcctctccttctgggttggtgctgtgtgatctagcacagccaccgggatccagaggtcagcgtggggccctgacgggaggtccggatcagacacacataaggctggtctcttcagtcggggtccaggtgcctctggcagggctgccgctggtgtttcatgcatcgtggaggccacgtggtcactgacctcatttccttgatggaggccctgctgcaggctaatcctttctcttggagtgaatgctgacttctgtgtctctgtcactgggtgttgacgtgaggcaccgcccttgttattccagtgggggtgctggtgttggatccgacagatggtccataataggccaccgactgtgttcacgtggctcctgccacagatggtctttgtggtggtggggcccactcagctgaccacgctctcctttctggcaggagacgttctagacccagtgtcttcagtggaaacagagcacaggctgtctgcagtctcaggcttcctagcagccctgataagagaagtagagcaatgcaggtgacattaatccttgcaggtttcatttcacctctatatccaacattttatctcaacatgtagtctgtagaaaacgttaatttgagctttatgggtttttttcatattaagtcttcaaaatgcacatgggatgggatgtaaagaacgctgaagtgggggcatttcagaggtgtctgctgctttttgcctgtgcctgctgggaagttgcagtgctctgtgtggcttgcgtgttgcgaggttgcggtctgcgtggctcacgtgttgggaggtcgtggtctgcgtggctcacgtgttgggaagttgcagtggtctgtatggcttgcgtgttgggaggttgcagtctgtgtggcccgtgtgttgggaggttgtggtctgcgtggcttgtgtgttgggaggttgtggttcacgtggcttgcatgttgggaagttgctgtggtctgcgtggcttatgtgttgggaggttgtggtttgtgtggcttgtgtgttgggaggttgcagtctgcgtggctcgtgtgttgggaagttgctgtggtctctggcttatgtgttgggaagttgctgtggtttgcgtggctcgtgtgttgggaggttgcagtttgcgtggcttgcgtgttgggaagttgctgtggtctgtgtggcttatgtgttgggaggttgtgggtttgtgtggctcaagtgttgggaggttgtggtctgcgtggctcacgtgtggggcggttgcttggctcgcctgttgggagtttgtggtttgcatggcttgtgtgttgga

SEQ ID NO: 36899 - DNA, 1071 bp, Homo sapiens
gctcatgacctagctgtaacatctcattgagggttggtggaaagttccgcatctcttgatcttaagcctgggtgtcaggtgtcagtcttgctggatggcagccagcattgcgggcttgttttgcgtgactgcctcactgaatccagacgggacatccttgtcttccttggccatcctgagtggcttcccagatctgtgccgtgagccaggctgcatgcatcccacgtaggagaaggtaaaggggaggtgcggcacctgccgcgctctggcggtgggtcaagcccccacaaccacctcccgctgctccgccgtggaaagttagctcttaggccaggtgaggctgtgaccatccccatcccatcccatcgtcacggcaccctggctgtgagggagaggtaaatccctgctgctctgtcctttctgattctaggagcggctgttagctttgaagcgcagcatgtcgtttatgcaggacatggatttttctcagcaggcagctcttttgggcaatgaagatacagctgttgaggaacctgtccctgaagttgtaccagtacaagtagaaactgccaagaaatccaaaaagccgagtagagaagttatcaggtaaaggttctgtggaaaccacatttgcttttggagttgagcaccatagccaggaaagcaggtgccttgtaggggagagtgagtgagtgagagaacggatgtcatgtcacatagacattcttggtgtagcttattctggcaggaggagtgtggccagacagcccctcctgcccaccggccacgtgcactctctgacccaggtgtggtacccaagcccgtccgatcacccctgcccccaactgctagtgactggtggtctctgtctctacacgccgttaagatcattggcccctccctcccctgcacagcgcctgccggcagccaaggctgtgcccttgtcccagactgtgccgcacaagcgggctgactttgggcagccagcattggcagggggcttctttgttgctgtggggcagatgcacactcctgaactgctcgcttctgtgtctgtgtagacgctggagt

SEQ ID NO: 36900 - DNA, 1009 bp, Homo sapiens
taagggctaccggttattacaagagatttttatgactcctgctgtgggggtgccctttctacccggctgagcttggtgggagccaaggctgagtcggatgtatctttatatccccagttctcggtggaacttaaaatgctgtgagacaccagacagacagatactgtgaacttggagctctctaatgaagggataccaaagtcttgtattcaatttttttttccttaaattgtcagccgaaaatgagagcacacctattcagcaactcctggaacacttcctccgccagcttcagaggtaaaccggggcgtttctgaagagctagtgtctgggggggtgtggtgtcatcttttctgaggccttattccccacgccagcctcgtcagctgtgaaacagaccctgcaccttctcttggtgactcccagtccacttcggggtgcgtaggaagagttcatgaactcattagtggctcactctgaagtcagagtagagtgagggaagtcaaggctagagctgggacattgatggccgccaggatgcgttgggggaatttttattatatctgaaatacctatcacaataaattaaaagacgctcgtaacttttttatttttaagaaacaaaattcggtcagttgtatccaatttttggattgtaagagattttgtatcatttagaaatctagatttttccgctttaagatgtctttgctttcagaaaagatccccatggattttttgcttttcctgtcacggatgcaattgctcctggatattcaatgataataaaacatcccatggattttggcaccatgaaagacaaaattgtagctaatgaatacaagtcagttacggaatttaaggtaagttactttcattgcccgaagtaatcgtggcatagttctgtgtattcatgtcttgtgaagacttcattcaccttagatcatttctagtttttgagctttcacaggtgtttctgtgttcggatgatgttttacagacacagcat

SEQ ID NO: 36901 - DNA, 1037 bp, Homo sapiens
ggcgagggtgaaccgaagtgctgggggtttctaggagggagatcgggctccggggttccaggtccctcttaatccatcttcttgaacgagtaatgtgaacaacatcccacagggcctctggtgaggacaccgtggctcgaaagggacctgaagctccctgcggaggggaagggagaacaaggaggcagtgacatgccgccactgtggtcttcccttccgtctttccctgctggttggcagccccgctgtactccttagggaggcctttccctcttagcaccttcacgtctcacctggctgcgtggcgtttgcacctgagcacgcgggtagaactcggtctgtgtctgtgcagattatgccgacaagcccctggagaagcctctaaagctagtcctgaaggtcggaggaagtgaagtgactgaactctcaggatccggccacgactccagttactatgatgacaggtcagaccatgagcgagagaggcacaaagaaaagaaaaagaagaagaagaagaagtccgagaaggagaagcatctggacgatgaggaaagaaggaagcgaaaggtaaaggagcagcggcggtggcccggacgctgcccacgaggagcccgtggggagcctggtcccaggacccaggcagagtgcgcctgcgtggctggaggaggggagggggtgttccgttggtagcaaaacgcgaaccgctgaggcccgcagactcagttccaggatcctgggtgtgctgttcctcagcagaccctgccagggtctctgtgaggagggagcctggcatgaggaggatctcggagggggtttcccttagttctgtccctcccctgagaactgcgaggggattgggcagacctgtccggatcccgcctactcctgcctttctcactcccttgactctgccgcccaggaagagaagaagcggaagcgagagagggagcactgtgacacggagggagaggctgacgactttgatcctgggaagaaggtggaggtggagccgcccccagatcggccagtccgagcgt

SEQ ID NO: 36902 - DNA, 1643 bp, Homo sapiens
gcacgaaagccccttgactgtgctgtggacagagaccccatctgtaattagaccaggctggagagaagatagaaggtctctccctgtgttcctcctggaaattggtggttatgatcacgtttatgtggcttaagcgtcaagcggatcaaagggcgtgagcctggatagcgtccgtggggcctctccatgaccctgcatgggcggcctctgtctgtccgccgccgcccctctgcgtccagggcgctggtgacctcccccagggggccacagtcacgaccgcacggctgcagctggcctgagacccgctccgactttcaagtccacacacgggccgggtttttccaacacagaaacgcaagtgctcccctccgcccagcgtttccccaggtggcctcctggaacgccagttctgctgcagtttaggggcctgcctaggaggggaccgtggggtagaggagggagataagctctgtcccgcaagggcctgagcacctcacagcatgattctgcagtgtccccaaacctacttggttggggagcctcctgtggggctgtggccgggcccaggccgccagggacgctttgagacatggaccggccacagcagcttcagagagcagacagggagggtcgtggagcagagctgcgttgtgaggacggaaggcgggggctggacggccacacggtggaagtgcttgtcctttagcccttggccagacaggggcagggtgggccgtaggaggggacccagtagtggccactgagggcctgtgcctccagctgagtcctcggcataccctgtccttgtcaggcctgggagcttcagcagcaacggctgcacaggccggtgtgggggactctgggcctttccttcctgagcttccggccccttggacccagttgtatcaggaccctcggagaggaggccatgtgtgcccagcctgacgggtctgtgtttggcagtgtctgacgtggggtttaggggcgatgatgtagatgtcaagagaagcgtgtcagccttgaaggcgtcaggcacatgggccacccagacggcttccactgttctgcctgctttgcagatgtagatgtagttaggaaagcgcttgcggtttgtgttgtgtgactgtagcccttagaagcttggcagccttagtgggctgagttctaggtccctggaggccaaagcatcccgctgctgaacgcccgccctggctgcagtcagcgcctttcgctcggagccgccacttctgcatccttcagggtcagagaatccgcctgatcctgactcacacagccctttccaacacgtgtgaatgcagctcatcagggctcagctcagcctcgtgtccggagcgtggggtgcacccgccgcccgctgaccgtgcccacctcccctgcagggaccagtccaacgtcaggcggatgcacacggctgtgaagctcaatggcgtcgtcctcaacaagtcccaggatgcgcagctggtcctgctcaacatgccaggtcctcccaaaaaccggcagggagacgagaactgtatcctttcttgcagtgtgcctgctgagcgtgcgggcaccccctggtggcttctcgctaagacctgggtttgtgggtgctgggagtgaggctggcttcccgcctctcc

SEQ ID NO: 36903 - DNA, 1055 bp, Homo sapiens
gccccgagcctgtgcccccctccttcggcagacagctaagggcatacgttggctttttagggtgatttttaaattcccctattattttccttaactttctaactctaaaaataccatcaggagatccctatcttctcagaagggagggttttgtagtgccaggtagaggccagtgagcaggaaggaaggaggtgctgagccaggcgcccccaggtccagggagggtgggcccccctgctgcgtgtgacctccaccaagtggggcgtccgtcggccggctccttgccctcccctgcatcctcccagcctgggctctgcgctttgcgtcgacgccacccctgagtgcctcctgccagcgtccagtgttctgctgacctgggtcccacacagcagtcgggaagtcaggccgctcaagatgtctctttccttccttttactgtaaacacagcggaattaatactgcatttccaaaatacttgaagacatttggttttgtttttgagaagcctcaatctggggttgaagtaaccggagacgagggacgtgaccgtgagaccaccttggggtggggcctggcctgatgagggccctcagccctggctgttgtcccaggacagggtagtggcctcttcagaagctgcatctctggacctctttctggttcccctgctgggtccttcccggctcggggagcttgtggccgccccccctgtctgtagctcggccagcccttggggtgggaccatcactgctgcacgtggacgctgcggaattgggtgttgccaggctcagcactcagcacctttctgcacgtggatggtgtggaactgggcattgccgggctcagcactcagcacctttctgcacgtggacgctgcggaactgggtattgccgtgccgcacgtggacgccgcggaattgggtggtggtgtgccgggctcagcactcagtacctttccgcacgtggacgctgtggaactgggtattgccgggctcagcactcagcacctttctggggtttcacgcatgctgggcactaccttgaggcctcatggg

SEQ ID NO: 36904 - DNA, 1058 bp, Homo sapiens
ttcagacccaggggctgaggacccggggagggcctgagctccacaccctgaacacggggagggaggtcggggggcccacggcgaggtgcgggccgcctgtgaccatgtccacgccgcgcaggaggagatggacagtaaccccatggtgtcctcgctgctcaacaagctggccaactacaccaacctgagccagggcgtggtggagcacgaggaggacgaggagagccggcggcgggaggccaaggtactgccaccctgcccgtgcccgcccagtccccgccccgtgtgtcccggcagggttagatcacgccggcaaggcagttgcttgtcagaagagctgccctgagctctggtatcatggccacgtccagccctttcttcctgggagggctcgatggtgcctgccctgcagctcctgtccaggcctcttccctctccaccgtccggggaagcgtgacacccccatgcatctgggtggccgggttccctgtcgagaaatgaacttggggtgttttgttcgttctgcgggagcggccccatcccctgctgtggagaggagtctgaatggtgccgagaggccgggacgtggccccttccagagggtgctgtggcctcggtgctcccaggggccgccctccttttcatttcctgtccaggacacttagcctggtagcattttccctgcagttttattccctgaggatttgtttccaggaatccgtcctaggaaacgaggggggtgcagtggggaaaggtttcccttgagtggtttctgtgggtgacgaggtgtggaaaccccttgagcatcctcgggagggttctgccgtcctgtacagacgggttgcctgagagccaccctgaggcctgaggccctgaggtgacgctcacaggcgagaaagaccctggacccgtgttgggggagatcttaggtcctcgctgtgggggtgcggcgggtggctcagtttcttctcaactccctctgctttttaaatcttctttcaaatatgtctgtgttgctctagaataagatacaaaaaacaaaaaaaaataatccaccg

SEQ ID NO: 36905 - DNA, 1035 bp, Homo sapiens
ctgtgtgccatgacatgcatcagaccagggctgtgtggggcggatctgtgcgtggacagctagcacccatagggctgcacagggtgtctgcccacttgcttacctggggtcgtttttataataaaatgaagaggtagaaaaaataagacgagaaaaaactgacttgtggccagttcttcaggccagggcttgacctcgccgccttcatggctgaggaggagggcagcattggtcagcctggtgttgctggttctccaccagcggctgtcggcctttgctggctattgggagggctcctccaaggtctcagggacccaccagaggctgtggttctggggcctggacccaggtcgggcctgctggccagacgctgtcagtcccgggcacgtctgcttggggcaggttctgttgagaccctggcccctggggataggtcagcctggtgcatggggttcatgaaggcaccagacaagctgtgagcagagctgctgctggaactgctttaaacctggagggacgggcaccggtgacagtgaccaaggccctgtcccagtgcaggtgggcagggcagtccacccagtgccagctgcttagggccgctcggggcaggtgagcgaggaggggcctctggggagagggcgctgaaacaggctgttcccaggtacgaggcgggccgaggccggggctgttcccagagctgggaagatgttgggatggacggagcaggagggcagcgcacacagctgtgggggagctggccatgggtgcggggctcagctcgtcgagggctcctggtgggtggtcaccatgcagagccacatccctgcaggctcatgtttcactgcctcttcccgggtgtgcttttctgtcccaggacacatccgggatccaacgtgacagacaccaagttcccacgctgcctcgggctcctcttggctgtgacggtttctcggactttctttttttgacgactgtggcagttttggggagtcctggtcctttttagagaatgcccctcagttgggaggtgtctgg

SEQ ID NO: 36906 - DNA, 1149 bp, Homo sapiens
atagcccctgcagtggggtttgctgatgtgctcatttgtgtcattgcaggctttatcctgtggataaacgcagagtgaacgagtttggggagtcctacgaggagaaggccacgcgggcgccccacacggactgaaggccgcccgggctgccgccagccaagtgcaacttgaattgtcaatgagtatttttggaagcatttggaggaattcctagacattgcgttttctgtgttgccaaaatcccttcggacatttctcagacatctcccaagttcccatcacgtcagatttggagctggtagcgcttacgatgcccccacgtgtgaacatctgtcttggtcacagagctgggtgctgccggtcaccttgagctgtggtggctcccggcacacgagtgtccggggttcggccatgtcctcacgcgggcaggggtgggagccctcacaggcaagggggctgttggatttccatttcaggtggttttctaagtgctccttatgtgaatttcaaacacgtatggaattcattccgcatggactctgggatcaaaggctctttcctcttttgtttgagagttggttgttttaaagcttaatgtatgtttctattttaaaataaatttttctggctgtggcatttttcttgacctggtataatgaaagtatttcggatatttgagtttaacccttttccagaaagtaatacatgatatggatttatttatgcattaaaagagcaaatttaaagagccctttgcaagcctttgagtcatgagtgttcttagatacgtagcatcttagttgtttaagactaaactattgtacagagccatgacccatcaggtcaagcttatcttgccctaggttgaggcagagagagagaaatggaatagaaagatgggtggagaactgctggactcggtgtgtagtgaagtttaatgtttgttgaagttagtttttgtggggtttgttgttctcagctcacagcagcctccacctcccatgttcacacaatcttcttgcctcagcctcctgagtagctgcgactacaagtgtgcaccaccacatccagcttttttgtattaatatttttagtagagatgtggttttgccatgttgtccaggctggtctcgaactcctgatctcaag

SEQ ID NO: 36907 - DNA, 1045 bp, Homo sapiens
gaaaacagcattgtgtggtgcatgactgttgtctgttttcttcatggaaacaaggaaacctaagcattaaaacaacaccatccacgtctggttccttagagcaaatggaagcaccaggctctggtgcacggcgcgccccctcctgcagatgcagtgtggggaccctgcagggccctgtgctcggggccacatgtcctgggaggcccgcctgccccaggtggcaccttcagctgcatgggctgctgtgtccatcccccagccccaccagaccagccctgatcgcagctttgtggtctctttgggaagtggtcccgtgagcattaagggcgagggcctgtctggtgcagagcaggtgggtcccgcactgccgtcctccctggtaggagtcccacacctgacccctggggcaggaccttgtgggtcaggaggccgtgtcctcatagccccagggtgctccagtgctctcactgacttgaccccgtgggcagcagttacactgattaataaatagaagagctttgctctccaaagttgtcgtagactcttgataaacttaccagccagaaagctgcttcacaccatgatggactctgaagttgtctggatagcagaccttgttttctgcccactatgcatagacgtggcagctcggccctccacacctcgtgagtgccgtctgtgcgtagatgtggcagcccggccctccgcacctcgtgagtgctgtctgtctttctgcaggggtctatgcctttggtttcctcttcatgctgccccagctctttgtgaactacaaggtaaggcggtgtgtgctgcccgcggcccggcccccgtctcctgtgctgcccacagctgacctgggcctgtctctcctgtttcagttgaagtcagtggcacatctgccctggaaggccttcacctacaaggtgagtgtgacagccggtgaggaatcccttctcactgagcagagcgtgagcaagggcgtcttccagccaacagcattactggggccatctctgcccagagtgcatctgcacctgtccctttc

SEQ ID NO: 36908 - DNA, 1363 bp, Homo sapiens
gagtacgggtcagcccgccttgagcagggatcccaagagtgaacacataaaacccaaatttcttactgggaagggcgggggctcgcagagactcatttcccagtccttacaggcacagcctgcctgtgtcaccgtatagtagggatattttcatcgtttgtaagtcacattcgccaggcagctgacgcaggccatggtgtctgctgtggttgctgggaacgcacttgccgtcaccaaggccataatggccgcggccgcacagtggcctggaggaatggccccagcagcacagggcgtcacctttccccattgctgttgggggagctggaattctcagttccagttaatagaacatttctgcacagatgattttagtttggtttaatcttcaccagcttatatccaacttgcatggcgttgtaaagctgaaatcagaatggatacagctggcgatgtaactacattacttagtaggcagttttttccggtttctttccattatgtttattgatctgttgtgggttggttggttttgaccaaccagaattgatctattattgttaactagcgcctgtagttacacccgggctctggcgtgtgcggtgcctcctggggctgtggcgagtgtgcgatgccctgcctgtgcccctcacgccgccccctgcagagcagccctgccaccctgagcgctgtagctcgttctgtctgtccctgtcggggtgagctccatgcagtgtgtttacagaggcttggcgtttgggcctctaactggaagccatctttgttccctgcaggccatgaagtacttgtcatacctgctgtaccctctctgtgtcgggggtgctgtctattcactcctgaatatcaaatataagaggtaggaggccgcacacgcttcccctgctgcgtctttcccctgagaaagccatttggatgactgagccagagcggggtgcgactggagggcaaactcggggccggggcacttgggccagcgcctgggaggggtcctgcccctgcagctgcacacggtgggctctgggcctcagtgtccccctggtaaggtgtagctgagaggactgactccagccaccaggcttcatgggaggcttgggcctgagctgagaggggtcctggagcccctggcctctgctgcccgtgtggggtgctggccctgagctgagagggttcccggagcccccggcctctgctgcctgggtggggtgttggccctgagccgagaggggtcctggagcctccagcctctgctgcccgggtggggtgctggccctgagccaagagggatcccggagcccccagcctctgttgcccaggtgggctgctggccctgagccaagaggga

SEQ ID NO: 36909 - DNA, 1023 bp, Homo sapiens
agaggaggagctggatgaaatgacgctggagctccacaggcagggtccctccataggtacgagtcacagtgccgtgcccggctctggcacccgtcctgagctccgtgggtgatgccttccaagcatttagccatgaggtggcggctctcagagcggtcccaaaactggctccagggctgcccgagtggcaggcagaagtaggtgggggcttatttgggtgcaggcagagtggcgtaaagaactgccctcacatgctgtttttgttgtccgctgggcggtggctgtgcagcccacctgaccaggtacgcctgccgtgtgtgggttagaggcccaggtccagcctccagcgctctggcctgagctgtgggagggacaggaagaggacagtgggctgcgcggggccatgggcagcaggtcctacccgttactgtctgggtcgttcattcgtggctcctggccttcgaatattaaaggaactatttcctgatttctcccctcagctgtggaaagtgaagaaggcattgaagatgactattttttggagaggcctgatgcccgaatttcaggtaggatttagttgtaatggctgaaccccaagcctctctgaagagtgtgattttgccccctgtgcaaagagtaagatggccatctgcagatgagtcactgcgggcctctgtcaggggagcctccgtggtggaggcagcactggtttctgatcgcagccactctcttcgcctgaggattccccggtcatatacctagttctgaccgtcttcagtgcagacggcagcacttctgggcctgagccggcctctgggaggaaggatgctggctggccagcacgtgtgcttcgttttggcaccttgtccagaggcgctcccgaggctggtgctgactggggtccgtacagtcctggcagtcctgaagtgagtgagcccctgccctgagctggtggctgccccagtgcctgggcgcccataaggcccctaggcagatgagggctggggcagagctggagttgaa

SEQ ID NO: 36910 - DNA, 1010 bp, Homo sapiens
ggctggagatctgagcacagcggccaggtaggcactgacggaaatcactcggtgccctgtggtccagccttggttgttccggagctcagaaaagccggccaaaagggagcctcgtggggcaagaccagctcaggagcaaacccttgaggggggcgatggccttcagggtgagagggcccaggcttaagcctagctcctcactgagctctgtgccacaccggcaggagccggagtctgaggtctctgcagttggtggcccacctgtgggtgggggcctctgcggccgtcatgcctgtagaggaggagctggatgcaatgtctctgtagaggaggagctgtatgaaatgtgtctgtagaggaggagctggatggaatgtccctgtagaggaggagctggatgaaatgtgtctgtagaggaggagctggatggaatgtgtctgtagaggaggagctggatgaaatgtgtctgtagaggaggagctggatgcaatgtgtctgtagagcaggagctggatgaaatgtgtctgtagaggaggatctggatggagtgtccctgtagaggaggagctggatgaaatgtgtctgtagaggaggagctggatggaatgtgtctatagaggaggagctggatgaaatgtgtctgtagacaaggagctggaagaaaactgtctgtagaggaggagctggatgaagtgtgtctgtagaggaggagctggatgaaatctgtctgtagaggaggagctggatgaaatgtgtccgtagaggaggagctggatgaaatgtgtctgcagaggaggagctggatgaaatgtgtctgtagaggaggagctggatggaatgtgtctgcagaggaggagctggatgaaatgtgtctgtagaggaggagctggatggaatgtgtctgtagaggaggagctggaagaaatgtccctgtagaggaggagctggatgaaatgtgtccgtagaggaggagctggatgaaatgtgtccgtagaggagtagctggatga

SEQ ID NO: 36911 - DNA, 1047 bp, Homo sapiens
gccctcagggcttgcaggaggaggaagacgtgttgaataagctggagtggttcttaaggtacagctggggaggaaacaaatccagacttgaaaagccacgcacttatcacagaactggcataagacacgcccggaagcaaagctgtgctggccccgtcatccgacctctgcccacgttccatgctcatttgcaagtgtggctcagacacgtgtttgtggagctggtgtggggccagctgttcagttcagcagccttccaaacactttcctagctgctgaatgcttcattgttctttttaaacggggtgacgtggactggggagtacctgaagcttcttgggcgtggtgggttgggatgggggactgggggtatgtgtgtgacttggggaacacaggtggggtctgccctgcaccccctcccagcccgaccatcctgtccccagtgctctggcgctgcttcagcaccgtggtcatctttctgttcctgctggacgagcagacgagcctgctggtgctggtcccggcgggtgttggagccgccattgaggtgagttccgggcagtgacctgaactgtctgaggtccatgtgcctccacgcactcaggaaaggctttcagccccgggacctgagaccttctgtggaagcctgtgtgcttgttcccgatggcctcagtgttctggaagctgtaggatggcaggcagtgggtgtaaaggctttgaacaagtggagagcaaggaaatgcgtgttcgggtggtatcagctcatgaggctctgtccaccaagcagtggtgagtcctgaggccctgtccaccaagcagatagtcctgaggctctgtccaccaagcagtggtgagtcctgaggccctgtccaccaagcagagagtcctgaggccctgtccaccaagcagagagtcctgaggctctgtccaccaagcagagagtcctgaggctctgtccaccaagcagagagtcctgaggccctgtccaccaagcagagagtcctgaggccctgtccaccaagcagagagtcctgaggctctgtccac

SEQ ID NO: 36912 - DNA, 1034 bp, Homo sapiens
acagaaggagggaccgggggatgcttgctgggcccagtcatggctgacctggggccacacagggatgggaagggggatggcagggttggcgagggctgccaggcagctgggtgcaagggtatgagggcagggccctcagtgtggctttcttcatcaggtcataaaccgctccaccaccgagctgcccctcaccgtgtcctacgacaaggtctcactggggcggctgcgcttctggatccacatgcaggacgccgtgtactccctgcagcagttcggtatgtgccgcacacggccggcgcctgggtgaggccgccctggagcccctcgggcatccaagtgcgaatcctgacacaggccggggcctcctcgcctcctgctgcagatccttgcacagacgttgaatcagaggctagcagcgcctgcctcacttctctccttggagatgacctggttgattgtctggaaattggctttattaagaacataatatgtgaaatgccatgagtttggtcaaatgaaccttaactgttgatgagatttatttttattgtttgtttgtttgtttgtttgtttgttttgagacagagtctcgctctgttgcccaggctggagtgcagtggcacaatctctggttactgcagcctccgccccccggattcaagcgattctcgttcctcagtccccccagtagctaggattacaggcgcgtgcccccacgcccagctaatttttgtatttttagtagagatggagtttcaccatgtttaccaggctggtcttgaactcctgacttcaagtgatctgcctgcctgagattcccaaagtgctgggtttacaggcatgagccactgcgcccggcctaaatttttatattgaaaactgtatttgtaatgttaggtaagattgacattgcctgttttatattgtatgtttttttttccttgacagggttttcagagaaagatgctgatgaggtgaaaggaatttttgtagataccaacttatacttcctggcgctgaccttctttgtcgca

SEQ ID NO: 36913 - DNA, 1089 bp, Homo sapiens
gagataatttacaaaacaaggccgggcgcagtggctcatgcctgtaatcccagcactttgggaggctgaggcaggtggatcacctgcagtcaggagttcgagactagcctggccaacatggtgaaaccccgtctctactaaaaatacaaaaattagctggatgtggtggcacgcgcctgtaatcccagctactcaggaggctgagggaggagaatcgtttgaacccgtgaggtgagatgatgccactgcattccagcctgggcgacagagggagactctgcctcagaaaaatttacaaaacaagaaagatggcagctttccaggaagaggctgtgaaattgttccagacagagagaaagagaggtctctcggagttgatggggttttgaaagccctaccaacacctgctcctgcctctccccagtttgcatctgtctccttaggaacatccctcacctgcccctctccgtgtcccctcatctggggcccccatccctcctctccagtgtcctgaaaagtgggtggggtgatgggcatgtagcatgtagcgcaggaagcctcccttgcaggtagcaaatgtgaggaggtgtggaaaaccgtttgtaatgtaaattatcgctaaactgcatctttaggtaggaaatgggtgaggcgatagtgcttcctaggatgtatcagatctgagccgagctaagatttccctgtcagtccatgtcctgtttaacttcatgtaagagccgtgtgtaatcctcagtatgtctcctttaggcagccccacatgcttggttttagaagctgactccctctcagtctccttacagccacagggctgtgtgagccctggacttgcacagtcttctgccaaggtcagggggctctcaccctctcaacttctgagaagtgggcccacttagtttgaggacctcaaaaaaggaattggtgaagtccgtgaccacatgttgcaaagcagcaccccctggcttccgtggagataaggatggggggctgtttggcgagagtctggcggaattggcagctgtggggccgctgtgccctctctgctgggctctcccccggttgtgcctgtgc

SEQ ID NO: 36914 - DNA, 1066 bp, Homo sapiens
gcgggctgggcgccgggcgggcggggctcgcggctgagaggcgggcgggccgggggcgccgggcgcggggccgccatgtggagcggccgcagctccttcaccagcttggtggtgggcgtgttcgtggtctacgtggtgcacacctgctgggtcatgtacggcatcgtctacacccgcccgtgctccggcgacgccaactgcatccagccctacctggcgcggcggcccaagctgcaggtgagcgtccgcggggccgggggccgggcgggttggggtgggggcctctcctccaggccccagacgtcgccttcccgtcccagttcggagctgtggccgcgcgagtcgagatggaacctttcctggttccccagcggccaggtcttccgccctccagctggccgtgggatttgagtgcgtcctgccagggcctggccgagctgactctcgacgccccctcctttccagctgagcgtgtacaccacgacgaggtcccacctgggtgctgagaacaacatcgacctggtcttgaatgtggaagactttgatgtggagtccaaatttgaaaggtatgggcgtaggacaaaatgccagtgaaagggaaaacattactcatgttcagattgtttaaaagttagctttctgtacataacatgtttattttagagaactagtcttaccgaatgtcttgaagtggtagaatatcctaactggaggcctatgcgtggcctgtaaacattcagcctggaaggtgacaggtgatgaatgtcgtttaagaagtagttctcagcagagtgtgatggcagtgggatgtcctggacggggaggctccgaaggagcaggggccacgcttggtgaaccagtggagagcagacaactctgcagtttcactaccggggaccaacttgtcttttcctggtggaagtagttcgcttaagttacttgtgagggaaaagagatgaggatagaggaagcaattttgtagaaaatcataaataagtgacatgtgacgttagaatagatcaatgtccaaatatgtagagtatcttaaaaattacatctgacatgg

SEQ ID NO: 36915 - DNA, 1030 bp, Homo sapiens
acctgcacacagcaggtgggacagccccgtagttgccagcagaggggttccggggtacaggaaagagatgagagacaggccctatcccggaggagctcaacatagtgtgagagaacctgcccggcatcttgtagaaattccaccgtgtctgagctccaggccgcgtggtgtggctgcacgtaagtgttccaagtccagttaactgcgcttgtgaaggctcccgttgaaggttcctggattcatggggcgggcttttaatagcacacagactacatggctgttcagaggggaaagtgaggaagccctcccagaaagtcagcctcctgcccacctcccgctctcccccgccattagttgaaactgagctgttttgcatgaggacgttggctccccttgagggggtgtctcctcttaacacccagagggctgacctcgatcttaggagataaaatgttctactgatcttagactaaatcttcgaacttcatacagaaacacacttcgtagacttttagataaaactacaaactatacgaaacaggacttcattttgccaagttgagagaaacatgacaatttcattgctctatgtcattttgtatttaatatgacagcacaattcctatgaagttctgatttcagcagaaacataacgtctgtgttatcatctgtttcttcaggctgcggcatagtcccctgccctctggcgtgtgctaacctctggtcgtaaggggtgtacacgccccagtctcgttcagatgactctgtggcagatgatgccacagcactgctaaagggaaattatgccggagcaaaggcaacttacatgggcagactgtggcctggggaggcatagttctttctaagaaaggtggtatctagcaagaagttgaacaataacagagagcacattacagcaatacctccatgtcagataggcaagcccgacatgtccagggatgcacgcgtggctctttaaagcatgctcagggctctctgtgcagccaaggcagccgcccctgatcccaga

SEQ ID NO: 36916 - DNA, 2892 bp, Homo sapiens
ggtgacttcgtgcgctgcaaagaaagtaagcgcaagttcttctctccaccctgaaagcatccgtttcacagacgattctaaccctccctggagggcgtgaggtggacacccaccagggccgtgggaaaagagcctccaaatcctagacatttgctcgtccccattccataaccacaggtgcctttgtctttccagctgacttccacaggtttgcagaaatgtaccctgccttcgcagaggaatacctgtacccggatcagacacatttcgaaagctgtgcagagacctcacctgcgccaatcccaaacggcttctgtgccgatttcagcccggaaaactcagacgctgggcggaagcctgttcgcaagaagctggattaggacccagggttgcggagagacgcggcccctcccgcgtggacatcaccgccatgagcctctttgcgagtgacctctgggctccgctcctcactcctgctgtacaggcactgtcttcagcccgagttccaggggcctcgggggctgtttgtatcttgttcctttgtgaagtgtgttgcagaaccgacgcttactgtgcgagaatcggagggcgcgcacgcggatcccccgcctggcctggaccccgtggggtcaggttccctgccgggcggggggcaccggtgccgccccgtgttctcccacggggccctggtttcgagtctctgtcacagcctcttccggcggcagcgtgcaccgggcgggcctccgtgcacactcagcacacgcctgccacacagcgtgcgcttgcgtgtcactctggcacgaaacctgtctgcctctgtggatccacagcctggcagagccgagccgtcacctgatttttcagtgtttctacctgtgtgctggagctcatgagtattttataaactccatttaggtacttcaggaaacatgcagcattttttaaaaaatgaaaattgtttttctacttcatttttccttttagagtcaaaggatatttatttataggcctttttttttttaatatagaatctgaggctgtttgggctttgacttaaatttccatcaggcctctctccagcaggtaatccctctccttccgctgggtcccctggggaggtgtgaactcaagggcctagccccaaaacactttttctgcttttcttaatccttttccagtcccctctttttttataaacgttggcagtttgatgtttctgtttcggcataacgtaatccatttcactgtagcctaaactccagtccgaggttggatattgttcaaatgagcagggcccgagctggaagcgcaaggcagccgccgccgtgccgctcctcccttgccctcaggccaggtccctgctggaagcggctgcatcttcctgtcagccctggtttccatggtgactggcgtcacgctgccacccgagtatggctgaccttcctgcagagagaggagccgcagtcttttgcttgtggaaggagacgctgggctgtgcggtgcggagggtgatgaggatgtctggtgacagccgtgcggacaccactcctctctgcagcactgcctcccagcgccagggtcgcgggcacatcccactgagagcgggggtcctgccccatcttagagtcaaaggcagaggggcttccaggccctggatggggtattttggtgtcacctgaagtccctctgacatcaccttgtttcatcattttttatgacagaattagaaacccatccttcaagcacaataatcatcacagacttgagtttgcttcctaaagcaaaggctccgggtttgtttggaaaatttttttgatttctgaaatgaattgatttttatatttggggcatctctatagaaagtgaccaccaaggccagtaagtacgggaaaaaatgtttactaacttcctcagagattcgtgatacgcgtttctccactgacagacatttaaaaacaaccttcagctccgtttcaatcaatcacctcgacttgttttttagcatggacactgccagcaggacagacagggatggagtaaaccgaagtcaatttcagggctcttggcgtgttggacacagaagaaatcctagtgcagcctttggtagctaacagtcactgattttataattggagaatgcgtaaagattcatttttcaaggagaagagcctgcaaatggccaatgaaggaggtaaataaactaagatattccgagggaagggacccaggccacctcccttccgcaggtctgcagatgaagggttttttgaatgaaatgccactgtgcattttcagaaaaaaaaatctctgataaacagactttgaatggatgtttgttcctcctgattctcttttctcttcgtggcgacttagagttggcggatattcggaactgtgaatgtacatagcgttgagttaaaccccttgtgtgtgagacaggacgcagcgggcccctggtggcctgggggccagacccgtgggcaggtggggcatgggccctggcctgcggggacctgctggggtgtgagggcagagggagggttgccatgaaggaacttgggattttcaatggaataagtaaaacataaagtctatacttgggaatgatgttgttttgtgtggttctttattagaaagacaacaacaggcattgtgagaggagagccaatccagatgagattttcttggtgtggttctagcatgtttggaaaacacaagaattgaaattctgtagaaaaagctgtcttggtggcaaagggacgctccggagtgttctggtattttgcggacagtagcagacatcttacagagttgaaacatggatggctggctgcctgcctggtgggttgacttacgtaatttctcaattttaagcacatgcaccttaagcgt

SEQ ID NO: 36917 - DNA, 2103 bp, Homo sapiens
ctgcctcctccaggcctgggcagcctgcctcctagggcccctgatctgagccaggccctgtggccctgcggcccctgctggccctgctttcactgtgccctgttgtttttttttttttaatttttgtgagatggagtctcgctctgttgtccaggctggagtgcagtggtgcaatcttggctcactgcaaccaacctctgcctcccaggttcaagtgattctcgtgcctcagcctcccaagtagctgggattacaggctcgtgccatgaaacccagctaatttttgtaattttagaagaaacagggtttcaccatgttggccaggctggtctcaaactcctggcctcaagtgatccgcccacctcagcatcccaaagtgctgggattacaggcatgagccaccgccccccgttctgctggccccaccagcccctgctgtagagccaccaagtataacctggaacgaatgacagcagcggtgggggtggcagttgccttgtttctcaacatgaacaatgggctgtggagcccgaccttcctcctgcacaggccccacctgcaggtgggcagggtaactggctgtggtagggttgaggacgcccactggggaggacagtgtgcaccgggtccctgcttggggtggggtatgtgccactaggaggtctttctcaggtgaaccaggcgatgggtgaggcctaggctgccctacagtgaccacctgggggcaggatgggtgatcacttctcacaggcttccaggccgctgatatggctgcgtccccacggcgacaccagggtcccgcctcacctccaccctcagcagctccgccctgacggcatatgccctgccttcctcccaccttcttgcaggctgcttccccatgtccctttctgcagcctatacctttcatggtgtcatcatttcctgaagtcatggccattgtgctttgctgctgctctgggagcctggcacattttggggggactgcatgtagcaggaagggcttccacggagcagtctcgtgtgagagagcgtggcaagtgcaccagcgtgctgctcttgggacacagagatccaggaagctgccccccaggctgactgtggacacagaactcctagcacctaggaccccagaggcacacgccggtgctcaggactccggatgcgcagcgcaccgatgtgcttcatacgccttggggccccttgtttttgttctttttcgttatcattactgtgtaaaaccttaagatgtggccctggtaaaacttccagcggctcagagagtggacagtgagaacctgaagtctgttgcctgtggtagcctcagtcctacctctgcgtttcccgtgcagcatctacacgaggctccgaggatgaaagtctgcatctgcagttctcatgtccaaatggacacagatgtcaggttgtcccctctgaagcagccttgcaaccactagggggcaggaggcactgctctctgggggctgagtgggatccaggtcggccgaggagctggaggccgtggccctgaagctttgacccggcccgttctgaggctccagcagcaccaacgtggatttcgtctgcagatgtttgattcagcaaatctaaaagcaggagagaaacgtagaccacagaagacagggtggccgcgtgcggcagcgctgtgggatgaggcccaggggagggagagtggagggtgaggatggggtctccagagcctggagcagacccggtccatggggtagaggcagagccccgggaagagggtgtgaacgcggggacagcttgccaggccggaaggctggaggcgtcagcgtttcttccctgagcaccgcaaggaggagccggtggaggtgaaggcgcagcccctccctgaagagaggcgacgcccctcccaggcagcccacttctcggagggtggagcaaacgctcacaagatcacagcgcgctgcagcaggagaaggggactcggagtcagggcgacggccccgtcggagccccaggaaccgtggaccccaggcagagagagggcggcgggggatggtgcagccccaggcagaggactcggggaagaaccaggtagaagagctggcccatctg

SEQ ID NO: 36918 - DNA, 1044 bp, Homo sapiens
gagggcacagcccgcctcactctgcttcatcctgtgcttcacagacagttgcttcacgtttgtggcaaccctgtgttgagcaagcctattagcaccgttttccagcactgtgagctcactttggcgtctctgggtcacatgttggtaattctcgcaccatgagctcacttcgtgtctccacgtcacatgttggtaattctcacgctgtttcaaactttttcacgattctcacgtgatggcagtctgtgtcagtgacctttggtgtggctgccgtcatcgtttcagagcacccacgagaggtgaagctgatcgatgaatgtgtgactgccccaccaactggcccttcccctgtctcactgcctctcctcagccctcctctcccctgagccatcggcggttattctggtggggcggtgggaactggctgccacgaggctgggctgacgggggtgctgccctccttgtagggccttgggtgtctccgtgactgactacacgttcgaggactgccagctggccctggcggaaggacagctccgtctccccgctgacacttgccttttagaatttgccaggctcgtgcggggcctcgggtgagtacctggttcttcttccttgagcattagctagaacccgtgatgccgaggtctggcgggggctgcctggggttgcagggaggggaactgaggagataattattaattattctggcttttttcaaatatcaacttaagcccacatagtgtctttcaatcccttaatgctggcatcagctgtctgtggacggcgccccaggagggccaccctgtgtcctgccacatctgccctgggaagggaacgggtctcaggggcacaggcacctggcttgacacttggacagaacacatctcgcaccttccaattaggagaatgccttttcttgaaaactagcttgctgctacttctgtcaattttaatattttgatgagtcttagaagtaaatctggtgttagcatgccaccattttattgaaaaagaaagctttccctctttttttgtctaggc

SEQ ID NO: 36919 - DNA, 1105 bp, Homo sapiens
tgtcgtcagctcacacgccctccccatctccctccctcagcaccttccatccctcaggtcccattccccccacacttgtccttgcaaccaggtcctcccacctggatttacccccacgtgaatgcctccctagtgcttcctcctgcaaagctctgtccagtggagctagagcctcccctccaccgggcggctgccagacctgagctgcaggagccacttggaagccacatcagcctcggtccaccggccccacccccaggctcctgctgcagcaggtcggggcatggctgggaactcgcctctccagagagcccagaggggaacacagccacggccgggcccatcagagtgtgcctggctctgacctccgagccactttgttcacactccgctgacaccctgaagattcagctgggcggcccgttccctcacgttcccatcctctccctcccaaagcatgtgtccgagggtagaaatgggcccggcagtctctgtcccgcaaagctccactcaacccccaccacaggcagctctgaacaatacaaaaagctgagtaggcgccgagccaggggaatgcattcccacctccaagcccagcacctgtgctccggactgctgccaatactggctacttttggggacttaggaggaagagaacagattttacagcgctcaaggagagatcgcctgtgggcctcactgattattttagaaccctccatttcaaacagactccgaggaacttgtactttttttagggtacgagagtgctgccatttccattgtagtaattcagaattctcttaaaaccccactccaaattaccgggaaccatgtttcatcacatcagggccgttggagggtctgccaccgtcagcaaaaccccccaccaaggaacatgggagggagaagcagcctcggactcctgggcctgggcggggcctgtgcagccccactcggagtggagatgggagggagaagcagcctcggactcctgggcctgggcggggccgtgcagccccactcggagtggagatgggagggagaagcagcctcggactcctgggcctgggcggggccgtgcagccccactcggggagtggag

SEQ ID NO: 36920 - DNA, 1027 bp, Homo sapiens
gtggttgatgcagacacgagcttacaccaggatgcccagataagccttgtacaatgtggcatatcacctgtcttgctttcccatctttccgtttctcagggctccttcgaggagcctctggttgctttacctcaatgactttatgtctctcttatgagtctgaaccacttggataagatttgggtttttgttttttgtttttctgagacagcattttgtcttgctctgttgcccaggctggagtgtagcgatgggctcactgcagcctcgacctcctgggcccaagtgatctccctgcctcagcctcccacgtaattggaccacaggcacacgccatgcctagctaatttttgtagagatgggtctcactttgttgcctaggctggtctcaaactcctgggctcaagcagtcctcccgccttggcctcctaaagtgcggggatcacaggcgtgaactaccacacccagctggaaaggattttttaaacctaccattcattattatgggtattgtagcttaaggacatatgaagctggcccacatgcaaataattatttgtttggctcttagttttactttacatatttaataccgctgagtttgtcatagcaccatgctctgtttaatacatagtcaaagatcccccttctcagcctgacccaggtctccagagtcaagaccttgggctaaatagtcacctctgtgtagcctgcacaattttttctaagtcgatgaggagtagttctttttttgtttaaaaggggaattaatatgcacttcttgcatctggaaataaaagatgagtcacatgcaacttaaatatttaataaaacaatttgctgccttccagtaaatattggagagcactacgaaatatactgataagcccggctttcagcccggctgttcacttccatagaggataagctgctctcattacagaggactgggctgaagggccttggcccgggcctgagggcggcagttcccccacccagcaggattatgtggctggatgggcagtgg

SEQ ID NO: 36921 - DNA, 1116 bp, Homo sapiens
aggatgcagaggcgggcctaccaaatgtggctgttggaagtggacgcagctctcactgggccacagtggcctccctgcacgggctgtgaacagacatggatgtggctgtccctggcctccctgcacgggctgtgagcagacatggatgtggctctccccggcctccctgcacgggctgtgagcaaacatggatgtggctgtccctgggccgcagcggcctccctgcacaggctgtgagcagatgtggacacggctctccctgggccatggtggactgtttcttcctgtggggtgggctgtgggggatggtcagggtgaataaggggtgatggccttctgggggcctcaggggtccctgttgagccatcttccagcctcattgttgcaactagtgacgttagacccatgcccagcacaagctatgtgtgaatatggaggtttctgtgcagtttagaagcccgtacctcctcccctctgccttgttcctgcattcagaagccctgggctctgactgcctcatcttggtttctcccagcctggcccttgtgcagcctgccttgggtgcacagtgctggcggggtctgggtgctgctgaccctcaggggcccctgggagactagggaggccagagacccctgcagactttcccaccggggtttccatgaagtcactgacctttcaggctcatggggggtttctgtgctcttggggactttcctgagaggtccccagggtgttgaggtttcctttgattcttactgagtttcagtgatgtccccttgacacatggtcgggatggtcggctgagctgtagcagcagagccattatcacccacagcaggtctcggcactccacgcgagctcctgggctcggtcccaggcaatgaggactatttcctccacactgcgtgtctcaggggctgggactcggctgccgggcgttggagctggggcttgagcctgggtctgtgccagccctgccgtcctccgcctcccctgacacagccacccgtccacctgggcacacagaagtgctgggtgaactgcatgagcttgctcccaggtgctgctgagcccacagcaggaagggggcaacccagccctggacacagggga

SEQ ID NO: 36922 - DNA, 1050 bp, Homo sapiens
tttgtgccctcctagcaaccgccttggctcagatccatggggacccctgtcctggaagtcttctgggaggatcatctgtcccagggcaatgtgaatccagtaaggcttcaggctcttgtttctctgtgcagtagttttacccagtgtgatgcgcccacttaacccagtggccgagtgagccgtggcttctcatgaggctgaatcatgttctctgtgtgcctgacctgtggcttctcacacaccgtggctgtctgctgcgtgtcaattccctgaggtgtggaataacagcctaatctgtagcctcatatgaaagagaatacacacatttaaaaggctaaatttgtacctattttaaaaagagataaagagtacacaaattcagttaacctaggctgatttttactttattttccaaatttattggccatctaatttcctccagaaacagctcactgtaataacacaacgcctggttgtgggaaccccgggcttcctgtggagatgagatggggaagttcgcacgcaggtctcagcttccgccctcagctctgagcgcccccccccccatattgcgatatgcgttttaggtgttttaatgtttttcccatttcaaaatgataggatgctgataaataagttgctaacatgaaggtccggaggtcttctggcctgggacttgtgctgtctgtgttccggagtctcatgttgtcttagcactgcctgccgcgtggcccgtgaccaccacacagggccccgcggcctccttcgtaggtgagagcgcagccagcgaggacacaggcggaggccaggaaggcgcggcgtcttttcttccctcaagcagatgtcccagcggcggcgaccacaggaagcccgtggcctggactgcgccctggagggctctcccgtgggaccgcccctgtgcctcacacagactccgagactgcggacgtgtgcccgcgtgacgcagcgccctcttttgcagggttgtggacttcctgctgaaggccatcatgcgcaccatgtggttcgccggcggcttccaccgggtgg

SEQ ID NO: 36923 - DNA, 1049 bp, Homo sapiens
agctgggccaggtcctccaggggctgccccttggctgaccggatggttcagatggatggtgccctttcctgaatgctctgtgtgggaacacctgttcccaagtttggggatgccatccccatgatgactctaggtactccccgtatgttggcctggaggttggagcttgaacttgagcatcaaaccactttatctggtctcccagaagccagcagctcctgccacctgcgtctcagcctggggctgcccctccacacctgccagcccaacacagccctcccaccagccacccaggggccgtccctgacccagctaagccagtccacgtggatcaccagacttgcctccttgaagccccgccagacgtggccccagggccccttcctttgccctaccccaccggcctggcaccgtagccagcactcaggctgtgtacatgtgtataggtcctctccagggccggctccactctgcctcttgcctctgctcacagcagaacatttggaacctgcagagccggggcctgcgcctgcccctcacgcttagacgtgtgggcttcccccacccacctccacatgccagctggcttgaggagatgcaggcctcagcggccttcctccttttccccctgcatgttctgggagatttcctcctcctcatttcccagtctttcctgtgagttgcttgtctccacagtgacagtcttggtttctgagagtgttttcttgttctttgatgctcctcagcgccctgttcttccagactctcttggcgagcgtggtggatgttttgcacccctcttctgatgcccaccctttctgtctccttggggtcagtcctctgcttctctgccatgcagctgctctgctcacacgtctcaggattcttgggtgtcgtccgtgtgagggcggtaggacggagtggatttcctgggggtgctgatggagatccccgctcctgtgtatgcagatagatctgtctcctgattcacattcccctgggaatgggctgcccaggcacctgagcaccctgggcttgtgctggctccc

SEQ ID NO: 36924 - DNA, 1031 bp, Homo sapiens
cctgtatttgcccgtagtgtggagcagggtgtacagggcaggccaggggctcctgcagctaagtgggtgggacttaggccaggatgttgtgtgtgggcggcagtgggaggtgggggagggtcccagtatctgtagatagtgcagggcagggtatacagggcaggccagggggttgggccaagatgttctggggggcccctgtatctgcgggtagtgtggggcagggtgtacagggcaggctgggggtgggacttgggccaggatgttctgggctggcgggggaggtgggggaccttgtatttgcgggtagtgtggcgcagggtgtacagggcaggctgtgggctcctgcagcttttgagggtttgggccaggatgtgctggggggctccctgtatctgcagccagttcggagtaggaagggccgggcaggctggggactcttgtagcaggatcccctgatgcaggatgtgctggggggctccctgtatctgcggccagttcggagtaggaagggccggcaggctggggactctttcttgtagcaggatcccctgatgcaggatgtgctggggggctccctgtatctgcggccagttcggagtaggaagggccagcaggctggggactctttcttgtagcaggatcccctgatgcaggatgtgctgggggtggggctcccaccacagggggcttgggaggtgctctccaccagggccccactggctttctgcagatgtttgttaaacaaatgcaagcagctagaaatgccacggatcctgaatttcaggattctttttactcagaccaggcgggaggtccggggagattggcgtttccctgggccacagctccggagggcctgtctcagggcctgggctgaatgggaagcgtgctggtatgtgtgaaggtcctgttttggctggaggtggaaggtggggtcctggcggagcacgcagggggacctttttgttggaatgatcccaggagcctgcttctcctgagccccccacgatgtatcactgtctgcagcg

SEQ ID NO: 36925 - DNA, 1046 bp, Homo sapiens
tagcattctgtcctaaaacttgggtttctaatatgagtgtgtgtatgagaatatgtgtgtacacacatgcatacacatatacataagtgcatacacaggcatatacatgcgagtgtacacaaacatccacataagcatacccacatacacacagaagctcacgcacatagttttgttttacagctgacagcaaagcaccatcagtttcatgcagaaacccgtgattgtgacccaaagttcgtcttaaacggacactgtctttgcactcctgtttcatcgtgagaaagagccctttatcttatattgtcagcacgcatctgtgccaacttttaaaactctgcagcttctgggtctgtttcaggacgccaggctggcgtgagccatgggagctgctttcttcccccactcatgcaccctgctctgcacgcttcctgcaggcacggttcctttctcacatcagcccaagtgagacaacacctttccgttcccagacaggagatgacacccagggcgcctccttcactgcctgtggtcgtggctccggaactctaaaggagcacatgtttttacgcatttcagaatgatgctggcctcttgcctgggtccggccccctatcgtcattggcactcaggactgctccttcctcccactggaacacagggccatgtgggttctgctcctgcctctgcttgctgttcacagccatggtcggtgctggccgcagcaggtgcattttaagtttttactgtgggccgggcgcaacggctcacgcctgtaatcccagcactttgggaggccgaggcgggcggatcatgaggtcgggagatcgagaccatcctggctaacacggtgaaaccccgtctctactaaaaatacaaaaaattagacgggtgtcatggcaggtgcctgcagtcccagccacccaggaggctgaggcaggagaatggcgtgaacccaggaggcggagcttgcagtgagcggagatcgcaccactgcactccagcctgggcgacagagccggactccgtctccaaaaagaaaaaga

SEQ ID NO: 36926 - DNA, 1023 bp, Homo sapiens
gacaggtaacttggagagggctcatgttatcttatttaacaaaaacattgcccagagcatggtatgataaagacctggcaggaatggagagcgcctcccacagaactttcaccaggtgcagggaggcaggatgcccatggggcgtttgggcagatgccacagggcgatgttgggtgggacccccagctaccggctccaggaggggtgaggaggccttgggctcctcttccaggcagccccactcagagccttgcacagagggcggcgctgcatggaggggcagccggagccaggccaggagcaagagggccagagggaggcaaggtgcaaagcaaagcctggaaatccagacaacactgggaacatcctgcactctctaagttcaccagtgcacagacccgcctgtggatggactcacccttgtcctctgggtcccgcctgtgcccaggactcccaggacctcggaggtatactctaggcatgatcttcattactctgcagaactgttcaccttaatttgctggaggttgtcttaaaacatggcctctatccatccacatatttagcggaattgattaaaataaacttaatactttcatgtcatccttttagggatttcttcaaaggtttagatatttcaagcactgtgttgattctataattcacctgctggagagagttggcttaagggatattctgaaatgaacaaacagccacagtcacctttgaagagccgcacgttgcccgtcccatcccagctctgagcctctgcgaggttctcccctgcctgctgagctccctcccctgtgacaccaggagcggcccctcctccccacactgcaggggcctccagatcccaaggggcaggcccaactccctgagaaactcagggaccagtagccactgtctccctggggacaagggtttgtccagaaaatgtggtgggcaggatgggttggatctgagacaggcctccaggtgccggggtcacaagccagtcagccccggcagcaggcggtcacc

SEQ ID NO: 36927 - DNA, 1035 bp, Homo sapiens
tgtctgagcatccctaattggaagatctgactccatagcacatttcttttgaatgtcatgctggtgctcagaaagtttcagattttagagaatttcagatttttggattagggatgttcaacctatataaatactaaactttgaagtagaaaaactggaagtagatggtttaaacataaagtgtcttggtatagacaagggttctcccactgctcatgacgggagcattattgtaaagcactgagaatctggtacagtgtcattttcgttgctctgttccactctacgaatctgccatcatttacagtcccctgttgtgcatgtagatcatttttgaatttgttattggaaaatactgcagcaaatacctttaagttcacatgctgtaaatctacttttatagttaaaatttttcaaaaggaacacaagagatggttttttgtacatttttgtgcttaacttaccactgactcttcttttcatggtcaccctgggatatagacccgtaatcgacaaaactttgaacgaggctgactgtgccaccgtccccccagccattcgctcctactgatgagacaagatgcggtgatgacagaatcagcttttgtaattatgtataatagctcatgcatgtgtccatgtcataactgtcttcatacgcttctgcactccggggaagaaggagtacattgaagggagattggcacccaggctgggagcttgccaggaacccagtggccagggagcgtggcacttacctttgtcccttgcttcattcttgtgagatgataaaactgggcacagctcttaaataaaatataaatgaacaaactttcttttatttccaaatccatttaaaatattttactgttatgactttagtcatatttgttgacctaaaaatcaaatgtagtaatctttgtattctgttacatcaaaatccagatatgttcttgtagtttctttttttttttctttttttttttttttttttttgagacaggattggtgcagtggtacaatctcagctcactg

SEQ ID NO: 36928 - DNA, 1063 bp, Homo sapiens
gcagataactagccagagcccgtccctttgtttcccataaggaatacttttagtaaatcttaccactggcttgctgtcaataaatatgtgggtaaatctctgttcaaggctctcagctctgaaggctgtgagacccctgatttcccacttcacatgctgtatttctgtgtgtgtgtctttaattcctctagcaccactgggttagggtctccacaaccgagctggtctcagcagtaaatattgaaaaggaatagatacaattgtcattatttacagatagaatttccaaacaattcccagggaataaactgaaaaactaacagaaacaaaacaagaatgtagtaaggtgtctgggtaagagatttgtatctaaaaatcagtagctttgcaatgtgcaagcagtaatctgcttagacatcagtaaatacctcattcatattttaaacaaaaaattaaaaatgccttgaaataatgtaaccagaaatacaaaaaaaaaggatatgaaaacgtggctgctaatggacatgaaagaatgtaatactagattctgagatgcaatttttttcatttgttcttcctgaaaaatcattaggttgatgtgcattacagtgttacgattatgtatgagtctaaggaaaatcagatgaaatttccaaattaaaccatgaaggtgcattggtagaggaagagacaattagggtcagtggagcaaagcacagttagagggagaagcaaggaggaggagggatcactgaggtggtgcctgtctgtcccacaggaagcaaaagctgacgcctacttcccagcatacctaagtaaacttcaggcccactgcatagcacatgtctcatcacagtaaaactatgaaggaactcagtgtacaaggagcttctacaagataggcagaagacagtagccagatgggcctagggccccagccacccacgcccctccctctccttgaagacctgtggctccaacaccaccatcaccagggctctgctcagctcctcctagtgtgtatcaccacagggctgctggcttgtgtcacgttcaccaccag

SEQ ID NO: 36929 - DNA, 1769 bp, Homo sapiens
gcaaacagcagttaggagtagaatgcaccctttttacatcactcacattagggctcatacacctcttccaggacctttgactgcagggaatcaaatggctgatcgcctagttgctactgcaatatctaatgctggacactttcacaatttaacccgtgttaatacctctggtctcaaacgcagatacagcagtacctggaaagaagctaaagctattatccagcgatgcccaacttgccaaatggtacattcctcatcttttacaggaggagttaatcctcgaggattggaacctaattctcaagctctagctaaatttttctctatacggaatattaaacacattactgatatcccatataattctgaaggacaagccatagtggaaagaatgaatctctccctgaaacagcagttgcagaagcaaaagggggaaaacaggtactacaggacaccccataagcaattgaatcgcattattaactttaaattttttgagcctgcctaaaggccggatcttatcagcagctgaacagcatctacagaaaccagctgcaaagacagaagcagaacaactggtttggtggagagacctgataacagaaagttgggaaataggtaaaataataacttggggtagaggttatgcttatgtttctccaggactgaaccatcaagacacctgaaaccttatcatgagcgaatgctgaggaagagattccgggaggatcccgaggacccccccagttgcagccatgtcaagactgatgctgaggaggaccccaactgtcacgagcaacacccgtcaaacacagccatccacctgaggtcagatcaagaagctgtcacagatggcagaagaaaacctgaggtaagtgggacaaccagtcaaaatgagtaatttaatggtagctatgatagtggtgatcaccattgccatgagtattccttcaacaagggctgacacagagaacaattatacttactgggcatatttatcaatcttggctggcaagaatgcctggatgtaatcactctatgacacagttacacatgctttctgatctcagtatttaccatgataaatctgctcctataattgaggcataccgccctcaaaaacctatctgtaaacaggattggacccagtcagagaaaatgaacgtacatgtttgggaagattgcattgcagaacaggcaggggtgctggcaacgattcctatggaatcattattgattgatcccctacggggatgtttagcttgaattgcacctctcagtctgtgtgccacggccccactatgttcagctggtctgaacaaaatggtcagatggtagaaatgataagaaatacggcaagaattcctattatctggaaccatggcggtgtagtggcacctcaacctcaaatgatatggccctttgtaggagctaaacataaggatttgtggaaactgttaatagctcttaataagatcaaaatttgggaaagaataaaaaagcatcgagaaggacactctacaaacttgtctttggatattgcaaaattgaaagaacagatatttgaagcatcccggcacacctgaccttaatgccaggaactggagtgcttgaaggagctgcagacagattagcagctggtaacccattaaaatggataaaaacacttggaagctctgtgatttcaatgaagattgtgcttttaatctgtgttgtctttgtatagtctgcagatgtggatcctgactctgcaagaagtagcccaccat

SEQ ID NO: 36930 - DNA, 1076 bp, Homo sapiens
cagagaagactcgagctgcagctgatcgaaaagcaaggccataaagcccaaataaatagaaacgatccagagaagactcgagctgcagctgatcgaaaagcaaggccataaagcccaaataaatagaaatgatccagagaagactcgagctgcatctcatcaaaaagcaaggacataaagcccaaatcaatagaatcgatgcagagaagactcaagctgcagctgatcaaaaagcaaggccataaagcccaaataaatagaatcgatccagagaagacttgagctgcagctgatcgaaaagcaaggccataaagcccaaatcaatagaatcgatccagagaagactcgagctgcagctcattgaaaagcaaggccataaagctcaaatcaatagaatcgatccagagaagactcgagctgcagctgatcgaaaaacaaggccataaagcccaaataaatagaatagatccagagaagactcgagctgcagctgatcaaaaagcaaggccataaagcccaaataaatggaatagatccagagaagactcgagctgcagctgatcgaaaagcaaggccataaaactcaaatcaatagaatagatgcagagaaaactcgagctgcagctgatcaaaaagcaaggccataaagcccaaatgaatagaattgatccagagaagactcgagctgcagctgattgaaaagcaaggccataaagcccaaatcaatagaatagatccagagaagactcgagatgcagctgatctaaaagcaagtccataaagcccaaataaatagaatagatccagagaagactctagatttgctaatttttccaactccacattcagctactggtgttattgttcaagagcaagatcttgtagaatggctttttcttccacatactaattcatggcctctaactccttatttggatcaaattgctactatgataggaaatgggagaactcggattgttaaattacatggatatgatcctgaaaaaattgtccctctcacgaaggcacaaatacagcaagattttataaatagtcttacttggcaaacccattta

SEQ ID NO: 36931 - DNA, 1269 bp, Homo sapiens
ggctgaggcaggagaatcaggcagggaggctgcagtgagccgagatggcagcagtacagtccagctttggctcggcatcagagggagaccgtggaaagaggggagaggggagagctgtttgtttgttttagagagggtctcttaaggcattcttaaaccacaaacaatagcatgagcgatctgtgccttaaggacatgctcttgctgcagataactagccagagcccatccctttgtttcccgtaaggaatacttttagtaaatcttatgactggcttgctctcaataaatgtgtgggtaaatctctgttcaaggctctcaactctgaaggctgtgagacccctgatttcccactctacatcctatatttctgtgcgtgtgtctttaattcctctagtgccgctgggttagggtctccacaaccgagctggtctcagcaagtggcgcccacacatgggggctcgaatccaggtcgaagggtcaccggagcgacagaaaacttggaactaagctggaggacaccgagtactcttatgcagtccccatggtgagtaagaaggggagctcagaagcatcagggtaacgatgggacacgtgtgggctctggttctaagccggaggacacccaagtactcttacccagtccccatggtgtgtaagaaagggagctcggaagcatcagggtaacaatgggacacgtgtgggctctggttctaagctggaggacactgagtactcttacacagtccccatggtgagtaagaaggggagctcggaagcatcagggtaacaatgggacgtgtgggctctggttcgttccaccttggaaccttttcacgctaataataagggggaaggagagtataacgaagtaacagaagaaataacagagcaggtttgtttgccaactaaagctaaagcggcaaaggagggagaggttcatccctacccttctgcaccccctccttattttgaagaaaaagagtggcctgaccctccagatctttcatttccagaggacagtgggcgaaaagtagttgctccagtgactgtccgagcagcaccttgagcgacccctctcagttctattcaggtaggaattcagcaagctagatgagagggtgatttagaggcttggcagttccctattagaatacaccccgcagatcaacagggaaatatagccacatttgagccttttccctttaaattacttaaggagtttaaacaggctatcaatcaatatggaccaggttctcatttcgtaat

SEQ ID NO: 36932 - DNA, 1037 bp, Homo sapiens
aaccccacccctcccgctttttggagcccccagtctctgctagtccactccatgtgtactcaccgttcagctcccatttccaagtgagaatgtgtgacacttgaccttctgagtcacttcacttaggatagtgacctcctgatccatcctgcagccatcttctgtggctgcagaagacatgattgcattctttttttatggccgagtagtatttcatggtatatatgtaccacattttcttcatccggtcatccgttgatgggcacttaggttgattccatgactttgctgttgtgactagtgctgcgataaatacacaaggctgcaccagaatctggaggtaaacagcggtaggacgtactcctcaccgtatcaagaatatgaaagagaccaggaggcctgaactatacagaagtgcacttcttttccacatagaaggtcagcagactagggcagaattagtgactgcttggcatccaggacagccttctgtggttcactcgtgtgtgcttgggtgtgacctccgtgacctgaccgtcgatggctgtcatggatgagtcacagcgtggaggagagggaaccgcaggaccgccggagaagctcagtccccagcagggcagctttctcttagaggtttcctggagttcaacacaacactggtgcttacatctcaggcccggatattgatcatgtcatcatgcctggcttccagcagcttggaaatgtctttaagctggacctgttgctggccctaaatatactcggaagagagggagagtgggcggcgggtggaaactgatctgtggcctgtgcgctgggagtcggtccagtaggaccatctgtgatgatggaaatgttccgagtgtttgccatccagtatggcagccattagccatggggccgtggagaacctgatatatagtcagtctaagaaactgaattcctctaataacaaggattcttgtccatgaatgagatctcttgtctactatttgcaaggatttctgcatattttctaaaaagaagtctattgcttt

SEQ ID NO: 36933 - DNA, 1030 bp, Homo sapiens
agaggaggatgcagagcccgggaaaggcaccctaggcagagggcacagcagggcaaaggcctggagtcaggcctgagcctgtgtggtttgaggaacggacagaggcctgcccggcaggaagggaacagcacaggggagagaccttagaccagagcagagggcagggctgtgctgggcactgtgggctgtggatggtgctggcatttaagaggggagaccatagaccagggcagagggcagggccgtgctgggcactttgggctgtggatgggagctggcatttatgctcaggtgatgggaatatgttaaaagattttaaggaggggagtaacagttgggattaatgtgtattctgggaatctcaacaaagtaaattcatagttcgaattttcataagatttctgcacaggcagagagaaataagatcgtgtctacagctgtgtgatgattttatttaaaaatattactaagattttaaacgtgatttcaaatggtgtgtttctatttcacattggacataagtagattgcaaggctaatggaaagtagaaaagttaactcacgaacataaaagagatatcgatttgaaaacaaaacatttattcatttacttccgctgcagatttcttgactgctgaatttcatgagaagggattgttctgtgagggtcgtggagctggagatccaggtgggagaggtgttctagcttggggaggagctgatgttccaccttgagggccctgcagctgcagacccggagaggagctgatgttctagattgagggtcgtgcagctggagacctggagaggagctgatgttctagtttgagggtcttgcagctgcagacctggagaggacctgatgttctagtttgagggtcttgcagctgcagacctggagaggacctgatgttctagtttgagggtcttgcagctgcagacctgaagaggagctgatgttctacattgagggtcgtgcagctgcagacctggagaggagctgatgttctacattgaggggcatgcagctg

SEQ ID NO: 36934 - DNA, 1085 bp, Homo sapiens
ccagcgtgtcatttctaccgcactctttcagtccctagggtgagcccagattcagggggaggcaaggagctccccttgctagaggatgaccacacctacaactggtaaggacttggagggatggagtgggctggtccttccctggtcatcgggattcatagttgagtgagccccatgccttgggggagcactgtcatcaacatgaatttgggggtggggagcacagtccaacccagagcagatgctgagatgcgacagccttctcacggctcctttcctcctggccagggacacctccccttctcccagaaaggagttttgtgagacaggagaccacgcaagaagcctagcgcggggggagcgccctcctgcccagatcagcagcaggggcgcagcagggtcacccagaaaggcctggtggggcggcagagggggcagcatggccacatgagggccaaagctcctccccagcacccacatcacttctccagggggagcagacgccggtgtgtgttgctgtgaactctgtgctgtgcccattcaccctcacaaagggcctctgcaagcagcttgacatgggcattgcagcccgcaggcgtctggccagttgaagaaggtggagagcgttattacctgaaagaaaagggaaccagctctgcgaagagcctgcttctgttgtgcagtgaaagggaagccctctctcgagccgttcttaagtgaggagttgatgcactagagtgtctgtcacgggggcccctgaaagtgtcagaagccagaccccactaggagacctgttatgcactggggctgagaatagttcagcaagagagaggactttcctcaagcgtgtgtgtgtgcgtgcatgtgtgtatatggcacgtgtgtgtgcatgcatgagtgtgtccacatatatacgcgtgtgtctgcatacactacctgaacaggcagtgtgggagggtgtgatgggtcagtggcaccgctgtagtgaccctcagcagactgcaaccttcagccagcgtgtgctgtccatgtctctgatctctcacggggtgggtgatgtggttttgagaaccacagggtcctga

SEQ ID NO: 36935 - DNA, 1004 bp, Homo sapiens
ggtttcagtcgtggacagcagctgtgtgctggtcctccactgccattatcctgtgtgtgcactcacatgcatgcccacatgcacacacgcacacacacacacacaaatgcacactccttttatgtctcctatggttgagtgctttctttgttgaaaaggccaggcagcttccttgagcattttgtgtttttgtggaattgaccaatcaatttccaatcaatcaagttcagtcctcttgggtaaatacttagtgaagtttctgggtcattgggtagatgtaggtttacttttagagaaaaagagttttccaaagtagttgaaccaatttacactcagcaaaaatgtctgaaagtgaagttgttccatacttcatcaacatttgatgttataagcttaagtttcaaataattaaatagatgatagatatagatagatcaatgataactagatagctggatgatagatagatagatagatagatagataagtggatagacagataagacattgatagagagacagatatgtggatggatggagatagagagctagatagagagagatatgttgatagagagagatagagagatgagatgtgagagataggtaaagacatggatggagacagataaataatgagatagagagatagagagatgaagatatagagatatcttcatggataaagagatggagacaggagagaaagagagagagatagagagatagatagggagacagagatgatagagaggtagatgatagatagatagatagatagatagatagatagatagatagacagacagacagatgacagatagtcaaatcgacagatgaaaccagaggaggaaaagccgcagcatcccggggtggacattaaggagtcctgggtctaatctcgcgttgtttttaccagttatgaacatggggccctgggtgtctctttctgctgcccgagaagatggttcatcatcatcacatctgtcttctctctgtcagag

SEQ ID NO: 36936 - DNA, 1053 bp, Homo sapiens
aagggaaatgatagagacatttttaaaaaaaaaaaaaagtggtttccttggtttgagataggggaggaagggatgaacaggcagaaggatttttagggcagtgaaagaattctgtatatcatagcggtggatacatgtgttacatttgtcaaaactcctaaaatgtccaacactgagtgaaccccaatgtagactatgaactttggcgtgacacgtaacaatgtgtcagtgtaaactcactggttataacaaacgtaccactatgagtgtggtgttgatagtggaggaggctgtgcatgcatgggggcaggtggtatatgagaactctgtcctttttgcttgattttgccgtgaaagtaaaactgctctaaaaaataaagtctctttggagaaaaaaagacaacaaaaaccaagagcaaacttccaggcagtgggagtaatgacaggaagtctccctatctggagtgaatgtggcatgttaaagcatcagaagtcagctcaggtaacccagactatagtgaacaaggagccacttggtattgatttacttaagaggagggatggggcacaggccagatcatgtagagtcttgtaagccagggtagaaaagttttagatctttgaagaggttaaagaaatggagtggcataatctgactttactttaaacatatttcatactgcctctcatgggagatggactgggacaaggcagcagaagaagccaggacaccagggaccaggctgtgatccaggacacagagaatggaggcatggctgcagtcctggcagtggagttagatggaaatagaaggagcgaggatcccaaagtgtattccaaagaggctgtactacatcctaccagcagtatatatgagtgtccaattcctccccttccttgccaacactagatataatcagtctcttaattttagccaatttaatatgagtgtggtagtaattcctcttgtgtatttccttaatgcacacttcctcaatttgcttttctttttaattaattaattaattttattttactttaagttccaggata

SEQ ID NO: 36937 - DNA, 1122 bp, Homo sapiens
tccagaattgcgggagaatacatttctgttgttttaagctgcctggcttggggtagtctgtaccgcagctgaggagatgtacacgatggcctttagagtccgctctgaggcacccctggagactgctcctgctgtccaggacttgaccgcagcaaccacctgacccgccctcatccctccctcacctcattcccactcgcgtccaaatctaccctcctcaccctgctgcaatggccttgcgcaaacacacctctgatcatggcccctgtgctcagcgatgcttggaggccagcgtggcagcccaatcacaattgcccagcgtggctacgtgccctccagggtcccaccgcattccctgggccccccaggccctcacgtcgccgtgcccacccttcgttcttcagggaccactgtggggtcaggtctcagcatcgcccccgcctctgtttctattatcaggaagccgcttgttccctgtcttgctagcaaatacctgcccatgttttcacattcgagccggtcctctgcgctccaggttcaagcaattctcctgcctcagcctcccaagtagctgggactacaggtcgggcctggttagtactcggatgggagaccgtttattcattttataagcaatcgtaataaagacacacggggatgtgcagtgacctggttctgccctgcagaactgctcagcatgtttgggaggaaagatgcattcagaaacctcccttcaacttctccttggccactgtgtgagtgtcttgatgtcactccaaatcagcatgggaaggccagcaatggggtccaggtggggaaactgtgcttgtgctggacactggaggatgcggaggctggagctgccgcagcagagagggctggcactgagcaagcctcggcaggtgggcagatgggggcaggcgggttggtgggtctccttgagatgccacatttgcaagcttgagaagctgaacttgaaatccatccttggaaaatcattttgcaagcaggtactaaagcaataattgcccttcccttggggggccctgaggaatgaggagagggaacctggaggagggattttgcagaaaactttagcccattcagttgtataaactccaa

SEQ ID NO: 36938 - DNA, 1027 bp, Homo sapiens
cagaggaggaggggctttgccaagcagcagggctgacctagaatggaggctgcatcgtggaaggatccgcctatgtcacccaggcccgaacccctggatctcatttagttttttcttttgtcaagagttgccttaccatacaagctgctgtaaggatcaaaaaggtaataaatagcatgaacgaattttgaaaagtgcaaatgctaaacacatgtaaagtggtatggcttgtgaagcgtgcttgggtttatcagtgatcattacttgattttatgagctgttcgtattatcagaagtaatgaaatcagatgatctgtacttgtgtaaatgagggaatattaattcccctggttcctacactgagttttgtctaaacaaggccgtgtgcagttatatatacctaacctttattcccccatacctttcagaaagctgtgagaataggtgtcagtcatgagaatgctaattgaaatatatcgtgtttccagatatatagatcaaggtcgaaatccccagctctacaccaaagagtgcctggagagggctctagctaaaaatgagcaagttaaaggcaagatcgacaccatgaaggtaagactctaaggagtgtcagaaatacagtgggaagagatgccttctcagtggaatttggttaagagactcatttttttccatacttgctagaatattgactttcataacttcacatattgagatttctgaattgtgtaataggcagtaagtaaaattagatatcagctgcgtaatagcataaaaaacatacactaatcttactcttaaggaaatccagagtaatttttgtgatagtagttctcactggctgtgatcattttcatttttttaagatgcacttttattgcattgatactttctatttctgtagtaattcctactgttgaaggctttccctgtagtcatggttctttgttttagaggattcttgaatattgatttttctctttgtccagcttctgacctccaaacttctttttaccatatccattgt

SEQ ID NO: 36939 - DNA, 1054 bp, Homo sapiens
gtgacctgttaaaatgttaaaaaggacatgtattttttaaagatctttaagtaaaacattttgctcattcccaaagccaaatttaaattataccatggccctaattcagaagttcattctttggcaggtgtttccttggtgcctggggcactctctctttctcccagttcctgtggcagtttgtccaggtgcccaagaacaattcataccctcctttctcgttatttatatacttgtctttttgcccctgccgggtattttagaaatcgtgcttggtgcactttgtgtccttcagtgtgccttacccagagcagatgcacgataagcatttttacacgagaacaagctggtggtgtaggcctctgctaaggaacaggctgtatatgctctttgtgggattaaggtagaatcagctttaactccaaagaaactgtccatgaattttgtttataatagcaagtagatttaaaatgacactttaaaaaaattctgttgtctttctctacatataatgctgtagaaaaatataactgatggattttgtgaacgtggtatttttaacttttcgtagcagcacaaagaatgctcctctttgtgtgtcaatgaaattgttctttatgacagcttcagggtaaatctgcagagaccagagaaagcacacagctgagccctgcagatctcacagaagggaaacccacagatccctctaagctggaaagtccgtcattcacaggaactggtgacacagaaatagctcatgcaactgaggatttagagaataatggcagtaagaaagatggcgtgtgtgggtaagaaaagtggttatgtcttgatctaatacgctggtgtcttcacagtccttttggattaaatgggatcccagagccacttcttggtcggtttgagggggcagtacatgtgtggtatcaggcacatgcagtgtgagggctggactctgtggaagccggaaggtttcaacatctgccgcaaaccgttccatgttgcacagaactgacagaaaggaagaatgtgcttttggtattgaaggttacca

SEQ ID NO: 36940 - DNA, 1044 bp, Homo sapiens
tccgcctcctgagttcaggcaattctcctgcctcagtctcccaagtagccgggattacaggtgcgcaccaccacaccctgctaattttgtatttttagtagagacggggtttctccatgttggtcaggctggtctcgaactcccgacctcaggcgatccgcctgccttggccttccaaagtgctgggattacaggtgtgagccactgtgcctggccttgctctgtgttttttaggtgaattagttggctttatcattcacacaaccctctaagggcagatactgtcaccatctccatttttccagatgaggaaaaggaagcaaggagaagtacttgaactgaggttacggagctgttaactggctgagctgagatttgagtctaggtagctctgttccttagcattatgttttcatgattcttacttgttcatctctatatttagtctctctggcttacagtttcattctcctcccatcctctttggagactgtacctatatcattctgtgattttggggcagtgtagaatccctaaaagtaaattatgtcatgctatagactctgtaaagaagtatatttagatcttggactagaaattgaaaaactagaattgctttaaattaaatgtagaatatttggttttttaaaaacatgaaacagtttcttgctttgttaatagatcttagatatgtgtgcagcacctggctcaaagaccacacagttaattgaaatgctacatgccgacatgaatgtcccctttccaggtatgcattggacttgtgttcaaaatggtaggaatgccactttggcagattgtagacaaggaaaagactctaactttgcctgctaatttggctctaaagtctcctatgacaagcagttgggttttccgtctaccggaagtagaactggacatcttgcctaccaccgtcagtagtactcaaacaaacacactcataccatgggggagctttattttagaattatgtgtgttttctataaaaacgaatggcatttcttttttttttttttgagatggagt

SEQ ID NO: 36941 - DNA, 1050 bp, Homo sapiens
ttgtctgcacctgaatagttctgccttgtaacagatgtcctggccgactagagaagacagagggcagggagtgtggtgaggaattttagatattgaaggtctaaagatggaaagatggaagcagtggttgatgtcttcatctctttgaaaggtagttatgagaaatagaaagtgggcatgggctatgtctgaaaatagtggaggactaagaaatagaattttaggcaagaaggaaaaaccatttgacagtcactttctgtcctaagttgatgctgtctgttgaaggtatttgtttaaatatttaatagcatttctgtctttgagagctgcccctctagcttctgtgctctactgctatggggagttggggctctgtaagcttcaagtcccttttctttcatggaagttggtattatacctgaatttctaatatttgaatggtatagcaaccatttgtccgctagtgtacagatccatctcatttagtgttctgtgtgatagtatgagttctctcattctgtataagattatgtgctgttttcctgttgcctttgaaacaatgccaaagattgaaattgtctgcggtttttttttttttcctaattgttgctgattttttttttttcctcaagggaaatattagtcgtcaagaagctgttagcatgatcccaccactgctcctcaacgtgcggcctcatcataaggtagcatatagcaactagaaacgtgggggcgggcagcttgttaccagtgtcatgcctgtttgttttgatgaaaccattttttcttaatataattagtcctttttttcttcttttcactttggatagagagtgatatgtacgtatcttagtttcttttttttttttttttcttttttgtcctacttaatttttatggtttagaaaattttctcccctttagttttactgatttgtttaccatatggattgtcttcagtgatggtgattggctaaattaggttgaaaatgatagtgaacatgtattgagagctcattgtatggcaagcattactctgtgctctttttt

SEQ ID NO: 36942 - DNA, 1035 bp, Homo sapiens
cacgagatcaagcttttcttcctcctggtaactaggttgtagactttgctcaagtcgtttggtttgaagatttgattgacgacactgattgtgttgtacttgaagtagaggtctgatactgtagtagtccattttcacactgttataaggacatacctgagtaatgtatagataaaggaaataggcttaattgactcacatttccacatcgccggggaggcctcaggaagcttaaaatcatggcggaagatctctctgcacagggtggcaggagagagaatgagtgctgagcaaaggaagaagcccctaataaaccatcagatctccccctgagaacgaactcactgttgtgagaacaacatgagggaaacggcccggggatttaattatctccacctcgtcctgcccttgacacgtggggaatattacaattcaaggtgaaattggggtgggaacacagagccaaaccatctaaaatattttaagaagacaggattacgattctcctcgggcatgtttgtatttttagcagtgatgcatgtatgtgctgcttcacacaatcacctggaaacatttgtttctaaaaccttgtgtttagaagcgcagagacgggataagaaatgcttttaagatgaagaagttcctgtccaggaggaacgtttcagcatgtgtctatagggaagaggtgtgctcttaaggcacctccatgtgggcattttcttctgcaggctccaacaaactaggagaaaccatacgatgtcaataaggcttgctagttttttattattctctgcaaactacagttacacttggatttgatcagcccttttaacatttcatagctgcttttccaccttgtttaacaatgtgtctgggtatatgacaaggtaattaccaaactcttagaatctgcaggttgtctgtagttgaagaatgaaggtgaattgctctctgccaacagccagctatgtttttgtttgctttaattttctgaacacacagctgaagggtatgaacaaaacattgtagatctgg

SEQ ID NO: 36943 - DNA, 1034 bp, Homo sapiens
ctgttctagacattggggatacaggatgaagaagctggttgggatatttgccttccaggagcttacattccgctgtggggaagcgtgtaagaaacaaacaaagtaaccaatagccagaggaacctcagattttgaaggatcttgaccagttttacttttctacctttacagatcccctatcatgagattgggatgctaaaatcaagacgtgaattggtggaatatttacaaagaaaactgttttctcaaaacactgttcattggttgcaagaatgaatactgacttcagaactcaaacaatggaagaacttgcatttttatggaactcagtattaaaagaaaaatataatgtgaattagccactttgcagaatatgttctagactggtgatctgaaagcatctgtagttttccttatactatgtatacatttattgtggtaaaatttaaaattaattttaatttaatactagtgtcatagatactttttgtacatcaaacaattgatcatgtgctgtaaaggaattcaatgaataaatgttatttttaagtattttgtcatagttatctgctaaatgaaaatattttgctctttagagaccttttgttttctaacagatggaggaaattttttctctttgtgtgctgtgagtggaagtgagatttaccgtaaggaaaaggagcaatgagaaatagagtacagtgctttggatataaatattatagaattatgcagaaacaatcttctggttaatgagatatattagtatggaaacttttttttaataaatatttagagaaatggaaaagcaatttaggtaggttttttggggagctgtttgattggagggaggatcttctaaattataaatcaagaatgaattaaattgtcattagttcattgcagagccttcattgcctcatcacagtcaggttacagtttcaaggagaagaggacaagagagccgactggagtagcagagtgtattttttgaaggagggaggagggatacaattgaacctgtaacaggttga

SEQ ID NO: 36944 - DNA, 1069 bp, Homo sapiens
tttgggaggccgaggtgggcggatcacctgaggtcaggagtagaccagcctggccaacgtggtgagaccccatctctactaaaaatacaaaaattagccgggcatggtggcgggtgcttgtaatcccagctactcgggaggctgaggcaggagacttgcttgaacctgggaggtagatgttgcagtgagctgagaccgtgccattgcactgcagcctgggcaacaagaatgaaactccatctcaaaaaaaaaaaaaaaaaaaaaaaaaaagaaaaaaatgacttttcttggcctttaagctcttgtttcttggggtatcagcatctctgctcttactatgtattgaggaagggccaaaggccacttactgatctttgccattctaggtaatttaagaagaatgagtatagcctcaggcatcacaaaaaccactgctaaacactctaatttgctgtcaatcctacctttaggtaggttaagttaaatttttaaaaatctaaactgtaagtctctttcttgataagcgactatattatttacattatttgttattactgacatgtttggacttattactaccatattggcttctgttttctgtttattatcccattttcttgctgctttcctctttctgttgaatcaataaagttttctatagtcttcctttaacctttctgttattttgaaatccatagattatatttccatttttttagtggttattttaaaaactataattgactatatgtatttttttcttatactttaatttctggcatacatgtgcagaacatgcaggtttgttacatagttatacacgtgccatggtggtttgctgcacccattaacccgttatctacattaggaatttctcctaatgctatccttcccctagcctcctgccctcccacccactgacaggccctagtgtgtgatgttcccctccctgtgttcatgtgttctcgttgttcaactcccacttatgagtgagaaaatgcagtgtttggttttctgttcttgtgttagtttgctgaaaataatggtttctggcttcatccatgtccct

SEQ ID NO: 36945 - DNA, 1066 bp, Homo sapiens
cgcacctctggttcaacagaagaagggtgggagtgggagctgtcaaggatcctgccttttcaagagaaacccagctcaaaactacttaagtaaaaaaaggcaggtggagttattgacacatgtaactggaaagacaggagatattttatacagagcagaagaaaacatatctgttttctttatgcggaactatcagaagtagccagaaaatttctctttatcacagtctagaaactattaatagtaataatactaaaaagtggccatctaaatatatttgagtatactggtgaatggccaattttttaagtgatataaaaccaaaatattaataattactgtaattatatataatattacaggggtttaaagaaggaagaagaggcttttgctggaatagttagaaaaggtcttacagaagagttaaaatagcgatatttatatgatgaatcatgtgagatattttattacagctctgggatcgtgaatagtgaatctggaatttttaggactcatgatattcagctccagccttagtagtgttcttggaatgtaaatggtcactgttcagtggagggtatccacttcggacttccaatttttaggcaaggatgagagtagtggcaaattaaaaaaaattggactttgttcccaagtaatcaaggttatccctgctttagtttattctttttaaattagaagatatgagaagaaccaaatcaatctccagaatttattacccagaagacagtaggcacttccactcaataagttaaagtgcatggatttgaaatttaagtaatcctgtattggaacaagacaaggaagcatttaaatctcaatccagcttctccctcatctgttggggcatatgctttaggcagtgtaagtggatgtaggaaattaatcttccaaaaggccaacaggcattattcccacatactctaacaagaaggtcaaattccttatttctaatttgttttaagtttcaggaagaaatttaaaatctgagaaataaaaaaagggaagaaagtatgttgttctgtctatagatgccttgctggca

SEQ ID NO: 36946 - DNA, 1046 bp, Homo sapiens
gccactgtgcccggccccgtagttacctctttaaagactttgtctccaaatacagccacgatctgaggtcctgggagttaagacttcagcatatgaattctggaggggaacacaattcagttcataaccatgtctttccaggttaattacagcatcatttaattagtaagtcactgcatgcagcctagacgggcattggttggagactagtgaagtacacagctagtgtatggagcagctgtgaggaagactgtccagtgacctgcaccagttcacatgggattcccaagatacagccttctctgctatcacatgcactctgcccggcacacattaaacataaccagctctacagaaaaggcagcgttattgggacccctcttgagacatgtgcaacttccaaacctgaacactgacagaagcaatcctggtacacagggaggtaacttgggcagtccgggcaggtagctcagtggagctgaaactgcttgaggggatgatgatactattaatagtaataatggcgtggggatgctgctttggggatgacaggcacatgagcactgaaggatttacaccttattgcaagcccaggaccgacaaggtaggaactggcaaggtggggtgcccctctctggggccgtgcaggcactccttttacattttcttaagacactactgaaagatcttcatatggagagccatttcctttcttgctgaaggttcttattctacactcgtaattcaaagctaagctccccttgcctagaaaaaattgcctgtgaaccaacgcaacttgcaggttactctgacatcattcctctgcatgccagtggtgtgtgagttaattggtgttatagtgacaagtgtagcacaccttgagtgcaaaaacaagggcagaacattgtgagagttgcttctatttatgtgaaaaagagtgttcacgtgttgatgcatgcacacatatatgtgtgtgtgtgagcatacacatgcacttgcatatcatgttagaaataatctgtgcaggctgggcgcggtggctcacg

SEQ ID NO: 36947 - DNA, 1084 bp, Homo sapiens
cagaagccacactgatcaacagaaatacattccggatggtcaatgccttgaaaacatatcctaggcggcacaattaaagaggctgtgaatgtttactctggacgagaggatgtttggaggcagatattttcacatatctgcagggctgccatgcagatgaaaggaaggtagtggacacgactgtgtgccaggggtttccatgcactgtatacccttctcctccgcagggacatagccctgtcttcctttttttttttaaatcaagggtagttaacttgctcagaatcacagccagacacaggagcaccaggtctttattacactcagttgctcccctggaagtaaacctgttctgattggctttggggggcaaagtagggtcattgggtggatgttgaagggatatgaaatttaagctcagtacaaagtaccgtcttaacaaagtcattaaaagttagaatgcgttgcctgtgggtgtagttccttctgcctggagatgcagagcggaggctggacagccacttggtggggatgttgtagaagggatccatccacaggcaggcatggagtcctaaaattaccctgaacgatgaggagttttccagtctgagcagggccacctgaatcctttcggcagacctccgcggaagatctgtgaggcactaaagcagcctttggcaataaaagtgtgtcacgtaactccatctaaacctagcatccccccagacattagggcgctgtggcaatttttcactctggtattgcctaacaaagtagccaaaatattggcaaaggtgatggatgaaggtaaactgtatcagaatccagccaggaagtgtggatgctcagaagagaaagttggcgtctgtcagatcccagagggtttagctggagctaacacagtgatgcttactccatgccaattagaactgagggactgttcttgaagcccctggtgggaatatgtcactagtggtgtcttatcctcttttaagtgacactgcttcattgccaagggagcagccttatgaggaccaaaccttgcccctttccagcccttccccaactgatgggatcagtgttg

SEQ ID NO: 36948 - DNA, 1083 bp, Homo sapiens
tttctttacccccatcactagcattaatactagcactagcattagtagcattcttcctcccaccgccccctccgccgacccagttcgttttccactgtgaaatcagttttacaactcattttaaggggcttcaggaatcaagaacaaagctgcgctgagtgggggatgctggcgattggctggctgccctgagggtgacccactgctgtgtgccagctttctgtgtgtcttgggttcaaatttgtactgcactagaatagattgccgtagttcatgggtgtggtgggaagaaaaatgtcctctccaggaatgtccacattctaattcctgcacctgtacagatgtaatcagtggtcttgagatgggagattattttggattatttatgtgggcccagtgttatcatgagggttcctataaattaagagggagccaggcatgtgagagaaggtgatgtcaggacagaagcagagattggagtgatgtggggtcaagagcctaggaatgtgggcagcctctggaagcaggaagagacaagaaaacctgcccgagggcccccagaaggaacgcaggcctgccaattcatttcagactgacctccagaactgtatgataataaatggtgattttcttttctttttttttttttttgacatggagtttcactcttgttgcccaggctggaatgcaatggtgtgatctcggctcactgcaagctctgcctcccgggttcaagcgattctcctgcctcagcctccctagtagctggggactacaagcatgcaccaccacgcccggctaattttgtgtttttagtagagatggggtttctccatgttggtcaggctggtctcaaactctcaacctctggtgatctgcccgccgtggcctcccaaagtgctgggattacaggtgtgagccactgcgcctggccataaatggtgttattttaagccactaattttgtgacaatttcttacagcagttataggaaacctataactgcattcgaccctgttctaagtgctttacctccatacactcatttcatcctcacaatatccctgtgacccccactttgca

SEQ ID NO: 36949 - DNA, 1046 bp, Homo sapiens
tacaggtatgaaccaacatgccccattcagtagtgtgcttcttacaaacagaaggtttatggcagccctacgtggagcaagtctgttcgcaccattttttcaacagcatcatgctcactttttatctctgtgtcacattttggtaattcttgcaatatttcaaattttccactatttttatgtctgttatggtgatctatgatcagggatttttgatgtttctattgtaaatgttttggggctccacaagccatgcccaaataagagtgaacttaatcgataaatgtgtgttttcctactgctgcactggccattcctctatctctctccatctccttgggccctcctatttcctgagacacaacaacattgaaattaggctgattaataaccctacaatgggctccaggtgttcaagtgaatgagtcacacttctaccattttaaatgaaaagctagaaattattaagcttagtgaagaaggcatgtggaaaactgaaatagactgaaaattaagcctctggcatcaaacagttagccaggttgtgaatgcaaagagaaagttgttgaaggagattaaaagtgctactccagtgaacacacaaatgataagaaagtgaaaaagctttattgctggtatggagcaagtttgagtggtctggatagaaaatcaaaccagccacatcatatctttaagccaaagcctaatctagagcaaggccctaactcttttcagttctctgaaggctgagagaagtgaggagagtgcagaagaaaagtttgaagctagcagtggtaggttcattaggtttaaggaaagataagccatttccagagcatgaaaatgcaaggtgaagcagcaagtgctgatggagaagccgcagcaagttatctagaagatctagctaagattgttgatgagggttgctgcactaaacagattttcttttttttttttcttttgagacggagtctcgctctgtcatccaggctagagtgcagtggcctgatcactgcaacctctgcctcccgggttcaaatgattct

SEQ ID NO: 36950 - DNA, 1035 bp, Homo sapiens
ccccttccgtgagacatgaacctttggggctcgacattgcaggcgtgggtctcttacaaattcccgtctcatgtgcttcgatggctctttctacacgtcgacacaaaatcctaagcacccgactgttagggtgtgctcctgagtcgggtcctgtcccccagcatcactgggccccgtcagcatctgtgggtgtcaccctcactctggctttctgtttcctctccgatcctgccccctgaagagtcccttttccctgtgagttctttcatcgctattttttgttgttttgttgttattcaatccggcatttctagtgtctatagccttactctgcagtgttgccagaaccagaagttaccattggtttctcacataataccatagatgtagctaaaatgaatttttttctataatcttgatttgaggtttacttaccatttatagcctttagatttgcagcattcagaatataacgcatgtttctctctccatagcccgacttaaatctctgcaatggctaacgaagcttatccttgtccgtgtgacattggccacagacttgagtatggagggctaggccgtgaagttcaagtcgagcacatcaaggcttatgtcaccaaatcccccgttgatgcaggcaaagctgtgattgtcattcaagatatatttggctggcagttgcccaataccagatatatagctgacatgatctcaggaaatggatacacgtatgtataaagttgtgtttctttgtttaaattcatacaaatttcagtggtttattttgttccctttaaaaaataaaaccacagcggtctgactatacagtatctactgtacattagaaacttccctatctcactgccgtgaagatagatgggaaatgtcttgggaaattaaacacccacctggtgctcctaaccccattcctgggtttcctgtcctcctgggagtacctggcctttagacttgctggacattgagaattcttttcccgtgtggggcctcagccagacgcaggcactggacatctga

SEQ ID NO: 36951 - DNA, 1033 bp, Homo sapiens
tgcactcctgctacggaaagacggctgtgccttgttgaagatgatactatatgattcgctaccagagtggggccatccctgcttcaggctgttcctagatgtttaaaagaacattccaaacgacgttaagaaactttgtgctgccatttgtgtattcctttccaaatcttttctaaaatgttagaattcagaccacagttcctgagctttggatgcaaactccttggccctgaatccctggaagccctcccctgtggatggtatcagccatcacagcaggatgtgctttaagaatccaaatgaattcagttataccacgtggcgggacttttaaacttgagctgagcttactcatttctggccgactattaatcctatagctaaatcatgtacgtaaaggaaggggaaaaaaatccaacctgggtaaccacacaacaaacactaaataaaaccaaggtaatgtatggggcatctctgtgctgcttagtaaaacttgaagtttcttaatgtcgcgaagtaacagaaattacttgggggaatttcaggtgtttttggtaaactctttggggaagtaaacagtcagtgaactttcggaatgctgggacttttgactgcagcaaaacaaagctaagacaagtggattccttaaaaaagaccactggcagcagaggagaagcagagctgggaagagacaggctggtgagctcaggggataaattctaccccctctacccagcaggactggccttaagcaaaactgaactaagagggagatgcttcccctccacccacctccgtgagtgtccccgatcgatcgcgctgtcccagctgggctgaccttgtattcacctccaggtcttgggtgtctgtacctcttggtggaggcatttggaagtgcacacaccttgtccactacctcaaactgtgtcctgatgtttttaaattatggcacacgtagccataaaaaataagtgtacagaagagtatataattacatggagagatgcttgccatagccttagttcagaaggca

SEQ ID NO: 36952 - DNA, 2020 bp, Homo sapiens
tgctggtgggaatctaaaatggaacagccgctgtggaaaacaggttggtgattcctcagaaagttaaacacagaattaccatataacccagcaattccacttctgagttacacacaaaataattgaaagtagaaactcgagcacatatttatacacccacgtccatagctgcaccattcgcagcagtccaggtgtccatcagcagatgaatggataagcagaatgtggtctgtctgtacagtggaatgttattcagcctcaaaaaagaattcccacacattctgcaacataaatgaaccttgacaatattatgctagatggaataagccagacacaaaaagacaagtactgtatgattccacttacatgagatccctagggcagttaaactcacggtgatggccaggggctgggaggaggagagaatggggagctagtgtttaatggggacagactttctgttgggaatgatgaaaaagttctggaaatagataaaggtgatgatagcataataatatgaatatacttaatgccactgaactgtatacttaaaaatggctaaaatggtacataatttttttgtaattagttgctgagctggctggggtttcaaagcgaagttagaagggagggagagcttggactgtctttaggaagaacgtttgccttgagcagaccagagctaaaggagaccctcagtctggtgtcctgtcacttcccgccgagtcgcctcttgcggctcgataagactttctcatgcaacacaattcttgaatattgtgtaaaaagtgcagtcttaaagcaaggacctcgcctgcggaagtgctggacacatggggttcttttctttcagtgccttatttcttaccagtgccaaacagatgggggcgctggagcacagcagtgcaggatgaagtctcaggccttcatgttgttcttccccaggttaattaggtggaatgcacactgttttggttgtgccccaagagactgctctgacctaagcttgccactgagtgacattccctgtccctgctcctcagctcggagtcagccctcagggtgtgcacaagggcaagttcacggcctttccatcctgagtgagtccctttgactgcggcatcagaccctcagtcttgccatcactcagccaagtcgccagcaccacatccagcagaatgactagccactttgtataggatgcagcacaaaggacaccagtccctggctcatcgccacacccggtgggcctcacctcacccctcgccacccagtggttggcagaggcacatttcttatgctgagcctagcatgattttcattgacatcctctgtctttatgagcagaatccaccaagccactaaagctcagcagattcagtcatgactcagcacaaaggagctatctccgtgaatttggggtttcacaaggacagcgccatctgtgaatgactcctgtggactcttagacgctgcaacctgcaaccatggccctggacactcctggaatgagctgggcctgtggggggagggtcattcttactgctgggggtctcctttagcccccagggtctccatggccattcagcagttgcgatgggacagtgtcttgagcagctcacatgggagtgaggtgctaaatgtgggtttaggaaaggaaagagcgtgccctgggagtcagaggctggtttctaggcctcagcttccgtgtgtgttttccagcactcaggctagagcagagctgtcatgatctcatatcatcactgttcacacacatttctccgggtacatactcgaggcatagaaccccacccttgtcgtgatcaatgcaggagacgcccagaggacagcacctctgaggagcaccgagggcagggaggaagggcgggactgtggcaggcccctgggctccagactcccgtcctcagtgcacacaggggaccagtgctggagacagattcctgatagccaggtcccccgagagcctcacgtggcagctactacacagtggggctgggct

SEQ ID NO: 36953 - DNA, 1071 bp, Homo sapiens
tctcattggcttgtagatggccgtcttctccctgtgtcctcaaacagtcttctctctctgcctgtctgtgtcctgctctccccttatagggacaccaatcatattgggtgagggtccaccctaatgatgttgttttaacttaatcacctctttaaaggccctgtccccaagtagagtcacactcagagattctgggagttaggacttcaacataggaatgtgttgctgggaaggacgggggtgaaattcagccagaacagcctctcacttggcacacagtggttgcctgcctcaagtccttcctgccctgcctggtcctgcgtttgaggaaggattatgtagtatattactttgtacccacgcagtgcttgcaaatgctagacacatgtcatttttcaatgaaaaactaacttgctcttgagtcccaaacttgggtttaatgaagccagtgaatcagcagttcttgaggctctattcagagcactgtgtgagaaagagtaaacagacgtcccacccagagtaaggtggctgaggtctcatcaggaagatggggatagacagttggagggcagggtggtgagaagcaccgactccaggaaacacaggaagcgctgtcagagttcagaggatttttaatgccgatagagtaagagagcgtagaagttatggctctcacagagcataaacgctggaggtaggtgcacgtgtgtcctcagaggaccagtgtgggggcagtcattaggagaatcctgtaaacactgctccttcctcaaaccagggcagttacgccccggtgagaccacctttgtctccagtcccaccctgtctgaggctggccttcatagagggtggatgcagacatggatcgcctggcatcagggcaaagttcaaatgaaattctgatgaaggtaaaagccccaggccaccccgggtgagcggacttcagccaccaactgggagccatgcgctgctcttggccctgctgatcccgaggtctgctcacacctaccttccccttgctgtgtacagcagagcaaaacccttttctctcccctcatttcaaaacatggg

SEQ ID NO: 36954 - DNA, 1051 bp, Homo sapiens
tcttccctccaagtcactggagccctcatccattagggacacagaaccagaaaggaggaatgtttcctctgcagctttagtttgaccccacctaggctgagtctttggtctgttagttcatgtgctggttatgactttttgaaaatcttggaccacatttatgactcttaagcaatttaggtacacatagtccacaagagccagcctcccctggtctacctgaaatgtgtgtaaagcatttaatctaggaaagccctaagctgatgggccctggggtgctggcctattgctcctgggtggcccctggtaaatcatgaacctttggtgcctgtttcctcatctgtagtgcaagatttgtgcatgtgtctctttctcttatgggacttttatagagaaaagaaaatgagggaaaaatatgaatatctgtaagctttgaaaagaactaaaagcacagcgtgaattaacagcagtcccatattcatggggtttctgttatagaggtggaaccttgctagactctggagaaaataagaaaggataagttagtcctcaagaaccttccagagatggattaatcctcactgaggccatctgcattcctttggtggcagagtagttcctgggtaggtatttataaatcatttcaggcttaaacaggattagaggtgctgtgcttttaaattgttttaatttagagtttttaccagaaattattgtataacattttgagggtagcacaaggaaatggattgcctttgctgtatggtgccttgaacacatcccacaggtttacttttttgctatatgtttttttctgcacccaaacaatgcaccgtttgtattttggcatttacttcaataatcttccaaatagacacccgcaagtacacttggatagcagacagtcccctaagatacagagcaagatgtgcgactctccttctgtatccttaggagctctgtcaacatagaaggtgtcacaactcagcattgtaatgaagatgaagataatggcatataataacatgtagggccaactcagaccagagat

SEQ ID NO: 36955 - DNA, 1092 bp, Homo sapiens
atgtttgaagagtataggtcatttattttgtaggattttcctcagttcaatttttctgatgtgccttcatgattggattcaggtcctgctttcagggcaggggctgcacagaagcgaggtcttgtccttcttgatgcattggatcaggaggtacacgacactccccatctcatggccggtgatgccagctttgattgttcagttaagatggcatctgccaagtttctccactatcaatttactattttaccctttgtaattcatacatatctcatgggggaatactttgcaactctatgagtattgtgtttctcatcaaacttttgcctgctactttcagcattcactgatgatgcttgcctgaaacagtaactactgcagatatactgtatttgtttcccagggctgccttaacaaaatgccacaacctgggtggctttaaataacacatttgtcatctcagttctggaggccagaatgctgaaagcaaggtgttggcaggttggttgcttctgagagctgtgggaagcatgtgttccatgctgctcccctagcttctggtggtttctgcaatctctggcatcccctggcttgtagatgcatcactccagtcctgtgcctttacatggtttctccctgtgtctctacatcatctttcctctttgtgtgtctttgtgtccaaatttccccttttcataaggacactggtcatattggattaggacccatcctgatgacttcattttaactggattaataaagatcccacttccaaataagctcacattctgaagtactgggagttaggatttcagcatgccttttttggaggacacaagtcaacccgtagcagatgccaaatggtgatctatagcaatttttaatggttctctcagtcaagttcattgttaagataataaatagaaaatttaaaacttcagttaaaagatggcccagcaatgtgccagcttaaatctcaggcatgtatgcctgggaatttttatctttagccatgatctgcatgtttgaactttaagccgtttggtgaaccaatttcaacattacccttaagttctaatgtcaccttttata

SEQ ID NO: 36956 - DNA, 1067 bp, Homo sapiens
cacccctggggaaaggtggaagagggaaacctgcccagtggccctaggagggccaggaagccggactgtgtcaggctgggctccacatggggacagaggtctccttgagaatttgtaaacaaaggcttgcttttacatgagttcagttcgtatttgtactgtttggcaatttgtcttctgagaaatctgccttgaaaaggattttcagacacctatactcctggcctgacaaaaacacgtgtagcatctccccagagggttgctgtctgcatcacaggccccatgagatccttactggtaaagcccagtgaagacagattcctcctccaagtctcccaggacaagagcaagaatccacaggcaaaaacagacagcaggattagactccagaggacttcagaaaatcaaataattggatatacaactaaaatgattaaatatataaaggaattgaacgcacaagaaaagaataagaccccatcaaatacctggtgaatttgagacaaaagctgtaggaatgaaaaatagagtgattaaaaatcaattgatgggatatagagcagatttttgagaggattactgaacaggattctgtttccttctgccccaagtagaatgtcctctccgttgagaagaggtgcgggcagcagggagattttagttctaaacccaagccagaggaaatagtcgtcattttccttgctctcttttgcccttttctaacagccagctgctggggcagtgctggtcctgggagcaaacgtcaccatctccctccagtcgggctggccaagtctcccagggaaattgaagaccagtacacctgaagcatgtaagccccaggctgcctctcccattctccttcccgttcatcagcagcataaagaaagttggcctgggttttcgtgactcggcagggtccactcagtttaaaatgccagaggacatggtgtggcaagttgactgtatcgtgatgttagccgtcttgtggcagagactcagagacttgaagggtaaagctcagtaaggcccacatccagagcctggggggccaatgactacaagga

SEQ ID NO: 36957 - DNA, 1024 bp, Homo sapiens
gcagtggtgaagaccctaaaccccaaggctgaggtggcccgaacggaggtggcgctagcggtcaacatcagcataatgcagggtctgcaggacgtgctgggaaccaacctggggcccaagggcacaatgaatatgcttgtttctggcgctggagacatcaagcttactaaaaagatggcaatgtgctgtttcacgaaatgcaaattcaacacacaacagcttccttaatagcaaaggtagcaacagcccaggatgatataactggtgatagtacaacttccaatgtcctaatcattgaaaagctactgaaacaggaggatctctacatttctgaaggccttcatctcagaataattactgaaggatttgaagctgcaaaggaaaaggcccttcggtttttggaagaagtcaaaataaggaaagagatggacagggaaacacttataaatgtggccagaacatctcttcatactaaagttcatgctgaacttgcagatgccttaacagaggctgtagtggactccattttggccattaaaagacaagatgaacctattgatctcttcatggttgtgatcatggagatgaaacataaatctgaaactgatacaagcttaatcagagggcttgttttggaccacggagcatggcatcctgatatgaagaaaagggtggaggatgtatacattctcaagtgtaacgtgtcattagaatatgaaaaaacataagtgaattctggctttttttacaagactgcagaaatgagagaaaaactcataaaagctgaaagaaaattcattgaagataagagttaaaaaatagaactgaaaaggaaagtctgtggtgattcagataaaggatttgttgctattaatcaagagggaattgaccccctttccttagatgctcttgcaaaagaacacatagtcactcttcacagagctaaaaggagaaatatcgaggggctgactcttgcttctggtgaggtagccctgaattcttttgaaaacctaaatcctgactg

SEQ ID NO: 36958 - DNA, 1045 bp, Homo sapiens
tattttgggatataattcaatactgtacttattttgttgcccaaattgtttttgctttggccattcggaagctccttctgcctggcttctgtgtccctttgccgtgttcccattcttttattttggggcacagccttccttcttgtaccatagatgctccaagcgaatcatcttgcatattctctgccttggtcctagaatgagtcatttctctaaggaatcctggttccttttattgaagaataaatagaaaaaccaagatctgggcactgggtggactattcgattttgaaggctgtgtcctgacagaatattgacagcaaactcgacagcagaaaacccacctctgcagctgctcagaggaacgactcttgttcattggtgggagattattaggggtgtgtgctggtttggaaaagtcaatgtcattaggctctgcaaatatttgaggaacacagcacatcatggtcaactgggaggcatgttctgagttgagactactctgggtgaactcattaaaatgacactgttcctgatactctttgtcaagggaacttctaaagcgtcctgttttttcaaatggacttgttaaatgtagtctgattattatgctagggctcagtactttgcctaggggaagctagggaaacctcacctgcagataggtattgtagcttttaatacataccatacccactttttttttttttttttttttttttgagacggagtctcgctctgtcgcccaggctggagtgcagtggcatgatctcagctcactgcaagctccgcctccccgattcacgccattctcctgcctcagcctcacgagtagctgggactacaggcgcctgccaccatgcctggctaattttttgtatttttagtagagatggggtttcaccgtgttagccaggatggtctcgatctcctgaccttgtgatcctcccaccttggcctcccaaagtgctggattacaggcatgagccaccacgcccagctcaccatatccacttataagttaaatgtattcctttctaagtta

SEQ ID NO: 36959 - DNA, 1033 bp, Homo sapiens
acctccctattcctgcatgccaggccaagtggtgaaagccagcccatcgggctgctaagtttaccaaatttgccaatttacccaaaacatgactttttaaaactgtttctgaagtccatagccaatcatattttaataaacagaagtttttaacacctttggatgcttttagttgactagtttccattttgatttcacaatggcattttcagaacatctgctgtttatcttctcaagctccctgctctgctgtactttggggagttagtgccaagagagggggaccctctgcttcaggagacatagagaagaatccatgcaaagcacaggcttggcctctgctaagcctccccaaaccattagcacacaatggaaatgggatctctccagatggatcttggcaagcagagccagccaggcacttttgtgcagtgcacgaactacacgactatacccagcacccctgggatgccacattcagagaaagtcagagaagggggagaacaaggatcagggaaaggagagtgactgaatgtcagagaggtggagtagcgtgaaggtcagaaggagaagggagagagactggtcagaaaaagaggggaggtgacgactcagagaaaactggagcagaatggcagaggtggggttacagacagggaaaatggaggccccagagaccctggggccctcccagcccttgggaccctgccaatccttcctgtaaaaaatggctataaactttagaagagtttaaaagagacaagatcttaaaactcagaaaatttgacaatttgttggttggccaaattggttatccaccggttgatttttggcgagctgacctgtttcaagatggcaggtgtggatgggactctgtccagggctggccccacacacccacattctgatgacgcagaggtcatgggactgtgccagggcccccagactacatccactggtccccaaataactggtttcactggcttcaacacatggaggctgcttgatgtggtgggggtagggaggtgttgct

SEQ ID NO: 36960 - DNA, 1059 bp, Homo sapiens
ttggtgattagaacccagagcattcattggctgtgacccactctgggtagagggatgagattgtagatgatttttttctatttgcttatctaatttttctatgacgaacaaatactacatttaaaattgtttttaagcttttgaaacaaaaagaatataaagatatccttttctaaatatttccacatatgcctttcgacactttgcagcttatagtgatttaggatactacattatcaataaactgcaccatgtggacgagtcggtggggagcaagacgagaagggccttcctgtacctcgccgcctttcctttcatggacgcaatggtgagtagagaagatcgttggctttctttctttttctttaactggtggtaaaatatacataatataaaatctaccattttagctatttttgtgtgtacagcttaatggcaggaagtacattcacattattgtgtaaccaatcttcagaactcttcatcttgcaaaactgagattctatcctaattcaacagtaaccctcctcggccccctccccagctctgggcaacctccattctactttgtaactctacaaattggactacttgagatacctcaaaagagtggaatcatacagcgtttgtacttttgtaattggcgtatttcactgagcgtgtcttcagagtttaacaatgtagtagcaggtgtcagaatttccttcctttttaaggctgagtcactttccagtgaatgtctaggccacatcttgtgtatccgttcgtcagctgatggacacttgcgttgcttccacctttgggttcttgtgactaacgctgctatgaacgtgagtgtgcaaatatctgagtccttgtttttggttctttggggtatatacccagaagtggaattgctggatcatacagaaatttgatttttgattttttgaggaattagcagactgatcttcgtagcagctataccaccatcagagtactcaggttccaattgtctgttgacttttaaccagtccatcttgtcaatttatttaattttgccacaagttctggtaggtg

SEQ ID NO: 36961 - DNA, 1049 bp, Homo sapiens
gacctaggtgatatttatgccccctatcccccacattggacaagtgttgcctagtatagattatagatgggtgatattaaatgtctgtgtcccagcccatatgcaggaaactgtcctcttcacagctgtgttagagtgtgcagtacctgatgcatacaagtcactcaatgtgtatttatcgaagtgatttaaatatggcctatcagccatgtaaacacacataccttggaaatgataccctagaagcacaggggtgaaattacctgctcccgtgaaaagcctcgcaagctggtcacagtgggtcaacaacagtacctgtgagacttttaaacattgaggacttgggaatttgaattagaataatggttctcagatttgcctattggatgtggaaaaatgtgtgtagacttatttcggttcatattaacattttatggtttgcaacagctcctggatgaacaggtttgagaaccactgattcagaaagagcccatggccctggctggctgaagtcagtggacccgtggatctgaagggcactttctgtgtcccttgtttaggagggtcaaagctgtccacctgtaaacaggtcaagtcagtgtcttcttgctgttgcaatatcataaaatttgtttacatctgttcaaaaaccttgtttaattttttttgtaatgttctgctcttcataaggaatacaagctgttttagaacagtcttggtaaggcggtttatagaagctgaaggttgctaaatattgctaaggcagctagcctggtaattatggactctatgcaaatcactttaaacaaattacccccccacccccccaatagctctagctggaaatagctcaggggcatgggagggagggagtcgccccaacagagtgggtgaaaacagttgttgggattttatactcacagctcccagggtagaattaacctctatagctataatcagactcctctatcatgtaggggaagagtagatggaagttagaaaatctgggaggaaaagcttcttcccttggcctccaaatatctcccgga

SEQ ID NO: 36962 - DNA, 1050 bp, Homo sapiens
acttagtttgtctaatctttttgtggtttgcatagaaggtggattgagtgtttttcaaagttgggacttcctgtttttccctgatctgtgtttttctcttttaattcttcatttttggcatcagccaagaacacattcatatgggactagtcttaagttccaagtgtgtttgaggggtttaaaaattaggtgatatagtagtttatgtcgtgttttatctgtttagtgtacttttatcttcatatggaagtaagtaattatggagaaaggtttttgttctgtacttttagaatgatgtgaggagggaggcggagtagaaatcttaatgcattttaacttgtgaagaagcatcatattctatattggggaattggaaggtatcataagacttactttaaagcagactaaactgtattgtcacagctattaattttacacaaaatgaaaatgtgagctgggcctggtggctcacgcctgtaatcccagcactttgggaggccgaggcgggtagatcgcttgagcccaggagttcgagaccagcctggacaacatggtgaaacccaatctctactaaaaatacaaaattagccatgcatggtgacacgcaactataatcccaactactggggagactgaggctggataatcacttgagcccgggaatcggaggttgcagtgagctgagatcgcaccactgcactccagccaggcaacagagtgagatcctgtcgagagagagagagagagaatgtgtactgctcaaagtccaaaattatcattgttttattcttaaagtacagttttaaaaatctgcactttgccatcttgaaagttaacaaacaattttaggagattcccttttattctcaataaaatagaaagaaatatttactgtggtttattccttagtgttaaagagaggttaccaagccaaacactgaatactttagaaaatttctagatagacacagcttagaaatggagcttagcttttttttttttttttatcaccaccattctgagagcacaacatgaatttaggatagttga

SEQ ID NO: 36963 - DNA, 1062 bp, Homo sapiens
cgaactcctgacctcaggtgatccacccgccttggcctcccaaaatgctgggattacaggcatcagcaaccgcgccctgccaaagaaagatttaaatgtggaaatgacttctcatgcgtaagaggctgtgaacttgaaagtcatttgtgagttttgatctccagtttgcttgaaaatactcactttttctctctcagtctctcaattcctgaattatttctagaaggatcacccactcacacaccatgctatgattgccttcttgctatacaatgttgtaaattgttcatttccactgcaaattgttcattttataaacaggatctctcctttttaaaagttctttttattttaaaattgttgttgttattcctgatattctgagagatagagacactgatatttaagtgaatcacagttcaaagcagttatgactaataaaataaatgaactaaacttattttcttgtaatataggtataaaatagtatatattaggctttctgactactcatggaactgttacaagtaaacactgaagttcacacttttcccattgcaacaaatatagtaaatgtcagaagtgtagttgaatgtttggttttatttagtgttataaaattacataatagtgtattttatattaccaagtccagataaccttaaattaattacagtattttttttttttttgagacggagtctggctctgtcgcccaggctgaagtgcagtggcgtgatctcggctcactgcaagctccgccttccgggttcacgccattctcctgcctcagcctcccgagtagctgggactacaggcgtgcaccactgcgcccagctaattttttctatttttagtagagacagggtttcaccgtggtctcgatctcctgacctcgtggtccacccgcctcggcctcccaaagtgctgggattacaggcgtgagccaccacgctcagccaattacggtattagtaatgtttaatggcaggttcttagagcataagaaaaggacaaatgtggttttcgtgtatttctgggatttgaatatctgtggtcgtg

SEQ ID NO: 36964 - DNA, 1060 bp, Homo sapiens
ttttgtcagaagacaaagagcatgactagttaagcagaaagacaaacaggaaaagtgattagtagccagcaggagcatctgccagaatctcaccagccagaaacgcatagtaacccagcatcagagtttctgggtgggaaacaggaccctcagtctcttagggaagagtgtaggattcatgtggcttttcaccactgaacgcactgagatgtctggaaagatgaagggcctgattacaaaaatggtttcaagtcagtagtgctgaactcgggaagcatttcaacctgtctgtgggcacggactgcgggtttttcaaagggctccttttacaatggaacagactcttccaagaggcaggttattcctgtgactaaccagagggacagcagtcatctcgctgagcaacactcatctctttcagtctcaacagaattaaaaatatatgtggtttccagttaagcctggtcataaaatatacatatgtgaagcactttaaaatttaacgagctctgcactaatccagaattattttttaaaaaacttgtaaagattacatcaccataaaaatgtaaatgagttgtactagtatcagaagtaatggttaatcttgcttgattaaagtaatgttactgaagtaaataaccttttctttcctactttggctgttttacttgagaaccgtgcttttgtcttaatgatggtactaaaacaagcagttatgtagccctgacagtgttcctggtgactgctcagagtgctttataagtctattaattcacgaatcttctaaataatcctatgaagcagccactgttattatcttctttctccagatgaggaaactaaggcacatgtccaagatgacacaatagatatttatttatttattttgagacacagtctcattctgtcacccaggctggagtgtagtggcgcgatctctgctcactgcaacctcagcctcctgggttcaagtgattctcctgcctcagcctcctgagtagctgggattacaggtgtgtaccaccacacctggctaatttttacgtattttttagag

SEQ ID NO: 36965 - DNA, 1047 bp, Homo sapiens
cagccctgggaccttgctccttgtctttgctgcaacatgcaggttccggcgatttccgagtggaacctttctcccacagtcaggactcaatatagtcaggatgcactagcacagctgtttctcagagccacatcctcagcctccacagcaaaggagactttatttccaaaccagtaacagcccctttttcccccttagtaatctctgtgtttttactggctacataagcattcactttgaggtgccaacttttctctctttcttttccccaatatggatgaaaataataaatgaaaaattttgctctcattaaccagccactgtgtctttagtagtttactggctcccttcctggcctaagagcaacgctttttgcctttgatgcagcacccttcatcccataaggcaacctgtaagatggtcattttaaaatcaaaagctcgagtttcattgtttttttttttttttttgaggcagtcttacactgtttcccaggctggaccgcagtggcatgatcttggctcactgcaacatccgtctcctgagttcaagcaattctcctgcctcagcctcccgagtagctgggactacaggtgcataacaccatgcctggctagtttttttttgtgtgcgtgtgtgtgtttttagtagagacgcagttttaccatgttggccaggctgggcttgaactcctgatcccaagtaatccatccgcctcagcctcccaaaatattgggattacaggcgtgagccaccacccttggcccttgaggttcattcttaaccatgctcttccctgggtgtcaaatgtatgtgcactctactaaattaattttgttgggtgatgtaaaatagatctctagtagaaacagcccaagagacagtactcagttgcttctctgggactttgtcacttgctcttgaaccattccattgcttatatatgaaacaattcagaaaaacatcctttgaaaagctgagggactaaaaatcacgatattaattactaaataagtcttgtcatccatttcttatcctagtccaaac

SEQ ID NO: 36966 - DNA, 1035 bp, Homo sapiens
tgcaatataaagtttcaatgaacatctttgtgtattaagtaggtaatgtgttttctctgactgccttgggctttatgcctggcataatttggtgcctatttcagtgtccaattcatacatagaaaatgaggtcatgcctttcttacagtccatatttagtcaaggacactgtgacctccttagtccacttggtacttacttccctgctgtgtttcccagttttctttagatgtccatctgcatttaaaatacctctcttaggatgacttaggtaagcgggttgtttctagagccacagaggtataatcctgaggttggtttgtttactcgtttactcattcatttatttattgaggtggtttgatgaccagcctagatactaatctatctacatacttccaagcatatccatcatacagaaacaatatttaaatctcttcctagtaatagatcaaattctttaaaagcagtttttattttgttttgttttgagacaagtctcactgtgtggcccaggctggagaacaatggtgcaaacacagcttactgcagcctcaaattccggggctaaagccatcctccagcctcagcctctgagtagctgggattccaggcatatggaaccatgcctgcctaatttttttatttttgtagagattgggtcttgtgatgttgcccaagctggtctcgaactcctgggcttaagcaatcctcccatctcagcctcccaaactgttgggattacaggcacgagccaccacatccagcctaaaaacagtttttaaagggtacagtgtgataccgtttatgggaaccactttttagatgagacaagcccagttgtaaattaatggtgaataatttggttttcatatttggtttgggacaatggagcaggttatgttgggtgggaggaggagagagcatgggtggagaaccattcctttactgtcttgtgtgagtaaataaacctctttaagctcctgatatagcataccagagtgacttgggtggtgtctacattaaaaaaagaaa

SEQ ID NO: 36967 - DNA, 1033 bp, Homo sapiens
gcccggccggcgagccagggcaccccggggtctccaggcggcccaccgccctcaccccccaccggcgtccccaagcccccagaccgtccccgccgcgccctcagcgccgccgcccccgggccggccgaggctccgcggcgagtcccgcccagcgccccggaggcgccagccccacggcccgagcgtgcgcagcgccccccgcggccgcgccaagcgcaggcgacggcacaggaaaggaggccgcggcgcgcccggcccggccccctccccagcccgcccccggggccgctggcggtgtccgcgcctccgcgcccgcccctgatttcctccgggcggcggcggcggcggcggcgcctcgtgcgcgcggttatttatttccgggccccagagcgcttataatggagccgctgtcagcagaaccttctgccgccgccgccgccgccgccgtccctcctcttttttttcccggcagatctttgttgtgtgggagggcagcagggatggacttgagcttgcggatcccctgctagagcagccgcgctcggagaaggcgccgcagccgcgaggaggagccgccgccgccgcgcccgaggccccgccgcccgcggcctctgtcggcccgcgccccgctcgccccgtcgccccgtcgcccctcgcctccccgcagagtcccctcgcggcagcagatgtgtgtggggtcagcccacggcggggactatggtgaaattcccggcgctcacgcactactggcccctgatccggttcttggtgcccctgggcatcaccaacatagccatcgacttcggggagcaggtaagccccggccccgcgccccacgcccgctcgccctgccttggccttacacgcccggacacgggggcggaggggagtcacctgctccgagtccctctttatcctgaaacatttggtcgggtgtgcagcttgtcaagggtgacttttccagcaccccattccctccctccctcccctcaattattcagcagacttttccagccctctctggaaaatgtta

SEQ ID NO: 36968 - DNA, 1008 bp, Homo sapiens
tggggcttcctctagtggagaaacagtccaaaccaaaaagagccggtccatcggatggctggtgtaaaaatggacaatgtcttttccagtggcctggccatttaaataaaggcacatattggggcatggagttcttgagtttgggactccttgattttggtttaaaacgtgtgcaaggaggtccccttggtccctgtagctgttgcggctctaaagacatgtgtccatttgccttttgtaaggagtttccccactgtggctgctgtaactctatgttgcctttgctaagggtcacaacatttatttagaaaagcacaggttctggatccaaagttcttttacatgaaattggctggagttctagatggttgagttctagaatcctcagagccagatgagcccatgattccctgtcttctggtaatcttacctagctactgaacccagtccagtttctaatttgacccagtcagacacctgaggccttcctacagacccagccctatttctgtcatgacttctgaaccaatctgctccaaacaaagtgctcaaatatactcagagagcccaaaatgcaaattcacagagctcagaatccaagagagaactcaaccatgaccccagttgctgcgagagatcaatgggcacagtgggccctggcagttaccttcgcttggtctctcggtgtttctgggaatcactagaggtctactttgaatcccgtttctggcacctggagcagcctgatgtttctgctgacatctcctcaatcagaacaatcacagaaggcctcatttggctccaacaagtctgagaaatgtagttttaattttggaaggccatgtgtactaaagttgggaagggatatgaagagacaacctgtcttcacgctggcatctgcatttggccattcattgctaatattttcctatgacatccaagagggggaaggtctctcctagtgtctcagatagaaagttccagagctttaatcaaagcagctgtaga

SEQ ID NO: 36969 - DNA, 1547 bp, Homo sapiens
ccttccgcctctaaaactgtgattctgtgactatactggagagctgagaattcctgtatcaagtgggctttctttgcctgatattcactcccaaagccatggaccctgcatgcagggtgagactggtcccaggcagggatgccactgttcgcctgtgggtgaagagcactgcgtctgagaatggtgctgtgctgcatgctgcatgctgcatgctgcatggtgctgaccctctttctcctgccaccccaacatccatacctcacttcatcctttgctttgttttgggtggggacagagtcttgctctgtccccaggctggagtgcagtggtacgaactaggcttactgcaacttctgcctcctggcttcaagcgattcttgtgcctcagtctcccaagtagctgggattacaggggcgcaccatcacacccagctaatttttgtatttttagtagagacaaggtttcgccatgttggccagactggcatcctttcctttaaagaacttaacacctttgttggaattgtggccaaatccacacaccatacacacactcccagtgccctggcttttagctgctgcagatgtttgcagctggtagctgtgctgagcctccgcggaatttccaggcagtggagaggagttgttctcagggtcggctctgagcctcacgcctgcggtttcaacccagttgtctttctaaacaggtacctggcctggggcaagttaccctcaaagcctcatttctccacttttaatacatgaaaaattcaatttaattgggaggtcgcagtgtggattaaacatacagaaacctattatgtgcttggtgcagggcctggcccttggtcagggttccaagaacagagcagctctttgatcgcatagctgatgtacacagaccctcgtcttggtcagggaggaggcaggcagggtgggattggcatggactggtcaggggaagagtagagaagggaagtcagctgacactggaccttttgtgtgaactctctgacgatgggagctcttgacatcctgggactatgttgacatgaggcatggtgaagggccacccttggccttggagtatgtcttccccactcagagaactcatctctggcagctcccaagcaaattcatgttggaaaaacatccttttaatctgccagaatgctcctgcaagacaagagtctgagatctcaggcatccgttgactttggcgccattgacaccttgcactgattttcagtcttttggcaaaaaatgttcccactccatgataatttgtgatttttccatttgaaacaatctgacacatctgtggagttagtatttcctgttggatgggatgagggaataaatgtcagcatgttgagaaaatgaaatgggagaggcatgtttgtcctgtgtcctggtgtctcttggtggctccttgggcgaggagttagagtgtgttgacgtgttggcatgtcagggtccaggggtgaaccaggctggcgattcctgcttggtgaggtgatctgcttttgctgactaatggtcctgtc

SEQ ID NO: 36970 - DNA, 1033 bp, Homo sapiens
tttttaagagacagagtctcgctctgtcactcaggctggagtgcagtggtgcaatcgtagttcactgcagcctcaaactcctgggctcaggcagttttcctgcctcagttccctgagaagatgagactacagtcatgcaccatcacactcagctccaactcacttttatttttttcattaattttttttcttatttctttttaaaatttttgttttttctttctttttttaaattttgttttttctcaaactcacttttataacaagcccactgtcatggtaactaacccactcctgctataaaaacaatccattcatgaaggcagacccctcatgtcttaatcacatcttaatatcatcatgatggcaattaaatttcaacatgagttttgcaggggactttcaaaccatagcaattagattaaattaaaaaagcatccctcaaaagaatcacttaaattcagaatatgctggacatacgcgttataagtaagcctatctgtgcttgggtaaatctttggctgaagaggcctaggcgagcctgggaactaagcaccagttttaaagtctgtaccctgccaaaatcaaaacccaaatgggccttttattccctttttcaaaaataataattgagcacaattctgcagtcatatattgcacaatagagagtcaaagcccttttctttctctctccgaagaaagaacagatccattcattgactgacagcaagctcttagccagagctgctcagatttggtctgaaagtttctccaagttctacatgcagtttccaatctgtggttaattttttaaatttgtgctttgaaaattagatccactgaagacaaatatgaaacaagagactagaagtaggttttaaagctgttttggaataaaaggatgtggagaactgtagttattatttcttaccatcagtggtgtacctacataaaaaattatgagttttaaaaaaaagtctcatgctgaacaattaagggccactcttttctctcaagagtccatctaactcaa

SEQ ID NO: 36971 - DNA, 1024 bp, Homo sapiens
aatgtaatggtaaacccagggtctaatttctgatggcctcatcaacaatcaacattagataattttagtcatatgccattcacatgtcaatatttgtacctggaaaattcctttgtgaaaatgtggttctcagtgggtatgttctgagaaggacccatgcttgacctatttctttaataaacactaactctacaatctgtgaacaggatttacatagagctgtctgccaacagaaccaaattgacatctttatggttcattcctagcactgaattgaaacctgatccatagtattataatagtttttcctttctgcatgaaactgtagcatttgattgaataaagtcctcttaacgaatgagaaagtatgcatgtgaccttttctgtatgcacagcatcatttaaaaacataaaactgttttcagtttggccaggtttttccaagtatgttataaattagaaagaaataactttacatacaacaaatcattcaaaatttcttcaatagttggtacattataactcagatgaacaagttattctcatcatgaatcttgttttattgtttggtgccaatttaaagcaattttttccttggcatctaaagcttgaaacctgaaaattatggctgagagctatcggattttctgatagatattccaggaatccagatgcccctagcggtgtgctctctgcaggaagtggatggggcttcccgagcttgcagctaggccattgcatctgatggccttaccttgagctgattcttgagaggcagagcacagattcaacagagtcagtctttccagagccagcagggattagcaaagggggtcctgaggttttttttgcccctagcttggtcagattgtgggcgtcctcagcctgtctatctctcaaactcttaggagaagcagttgtgtggccctgattcttgcaatgaaatgctcttttgttttgtgggcttccagaaaatggccagtgaaaatgctctagttggttgtatgctttcaagtaggcggag

SEQ ID NO: 36972 - DNA, 1091 bp, Homo sapiens
gagagggtgacattggatataagaagagaaacgtgatccctggtgcttctcgtggaggtggcgggcagcctgggaggggtgggctggccccagggaagagctggcataggctctggtaggcatttgtcttgccctgtgctctgatctgtgtgctgcgcataggcaggttaaggttctctttctattttatagaaacttgcttgtgggaatgtcaagataaagagaaccttaaattactcttttgagatagggaaacagtcatgtgtttggaatggattaaaatgtgttttgggttttgctgtctatctgcttcatgctccaagtgctttttctacattgtcatcttttagggaaatcatttaaataaaaaactgtaagagaacgtctcagctggaaataggatctgatttatgcagtataatgttggaaatcagtaaaagacatctatgaagacaaggaatttcatacatagtttgttcagtatgagtttttagaattattttaaattgcaattatgcacaggcaataattttctttactgatagagttttatcagtagtaaagaggaggataaagaagagaatgaaaagcaaactgagaatttaaaatctgattcctaagcagaaaatacatttctgacccagcagttgtataaatacagttgtataaatagagcagacaagaaatactgcttaagttttagatttcttttaaaaaggaataacaaaaaagtttgtattcatataataaaataatttgtgtaattggaaacagaaatttaagatatattgtcaatggatatgatgacataatttctacaatcatgacaaaatatgtacagtgactcacttaagaaagtttcctcttttcttttccagtatcttaattaacccaacaagtaaggtttgaaatacatggaaaaaaaagatttatatttttaggcctaattgatagaaataaagattaattttcaaaaaacttttcaataaaaacaatttctatctagtaatataaatacattttacccacacaggtcatcttctaagaccaaatcttcctaaattaattggttaatttaggaattaataata

SEQ ID NO: 36973 - DNA, 1030 bp, Homo sapiens
acccagtctcaggtatttctttagggcaatgcaagaatggcctagtacctagctcagctggagtgggctgcagaacttgactcacccgccctgcctcgaagtccccttccctgctgtgaccaggtcaggtagaaggtggaataggagtgggcaggtattcaatttatacactaggtggagctaaggagcacattgcactgccctagggtgcccctgacttgatttacccatggcttttctcataattccagtgcaagggtgcacagtagagcatgctcagtttctctttgccttgacctcagatggccttggttccatcctagccatgcccttggtttctcctactctttaggcacaagaacgcaaacagaatacaaactccctgctgctcctccccactgtcttatctgtttgtccaccatgccttgctgacctgggcacattccctgaattcactggattatcgtgatgtgcttctcctagagtaaggttattcccctcctccactgcagcagactctgattgttactacccaccatttccctgtgattgatatcttccagaatttctcatctctttagagaaaggagtctattacctaccaccctcttttcctctcctctgatgcttataattcattttcttggccatcacaactaaagaagtacttccctagggaaaaaaaaaaggcttctgagttccatttaatcctggatttgcaattaaattgttattgctttatctcactccattttcggatgatcgtcctttccaaattatttaaaactatatattcatgtttaagaaatgtaccccccagccaacacacatacatgttttaaacagctctgaaaatgggatacatattacaattgagagggtctttatttttttggcagctttttttccttaatagtgcacaatttaatttcacacagcatcttcagttactaattttgcagaatctgcataaaaggccaggagaaattaaagccaactttagttgaaactctgaattttgtgatattat

SEQ ID NO: 36974 - DNA, 1053 bp, Homo sapiens
agtcaagaagacccaagtttatattctgactccatgatttggacaaattgctccaacctaatctatttatggatatataatttccatgtatctaaattcatcatgttgtttaggaacattacatgcgatggagatgtgaaaatacccagctaaggtgggctttgattacacatcaactttttttctgtagtgggcatgcctaggacggttccttgaattcattactgtgtgtcttgcttctctccccatcactcacccaagagctcttcttctcagaagccttttcagcacctatcactatgccttattcccagttgcaaaggactgagtgtctccttttgtccccgcattcttatgttgaaaccccatcaccaatgtgatgagaggaagcctttgggagctgattaggtccggaggatggagccctcatgaatgggattagtgccctttaaaagagaccccagagagatcttttgccccttctaccacgtgagaacacaatgagaagttgccatctctgaatcagaaagcaggtcctcaccagacactgaatctgctaaggccttagtgttggacttcccagccaccagaactatgagaaatagatttctgttgtttataagccaccctgcctgtggtattttgttacagcagctggaatggattaagacaccagtatgtgcatgtgtttatgtgtgaaggaagaggccccaaagctcagtttaatatttggatctgttacaccgcattctctagaactagagtttatagaatcagataatatttgaatgggaaaggccctgagacaccttcgcagtccagtggtttgcaaatctgactgttagcatgtaggttcctgtacctctccttggagctctgacccacccagtccagagtgggacccaggaatctgcaatttctaaaaatgcttgtgaccagtcgaagtaaaaaaaatgccccaagtaattctgatgatgatgaggcagttttaggaagggcttatctagccagtgccttaatttaaagatgaaaataccgaggcagaggatatgg

SEQ ID NO: 36975 - DNA, 1094 bp, Homo sapiens
attcacagatgctcaagtccctgctatacagtggtataatatttgcatagaacctgcacacatctttccttaccctttaaatcatctccaggttacagatacctagcacaacataaatgctgcataaatagctgttataccgtgtgtgtctgtgttttaaacattgtttatttgagacagggtctcactctgtcaccaggctacagtgcagaggcacagtcacagctcattgcagcctcaacctcctgggctcaagcagtcctccacctcagcctcccaaagtgctaggatgacaggtgtgagccactgtgccccaccaaaaaaagttttttcaaatattttctatctgtggttggattcagaccacatgaacactgagggctgactgtagttttgaatgtctgttactgaggaggcaccagcataaagtattttatcacttcagacgctgacaatctagtatttttaatttttaaatcttttgaaagctaatacatataggtgatttgtaaaaaaaaaaaaaaaaaaaaaaaaaaaaaaaaaaaaaaacaactagaagtaaaatgttacttttttccagctgtagccctaattacccattttcctttcccagaaacagctatttttactgttttattgaatattctctcaaaaataatttaagctgtccaatcatttactcatacatacatatatatccccatcctcatttttaatagatggaaacaaactgttgtagcttacttttttctcagcatagtattttagctctaatcctacattaatacctatagaattgccttattctttttgatgattatatagtacctcagatagctctgtggaaaaacaggataaggccatctgtattagtccattctcacactgctagaaggacatgcctgagactgggtaatttataaagaaaaagaagttgaatggactcagtctcacatgcctggggaggcctcacaatcatggtggacagcaaaggaggagaaaaggcacatcttatatggcagcaggcaagagagcttgcacaggggaactcccttttataaaaccattagctcttccgagacatactcactatg

SEQ ID NO: 36976 - DNA, 1032 bp, Homo sapiens
cccaggttcaagcgattcttctgcctcagcctcccaagtatctgggattacaggcacccccaccatgcctggctaattttttgtatttttagtaaaggcaggatttccccatgttggccaggctggtctcccaactcctgacctcaggtgatccacctgcctcggcctcccagagtgctgggattactggcatgagccactgcgcccggccaacagaatatatattgtatatataatacaataataattgtattataaggagaggattgtatgaagagctttcctaggagaatgatttgtgatggagttttacccagagcaggaataggtacggctgtgagtcacaaggtggtaggactctttatttgcttttttgcccaaatgtcatggaggacacagagcagagaacctggaaaaatgtgccattgggagaacgtgatgcaccattttaggccagaatgacgcatggaagcgtaaagtaaaaaattgcggagacaccaaaatgcatctgtgtggattgttaacaaaaaagcatgaaaatgtttgatactggttgttatagggaatcattcaaaatttcttatgcgtgtattaaatctgaaatggcaaaattaaaagccactttatcaagagaaggtcctggtattttcatatcttttcaaaaactaggaattctaatacaaagtgccaattacctgacacacttatttgataagcagaggatggacgtgtccattctcagacataggcaagcaaacagctacaatttatttagtcctgattccactgtgcttgtgctagtcaaactgagatgtagctgaaataattcagttctcattttaaactcagttttcagaataatgttcttaacgtcaatattttgagtgcatttaagtttttgaagccaagatactctgattgtaatcacatagcaggcacaaagagaggatttccacataaaggcaaaataacgttttagaaatttcttggcttcccttccttcctcctttccttcctctgctttctgtatct

SEQ ID NO: 36977 - DNA, 1102 bp, Homo sapiens
ccacctagtaattctcacaggggccagggaacctgggtctctgtattctgtctttgtttctggcttctctggctgggcttgaacttgacactgccccgtgatgtccctctggttttggcatcccgtaccagctgatgctgcccctgttgacctctgctccatactgatttgtcttctggttatttttgaggctcacagtgttaaccactgaagagttttaaactatatacaagccttgcaatatctccatgcaccttaatccactgaggactaagccccttccccataagcctccctccttcccagggataatccttcccttccaccacagcacctcttccatctaccaacagactgtaccggtatgtcacatacccttctctctctccaggcagagtccaacttttcagcactaagacagagtaattctgccaataatgacctacacggttaatatgtaaaaaccccacatttaataagaagcgtttgtttagaggctccacagggtcaggacttggatccatgtgcctgtagttctcttggtccttcctcaaggttacaaaatggttgccatagctacagccatcacctcctcacaaaacattgtcattccatttttttcaatgagcatctgttatgccattgtgatacatctctgagtaaagcaaataaagacctcaccctcttagagtaaacattaatcctggaaagaatcagggttgggaccaaagagactcccctcggtgcccctcttcctttaattaggaaggaaaatcttccccaggagcccctcagtagttttgcgtgacatcttcctcgtttctctgcttggttctttggccaggactgggcctggttgctgagcctcactccacaggaagctgagaaagtgagtggatgagttcgtagggttggctggggtacagttggagttcttttagcaaagcgttgctgttgggccacactagaaaataaaactttaggctgggtgcggtggctcacgcctgtgatcccagcactttgggaggccgaggcgggtggatcacaaggtcaggagatcgagaccattctggctaacacggtgaaaccccatctctactaa

SEQ ID NO: 36978 - DNA, 1030 bp, Homo sapiens
gcttgtcacccaggctggagtgcaatggcgcagtctcagcttactgcaacctccgcctcccgggttcaagtgattctcctgccttagcctcccaagtagctgggattacaggtgtgcgccaccacgtccggctaatttttgtatttttagtagagacggggtttcaccatgttggccaggctggtctcgaactcctgacctcagttgatccgcccaccttggcctcccaaagtgctgaatttataggcatgagccaccatgcccggcctgacatcgggagtcttggtagagaactctggtgttcactgtgtggctctcccagcaaaaaacaggtgtgttcgtttcttctcgtgatctgtcatttgaacgtgggcaccgttgactgaactcagcagcacattgccaggtagaatttgtgaaggacgtacgttcattttggggtaggcgtggggaatatcaaattcatggaagcaatatgatcagaaccctgaaagctgttcttttaagtcgaaagatgtggtagatgttaagtaaagcaaattggatcgctgaaggaagtggatgaaatgtgttaataaggacaggtgaggagaaagctgtcactcatgaatagccttctgtctgctgcttcttggatttaggagcatatactcctttgttttctttctttctttttttttttgcatcccttttatttttaacattgtgcttaatctgtggaagagtcttcaacttaaaactctttcatacgaattctcaggcactcctatcttagagaaagcgtcaggctgcccctgaagccagcctggcatgtcacacattggaccctttcctgctggtagcaggagggaggcacttaacaattaagcagttcgagtcacccagctcagaagcctggactccctgcctggacgtggatgctgcgatgccgagccgtcaactcgtggcgccccctgcccagagtccagcctggagagtcctgaagaggcccggggatgggaataacctggcctttgagtgctgcctgacc

SEQ ID NO: 36979 - DNA, 1064 bp, Homo sapiens
gtgagcaaatcccttccctcccctacctgcacccccaactcccacccctgtccgtctagctcatgcagactgagatatttttttttcccctctaagcattagccgccctgaattaacgttttcacgggcagccccctcaatgtgtgctttctggtagtgactttgttctaaagctcactttgctcccccagcggctacaaaggaccaattcccaaatccccatcagcctccctcccagctgtcactccctcagaagactctggagcaaagggccaggtttgagactggagaccagaggttaggggtggactgcggttctcaagatcagggtctgaaactcccctgggtcttctctcatctgtgcagatggtccactctgcttcattagctcttcagcacttcactctgttcttcttcatcctaggggtactttccttgtttttttctccggcaagttctttctatgaccctcaaaaatatgcgacaaagaatagtgacaataataaaaacaccaccgcattagatgctggggtttgcgttcacccctcctcaatataaagacgattcttactgattataaaatattagggaaatatgtgaaatgttttaaaaattagttacccataattttaccagccagagacaaccctctttatatttgttgtgtatatacttttcttccctttaaattgggatcatagtttaccttaattttgtaacctacttttttttttaacttaataaatcttgaaacattctttcgcattttttcatgactataaaattctgtcagtggctatactttcaagtcagatttctattactggattgtttatttgttgttgcaaataatagtactgtatttttcatgtgcacaaatactttctccttaaggtaaattcttgaaagtgtatttgccaatcagaatatgcacgttgttatgactttgatgtatatatagccaaactgccctcattaaagccaacagcaaacaagatatatatatccaatgtgtataacaatggatgtatagctttaatatataaagagccttcacaaatcaa

SEQ ID NO: 36980 - DNA, 1013 bp, Homo sapiens
ctcactgcaacctccgtctcccgggttcaagagattctcctgcttcagcatctcaagtagctggaattacaggcatgcaccaccatgcccggctaattttgtatttttagtagagatggggtttctccatgctctccaggctagtctcgaactcccgacctcaggcagtccacccgcttcagcctcccaaagtgctgggattacaggcgtgagccatcacgcctggcctttttatgtatgtatttttttttttttgagaccgagtcttgctctgtgtcacccaggctggagtgcagtggtgtgatctcagccactgcaatgtccgcttcctgttttcaagcaattctcctgcctcagcctcccgagtagctggaattagaggcacccaccaccatgcctggctaatttttgtgttgatgagatttcaccatgttggccaggctggtctcgaactcctgacctcaaatgatccacccacctaggcctcccgaagtgctgggattataggcgtgagccaccatgcgggcccttctggtttttgattgccactcatgtcccctgttgttttgactgtctcctgcacctggagcacccattgccagcatctttgacttttgaaaacatttcatatagaagacctgtaaaaagctgcctttttacctttggaggaaattttagtaaaggaagcatttaaagcaaccattcttctccctaaacaaaacaatcccagtaaagccctcagtggtcacttccatcctgtttaccaagttgtcatggaaactattcatcagagctctgtagagatcaggataaattgcagcgagtgaagctcagcaccagcaaagagtgctgttcttgttctctgggtggattttccaagatcacaactaaactgcttgattttgtcctgggactttttttaaaaaaaaattattgattggcttttaaaatcaagaatctttgggccctgaaatgtaattacacatttgttgatgcgtgcatgatggttagtt

SEQ ID NO: 36981 - DNA, 1070 bp, Homo sapiens
tgaacaccatacatgaagatggagagctgagagtgagcttgatgcggcctcatcgcagcgggagaaggctgtctttgctcatggaatcagatgctggctggggaatgtgcagaaattaggtgggatgggcagcctgaggttagaagccttaaaccattggttccccacctaggatgattctgccgtggggacattttgtaatatctaaaagacatttttggtctcatagctacggtcaagcgacgctactggcatttactgagtagaggccagggatgctgagaaacatcccggagtgcctggggcagccccagagtcatctggcctaagatgtcagtggtgccagaacatcccccccccacttaccatcagctcacctggaaagtttggggctgatggtacacagaccccactatatttgttaaagttttctttttgtttttttttttttttttgagacagagtcttgctctttcgcccaggctggagtgcagtggtgccatgtcggctcactgcaacctctgcctcctgggttcaagcaattcttctgcctcagtctcctgagtagctgggattacaggcatccgccaccacacccggctaatttttgtatttttttgtagatacagggtttcaccacgttggccaggctggtctcgaactgacctcgggagatccacccgccttggcctctcaaagtgttgggattacagacgtgagccactgcacctggcctttattttgttttagagacaggatcccgctctgtcacccaggctggagtgcaatggtgtgatcatagttctttgcagccttgacctcccaggtcagcctctagagcagctgggactacaggcacgcaccaccacgcctggctaatttttaaatttttgtcaagactgggatcttgctatgttgtccaggatgatcttgaactcttgacctcaagccatcctcccaccttgacctcccaaagtgctgggatttataggcatgagccactgcacccagtctgtttaaaggtttctgaaaggagaatttctctaagaaaaatttcagaagatttaaga

SEQ ID NO: 36982 - DNA, 1082 bp, Homo sapiens
aattcttgttaatctaagtaaaattatgttttcaagggatttgccacattagaaacttgggtcaaaaatcatgttttcctagagtttattgcctaggttttattagtggggatttactttctgtggaagggccttctgcacatcgaggtagtttgaccttgctgcttgtgaatacgctgtgttgtgttcagtttctaagtgttctgccacggaaagaagtcatggagttgtagactgaccgagggaaaatgttgacttgtggacatgagtacttgagcttaagctgtcttttctggatttttctctttctgtggattttcagtcatttttctggctctgaagcccaccctagggtgataacttgcattcaagggaacccatctttctaagttgtgggattcctgtttgctattttgaatggagaaatacataaaaagtggtcatgcacatttttctctcaacttctatgaaatgtgactatacctgtattataaagtgatatttaagaatcacttgttataaatttttgacgtgaaagtacagatactgcattatctgtcaagatcagttgacctgcagattttctccccttttccatctgcctgtttgcaagtctttataggaaactaaaggcaactggttatgtatgtttatttctcttgtccagctcaaatttatatagtttttaagccaaaattataatactttaaaaactcttgatcttttagtcatttttattctttaggagttacatttctttgccaatatgtttgtgattatgattaataataaattagcctttgccaggtgctgtggctcacacctgtaatcccagcactttgtgaggccgaggtgggcggatcacgaggtctggagtttgagacaagcctgacgaacatggtgaaatcccatctctactaaaaatacaaaaactagctgggcatggtggcacatgcctgtaatcccggctactcaggaggctgaggcaggagaattgcttgaacccgggaggcagaggttgcagtgagccaagatcgcgccactgcactccggcctgggtgacagagcgaaactctgtctca

SEQ ID NO: 36983 - DNA, 1030 bp, Homo sapiens
attatatgtaataagtatgtgtatattacatatatgtaaaatataattagtgtctgtgttttgtagtgtcttaagtattatgtatgattatttccagaaagcagaatatgtatctataaatacaagtaaaaattataatattctaaatcttcaaaatctggatttctcagtatacctagagtgacagttagtagaagctgtttgttttcacgttgagaaggacttgctgttggtgagtttgcaggggctggagagggagatagttgtgctggcttcagtgccctgtcttcttgcttagaagaaaatttgggaagggaactcgagttgcgctggcaggagccttgagtcagcagagtgagatgagacctcaggtgtgtgccgggagctggcaggtggcatgggccctactttatactacttggttggccgagagttgaccagcaggcaagttctgtttctgccccaccctggtcggcacttttctttggaagacgcaagtacctgtctggttgtagctcttctgaaaatgtgcctggattggcatcatggggatgtggcgtgctaggggaaggcagggcattctagctatttaacttctgggaatttctaggttgccccaaggctgctttgactctggcctaagtttctgtttcttaactttcttccatggtgttgatgacttaaaatgaagggtctacatgtttcttcactcttgaatgtccttgtgccttctgggtgcgaagcacttctaccctgctccctaggtggccccaggcctctgccagccctgtggggctcatgtggcagggttggccaccttaccatgagatggggccactaggactgtctcctctcctggtggatgtctgagcccaggaagcagctggggacagtggcttttcttcataagagacgggtgggtccctatcttggcctcgagcagtttctcaggactggcttgaccaactctagtggttcatgtggcagaaatgctactgctgaagttgtaatttttctctagaaaaatgaa

SEQ ID NO: 36984 - DNA, 1026 bp, Homo sapiens
tagcagccgtcctgccaggcaggagttgccttcaaggcctgttaagggatatggggtatgtgtgacactgttgtcactttttttgtggaaatgccaagtgtaagaaatctctgttgcatttgacaggtgttgcagttgaggatgtatccattctaatctatgagtgcttttctttctctttttctttttttcaacttgccatggaagatagggaacaggaaattggacttagcaattactgagtggttgtccctactcagatgtcaccttgttaacaagctgctctaactccttaagttctcacccttgacacacacattgttcatgtgtgaagacgctacccacccactcctgatctttgcaatcaggagttaaatttcttacttttactggtggcagggaatttatttgttaaagcaaacaaaagaagatcgcttggtgtcactgggtcgttgagagccacaacatgtatttggaagtgagttgcatccaaggtacccatctttttctttggcagactctggaatggaactttcttgttttgcagcactcatcggtcagtggaggtctgagatggactcattgccctggctggctggctggctggtggctgttcctgcaggacgggagggtgagtgtcagggaggtggctctgattgcagggagacctactagccttagggttgggagaatattccttttgttgctccttccctccagctgtccccctgccctctcttctgttgagagcagtggactctgggtgtaagggcacactcagacacagtaagggctcaaggtcggtgagggagattgttgtcctccgaagatattagtaacagtgagctttgctgaatgagcccagacaaggatgggaggttgagtctttgtggaataccgagtccattcttggaggtgctttccttcagaagcttgggaagccacctgtgtgctgggtagcttacagttcgccataccatctctagaacaagggatgcagcgtgccctccgcatcaagcgagattt

SEQ ID NO: 36985 - DNA, 1029 bp, Homo sapiens
tggtgtgatctcggctcactgcaacctccacctcccaggttcaagcgattctcctgccttagcctcccaagtagctgggactacaggcgcctgccaccacacccggctaatttttgatatttttagtagagatggggtttcaccttgttggccagaatggtctcgatttccagaccttgtgatccacccgtcacagcctcccaaagtgctgggattacaggtgtgagccgtcatgcccggcccataaagtgtggtttctaaagctggttgtcccaacttcatgaggatagtaggaaggtttacatactaaagcacttagggccatgtgctcatgcctgtaatcccagcactttgggaggccgaggcaggtggatacctgaggtcaggagttcgagaccagcctgggcaacatagtgaaaccctgtctctaataaaatccaaaaattagctgggcgtggtgacatgggcctgtaatcgcaactacttggaaggctgaggcaggagaatcggttgaatccgggaggtgaagattacggtgagccactgcactccagcctgggtgacagagggagactgtctccaaaattgtaatagtaataataaaaatattaaaacaaaataaagcacttagaaaacaagatgatttgagaagtgtttattaaaagaaaatgtgggactcatttgtttccctaattccagctgtcaattaattagtgaagtgttacttgaggttttttgatagaatcttctttttcagttaaagattctgagtgctttgttggagtttcttcatatcacctatcatttgcttgttagcttatcgatacccatggaacagttattgacaggacattgggtcgttttcccaagagcattccttgaataaaacattttgctgccttgctaagaggtgttcagaaaatatttccaccaggcctaaagtaaatctagcacctcatgtcacatgacatcatgtcatctaatgctgccagttacaggaaaagacattagagttttggggacaaagcc

SEQ ID NO: 36986 - DNA, 1052 bp, Homo sapiens
ttttagtcttaattataaaaggacagccaaggattgccaggtatttaagaaaacttgcagttgggtgcggggactcacgcctgtaatcctagtactttgggaggccaaggcaggtggaccacttgaggtcaggagttcgaaaccaacctgaccaatatggcaaaaccccgtctctactaaacacacacacacacacacacacacacacaaaattagcggggcatggtggcaggcgcctataaggctgaggcaggaaaatggcttgaacccaagaggtggaggttgcagtgagccaagattgcaccattgcactccagcctgggcaacaagagtgaaactccatctcaaaaaaaaaaaaaaaaagaaaggaaaacttgcaacctgagctaaagaagtctggcgggaaggactccaaaggaaataaatgatacaggaactggagatatatatacataatatcaataccctcagagctattaaagaagaaagtatcctcataaaataaggacaagaaaacatgaaacaagttcagaaagcaagagaaattccttgtaaattaacaatgtgataaccaagatataaatttcagtagaggattagaatacaatatggaagaaatgctagaaaggaaaatggaaatatcaagaaatagaaaacaggagtgaaaagaagaggcagagattcaaaacaagaggaccaacatttctgaaattccagaaaaagaacagaagagaagaaattatcaaagagattgtggcaaacttttcccagaactgaggatcacaagtctctgaattaaaaaggcacactctgtgccaagcccaatgaatggataaaaagatcataagaaagcacaccatcttgaaatctcaggaccctggagataaagaaaagatacagaagacttccagagaggaaacaaacaaatggaatcaggaatcagaatcgccatactagatgtaaaaagataaagactttcaaaattctaaaggaaaattgctctcaatctagatttttttttttttttttttttttttggatacagggtcttg

SEQ ID NO: 36987 - DNA, 1056 bp, Homo sapiens
agcttttctgaaggaaaataatttgaaactaagacatgtgaataatgaatttttatgttcaatctatgttcagtggtacccccaacacatacccctccatcctaacactcagctaccacatccctttgtgtgaaacagtaatagaatatgaagatcagttgttgtaaatcagagcctttttgccacccagcagccttcatataggggcacagaagaaagaagggtaatttattcactaaatactgaaactattattcattgttttgaatgagtgcaaagctctgcggacaaatgtcgtcttttgcagtttccgatatggtctggcagcattgtaaataatcctattatagttaacgaaaggattatacacatagttgtattgtttgtattacttcaaaataagtgggccattcactgagccttagaactttttttttaatgttacggtatttttgacaatgggaattatattcaagtatcaaagtctaccatgcaaaactagcttatttacaaagtgcaaaggcattctgactaaggaacttaaaagaacttctttttcaatgaaagaaaagtaatttaaagatgaaaatcacataaaaattaaacagagagatcattcttttttttttttttagctcaatgaaagctatttttattccttcttttgaaaatgcaccatttgtttgctttgtcaaggtacctttaaatgaagtcatcctagggggtcaccatttattaatgcaaaatttgacatattgttgtcattaagatcagtattaagtttttctctttttgggcagattgaatctataaattaccccatttctgttcattaaatttaacatagaatccttaaaaacaggggatctcaggattggtgttgaaaatggcaagacccaagaatgtgcgtattctggcatcatatctaatcttcaagtaatattttgacttatttgatgtgaacagggttgggtgctcagcattttttccctgatatacagcggcattctgtgtaccttttaagctattcctttagcccttagctaaatgcagttt

SEQ ID NO: 36988 - DNA, 1009 bp, Homo sapiens
tacacacactgggactgcagaacgaaaaggcatggcataaaaaaaatgagaagactgagaggcagtagggacttagtttggttagaccatggcagagttgaaagggagttacagagacaggtttgatttataaacaaagtgaaatggtccctatgcctcttattttggtttcattttataaaacttttgtgagcttttttatttgttgcgtactgtttttactctgtgaaaccaatcaataatatcctgaaatggtgaacaaaacatccagaaggaggtcatgatgatctcttaaggcacaatgagtaacctttgagaagtcccttgaggactggacattgagaaagcaaatactttattgggcaaagaaaaatactggtacactgcaagatacttagtgcagtctgtctttagtatgttgaagcaaataacaagtctttcaaactttgcatctctacagtttttatgtgtgttctgctttgaatagaattggattttatctttgtaaccgtgagtgagccctggaaatagtttatgtgagacataaatattggaactagagagaatatggtgacttggctgtttagatgtcatttttcagtggaatttctaagcctagcattcactcactcgatgagtatctcttgagttccatcataagtgctgaggaatcagcagtactctttttttatattaagtttgattaccatttaaagttaacagtttttaggtggacaagaaagtgtctttttcatgacttaatattaaattcataaactataaacatttttgagaaatgaactatagtatcttactgttcattagaaaaacaataaattgcatgttcaatatcctctgacacttcatacgtgtcagagtatctggttggcccgagaaatggccaaaccaactaaatagtttgaaatagtaattcatcttagggccctatagaggccacttttgaaaatgtttgctttaaatacacacatttcccctggtattcctacaa

SEQ ID NO: 36989 - DNA, 1087 bp, Homo sapiens
agaatggcgtgaaccctggaggcagagcttgcagtgagcctagattgtgccactgcactccagcctgggcaacagagcaagactccttctcaaagaaaaaaaaaagaagttgtgctaatgcgtgcatggaaaaataagaatatagagtagagactagaagaagtcaggaaattcacatcacagcactccagaatacagtagatgtttataagataaaatatggcttgcggtctgcttgcaagcagggctccagagatagcaaacaattaaattttcccagtgaagttgtgaaacagatgaaatttacatattctagtataaactcttgcactttgggatcaatttttaaaaagagatattttctgctattgcatttgcggtagtcaaaactcatttgagtatattttataatcacaaatttcaaacagtataaaatactacagcatatatgtcttatttttattgtctttgtgtttttccaatatgaataaatatggatatttaagatacatactgagacacacagaatctatgtcttttgtctgaggactggtggaactcatattgtcctaggctgttcattgacttgtgatttgttccatgttatgtggcatgttattgcttagtatttattgaattgaattacatggtaatggaaatggatttattgcatatttatgcaatgtttgtagctttcttttttatggaaagaattatgatttccatttattcaatctcaggagttgcataaaaaatattctttcacattgtgtctagttctaaaaggctggaattgatttgtatgttgtaatgccatgggataagaaataagcagccacagagatcaaagtaaaggaaaactatgagtaagatagtgaaatgaatccagaggtaaagttagtatacactgacgtattcatcagccctacacctacaactgggctacaaatttggctctaaactcttctgaggccaaatcagaaaaggaaacacaattcactacaaatgctattttcagagcccttaagatcaatccaattcattgcttagaaggtctcagtgaacccacagagagatgagtatggaa

SEQ ID NO: 36990 - DNA, 1135 bp, Homo sapiens
ggagtctgaggcaggagaatcacttgaacctgggaggtggaggttgcattgagctgagattatgccacaacactttagcctgggtgacagagtgagactctgtctcaaaaaaaaaaaaaaaaaggaataggggcaggaaagtgttttgcttttctatactgacacaatttctcttttaaagggagacaatacatgcttctcttggaactctcttgagctgtttttattctctttaggttatttcttttcacaagatggacataatcaggagaagggactcctctctccaggggccacacgtaacacagcccaaggaaaagcatttgtttcactcccaatttttagtattaatgtgtttgctcttagagtgtgtaactgattattctgctctttgttgtcatcagatttcagagaaatcttttaacagaaataaatgtgaaaatacaagtgaatggtgctgtctgggttttagcacattcagatatactgttcttaccatttaactttcaaagactttaatcagatcctttagtttgattcacctgatatccattgcacagctactgtgtgccagccctgtttctgtgactcagagccacagacagaatgtcgtgatgcatatttattcatgtacttctttttttttttgtagcgtccatttgtactatttgtttcctagtctggaagaaggaggattagcaacctatcggactgccattgttcagaatcagcaccttgccatgctagcaaaggtatagaagacatctgcagcatttgtagttacgtctgacatgctcttctgcggtccatgcataattttgcatttgaataagtaactcgttaggatatattaggagtgttaatattttacagaccaggaagtattttttgttgggttttaaggatccagtcttattagttctgttacctttgtgagtttcaccagcagctaatgaactccacagtgaggtaacttgagaacagatgaagaaaaatttgacagatgtgcatgaacagagttaaacatttggggaaaaggaacatgggaacaaagcaaaagaaatgaaatatactgtcttttccctttgtgtagtatttctgtagtacatttgtttttaatttacattaacaagcc

SEQ ID NO: 36991 - DNA, 1034 bp, Homo sapiens
tacttggggagataagatggaaagatcagggcttagaattcaactggatagacagctccctttcctgcttaatttgggatgatacaaagatggtgctcccatgctgagtttttgttttgtttttgttttttgagacagggtctccctctgtcatccaggctagagtgcagtggcatgatcatagctcactgcagcctcgacctcctgggctcaagtgatcctcccacctcagcctcttgagtagctgggactccagtcaggtgccaccacaccagcctaattttttattttttgtagagatggcgtctcactgtgttgcccaggctagtcttgatctcctgggctaaagtggtccctccaccttaggattacaggcgtgagccactgcacccagtttatgctgttttaaagactgaacttatttcattgaaattttagctggccatgactcatccaagtcatcatttaaattttggaatgaatcctgatcatgccaggaattcattatctaactgtggaattcggcagcccaaatacggagacagaaaagttcatcacatgcacatgcggaagaaaggtatgtctggatgattttaagatgtgaatctcctattttggcctgtgttttctgttgtaaattatttcgcctctaggaatggttccctgggtgactctttcaccgtctcatattctagtgcttactgactctttttttttttttttgagacagggtctcactctgtcacccaggctggagtgcagtggcacgatctcagctcactgcaaactttgcctcctgggttcaagtgattctcctgtgttagcctcccaaatagctgggattacaggcatgtgccaccatacttggctagtttttttgtatttttattagagacagggttttgccatgttggccaggctggtcttgaactcctgacctcaagtgatctatccgcctctgcctcccaaagtgctgaagttacagacctgagccactgtgcctggccccacagactcttttataatacttactt

SEQ ID NO: 36992 - DNA, 1030 bp, Homo sapiens
tgtgtgtgtgtgtgtgtgtatcttgttgtcttttagtaaaaatagcttctctctgcttcttcccataatcctctctctcacctggcacctaatttgaagtgatatccttttgttgcaagttaataaggcagacagcaacctcatcctactctttatgtatttcttattctccccttgttttctgatggttgtactaatcaatgttagaatgtttaattatttcttatattgactcacttgtgattatctaccaataaaaatatatttgcaagtaatcatcagatcatgtcattatcaatctcccacctccccttttttgtttgtctgaagctcattttctaaaacattcctcaagaagggcttatagaaacagtggtccttgagtttctgcatgttcctcacagtttgcctgtggcctttgttttaacggtcagtttggctggatataaaatctgtggatcccattttctttctttaatattttaaatacattctcattgttttctggcataaaacattgctgtcaaaagtataacaatatggtcaggtacaggtactcacaactgtaatcccagcactttgggaggccaaggcaagtgcatcacctgagctcaggagttcgagaccagcctgggcaacatggcgaaaccctgtctctacaaaaaatacaaaaaattagctgggtgtggtggtgcacacctgtggtcccagctacttgggaggctgaggtgggaggatcacttgagcctgggagatggaggttgcagtgagccgagatagtgccactgcactccaaactgggtaacagagtgagaccccgtctcaaaaaaaaaaaaaaaaagtgtgataacaatatgagtttaagtgacttggtccttttatctgagtgcccaaaggattttttctttttctttagaaaccaatagtttactagaatatgtctcagctcttgtctcagctcttttcagttaattttttcaggtatgctgtatatactttcagtatatactttcaagttgtcttttatctc

SEQ ID NO: 36993 - DNA, 1025 bp, Homo sapiens
gcatatcataatgcagtttaaaacctccaaaataaaagcatttagtatttttggtaatgaagaataaaaatctaattgactgggaaatagcagttaagtgaatttatacactgaatactttgaataattttatgattattcaaagtctttgaacagataggctcataatttttacaagaaaggatttatttaaaatccttggtagtttttcctctgtgtttggtagttcattgatatagaacctactgttttttagtaataattgctagtaggttgctagtgaaagccttgagatgctatctggtttctgcaggagacgaaaccattgcgttaaatctgagatggagtgacctcagtaccagcatctccctctggaagtacattttccccaaccagagaagctaccaaggattgttaggagattagaaaattctacctggtgccccagccaatgttaagaggattgaaaacctaggggtgggtgctataacttgtaattatatgtgaaccgaatgtggacctgtcactatgtttgtagataaattgttgaagaattttttctgtgttgctgcttgttagagtgaattctgggtaatatggaagaaaaaggaatcaaaacctgaatctgagtctaaaaaattcagcataatgactcagaagaggaagaaaagcaacatgctgcagtaagacctgtattttttaagaatagggtttcacacactgaggttaaattggtatcttctgtagagggaggcacctggaccctatgctatactgagaaggtggtccatggaaatcaataaactgactcagaagacatgaaaaaaggagcaaagaatttgcaccatcacagtcgcatcaccagtaggagactcatgccaaatgcggagacattgtaacttcttaaggaaaaaaaaaggaagcacaggtgcctggagaactgttggcctttgaggaaagctgagttgtggtggttggtatttgtattgagtggacagagagctgtatttggactaattaatgaa

SEQ ID NO: 36994 - DNA, 1044 bp, Homo sapiens
acaaacaaaatgttgctatttgcaaataaaacattctggctagtatggattcttttaaacaaatccagaaagtaaaattgtttaataaaaatatgtttaaacataaaacatgtttaaaaccagaaaatcgtataatttttactgttatactgttaagccacataattattaaagtaactttaaaagaaatatgtaagtaataacactctcagagtaagactgtgaattctatttttattcttaaaacagttgcatatattgatattccctctgtcacttttcatgctgagtcagaggatggggcggtggtggtggcagatgtccagtttcagctgggtggttccacttggagagttccatgttctgtggtagacacggggggagcacgttcaccctggacttccttccatggtatagttacgttttcctgaaatctagaatcagctggagagtttaaaaaaaaacttaaggataccctggcttaaggatatagctaccttatatactccaggcagtgaggcccagttttctgtagttaaaaaaaaatcctcaaacgtttgattttctcactgcttgtttttgagccagtggcatagatgaagtttatgatcaccatgatcatcattcaactaatttgtcaagggactactatatgagccaggtgctagtgaagttatatgttaggctggcacaaaagtagttgcgggggtctgccataccgcaactatttttgcaccaaactaatgtatgatgcttgcccaggtgaaaacccaaagaccactaacatatgaaaggagtctttgatgaatggttgagccaatggatgcatcaggaaagcctctcattttaggagctatcactgggataggcttgccaggggtgcttcctaaacagtaagatctctgaggaattgagaaattgtagaaattattggcatgattaactgtgcatccttgagatgctgtaaagccagtattaacaacatgaagtcagacctagtcagtatgaaagatttttattggaagtttcagtgtcaggcttagg

SEQ ID NO: 36995 - DNA, 1046 bp, Homo sapiens
atcttggttcactgcaacctccaactcccgggttcaagtgattcttctgcctcagcctcccaagtagctgggattatagacgccaccacgcccagctaatttttgtatttttagtagagacggggtttcaccatgttggccaggctgttcttgaactcctgaactcagttgatccacgctgctcagcctcccaaagtgctaggattacaggcataagccaccgtgcccggcccctcctcatctttgaagacaactcatatgttacctcctctttggttcttttatactttatactttttttgttgcttgtttgttttttaattgaacttagaagttacattgcattgtattctttttgtatttacttacatgcctttcttcttacacatctttacctcttaagataggacccgtagcttattttagagtacctatgaacctaatatagttgttagcaaagaataggtattttaaaaatacattgaatcatgcaaaattttgtaactcttaaatatttttaaatgattataagaacaaagtagaacttaaaaatgataatggctattatgaatttcactcaaattaaccactattctttagaataaaaaggaaaagcccccaagaactaaactttgtatctgagaaaaggatttccagtagatggcattataagactatttttctgtttttcttaccatccctttcactgatagaattaaaatttgtttctttctgattgctgtggtttatgaaaatgattacatctgtataaaatcatcttatggacagattaagcagccagaaaaactcagttaacgcgtctctgggacttctgggtctgttattttccccagctagccagccaattctctgcagtaatctccctccctttttcattctttaattcattcaaaaatatatttacggaaaacctgttatgtgtaggcagtaggcaattgtctgatgatacattggtaaagtaagatagatgtggatttattttatgctgagccttccttcattttcacatgtatcttgagtattag

SEQ ID NO: 36996 - DNA, 1024 bp, Homo sapiens
cactgtgcctggccctactttacagttgtttttaaggtgagtcccatcacaggccaaacaagctctcttggtctccgaagttaatcaggctctgtgggcccttgccatgctggaaaatgccaagacacaaccaccacccaaccaagtgtttccagctgcagctcacacctctcccagccccaacttggcaccttgtagccagaggttcagacacctggcatcgctctccttggcctccccaggcccatcacccacaggacaagaccctgtccagctgtctgcaacaagggcagagctacttctactggcagctgcaataaaggggactcccaaatgggcccatctccggcaagcctcatgagttccttcagaccctccttacaactgacgtggcctgctcacccaccgacccagatggaagaacaccaagtcttcatcaaggccacctatgtgtactagcagtccagtgggtgtccctctggtaccctcatggatgataattgctcatttaccaagttcatggtattttggaggccccaaaacctcagacatttgcggccttattggtcatccttgcttcaccagcacctgaggaagcggctgagagctggagactggccagcccttttttattggtctaggtatggcaaagccaatactgttctttcctaccagtctgtgaaggaacagacataaaacctgttttgttagatgtgaatctaggaaatacaatatatttttaagtaaaagtactcttgctttacttgtaaactgattttcgtttttttcccctcaggccatcaagccctgtcgtcctatgaccaacaatgctggcagacttttccactaccggatcacagtctccccgcctacgaactttttagtaagtttctaaagaatcacatgcatatcatttaaaatgtaaatagagtaaaatgtgaataggctaaagttattgattctgttctcaaatgttcttactttgaaaaatattttatttttatgttgacaaattggcctttct

SEQ ID NO: 36997 - DNA, 1062 bp, Homo sapiens
gaacgtgggtctgcgtggcacagccccatgtctatcacaggtgcacccaatgatgccatcacaactgatgctgtcacagcacacttcttgtgctggctttgtttgccttttctcgtcttttttttttttgatacagagttttgtcttgttgcccgggctggagtgaaatggtgtgatttcggctcaccgcaatctccacctcccgggttcaagtgattctcctgcctcagcctcccaagtagctgggattgcaggcgtgcatcaccacgcctggctaattttgtatttttagtagagatggggtttctccatgttggtcaggctggtcttgaactcccgacctcaggcgatctgcccaccttggcctcccaaagtgctgggattacaggcatgagccaccgtgcctggccagccttttcccgtcttaagatccatgcatatactgttccaccacctctcatgctttcttcatttctgaccttttcgatttttactcagcatatttattccttctagctttttaaatttcctattaacactcactgctgttagttctcagattaatttccccactttttttttcagtttattcataagtataaccaaaggtcagttattgtgttattttacaagtaaaaggaagatggtcataggattctagatctagaaagatccttaaatcttgtagtctgaaccccctctggagtatactgtaagtggcatattgtggctgtaagattaagggtagccataacttcattcaggtgtctcacagggctgatactccatgtcagcagtgttgtccgtgtcagcctgtgtcagcagtctacaacctagcctggagatttccaggagacaaggccacctaggcacagatgcagctttcataagtcttaaaacaaagtttccccttacaagaatagtttaaactccttttagaaaagagacacctggtaactgacctggactgaatacaggtataagcaaaggagaaggatcctccaaacttgagaatggtctctggatgaagaccctcctggtgacttggtcatctaagtccct

SEQ ID NO: 36998 - DNA, 1035 bp, Homo sapiens
cacatttacctgaagactgtgtcagcgataagtgtgtgtttgattcagagtatgattgccagtacttgagcattttgtttttaaatgtttgttaaatttagggttgaaaaatagcatcttgctgttaaaaatgctttgattacctgtgagatcttacatatctttgatatgatcgttattgatatagttcctaatattgatcctttatttttaaaagggagattctacagtggttggaacgagtaggcttcgtgacttatatgacaaatttgaggaggagttggggagcaggcaagaaaaggccaaagctgctcggcctccgtgggaacctccaaagacgaagctcgatgaagatttaggtgagtcagagtcactaactagcctgagacccttgcgattatagcttcattcctaaattttggggaaatacccttgagagtcccacattgagatttcttctttttcattttatttttcttaattacagtcagtaagatacatagcagtagaacttccttctttttgatcgtatttttccttagttcatttggcagaatacagcagcgatctcatttgcaaggcatgctaacaagggtgccccttggagagttgtccagtcagaagagttcagcatctttccgagagcaggagcccatgccccctgcctctcatgaggacaggtgtccttccttggccctctcctttgccaggtgcgcctggtttgatgagggaaacagcgactgtaccccagctctgtttgaaggtttctctccacttgtgtagacagtttgcatagctttttcataaggtggtctattttttcatgtgtatgttctgaggttccaagtaggttgtgagatctttgagaatggaaattgctttttatcactttgtatccttagcccctaacagaatgccatgcacagatgagacattcagtgtgcatttagctacatgttctctctagctcttatctgcccacctccattacatcccacacgctgagaggcagttatccatactgggcaaagacac

SEQ ID NO: 36999 - DNA, 2018 bp, Homo sapiens
atgtgatgggttgatttctaagaaaacaaaaataatttcacacaagaagcagaaaactttaataggtcaataactcgaaaaatggaaaaagcttactttgcaccacctctaaaaaaagctttaaagtggtcttgaacactaaaaaaagatggaaggaaagctcagctcattctgtagtagcaggaaaaaccagatggcaaaacctaaccaagggaaaaaaaatgacacaaaaacgacacagcaatctctcttacaaatatggatataaaaacacgaattaggatattagcaaatgttttcagtagtttgttaaaataacagatagagtttattccaagactgcatggatagaaaagttaatattagaaaatctgtattgtatgtgtcaaaatctgtagggttatctcagtacttaccttttaggtatttaaactaaaatcagcatccatatgtgagtaaaaactagtaaactagaaatattaacagttgtctttaacatgatgaagaatggtagctcacgatgaacctgatggataccatccccaaagagtcaaatgtggtgttgaaacctgcaggcctttcccatacaaatttgaaaaaaggcaaggaggccccattgcttatcgttgttactgaatatccttgtgatacaatcaacatggtaattaaaaacatggtgtttttgtgtgtcccgggtattgtactggtatgggtgatataggcattaacaaaggcccccacttaataggaaaaggaaagttaagtgctgtaagtgcgtttgataggacacttacatgttgctctggattagatgagattaattaggaaggatgaaatgccatgggttagatgggattaattaggaaagatgacaagagggcctgaggaggaggagaggagacaggagaaaagccagagtattgtgtcagtggacatcattgaggacctatttgaggtggatgatttttaatgtataagtgctggaaatagcctcggtttaatggtttcttctctaatgcctggtagcttgcagagaaggtagacttgaattctgtaagttctgactaacgcagcagaaaataaaaattagaaatggaaatactgtgagggggaaaatttaccagtttgcactgtggcatattggtaagaagaaacattgggagtttggattttgaattttggagtgcctgagacacttacctaaaaaagatcttttgtttctgtgttgaaatgcccttctcaaagtgttaaaaaaaatattaactgatgttcacaacaactgaccctgaccattcattacatcattcacaacgcctgcttaaaaggatgggtgaggatgtcttttgcctgtgtttcttggcaataaaacatttggtggaatttctttttagaacatgatgaaatgtctgtatcaaccatattagcatttaactaccacttttagctttatcgtattaggcaagtgactgattttcaaagctgttgcctcctttgtaggggatgttaatatctgcctcctaggcttgctgtcaggattaaatgtgaaatgtcagtaaagtgcttagcagggtgccagcctcagagtaagcaccaaaacaaaccaaaaagagtccctaggagctaagagttgccgttattacctgacagtattttaacagccttttaagtaaaaaggactacctggttagaaaatgtaatgcaaagacaaattaaaattcactatggaaagttattaacaaataatttaagcatcttgtaatgcataggaccaatgggaagaaaactataaaatgtagctgatgacaaagaaggtgatgtaataaaaggaaggtatgtccttttcccgtagtggatgaccatgtcgtaaaaataccagttttcttcacaatatagtcacgtaccacatggcatttcagtgacagactgtatacaatgttggtcccaaagattataataccttatttttttactggaccttttctatgttcaaatatgtctagttacataaatatttacca

SEQ ID NO: 37000 - DNA, 1050 bp, Homo sapiens
acgcatccatgggggtgggggctggggaggcaactggactgattgctgcacagagatcaagcaaggtgattgaaaatgacctttggttttcaagacaaggtgggcactgatcatgtcacttattggagaggtggtggaagctgaagtcggattagagtgagttagaagtatatacacttttgtcttagcttgggctgccatgactaaatgctatagactgggtaacttaaacagtaaacatttatttctcacagttctggaggctggcagtctgagatcagggtaccagcacagccaggtttctgatgcatgccctcctcctgccttgcaggtggctgccttcttgttgtagtctcacctggtaaggggtgggtggcagggatttcttttctctttctctcttcataagggtactaatcccatcataattacctctcagagtccccacttccatatagcatcacatcagcgttatgatttcatcagcaggaattttgggatggacacaaacattcggtctgtagcaacgttttcaggtcatttgactgtaaaggggaggacaaagaaggggcaaagtcaagggagacctggaggccaaggaaagtactttatgttggaatagacctgagcactttcaaatgctgatgtgaagggtctggtatcagggagaggtggaggattgcagagggggggtggtaatcccaaatctgcatttggagatgggagtgggggctggggaggcaagcccccttgatcttgtgaggtcaagatcagaggggaacttgagcaaaggcatgacagcaaatggtgaacaatgggatgttgaattggtcattttggaagtggagcagctttaaggaatggtcggtccagggactaaacatggcagtgggctgggtggccaagaaaggggaagaggagtttattgagcatgagggtttcagatgttagcaggaacccagtattaaatgggtggcctattccagtggcttgactagggggtctttgagttgctcatcaagatggtcaggcatttatgaaaccctgttt

SEQ ID NO: 37001 - DNA, 1033 bp, Homo sapiens
gagtgcgctggcacgatcatagctcactgagcctcaaactactggacccaagtgattctcctgcttcagattcccatgtaggtaggactacaggcatataccaccacgcctggctaattttttaaatttaatcttttttttttttttttgagagatgaggggtctcactatgttgatgaggctggtctcgaactcctggcctcagatgatcctcctgtcaaggcatgtcttaactgcacagacccaaatcagcggctgagaatcagaagggagtggaacctgaagggactggtctcctttattccaacctctctcctcgcctcctggccaactccttactaggtgccaaggctggctgttggctgagaaaccacacagcccctctatatttgaatttctggaacagcattcttagatgacttcagtgacccaggtatactaccactaaagaaacattcatatttatttctctaaatagaaaatattcattcattagggttcaaatctctacgtatagccccaagaaattgatcttcagattagtatcctagatgtgaacctgtggtttcttctgtcaatgtttattgtcacaactgatttactgaaagattttatttgtaattccttgtactccagggttcagatgctcttctacaggtgacatttgaacaacacaggctcaaactgtacaggtccactcacactcagggtttcttcagcctctttatccttgaggcagcaagaccaacccctccctccttctcaggctactcagtgtgaagatgacaaggatgaagccctttatgatgaaccacttccacttaatgaatagtaaatacactttctcttatgactttttttttttaattgagatgaagtcttgctctgtcacccaggctggaatgcagtggtgcaatcttagctcatgtcaacctctgcctcctaagttcaagcaatcctctcgccttagcctcctgagtcgctgagactacaggcacccaccaccatgtccagctaatttttgtatttttag

SEQ ID NO: 37002 - DNA, 1035 bp, Homo sapiens
gccacgcctggccaagtagatgctttttattgagctctgtgaggtaggatcccagatcatccaagtaggagggggaaggtgaatgggtagggtttttgagaaaaagaacattattgtgaaaaatgagaggaaaaactgacaaggaaacaagtgctgagtggcagcgagggtccagttaaggctggaaactgtgaatttacagcagcagcgttctgtctagttgtgggattttcctctaggaatacggttataggaaccaagatgctggctatttggaagggtccagaatcgcctggtaagacacaacagtggggcaagggatctaagcctgtgggctgggcagagtttgctgtgctacgctagggttctggtctgagaagggaatggaagggtggagttctgatagggagaaaactgtcaagggctttttgaaagtgaagacgtgggaggaagtgaccaggaggctgggagcgtgtggtaaaagagtaggatgttcaattgtaagaaagatttagaggtggaaaagttttggattgtgtcaagattgtgagtgtggcctggaaaagggtggctaatttgagttctattgcctttgtacctctgatgcatttaggtgacaataaacatttctcatctcaatattactctattattaacaaacaaacagccaaaagagaaaaaaaaaatcaagtagtaagcagagtgtttattttttttaaaattacttaaaaaaggttgtttacagagatgtggatttatataacttggtgacaacatttttaaaatgtacaggctatttcatattattgcacttactctttaatatataaggcattttactttacataaataaaggttaatgtataatatcatacaaagttatggtgccaattaagtcaaccatcaaattcaatgagatgtgtgggaagatggaaatgaaacccagcctactttaatcttcatggtatattcttgcaactacggtttacttgttataacacatatttatttaccctcatagcttattgtgaatga

SEQ ID NO: 37003 - DNA, 1075 bp, Homo sapiens
ccttctgaatgtcctggtttttagtgaggcttttgctctctggctagttggcaatcacatttttcccagctctactgaactcttagaattgttcactttctggtaggtgttctttgcctagctttgtggaatttctcaccctaacacatgtagctttagctttcagcccaagactcaaggaacaccttgcagatttctagacctctttatctgtgtaggtcccccttctccagtagtctgctttgcacactgcagctgccttagctaccctgaactctgatctctgctgccttaacgtgatgggactgctgtgctctgcttgggttcttcctgcctgctctgctgcctgggacgtgcctctaggtggtaagcttaggcagttgtcaggctcacataggctgcactcaagtgtcacagttctgggctgcttttgactagtgtctgaaaacagttttttcgtatattttatggagatttctaattacaatgagagggcagctttaggaatgattacttcatcataggcctatgttgtttagtattaagtataggaaaataattgtgtctctgtccagttgaatggtaatatattttaagacagcaacttaaaattttaagatagtccgctagaactttctttgatgatgaaaatgttctgttcctgtggggtgtagccactggccatacgtcactattgtatacgtgaaatgtggctagtgccactgaagagatgaatttttaaattaatttaaatagctctatgtgggtaatggctcctgtaatggacagtgtggctgaaggttttctctcagtattagaaaatctcgaccttacaacgtttgcatttaaaaaagatgcctgtggttgatctttaacatattctaatttagaaaaatatagtttttttaagtataaaaatagttgcatgttcattggagatcatttggaaaatgcagaaagcacaaaaaaagttgagcacacataatcccaaagataagtaagattaatattttggtgtatttccttccagttttctataaagaagaacccactttagtgaaaaatcgtttggttt

SEQ ID NO: 37004 - DNA, 1057 bp, Homo sapiens
gccttctgctcgtgagatttctttatttttctctaatacttgaggagatctgaataaccgtctatttgttggagtgagcacacggggtttaccctcttcccagggaattgctacaagagaagatgatagctgggtccctttttattgcttcctttgagtcagaaatgattgccagtaggaagggccagtcataagtggaatactttatttgaaggtggtctgtgtttaggctcttctaatttttagtagaaacattaaactgtaagttagtatactttggaattgggaaatttccacaggaacttctgtaaaatttactaagcatgtatttccactggttgcaatatgtaagttttaactaaggataaggtgaggataaaccttagcataagttcagtataagagacagtagtcataaactattaatcccacttaattcccatgagaaaaaaaaatattgtagaacagcattagagggatgtgtgtataggggagggggtgttttttttgggtggggagtggaaagctgcaaagagaagtttaactgtagatctctcagaataattcgtttcttgacttttttttcccctctgttgtttggcagtagatgttgtttggctaagatgtctctggagtatagaattccttcctatttgacttgggaaggtaaaataaaaatggatagcttgggagtcatttattctgctatacttaggttttgtgacaacataaacatattaagtcagtgataccaaattagagttgataggggataatacttctttgataacaacaaattattctttacataattaattaatcttaggattgaactgtagttttttaaataggcttttatgtaagtttggctgtttattattttatgttgcattagtttaaatttccctaagtcgtttaacacaatagttacccaattccagcctagtgtcttaggctgcctaacacctgccattgacattagaaaaagcaaaactcatactagtgaaagatgcagcagttatttattggtgggacattgggtttacacaattataaa

SEQ ID NO: 37005 - DNA, 1064 bp, Homo sapiens
tgtgtgtgtgtgtgtgtgtattttatttatttatttatttatttatttatttatttatttattttgagacagagtttagctcttgttacccaggctggagtacaatggcgtgatctcggctcactgcaacctcctcctcctgggttcaagcgattcttctgccttagcctcccaagtagctgggattacaggcatgcaccaccatgcccggctaattttgtatttttagtagcgatggggtttcactatattggtcaggctggtctcaaatctgctgaccttaagtgatccacccgccttagcctcccaaagtgctgggattagaggcgtgagccactatgcccaaccccagtatcattaaaggtttagtttaagttggagacagtacatttatatactgagatttcaatatttttttacatcagcagttcagaaacacaggtacagatatggaaaaagtgacagttggattgatccggggctggagttttgctagttgaatgcagtgggaaacaatggatgtgtttaggaaactagtaagggtgtagttgaaggtagtgtactctggcgttgtttgcccatctttgaattgggattgataataatagcacttagttcagaaggttgttgcgaaggttgaaatgagctcccacagtacttagtactcagaacagtgctttgcacatggtatgtgcacagtaacttattgtgctgggtggggatgagggaaagaacggaggagactggtgggaaaaagggaggaaggctgaggattggaatccccataaggatgatgaaaagttacttgtggattgaatttccgagttggatttggttctcatcaaaaggttgtgggtttaaggatgctgatgtccaagttcccagggagtggcagataagatccctggttttgagtgaagaccatgagaatagaggccctgagggccctggctgttacttctgtgaaaaaatacattctgtgttacaaattgcttaaaagggaacttttaaaacgtaatcataacttgattactaccagtaacttacacatgtggatggcaccc

SEQ ID NO: 37006 - DNA, 1006 bp, Homo sapiens
agcctcaacctcttgggctaaagtgatcctcctgcctcagcttcccgaggagctaggaccacaggcacacaccaccatgcccagctaattaaaaaaaaattttttttttataaagacagggatttcaccacatggctcaggctggtcttgaactcctgggatcaagtgatcctcccgcttcagtctcccaaagtgcaggtattagaggcatgagccaccgcacctgtttttttttttgttgttgtgttttttggtttttgttttaagacagattgtgctgtgtcgccaggctagagtacagtggcgagatcatagctcactgcagcctcgaactcctggcctcaagtgatcctcccgcctcagcctcccaaagtgttgggattactgcgaccggctctaggatgcactcttgaagcatattattcccctgctgttttgtcatgcagccagacttgtccaatcatatgttttctttcagggctttggatcttgagagaataacgagctgtagggttttttggagacctttccagagtcatgtcagcgtgtggatcagactgttctttggcatggttctttgagctgctttctctggtctgttggcactgtttttttccagtctgattttccagtcatctttcagtgttgtgagtttcaacagccttccagtaaagttgctttttaaagatagccagagtcagttactaatgtttctaatgcttgtagacaagaactgtaatacagtaacttaactctatgtcttgaaaaataagtaggtacttgaggtaaataatatgtaatggggtaaaatacttaagattaaccaaaatgatagaactgacttttgtgtggcttttacacaggctccaaagatgttttccatttttggaataaggttcccaaggtcactactttgaagtataatagtgatgaagatgtataacttaacaaaaattgttttcctttctatacgtgtggtgatgtccaccatctctacatatcaaat

SEQ ID NO: 37007 - DNA, 1051 bp, Homo sapiens
ccgtagagatggcttggatttttccttacccctttcacagtcgctcctttcatttcgacaccctggcagtttgtatttcttcgtcgccttttttccgcgtttttaacccgtgtagaccccagggtgcaaatccaacccggagactgcccgggaaactaacagctggagccaccagcgccacgaactctttgggtttttgcaggctttaggacctgggaggggtgcccggatctgcttgctggggatgttttttttttcttcttcttcagttaaagcttactgttgggaattacgaaaaacgtaggcgaagtggtaatagagggaaaagctcttttactgagtaaagttaagttaagtttctcatgaaacctcctggtaaatgactttctaggtgaacttacattaggtgagagattatttttagtatcgcttttatattttatcagttgatgaatctcaaagtcttgccgtcttaagaaagggctttttcatcgagtgcttgaaatgtaggtttgtgagttgatcagaggcctcaaagcttcaggtgggttgaagttgcaatagataattctttgtattctgactttgaaagcgtttattttcacttcagtgtccaaaattttcacacacagaaaagttgaaaaagtgatagatacatatgcatatatactctttctagattctatgacgttttgctgtatttgttatatttgcctacaaaaatgattatttatttatgtggagacggagtttcgctcttgttgcccaggctggagtgcaatgccgcgatctcggcttaccgaaatctccgcctcccgggttcaagcgattctcctgcctcagcctcctgaggcaggcatgcgccaccatgcccggctaattttgtgtttttgttttgttttgtttttgagacggagcctcagtttgtcgcccaggctggagtgcagtggcgcgatctccactcactgcaaactccgcctcccgggttcaagcgattttcctgcctcagcctcccgagtagccgggactacagacgtgcgccgccatgccc

SEQ ID NO: 37008 - DNA, 1059 bp, Homo sapiens
ctcctcacctcccagacggggtctcggcagggcagaggcgctcctcacatcccagatggggcggcggggcagaggcgctccccacatctcagacgatgggcggccgggcagagacgctcctcacttcctagatgtgatggcggctgggaagaggcgctcctcacttcctagatgggatggcggccgggcggagacgctcctcactttccagactgggcagccaggcagaggggctcctcacatcccagacgatgggcggccaggcagagacactcctcacttcccagacgcggtggcggccgggcagaggctgcaatctcggcactttgggaggccaaggcaggcggctgctccaaaaatgctaattaacaggaagaaaaaaattactcggtagggcagacagcctctaacatggctcccagggttcatggctgtgtaatcttctctccttgtgtatgggtgaacctagtcacttgcttccaacaaacaggacatggcgcaagtgattagatcacagaagactgtgatacctctttcccttttgtggagcccttggtttgagaaagggaagctgtcattttgtagagctgccctatggagaagtcaatgtggcatgaaagtgatgtctccggctgacagccattgagggcctcaggcctcccaatggccgcacgaatgagctcagaaatggatcctcccccatttgaacagtgagccagaaacctggtctacagccccacaccaaaccttgactgccgttttgtaagagatctggagccagaggatctggttaggccatcccgccttacaaaaactgtcccacagaaactgtgagatcataaaaattgtttggttgttttaaactactaaatttggggggtaatttgttatgtagaacagttggctaaaacacttagtcagcagccgcctcacgttgagaagatgtaaatttcatgaaggaaggttacttcttgctgagctggagactaagctgaaagcgaaatttaaagtggaaagatctagcagagctgtgcctacacatctggtggcaggtaattt

SEQ ID NO: 37009 - DNA, 1044 bp, Homo sapiens
ctcagtaaatacatgctgaagaagctaattcaggaggttgaatttaaaccattaggttcgagatttgttatattattataaaaaatcatctttaatatttgtggatagagccatcaccagagataaaaagggcagtttgggctgggcatggtggctcatgcctgtaattccagcactttgagaggccgagtggggaggattgacgaaggccaggagttcgagaccagcctaggcaacatagcgggacccccatcgctacaaaaacaaaaacaaaattagctgggtgtggtggtgcaggcctgtagtcccagctactccgggaactgtgaggtgggaggactgcttgagtccaggagatcgaggctgcagtgcacagagatcgcaccactgcactccagcctgggggacaaagcaaaaccctgtctcccaaaataaaaaccaataaaaaatagataaaagggcagttttattaataaagaggataggaaagaaactcctcccgagccctgcggatctaaccgagcactgtcaagggaggctgtgtctcctgctcctctctccgcaccagtccaggctccatggccccatggcccaccattctcccgcagtcccacctgttccgggggaagtctcggcctccttctccccacacccaggccctatacctgtgccccccaccctcccaatccccccctccattatccctcaggaaccttttgctttctattatgttctgtctcccagtcctttggtctctacagaccccgcccgttcaatgtgccctggtctagcctatctcaaaacaaaatgaatgcctggatcctaccttcctcttcaagctacactccccacccctattccctgtctttatcagcctgacagacttattatttatttatttatttatttattttaagaataatctagccagatgcagtgcctcatgcctgtaatcccagcactttgggaggctgaggctggtggatcacttgaggtccggagttcgagaccagcctggccaacatggtgaaaccctgtctccac

SEQ ID NO: 37010 - DNA, 1043 bp, Homo sapiens
tgttgtgttacgggaggaacctaaggctcccccttccaataatggatttcatttctctcctcagacctagcttttctaatcatctcttttccttgggagatagggacagacagcctaagctccaggagttggcaggtgggaaaggactgagctgaaggggtggagaatttcaggttgcactagctaaatcacagttgggacgggggcgacaagaaaccttgaagcctttgggtaagaagaccagatatcaggtggagcaatgtgttgagcggcctggtggcctgggggaagttctgcagagactctgaggaagcaggggctgagcagcatgtggtgctgccgtgcaaatgccacacggtgggggggacccattccagtgtgcagcctcggtgtcagccgcaggcccgggccaggctttggcctgcagagctgctggcatgtcagctggtcttgagtgctccctttgcttaggagatagagagaagggggcttccaggaccaaggagagctcagtagagagcccaggctctggagccagactatttgaaccacctttggcactgagcagcagtgccttcggcagattgcttacctctgtgccttagtttccttgcttgtaaagtggggcaataatagtgactttgagaatgaggtgctcagtgaatgtgagtactgagcacagaaccgagcaggcaggaagcactgggtggtggttcagtgtagtccctgccctgcctgacacatcttcacgatggagaaaaagagaggccactgaatcctggccttcatctttcctgaccctggatggaaagtcaaatcctggtcacctccgagctgtggtcttgtggatggttttgttttctttttaatatttttattgttattccatatttcataataaggaaataattttctttacaataaagaatatctttttacaaggaagaaccattgatggaaatatgttagagagttttagagtgaacctgaaaattaagttgttatctcttcttacttcaaatgaacagtagcaaaagagctgg

SEQ ID NO: 37011 - DNA, 1316 bp, Homo sapiens
gactgtgcccccaattagataatctcagtgcttctgagcagcctcctgagggctacaggctttgcttgagctgggaggattaccaaatcccccagtgaagtaggagcaacagccctgctttcagagctcagccttgtgactcaccagctttgtgaccttgggcagttcagttttctgagccttggtttcctcaaatgtaaaattggaaaaacaacagttgcctcgcgaggctgtggaagcacccagcacagcggctggcgtgtagactgctggaaaggaagtgtccttgttcttgccctcctcccacaccaaaagcttgtagtgaataaccacaggtagcctcagccttaaatgcccatgattattcattctcagggcagagcaggagcatgcttcctggtgcctgtgtccagaagtatgtgtttgccttcctcagccctccctggaaaacagcatgacctgtgcttgttttggcagggtagagaaggccaggatacacaaagcaagcctttgaatctgctcaccgtgtgggattggtcggtgcagtttgaacccaaagcccagacattgctcaaaaaccctctttatgtggaaaagccaaaactggacaaaggccaacggaaaggaatgcgcttcaaagtaagatgtccacatgtctaaacccccttcagctgcccagaccccgtgcatgtaatgataaaaggtacttacggattctgtctgccagcattttctacccctcgaagcagtctgcagagttgagacttgtgatggtcaaattgtcaagggccattagaatcctttgctttcagcaaatcacctttgccctggtacaacagggccatttgccagatgtcactgtggatgctgccaccctggtcatactccatggaatcgtgcctcttgtcctgcctgtgtgtgtgtgtgtgtgtgtgtgtttgtgtgtgtgtgtgtgttagtagagtaaaaggaacattgattgtgtgggttttacttggccgataccagttcatttattataataaatagtaagacttttcttaatgagctgtgcctgtaaaccacaggttgcaaaactctgtcaagggctgcaaagtctctgtcacaactacccctctactgttgtagtacaaaagaagccttagtctgctctgcccttggagtagccattctttattcctttacttgaaaaaaaaaaaaggagccttagtaggtgaacaagtaggcatagctgtgttccagtgtttacgagaacaggcgccaggccagatttggccggaggggtggccagtttgctgacctatgctatgagccac

SEQ ID NO: 37012 - DNA, 1033 bp, Homo sapiens
ccaccacacctggccaagaatttttaaattaccaaaacagtcgtagcttttaacatgcaggaatagttcctcttgcttaagccccagaccagtacatcagaatcatctggggagctttttacaaaatcagagagccagcctgcatccctgcactataagtccgcaggcttatgggtgccagagagtgtttagataacaagcttcccacgtgatctgaccacactgcctcagagggacttggtttactggcatcttagtcacctccaatttataccatgctcaaaaatgagttctcaggaaaagccctaacattcttcttcagcctcaagataggctgtacccaagtttcttctaatgccatatttcagtctgaattaacaaattcagaaaatttcccacccagggccttctaccaaagaaaaaaaaaaatctgattttatttgttgacaaaactggttgtgtcttgtagaatttttcacagtcagaatttgactgattatatccccactgtattatttgacatgtttctctgtcccagtgtttctgatacattggctgattgctgtggaagttcaaggagactgaggttagatattttggcaagaacacttcctggatggtgtggcacactttattaggaggcccatggtgcctctctttgttatgttaacagccatatatgatcattgctttggtctattcattcattcatgtttgtaattaattatctttgaatatcccataaatactgagccccaagtagaggcatttgaatatatttttactgagaagcagtgacccagaaactggccttgattctctgttagaaatgactgtatcccttggcactgtcttgtggttttaggtaactttgaatggacaaagaatgtcccagctctctttactgagccctggtgtgctgtagattagctggatcaatactgacttgatacattcatgttttcctattcttacctttgggccttatttatgtgtccatattctttcaagaacacatcatcttttgctttca

SEQ ID NO: 37013 - DNA, 1066 bp, Homo sapiens
tgagcttcttacatattcttgttatcccctgtcagatagatggtttgtaaatattttctctcattcagtgggttatctcttcattttgttgatagtttcctttgctgtgaggaagctttttaacttgatgtgatcccatttgtccatttttgctttggttgcctatgcttgtcgggtattctttatgtctttttttgatagaaccctggttgaagtgcaactgatctttaaacttttctcttcagggaaattaaactacaagtggaaagtcttctgaaatgtggccagagttcaagaatgttcaaattcttcgtccaccaagtgcacatgttgtaattagacatgtttccctctttgcccacagtgcctgatgtatttcctttgagggataattagggaaggggagtggttcagtctaaaataagcctgaagtggtcacatttttcagatccttatagttggcagctttgttttcttgcattaaaataatgctgtgcagacactatgcctcgttgttgtagtctgactctaaacatgttttgtaacagaggataaggctctgtcctaaattgtggatggttttttaaaagataagggtaaggccgggcgtggtggctcacgcctgtaatcccagcactttgggaggccgaggtgggtggatcatgaggccaagagatccagactatcctggccaacatggtgaaaccccgtctctactaaaaatacaaaaattacctgggcgtggtggtgtgtgcctgtagttagtcccagttactcgggaggctcaggcaggagaatcccttgaacccaggaggcagaggttgcagtgagccaagatcacgccactgcatttcagcctggcgacagagtgagactccatctcaaaaaaaaaaagaagataaaggtaggaaggggtgagaaggcaatgtatttttaagtatataggttttgccaggtaatcatattacgggaaatgcaggtgagcaacatcgaggcatggcttatgtgcttctgagagccctgggtctggtaaccttctcttggcttacccagtgggaggagttcc

SEQ ID NO: 37014 - DNA, 1061 bp, Homo sapiens
tatcccttatgataggctctataacgagttctactgtaaagactatagttacccaacagactttaaactctctcgtaaaaattatgctaaattgtagaattgactaaacagaaaagtatctgtacagctactggcacttgtggcctatagagaaatacatcaaatgtaaattatcaaaattcagttgtagggaattaatgaaaagaccacttaagcgagtagactcttcatgtaactcattcttcgatctatttgattttagctggtttcatttatagagaccctgaataaagaacatactccaaactcttggtattatcctcccaatagtcataataatagtctccctggtacactgtattctctcagaggctttaaatgtttacatacagccatctctaaaatgtcaaattgtctctcttcaactggaatgacaaaaactgaaagaagtatacggccatgaggacactataacctatgaatgacatactgagatcagaaatgcaaaatggtagtaactgagagtgacgctaaggccctaaattgtggtcacacgctcacctaagtgagaacctgaccaaaaagggggaatttttaaacaaaattatgggaggccattgttttggactgaactcatatactagaccccaaacagaccaaactaaacaaaagtggagtcactcatgctaaacgtgacataatcaaactaaaattttaaggaaacacataaacactaaaccagaacacaccaggttttgtttttcttctaaaaatgggaccttccaacataggtagataccctctactcagtccttgctcctacctttgcaaaactcactgttctgtttcccagtgggtttcaaaatcaaataaatacatttatgatggtgatagtgacatcaatgactaaagttttagtcaatcttttaaaattgagaaaatgaccaaaaggagggaattgttaaagcaaactaaatatggcccgagaaggactccattcttctatatttgagtccttgcagatgtactgtaacctagcttaatagacaagattgaaaacc

SEQ ID NO: 37015 - DNA, 1385 bp, Homo sapiens
ttattaactagtgcattgtcttattaaatcttcactgtatttaatgcaggatgtgtgcttcagttgctctgtgtattttgatattttaatttagaggttttgtttgctttttgacactagttgtaagttactttgttatagatggtatcctttaccccttcttaatattttacagcagtacgtttttttgtaacgtgagactgcagagtttgtttttctatatgtgaaggattacaacacaaaaagttatcctgccattcgagtgctcagaactgaatgtttctgcagatcttgtggcatttgtctctagtgtgatatataaaggtgtaattaagacagagttctgttaatctaatcaagtttgctgttagttgtgcattagcagtataaaagctaatatatactatatggtcttgcaacagttttaaagcctctgcataattgataataaaaatgcatgacattcttgtttttaatagacttttaaaatcataattttaggtttaacacgtagatctttgtacagttgactttttgacatagcaaggccaaaaataactttctgaatatttttttcttgtgtataagtggaaagggcatttttcacatataagtgggctaaccaatattttcaaaagaacttcatcattgtacaactaacaacagtaactagcccttaattatggtgacagttccttattggtgtgtgtgagattactctagcaactattacagtataacacagatgatcttctccacacaccccatcacccagataatttacagttctgttaacagtgaggttgataaagtattactgataaaaaattatctaaggaaaaaaacagaaaattatttggtgtggccatcttacctgcttatgtctcctacacaaagctaaatattctagcagtgatgtaatgaaaaattacatcttactgttgatatatgtatgctctggtacacagatgtcattttgttgtcacagcactacagtgaaatacacaaaaaatgaaattcatataatgacttaaatgtattatatgttagaattgacaacataaactacttttgctttgaaatgatgtatgcttcagtaaaatcatattcaaatttattgagtactgcatcttgttattcctgacaaatgtttgttgtctaagcacataattttcagaaaattttgtaattcaatactatattggcttaatttctttctagggtcagaatctacccccaaagtcttagagggtcagaatcttcccccaaagtcttagagggccaggaaactgtaggagaccacaggggaaatagaacaggagactcagacttttctcccagattcatcacacacagattatctaatctaaaaatctgaaaattgt

SEQ ID NO: 37016 - DNA, 1050 bp, Homo sapiens
cctgctacagtcagttataatcacaccactgctttccagtctaggaaacagagcaagaccctgtctctcaaaaaataaataaaaagcaaatattacagtggagtgcagtggcattcacttgtagtctcagctactggggaaactgaggtatgattacttgagcccaggagttcaagctcggctgcagtgtgctatgatcgtgcctgcgaataactactgcactccatcctggcaacatagcgagggcctgtctgtaaaaaaaaaaaaaaaaattaaaaaatcttttaaagcaaatattacaatccttgatttttttaatcatttaatatggggagctttttccatctccagttataataattcttaataagttattctcttatataattatagcctccaagaccctttacatcaaaacctgaagtgttgtaatccttaatttgattctatttatttttgatattatctttttacttttgaattatattcttctattttcattgctcttttaactgtagacatgtgcttggagaatagctatgttctttagaaaattaatatgttttaattgcttagttcacagtaaatggtgtcagaggtagttgattagttttattgtgtgtgtttaagtgtattgacttttttgtgttccataaataattgatttctttcttgacttttaattaatttctgcttttacctgctggtataaatcagaaatgcctgattcttaaagccaatcaataaacagattttgaaaaagctttgagttacttgaaacacatttttatgtcttgacgtacctgaactgtagctgattacttaatgctcacttttctcataacatttgctaaaagtactcagtaaaaatttgaggcatttatcgaaagttacgtattttatgacttcaattttgtgttttaatcacaacatcaatattttgctaattattactcttggtttattttatcactgaattgtcaggattattctcacattctttccaaaatcattccatgtcatcatttactaagtatttacaaaattctg

SEQ ID NO: 37017 - DNA, 1050 bp, Homo sapiens
ttcaaattagttgttcttctgtcatgaatccatggtgatgaaataaaatataggtagagttctgttgtaatgttggtctgatatcagaattgctgtgtgctatctaaacctttagaatagtataactgcagtaacttataaaaggcatgtaatttttttaatgtttattatagacctagcacaatggctcctacctgtaatcccagcactttaggaagccaaggtgggaaggtcacttgaggccaggagttcaaaaccagccttatttgtatagcaagaccctatgtctacaaaagacaaacttaaaaattagctggatgagatggcgcacacctgtagtcccagctactcaggaggctgaggtcagagaatcacttgagcccaggaggttgaggctgcagtgagctgtgattgcaccactgcacttcaccctgggcgacagggcaagaccatgtctgtctgtctgtctgtctgcctgcctgtctgtctgtctgtctctctctctctctctctctctctctctctctctctctctctccccccacaacacacaatgttattatatattttatttctagacagtgtcctatgatgagtatttcagcaaaaaaatctgttattgtgctgggcacagtggcccattcctgtagtcccaggtactcaagagactgaggcaagaggatctcttgagcccaggattttgaggccagcctgggcacatcgtgagaccctatctcaaaaaaaaaaaaaaaaaaaaaatctgccactgtattgattaatgttgaaaacagtatgctaagtgcaagaatccaggctcaaaaggtcacatgttgtgtgattccatttatatgaaatatcaagaatatataaatccatagagacagagtgcatgtctctatggaaatagggataagttgcttaatgggtaagggggtttactttgcggtaatggagatgttttggaacttgatatggacaacatagtataataatgctgctgaatcattcgttttaaaatgtttcatgttatcttttttaagacagagtttc

SEQ ID NO: 37018 - DNA, 1032 bp, Homo sapiens
taacaatttatattcccctgaaccaagagagcatttgggtatgtgaagctaatttggggctctatgaagtttttttttttttccctacctctaattcctttggaagatcttacctttattttttcttttatctgcattttagccaaatgcatttattattggaaatagttagatgtgaatgattaccatttttctgctctttcctgatttcctgattgcttctgttctttcctggttttcaaagtcttcaggatagcaaattctagtgtttttcttttttctggtgagatagaagatggtcagatggagtttttacgtttaggaaaatttcttctgaaactgcttataatgtgattcattttacctttctccaaattgaaagttattggtgaagtttttgggatttgttgaatcagctgtcatccccaccctcatctctggagagccaagcttaagcagggtaaacactctgttcttaaggaatgttctctgtcactggccttttcctctgtttgattcaagctattacattttttcctgaaatgcagtagtgtgtatattctatcatttgtttttgagacagggtcctgctctgtcatctaaactggagggcgatggagcagccctggctcactgcagctttgaactcctgggctcaagcattccttctgcctgaaccttcctagtgcctgtgatgataggcacatgccaccatacctgactaatgtctttatttttaatagagatgagatctcactatgttgccccagctggtctcgaactcctgggctcaagcgatcctcttgccacggtcttccgaagtgctgggattataggcatgagccaacatgcctggccctaatatatttcttaatcatgttttggaggcaagagatcttcagtttctgtctgtgctattgtcataaacaggagtaactttttttctgttatcaaataaatttgaaattcttatgaactgtattatgtttaattttatttagcattcagattactttgaacaaatccttaagt

SEQ ID NO: 37019 - DNA, 1050 bp, Homo sapiens
ctctaagttaataagtgtagggagtgaaaggtgaggaagcagctgtttggtttagtgactttgcagtcatgcaaaggcacagaagggaaaccaaacagatttccttaacctttcagtccctagacaaactttttagctctttactttttcttttatttctaatgtaggcagactttttttttttaagtttactgttttaaatgaacacaggtcaaggttcacaggggatcaagaaatattattcttgtataatctgtttactttgacctaaataccagcttttaaatactaaccctggcataaaatactgctgtaaatggcagctcattgaatccaattttaagtgtgattgtttttgtttttatctgagcttccattgaacggtggtattttaactttttttcatcaagggatatattcagtatttctaagattaattcaattggtttttatgttgctctcaaggctagagctaatggtctgcagtcctgtgtgattatcatacgcattcttcgagacctctgtcagcgagttccaacttggtctgattttccaagctgggtaagtagtacgtaactgtatggtgtaaaaacatgtaggaaataattctgcagcttttatcctctcagtttacatgtaattatcagccttatttgcatttactaaatatagtttttcttttctgatgaaaaatcctgggggagtcttagaatgtttaattttctcagatgtgactaattaaagaattttcattgatgtttctctttgtgtgtttttttctttttgctgttttcacagtgttttttttttaatattacagcatttattagttggcttttacatataatatacaaatgtataaagaagactttgaagaactgttaatctccttatgcagggacattttttaaaataatgtatgtggttgggaactgtaaaaattcagaaatacatattattcaaaaataatacaaaaaaaataggagattcagtaacgcagaaagctacaaaataaccaaaagccttcttatttaaaggcagattatctta

SEQ ID NO: 37020 - DNA, 1050 bp, Homo sapiens
ttagggactattctgtaacattttcaaagcttcaaaagcttttaagctgaaaagcatgatcagtgtctgcagtatgttggttctgttgttttatgggtcagataaaatttactttgtttcctttcatgtttttatacatcttgttgagtatggaataacagtctacactaatatttctttgtgatacaggttgaggaggaagagggtactacatacttaatattaaaattcatttgtataaaatagcatcagtagtctctcaattactgtttctttaaatttgtttgcttataacaaagcaattttttaagacactgggcttttcacaacccaggaaaagaacattttaccaaaaatgtcattgggagctatgtctaattttacatactttgcatgtataccataatcagatgatatttatatcttaagctttgcatcttaaatgagttttgtgtaaagggttttcttatgtgaacgtgagtttctactcaaggtctggccatgggtgttgctggagaaacagttcctgagtcaatctggtcaggtcatatacagcatatgggatttgataaaactaatatgatacattataaatgttgctgtatttagtgtaaaatgataaccatttaactttatttcagaatacattttgttcagttatatttagacttaattaaatttatacagtatcaagccattttattatgttgtaaaagtctaaagtgaatagtgtcatatttgcagtaaattatttgataacctatcccttctaaaggaaacaaaattatatttttgtctgacccagacttgagttagaattattgttctgaatttcataaatattatgatgaggaaaatggtcagtccaaaatggaaagattttgcttcaagacactgagctgaaaagttggatgtgccaaagtgtagaaacactgatagtgttccttgctgcagataactgcagtaaaccatgtctttagcttcattatgaagattgcttctttcttgctgcagaataacggtatgtattctctctcactgcagctccca

SEQ ID NO: 37021 - DNA, 1028 bp, Homo sapiens
acagaaaatgtacaatatgggaataaattgtagctcctattaaggtcaggtagctattttagcttcattcaaattatgcaaatatatgttataaatatggcagtgtttcttttatccaagaatttattatctaagagagatagacctatgtacaaataactcacaatacaaacaatggtaaatattagttcaacacagaattctgaaagtagggagtaagactaataatactggcatgtacggcagggcttcctagaaggagcagtatataatctggtcctcatatagaatggttagggtagtaagagagtgaaagagccataatgaaagtgcttttgtttgttaatacaacagatccaatttgtttcttatcatcttcattacacaggttataagccctgagaagtatgacataaaatgtgctgtatctgaagcggcaataattttgaattcatgtgtggaacccaaaatgcaagtcactatcacactgacatctccaattattcgagaagagaacatgagggaaggaggttggaaagccattaaactttctactttctattaactttttttttcatttatctactctttaagatggcattaagccctagaaggcaacatgctggcattacacgtgaatttgatagatttgacttatttagcaaccggttttgcctaagataatttcccacagagtaaatgctctttttagtgatgtatttttatataaaacactatggtatgattgattttcttgatttctttcttttcttgctaacctcagatttctggaaaaaaaacttcaaaattatttttactggcatagtcaatgcatgaaaaaatggttttaaaatgttgctagtgactagggggacacaactttaagttggattaagaagtttttgctcttgccttgtcttacaaaaaagacaagagttttcacaaacaaaattggctaagtattcgtaacacatttttaagaggcatttttatacatatatatataataatggatttggcttgtcctg

SEQ ID NO: 37022 - DNA, 1010 bp, Homo sapiens
caagttctttaccataattcccaacacccttaatgtgtccccaacagtaagactgactatgacttgccatttatcactgccttgcactgtttttcttcatagtagagacataggaaagagcatgtttctttgaggacatgaagaaaattcccaaatgttgatctgtgcacttcaggtcatttactcacagtgttggcctgcctcctttaggtggcattgggtttctaattcatacttaaagcaggagagaggtaagaaactgaggtttctgatgcctgttctttttactttttcctcaggctgaaattttctgcttttcatgctcttttctctttcatttacttcgcaatgaaagcaaacatggaaaatcagatacatttgggaagaaattttagctaggctgatgttggtggggttttttattgctttttatgtcactattgatgcaagttcttgggctgtatttttcctcatatgcttataatgtcattctttatgtttcagacgttatgaagaggacatgtactggaggagaatggaggaagaacaacatcattgggatgatcgccgccgaatgccagatggaggttatcctcatggtcctccaggcccattaggccttctgggagtccgaccaggcatgcctcctcagcctcaggggcctgcagtgagtgtccacgttggtgatacaaggggtgaaagtttgactggttcagcattagaagaaaacaattttggaggggctaatgtttagacttaataatcttgtaatcttggtagtttttttgagacagagtcttgctctgtcgcccaggctggagtgcagtggcgtgatctcggctcactgcacgtaacgtgcgcttcccaggttcaagcaattctcctgcctcagctttccaagtaactgggattacaggtgctcaccaacacacttggctaatttttgtattattagtagagatagagtttcgccacgttggccaggctggtcttgaactcctgacttcagg

SEQ ID NO: 37023 - DNA, 1047 bp, Homo sapiens
agattcacaattaacatgctattctcttggacagttagttgaagtgttaagtttaattgatgataaaaatgaaagctattatttatagtcacttctacatcagtttctgaggttcttcatactttcagtttagaacaataatagaaaatcttttgtaaataagttaaaggaaataaacagtgataaaacctaaattggttctgtttccttccctggtgggaaactttgtttggactaagtttgcagagagacctaatcattgaacttaactttttttaatttttctaaattgtagggcatgacctagatgttacccccaacttttttgggagacagggtctgaccaggcctggagtgcagtggtgcgatctcagctcactgcagcctctacctcttaggctcaagcagtccttccacctcagccccacaagtagctaggactgcaggcatgcaccatcacatccagctaatttttgtagtgaccaggttttgccatgttcccccggctggtctcaaacttctaggctcaaactcctgggctcaagtgatcctcccacctctgcctcccacagtgctgggatcatagggcataagccatcacacccaactggaagttagcagtttttaaggaacaaatactactcatttcagtcacttgccaagaaactagggctacaaacatcaattaggcttagtccttaccatttcaggtacttgctattcactttgaggggggatgaggagggtgttgggtgttccaagatggaaaagagaaaaattcagaaacgtatttcactaatagggtaaaaaagccaagtagtttatgtagttcttcaaaattctcatctgttgtatgtcagttaggagtttgactattagcagaaaagaactttatctgaagttttcgtcttatcaggtatatatatttatacaaaaataaaattttttttaactttttgatacttttctaggtggtaataagctgcagtcaacaggaaataaagcagaagacataaaaggaaccgaatgtgttaaaagtactcctgt

SEQ ID NO: 37024 - DNA, 1035 bp, Homo sapiens
attgaactaaaccatttatttcactaactgggaattgtcatgtgatcatttttaatgtagccaagtctgttcatctttctctacctcagtttcctcacctaatagtagatggaatatgtatgcatatttgcttcacagagattatcttgaaagtaatgagttttgtatatgtgtgtatatacaaaaacatatagcagaaaaaatacaacaaagaaaagcatggtttagattttcattttataatgttccaggcagacttttcaaaatctatttgagtttcctgacaaataagtgtgcttttgttttataggtggttaagttacacacaaaacttggtaaacccattccatcaacagaaccaaatgttgttagccaagctacttcttcaacagctgtatctgcttcaaagccgactgcctctccttcaagcattgcagcaaacaattgtactgtgaatacgtcatcagttgcaacgtcttcaatgaagggtcttacgactacaggaaactcgtctcttaatagcacatctaacactaaagtatcagcagtgcctacaaatatggctgccaagaaaacatctacccccaaaataaattttgttggcaagtactgatattctctgtccctgctgactctgtcaaagtgttgtttcttctccattgcagcactaacccttctccctgtgttcttggacctgcctcctcccttctctctgggaccttgtttcttcacatatctgcctagtgtgtgtgtatttttaatttttattccatcgtctactggtttcttcccttcagccatacagatatatctgtgtcttcctctagtcatttaaaaaaaaaagatctgcacacacaaagacccttttcccatttctctaatcttaaggtaacctgattggttttttttgtttttttttttttcatttttgagacagagccccactctgtcaccgaggctggagtgcagtagcacgatcttggctcactgcagcctcaatttccagggctcaagcgatccgcccacctcagtctc

SEQ ID NO: 37025 - DNA, 1111 bp, Homo sapiens
tggaaatacatagaaagcatttggcagaagatagtatatttatttgtatattctattcatattggtaataagagttttatgccttttgctaaggagaaattgctggcataaaatttatagttaatgatgtttgtacctattctttccagctttttaaggatactggtacagtaactatagtggcttactcttctaattttctgatgtctctttcctacttcagcccccaaagcaggttacagccaaggtgcaactcagtatactcaagcccagcaaactcgacaagtgacagccataaaaccagccacaccaagtccagctaccactactttctccatctatcctgtatcctccaccgtacagccagtagcagctgcggctactgtggtgccatcctatactcagagtgctacttacagtaccacagcagttacatattctggtaagactgataaactgtgtttaaatgagtaaacaaattaggaagagacttagtagaaactatcttgattgtctttgaaattaccttactcccaataataggaattaaattaattgatagacataaatataggtacataatgtgactgttctgtaaattgtatgcttttttgggggcgtggggaggagaagatcttagaagaatataatatgttcttgggggttttaaggctcattatgagtcttgggcttagcattgcaattaaaggaagtaacaccgagttttctacaggattgtttactttcctgcttttccaaatgaaattgaaaactcaaggttaatactcagggaataccacagacaaattatttctgtttattttggctctcgaagagctatttattatcagaaatagttcatcatggaaatgttgggtagccctttctaaacatccataagatggtggttatgtaacacaccttttttggaagaacagagtacctttattttccttaaataattatatatttctcccagagaggtacaatggctaaaacctttttgtgtccactgctgttgccaatttctagctgaggaagtttgcattttcacagtgattaagatcacacattgccttttttgtagagactcagcttttgtattcctccc

SEQ ID NO: 37026 - DNA, 1008 bp, Homo sapiens
ccaacctcagccttctgttgctgaaacttactatcagacaggtgggttttcttaacctacagagtttctttgtaaactattgaagtatatgacttactgcgtttaatgaagataagcttttgagtccatctaaactcatatcacatcatcttaggaggcaggttctagacctgtcctactaaatgccttggagtcacaattcataatcatgcctttctctcctggaaatgtactccatttctggactttcagcccacagtccattcctgctgaaataagctgtgcaaaagaacctgtgatgataacttctgaacacatttttatctttgccagaaatgcccagaacatatgatactgccaacaaacagcctttgtaaccagtggagaccctttaatgggcccatatttttaattaatctttctctgatcgctaatgacagttggttctgttatcagccaccaatcatgttaaatacagtatgtagaatggttcaaatctaggaagcatttcgtttgcaaagaaacctgtatatttacagactttaaaagatggatttttttttttttagagagagacttgataatttttaaaacaaagcttttgaaaagtgggcagttcttggggtggggggagggaaagcactaggagatacacctaatgtaaatgacaagttaatgggtgcagcacactaacatgacacatgtatacatatgtaacaaacctgcatgttgtgcacatgtaccctagaacttaaagtataataaaaaaaaaaagaaaaaaaatgggcacttcctttaattatttttgaagggtgtgagggtgtgggtagagcgttggattgtaagagagtagaattggcttccagtactggctttattgctaatgtgggcaagtgattttttacctctcttatctctgttctcttacctgtaaatgaggtagttgacccaaatttcagtagggccccttctagttgtaagattttatgagtcccttaaaagtggttt

SEQ ID NO: 37027 - DNA, 1021 bp, Homo sapiens
ggaacagaacttctcaaccctcagcactattgacatactttaaataattctttgttatgcacggctgtcctgtgcattgtaggatttgtaacagcatccctggcctctatccactggatgccagtagctcacatatcaccacctcctctgcagtttggtcatcaaaaatatatgcagatatggccatatgtcccctgggggaaaaattcccccagttgaataccaactgtcctaaagcaacagaagtattttttaatcagctggtcagtagtttctaccttaaatttctttctgtaattgggctagaatagaatatttttcttatggtttctttgtagagatttgtaaaactgtacaacataataaagaacttcacatgtaactaacactaaagttcctaatttggtcagttttttcttttcttcctaatactgttttttatcctagtttttaattcctgttatgtgatacaatctatgatctgaaacgtgtgactatataatgtattgagattaaagaatgaaaatttaaaaaaaaaagaatgaaaattacagaacagtaataaatatgatattgaataggaagtttattgagttcaagtacttgaccttttgtggtccgtcattaaattacttgaaaatgtgctttttatttcagttgaatagcttttaattgaagttggttaactcctggatattaaaattgtattatatttattcttgtactccacaatgtagccagcagccagcttcgggtgtagcctattctcatccaactacagttgctagctacactgtccatcaggctccagtagctgctcacacagttactgctgcctatgcaccagcagccgccacagttgcagttgccaggcctgctccagtagctgttgcagctgctgcaacagctgctgcttatggaggctaccccactgcacacacagcaactgactatggttatactcagaggcaacaagaagcaccaccaccaccacccccagctactacacaaaactaccagg

SEQ ID NO: 37028 - DNA, 1030 bp, Homo sapiens
gacaggttttactctgtcatccaggctggagtgcagtggcacaatcatggttcaccgtagcctcaacctcctctgctcaagcgatcctcccacctcagcctcctgactagctgggactacaggcacacactaccatgtgtggctaatttttaaaaaattttctgtagagatgtggtctttctacgttgcccaggctggtctcaaactcctgacttcaagcagtcctgctgccttggcctcccaaagtgctgggattactggtgtgagccaccatgcccagccttcctcatgcttttggtagaagatatggttccagtccagatgatggttagagacctggctatacagagcagagttagacaatgccagggatgtgtaaatagcaattgctaaatctgctggcatctttttcatatttcatcttttcctgggactggtgactgtataatttattgttcaaactgagacatgtaggagagtgaaaagtactaaaagtaataattacaccggcagtaggcattaaccagaacatatggtcattccttcttgagtctcatggacatttagggtgacgatcagaggcagtataagttaaattggcttcctggttgactcaacattcccatcctattcccacctgctttttgtctaataggacatgttttggggacaaatactagataaggagcagtgggatgaatagaaacagtcttttatataaccaaaattactcttaggtggtttagtctggatgtatttaatcttatcctgttagtaaatgttaaatacaagtttcacagacctgttgtatttgtattttaaatagtatcttttttttcagttccaggaattttggaaaagtatgacctgttactggcattttcttacagatatggagttgttcctagaaaatgttattcccaaacaagtttttcactgttttaatgtaaacttttcctgtcatattggcatatatgtagaaaatgttagttttatatcaaaatatggaaacctcatccagatagaaatt

SEQ ID NO: 37029 - DNA, 1065 bp, Homo sapiens
atcaaagctagacagtatatgagtactctgtagtttttaaaaattcttgaaactcttgtgtttcactccttctctttccctacttcactccccaaacttaatgtatactcttatttatgataacgtttacattatattctgtaatcatagtttatcttctctaatttagattgattctaaaactttaaagcaaaaactgttttatcttatcaatagtatttattgtggagcctagtaccattctatgattatgatttctaatgtgttccattttacaatcctgtaccgcttattagaaaatcttcctaggctcaagttcaaatggattttttcctcttttataccatactgattgctcacctataaagtcttttattgggatcatgcctttcttgagcagtttacatttcctgaattcattcattaccttttttctttttcttttttttttttttttgagacggagtctcgctctttcacccaggtgagactgcagtggcgcgcgatctcggctcactgcaagctccgccttctgggctcacgccattctcctgactcaacctcccgagtagccgggactacaggtgcccgccactgcgcccagctaatgttttgtatttttaatagagacgggctttcaccgtggtctctatctcctgacctcgtgatccacccacctcggcctcccaaagtgctgggattacaggcgtgagccaccacgcccagcctacctttttttcttaatcatgttgtcatttcttaaaatttgtctaggctccctgtctactggctctgtgccgagtcctctgtttttctggatatctttctctgagaggcttctgtccttcccctaattccaatctatactcacttctctctgggcctgctgccaccacagctgctgacctaggctttcatctgtttgcaggatcccatgttttcttggtttactttttgttttagctggaatatatcttcatgtagcttcctaagaaaaggttgtagtaggtaaactccttccatccttgagtggttaaaaaatctttattctgcctccatagtttg

SEQ ID NO: 37030 - DNA, 1184 bp, Homo sapiens
ctgggctgaagtgatccacctgccttggcctcccaaagtgctgtgattacaggtgtgagccaccagcacctggcctaatttggatgccttttatttttcctgccatattgctttggctggaacttaagtactgtgttgaatagaagcagtaaaagcatgcagctttgtcttcttcctgatcttagaggaaaagctttcagtgtgtcatcgagtgtgaggttagctatgggcttttcatagtttttattatattgaggttatttccttcaattcctagttggttgaggtttttttttttctttttttaatcataaaaggatgttgactcttgtcaaatgctattgagatgatcgcttgggttttgtcttccattttattaatgtgtattacattgatttatatgttgaacttgtcaccgtattttaaactgttaaagaaaacacaaatgttgtagagagtagatgtgatggttaagagcacatacacactggggccacactgcttaggttctggcttttactctgccacttactagtgatttcatatcttgggtttagattaaacaattttctgctaggtttctattaattataaaccttattttactgtaattagtagtttttattaatgaattaagcaatttcattttcctgttgcgtgacagaaactttttgcataaagggataataaatagagaccaaggaaataaatggtgaataaccattacagactcaagttaatggtctgcatcatgaaatgaagattctcaaacttttgggtttcaggattcctgtagcacttctaattattcagaaccccagagtttttgtttatttgggttatattggtatttactatattagaattaggctgggcacggtggctcatgcctgtaatcccagcactttgggaggccaaggcgggtggatcacctgaggtcaggagtttgagaccagcctggccaacatggtgaaaccgtgtctctactaaaaatacaaaaattagccagaaggtggcagctgcctgtaatcccagctactcgggtggctgaggcagggaaaactgcttgacctaggaggcggaggttgcagtgagccgagattgtgccactgcactccagcctgggcaacagagtgagactccgactcaaaaagaaagagtaaaagtattacacattaaccaaa

SEQ ID NO: 37031 - DNA, 1043 bp, Homo sapiens
cactgttgagcattaaacttggactaaagggaaggtcagattgtgtttcatgtgccatgaaagagaaagaaatgttgtatctatcaattactttgctgttttacccaaaattgaaacatgcacacacacagtatgttttctaaggtacgaaaagcacatttaatgtgaataacagaagctgtctatgttttctttagatttttcccacttcattctttataactgcagaaatacaatattctgtttccacctggtagtggttcctctagaaatttaacatgaatatttcacttagtctaaagttagtcattagttttattcccctaaccaatagacttaaaatattttaaacttgatcagtcctcctgattttgtgttcttgttatatgatagctcagatttttttaaccccgtgaccaattactgttggacacaattacttgttttatatggtcaatgattatttaagtttaccttcatatttaccactctttttgctcaacattcattcattctgagatcatttttattctttctaaagtaaatctttgagaatttccattagcgtgggtctaaaaaaacaggttttcctcttgctttcgttttttgagacagggtctcactgtgttgcccaggctggagtgcagtggtgcaatttcagctcactgcaccttcaacctcccgggctcaagcagtcctcccacctcagccccctgagtagctaggattacaggcacgccaccatgcctggctaatttttgtattttttagtagagacagagtttcactgtgatgcccaggctggtctcaaactcctggactcaagagatctgcctgcaatagcctcccaaagtgctgggattacaggtgtgaggcaccacaatcagcctgagagttttttgggttttttttcttcatcttaaaatatctttgattctacctccttgagtagtcatcacttaatctctgtaggcagttttttccctctggctgctcataagagtttttctttatctttcatgtttacagtttcacttagatat

SEQ ID NO: 37032 - DNA, 1076 bp, Homo sapiens
aataaaaattcgggtttactataattttttaattactgtaattcttatttatagaagtttctaatcattctttttcattatcccttattttaatggaaattatttgttaaatgactaaaattaaaataatttaaaagatccagtggacgcagatgggaaatggtgatagctgtctttcctggtgagttaaagattacaagaaaattaacaattttcatacgacatttaaccacctcgctcccctgtggtctacaccattctagtgagttggtaggaattgtaggataagctgtcttattctagtgtttaagaagaaatcaagcggcagggcacagtggttcatgtctataatccctgcactttgggaggctgaagcgggaggatcacttgaagctgagtttgagaccagcctgggtagcatagcaagacctcatctctgtttaaaaaaaaaaaaaacaattagccaggcatggtggagtacacctgtggtcccagctacttagaagactgaggtaggaggatcacgtgagctggggatgttgagggtgcagtgagctgtgattgcaccactgcactccttcctgggtgacagagtgaaaaaaataaaaagaagaaatggaacctaaatttaaatttcttctaaaatctatggtaataaaattattattataataacattgcaaagataatgggagcatgacattacaacatcaagaataaggaatagccaggtgctgtggctcacacctgtaatcccaacactttgggaggctgaggggagaggattacttgacctcaggagtttgagaccagctatatataaagaactcttaaaactcaacaaaagtcaaataatccaatttaaaaattggcagaagacttaaatagaaactttaccaaaaatgacatacaaatggccaaaaagcgtatgaaaagacgctcaacatcactgactaccatagaaatgcaaatcaaaaccacaatgggccatcacctcacatttagtgagctattacctacattatagtaaacccaattttttattccgtattgccctgaaaggtatatggactgtg

SEQ ID NO: 37033 - DNA, 1122 bp, Homo sapiens
attcaggcttataaatgttgtaattgatgaagtatgttagtattatttggatggatctttagtctacttattaaaggttgcttgactattaattgtccatgacaccactctgtcagaatacaggattagagtgattgttctgagtatatcatttcttagtatttcatgaaagccatgtacagtacagcttttattcatacagagataaaatgaatgaaataaactttgggtttttttttgttttatttgaatattagtcttgtatacactttatattaaagtgcatttgtagggaataattcacttatttaatattttatgagcatctacaatatgcatagtccctgctttcagggagtttacacttctggggcatgagggtggagacagatgagtctacaaataactatgccattataattaagttttaatgaaatactaaaatgggaaattggaggattttgactatggagtttgaggtagacttcgtgttctttcattctgaaaatcaagggaaggtcattttagacaaaggaaaagtattgagccaagacaaatatctggattgcatgatataatagagactgggttggctctgaagtcagactacctaagctgaatctggctcctcctattacctgccatgtgaccttgggcaaacagtctgttgttagtttttttatctataaattgaagataatattttctttgcctcataggaaaactgcacatgtaagagaaaatgaaatgtcataaaccgagtgtacctgtgtaacttgcacttaaattaaaaacaaaaacagaacattatcagtatcccaggaggtttttacattctccattgtgttgtttcgaggattcactattatttgtaaggtggacctggcagtgactcacacctgtaaccctagcactttggtaggcctaggctggaggattttaatcccaggattttgagactagcgtgaacagcaaagtgagactctgtattattaataaaatgaagaaaagaaaacattatttgtgaagtgttcagaacagtatctggcatatattatatctctatcaatgttagccattattcagtaggtggctggtgaatatggatgaaactagagaaag

SEQ ID NO: 37034 - DNA, 1033 bp, Homo sapiens
ccacagggcctactgtgggactttatgtatggatttttgtatacgtagcggtcctggaaccaatcccctgcttatatggagggatgactgtatttatgtgtgaatgatgtgattgaattgcttcacctatcattgaatacagataaagtaaacatcctacacctaaatgtaattccagaggccaggcgtggtggctcacgcctgtaatcccagcacattgggaggctaaggcgggtgtatcacctgaggtcaggggtatgagatcagcctgaccaacatggcgaaacccggtctctactactaaaaatacaaaagttagctgggcatggtggcgggcacctgtaatcccagctactctggaggctgaggcaggagaatcgcttgaaccggggaggtggaggttgcagtgagccaagatcgcgcgattacactctggctgggcaacagagacagactccgtctcaaaataaaatacaataaaagtaattccagctcttagttttcttgattacagttctgtaagatatttgattaaatttattttagatttagactttttagcttgttaatatttgagattcataatggcacactaaagatcagattctttaagatgtaaagacctgtaataatgaatttgtcaagtatggctactagtaacttgtagattagttaccacatttttcatttgtgttcatgcatattagacaattttgtggtaagcgtttctcagtcttgtgttctaagtcccataaactatggaattttttttttcctgttttgtattttttgtttttttttttgtttttgagacagagtctccttctgtcacccaggctggagtgcaatggcacgatcttggctcactgcaacctctgcctctcgggttcaagtgattctcctgcctcagcctcctgagtagctgggattacaggcgtgtgccaccacgcctggctagtttttgtatttttagtacagacgagtttcaccatgttggccaggctggtctcaaactcccgaactccggtcctcc

SEQ ID NO: 37035 - DNA, 1044 bp, Homo sapiens
catcatatagttgggttttcatgttcatcatctgtaaaatgagatgctgggcaaactatctttttgggctgaaacttgtggttttgagaaaccaagttactgttttccatggcatcctaagatgccatttgttgtaaaaggtaccattattgtatgtagcactaaaaaaaaatgctgccagttaagacactgcttaagactccattaagagatgtcaaaatgtataaatgtgcatcatattggtgaaactagattttactaattgttgaatgccatgtggcattttacaagtgttttttcatgaggcctgcattccagaaaaagcactgagatgacaaattattacagcaaaatcttgggggcatttcaagtattagcaaatcgtttgcttataatttttgataattagacaaaaaaagtttcagctactttgataaaactttttaggacttttaaaaaattcaacagctttttggggtacaagtggtttttggttacgtggactaattatatagtgaattctgagattttagtagggctaataattttcaaggagaggaaaaaaccatctttttctcagaagagatagctaatcagcatctgtgccataaatctgctggcaattactagtattccgtctagaaaagattgtgtttaaccattaaaattttacttgttttactcaggttttttctgttttcctcatatgggctgagtgataagatttgttgaattactaactttatttactgtaaagtggtgggttctttgtggcacttctgaaatgtttttcctaaatgcagacctacagatagaaatgaagaaaggaaatgctgatttaaagataattaataattttttgataaaatatttatgtgattgttttatcccagtatagggaactgtgacagaatttctgtttctaataattttttttttggccttgaaactgaaaagtttaaactgtaacaacaatccaggttactaaattgattaagtgtacatctgatgagaaaagactagtcttttgacattacttatatt

SEQ ID NO: 37036 - DNA, 1054 bp, Homo sapiens
ctcatcaaaaccttgcataattttcaatcaaagcagaggaccttttctgcgaaagtaatgagatttttctggagcaagtgtagaatcatgcatttcaggataaaactgatggatgccatttctaaattggagaagggaggtttctgaaattccagtgacaatgactagggtaggtgatgcatcttaaagtagattgataccaggaactgcagccatctaaagagagggtccagattttgacggggtgagtgtcacaggacaattgaccgtatttccccgaggctgagcagctgtccccagctgctgtgtgtttcagagctgaagacagatgtatgcagatttcccactgcatattggaaaatactagattttcatgggcataactgccagggcattgagtctgcccctggagttttgatttattattaaattccccatggacttagaaaacagatgtgggtcacccagcacctatcagggtataaatccatgtcagtgattaatctgtagccttaaacttcctgttatgaattgaaaatccttctacagccagggaatgtaaatttgattaggttgacaatttatatctccctcccatgcctgaacccataggcagaacacagtaataatactgtggtcaatttagaatcagccccgtgtatgtcagtcctcagatgttaattggatgtttcacacagaggtcaactttggctttgaatgcctcatctgtgctgattggctgttgtcattgtgtttgttgtgcagtatctatatacttttcatacggtgagaatccctccttttgtgtgacagtagtgggattcaatgtcctgctgtccagtgtagtacttaagtttggagttttccccttctttctaccatgtggtagctatggcatgggcatatagtttagaattagccaatcagataattggataactcctacccaggaatttggaataaatgacaaagaacaaatggtcagttaagaattagttatggtggtttacaggtgtccaggagggtgtaaggtctgactccaccaatagtgaca

SEQ ID NO: 37037 - DNA, 1043 bp, Homo sapiens
ccagagcagtggtggttgtggcagactcagcacatagtagggccagggatgctaaggcctgaggtgcatccaggatctttacaggtcatagctattgttatgggctgaactgtgtcccaaccctccaccccaatttatatgttgaagccctaacccccagcacctcagcatatgactatatttggagataaggtctttatggactgaatgtttgtatttcccccaaattcataagttgagctctaaacccccaagctgatggtgttagcaagaggtcctttgggaggtgattaggtcatgagggctttgccctcataaatgggattagtgcccctataaaggagacctcagagaactccccagcccctattgccatgtgaaggcacagagaagacagctgtctatagaccaggaagcaggccttcgtcagatactgaatctgatggtgccttgatcttggactgtccagcctccaaaactgtgagaaataaatacttgttgcttaagccatctagtatttggcagtttgttatagcagcctgaaggaactaagaggtaagttaattaagtgaaaatgaggctgttagggtgggccataatccaatccaactggtagccttaaaagaagaagacatttagagacacagagagacaccagatacgtgcacacatggacgaccatgtagggactcagcaagatgacggccatttgcaaaccaaggagacacacaccctgtacaccttgatcttgggctcccagcccccaaaactgtgagaaaataaacgtctgctgtctaagcttcccagtctgtcatactttgttacagcagccctagtaaatgaatacaattgttaagaggggaggaaacctgtttggcatcttcagctttgcatctgctctcctgcacgcagttcaaaccttcaccataactttttatgtggctgtaattctctgtttctcgtcttgacctcttcctcttgaccttgagtcccttgagtagggggactctgtgttggtcaacttctattttcaacctcaaaga

SEQ ID NO: 37038 - DNA, 1045 bp, Homo sapiens
agccattctgactggtgtgggatggcgtgttattgtggttttgatttgcatttttcttacgatgtgtaatgagcattttttcatgtttgttggctgcttgtatgtcttcttttgagaagtgtctgttcatgtcctttgtccatttttaaatggggttatctgtcttttgctggttgatttgcttaaattccttacagattctagatattagtccttcgttgggtgcagtctgtgaatattttttcccagtccataggttgtctgtttactctgttgatagtttcttttgctgtgcagaagttctttagtttaattaggacctacttgtcgtttttatttttgttgcaattgcttttggagacttagccaaaaattcttcgccaagaccaattcaagaagggtatatcataagtttttcacaatttggagtcttacacttaaatcctcaatgtgattaacatttaaatcagtagacttggaataaatgattttacacaccgcaatgtagatggcctcacctaatcagttgaaggccttaagagaaaagactaggcaactccctttgggtcccctcccattgtatgggagctctgtttttattctattaaatcttgcaactgcgcactcttctggtctgtgtttgttacagtttgagctgagcttttgcttgccatccaccactgctgtttgccgccgtcccagatctgccattgacttccacccctccagatccggcagtgtgtccgctgcactcctgatccagcgaggcacccattgctgctcctgatcaggctaaaggctcgtcattgttgctgaacagctaagtgtccagggtcatcctaattgagctgaacactggtcgctgggttccatggttctcttccatgacctatggcttctaatagagctataacactcactgcatggcccaaggttccattccttggaatctgtgaggccaagaaccccaggtcagagaacaaaaggccatcttgggagcagcccacccctatcttgggagtggcccgccacatcttgggagctc

SEQ ID NO: 37039 - DNA, 1033 bp, Homo sapiens
aattcattatttgtcttttcaaaaaaacagatcattttgatacagtaggtagcttgtcaggcatgagcagggtaagggagggctccctcccccaaccaggaatgtcaagtgaccatcaggtcatggtcaggtggttgttaaagtgtctctctaaaataataattggttgcagctggcaccagcaaaaggcagtctcccagcagaaagacaaaacctgaaacaggtgatcagcagcttcccgataagatcacaggagttggacaagtgtgctcaagcatgcatgttaaaaagcaaaatgatagagtttaactggtatatgaccttctaggaaaattcagctggtaagggaataacacctcaaaagagcatacatacaactttgtatgtatttcattctttttttatggctgcatagtattccatggtgtatatgtatcacattttctttattcagtccatcactgatgggcacctaggttgattccacgtctttgccattgtgaacagcacaacaatgaacatatgagtccacatgtctttttggtataatgatctgttttccatactcagtaatgggattcctaggtcaagtggtagctctgttttaagttctctgagaaatctccagactgctttccacagtgtgtgaactatttgcattcccaacgacggtgtataagtgttctttattctctgcagcctctccagcatctgttgttttttgacttttttttttgagatggagtttccctcttgttgcccaggctggggtgcaatggtttgatttcgggtaactgcaacctctgcctcctggtttcaagtgattctcctgcctcagtctccctagtagctgggattacaggcagatgccatgatgcccagctaatttttgtatttttagtggagatggggtttcaccttgttggtcaaagctggtttcaaactcttgacctgaggacatctgcctgcctcagcctacaaaagtgctgggattacagatgtgagccaccatgcatggcctgttttttgactt

SEQ ID NO: 37040 - DNA, 1108 bp, Homo sapiens
tcactcccccttgagataaacaattacctcttgaagcctcttcctatgtgggatctagactaatgctaagtagccataaaatgccgtacgcctatggttcagcaatgtatagacaatcactaatcaatattacttctgtaaaccagtgagaattcctgattagcaattttgtaatcaccccctctcctgattcattctttgttctttacaaacttgagcctctcctttgtactccagagccctgctcaaggcaacctggactccaggctgctgaaagtgtcccaggttgttgtccttaatcttggcccaaataaagtctctatattaattttgcctcagcttttgcctttaagttgacattttcacactgtttttcatatggtatgattttttaaatttagcaacaattaaataagcaattaaatgtagctatattttctcttttaacttataaagtcattccgtcatctcagaatagttaaaacgtctttagtgatatatatttcacattaactaagtaaatatgttgatgagcattaaagaacattaaagtatagttttataatttaacatgccgtttaaaaaatgatgatccatctgttatttttaaatgttaataacagtctaatttactttcatttcaaaacagtaatttcatacaaatacttaacaagtcacatgcatccaatcttaattttagagcattaaactttaaagtctctcggtgccatttaatttacaggtttctttctgccaccaatattcatatctggaaaacatggacaggatttcttaattttctggagtaaatattctgtctaacacagttccagttaacatgtacatttgccacatatagaaaagaactaacacatactgaattctgatttccgataacagaacatagcatgtatgctgtcttacagtaacaattaaatgtttttcacaatgcgtatttttacagtgggacaatgaagcaatacaaacaaaaccagcagacacgttatctttagtagaaaatgttatgcaaatttagtgagaatattacataaaccaagtaatagtgaaacacatactcctcagatttccctagttccttattggaact

SEQ ID NO: 37041 - DNA, 1022 bp, Homo sapiens
cattcatgctgtctcatggttaccaagctgctcctctgtcaccatgtgttatgcccgcattactgaaagaaaagggccaaaagaccaaacttcatggactgctgaataaccagttaactcaaatttaatgacttgaatttgattatttattgtgattgcctagttattattaaaaattaatggccacaacccctgctaagctcagcggaaaggatcttttgtatgcaaaacctactgctttagggatggtgatgtggttttttttgtctgtttgttttgagacagggtctcgatttgctgctcaggctagagtgcagtggcatgatcatacctcactgtagccttgaactcttggattcaagagatgcttccacctcagcttcccaagtagctaggcctacagtcatgtacataccaccaggcttggctaactttttttttttttttttggtagagatggagtatccttatgttgcctaggctggtctagaactcctgaggtcaagtgatcctccagcctcagccttccaatgtgatgggattataggtatgagccactgcaccctgccaggaaagttgttgaaaaagactagcatgttggtgtgtgttggcagctcctcagatctttcagtatgggatataaaggggttgtaattgattggttggaaataatcagtgtgcaaacaacaatggaaatggaagagaatacatcttggtaataaaatctctgtctgtccatggcctataatataaattgcataaatttctagtaatttgatatcttgcaatgttgtaaaaatcaactacttttatactccaaataatagggaaacaatgatcatctagagcccttgtcaagggtctcctattgagagtccttagacagtgtgacacatctctatggcaaagatcagatataatatgttacatttacacaagtaacagacttctggctctcctccaactcaggtatactcttctgccgagagactgtacttctcagcctcccttgtggctaggtg

SEQ ID NO: 37042 - DNA, 1057 bp, Homo sapiens
atgttgctagaaaggccgggcacagtggttcatgcctgtaatcccagaactttgggaggtgaaggcaggcagatcatttgaagtcaggagttcaaaccagcccggccaacatggtgaaacctcatctgtactaaaaatacaaaaaattagctgggcgtggtgtcaggcgcttgtaatcccagctactcaggaggctaaagcaggagaatcgcttcaacctgggagacggaggttgcagtgagccgagatagcatctctgcactccagcctaggtgacaaagcaagactccatctcaaataacaaaaataaaattttaaaaaatgttgctagatagaaggagggacagtgcataatgctaagagtcaatagatttgggaatatataaaatttaagcatttaacaacagaatccaaagatactttagataaatattgacagaattgaaggaaagaatagacaattcaacagtagtagttggagattttaatacctctttcaatgagaatagaacaaggagacagatcaataaagaaaaagattttaacacacaactaactgtaacacacatctatctataggacactctatttagcaaaagcagaaagcatacttttttaaagtgcacgtggaacatttttaaaagcctcaataaaattttttaaaattgcaataatacaaattatattcttcaacctcaatgaaattttaaaaatcttcaaaaggaaatttgagaaatttacaaatatgcagctatcaaacaacagattcttaaataagcagtgggtcgaagaaattacaagaaaggtttgaaaatgctttgagatgaatataatgtacatataaaatggtaaaaagtatacaaaaaactaaagcagttttcagagtgaaacacatagctatgaacatttacagtaaaaaagaacagtatccaaaataagtaacctaaaaattactttaagtttgttccaagagaaaatttatagaaataaattaaaaacatgatcaaagatttactgcagagagtttagaattcagagaatatgagagtttgaaatg

SEQ ID NO: 37043 - DNA, 1051 bp, Homo sapiens
tggggaggcctcacaatgatggtggaaggtgaaaggcatgtctcacatggcgttagacaaaagaagagaacttgttcacggaaacacctctttataaaaccatcagatcttatgagacttattcactatcatgagaacagcatgggaaagacccacccctatgattcaattacctcctaacagttccctcccacaacacgtgggaactgtgggagctatagttcaagatgagatttgagtggagacacaaccaaatcataccaggtattaagtaagtaaatatggcatattgttcttttcccattaaatgcatttactgtcaaatttccatttgcctttttttcaaatcctcttttcaaacatacagtttgctttcccactctgaaaaaaaaaatgtgatttatgaaaatttcacaagactatagatggctatacttaaagtaagaatataaaaaactgaaactgatatgatctaaaacaaaaacgtcagttcaggaaatacaaatcaagagtagaaatatttgagttcctgaatatcatagttctgaaacatgcatgaatgccaaagtgaatttctaggtctgattagaaatctactgaatttctaaatctggaccattagaccaaatgttatttattgtaaaagcattaggtgacttaaacaggactttcacttgaggtagtattaaaattaggaacaatccattcctcaagtttaatcaaataccgatgtttctgtttagaaaaatgtgtgggagaaagtcaaaagtactgcagtaagcaaaataagaggcccccaaagatatccagctcttaatctctggagtctgtgaatatgttattatgttacatcgcttaagggagttaagggttcagatggaatttggcgtttaaaaatgaagattatactggattatctgggtaggcataatgtatcacaaggatccctaaaatatggaagagggagttaggggagttagtatcacagtgatgcgcaatgtgagaaagactcaactgtccgtagctggttttcaggataaaatgggatcat

SEQ ID NO: 37044 - DNA, 1027 bp, Homo sapiens
cttttttaaactaacttttctgctggaaaattctatctgtcaatagagttcttaaaaggatttgtattaagccttccacagatactctgatattaaaatcaggtctgagtaaacaggtacattctgtgtagttaaaattaaatactgctataaatatgcccagtggggtaatccaatttactagtcacttcagagctgatatgaaggtcaaaaggtacttggcaacatcgtttggaatcgggattacttgtaggttatttatccttaagaagtattgtaatgtctgtgtataaagtgcattattccttagaaactgcctcggtcaaataacacaggcttaagattctcattttctgtccctttatgctgtgtacatgcagagtcaatccattgttattacacagccaattataggaccaaaacataatttgcatttcttttctcctttttagtcataatcttgatgattatagccaagctctattttgtaattttaaagaaatcccctgaatgtacttccacaagccattttaattattctcatgatatctgcggtaggtaggtgaaaatagtcactaacagccataaatgataactaagaagtatgtgaccatagcaatgtgttaggagacacatatttacgggatttttatttaaattgattagcattgcttcatgcatacaccagtggttctcaactgtccatcagactaagctggcaagattgttaatagtttagatactcaggttcatgcccagagatggttctcattttctatctgtctctatctctacctgatgcccagagattgttcatgcccagagatagttcactttctttaagtgtatctctagctctctctctctttatcatgtcctacttccagatgatacaaatttgcagctaaggctgagaaacgctgatctagatgagaatgtaccaagcagaaagattaagtgaattattaatgcccacaaagtcatttcaaatgtgtatttatttattcaattgatttgactgaaaact

SEQ ID NO: 37045 - DNA, 1237 bp, Homo sapiens
tctactaagaaaacaaaaattagccgggcatggtggcatgcacctgtaatcccagctactcgggaggctgaggcaggagaattgcttgaacccgggagggggaggttgcagtgagctgagatcacaccactgtactccagcctgtgcgacagagggagactctgtctcaaaaaaaaaaaaaaaaaagaaaagcagcctttgcccagatttagtatgctcttagattgattagttcccatactttgttttatctgaacaatatatgagtagatggagaggatattggtggtaaggtccattcacaatctggatcctgaaaggtaataatacattgaaatgtagatttttgaatagctgaggcttttgagctgtgtattatttttgtattgctgaagtattgaattaccacaaacttggcagcttacaacgagaaaagttcatcgtcttacagatctataagttaggagtccaatatgggtctcactgaactaaaatcccaatgttgaaagggctgcagtgttcctctttagaggctagaagaaatattttatttccttgacttttacagcttctagaggctatcgacattccttaacccttggtccccatcctgcatcaaagccaacaaagttttatctctctgatcattcttctatagtcacatctctctttctgaccacagccaggaatgattctctgcttttaagaacccatggactatatgccaaacagaataacgaggataatttcatctcaaggtacttaatcacatctacaaaatctcattcaacatggcaggtagcatattcacatattttggggacaacaatgcaaacatctttgggggccatcattcagcttactacaatgtgtgatttcagtaatagagctacagattcatagtagggtctttctcaataatgattttgttcatactgcatcttctaaaagaggagagtcataaaacttgattatttaatcatgattaggaaagtttggtatataacacagtagccatattttatacagttgtggctactgtgaaataggaagctcagcagcagccattgggagtgtgcatgtcttggccgtgagtaatctgagtaaattctacaagtatgtttcagtaattgaaaacagaagacattcatatgaaatttgccgaaagtcctattcccagcgattaagtaattatctgttataaatcaaaattactccaatagtcataaaaattata

SEQ ID NO: 37046 - DNA, 1043 bp, Homo sapiens
ttttgtaatataggcagatgttaagatcacgtcagcactgctgtgcaaaggtttatggtagatattattttatatctttgttccactgtctgtcctaaaataaaaatcaattggttttttgtttgttttcttgtttttaacatatcaacacaaaccaaagtattctgtatgctccattgataccatctcattgttgtttggataggcaagataaacatgtcttaagtttttaaaggttacagaagggttgaaaatgatggaatccaatcactgattcaaaatgtgtgtttactaggtagtatttaagaatgaatgcatataataattattgttatttttaatttgaaaatataatagggaccttttatcaatgtggtgagagtctttctatgtccagtctggttttttgcccttctagagcactcctttttacccatagcctttggatgataatcaacaacatatatgttgcttctcattttaagcacttttcaatacttgcagaaactttagtatatcatggacatatatgaaattgtgaggactttgttattgagatttttaattaaaataatcaatcataataaaatacattttatagtaaaatattaaaatacaaatataataataaggcaaaactatagtagcatctttctctagattgcagtttaaagaaacattgacttcctaatgttggaatcaatctttttaaaaagtttatattttaggtttgcgggtacatgcgaaggtttgttatatagataaacacatgtcatgggggggttgttgtacataacatcacccagaaattaagctcagaatctttttctttcatttttagctatattatttcccttatgttggaccataaatctaaaattgtaattaaatgtccatcctccaaaaatggatatgcaagcgtgtacatgtctttaaaggtaagacacagaagctgccaatgtaatttgtacagaagttatattttttatccgtgtgtgcacatacaaggtggaatgcccattgtatgaggaacattctgtaca

SEQ ID NO: 37047 - DNA, 1088 bp, Homo sapiens
cttaatatctggcttcagatcttagacaggatcagagggccagctcaaatttgcaaggaggggaggtagatcccaccattttatgggtgaatggcaaaatcaaacagaaattatgtgggatgggagatactgatgcaggcatctttggaaacattctacttagctaattttatgctaggctttaggtcaagaaggagagagagagctgacatgctgtggtacacacttatagtcccagcgacttggaaagctgaggcaggaggattgcttgatcccaggagtttgaggtagtgtgcgatgatcgttcttgtgaatagccactagccactgaactccagcttgggcaacattgagacaccctgtctcttaattttaaaaaaaaaaaaaaaaaaaaaaaggaggaaagaaagtggtctcagtttttaatgtaaatatttttaatgggataatgatattttaagattaatgtatattgtatatcagttaactataggtcaataattatataaaacttaaggtacgaaaaacatttatttttgctaacatatctgtgagttgactgttcctggcttggtgaggctgcgagctgcagatagagtctaggtatgttttctgtgtgtttgttcccccttggatcagtggactacctgagaatgtgtttttgtcacagtgatagaatcacaaggaaactccagttctggaagtacattttaagccattgcttctatcatgtccactaacattcagtcagccaaagcacataccttgtccatggctaacattgatagtatagataaatatacctgatctctagcaggaggaactgcattgtcttggggaaaggttttagatatagggaggggtgatgagttgggaacaataatgtagtctgccacaaacatattaaagtgtaactggatatggttgctgcagaattttgaacctttgttttaattgtgatttttactctttttcccctatctagtgcccttttgtaatacagtaattctcatgatttttgtctgaattgaaatcttctgagattagattgtctacgaaaatacagtctatcctccttgttttcagct

SEQ ID NO: 37048 - DNA, 1106 bp, Homo sapiens
ttgggtcgtaggagcagttgtcatgttactatacagctactgaatgaagaagagttcttagtgaggcctgggtgaacagctcttcttagtattctgtgtgaccccattcgaccttttaacaaatccctaagtaaataaatagcccctaaggtaaactaagtttttctctgctgtttttttgcttgagagagctataactgtaatagacttatatttctgaacattttagtgcttgccaatatttggtaatatttatgtttcctatatttgtaatgaacattcttcttcaggtacattttttgttaaattattgtttcatgcataaaagttcaccttttattgtataaaattgactcagattaatttatacacattgacaatgggtaaatagagtttttcagattattaaaagctgaaggatgcccatgtaagcaaaaaaaaaagagaaaaaaccaacaaaaataaacccaaacccctcaaacaatttcgaacacaaaacattcttctcacgccggcatccctgcttgcaggtgtgaagggggcaggaatcagcgaggtgtcctgggctgagtccccggagtgggaagaggtggccggaaggggatctgaggaggagaacaggggtcctggtggtctgtgcttcttcccagacacgggagctgtagaggagacctctgcagcagatgctaggggggccactaggcccaggcagtcttgggacttgggtctgtcctgctgtgcatccatagtgggtgctttagaaacgggaggcccacccgaagcccctgttgcaagtgaggacaaagtgtgggaaggccgtgagggtctgcagtccgagatggccttgtcctcaacgtgcagtgcactgttgatgcggggcctagaggcctgggatctgggggagccacccctgggggcgagtgtctgccctggtgctgtatctgccttttcacagcgggtgtcacgcgaagagacagcctgaggtccgtcctcactcactgtgtttgaggaactgagggccagctggcagtgggatgaggctggccccctcctccgctttagttcctggaggccttccgtagagctgtgggagctggagctggcat

SEQ ID NO: 37049 - DNA, 1049 bp, Homo sapiens
ttgagacctcatcaactgggactttactgtccatatcataattaacattttggttacaaccatttaactttccctcatcttcctatcttcttctgagttctcaaaactctttcaacccgttccaaagttgcttccacattgtcaaataccattattgcaatgccccaatccttgataagattttctgtattaggacattcctgcattgctataaagaaatatccaagattgggcaatttaaaaagaaaaaaagttttaactggttgacagttccgcagactttacagaaaacgtagtgctggcatctgctcctcctctagagaggcctcgggaagcttataatcatggcaaaaggtgaagagggtgcaggcatgccatatggtgaaaacagggacaagtgagagagagaatgggagggggtgccacacactgttaaacgaccagatttcacaagaacactctattgcaaagacagcactgaggcattagagatccaccctgatgtggtttggctctgtgtcgccactcaaatctcatcttgtagctccagtaattctcatgtgctgtgggagggacccagtgagagataattgaatcgtgggagctggtctttcctgggctttctcatgatagtgagtaagtctcacaagatctgatagttttaaaaagaggagttctgctgcacaagctctctctttgcctgctgccattgatgtaacatgtgactttctactcatcttctgccgtgattttgagaccaccccagccgtatggaatgatagcccattaaaccttttttcctgtataaattacccagtctcaggtatgtctttattagcagtgtgaaaacaaactaatacaggaaattggtaccagtagaatggagcattgctgaaaagatacccaaaaatgtggaagcaactttggaattggataacaggcagaggtttgaacagttcagagggctcagaagaagacaggaaaatgtgggaaagtttggaactccctagagttccaattttggaacaattgagaaactgctgttgaag

SEQ ID NO: 37050 - DNA, 1052 bp, Homo sapiens
ttttggaaatgcaggaagttcccaccttgactatcccaaagattctgatttgatggaagcatttcattgtaatcagacccaagtcaacaggtcagttcttaatatagaggttgtcattggtgataaagaggaggttaaataccagatttctgttaaataaaaacactttcaatctgttaattaaaatgcacagcattttataaaaatgaatagtagagtgctggacttactaggggatgtagggttctaacagtgaatgaattttaaaacagaaaatattagcaaattggataagtacttgattttattcttagatttgctactttttatcctttacttgggagttctgagcagtgttcactgtgttgatataacagcgttttattttttcttctacagatacaagatttccttactgaaaccctctacaaaggcattagtcctatcttgtaaggtatctattcggacagataacagaggcttcctttcattacagtatatgattagaaatgaagatggacaaatatgttttgtggaatattactgctgccctgatgaagaagttcctgaatctgagtcttgagtatgacaattcactgatatttatgtgtacatttatgatagatgaagttcttattctgagtacagtactctttgtcatttcatattggattttctatagagaagaagcacaatggggaagataggagcaaggtcatgtaccctaatagttactatgttttgtaaatccattttgtagagggcatgtaaataaatgttttcctgtagtcatagattattcaggactgtcctttagttctgtcttttgaactcatgggaataattgtgagtcagcgtaacatttcaagagtctaaaggtggccgggtgtggtggctttaatcccagcactttgggaagccgaggtgggcggatcacctgaggtcaggagttcgagaccagcctgaccaacgtggagaaaccccatctctactaaaaatacaaaaaattagccggacgtggtggcacatgcctgtaatgccagctactcggg

SEQ ID NO: 37051 - DNA, 1019 bp, Homo sapiens
ttaggaataatagtttaatgtgcattgaatagagtatcacctttttcaacaagatttattacatatcatttcctaagcatctgccttagaaatacagttacagtggaaggactttaagaaagatcaacatatgttaagaacatgcagttcagtttgtttcagattaattttttttcaagagagttattttaaagattcaaggaagccataagtcatactaaataatattatatacagttttgttattgtgacttacatttttgttacttctaaaaagtatattcaacctgtatttcccaaagaaatgtaagtgaatggagacctcaaataataactgtattcataaaactcgtgtcttaaaacaaggcttacttactagacataactgaatgtaaaaagtgctttttcaaatctgtttgcaaactcgtgggggatttttgcatgtataagattaagattatacttcaagtgatgcgtgtctgtgtatttagcatgtgtactataatcaggtgatatagtattccttcagtctttgtagtaactggatttttttatgcttctggtattgctttataaaagattttcatttcagaaagctatgttcacatttatcatttaacatattgatttaaatgttgattatgatattcaaggataaatcctaggcattaatgaaaaatagtttttttttaagtagtcaaagagtccaacaaaatccttcagtatttaaaggtacctgcttatactttttgagaaaaaaactggttattcaaaggtaaaaagtgaatccatttactgttattactgatacttaaatcgtggtttatagaaaacaaaactatattagaatggaaatgtgtaataacttgttggttaaacattcttactaaatagactgtttttaacctttgtgtttaagataaatttatgtattatattttaaagcactagtgttttattgaaaagtgaacatgtttgattgcagcatgcttgcagagagttttcttatgtccctagaa

SEQ ID NO: 37052 - DNA, 1040 bp, Homo sapiens
aaaactgagcactctcacccactcagctacaagttttgcactgagcaccaagccatagtagtcaattgttggaggaggaatagaaacatggagaagactccctctgtggcatatccatatccatgcagggactactgaaatctgagagtggaaaaagaatactgagagaaaccatctgacacttgaggccctactaagtacaaggtcataggatttcattactagagaaatgtgaagtctttggggacttaaggaaactaaagcaacaaccaaatccaaactcagatcaactataggttgagtgattcaagccatcagcaatgatgatctaatagaagaggtgtgcccattctgggcataaaactatgatttctctccatcttttccttcttttacacataatgtctagcttttaacccaaaattatgagatatacaagaaagtaagataatatgagccattttcaaaacataaaatagtgaacataaccagacccagaggtggctcaaatgttgaaattatcagacagtgcagtgactttgaaataaccaattgatatgttaaatgatctgatggaaaggttggacaatgtgcatgaacagataggggggaatttcaccagagagatggaaactatacaaaagagctaaatagaaatgttaaaaatattttaattacagactatgtatgatattgtagatttctcatgacagctctgatagaaggatgcacaccagatgcagaaggaattcagcttggggattgaaaaagagggcttatcttaggaaagagtttttataatgaagaaatatttctgtaataaggacatgtttagctgagtatttaagaaggaatagtacctagccaggtgaagggtattttaattagaagggagactaagtgcaggacgttgtggcatgagagaacctttgggaaaatgcatgtttttctctaactaaagcctaagcatggggaggctaataagagaggaggccacagagtagttggggaacagatattgtcattctccaatgtttgga

SEQ ID NO: 37053 - DNA, 1077 bp, Homo sapiens
agcactttgggagctgaggcaggtggatcacttgagctcaggagttcgagaccagcccaggcaacatggcaaaaccttgtctattttttaaaacataagatttgactttgttgtggtataagttgtttcatagaatatgaaatttgaaaatttgagtagtatttggtaatgttcagagttttaagccttttgagttgtaataagtatttgttaaatcagtttaccattacacgagttttacattgcctttgaagtcgtcagtaatagaaaaatagtgtatgtactaaactacacagtattttttattatttcaacaaatatttcttgatactactgtatgccaggtactaactacatcagacaactggaatatagtatggaataaaatagtcaagtctctgctctcatagagtctctggggtaaggggagaggtgtggagagacaataaatataaagaatgtgtattatatcagatgaataaatgcattgaaggaaaatatagcaggataagagggtagagattgatgaaagaagttcaattttagataattaagaaaaatgaaaatattgacagttgaaatggaaactgtttaccaatataaaaaatagtgaagaaaattgttcattaaatgtgatttttctatgtgatagttcatgtaggagtattttgtatataaatttaaatttaaccatttaaagtacttaaattgtcttttctattattctaaatagttttagttaaagatgtttgttgatttgaagtatttcattggttctcccttattttgttatttatttatttattttgagacagaattttgctcttgttgcccaggcttcagtgtaatggcacgatatcggcttactgcaacctctgccttccaggttcaagcgattctcctgcctcagcctactgagtagctgtgattacaggcacccgctaccacacctggctaatttttgtatttttagtagagatggtgtttcaccatgttggcccaggctggtcatgaactcctgacctcaggtgatccgcctgccttagcctcccgaagtgctaggattacaggtgtgag

SEQ ID NO: 37054 - DNA, 1055 bp, Homo sapiens
tcccagtgaagtagtgcttctgctagaggcaatggggcttctgtctggggaggggtgtaattttgatagattttgatagttcaagttttcagcctttcagagcataaggaatgacagccactacaatgcttttaaagcattcctcgcctcccacatgcacccagtagttgagtcctgtgttgatgttgcatttcgataagtatgggttagattaaaatctcagccttctctatgttgcttgttaaagtcttctattatttcctgtgctctagtataaaagtctttctcacaagctatatcctatccctgacaccttcgttgctcagtctcttctctaccaagccccatgcagcttgcttgcatctaacatgttctcccctcttccattactgatgattcttttgctatgattgcaattcccattcatcttttgtcctttttgcttcaaaaaatgtaggaagagaagagaagccgaggagccagaggggctggggaaaagctgtatatttctatacattaataatttttgtttttatcatactactatctctgagcacattttttgttccaagctaattagatgatcttgtttaaattctcacaaatactctggaagtaggtgattttattttcataagtagaatccaaaaagtttcataagttaactgactttcccaaagctatgtggctaataaatggtgaagtcgtgatttaaattttaaacctatctgtaaaccatagacctctgaagaatcattggaaagaaaatattaggatagtctatttttctctcttttaattcttgatagagaggggctttttttcttgtatggaattctttaattagtctttgctttcaatatgaaatgtggaaatgtatgactcatggtaagctatttgttataaaagataaaccaccaatctcagtggcttaacacagtataagtctatttcttgttcttgtaaagtctgcagtgagtattcctgattggcaagtggcttcctgtaagtggttattgaaggagccagagttcttccatcacgtggctctacca

SEQ ID NO: 37055 - DNA, 1043 bp, Homo sapiens
ttgatagattttgggggagttagtgaaatttcttgaggggattttcaatcgaatgcttttattttctgtggcagtaatgatctggttggtttatctcataaataactgatgctgctgctttttgtgttctttgatgtctcaccttatgtttttactaagtaaggacagcaatggattggcttctgatgctgttgaaaatagtttaactactgcaggtattagaactcacttttaaagattttatgacatagaccattaggcagaaaggaaatggacatttattggatgcctgctgtgtgtcaggcactgcgtatattgtgtatgctatctcatttaatgctcatagcaagcctgtgagaaaggtggttgtatttattagtgacaaaattgagatttggagagttcaaataactagcacaaggtcatataattagctagcatcagaactgtaacataaacccggtgtttctgattctagatcctgtattgaggcttcactatgctctgaaaacttaagtgccttgcttggaaaatatgaagtgcagcaatattattcctgcctcatttataatgttcttagatttaagaacattttaaaggcccaattttgttttcttttctcctatttgttctaacctagaatgtcttattcttgggctgtagcagtggacaatttaagaagaagtatacccactctaaagggactgtgagttttattgctgccttaaaaaaataatttccctgaaacaaaaattctatgaactgactaatcttgataaatcttgcatgtgagaatgacactaaatttgctcattattttgggctgagcatctctcacctgactgtacttgtctttctctctgcctctgcttcttttctacccatgcccccttacctctaatctcttttgtttctacttgattctggcatagtagcagccacttctatggatttggctggcttgtctgtacataataggctcctaatgtgtgttttctaggaagacataacaaagctatgaaatagattaaatgtgaatatta

SEQ ID NO: 37056 - DNA, 1048 bp, Homo sapiens
caaatctgtcattgataaggaagctataggctttaggtgtttctgatataatttattcatggaataactggtaactagtttttattaactatttaatttggttaaattattataatgtctactctttaatttattctattttaacataatttgccttttcttcatttttctaaggtggttgtggaggcagagaatcaggttataccttgaagggactggcataaaccctgtacctgtggaccttcacgagcagcagctaagcttgaatcagcacaatagagcccttaacattgaaagagctcatgatgaaagtaggtggattgggcatcagatgtgtttggggaaatatttaactcatagctcctttgacctcaaattttttgatgtaataatttacttgtttttagtgtcattaatagcacttaacaaagtacagtgaattacttcagttgtaaagtttattagaatctgaagtaaataatagcatatttctagaaatgttttctaggacagatttgaaaactagctgattagggaaggattgtaaagtatctgataagatagttgatgtttgagaaaagattcttggccttaatctttgaaatgtcaaaaaaaaaagcagtagagatgaaatgagctaatctgtggaagattatgatggttatacatgttatatagttatacttaaatatatttattgggaaattttgcattccagccttaggatttgtgcttgaagtatttgtgtagcttagagaatattagcataaggtgatttggcagctttttttgttaggagggttaaagcaaattctccattttgagccatattttcccactttttatagcaaatgtaggactttattgatgcaagaatatcccaagagaaatcttaaatatttgtagactgtttaaaaagatacagttttctcctatgttttattttctggataaatttatcaggaaaagctacttttacatttttgctttctgcctctgctctctcatggtacctgatgtttatatccccttattccagagtttttca

SEQ ID NO: 37057 - DNA, 1050 bp, Homo sapiens
agttcaggtaggaatttcttacggttgttcttatgtaagtatcttaataagtatgtgccattaataatgctgttaaaaaacagaacaaatcaggcagggcacggtatctcacgcctgtaatcccagtactttgggaggccgatgcgggtggatcacttgagctcaggagtttgagaccagcctgggcaacatggtgaaaccttgtttctacaaaaaatacagaagttagctgggcatggtggcaagcacctgtagtcccagctacttgcggggctgagttgagaggatcacttgagcccaggaggtagaggttccagtgagccgagatcatgccactgcactccagcctgggtaacagagtgagactgtgtctcaaaacaaacaaacacacaaaaaaccagaacaaatcagataatgtttggattactccatagatataacagtagccattaaaagtaatgtattagctgagtcacaaataggtctaatttaccttctcctagtccagttggaattgtggagagaaaccctgacaaatattggttggcctataatataactgcatatagaaattttttttctccttcagtgagatagcaggcatgtctctactttcttaacctcgttacatgtccttatcagtttagtggaaaggtaattaaaactttggctaaaattgtttgaattttcagattttatattttttatctttatctcccatctagtaatgattgagagctggatttaatccaaccatgctgagattcctggtatctgtctcacataaaagtatttcttaagcagtggggatgggatttttaaaagtttcttttacttaatgtgttcagtggtcagaccatcaggaaaagaggaaggtggaggaaggagcatgaggttggccaattatatttgagagagctaagttggactactttttatttcctgacttggactagattttatagttggggaaagcttttcccacagatgtttgtgaagttgtattagatcttcttttcaagaatcatttcattaccagtaattctagtt

SEQ ID NO: 37058 - DNA, 1047 bp, Homo sapiens
cttaaatgtgacatacaggctgtacattatctggccctttaccagttctgtccttattgcctattatttttcccttcattctattctagccacactggcctctactttggatatatccagtggtattaaaattgtaacatgtaccaataaactctcctttcctctctcccatcattcttgatgaatgaaatcatctgtgctgaagctgtaactacctctccctcactctatcatcaaattggtcctaagttctagggaacttacttttgagtccatctcttgccatcctcgctgccactaaaaatagctcagccctttatagtttgtttaaattactgaactagcttacagtctctctccttctaactcatcctttacacattgccttagtcttctttctaaagtgcagatctaattgattatatccacttcttattaaatcttttagagtttcccatgaccttcaggatacattgtaaattccttagcataatacatattatctttcactgtctcttgcctgtttgcttttctagtttcacctgtcctcatatgtccacaggcatgacacattctttagcttaaaaaatatatttttggaaacttttctaggatcagcctgggatcctttctaaaaggctgttcttaactgcaaaatgtaactatatgagtgtccaccaacatgctggttagaggctcacacagggatgcttttactctggtggggagctttgttgatatgatgacccaaggcgtgatttgagagtaggtgaaagagttctccagaaggcctatgtccccctaacccacccacccatgcctttgtatgtgcttttgtcaaaagttcccttataccacttactcacttctgtgtttcttgtttgttcaagactggtgtttctcctgggttgtaattccctctacagaaagcacttatccctatatatttattttctgtttctttttctctttcattagactataaattccttgagtataggaccttgtattttaatttctctgtcactagcatagttttatacatag

SEQ ID NO: 37059 - DNA, 1026 bp, Homo sapiens
aggtagaaagggagtgggataggctatagcggttagcagggtggggtatgattgttaaaactactgattttcaaaatggccaaaaactagatttataacagaaatttggttatgtcttgtattttgtcttatgttccttaggtgatggcacaatgctgctggcagcgagtaaagtcttggacagacttaaaccagttataggggtaaacactgatccagaacggtaagaaagaacgtatacattttgtttgatttgtgtggtgtgctttttaagtttttttttaggttatacatacatgcatttctgctttgattgcatagtatctttttatggtctgtcttaaaatttggaagctattttttattttcttgaccatgttcacattcttgggctctgttgctacagacattttactaggtgtatggtgtctaagtggaagcatcattgttcctggccaccatgaacattagaaccatgttccagaagcattctagtaatcaaatttaggtatgtagaactgagtaggattgtcttttatgtagttgttttcaaggatatagctctagttttaagctcaggcatgaaaaatatatatacatctagctggcattggtggtaggaaattatgttataggatggaccagttctcacattttagcttcccaggtagtttgggagtaggatctgtggcataatagacctgagttcttgacccaggtgagtgttggggacctttggtattgctgaggagggacaagttaataatgatccattttctacccttccttatggcttgtatttatattcctcattatgctaccactgatttttttgggggacagtgactttactgacttaataaaaagacctatcttaataaaaagaccaataaaaacactattggcactttttgtttccttccttagcttcgtgatatttaccctcattctgttctagccacccacagccatgactgtacctggactttatggtgatctggaattccctatctctacaatcctaat

SEQ ID NO: 37060 - DNA, 1061 bp, Homo sapiens
gggattacaggcgtgagccaccgcgcctggcccattaatacattttaactgctgtgcaatatttcattgtttggataattaggttagtcacagtttttccattattaaaaaaatattgtaattagaagtacaaataattttttccataagcatttagtgggttcctgaacagcacttagtagactttaacatttttgctaatatgaaggtgaaatggtatcttttaatttcaggatgtttgaattaaatattgaaaaatacagaagaatttttatgtgtgaaggagagaacagcaagacttgcgtgaagttcatcttgtagccaaccaaaagaactcaaaactgactgtgatccataatcagagatctcttacattgtgactcagtacataaatttgaaataaaagataacagggaagaatttagccttgtatgttttataaaaacatctttaaataaaagataacagggaagaattaaaaatatattttaaataaaagataacagggaagaatttagcctagtatgttttattttctagttaatgataatgctggctgtgatcgttaaattgtgaccagcttataatgcactttaagacaatttgaaaatcatagtatattgaggccaaacaggtagagtggaccttataaaggtggtaagtctcttgccaaggagttagctttatctcctagtggttttcagactctttatggtagaacacaacccttgctcagcctgtctttctccataggaattgggtgatgagggtcaatttttctgagatttcagcattttggacgttgtatgaaaactggcttttgttttcatacgacgcccaaaatgtggtggtgttaaggttagttaggggatgggaattagtcaaagacttttgaataaggaactagtttagaaaatctggaggcaagcttttgcattagaccagataagagttggtgttgtccagaactcaagcagtggcagcatgaacttaaagtacatagattgtcaaaacacttcacagatgtaattatttgacttcactactgactggctgtggac

SEQ ID NO: 37061 - DNA, 1037 bp, Homo sapiens
aaaccaaacaaaggctggtgagaaaatagctcatttcttgtcttattccagagtaaggagtggtgacagattaggaaaagcatcaaaaaagtggcttccagtgaacaaaatcaggaagtttgagtaaagaatttctcttttgctaaaaacttaaatataaaagtttagtcaggaatttgtacccacacatgtatactgcttttaacatttttctctagacatttgaaatattttattttctctttaaaaaagcagcaccaaaacctaaatttaatagtaatgtttctgatttatcagcttctttccatcttacactgttgaattctgtactgcttctaaagcacctacaattaactctacaagaactgcacaattaacactcggcattgccttcttcctaattctaacatcgacattcatcagctttctccaatacagtcagatgattccttataatcatatctagccaaatgatgtaacttttgcttgatgtatgggaaaatagcttacattatgaatttagaagagctatagtagtatttgacaatatagatggaaaagtatttttaatttaaagaacatattgcacatctttcagaatttctgtaaaaacttttgaatgtccattttggctaggagcttagaaatgatcatgcttaagtttaattttgtgtttacattaaatcttttggattttcattctgtatacaatattgctgtaaaacatcatagttgtgaaatctggctctttaggagatgcttaccataaaactggtttgaaaactattctgactacagtgtagctattacattcactaataagaatttagtatgcctctgaatataagtaagtctctaattccctatttttttggaatattactgtattctaagaatatcagaatatgagcttcttaaagattttgaattagcatatccaaattgacagataacattcttaggtggggcgtggtggctcatgcctataatttcagcacgttgggaggctgaggtgggcggatcacttgaggtcacga

SEQ ID NO: 37062 - DNA, 1092 bp, Homo sapiens
tatatatttaaataaatgtacttacacttgtgtataggatttaaaagggggaaacttaagaaggaagaaattgtgtatagaatttaaaaaggaggcattatattgcatgagtagaatgaaaagtatctaaccagaaagcaaataagttaaggattatattatactgaaatattttaatacaatttaaatatttcattactctttcactttatttgctatttgtagatttcagtattgtaatgttggcaagtctatttaagacggcattaataaaaattttgtttttcaggcatgtgataccaagtccctttccattatagataagtaaggcctaggttggttaaaaccttagctaaacacaaaatttgctagagaatcaacatataagaagctctaactccaagcttattcaccccagatatttcaccaatgttaacacataccctattgaactaagaaaggaattatattactaaccagcagagggagccaagtcaatcatgaaaggtaggagtataaaggaacatcatatgacttcctgttttgaatttaactgtatggcccctgctcactttttgagtttaccaaaaagacagtcataaggagagaaaggcgaccaatgtatcaaataaggatacagtgacaattataacttagaattaccttgcaggaaataaattggaagaaaaattgaatgcagaactatacaagtgaaatgtctcagtattataacccaagatggaaaaaccatggaaaacagtaccttaatgccatgatgaattgctagccaaatgtaacagtgaatatttcttaataattccattttcacttaaagttgaaattaggccataaatagacacattttaaaactataaagttgtacatcaaatttatgtgcatttaatctaagaaataagggataaaatttaataaaaaattattacagtgaattaataaggacatgatttttcagcttaaaattagagaacagaattgtttccactactgtttataaacacaacaaataaagtaatatctgttttgtgagagatgtttggaggaatctagtagctaagtgattatgtcagttta

SEQ ID NO: 37063 - DNA, 1027 bp, Homo sapiens
ttacaaattttcatatttcatgtattgaatttttggacaagaaaagacagccttgataggtattttataaccattaatacaattaatcaaacattgtttagtaaatccaatcgtctattcattattatttttcccattaatcttcagaacagctttaagttaatacagatgactcagaatgtgtttttcactcagtttcaaaataccattatttcaattcgctaatagaagcacaattatcttcttgtctgctttcttaaatgttactggtaaactagtaattttgcatgtccaggtaactgcagctgctacagtcaatctgctttggaaagtcttggcattattgtgtcatttaatttaaaatttttaagtttttttagtttcttcccttattgaggacttattaggcgctaattagctttatgctagacatctcatgcatggcagtgaatgaaaacaacactgcctttgagggttttaacttgtatatagtttataccattttttttccaggttatagaatcaaagaaattgtttcaattcatatcacagtatttctctattaaatcaaatggtattttgcttgcataaatttaagtatccaagttgagatcttacatagaatctgttaatctaatattagtgttttcttcatttcattgtcttgggtttttttttcttaataattatttttcccaataccatccatttgttttgctcttacatttttaagtcttttatgttccaaatcaggtgacttacatcctccacttgtccattgaggatagcccagtaaacctttattctgactttaaattgcctccttgcttcaagaactgagttgcatgactcagttttctttgctagaaatatccctggatagtctcgtatgtattcttgatcaatgaattgcagaagatttgattaaaaattttaaatggatttcagggataaactatttgtatcaaatgtcatcaccaggaatttctacaactgaaaaatttgaattgttatttttattgaagaa

SEQ ID NO: 37064 - DNA, 1033 bp, Homo sapiens
gttttttttccaagatataaacaatttttgttaaactataatacagtgggagtaaaaatgaactgagaatctgtttctgctgcacaacagcgaagggagctcccacaaaaatgtttgcccaacatttccttcttttgttcctgcatcccaggttccacttactcttcataaaactgatttttttttgccagaatgttggtatttcaagtttttctgccttttaaaaaaattcctgtaaatttggctgcatgtacaaattcattagctggaagtcccatccttggcggcatacagggatcgtaaagtctgaacaactttattagtcagcttattagcactcgttagagcaatttttttgtaaataatgtctgactctttaatagtgtctacccaaggcaccagtttgcggccatcacggcgcttagcctcagtccaggagccactgtaggagcctgccatccactgaacactgaagccactgctggttttctgcactactcttgcaatttgtggtcgatctttgtactttggacagcaaatagcgatgacatccatgacgtcaacactttcattcatctgtgctgccaactccgtagagtctgaatttcgttttgaccttctcaatgactaaaacattgggaggggggaaaaaagaccaagtgttacacaaaagaattttagtgaaattattgtttttattgcttttaatcccttgacgccgggagttgggatttcccggcacacttccattgccggcaatgagacgcaccgtgaccgccagcgccaaggggttaacatatacttgtaaaaccatataactcttaatttgtacccgtgtctttactcttattgatatataaaattatatatacatatgaaccatatagctacataaaacttagcaacaataaaaataacacacattaatacaattcaaagaaaaattaaccctttatgctggataaatctcatttctgtttttttattgtcttttatgttaaactttctacaaaaggatgtataaacgggtaag

SEQ ID NO: 37065 - DNA, 1042 bp, Homo sapiens
tacacgcacgccagctcctctactcactatgctgctcccactttcagaattccatcccccatctccccacttaacccagcattctgattctctctctctaatgtgtctacacaaaacctaagtatagatttctttaaataagcttccacaaaataagctaagtgattttgtttacatttcatttcacacttgtttcagaaacccatggctttgtctatggctatgactatgtcttctgacttcaaagttaatactctttttcactaacctaagttttagtcttctacatcaagccaggtgatgtagaaataattaaaacacaataaaatatcacattttcccttttctacctaataggatggtaggcatcacaaaatctgagaacacaaaacgtggatcttttgaaaaggtatagaaaaaaaaatcagtaaaatttagtcattaagtagcctacattcagatcttaacaggagactgaataagaacttcccaaggttaaatcttccttatgggagataagaacccagttttgcttttgactctagcaataagtaggtatgcagcttggtgatatcaattcacctctttgagccttaatttcaccttcttaaacctgtagtcattccatagattcccaagataggccaaagacggaaatgggatggggatgtccatgaaccccttgaaattttatgcacaattctgaatatgaacttattctattttctaaggagagagatttctcggctttcattatattctcaaaggggttagtaaattccaaagtgattaaaaacttcagattatttgccatctctcatatgactgtataaatatttttaaaactatggaattggagatccattattggtttaaattttataacaaacttagaccataataacctttttctgttctttgctccaggatttaaatctagtaaggttaaggctaaattacaattctaggcatgttataatcaagaaaagcttactctggtatttcttagcagaagaaaggtcaatgtaaagggtttgataaa

SEQ ID NO: 37066 - DNA, 1058 bp, Homo sapiens
gaaaagactatctttccttcatatatgaagctcagtttcactgaatacagaattcttggctgctaattgttttgtttgaggaggctgaaaataggccccaatcctttctagcttgcaggatttcttctgagaaatctgctgttaatctgataggttttcctttataggttacctggtgcttttgtctcacagctcttaagattctttccttcatcttaaatttagataacctgatggcagggtgcctaggtgatgatctttttgcgatgaatttcccaggtgttctttgtgcttcttgtgtttgaatatctaggtctctagaaaggccagggaaattttcctcgattattcccccaaatatgttttccaaacttttagatttattttcttcctcaggaatgctgattattcttaggtgaatggtttcgtttaacattaactgtagacttcttggaggctttgttcacatttcttattttttctttgtctttgttggattgggttaatttgaagacattgccttcgagctctgaattaatttcttctacttattcgattttattgttgagactttccagagcattttgcatttctgtgtttccattgtttccctgcagttttgattattttttatttatgctatctatgtcattgaatatttctcccttcacttcttgtatcatttttttggtttccttacattgggctttgcctttctcaggtgcctccctgattggctcaataactaaacttcttaattctttttcaggtaaatcagggattccttcttggtttgtgcccattgctggtgagctagtgtgattttctgggggtgttaatgaaccttgttatgtcatagtaccagagttggttttctgattccttctcatttgggtaggctctgtcagagggaaggtctagggctgaaggctgttgttcagattcttttgtcctgcagggtgttctcttgatgtagtactctcccccttttcctatggatgtggcttcctgagagccgagctgaagtgattgttatctttcttctggatctagccacc

SEQ ID NO: 37067 - DNA, 1053 bp, Homo sapiens
tcctgtgctccctgtggtggctgctctgagagagaggactgtgggcttcccatctgatcgaggaaagctgctggcattgccccagttgcgagcggggcctggggcttgctcctactgaagttgcctgactggttttttatggggttggcgtttttatcaaatttacacatgcactgatttgcccaatgtttccccttcctacattggggacatatagaagagggttctttccctgaattaccttggtctctactatgggagcattccctcttcatatgacctggatctccgcatagaaaacaatttgggtttctctcccttttcactttaggaggccttaatgccatagccaatattttggctttgtttgtctcagttcctaccagctgacacgctcatagaagctccccaactgtggctgcctttcctttgattgcctgcattgcctgctgcacattagcgttttcaaaagacagttgcaacgataagatatcagcagcttgggtgtgactagtatgtctcttaattgcctgggttaaccgattgataaactcaacaaatggctcttgaggcccttgtcaaacatttacgaaagatccctgttgaactccacttttgggaattccgtcccaagccctgagagcacacaaagacacttgagcataggcctggggatcaaaatctagttgttgtacattggcatgaggacccctcccttggagcatatcagctgttatgtcttggccggccacctgattctggttggcttgttcgtacaactcattgtattctgccttccagaggaggtattggctaggctacaaagttgttttagctagcattgactagtcccatggggtcatatgcaagtggcctgccaaggccttaatcattcctttcgtaaatgggctagcggctccattttctttaacgctttttcttggctctttataaggttaaaagaaacaagttgtggccaggtgcggtggctcatgcctgtaatcccagcacttttggaggctgaggcgggtggatcacgaggtcaggagattg

SEQ ID NO: 37068 - DNA, 2742 bp, Homo sapiens
agcgctatcctgcccgcaaatgatcaaaggttagttttagaaccacatgagtaaacaagctatttagataaactactctacattcctgttaattacccttgctatagctcaaagaggattaggctgccttcagccataactctgtcctgaagcttttgcaaaaagcttttggccttccaagaaggtttgtgttttattttataattttccccaccattctgactgaacccctacatctctcccttttctgttttctgcattgggtcttattgattggagagtgcagatgtatgcagcaacaggtttgtcaggagtggcagtgattgctcttattctggctttgcatcctagaattagtaaataacataagacaatcatgagtataattagcaacattctctgctagtcaaagagtgacccccaggagtgggggtctaaccaggagagatgatcttgcacacccttccatatggctgtttgttgggtgtgtagatctatagtgtgaagggattctaaaattttagttttaagttgctttacgtctgctgttaaattccccagaggtgttgtttcacctcatcccaactatgcattgattgattccatggtagagaagtgacacagatatgcttatgctcccagttgcagcttaattgctgttggaatgccagtgcatcttgtggctcccccacatattttaaagcagcctcaagggcttgcagacgtgcaagaattttttgatctataccctgctataagagaagttcattagacacgtttttggccagattatctacaaaggcagctgtttatactgactcagtaatagatgccacagcaatgctagcagttgctaggatgactatggctgagactataaaggccataaatgtaactatgaatcttttgtgtctgacctgggacagggtacgctctaaggtggcaagggcagaggatccttgccaatcgcatgtcaaattgactggtaggaatgcctcagattatctccttagtaccatgacactagtaatatttagatcagatatattgtaattaatgatacatgaggtgaaccaagtctgtccctgcacccgggtcacaaatgtggagttttggggtgaaatagaaatattggttcccataaggaaaacatggatgggtagtgcaaatcagttactaatcagcgtaactgatcagtatgaataaaggttatagtatagttgttaccggaattatgatatgttccatgccaggtgtcaagggaggtgccaagatgtcccaggtgccataaagtgtcttgaggtggcatggaatttacttggggtctgggatattgcatcgccccattggcccaaatcataggggaatgggacatggctacaaaactgtgattgatgccttgacagaggaggacattagtaaggctgccctgcaaatggccatggggactccagtctaagatgttataattgcctaactggaggctatgggcttgtcccctgtgacagacctcccagctaaagtaaaatccagtactttcccagttttgtcctttagcacaggaaggaatgtttgggaaagtggcattgattgcattacctggtttgaggctacctgtagctaaggctgttaaggcattttctttgccatgatatggtcataattgtgtttgggcagatacacagtaagtgttagaacctttataacttacacacagtgggaagatagtggagtgatatgtagtgttatctggcaccttagtccaatgtatgccattactgagggaccccactgggggtaaatctatccctcctagccaagcacttatgttattataggctgggaaggggatgtctgcccaggtgacagggcgaaagaaaggcgggtctaagataagagccagtagagtgtagcaggtacagtttgcagacaaagcaagagcataaaaaggatcaataccctatgtgagttgcaatgtacaacagagagcatagcaaggaacaaattatctgaagtaaatggtgtctgtgtctggagcagaattcattcagcctcctgagttgtcctcttcagcatcccccaggtgacgtccggggcttgtgtcatccatggaagcctcatcgtctggggctgtggatcctgtagggtcagttccttcatctccggtaccaggttggatcctagccacaccatggtatggtttaatgcatcatgctggaattcaaagaggacctgagggggtatggacacaagcctaccctcttccccacattaacaattcatttggatcacaccattcattactgtttacatctttccataaaactgcaggctttatgtcttgagaggttttagcaaagtgcttttctacagctgattgaaattcgtcatctaaatttagaaaattaagggtaaataaggcttgtgccaatagtgttggagggtttttactcatactccccctcttctggctgttttctgggcatatttttaagggtggagtgggcacgttctactatggcttgtccttgggggttatatgggatgcctgtggaatgttggatattccacttgtgacaaaattgttgaaattgtgagctggcataagctggaccattttcagttttaattttttaattttttaatttttgtgggctgccccataaatgcaaaagttaaaagatgtttaatgatataccaagtggactctctaggaagggtgtgtgcactaattagatgagt

SEQ ID NO: 37069 - DNA, 1061 bp, Homo sapiens
ctgtgtgctgatgagaagaatatatactctgtagctgttagatggagtggtctgtaaatgtctgttaggtccatttggtctaaagtgaaatttaattccaatgtttctatgttgattttctggctagatgagctatctaatgctgtgagtaggtgtatgtgtgtggtttttttttttttttttttttttttgagacggagttttgctctgtcacccaggctggagtacggtggcatgatatcggctcactgcaacctccgcctcccaggttcatgtgattccctgcctcagcctcccaagtagctgggattacaggtgcctgccaccatgcccaggtactttttgtatttttagtagagatggggtttcaccatcttggccaggctggtctcgaactcctgatcttgtgatccacccgcctcggcctcccaaagtgctgggattacaggcgtgagccaccatgcctggcctgctgtgagtaggttttaaagtacccaaatatgactgtattggagtctgtctcttcctttagatctagtaatgtttgctttatatatctgggtgcttcagtgttgggtgcatatatatttagaaatgcaatattctgttgatgaattaattgctttgtcattatattatgattttcattgtctttttactgttgttgtttgctgtcttatcttttaagtaggacatttaatccattcacaggtagggttattattgagatgttattatgagatgtgaggactcattcctgaaatgaatcctctccatttttgtttgggagagactttatttctcttttatttatgaaagattccttggctgggtatagaattcttgttaggcaggtttttgttttattttcctctcagcactttgaatatatcatcccattctctcctggcctgtaaagtttctggtgagaaatcctttgttactctgatgagacgtcccttgtatgtgactaggcacttctctctgcctttaacttttgacagtttgactataatgtgacagaagaccttttggggttgttatctatttgtgggtgtctg

SEQ ID NO: 37070 - DNA, 1057 bp, Homo sapiens
acaacccagaatttcatatccggccaaactaagcttcataaatgaaagagaaataagctccttttcagacaagcaaatgctgagggaatacatctccaccaagcctgccttgcaagagctcctgaaggaagtacctgatgtggaaaggaaaaaccattaccagccactacaaaagcacaccgaagtatacagaccagtgacactatgaagcaaccacataaaacaagtctgcaaaataaccagttagcatcatgatgacaggatcagattcacacataacagtattaaccttaaatgtaaatggacttaatgccacaattaaaatacataaaatggcaagctggatagagtcaagccccattaatgttctgtcttcaagagacacatctcacatccaaagacacacataggctcaaaataaagggagggaggaaaaatggaaaacagaaaaaagctggggtcacaatcctggtttctgacaaaacagactttaaaccaacaaagataaaaaaagaaggccattacataatggtaaaggattcaattcaacaagagctaactatcctaaatataaatacacccaatataggagcactcagattcataaagcaagttcttagagaccttcaaagagacttagattcccacacagtaatactggacactttaacaccccactgacaatattagatcatcaagacagaaaattaacaaagatattcaggacctgaactcagctctggatcaagtggacctgatagatatctacagaactctccatcccaaaacaacagaatatacattcttctcatcacatggcactctaaaattgatcacataattggaagtaaaacacccctcagcaaatgcaaaagaactgaaatcaaactgctcagaccacagcacaatcaagttagaactcaagattaagaaactcactcaaaaccacacaactacatggaaattgaacaacctgctcctgaatgactcctgagtaaataatgaaattaaggcagatgtcaagaagttatttgaaattaatgagaacaaagagaca

SEQ ID NO: 37071 - DNA, 1032 bp, Homo sapiens
aagcctgggtgaagatgcccaaaacattgcttctaagaagttttcacaagactttctgtaaaagacagggaaggcccaggtctcagagttcacccaactttggtgtcaatacctctccaccgttctgttatatctgtggcctctcctccctagattttcttgtcttaaagattaattactaatagttttcaaatccaaaggctggaattcagtttccatctcgtacagtgacaggacaggaattgttcgaactctaaagtgaaccatttccagaccttgtgattcaaatattatttaaaatgtgactaccttggctttgatgataaaagtcacaattaacaaatgaatgaatgaatgaatgaatcaatcccaatgtgtgctttgttcttatcccttaaaaggctctaatgctccgtgtcatagtctgcagcatacaaaaaaacatggaagtgctgggcttgcacctcaaaccaagcaggtgtgtgtagagtatgaaagagaggagactgtggtgagtccctggacgataccttcagaaatccataagattcttcatgagagtcacaattcccttctacaagtaagcattgttctagattttgtttgtctagtgattgctctatgttcttcaggttttttgtttgtttgtttgtttgttttttagtttgttttttgtgggatgtggaaatactgaaaagttgttaggtcagtttgaaatcgtgatgcaaagcatcttcccttttggcttagtacttcagcatttgtctttcagacttctctgtgactgtattttttaactaaaaaatgaccaaaatgtaagaacataaaatcgtactacaagtatcaacatccgttctgccctgtcttcacatctggtgccagcatctcgttgtgtgagatgatgttcagctcttgtccatctggatgtgctgggcaatcacagccctatttcctggcacatttccttcagccttttgatggatgagcaactctagaatttttggaaagcttagttcacgttccaggtttttt

SEQ ID NO: 37072 - DNA, 1290 bp, Homo sapiens
tgttttatgctagagtaggaagcttcatcaaacacgacagtgttttgtactgtttcctaaataacagaattatgtgtaatggtttaattatttggattgaacaataatgaaccaactgggtattttttatgcagctttacatgacttcaagggaaataaggctgagacaaaagatgaagcatgaaaaagacaggtgagtttggtagctgtaaccctgtgttttctctctaacttccttagctgaggcatagattaatgccttaggaattctgttttcacaatagtctcttttttgtcaataaacagagaattatgggagttatcactgcaaggaaaatgatgagactcactagccttttttcaaatttgctttcaaatattatgtgtttcattcagtttttatgacttttatttctgctgttctccctttcccaacccagatatttacatgcatttgggaaatactccagagaccataactacaagtacctttaataatactgcctaatcattttcagaaatctgatgaatagaaggatgttagaagtgctgaagaaagaaaatgctaagtgaaattagccgggcatggtggccaggcgcctgtaatcccagctactcgggagcctgaggcaggagaattgcttgaactcgggaggcggaggttgcagtgagccgagatcacgccattgcaatccagcctgggtgacaagagtgaaactccgtctcaaaaaaaaaaaaaaaccagaacatgctaggtgatcttcaaacactatattccctctggatagatgaactgaaagtgactcttaataaatgatgcttaattctttgtctacagattgctgctctctgaacactatagtcgtcgaatctcacaagcgtacggtctgatgaatgaactgttatctgagtcagtacagctaccaactctaccacagaaaccattgcctaacaaacccagccctactcagtcttccagttgtcaacactgcccttctccaagagggtaagacaaggtttcacatgccatttggcaagataacgtcaggcctgataagaagaaatgtagcactttcgtgacctaagttcagtgcatttgcatttaccctgcttagagttatgatgataaaggaaaaaagtagcctcataatcatgaggtctttatacattgatagaatcaccaaggaaaaaggcaaaaattgtgttatatttctcactaagcttacagagcatttaggtattccagaagtatgaaatttggtatctgtgcagtcctgttttatttagttg

SEQ ID NO: 37073 - DNA, 1051 bp, Homo sapiens
catcatcttgcccaggctggtcttgaactcctgggctaaagcagtctgcctgccttggcctcccagagttctgggattacaggtgtgagccactgagcccagccctgtattagaagttttgaaagtgatagagatagtgcagggaataagttaaatagataaagaagtggaaacctccccattttacatgatgtgtttattatgcattgcatacctgtatcaaaatatctcatgtactctataaatatatacatctactatgtacccacaaaattaaaaagtttaaaaaaagtcaaaaggagaacctttaagataattaattttgaagcagtgagcagagaagaaaggagccaatgcaggaggctatatagttttctgagagttaggaaaagactcaggtaagatagagtttaaagaagaagggaaaatcgagtttaaggtaaatgttataaagaagttgttagctttctgagtccattttcagtggagttcaggtaacaaattggagtgagttgactagagaacataagtatatactacttttgaagatggggcaaaatatttccggataaatagtgtttagtcatgatatatcttatctgcttaacaaatttaaaagcaaatgatgtcttgcttgttaaatttctcagaattcagcattattctggcagacattcacaaagaactgacaaggaaagaagagagattcaagcctggatgaaaagaaaacgaaaagaaagaatggcaaagtacttaaatgagctggcagaaaagagagggcaagaacatgatcctttctgtcccagaagcaatccagtaagtctgccatgtcaagggtaatggaattacagaatatgtgtaattactttcctggcaaaattttaagaaaaagattaacataatttggatacatttgtaatttggcatatagaaaagtaaatgttttacttaagtcaggaaaagttaataaattatcttaaaatgttgcagcatattgtgctaaccaagttatactgaattatcttaaatattttcttgtcccccaggctaa

SEQ ID NO: 37074 - DNA, 1048 bp, Homo sapiens
aggccaaggcaggtgaatcacttgagctcaggagttcgagaccaacctgggcaacatagcaagaccccgtgtctacaaaaaatacaaaaattagcctgcattgcggcacacacctgtaatcccagccattcaggaggttaaggtgggaggtttgcttgagcccggaggcagaggttgtagtatgccatgaccatgtcgctgcacttagcctgggtgacagagtgagacatggtctcaaaaaatatgtagacagtattcactatcagatagcatattcaggaagaggataaatatgctgtaaatatatatctataaaccaatttggaagtttaaaagtattttaatttaatttctggttatataatttctaaattagattaacaattgaaagcaaaaaaaaacccaaaatttttattaataatgattttttttttaggtatgaatagcagtgatgaattgtgtgagaggtaaatatcttaagagttaattcacaattttctttaaagttgggtgtagatagtgaaaattttgttcatatgtgtgtgaatttttacattatatatatctttgtggtttaaaggaatataagttttcattgggtatggaatatttttaagaaattgaggattgttatatctcttactgttttagcacaagtagttagaattcaatagactatatttactacattttcttatataaatatggattaaatttaaacagaatctataggggttttcttctggaccatatgtttcctttttaaagaaaatctaccaagtcattactttttgttgattagtctttttcactgagagatactagaattacagaaatagaaggaacagtagatatatgtttatcattttgtgttcatttgttacatgtttatttttgcttaatgtaattaagttgtagatactgatttatatttcttaaattacatttgcaaatgaagtgtttcagtacatccgctccagatgactggattgactgatattgcagacattattgatgaccttataattaaagacggagtttccagtga

SEQ ID NO: 37075 - DNA, 1045 bp, Homo sapiens
cactgggcccagcaggtttggtatatttttaaaaaatgctctcacattattataatgtacacataaatacaaacatcttcacttgcctaacttaagaaaacagcttatagtcctggaagaggcccagggatactctgggcagacactgagtggtaaatagtcttgaagacctgggttgaccgtgttatgccactaaaaaagtcattgaatctctctgggctttgttctctcatctttaatacgaatttgtctagatagtaattaaggttcttcattctaaaattttatgatacaattttcctgagccttttaaaagtttataactcagttaagctacaaataagtaaaaatttcctctgttttattgatccctaccatttagcttatattggatttaatcccatttttttcacttttgcattaatgcaagtgtttaaaacttacataaaactgtttgttattttgaaattatcaaagtattactgttgttttgttgtgtgtgttttttctacagattggaccagtggatcacattgaattctcttctggccctgaattcaaaaaaacattagcttcaaaaaccattagcatttctgaagaaggtttgtaggggctgataggggctggctgaagtcttgctttagttgatctgaaagaatgtgcattgttttgtggagtgccagaagtaggagtagttttcattatgtgagctgaagtcataagcttcccagtttttagattaggattatttttttgtaatgtgattagcttccacctcacggcctttttttttttttttttttttttttttgagaaggcagtaacctcctctggattttatactaggatggggcaagtgtggcctggagctcagtttttgtggattccaagccattggcctcatagtgctgaggattgcacagagctttgtgctgaggttgctgtttgtctgtgatcatcagctgagctggaatttgaggttctggtaaaatggccaggcagtggtgaggtattaagttttttcattttttattgaaagaatgaa

SEQ ID NO: 37076 - DNA, 1031 bp, Homo sapiens
aagtttagagttaaaattagctttctagaaatatgtacaatatgaaaatgaggctacctacatttctgcccagctgactacaaattcaagggttcctatactccacccccctcaactcaggtttgataattgactagaaaacccacagaaattgggaaagcactttacttatgattacaattttattataaaggatacgcagtggtgggggtgggcagcacagggcttccatgccctctctgggatggtcattctcctagcacatccatgtattcaccaacctggaatctcccttaacctgtttgcttcagaatttttattgacttttcagtacataggtataattgattaaatcactggccattgtgattgagctcaatctccagccccttctctttcccagaagtggcagtaggatgagtgaattgggggctggtagttctaaccctctcatcatgtggttggttcctctggtgactagggcctatgctgaagctatctaagggcttgcaaagagacacctctagcataaacttaggtatgatcaaaaggggctcgttagaaataacagacactcctatcaggaaatcccaagattctgaggacctgtgtgcaagaaactgggtctttgtagaccaaatatatatttttcattataccacaatgctccataattaatactttcttattctacctagtcttcctgggagatctcccagagaaatccacatgtaaacccaaactctcacagtagactttggattttgattttctttcctcttgagtttttccacttgtgtagaaattacctcaggtacaccatgtgaattctgaattcattatttctactctgccccaactgttttttcctcctatgttctctttctccatttgtgttgatatcagcctaagccagaaacacatgattctgaattctgtcttccctcttatccattcagtaaccaattcttacctattttgcttcctttgtaattcttaaatttaacctgtttccccatccctcaccatta

SEQ ID NO: 37077 - DNA, 1826 bp, Homo sapiens
gtcatgcatctgaaaacattttatgtgagaaaaattcctattttgcgagacaaatactataattttttcccattttattaaggaattctttcctaccattcatagactggaggattcttttacagtgtcggtaataggatgaacagtcatttgctgctcaaatatttggtacaatatcccatatgcagtagtcctcccttatccccaggaatacatgccaagaccttcagtggatacctgaaactgcagatagtactgaaccctattatatattttgtttttttctatatatgcatgccaatgataaagtttaagttacagattaggcacagtaagcaatgcacaataactagtaataaaatataacaattataactatattgtaatacaagttataagaatgtgatctctttctctctgtctctcaaaatatcttactgcactgaactcatctattttcgaaccatggttgaactctgataactgaaaccttggaaagtgaaaccatggataagcagggactactgtatcatctaatactttgaaccaatcatcttaccgtattctttagactcttacagtaagcaggagggtaggtgatgtaaattgtttcagggcactaagaaatgtgtatgtgaaaagcaaggctgtgacttctagtgaagagcacttactgtagtgttttaccgcatatattgattggtagattattactaagtctagaaaatacttttaaaatttcacatttatcagactgtaaaatctgtcactagtgctctctttccagaaattttctgtttccatctattccctcttcaaattaagtcttccctttagcattttgagacctctttcctccttgctgtaattttgctgaggtgactaagtgtgcttaatgtcttcaaatagacaaatggaggtatctgatagggtttctggcaccagcttcaaatccacagaaaagagagtttaataattacctaaggtgtgtaaacctgtccttagattccagtgactaatatagaatagtcagttcagtagtagaggttctagaaataaatttcacatttggtgttttgcttatatttgcttgtatttgcagaatatcttgccaatttaattaaatgctattgaaaataatttatgaacgtaattttgtcaactgtatccctatatagcatgataaatgaaaagcaaatgttgctatagttgtaaaagtatgttttatgctattatgtttaacaggcaaagaagaagagctgagaaagagctgcaagaaaaaagatgtgagaaactgaggagaaaaccaaatgtgacttttcgaccagagaattccataattaataatgatgattcagaaatcattaagaaacccaaggtatagaaaaactgctatagattcttccctggtttgcatgtacactgagtttggtatgtctttgtggtttatctagtctgattgctgggagcttctgactgtgactaggaggatcttcatatcattcagtatatcagtccctgctgcctccctccacagagcagtagacatagagttctgaatgtgaaaagcaacttgatggtacatgaaaaactgcagtttagagcatctgcctgtgtggcttttttatatttgaaatcaccctttgcttatttctatgacatcttaatatatatattatgttatttgggcttctcctaatacagtttcaccgttctctgagattcctctaggatttcccaaacaggtttgttgtgtaacctctattttaagtcacgtctttttttaaaatttaatttattattattttttagagatagggccttgc

SEQ ID NO: 37078 - DNA, 1004 bp, Homo sapiens
agctctttgggatgcagctgctcacaaaagtgaggtggggagtaatcaaaccagattagtgggctcctactcaaaagtatccaaggtttattttccagctgacactatcacatatttcttatccatatttcttgtgcttgagttgaaactctcagctgcatttcaaattactgttcactttgactttcatcatacctggctatcctttttttctgtttaccaacaatggttaattatttacctttttagaaacattagtttccttcagatctaaacctctgctcatttgtcctacattcacttccatatccttttatgtgatgtaatatataccatttccatattgatgattctcggcactaattttctttttaaaaattttttttatatttttattttttgagacggagtctcactctgttgcccaggctggagtgcagtggcgcgatctcggctcactgcaacctctgcctcccaggttcaagcgtcttctgcctcagcctcctgagtagctgggattataggcatgtaccaccttgcctggctaatttttatatttttagtaaagatggagtttcgccatgttggccaggctggtctcgaactcctgacctcaggtgatctgcctgccttggcctcccaaagtgctaggattacaggcgtgagccgctgtgcccagctgcactaattttctctttgaacttaggggccttgatgagaatagttgttcagcatgtccccctgtcccatgaaacttactgaaactaattttattcttattctccctagtcccttctttcctttttctgtttagtagcaccactgattctaccatcttaatgttttagagacatctctcaaactgttagatggattacttggggacttcactggtcactgtcctatatatttaacacattatccagataattctgatgcacacaaaagattaagaatcactatcttcaaaagtcatctttgccttctttcacaacccctaccca

SEQ ID NO: 37079 - DNA, 1040 bp, Homo sapiens
agtataggaagactgctggaatggatgataaggtggtctaatagaaggctactctgtgattctggtataactgagtcatcctctgagtacagtccagtaattcgtgtaaagacctctacagctgccattcttacatcattatggcttttggaacaaccctattttgctacatataaggcaaaaaatgccattattaaggtaagcatatcaattgtttattacttacaaatgagaattctcattttagattaaaactatgtttacatttcccatcttttaaagaatcattaaataatagaaaattaatgacaatgttgattataatcagtatctcctatttttttcttccagtggttcctttaattcttaacaataaagtgctttcagagaggctgtgaggttttgaagttttatgtgtatttataaaaaagaaaaaaaggaaggagataattttaagtgatattacaagtggtattacacgtatattatttctcctttcagtttcaggttttggttcagatgaaggaggactaggtggctctgtagttttaattactgatgtctcatcaagtccgttaggggatagtttttcttatactctcaggccagaagaggttggagaaccaaacacagaaaggcagatgggggagtcagtagaggagttagtgtttaattaactattctttcttccctagtcaatggcaagtgcttttattctgaagtagtttattctaggctgaaggatgtgagtgtgtgtgtgtatgtgtgtgtgtgtatgtgaatatgtgaatttgttttattttttacttattcattttttgagacagagtcttgctttttgttttgttttgttttttgttttttttgagatggagtctcactctgtcacccaggctggagtgcagtggcgtgatctcaactcactgcaacctccgcctcctggattcaagcgattctcctgcctcagccttgtgagtagctgggactacaggcacgcgccaccacgcctgactaatttttgtagtttttagtagagatgg

SEQ ID NO: 37080 - DNA, 1032 bp, Homo sapiens
agtggcttggagtttttgttgactttgtattcctaaaatctgacccattagaggactatttcttttacccacagaaaaattattcatgttcttttatagtgaaatttctgtggacacattttaatctcttctaatacaaattttcccttttgatagtaatttttttttgatctcatagtagaaatgttccactcttgaaaacacttagaaatcatttagtcccactccctcatttgaaatgtaggtaattgaggcacacaaaatatacatgacttaatcattggagagaattttccatgtcaattctaagatcagttttagtgattaaatgatctctaattttgtcttattttatttttttgctatagaaatgccccaaatcacatggaattaacatcaattcataagccaactgataaaaggaaaatgtgtaatcagaaagaaaatcctacaaagaaagaagatcatgaaaagttatcacaaaatacacttcctgtaataggtgtttgggaatttgaacgtgatgatgatgaatatattaaattccttgatctgtttttgagttacattcttgaaagagacctaccttattccagggatgctgacattccatttctaactagtttttctggaaagcttagagaacatgaacttaattctttactttttgatgtacatacaacattaaaacgacatcagagcaaaactaaaagccagaatgtgtttagagctggttcttgctttgttgttgctcctgagtcctatgaatcagaaaaatcatcctctttaaatgatgaatatggcatgcatttagaaaaccagaaactttcatcatcagtactggttaatcaagggatcaaaccttttttacaatatccttcgaatgaagtcaataagaatgaaggaatgagtggattatttggtttaaaacaaaggtcaatttacaaaatacaagatgacactagagagaaatgtctaatccagagatcatcaaaccacattttttggactcccaagtccattaaaactaga

SEQ ID NO: 37081 - DNA, 1050 bp, Homo sapiens
agatggagtcttgctctgtcacccaggctggagtgtagtggcgtgatcttggcttactgcaacctttgcctcctgggttcaagcgattctcctgcctcagcctcctgagtagctgggattacaggcatgcgccaccatgcctggctgacttttgtatttttagtagagatggggtttcaccatgttggtcaggctggtctcaaactcctgacctcgtgatccacacaccttggcctctcaaagtgctgggattacaggcgtgagccactgtgcccagccatgcgtggctaatttttaaaaattattttattatttgtagagatgagtcttggtatattgcgcaggctgatctcaaactcctgggttcaagtgatcttcacacctcagcctctcaaaatgctggggttataggtgtgagccactgtacccagggtgaaagacttctgtatatgactttttaaatgacaggatagtctttatttatttgtttatttttgcaatattgtccttacgtgatttaactttcatgataagttgaacctgtagtaattcatttgttttaatttttttttttttttgagatggagtttcgctcttgtggcacaggctagtgtgcaatggcactatctcagctcactgcaaccttcgcctcccagtttcaagcagttttcctgcctcagcctcccgagtagctgggattacaggcgcctgccaccatgcctagctaatttttgtatttttagtagagacggggtttcaccacattggccaggctgttcttgaactcccgacctcaggtgatccactcacctcagcctctcaaagtgctgggattacaagcgtgagccaccgcgcccagctcatttgtcttaatttttaatgatgattgcttaaaatatattaagcatatacttactgggttggggaccccaaaattaccccctagatttgatggttcactaggaaaactcagaagatttaacatatagttgtactcatagctatgatttattacagtgaaagaaaacagcaaaatcagcaaagggaaaa

SEQ ID NO: 37082 - DNA, 1075 bp, Homo sapiens
ctacctgggaggctgagatgggaggattgcttgagcccgggaggctgagatgggaggattgcttgaacccaggaggttgaggctacagtaagctgtgatggagccactgcaattcagcctggcaacagagcaagaccctgtctcccaggctggagtgcagtggcacatacctgtaatctcacctgttcgggaggctgaggtagggtgatcgcttgggcccaggagtttgagatcagtctgggcaacgtagtgagaccttgtgtcttaaaaaaaaaaaaaaaaaaaagattacaggtgcttaaaatatttatgaagattttatataaggcattttttaatcattttattttgcactatatttaaatgtgatcagtttgtatgtatgttataccgatgaagaatacaggcaaaaaaaaaaataggctaaaaaggaggctaaactcatcattagcctgaaatttgcttttgataattacctgattttatgtgcagattgcttattctctggagaatactgtacaaaaaaactttatggtatcaagcacaattaaatcgaagagttcctgaagctgatagtcagttaactgaaaagatgacacatgaagcatctactgtcaagtccctgttatgtcatttgcaggctaacctacagagtactggagattgcttgaatcaaaccttagaacttaaatctatcaatggtcagtatcttatgaatattttctaactccatgaataaatgacatagttaaccagactttgaatttctaattggttgtaatgatttgtttttcaaaataatttctggctgagctccattaactggattttaaaacaaagtaaatttttatgaagtaatataattaactatgactaattgttggttaaaaactttctaggggaagaatgttttttattaggatcatatgaaaagtctgttcagctgtggaaaaaagctctacaagaaatcgaagagaaaggtaagagagtgttaaaaaatatgtgccataatattagcaggactccttttagcttgctgtagaccttaacagtaattctaaattccaaaaaatat

SEQ ID NO: 37083 - DNA, 1010 bp, Homo sapiens
aaggtctagcctgttagaacaccaaggaaatgaaagttcagccgatttcactgtccccaaattcttgcaggcagaagaaacaataaatgaaaatgcagcagattttcaggtacttagcagcagaattttatttacttggaacaattatgactttattccaagaaacatattctgtttttctcttgttaaagggaagagaaatttaagaacgccaaagtgatgctattgataaggtattaaatggtattaagtatcatttttttcccctcatgttttaggattttgaagcagaagaaactaacgaaggcagacactttccagacaacttatgtcctttttggaacaaaagagatgatgtgctgtgtagtagtatgaaggaaggaagattggaatttgcatctatgtttgatacgatacatgcaaaggatgatagtgaggagacagatagaaccattacagaactgcattctatccagaaaagtctacttgcagcgtggactataggaatttcaaaaactgtgacagaaaaaaatttaatgttaaattacatagtagtttgtatcactcattttttttacattcttcaatttataaaatgtccttttcctaaacttgatcttgttttaagcaaaagctcaagacataatgcatggatactttgtatctttcaactttttcatcagtgtttatcaatccattattgggatataagatacaaacaagatgtggggcatttgataaagctgacctcaaatactgtaaaacttttgctgactcagcaacaaaagggtcagttattctcagagaaacttttagcttgtttttatttactcaaaatggtagctgacaatttaaatggtgtatacattcttcaacctgaagttatttcagcatcagctgatggaagtaaaataacagctcaagactcattggtggtacctatttttcagatgtttcaagatagtggttttcagaaaaactggtcttggaactcatttttcaagattcat

SEQ ID NO: 37084 - DNA, 1031 bp, Homo sapiens
caccaggatccatgcaaaattacagagtaggagaatttcctcttacagcttctaacttccttttctgaatacttttccatgctgttctatgcattttcagagtttttaggtttatctagccctgcctcttcattttcttttactttccacaagttcctttctctttggtaaatttctcattcatattattcataatactttgaaagtattagtctcagttcagtggtctttttgatttagtgtctgtcattttctgaggaggacctactgtttgtctcattaaacattagtatcaccagatatcaacacctgtgaaaagacgggaataagggttaaaatataaaattttaaaaaataaaaataaaataaattaaaaaatcacgaaatagttaaggagtagtaccagttagagctttgggaagagggagagtctgctgttgagagggactctaacagcctgcagagaggacagatgtggccttgaaatctatcagtagatcttgattgtagactctactaggattaaaattcattctaatatgtgagtgactaaaaaactcagttctttaggaatatatatatattttttctctgtgtcccagactggagtgcagtggtatgatctcggctcactgcaacctctgcctccccagttcaagccattctcctgcctcagcctccccagtagctgggattatgggcacccgccaccacgcctggcttatttgtatttttgtagagacggtgttggccaggctggtcttgaactcctgacctcagttgatccgcctgcctcggcctcccaaagtgctgggattacaggcttgagccacggtgcctggccgaatattttcgttttttaattgcttatgaatttctaattggaatattgttgaaatagatgtttatgagcaaactcctttgttctaggaagtaaaattcatgaaatgtgtatggcaattgtctactattagtcattcttttgccctcattttttgaactttcacacctctgcttggtacagcccattt

SEQ ID NO: 37085 - DNA, 1797 bp, Homo sapiens
atatggagtctcactctgtcgcccaggctggagtgcagtggcgtgatcttggctcactgcgacctccgcctcccgggttcaagcaattctcctgcctcagcctcccgaatagcttggattacaggtgcactccaccatgcccaggtaattttgtatttttagcagagacgggatttcacctgttggctaggctggtctcagactcctggcctcaagtgatccacccgtctctgcctcctaaagtgctgggattacaggtgtgagctaccgtgcccagccaaccccttttctttataaattactcagtctcaggcattcctttacagcaacacaatggattaacatagtctctaaaatattccctaagtacatgtgcacatgtaggaatttggatggatcctttaatttttgtaatgaactacatataaatttaaaagttactataccttttgttttcaattatttcattacttttttagatcattgccataccatgttcattgggctcaacaagactgtcatctctgtagtttaattcctaaatgtgaatcagtaaagtcaagaggagctctaatttctgccttttcaagagatggccttaccctggcagtaactcttaatcagaaagaccccaaggtcagtaaatatctgtcttagaaagtaatctataaaagaaggagtttattccagttttgagatttttctttttctaaatactcctttatatccattttttttttctttctggttttttttttttttttttttgacagggtctctctctgttgcctaggctggagtgcagtggtgcgatcatggcttgctgcagcctcgacctcctgggctcaagtgatcctctcacctcagccccccaagtagctgagaccataggcttataccaccgtgcctggctaatttttgtatttttttggtagagatggggttttgccatattgcccaggctggtcttgaattcctgagctcaagcagttctcccacctcagcctcccaaagtgctgggattacaggtgtgaaccactgtgcccagcctgctttatattctttaagttggtggtgtttaatccaatttgacattgtggattggtaaagttctttaaagtagatcccataactttcaaaacttggctttcagaaatgaaaaaagaataagggaaaaagaggaaagaagagcattgtggtaactaatgtttttaaggtggaacataaaagagcaaaggctaccaggggtcaatattgctttgccagttaggaaatactccctagatagtttattaatataataatagatctctgtgtcaccagaattataaataatggttacagtaaaataattttaatagttttcttgtcttttttttcctttctaggcaactcaggtattatttataaacacactgaattttgttactctctgtggtagccttaaaggatgtagtaacaagagtcccgtggttccagctacacttattaggtaagaactcttttgtctgtcttttttttctttttttcttttaaaagagatgggtctctgtcaggtgtggtagctcacacctgtaattctagcactttgggaaaccaaggtgagaggatcacttgagctcaggagtttgagaccagcttgggcaacataatgagacctcatctttactaaaaaataaaaagaaattagccgagcatggtggtggacacctgtagtcccagctacttgagaggctgagctagggggtatcacctgaacgtgggtgatagaggctgcagtgagctatgatcttgcca

SEQ ID NO: 37086 - DNA, 1049 bp, Homo sapiens
gctcagttataccttgaaaatcactgccttagaatatatgaaaacaaagttaactcaaaacagcctactttttctaggtaataaaaaatgagcagagtcagggatttatgaatttcagaagctatatctattttaatctaagtaaataatttaaaaacttgctcatactactgttaaaattgatgagagtcaggttcagtggtatgcacctgtggtcccagctactcaggaggctaaggcaagaggatcgcttgagcccaggagttctgggctgcagtgtgctataccgattacgtgtctgcactaaattcggtatcaatatgatgacctcccgagatcaaggggctggggtaaccaccaggttgcctaagaatggtgaactggtccaggtcagaaatgggccaggtcaaaactctcatgcttattagtagtgggatagtgcctgtaaatatctactccacttaaggctgggcaacaaagtgagacctcagctcttaaaaaaaaaaaaaaaaaaagattaaaaagtagataagccagttttggctagcagaattagaggacactcctataattttaaacttcaaagaaattgaaatacaactactaggtagccttacctattaattctaacgaggtattttaaaacaattcaaaatgttcaggctactatagagtattaagcttaatgttcattttatgatttgtggtacaaatggataatctttcttaaatgtcgctttgatttctgggataatttatttaggcagtaagttgaattaatttctggcacctcttgagtccttcacatgtttcttctcttaggaaaaagaagccgtttttcttttggatgataaattcataaatgaaattaatttgctatcaggaaagataaagaagaaaattcctagtctgcagcctttcttgaaggatgttattgtcctaacaacatccagtaatggttaagtagtactgatattttcaaatggctaaaactatattttttaataacttagggtgatgttaaaggaaatactagattgtaagtattg

SEQ ID NO: 37087 - DNA, 1053 bp, Homo sapiens
cagatggttagagatggttgcagtttaggacctggaagaacaaagctttatcttaaactattgatctggatgttttttctttatccctgctcatcccttacactcttttctatattcattttactggttcaccagaagccaggaaaaataattttgtagtagtcagagtgttattccaattgtatattgtttattgtgaatactggtgaacagtggtcaagaagtagttttatattcctttaaaaaatgtagccaggtatggtggctcatgcctgtaatcccagcactttgggaggccaagggggggtgaatcgttaggtcaggagttcgagaccagcctgaccaaaatggtgaaaccccatctgtactaaaaaacacaaaaattagccaggcatggtggtgggcacctgtaatcccagctactcgggaggctgagtcagaagaattgcttgaacctgggaggcagaggttgcactgagccaagatcacaccactgcactccagcttgggtgacagagcaagactctgtctcaaaaaaaaaaaatgtaactctaaatatactcctacctttttcctcaagaaattacagattcctagtgtggcattataagcactgcattttagttgagcaaaaataaaaataacaaaagtctcatgttagttttagcaaaagaataatttattggccctcaaaactaaaatgtccatgtataggcaacttccacctgactacatccccagcctcaatattttcagggccttctctagctcagttcctctcttttcatgtcactctgctcttgcaatttgtctacctgtgactcctgggagagtatgggcagtgttacatcctgttagctctaacctggagatacagttaacagagaagtcctaggaagggctctgatcaacgagtccagcttgagtcatggactagtcttggggcatagtggtcatgcaaaccatatggaataggaaagaaatgctttcctaaagaattggatgctgggcatacatgtgatctcagctatgcacatcagatatagtaggcac

SEQ ID NO: 37088 - DNA, 1039 bp, Homo sapiens
agactgagttttgctcttgttgcccaggctggagtgcaatggcacgatcttggctcaccacaacctccacttcctgggttcaagcaattcttctgcctcagcctcccgagtagctgagattacaggcatgcgccaccatgcctggctaattttttttttttgtatttttagtagagatggggtttcaccgtgttggtcaggctggtcttgaactcctgacctcaggtgatccaccccccttggcctcccaaagagctgggattacaggcatgagccactgcgcctagccccaccccccctactttttttttttttttttttttaattttttgtgtagccaaaagatctcactctgttgcccagactgctctcaaaactcctggccttaagtgattcccctgcctcagtctcccaaagtgctgggattataggcatgagccaccatgcctgtccattatttctttatagtgactattatatgtaggcaatgtataattggtagaacatagtctatgaaacagtgcgttaattgtgggcagtgaagaatcattgaagttgtgaaatttgtattttaactagatcattgtagtatggcaaaacggttaggaaagagaaagctatcttgactaactgtttatgctatgagatactgactgatgtacatgtacatttagtgtttctttaggtatacctgacttattcattgaacacctatccactgatctcaaaagtattcctcagggtagtctccattcctgtcatttttcctcctattcatgagacggaaaaattatgaccatggtacagagttgtatcaaggaaatgaagaactagaacattgaattgaaaggttttgaaagggttcacaatttcttttcattttctattaatgtcttcttttaaattctcttaagaataaaacttttttctaatattttaagtcttccattaaatcattgaaactcttctgagcttcgttttcctcatatataaatgagattgaagccaaataataaaactttaaaaatcaatcaagggc

SEQ ID NO: 37089 - DNA, 1049 bp, Homo sapiens
gatcgagaccatcctggctaacacgtgaaaccccatctctactaaaaatacaaaaaaattagctgggcgtggtggcgggcacctgtagtcccagctacacgggaggctgaggcaggagaatggcgtgaacccaggaggcagaggttgcagtgagccgagatggcgccactgcactgcagcctgagtgacagagcgagactccgtctcaaaaaaaaaaaaaaaatcttcaaatggaacccacctacacccaagttttcttttttactttatttcttatttacttaatcacatggtctttcctctcctgtgagaattaaagttgccagaagttggtggggaagaagtcctgcaggaggaaatgtttgtaaatgtataattaatcatgtgtctttttcgttgtaggagaagatttacaaatctctgcctggatgctgtttgtggttaccttgttgagctccagtctatgagctcgtcagtagcagtacaagccatcactgggaattttaaatctcttcaagctaaattagaacggcttcattaattactgtgatatactttcatccgttttatgatctgtaaaataaaaactcagctgggtccagatatcaggtgttctaaatctaagaatgtaagaacaatcttaatagaaatatgtttttaataagtggctaatatctacaaatagtacctttgctaaatgaattcttttttatgactattttgttttttagtaattgggtgaaaaaacaactgaaatgagattatttattattttaacataaggattaaaaaaatttagaaactcttattttgaattgtactgcaggcagaaatttcgaatttatattattcattttcaagttagtccaaggatattggcattaaaactccactaggcggccaggcacagtgacttacacctgtaatcccagcactttgggaggccaaggtgggcgaatcacgaggccaagagtttgagaccaacctggccaacatggtgaaaccccatctctactaaaaatacaaaaaaaaatagccaggcgtggtgg

SEQ ID NO: 37090 - DNA, 1045 bp, Homo sapiens
ttctaacagtgtttaggaaggagtaatatgtaagcccaagattttcaaatatagccaagtgattgttttttccattttataaccaaagccaggagatctgactctagttttggctctacttaagctttacttttctcatttggaaagtgagagttttggactagatctactgtaggttcttttccaactctctatgattttatgtaagttcgcaaaaatttgtttctactaattagtatattttcgcttttcaattatagagtctattaatatttaggttattttaatttattaaaataatttcattatgtttagaaatatggtatttctataattgtgatagaaaagttttatgctcctaggaacttcaagagcagctgaagatcaccacctttaaagatcttgtaatcagggacaaagaactcacaggggcattaattgcttctcttatcaactgctacatcagagataatgccgctgttgatggcattagtttacatttacaggatatctgcccacttctatatagcactgatgatgcaatttgttctaaggtatgatactttattacctatttcattgtttgttataagaggtatcatgtatgatgaaccatcttgtttcacttaatataggacctcagtcagttagatctcttaacctctcctagcctcagaatcctcatctaagaaaggggttggaatatgtggcttcttaaaaccagtgtatactcttttaagcttagcttttctttttaaaaatatttttatttatttatttgacacagggtttcactctgttgcttaggctgtagtgcagtgctgtgatcatagctcacagcagcttctaagtcctagactcaagcaggcctctcatgtagctaggggctacgggtgtgcaccactacacccagccaatttttttgttttttatagagacaagttctgatttgttgcacaggctggtcttgaactcttggcttcaagtgatcctcctgcctcagcctcccatagtgctgggattataagtgtgagccaccatgccc

SEQ ID NO: 37091 - DNA, 1049 bp, Homo sapiens
tttttcttttttaggcaatcttgctctgtcattgaggctggagtgcagtgatgtgatcattattccctgcaatctcagactcagccgcctgagtagctggggctacaggcatgtgctgccacacctggctgattttttcttatttttctcagagatagggtctcactgtgttgcccaggctggtctaaaactcttggcctcaagttatgctccctccttagcttcccaaagtgctgggattacaggcatgacccactgcatccacccttacttgaggtgttttttggttttcttttttgagactggtctcactctgttgcccaggccggagtgcagtggcatgatcacggctcaccgcaactttgacctcccagcttcaagtgatcctcccacctcagcctcctgagtagttgggactacaggcacatgctaccatgctcagctaatttttttatttcacattttgtagagacaagttctcactgttttgcccacgttgatcttgcactcctgggcttaggtgatcctcctgtcttggcctcaaaaaatgctgggattttaggcatgagccatccgcactcagcccttattgaatatgtttaacatattcatatatttaacatattgaatatgcttaccatattcaataagtgagtttgtcaaatgtatttactgcattttacagagatgatcatatcattttcccccttacctttaacaatagagttaatacatgtcctaatttcgaccaacccttggattcctataacattagtttcattgactatggaaattttttaaacagatttttgagatctactttacataccactaaatttactcattttgaatgttcagttcagtgacttttagtaaattcatagaattgtgcaaccatcaccacagtccagttttagcacacttccattatctaggagacatacctcatgtccattagcagtcactttccattcccacttcttagccccagacacttactgatctgctctatctctgtagatgtgcctattcttgacatgtcatataaa

SEQ ID NO: 37092 - DNA, 1054 bp, Homo sapiens
ggttagattgtttcacatttcctgatattacacaaataagatggcaaaggttatttttttttttttttttttttttgagacagagtcctgctctgtctcccaggctggagtgcagtggcccagtctcagcttactgcaacctctgccctctggggtcaagcgatcctcccacctcagcctcctgagtacctgggattacaggtgtgcgccaccatgcctggctaatttttgtagtttttgtagagatagggtttcaccatgttgcccaggccagtctcaaactcctagactcaagcaaaccacctgccttggcttcccaaagtgctaagattacaggcagggggcctcagcgcctggcgggttattcttttatgtatatgtttgcattcttggacaacaaactgcttaccttcaggtttaaatctcatctctaacattgattaactgtctgaatatgagtaaattacttaacatttcagagcctgatacctcatggtaaaagaaggggcgtagtatatctccctcataaggttgtcatgagggataactcaagcaacttaatattgctcaaattttactatgtaatactttgacatatatatgaacgaaaactccatggacccagcactaatttctatgaattggcatactttacagactgctttttgctcttgttgcccaagctggagtgcagtggcacagtttcactcttgttgcccaagctggtgtgcaatggcattatctcggcccatcgtaacccctgcctcctgggttcaagcgattcttctgccacagcctcacgagtagctgggattacaggtgcgcgccaccatgcccagctgattttttgtatttttagtagaaacagtgttttactatgttagccaggctggtctcgaactcctgacctcaaatgatccgcccacctcggcctccactgagaatacaggcgtgagccaccacgcccagtccaaatatatttttaattgtgaggctcttaaagttcatgagttgggcacagtggcccgtgcctgtaaccacaatgctttggaag

SEQ ID NO: 37093 - DNA, 1048 bp, Homo sapiens
caggggttaggggatgccaaccaccattcctcaaccttcatgtagtcaaaaattcatgtacaacttttgactttcttaattactaatagcctactgtctagaagcctcactgataagtaatcaattaacacgttttgtatgttttttgtgttttctttttttaacttttgcatggtgtaggagtatgggggagtctcgtaaaaaccagaaaacctgctagacaaattctaaaacagccgtaacactgatattttgtgttatatgtgttatacactatattcttaccataaagtaagctagagaaaaaaaattaagaaaatcataaggaagagaaaatatatttactattcattaagtggcaatggatcatcataaaagtcttcatccttgtcttcacgctgagtaggctgaggagtaggaagaggaagggttggttttgatgtgctggggtagcataggtgggaaaaaaatctgtgtataagtggacccacacaattcaagcccatattgttcaaaggtcaactgtatatctacttacatatgaatgtacagtgttacaaacttccccataactcagtgacatgtgtctacagttcaacagggcagttcttgtcttgctgggctaactcaagaataggcaatcagttgtgaagttaaagagagctatgcttatcttggctagactctcacatgttcaaggttatattttccagctggtctagaatggcccaagatgaaacagcttggttgttctctacatggtttctcatcccccagcaggccagccaaagattatttagttggtggtggcagagttccttgagaaagagtagacacttgcaaaacctttattctaaactcagaactggcttaccatgcacttttccgccttattcacttggccagagggaagtcacagggccaactcagatttaaaaggtgggaaatagaccaccttttaggggagagacatcaaatcatactgcagaggggatagatatagggagggataaagaaatgtggttgtttttgcaatcagtctatcatg

SEQ ID NO: 37094 - DNA, 1069 bp, Homo sapiens
cgtaatattatgatagttttattttgtcctttaagtcttttgatctatttggaatttactctggtataaggtatgactatgtttctagctttttttttttttttttttgcctaaattgatataaatagtagcaacatgattaattaataatctaactttaattctctggtttaaggggcagctttgccggggcaattgcattaagttttctttatagatatatagatctactggaggttgagtagagaagtagatgatctttttgaccagttgtactttttatatcacctcagccattcctcctgcctcagccccgtgatgtgctggaaatacaaatgtgggccaccatacccagcctactttgtattgttgaatggttttttttgtttgtttcatttattttatcaaataaggtagagtcagttgctatcagccaatcttggtaaatctcttgttcatgttctttcttcaaatttcttaggggagccttatgtttcataaacttagacctgtagatcaactgaggcatctacttgtgagtaatgtgggaggagatggagaagagattgaaagattctttaaattacatcaggtaattatatatacttttaaaaaatgtgatgctattttaaacaaacagtgggagtcatagtttatgtaaattgggactggaatactgtaataaatatatatatatattttgagatggagtttcgctcttgttgcccaggcaggagtgcaatggcgcaatcttggctcactgcaacctctgcctctcaggttcaaatgattgttctgcctcagcctccccagtagctgggattacaggcatgtgccagcactcccaactaattttgtatttttagtagagacagagtttctccatgttggtcaggctggtctcgaactcccgacctcaggtgatccgcccacctcggcctcctaaagtgctgggattacaggccgtgagccaccaagcccagccataaatagataatcttaacaatattcctttctttgcctaagtcactgtatgtgaactgacatttgaaagcaggattaatatgag

SEQ ID NO: 37095 - DNA, 1037 bp, Homo sapiens
tacaaaaattagccaggtgtgaagtggagattgcagtgagccaagattgtgccactgcacttcagcctgggtgacagagctggaccttgtctcaaaaataatagtaataataataataaagatcattgtaagataatacttggttttctgtttttcttttcttttcttttttgagacaggctctcactttgtcacccaggctggagtgcagtggcatgatcactactcactgcagcctcaacctcccaggcctttgcgatcctgccaactcagtggcctcacacccccatgcctggctaattttttgtttcttttttgtagagacagtctcactatgttgcccaggctggtcttgaacttctgggctcaggcagtcctcctgcctcagactcccaaagtactgggattaaagacatgagccaccacatctggcctatttgctttatatgtgtaacatgtttttcttcatttattcacagaggagaccttgcctattttgatggacttagtgagactattcttgctgtggggcttgtgaagccaaaagcaggtaagaaataaaactataaggaagagattatgtttgtatatgtaaactccaaatggtatagacctgaacaacaacacacatttttttcgagatggagtctcgttccatcgagtaggctggagtgcagtggcgcaatcttggctcactgcaatctccgcctcctgggttcaagcagttctcctgcctcagcctcccgaatagctgggattacgggcgtgcgccaccacacccagctaatttttgtatttttagtagagacggggctccgccatgttggccaggctggtctcaactcctgacctcaggtgatccgcccgcctcagcctcccaaagtgctgggattacagatgtaagccaccgcgcctggctgacaacacccttttttaaacaattgtattctccattgaagttttattttgaattctaattagaaatatgtaaagtgattattaatgtttaactgtttactttaatggtataagtgaca

SEQ ID NO: 37096 - DNA, 1014 bp, Homo sapiens
attctttacctatttttttttgtctgttttatttctcccttttttttgagacagagtctcgctctgttgcccaggcttgagtgcagtggtatcatcttgcctcactgcaacctccacctcccaggttcaagtgattttcatgcctcagcctccggagtagctgggattacaggcctgggacaccatgcctggctaattttttctatttttagtagaaacaggtatcattgtgttggccaggctggtcttgaactcatggcctcaagtgatccacacgtctcaacctcccaactttacctatttgtacatatagtcaattaggtaatttttcctatataaagcctatatgtatagttcatagttactttacatttcttgtctgatagtttggattcatagctgagtctggttctattgattactttgtttcttgacactggggttttttttcttgttattttgtgtctcatgatttcttattgaaagccagaaatcatgttaagacagtagatactgtaagtaagtagcaagtggtatttattcttagaaatgggcatgtcttttccttggctaaggtatagcagatctttattatatggggaattgcctttttccaggtcaggacttgagctggatttgggttctgttgttgtacttagggtgcaagttggtttactggagattttttctcagtgttcctcttacatcctcagtcttaggctcttcctgtgattccatccttgtaagatggccctcttcttacccttatccctgccccagcagtagattgctattacttgatgtgcagccctgttgtggagatgtttggaatggggagcagcattttctatttttgtatttccctatttttctagttcatccttagccataagcaggtctggatccctgggtcttggaactgaaacagttttctttgcttgtttattttttcattatatatataatgaaaaatatttttatatattcaatatatataaaatgaaaaagttatat

SEQ ID NO: 37097 - DNA, 1025 bp, Homo sapiens
ggagggaagttggaaggagattggtcacatgttcagttgtctgagatactggtaaatgtgcgctgtttgtcaatgaaggttgcatgcctgcatttacaaggtggtctcatactgattgtgctctgtccagttagattcgtggcttctcccttggaagctacaattaaggactagttagaagcagaggctagatgtgttctctccagcccttactaactgggaaaataattgagaaatccctcttttcctcagtgaaagcccagtcattggttagaaaaatctaattgtcaaactagcattatgttccatcatatctgtgggatagtaattcatgtaagacacatttttacctctcttacaagtcaattcacttacaagccagtttcaaatcaagcttcccttgcgaggaatggagatcattatggggcttattatgactacatttcttttatgagtgaccattttaaataattaatattttatttaatattaaattattaaagacttagctagacttttaacattagatgaaccttgtgaatcatatattgcatagattagcacatgtatgcaatctaggtcatcaatttgttgaatttatacagccctagatttgagattgtggccctgagtatctggatagttgagttgtgtgtttatgtgcttatatgatagaggtgctttgttcctgcagcttagaaacagaagcagccattcactgagaagcttaagagaggaagtatcaacctcattttccaaaccagcattactttcaccgctcgtggatctgaaagattacatttagaacatttagtactattacactctcagaaactgtggtaaaaagtcacattttcaaaacttcatgcatattgtattcttgttggaaataagtcctatagtttcttaattgtcttcatgccgtccatatttaacaaacattgcaagtcctttttatatttgggtaattatttgtaatttagtgaaggagactaggggatgttttcttccaaagggaatttaaa

SEQ ID NO: 37098 - DNA, 1062 bp, Homo sapiens
ttatctgatccagtcctcacatttttaaatataaaactaaagagagaatgcttcttacaggaacagttacccaagggctgtttcttagtaactgtcataaactgatctgaatccatgggcatacctgtgttgcaggtgcagcaattgcttggtgagctgtgcagaattgattgccttcagcacagcatcctctgcccacccttgtttctcataagcgatgtctggagtgattgtggttcttggaaaagcagaaggaaaaactaaaaagtgtatcttgtattttccctgccctcaggttgcctatgtattttaccttttcatatttaaggcaaaagtacttgaaaattttaagtgtccgaataagatatgtcttttttgtttgttttttttggttgtttgtttgttttttatcatctgagattctgtaatgtatttgcaaataatggatcaattaattttttttgaagctcatattgtatctttttaaaaaccatgttgtggaaaaaagccagagtgacaagtgacaaaatctatttaggttctctgtgtatgaatcctgattttaactgctaggattcagctaaatttctgagctttatgatctgtggaaatttggaatgaaatgcaattcattttgtacatacatagtatattaaaactatataatagttcatagaaatgttcagtaatgaaaaatatatccaatcagagccatccctaaagagtgttctcttgtcttcctttgtatcctctttggctccttcccttagcttccaccccagacatcagacctggggctgccttctctccctgccaaagcttgctgttagcattgtctgcttgccctcaactcctgccttgttccctgttgaaatgtatcaatcccgtactttatctctccaggacaaggataagtgtggctacagtaaaagtttattgctctaaacggcgctaacctgagataatgagaaaaggccagaagagattgtttgatctctgtctgtcaatatatatgcatttcaactgtgaccatctggatccagggccctttctaacctatat

SEQ ID NO: 37099 - DNA, 1049 bp, Homo sapiens
tttggtagcctctgaaataggattaagggaaaaaaagtgacaactgatatttcaagttgctacagggagtttccagatgagctaagagtcatttttcagtatattttaatctgtcaattctaatgtaatatgaactctgacaagacatgctacagagagaataattcctgcattattcaaaagtaaaatgtaaatagtaaattatttcattttttaggaaattgtggaaaacattgacgtttataaaatattatgttttcagggaaaatatatgtaatcataagtacctgcattttttttctgttagatccaccagatactcctcaacaactgaattgtgagacacatgatttaaaagaaattatatgtagttggaatccaggaagggtgacagcgttggtgggcccacgtgctacaagctacactttagttgaaaggtaatgataactgggaaaagatgtcagatggcaaggagtacgttggaagtgcatgttaaatgacatagggaactgcactagatcatttatgttacaaacaagatataaaaccaaatatgctgtataaaattacacttataagcactgcagttcagccacatgtacactcaattttatgtctcctcttttaagaagcttagaatgaagaacacttgaacatgaacagagactgtttctcggtagtaaacttatggctgattaatttcttctattttctgtatcacatacattttcttctctgagtatgtaatatgcttctaattagaaatttaaactttttatacaaattaagtattacgaatttgcccgttttttcctgcaatatttatctcttgccattttgaaattatttttctgttaattaacagtttttcaggaaaatatgttagacttaaaagagctgaagcacctacaaacgaaagctatcaattattatttcaaatgcttccaaatcaagaaatatataattttactttgaatgctcacaatccgctgggtcgatcacaatcaacaattttagttaatataactgaaaaaggtaagctgtacata

SEQ ID NO: 37100 - DNA, 1027 bp, Homo sapiens
ccacaggccaaacagagaggaagttagttctggccccctgctcccctgggaggtcacaataaacaaatagtagcaaggctgtggtttttgtgcaagggagtggacactaggagtatgaatgtctagaaaggctgtcagaggaggtgtaattctggagtaggcacagtcagttttctcagcagaaaaggaataggaggacattctaccctgaaagaatattgagtacaatggcttgaatgtatgagatggcgtgatttggagaattcaggtgtttttgcattgctgatgcctaaagaagcctcaccatgtgagaggtttagaaggagatgagctggacccattcaagtccagagtcctaagcacccagccctaaggctggggctgggtagttggtgggggcaggaatgcaagaggcatggaaagtcctttcagtaaagtaaacatttgtataagaagtttgaaacatatatgaacaacagtataaggaatataagcatgctctggagagatatcaagggctgtggaacaagagaggaaaatatcattttgcctaagagataccaggggaactggaagcattttgaaaacagaactgaagaggaagttctgttaagaagaaaccatgagccaaggcagaggagcaggggagttgccagtttcatttccttcatcagcatccgttgaacatcatcctagcatgaggagcgctgtgatgcactggtccctcagtgaaggggtggagtgtgagtagtggaagtcagcctacaaagggaaggttgaggtgggattttgaaaggcatgcaaaaactccagctgtttggagtcatctatgcttattctacttttggtacaatgaggttgtttttcctacccccacattggtaaagttactatcaatctgttttttcagtcttaaaatgcggtacaacctatcatgtttttgcaacaaagagggcataaagtattttccattgtattttgtgttaaccaaatttttatgaaaattatactattaattttatttgct

SEQ ID NO: 37101 - DNA, 1055 bp, Homo sapiens
acagatgtgaaaatctttggatgccaagtccctaatataaaatggtgtggtatttgtatataacctgtgcttatcctctcatatgatttaaatcatctctagattactttaaatcatccctaatacagtgttaatgctatgtaagcagttgttaaacggtacttttttttttactgtttttttattgttgtactgttgtcttttattggttttgttttctgaatattttcaatccaaggttggttgaatctgtggttgcagaaccctgggatatgaagggtctatggtagtatttttatttcattcttaaaaaaccttaattactgatgagatgtgtgaagctattgagtactgcatagcttcccaaatcttggaaaccagcaccctcatttccatttctacattgatttgtttgggtagtacttgtgttttatcccagcaattactagtccctccctctcttcaccaaagataaagatacgatgtcacacaaaaaaatgtagcatgagcaaatattgaaactgtggactaccttgaactaacggttttcagagtgttggacagatgtcactttatttccttcaaaaacttagatattctgtgatagctctgtcagtttgctttggtgtcttggggtgcctcagtgcagtttgggagccagagctttaacttgggttcctagtgttggcagtacctgggttagcatgcagcctaacaatgaaagtatactgtgtgggcatataataatttgtgccttggtattcattcagccagctggcttagagtttttggtgtctgctttgtgccaggtactgcttggacactgagggttacagtgaactcggatgtgtttgctctcaaggatctgacggtctgtagggagaattataagattaggaagtgaagcagtagagcagaagtcagcaaactctttctgtaaagggccaggcagtaaatattttaggctttgtggaccattcaatctctatcctagccactcagctctaacattgtcatgggaaagtagtcataggttatacttaaactagtgggcg

SEQ ID NO: 37102 - DNA, 1096 bp, Homo sapiens
cctgaaataaggcttagttagtattggcctgaatgttttgtgtttttttttttgttttttttttttactgttactttgaaaaatatgtatgtataccttatcatatctgcctatatcacttactttggggagatactcagagctttgtggttatcagtatactaaaaaaaaaaaaaagtctacgcttaaatttatagtgctatttggtttctccatgatttcactgacaggtctaatacattttctttgagtacttgtttgtaaaaagtagactttatggtgaaaaatacatgcagtgccaagtgattaacttaagtgtttaaaaatattaaattatagcagaagaggttaggaatgatatcagcagtaatagaaataattgagaaaatcatctataaataatagatattacagactatagaataccaaaataatgtcaatactgtagtttttaaagattttaggattaatcttagtccatataaatttgtactattggtaattattgaataattgggaggaatctgggcagttgtgctggttgtaaactatgaatttctaatcgtaaagtgaattgttatttctaattgaactttttttcaagaacagatttcagcctcacatactaagtaaatactgataaataaggaaattagaaatttagtattcataattaaatatgctctaaaatttcctatacttttatttcctgtttattcttaggtagattggaagggggaaacagtctgttctccctaattaaattttttctaataacgattagtagaatatggacattctatatgacagtgacattaaaagaggctctttggaagtatatacattattaacataatgtgtacaagtccttttgaaatgacaactttaatgggtttcagctcttttatctagagcttgagataattcaagctgagtttttcagggcatatcacaacggccaagtgttcagcagtgggatatcaatgcttatttacattttcctactgctatttatataaaatgttattccattcagaggatgccttttatccccacattaaagcacagatcattaagcaataaaaaccaaattgtc

SEQ ID NO: 37103 - DNA, 1192 bp, Homo sapiens
cacttggttctctgtaagtatattttaagattgggaattcatttcttacaaggtgaatttctcctgcttatagtaatttaaagaagaaccactaggaatctgtagtaattgagtaagcatccatggccaagtctcctttttccctttaatttcatcctgaatatttggagaatcaaaagaaacttcatgtaacctgtgccatagtgggtcttataataatttttctttggaaataacaggagattctcataaattacataattttacattttattcaagtccaaactctgggtttcaagaaagatattttcaagtagctgaatggtttaaccgtttatttttaaattttttcctctagatgactaaaaaaaaatttcctgaaatgtgatgtcactaatagttatcatgaatttgtcattttatatgtgtttttattaattgatccttcaatcataggtatgttcatattggaggatgaccggtttggcagcagctctactagcacatttttccttgatatcaatgaagatacagagccaacattttatgaccgatctggacccataaaggataaaaattcattccctttctttgcttctagtaaacttgtgaagaatcgtatcttaaattcgcttactttgcctaacaaaaaacatcgtagtagcagtgatccaaaaggagggaaattatcatctgaaagtaagacaagcaacaggcgaatcagaacacttacggagcccagtgttgattttaatcatagtgatgattttacacccatatccactgtacagaaaacattacaattagagacttcatttatggggaataagcacattgaagacactggtagtacaccaagcattggagaaaatgacttaaaattcaccaagaattttggtacagagaatcacagagaaaatacaagccgagagaggttagtagtagaaagttcaacgagctcacatatgaagatacgtagccaaagtttcaatacagacactacaacaagtggcataagttcaatgagctcaagtccttcacgagagacagtaggtgtagatgctacaactatggacacagactgtggaagcatgagtactgtggtaagtactaaaactattaagacaagccactatttgacgccacagtctaaccatctgtctctctccaaatcaaattcggtgtccctggt

SEQ ID NO: 37104 - DNA, 1025 bp, Homo sapiens
gaggcgggcggatcatgagatcaggagatcgagaccatcctggctaacacggtgaagcctgtctctactaaaaatagaaaaaacagccgggcatggtggcaggcacctgtagtcccagctactcgggaggctgaggcaggagaatggtgtgaacccgggaggcggagcttgcagtgagccgagatcacgccactgcacttcagcctgggccacagagcgagactccatctcaaaaaaaaaaaaaaaaaaaattaaaaatacagcacctatataggctacttacagtgcatggagcttatgggactaatagtagctctggatgagtcaatgtgtgagaagtgagtgaatgttaagacctaggacatgactgtacactactgtagactttacagacttgtatacttaggctacatttaatttattaaaattcttttcttcaaaaataattagcttactgtaacctttttagtttataattttcaaattttttaaacttttgactcttttgcaataatatttagcttaaaacacaaacacattgtataggtgttcaaaatttttttggttttatatccttattctataagatttttctgtttttaaatttttttactttttaaacttttttgttaaaaacaaaaacacaggccaggtgcggtggctcacacctgtaatcccagcactttgggaggccaaggcgggcagatcacctgaggtcaggagttcgagaccagcctggccaacatggtgaaacccccatcgctactgaaaatacaaaaattagccgggcgtggtggcaggtgcctataatcccagctactcaggaggctggcggcaggagaattgcttgaacccgggaggtggaggttacagtgagccgagattgtgccactgccctccagcctgggagatgagcgagactgcctcaaaaaaaaaaaaaaaaaaaaaaaaactcctcccccgccaaacacacactagcctaggcctatacagggttaggatcatcagtatcactgtcttccacc

SEQ ID NO: 37105 - DNA, 1043 bp, Homo sapiens
ccctggagcccttttataatgattcatcattagaaacttagaggggtggggctgggtgcagtcgctcatgctaaggtgggtggatcacctgaggtcaagggttcaagaccagcctggccaacatggtgaagccctgtatctactaaaaatacaaaaattagccaggtgtggtggcgggcacctgtaatcccagctactcgggaggctgcagcaggagaattgcttgaacccaggaggcggaggttgcagtgagccaagatcgcaccactacactccagcctgggtgatagagcgagactctgtctcaaaaaaaaagaaagaaacttagaggggtgggagtcttctacctttctattgaagtaagaagagaaatatcagcattataagttaaaaccttgaaagcatttgtctcgtggaaataacttcctaaataatatttatattctgtagtactgtttataagttaaataaacttttgtgtacttgtaacattatttctgtgatgtatttccagttccaaataactgattgaaaaatgatcttttagaacacattttttaatgaggtgcaacagcctgttttccatattagcacagagtatgatcttttgagactatatcttatctgtaatttctcaaactactctcagacatcaaaatttgcgaaatagtattttgatactttaagcaaataagcttacctagtatgtttcgatttgaattttgatcctgaatctaaagagaacatagagactgttcataaatatctgtacgcttagctggaagtacagggaactttggagtcctataagacattttaaagaatgttttccctaacatgtcataaaaaatttgaaacatacagaaaaattgaaaaaactatacagtgaacacccatatacttccacctagattttactgtatttgctgtattatatatctgtccatcccactgggcgttcatcagtccatctatgttattctaatatatcttaaaggaagttgcagacatagtcctcttcactcctgaacactgcagcatgc

SEQ ID NO: 37106 - DNA, 1062 bp, Homo sapiens
ctccttggactagttttcttaacaataagctttcagttgaaacttcaggtggcagggaaaaagcagaggtaggcctggtcttaccagggcaaccacctaacgtggactcaacaccatctagtggtttaacagaaagaaggctgaaccttctgtggagacagataacaccatcaaatctttgcaagtttttatatacaatcaaagactaaggagctaccaaaggacaggattacatgactagaacaaaagggaaaacagttaataacagatccagagatgatccacatcattcaggtttattagatgaaacctattttcagtaacaactatgtcatgaacatagaggacgtatggagaaaattgatgtgaaatgaagaatttcattagcacattggaatggctaaaaggattaaatggaaattcaagaagggaataatacagtatctacatttaaaaactcattagatacatgtaatagaagattagacacatcagaaaacaggttatagaaaatattcaactgaagcattgagataaaatggaaaaaaaaaaaaagaggatttacggatttgtgatacacatgagaagatctggcatacatttaattgaattaccagaaggagagtttggacagaagtagttttgaaaatatattgtatagaatttttcaaaactgcagaagtagatcaacccagagatttaggaagttttgtttaccctaagcaggatagctacaaaggaaaccacacctagaaacattgtaataagattgctggaaaccaaagataaggaaagatgtctttaaaagagtctgagtgagaggccgggcgctgtggctcatgcccataatcccagcactttgggaggccaaggcgggcggatcacctgaggtcgggagtttgagaccagcctgaccaacatggagaaaccctgtctctactaaaaatacaaaattagctgggcgtggtggcacatgcctgtaatcccagctactagggaggctgaagcaggggaatcgcttgaacgtgggaggcggaggttgcggtgagctgagattgcacc

SEQ ID NO: 37107 - DNA, 1022 bp, Homo sapiens
taaggatctgtattagtttgctaggtgaggatggaatgctgtgagctgaattgtgtctcgtcaaaattcgtatgttgaatttctaacctccaatacctcagaatgtgactgtatttggagatagggcctttgaaaaagataattaaagaaaaatgtggtcatatgggtgggtgggcctaatctaatataatctcttataaaaagtgtagattaggagacagacatacacataggaagatatagaaaatagccatatgtaaggcaaggagagagactttaaaaaaacaacaaccctgccaacaccttgatcttagatttctggcctccagagttatgaaaaagtacatttctgttgtttaagccacccagtctgtgacatatgttatagtagccctagcaaactacatacagtgccttaacctttttcttaccatatttgttgcaaatattttttactaacacattgtcacttttaattttaggtatatggttggttttttagaggtatagaagttttatctcaaaacttagaaaattttatgttattttaaatatgtatgtataaaaacgcattctcttaaatttgtaactactttcaacactgtacaagacagtaaaaacaaaagaaaaacatactctttgaaagtctgaggcctctttgttcgtcatatcagaattttaaggaataccagtattgtaatatcagcagtgttgcaatatctgatagcagctattctagtcctgtctcctaccctattctgtttgggaccccctcccctcccctcctctcctctcccctcctctcccctcctctcccctcctctcccctcctctcccctcctctcccctcctctcccctcctctcccttccccttccctccccttatttcctctaaagaaaaaattggacaggaaatttttacagttatcctaccaatagggtagtgaacttttatcagctttttcttagggtccatgcttctcgtggatgtgatgtgatatgttgatcactttggttgctt

SEQ ID NO: 37108 - DNA, 1033 bp, Homo sapiens
agcaaacttctgcctggacatgcaagcattttcatacaccgtctgaaatctagatggaggttcccaaacctcaattcttgacttctgtgcacccacaggcccaacaccatgtgtaaattgccaaggcttggggcttgcaccatctgaagcaacagcctgagctctgtcttggccccttttagccacggctgggatacagggcactaaagactacacaaagcagcaagtccctgggccctgaccaggaaaccactttttcctcctaggcctctgggcctgtgatgggaggggctgccatgaagatctctgacatgccttggagacatttttccctattgtcttggtgattaacattcagatccttgttacttatgcaaatttctgtggccagcttgaatttctcctcagaaaatgggtttttcttttctgttgcatcatcaggctgcaaattttccaaacttttatgctctgcttcacttttaaacataagttccaattccagattgtatctttgtgaatatataaaactgaatgttttaaagagcacccaagtcacctcttgaatgctttgctgcttagaaattttttccaccagataccctaaatcatttctctcaagttcagagttccacagatttctagtgcagtggcaaaatgctgtcagtctctttgttaaagcatagcaagtatcacctttattccagttcccaacaagttcctcatctccatctcagaccatcttagcctggacttcattgtccatatcactatcagcaatttggtcaaagccattcaacaggtctataggacgttccaagctttcccacattttcctctgtcttctgagccctctaactgttccagcctctgcctgttacccagttccaaagtcacttccacatgtcgtgtatctttacagcagtgccccactctctgtggtagcagtttactgtgttagtctgttctcacagtgctataaagaactgcctgagattggataatctataaaggaaagaggtttaattgacttaca

SEQ ID NO: 37109 - DNA, 1048 bp, Homo sapiens
aatggcgtgaacccgtgaggcggagcttgcagtgagccgagatcccgccactgcactccagcctgggcgacagagcgagactccgtctcaaaaaaaaaaaaaaaaaaaaaaaaagaattccagttgctccatggcctctccaacatttgatgttgtcattcttcttgattttagctattcttataagtgtgtaatggtacttctgtggttttaattttcattttcctgttaattaatgatgttaggcaccttttctcatactttttggcctcttatcctcttttgctttcacatctatttaaatcttttacctgtttttacatgggttattttattgttgatttgtagatgatagtcatatattggttattaaaatcttgtctgatgtttgtgctgtgaatgttttttacccattttgtggattgtcttttcattttcttaatagtcttttgatgagcagaggattagatacttatgtcagataattaactttatactaattaagactgctttctattgttctgtatacttagaaaaatatttaacactgatatgtaaaaatgcttctgcgggatggaagtgttagtaattttttaacattttctttggcttttttatttttcaaaatgtctacaaaataatgtaacatcagaagtactctaaaaaataaactttaacataaatatgtgtaacttatggtgacattaatatataatactctggtgaatactatatacgtgccatgcaatacatgataatgaagcacatataaaacacattacacttacatttattatatttattttaaactgctttttccatttttacttataaaagcaatgtagagagattaattattttaatctagtcacagccaggaagtcttcattttttttcagttcctctcattttgtgcatgttttttatactcatttagagaagtaaaatatagtccaagatataaaaataaatcatcagtaatttttaccacctaaaattaacttctctgaaaatatttttgaagtatatactttcctaattgcaagaa

SEQ ID NO: 37110 - DNA, 1038 bp, Homo sapiens
taaaactgacgtgacctaaactcatttcatacagcaaagcctgactggaatttgatttcttaatttgtctcagtgtgtctagtcatatgtttttcctaaaagaaataatagtttttgaataggtaatgttgtacaaaacactaattttgtataaaaacaggataccattataatgtagtctacgtaagaggttagtaaaatacatgaactaaagcaggggtccccaaacccctggctgtgcaccggtaccagtccgtggcctgttaggaacggggccacacagcaggaggtgagcagcgggcaagcatacattaccacctgctctgccttctgtcagatcagtggctgcattagattctcataggaacatgaaccctattgtgaactgcacatgcgagggatctaggtcgtgccctccttatgagaatctaatgcctgatgatctgaggtggaacaatttcatctgaaaccatcccccccacttgaccctgtccattgaaaaactgtcttccacagaaccagtccctgggccaaaaaggttggggactactgttctaaagtgtctcagtgatacttgatgactacttggatgtgagtagattccagggagtccagaatttctaatagtaatattatttgaagatggaaatttttttaagtttttttttaagatgaattaatttgattacaggacatgctaaatttgaggtggacacaccacaaaacatacagactgaggtgtgttgcttttaatcatagataaattttagaatcgaacttttgaggcattgacttaaagggtaaaattgaatttgttagagttgatagagacagggaaaagagaaacctgaggaaaaggatatagtacttcaggtaatttttgttgtctttgttgttgtttacatttaaaacattttttttccctggcaaccttcatttaactcaaagctttaggtaatgttaaaggatatggaacaggaggagggaatacaaatctttaaaccaagtcataaggaacagtgaaggatagttatgaaa

SEQ ID NO: 37111 - DNA, 1354 bp, Homo sapiens
accatgtcgtcaagtacatcaaacctaatatgtttcaaactggctaattatctcattattctaaaaatctttctgggttaagagaagtactttaattgggccaaataagacacccaggagacatcttaacctcgttccttgtccttattccacatatccaatctgagaccagatggtaatgattttatctctgaaatacttgcaaatctgttttttccatttctgttgccatgcctttattcaggcccttattatctttcctgatgattctattgacttcgtaactactctccctgttctagttctgttcttttccaatctgttttcttctctgtaaccaacaaaaagtttcccaaaaagtcaatcttccctcgcagtgttgaacatcttctttatttgggcttttataatatattgcattttacctttcttacaattggcataattttattcacatgtctgcctctctgtcacactagacaaatatttgttgacctttactgtgtactgggtactgatcttttgctgctgattcagtggtgaaaaaaatatattgagtccctacctttgatggacctatagtctaggggggagaacacagtaaacacatgagtgcagaattttaggtactgataaatgctcttaatagtgtaaaatcaggtatgtgaaaaagagtggggggggggaattgtcagagaaagcttctcttaagtagtagtgtttaattgataccgaggaggcaccatgtaagggaggaaagtcttcaagtagaaggaaaaactagccaaaaaaatgtgactatcaacgagacaggaaagaaccagtatggctagtgcttgatgaatgagagagagagtatgggaatatgagattaggagagacagggagacaagtaataacttggagagggtggtacaactgcaaagggaagtcattagagggtttcaggcaggagtgtgatatggtgagataatttagaaaaatcactctgccccttggacaatagactgtagcccttggagcaggcacttcatagcacatgccattaaattaatgttaactgaattaataagtgaatgaatgaattctttcattcatgttacaagacgggcaagattattccatttgaatcacttgaaactgaagtagtgtattgtttttcaagacgagatagcaaaaccaaacattgtagaaatgatagttgtattaatagatttccttgtaagtgatgtgtgtataaccctaattactttaatatttttgagttatcaagtaatgcctgattactaattttaacaacagctcttttcactgtgggtggaaatgctgtatttaatgagtatataacatagag

SEQ ID NO: 37112 - DNA, 1712 bp, Homo sapiens
gagagagagaggtggggttcagaagcctttctttgtttctgattctaaaacccatgcacttacccctttgcagtcttcccaaagacagcatcatgtataagataaatcatatgactaagactaaatgagtattctatgtattgtagagtattgatttggaacccccaggaaccaggttattaactgagatccgaaatgtatattttagccatttctatacagttgtttctagagctggttcctgttcttttctaacttgagaaaataccaactattaacttgagaaaaagttaaagtatgttaactttttctccttggctagggtcatcattatgaatattgatttttgtgttggggtggggtgaagacaatttattactaccctctgtaatacctcaccgctcttttgattcctgtatgcttctacgtttctttcagctgtcactttacaatgcagttattatccctatatttaggagtcctttaattctttgttttttacttttattgtgctgtagaatggcaactgttaagtgtggacttacgctaatatatgtaaaataggataaataggttgtgatgaagaattaagagtctctactatgcataacatgtgaataaacttggtgatgatacatactttgaatttttattgtcattttttggagtgcttacatttgagtacaggttttccaaataggtaattgcctcatagcatagttcagagtaggtgaagtatgacttgatatggagttggcttatacgtatgtaatatggatagtaggattatatgaagatagctaataagttacaaaatataactaatatggacaaaataacatctaataaggtactgattgcatgatatgaagacagtctagtattgactaaaagcatggtgtcgtacccagacagatctagatttgaatcttgatcctgcctttgagaagttaagggctctgctggacaagttgccttttctgagcgtgtttcttcatctccttttgagataacacttatttgaggattgaaggaaatgtttgtaaaatatttattacatttttagcacatagatgtaaagaaatagatattacatattcttatttgtatggtcagtgaaagcaaaagagatgagaatggagagattgatgtgagctggaaaaaaaatcatagaaagtggaggattgtttcaaccttggatgggtagaatgtggttaaatctagaggaaataaggcataaataaaggcatgacacattttactgaaaggaaccataagaatatagaattttagtattagatttgtaggataagggtaagttgttgaggaccttcagaactgcagggaaaacagtaaatgttatataaaaactttcctttattgaaagatagcatagatccaaaaagtctttgttataaatgtacaattctgagaattttgacaaattgaacacatggggaatcagaacccagatcaagaaacataatattgcaataccctggaagctcccattctgtttccttccaggcactactttcccagccaaggaaggcactatcctgacctctaatgccatagattagtttagccgccggtttttgaactttataaaatgtactcatgcagtagatgtactctttttgtaaagttcaaaaacaggccaaactaatccatggtgataaacaagagtgtatgctctgttgtatctgcct

SEQ ID NO: 37113 - DNA, 1048 bp, Homo sapiens
agggacctgtggaagtttgaacttgagagtgatgacctctggtatctggcggaagaaatgtctaagcagcaaagtgttcaagatgtgtcctggatgctgctaacagcccatgctaagatgtaggagcaaagaaatgacttaaagttggaatttgtttttaaacaggaagcactgcataaaggtttgggaaatttgcagcctagccatgtggcaaagaaagaaaaagctttttcaggggaggaattcaagcaggctatagagcaaccacgtgctagagatatttgcataattaaacacatgccaaagtgctgatatccgtgaagttggagaaaaggccttcaaggcattttagaaaccttcacagcagcccctctcatcataggcccagaggcctaggaagaaagaatggttttgtgggcctgggctagccgggccttgctgccttgcacagcctcaagacactgctccctgcatcccagccactcaggcttccagccttgttcaaaggggcccaggtacagttcgggctgctgcttcaaagggtgcaagccataagacttgatggcttacatgtattattaagcctgcaggtgcccagagtgcaagaactgaggcttgggagcctctgcctagatttcagaggatgtatgagaaagcctgggtgtctaggcagaagcctgctgcaggggtggagccctcattgaggatctctattagggtggggccaaggggaaatgtggggttggagccccccagagtccccagtggggcactgcctagtggagctgtgagaaggggcctaccatcctccagaccacagaatggtagatccactggcagtttgcatcctatacctggagaagccacaggcattcaactaaaacctgtgagagcattcctgggggctaaaccctgcaaagccacagggcagagttgcccaaagccttgggagcccaccctttgcagcagtgtgccttgaatgtggaacatagagtcaaaggagattattttggagctttaagatttaatgactgccctgctgggtttt

SEQ ID NO: 37114 - DNA, 1072 bp, Homo sapiens
gagatctttccttatcccagtgggaatttattgcttccttctctgcttttttacgtctttatttattattttctaaattgcagttaccattgtcttactttagttctttgtccagtttcttcccccttcactagatctttagcttcttgagggcaggaggcctgttttacccatttttaacatccgcttcccccagcatccatcagataatcactgaggcattaattgactggaagaagggagtgagagacatgggaaaaagaatagtacagtattaaggagattagaaggaaaagagtactttaagattactgtcctaagggacaatgaaattgatggtgccataaaatggagaagtcattttgggaaggatgataatgagttcagctttgcaccttgaatttcacgtgattatataaatgtgtaaaaggtggcagcaaatactggaatggaggttttagttgccctgaatttctagtctgattgttctgtgtgtaagatgttgagaaaagggatataaatggaaaaagagctgaagatttgaatgtatgaaaatagataagatgatgagggtgtatatcatagggtaggaatcaataagaagaaaggagtcaatagaagagaagagagaaaattgtgatctcttaagctaaaacagtttggatatttgtccccacccaaatctcatgttgaattgtaatccccaatgctggaggtggggcttggtgggaggtgtttgggccatgggaatggatccctgatggcttggtgttgtttttgcaatagtgagttctggcaagatctggttgtttaaaagtgtgcacctaccctcttactctttctcactcctactttgccatgtgagatgcctactcctgcttcaccttccatcttgagcagaaacaccctgaggcctcccgagaagcagatgctggcaccatgcttcctgtacagcctacagaaccaatagccaattaaacctcttttaaattacccaggctcagatgcttctttatagcagtgcaagaacagcctattacagaaaattggtaagtgggcgtggagcattgct

SEQ ID NO: 37115 - DNA, 1080 bp, Homo sapiens
gtctgtaaaagatgtaattagtgagtgatttaatttatatacaggcatatgtgttttagatgaaggtgaagggagcccttaataaacttgagtttaacttgtgcattaaaaacctgctcagatgtggtgctggaaatatatagttgtattttaaattgagttcgtcgagctcctatatatagtggtttctctgcttggtgtcaaaaatgttgagttgtggaagagcttaggtacacatctgatttgataattttggcttactccagttttactgaggcacacaggtaactgtttactatttaaaatgccatattaactgagaatttagtaagcacctatgtccataggtatttccaggttaatatagatagtgcagaaaatgctgttttcggcttgccctgacaaaatgtacttcagtttggaataaagtatacacagccatttaaaactgattgcaaaaataaagagtgagggattgtttgagatctgtatttctaaatcataaggaagtttggaattaatctgaatcagtcattttatagtgatactattgttttaaaaagttgctgttgtgacagacatttcattgttcaaagaaggcttgaagaaaattcatgaggaattaaagtttagtaataatttgagaactgtgaggcagtttgggttgcagctgaagggcagctgtttgtggattagattacagtatgtaaaaagataaagtttgggcaaccaaaaatttttttgtttaatgccaaggcagtgtttgcttttattcttattttttaaatttaatctttgagagattcattgtgtagttacctaataaagctcattataaaatagaggacatggtcattgtaatccctaaaggatccatcaatgtgtagtgaaaagagagttgactataaagtcaaatcattctggattgtaacctcagctgtgagatttaatagttgggtgatttggggcaagttatttgaccttgctttacccctgatttcttcatttctaaaataagagataacttcaaagggttaagaatgtgaaaagtaaatgagctagttcttaattaaagtactt

SEQ ID NO: 37116 - DNA, 1091 bp, Homo sapiens
aagacagtcctggtggtgacaaaatctctcagatttgcttgtctgtaaaggattttatttctccttcacttatgaagcttagtttagctggatatgagattctgggttgaaaattcttttctttaagaatgttgaatattggcccctactctcttctggcttgtagagttcctgcagagagatccactgttagtctgatgggcttccctttgtggataacccgagctttctctctggctgcccttaacattttttccttcatttcaaccttggtgaatctgacgattacgtgtcttggggttgctcttcttaaggaatatctttgtggtgttctctgcatttcctgaatttgaatgttggcctgtcttgctaggttgtggaagttctcctggataatatcctgaagagagttttccaacttggttccattctccccatcactttcaggtacaccaatcaaacataggtttggtcttttcacatagtcctatatttcttggaggctttgtttgttctttttcattctttttttctttaaccttgtcttcgtgctttatttcattaagttgatcttcaatctctgatatccttttttccacttgatcgatttggctactgcacttgtgtatgcttcacgaagttcttgagctgcgtttttcagctccatcaggtcatttatgttcttctctagactggttattctagctagcaattcttgcaaccttttttcaaggttctcagcttccttgcattgggttagaacatgcttctttagctgggaggagtttgttgttacccaccttctgaagcctacttctgtcaattcgtcaaactcattctctgtccagttttgttcccttgctggtgaggagttgtgatcctttggaaaagaagaggcattctggtttttggtatttttagcctttttgcactggtttttccttattttcatggatttatctacctttagtctttgatgttggtgaccttcagatagggcttctgtgtggacgtcctttttgctaatgttgatgctattcctttgtgtttattttccttctaacagtcaggcccctctgctgcaggtctgc

SEQ ID NO: 37117 - DNA, 1047 bp, Homo sapiens
taattccttaggaaagtaaaactacacacactttcagagaaacaataagctgcttagatttttaaaattttttatattatacacttcaattatgggttatttattaaagacttcaaaaaatttatgttatgtttttaaaagtaccaattagtgagggaaaaagttgaaaatattcaccagcatgttaggttctcctgaaatcacagttttctggataaataaatgtaatatcactaaacaattttcactatgtattttatacatagcctggaaagaacagtattttggactgtaattttcacatcttaaatagtatttttttctttatccctttgataatactaaattctttctcttaaaaatttatatctattttatagatatcaatcttactatgaattttcaactttgactcgaacttgtttatgaaaaatatctaacatctgcaacttcagctggttatactggaaggagaggggttgcgataattttattataccttgtattaacaataaaccttctcacagagaagaaaatactttaaataccttaaatcgtatgtacaacaataaaaattcacatttcatgctttagtgagacacttaaatcatccataaggcagtcctcatagtttattggaatagagcctttctaatatctgggcctctgctgtgtgccaaatacgacaaagctctggatgttatgacagcagccaaacttctaccatcctcctatctagtagaaaaacggagggtaggtcttcgcagccatcaagttgtgaccacaatcctctgtcatagtggggtagcatccgacgtgctgcaggcctcaggacccacgtgagtcaacttgattgtttgaaaagtgctcaaaagccaggatgttctctaatgtgagttgtaggatgatgatagcccttctgagcacagctaaatgtgacatgtatgtgtctattgcacaggattttataagggtccagaaacagtactgtatttctttccttgcctattatatacatttttctgataagttcagtgtttcactggg

SEQ ID NO: 37118 - DNA, 1054 bp, Homo sapiens
cccaagaacagtatattttttgaagcatacttggtattttcatactttacatattttgcaaacatgtttggagtataagggtatattattgtggtttcactgctatttcttcatttttaaaaatttaggacattaagtactggtatactgatgagtataactataacttaggtctcttgtatttccccaatatatttactacttctttcttcattctcagtataattataatttaggtttcaatctatgtttatgatgatgatgatgattattattaaattttagagacagggtcttggtttgttgcccaggctggtgtccagtggcaccatcttagctcactgtaacctcaaattcatggctcaggagatctgcctgcctcagtctcccgagtagctaggactacaagcacatgcccccatgcctggctaatttttcatggtttttttttttttttttttttttttttgtagagacagggtctctcactgtgttgcccagacaggtcttgaactctgcaagtgagaccatgtggtatttggttttctgtttctgagttagttcacttaggacaatggtctctagttccatttgtgctactgcagaggacatgatttcattcttttttatggctgcacaaaaggagtttgtgcaagcaatcctgtctcagcctcccaaagctttaggattacaggtgtgagccgctgtacctgactgtatattcattatttgatatgagtatacttattacacataatttagttcaccttgtatattatgtttattttgccttttttccacctctctttgtttttcatggagtcaataattgccttttttaaattcattagtttcctatgtatatttttactaatttttctaatagaactataacactccctttgattttgccaaacatcaaataatctattacttttccttctttttcttttttctttgtttttttgttttttttttgagatggaatttcgctcgctgcccaggctagagtgcaatggcatgatctcagctcaccgcaacctccgcctccggg

SEQ ID NO: 37119 - DNA, 1302 bp, Homo sapiens
taactgaacagtatagcccttttagttgtttgaaaattacataatgattcaaaagcttgtttcactgcctttcccagcactaagaaaattaacaatcatttcttttaatttccttgaatcagagccattctaaagtgactctggaccagcaattctgagctatgatttcatgatacatgtattaatatctaaatgagttgtgagttgacataagaaccatagttccataataattatcttcaaatcaatggatatcttaaatgtgtttttttcttccttagagattattattaaactgatgtatttgataataaagaattttaggactgagaaagttaagtttttcttaccaataataagatattgaaatatataaattataaaacagaaataaaatgaaataaaggaggttatccctaaagtcatttaccttagtcacttgcaattaaatatggttacttcggaagaagaagtgtggccctaaagctactgtaacatgaatcatgccctaatgtgcactatatatgaactactttggtcagaaggcagcggcgggtaaggatggcttcctctcacagtgcttcttaggctatccatttaccaaggaattctaatctctttctctcacttcaccaggaaaggagggagtttaagatatagaactgggcatgctagcctcttttttcccttttgtggatttgtcataactgcagagaaccgatgttgtggtctcttgccagctacattgtgaaccttgcagtgaaagttctttgcctctgcaaagggagatttgtgcttgtgcagaactgcccatgccttagtaagcaggtctgtctaattctaagttcaatatctggtggctattgttggcataaacttaaagtacatcctctaacctagcctttttcagcagtaaacttaaaatattgaatctccatctgtctgtgtctcaagtggttcagaggtcaggagaggagagggacattattttatgactccctcaaactttaacaaagactagtgcagattatatttcgaagtaagcatgagatatattaaaaaccacatgtgggaattctttcctaattttagaggttttttttaaataatggaaattctattgaaattgagtagtgttaattacaaggcaacaggtaaacatttgttcaggatatttaaaaggtctgctgagttggaattgtgacagaccacattgttgactctagattgaattggaagggaagaatgtgaaatgaattaggatatcctctgttcacctctattaactttcttaaatgagta

SEQ ID NO: 37120 - DNA, 1114 bp, Homo sapiens
aaaatacaaaaattagccaggcatggtggtgtgtgcctgtagttccagctactcaggaggcaggagaatatcttgaacctggcaggtggaggttgcagtgagctgagatcgcaccactgcactccagcatgagtgacagagtgagactccatctcaaaaaaaaaaaaaaaaatccacttgtaaatttttagtttagttaattactgtagacattgtttgagtcaagctgcattatcttttttataattgaatagtacaaattcttgaattatagtctttataaatgttgtatgttgacacttaagaattgagtttttttcttgaaaaataaagtttgtttatgagctttattattgttctgtttttttttgtttgtttgttttttgtttttttgagatggagtctcgctctgttccccaggctggagtgcactggtgtgatctcggctcacttcaacctccacctcccgggttcaagccattctcgttcctcagcctcccaagtagctgggactataggcgtgtgccaccatgtctggctaatttttgtaattttagtagagacagggtttcaccgtgttggccaggctggtcttgaactcctgacctcatgatcctcctgcctcagcctcccaatgttccgggattacaggcgtgagccactgtgccttgcctcacaattttactttttgagtctatgaatttgcctgttttagagatatcgtataagtggaattatgcagaatttgctttctgtgactggcttctttcacttagcataatgtcctcaaagtcccatccatgttgtgtattgtagaatttgcttcttttttgaagctgaaaaatatttcattttgtgtgtataccatttgctttgttcattcttcctttgatggacatttaggttgtttctacatattggctatcgtgaatagtgctgccatgaacctgggagtgctaatatctctttgagatcttgattcttttggataaatatccagaaatgagatagctttattacatggtagttctaattttaattttttgaagaaactccataatggctacaccattttgcatttttactaacaatatacaagggttccagtttctcc

SEQ ID NO: 37121 - DNA, 1007 bp, Homo sapiens
ttccttttgctctccagatcaacaatcatctgtgtttgtggagctgttgccagcttaacatagaccttgtatttattcttctttcttcatggcttacttctgtttttccctcactcttgattgcgtgggatcctatccactcaataaagatttagccagtaagctttggcctcaggctctgttttccaggtaacccaaattatcctggatttctttctttttttcactcataccaagtccaagttgagccaactgtacattttcagtgtgttgtaaatcttttttcctctttctgttttcacttctatccttatctagggttatctcatacctaaattactttggttgtctcatatctagccttcctgtgtacatttttgtacccttactgtctattcttctgggtctgactgatcttttaaaaatgtaaatcaataattcatgtctcactgttgtataaaaactctgtggattcttcatcacacatacaattaaatccacatgcataactatggcttattgtattctctgtgatcatggcttcggcccacctccctgacctctgacttcctttcctctggttttatttcctttccacaaaacatggtttggtcctgccccaggttcttccctttgcctggaatggaccttctccagattttcagttgtctgaccacgttttgtcactcaggtctcagcttgaatgcgttcctaggaagacctttcttgaccgcccattccgaatagccacttggtcactccctatcacattcctccatttgtcttttatcacggcacttatattttaactgtttgttatctttctttccctgtccccttctaacatgcatacactttagaaagtaagatctggaagaatagtagggaccttttatatcttgttgggtgctgcatccttagtacttattactagaattctacctgtcccagggtaggtgcccagtaaatatttataaagtgaataagctgttaactatatagctcat

SEQ ID NO: 37122 - DNA, 1064 bp, Homo sapiens
aaatatttactggagtcacagggggttatttcttagtagaatgactacactatccctagagggaaggctacttcagaccttccctagaaaacctttaaaaatagtttttgaagggttcaaactgatactttcaaactttactgcctgccagaatagagcctaacatttttagtcaacagtgtaacatttaaaatattcagcatctaatcaaaaattactggacatgccaaagagttggaaactgtgacccataaataggagacaaatcagtcaatagaaacattcagaaataacatagatgatggaagtagtggacagagagattaaaatggtaatacaactatattcagataattaaagggaaacaaacataatgaggagtgaaatggaagatatattaaaaaaaggaacatctagaaatgaaaaatacgatatctgaaataaaaaatatactgaacagttatgctagtctgggtccttctagaagcatatgctaagaccggcttaaacatgcaaagatttcattaggggaatcactgtatgagaggacatggggtgggaactgagtaaatctgggagagctatgcttgtctaacccccagtgaaggggagagggagggaaggttggatggaaatgtcttaggctgtcatattatctaaagaaagttggacaataccttggatagtcgtcaagtcagagttgtccctcattggagtcccatgcccctcgggaatgagctggtcttcttatttctgctacttccagttaatgtggagaaaagccatgagatatttatccttgctgcatatgtggccatggatttcggagtgtagaagctgaggtcagctggaggtctatgcaagataatggaatgacatcatttagttttgaaggaaagtaaaactgccaacttagaattctttgtattataaaaatatctttcagaaatgaaggcaaaataactttattggacaaacaaaagctgagataacccattaccagtaggcctggacttcaagaaatattaaaagaaattctttacatagaaggaaaatcatactag

SEQ ID NO: 37123 - DNA, 1045 bp, Homo sapiens
gtagagaagtagtgggtgaagtataaaaacttagtgggagctacccttaaacacagtagaggagatcagggttaggttacttgagagatttagcaaagacccctaggtagggggcacagcttcaagtaccatttactcactctgcaacctctattccttcttattggctactatgaactaatgacactatgaatgtgaccataagataaatcttccctctgcatgtcttgttagggaggtacatgttttcttatttaagactttcatagacatatatacagaaaagtgcacaaatgagtatttggcttaatgagttttcagtatttcaggtacacaggaaacatgaccatgtaaacctctaggcagattaagaaacattgccaccatcttagtgtctttcataattaatatcggaagtgataaacggtcacttctgccctcttctgtaggtaacacagaccaaccgtggtacaatataggaaggcagtgcataaggatgtgaatgccaggagtgaatgccatcttggaggctggctaccgcagtcatgcattgatcgttttcaaatactactggttcacttatgcagcctgcacaaatattgatgtatttaagcaaacaatgtaaataaaagtcacaactgataatcacttatatcagaaaattctggagatactgggaagctgccaagatcattatggtgaataccatttttccaaaatcatattttttttttgcctaaaatcttgaattttatcattggcaacaaactcaatttttttttctttcctccctccctccctatttctcttttttcctttcctttccccttcccctttccctttccttgtttttcttgaagttacagattccctttgttcattttcaagaaaggtttgtcaaatacccaagtccgaataaccggtttgtcactcatcttagtaaaatttgtgttccaggaaaaaaaagtatttacttcagtttataatgccatctcacagtagctcttctttgatacgtcatacttcaatatgcagcagaagtact

SEQ ID NO: 37124 - DNA, 1917 bp, Homo sapiens
gggaggccaaggtgggcagttcacgtgaggtggggagttcgagaccagcctgaccaacatggagaaaccccgtctctactaaaaatacaaaaatattagccgggcgtggtggtgcatgcctgtaatcccagctactagggaggctgaggcaggagaattgcttgaacctgggagacggaggttgcggtgagctgcagaggcctcacctctaattgagacacaattatatattgttgatatatatatatatatatatacacacacacacacacactatgatggataaatgcatgagtttctgtgagagcattggaaaggagtttgtcactcaataggtgaagccaggctaagatttaagctgagccagggaggacttgaaggaatcatgatgagagagaaggtaagtggctttgccagcaatgaaacagctgacataatggtaaccagtcagaggagggcataactatgaaactggacaccttggttgtcaggttagaaggatggggtgtagggttggtaagaaaagaattcagggaagagcagcgatcagattatgaagaatttgtcttgagaaattacagaggatttaaaccagaatgttaggaatagttattctagcaagatgaatgtggaaagtgttagtgtgcatgtgatgagtcttgaagctggaaactaggtaacaggttcttaaatagttcatgtgaaaatcatgacagactaaggcagtggctgtggggctgtccgggagttctctacagaaaacatctaaaacttgaatgtgcaagtgagtagctaacttccaagcttcccatttctgtataatttaagcatgaaaatgagaacactgagatttgataggcatgtagaagtcagagtaagcaagagggcttgagttcatcgatgaacttcagtaactatccttgacttagtattggtggaaaccatttgtgaatttacagactccaaaaacaaaaagataatttagagtctcaaagtaagatttggggagatgtccattggagacagaagtggagagagggagaagttcatttgttgacatatttatgtatggtgcacctactgtgtgccaagccatgttagagatacagtgggagcaaaaccagatgtgttttctgccctctgactccagtggttgcagaattagcccaggaactagaattggatggagtcacacaaaccaaggaaggggattgtttgaggggggcactcagtcacatgtggctgaggccaaagagaatgaagatatattttaaaattctggatttggcaaaatttaggctagtctttacttttcataaacctctctcatgttagagcagcaaagaaaaaccagtttgccaagaggtcacgagattgggcagtgaggaatggggagtttagtttaaaagacaacactagatacttttggaagtttacctattctgtggttcccttttattgactaaatggtgcccttcattcatgaagcaagtatctatttagtgactactatgtgtcaaaagctatctaggcccagaaacttttaagtggaaaacaaaacaaagaccctgccctgacagatttcaatcatgtatatactgtatgtatgtttgtggaaggtgacataatagacaattgcagatagtgataagtgtgtaagacaaggataccacgagcgtaatagacagtggggatggaggaacctttagaaggttggttaagttgaatgataaggagccattcttttgtctttacctgaatgacttatcattcagccctttttgagttttgggttgcttgcagagtttaaccttgcctgtaattgaaacttaattttgtaatagcataacttcatgtaagaaaagcaaagcaatacattacagaattattttactgaagaacttgtttcagagaaag

SEQ ID NO: 37125 - DNA, 2115 bp, Homo sapiens
ccatctaagatctcagctaagattcagaatgatgcagacttaactataaagctggtgctccttccgttactatgttctatttcagcaattctcagctattgatactttgggctggataattctttgtggtgggattgtccagtgcaaaattgaatattttgcagaatccctagcctctacccactcagtctccggagtgtccagttttaaagatagcaagacagttcagggctttgtagacacccataggtgtgttcatgtgctgaagcaactttctttgcatttagggtcataacgtttttgtgggcttaatgttgagtggtctgttagtacaatataggagttaagagcttgaactgaagccaggcttttaaaagtaggatagttgacctttcttagagtagatacttcttagagtagatacagatgttaaataagttaaaatgcaaagctcttggtttagaaaatgtctgccattaaacatgctaattgttttttccttgcttagtgaaagtagttgggatctattctcagtatagggaaccattttcacaaataatctgtgatctcttgccaaatatgaacaaacatactggcccaatgactagtatagccaaataagtttttgagcctttattgcagttgcagttaactatatccgaaaatgggtatctttaagcaaagtgaagaatttcagcttatcagtgatgttgtaaaaataaatgtctgaacatatgaatgcagtattgatttcagcatttaactgagataagcgcattgaaatctgtttaacaaaaattaaaatgtatgcatcgatgttgctgaagtaacttgttcttgtttttgacatcctgcaggcatggattccgtgaaggaacaacacctaaacccaagagggcagctgttgcagcatccagttcatcttaagaatgtcaacgattagtcatgcaataaatgttctggttttaaaaaatacatatctggttttggtaaggtatttttaatcaattaggcttgtagtatcagtgaaatactgtaggtttagggactgggctagcttcatatcagatttacttgttaagtgactgttttggaatgtttacttttggactgggtttgtaacacggttaaaggcaatgagaaacaagcagaattccaggagtccttgaagcagagggcactggaagacaatatagcagattaaaatagcacagctcatgtggcataggtgggtattttagatgtttgagtaaatttgaaagagtatgatgtttaaattacctttagcaacatgttcatctgctatgctgtcatgactagggggatgattattagtcacatagagcttgggagtaccactggaaacgtatgggtaggagtttaggtggcttctgtttttcaaaagatgatcttatcctagtatctgtaatgctcacttggcacacctgacttgtgggctgtgtgtaaggtggctagctaagtgaaaaaagcctgctaggtgtgagtcaacttaagaatatgtaaataggtttgagaaaaagtagggcttgggtgcaagtaaagattgagcaggaaataaaggaaaatcaagtataatccctgagatttgtagactaaaggcaatgatgtgggactacttggtcgaatttttttagccctcaacttggtaattgggtgtttctgtgttaaagcactgaaacttgctgtcgtgccttcctagttttcgtggtttattgacagggttgggggttttttttgtttttttaaaatgaagggacaaagtcaactggactgctgagtgagagggcaggggcagttgaagggaacatgaattgctggaacagctacataaaatagtgatgtagccaagtcatgctatttaaattataattctccactgtgtttagaataacatctgaggttcttaacctggccttggaagggtatcacttttacttgtaacctggaatggctttataatgtgctagctaattgctactctcatcttgtattttaactcctaatttacccttcaggtctcagcttcagaacattcacttataaagaaaccctgctgattaaatctctcttgggcttcctcccgaaatgtgagac

SEQ ID NO: 37126 - DNA, 1654 bp, Homo sapiens
cgcgatcggccctgcctggtaccgcatcctcctcttgaccccacctacactacgacgacggacgctcgagaacgctgcaccgcgccccgcaggaagtgcttccctgggcggaagcttctgagcgtgatatagcggaagtgccttctcttccggtctttctggtctcggccgcagaagcgagatggtgagttgtgactgtggtgtttgtgaatcgcgttccatcctcgtcctttgtgcctctctgtttgctgtgcttggggggctggcaagattccggataaggggaactggtgggctggaaagaggcatgcggtggccctcaagagccagaagaatgactgctaactggtgcctgggggacctatcccgccgtaattgtggtgctagagccgcattgtgtcctttgcctcggtccaacctttggagacctttcacggctctagccttggttgggagccgagggaaggagtttgggaatgtttggctctgtgtaacaatgaaataattcattggtgatgctctctggccggagtctgtaaagataaggtgcatttcagaacattgcaactcttgcggagggttttaggtaacgtgaaatgcgggtagtggtctctgacttggcattcgtggaaagaggcttctcccgcagtttcgatctttacgattgcctttaaattttatcagtaattggtttcccggagaactcgagtaaatctagaagttgccaggtttcagaactatttattcctttaatgtgcagacgaagggaacgtcatcgtttggaaagcgtcgcaataagacgcacacgttgtgccgccgctgtggctctaaggcctaccaccttcagaagtcgacctgtggcaaatgtggctaccctgccaagcgcaagagaaagtgtaagtaacatttttcaggccaactgtgttagcttttgtttgtattgcacttaagtgggggcataggtttgaactttatttggtgcctatcttaaaactcgtacatctgtatgccgatgaggtggcataaaactcgtgtgttaacaacacctacaaggtgtgtgggagaacaccgtttgaaatcttttctgaacttatgttttagataactggagtgccaaggctaaaagacgaaataccaccggaactggtcgaatgaggcacctaaaaattgtataccgcagattcaggtacagtttgtatgttcgatcataattggtccagtgggcttgaatgaaaccctcgtgtttacttgtaaaaagataacagtaccctgatggttactggggatgagatgttggaagctttttatttattgttgtttttgaggcagggtttcactatgttgcccaggcttgagtgtagtggcacgatcacggctcagtgcagcctcagtctccccagcctcaggtaatctcatctcagccgcccgagtacccgggactacaggtgtgcgctgccacatgcccagctaatttttgtatttattgtagagaatgggatattgtcatgttacccaggataatctcggaactcctgggctcaggccagatgttgaaagcttttatcttctgccgctgtaaccttgacatcagttagtttggattttattagtagttttttcactaaacagtagtataaattaaataacaggagca

SEQ ID NO: 37127 - DNA, 1083 bp, Homo sapiens
gctaaagccataggagaagcagttttagctcttaaggtttgagcttcccttcagtaaacaatctgccttgaaataagtgagcctcctgccactgcaagtatctaagcagaacctcattgactatctgagaagaatgttttgaagaattcttgggtggaaggttatattaagtgacctcgtaggtcacttccacttgagttatatttctaagtgtgaaagcatgtgttctaaatcagatacaacaggtggggtctatctgctgaggtcaagccataccaattggcactaccaacacctgatgttacagaccagaatgatggaatgtttcaggtaagattggctttctggtgcttgccctaaatataagcatcttcatttgatttgcatagcaaagggagattcccatgctctctttttgagactatatgttttacaggacttaaggagaatattttaaacagttacttgcatgtctttcaggaccagggtagctatcctcttataattactcctagacacttcagagcaccttcttctgtttcctgtaattctttacccaatatcatttataaacttttttcctgtcattcatgtgctttcaccttccaaatattccctttctctctccctctttcttcattcctttctttgttcaaatcattattaatcactaattgacctttgaccaaaagtgttagacttaacaaaagggaggtagtttttaaaaaactggttgcagtagtaacaaatgccatccatggtcaatgctcatttattttctggcatcaacactgttccacaactaattgctgattagggagttggcatttatcctcaccaaaatatcatagttacagttgacattttttcactgctgatttttcttttgtcctgggtcttgtgtttccttttttttttttttttgagacagagtctggctctgtcgtccaggctggagtgcagtggcgtgatctcggctcactgcaagctccgcctctcgggttcacgccattctcctgcctcagcctcccaagtagctgggactacaggtgcctgccaccatgcccagctaatttttttttt

SEQ ID NO: 37128 - DNA, 1029 bp, Homo sapiens
tcttcactgttggattactttttagtggcttctctagggtctaccatatacatattttaatcacaatctacttcaagtaatatatcactttatatataatgtaagaattatacaatagtaaacttctgttttctgccttattgtgtgttctttagtgatagttaattctgcatgtgacataaaccttatacttcgctattatttttgctctaaacactcgactatctttttaagtaatctttgaaaatgaggaaaaatcttttatatttttccaacatattttctgtttgttgcactttttctgtgcagagatctagattgccatttgatgtttttttccttctgcttgaaggacatcctttgatgtttgttgtagcacaaattctatagatgtctctcaggttgatctttttcaatatttgcttttaagctgtgttaagattagttgagagtagcctttagttgcagtttaatttatagccccactactgagaaagttttcttcggaggactctgcctgatgctccatatattacaaaatctttcctcactgtttggtaggattgtgaattgttcctagacctgtgttagttttgggcttttttttttttttttttttttttgcctaatgcttgcttaatggttctttttcaggctttgactaatttcttctcatatatgcacatattcatactctgctaaagacttgagaccttcttcctctgcaaatctgagctctcactctgtataatgacctcctttctggtattttcagatctcaaattgtagttgcctcaggctctctgaagccaacaaaattgctgagtttgacttcctgtactgcagcttgcaaattctctccaggcagtaagctgggggaaattgtagacctatcttgttggcttcccttctttcagaaatggtagtcccgtactgtgtgtggtctaatgtccgaaagccactttttcatgtcagtttgatttttctaactgtttaatatcattaataacatgtttgaatttatgtcat

SEQ ID NO: 37129 - DNA, 1026 bp, Homo sapiens
actgtcctaatttatgatctgtagtttttctggctgtcttagaggggagataagaataatcatgtctttggtggttttatccctgctgtagtcttatcttaatgtttgattgttcagaattgtctgtcttgaaggtgctttgcacttttctagagtgtagaatgtcattctaattagcttcaggctgtgggtagctggtgagtatgagattgtggcaaggagtgtaggtaccaggagcattgaaggtattctaaggccagtgtgttagtcccttttgcattgctgtaaaagaatacctgagactgggtaatttataaagaagtttgtttggctcacacttctgtgggctatacgtgaagcatggcaccagcatctgcttctggtcaggacctcaggaagcttttactcagagcagaaggaaaaggggaagcaggcatgtcacaaggcgagagagagagaaggtgccaggctcctttagacaaccagctcgtgtgtaaacgaacagagggagaactcctgcatttccaagggatggcactaagccaattcataagggatctgcatccatgatccaacacttcccactaggccgcatctccaacattggaaagtacatttcaacctgagatttggaggggacacatatctaaatcatcagccagtgagagtagacaatggccaccctaccagaattactgtcatgatttagaagtgtctagggatcagcaacagaatagacatacagtagggtgctagagatacccactaccttgtagatatcaaacaggaagacattttataatacaaaaccagtgtcaggggcccaggaagaaaggatgagacttttgcaaacacgagccagagtttgtgtcaaagagacttaatagaggaaatagtttcctggctggtttctgggtatttctatgattcctgtggtgcatttgtggtaaaaatagtctggactttgcaggtggaaacaggcaattggcagcagcaacacctggtaaacacattctgacagccctg

SEQ ID NO: 37130 - DNA, 1032 bp, Homo sapiens
ggaaagaagctctgggactaatcctgaggaggcttatcttttttcttttcattttttttttgaacagaatatgagattaagatttgtttctcactacttttgcaaccttagacaaatgactttagaatctcgtcttccttacagcctctgttgtttgcttatttcatgggtttattttgagcatcagtgggatagagcattccagtgtgttttctaaagcttaaaaatgctacatgctcaccttaatccctcccgctgctttgattaataaaccttagatgactgttctcattgacccagtgatgatgactattgaactacattgtaaatggcagctggcaaggcacatcctctgtaacctttccctgtcttccaaagttctttatctgagaaaataaaaattccataatgcctccgattcctaaaatcttagtgcatgatcaaaaaactaaattttgttttaaaaatattgttagcttaaatccttcagaaaactaaccaatatttgaagtccataaaatcaacttaaacatgctgataccttacatcaagcaaaaactgtgatgactcttgaggggaatattatggacaccttcacgagagcaaggttcttataaatctgtcacttcatagcttgagttgtacaccctcaaattgatgacctctctctgcctttgtatttgaaatatggagcattagttaatgacccattttatctctttttatactttggctcaaaagattcacatattttggtttgggatgaagattaaagttatttcctgcttaaaacttgcttgtgctgaataaccactgtgacttttttattctttaagaaagaaaagtttacttagctcatgattttagtgggtacaaagtccaagactgggtagctgtgtctggtgagggcctcatgctgcttccactcatggcctaaattggaggaggagtgggtgtgcacaaagagatcatgtgatgagagaggaggcaagagccatatgacttcttttgaatgaaagtcacatctgttgt

SEQ ID NO: 37131 - DNA, 1033 bp, Homo sapiens
ggagtagcaaggactcttgagtcttccaaagggaactaatttggctgtttctcaggaggaatcctgttattgtgttaagctctcaactccctatgagcccctctgctagtcttctgtgtgcataacctaccatctaagtttctctggaaatggcctatttctgtttttttttgaaggagcctgtaatagaaaacctatggggagggatgagagtgcttcactcaggagactgttgatgctttgtctcctgcaagcagcctggcatgcacgtgctgtcagaaaaggtcgtctgactcagccactgaagctgctgaggctgcctgtgactgaaataacctcactgctgtggatttctttgtgctgtcaggcttgtgccatggctagtttacgagacagcaaaggtttacccaaggccctttcaactattttagttaacttcagctttcagtcaaaacaagtacatttatcatgacataaatataattacttttattgtatttatattgtggtatgtttgcctgtaaaagaattgcttagatgatacgatatttggtgcacacaaatatttattgtagcctgtgtggtttatgaatcacaatataaattgaatatcggtgaacccatctaatataagaattagaggttaatggacatatagaaaattattttcaaaagtgatattctaagacttatttataagagccaggcttcagggagctgtatcttctgtgttctatactggtgcctggcatgtgccattgttttaaaatttttaaatttttgtggatacatagtaggtgtatatatttatgattattgggctgttcagattcttaatttctttctggttcaatcttgataggttatatatgtctaggaatttattcatttcttctagattttccaatttattggcatatagttgctcctagtagccactaacgactctttgaatttcttatgagttttaatgtcccctttttcatctctgattttatttgggtcttcatccctacccccacccccaccgttg

SEQ ID NO: 37132 - DNA, 1050 bp, Homo sapiens
cacacattagggtctctttcaatacagtaatgtgcgcaaccactcctaattcactacactctccagtatggtagccactagccacatgtgacttataaaattaaaattatggcacagtggctcaggcctaatttatcgcagcactttggaaggctgaggcaggtggatcgcttgagcctagatgttcaagggcaacatggtgaaaccctgtgtctacaaaaaattagccagacgtggtggcatgtgcctaagtcccagctacccaggagctgaggtctgaggatcgcctgagtccaggaggtcaaggctgcagtgagctgtgactgtgtcactgtggctccagcctgggccacacagtgagaccctgtctcaaaaaaaaaaaaaaaaattgactgagaaattgaatttacctttatactagtcccatatcaagcaaagctacatgtggctagtgattactgtattgattagcacaagtaaacattatcattgcaggaagttttattggacaaagctggattagaaggatcaagaataatctgttatactagtacaggaacataagcaaaacagctctttggactataggattattgtaagcctacccctgacacctgttcatagtagaaacatatagtatacatagtagaaacatgaccatagattgaattgtaagaactgtgctctcaaaagtggaaaataatttggaattggggttagtgcctagattgggcattttctgatgtgaaactctgttttggctttgtgatttgtattttgagtccagtgagtaccctggacctccagccccctgttctgtgctataccctatgcactccgttacctgcgctggcctccaggttgctatgacttttcaagccctatcttgctttcttttatgggagtcatagtgggatggatgattataagctggtctctgaagtgcaacatttaagaggaatcttcagggatcattaagttaactgcatattcttctgcatgcaaaatgccaataatgttagctactattcaggcatttatgatgtatta

SEQ ID NO: 37133 - DNA, 1031 bp, Homo sapiens
ttctacccatggtggatgggaaatcttatcagattcagcatttgaaggctaggggtgcaaaacacgttgagtaggaggttgacagttacctgttacctagacactttgaagtgttcattgtgtcaggagtgccgggggtaggaaagaggtttggaaatgaaattctgagaattgggaaggaatcagctgagctggagtggtcacttgtcggtgtgaggagtatgagagtggagagtggaatgaagttgggagaacaggtggcatcaggagaaatgtcagtggtttgtcacatacttaacacctttccagatcaagtaagtaggcgtcactagtgcttgttaatttcccccaaccaactttctttatattccatcaccaaagccagaattctggagtgggtctgcagcttcatcaggatgggcaacaagtcttatgaattatttcccccaaagaccctcttgatttctcccttctccattcccattcccactgctcagactctcactgttggttgtttggactacttcgagcctcttcattgatatcccggcctttcatctttcaagctttccagctaatcatactgttatatttccgcttaaaactttttacagggacttcctgtctttcaggatgaaatcccacaaggctgatcacaactggtcctgccttctcccctcccacatgctgttgccctcagtccatactccaggaacactgaacatgtagtttcctgagtgcatctttgcaaagctgtctatctgtctgtttttctctacacctccaccccacacactgttctcgagatgttttcttttttcctatgtctgtgtaagtgccacctcctgtaagattttttctgctatctttctcctccccaaaagttgggttctccattttcagaattatcacaatttgtgcctaattcccttagcatgtctctccctctgttgtaattataggttacgtgtttattttctcagtttcaaagctgcccaggaccaggtcttattcatgattgtagctccaga

SEQ ID NO: 37134 - DNA, 1045 bp, Homo sapiens
tagccaggatggtctcgatctcctgacatcgtgatctgccagcctcggcctcccaaagtgctgggattacaggcgtgagccaccacacccggcctatccctttcttcttggaggatagaaagaacagtcagaacttggtgtgtctcaaacaaaagttaggttgtgtttgcagaatgttacataagtcacagacttatttttataagccacagtctgaacataactttctggagacagaattcatgggctaggtatttttaggaagtggaattatgtctgcaggatttatagaaattcatagttaggactgtgaagttaactatgaagaagagtgacaggttttctcttttacaggacaaccccagcaatgtggagaagcctggggcttgccctggctctctgtctcctcccatcgggaggaacagagagccaggaccaaagctccttatgtaagcaacccccagcctggagcataagagatcaagatccaatgctaaactccaatggttcagtgactgtggttgctcttcttcaagccagctgatacctgtgcatactgcaggcatctaagtaagacagtctttctgtggcttaaaataccttaaggggaaggctattaaatacacacacgcatatagacataaaataaaagtgtaaataatgtattaagtcacacttttagaaaaactatgtgtttgcatagaacatattagaagagagaaactaggatgatacacaccaaaatgtttacagtgggtttcctagggttatggaaattttttcttctttttgtgcacctatattttataacttcctactaaatatgtattacttgtgtaatgaaaatgctctaaaatgtacttctgcaaatagaacagttacttcaatacaagaggcagagaagactgttttgtcagagtagaaagaacactaggcttgctatcaaagtcttgggttatttaacaaataaatataaaaaatatttgttgagttattcaccagatattcactgggtggaattctccttacagtcatccagtggtat

SEQ ID NO: 37135 - DNA, 1047 bp, Homo sapiens
acagtggatgaccctgaaaatattgcaaacctggattttcctagtgtggggctggcagaagcagctcatgctcccttgcctgaagaccctgccaaggcttccagtgaggcagctcttgacctccacattctcttccagaacccttattattctccaaaccaagaaccagggtgacttctcagtagagcctgagtggagaaatacaacctccgtctcggggaaaatagtgtagatactgaaggaactgcagaacctgatacatactgtcaggaaccagggggaaatgtgtgtgaatgattttgagggtgttaagccaaaggtggaagttgagggaagactataaggcgggataagaaagattactataggagccgggcacaggggctcatgcctgtaattccagcactttgggaggctgaggcaggcagatcacctaaggtcgggagtttgagaccagcctgaccaacatggagaaaccccgtttcaactgaaaatacaaaattagccgggcgtgtggcacatgcctgtaatcccagctactcaggaggctgaggcaggagaattgcttgaacccgggaggttgcaatgggccaagatcatgccattgcactccagcctgggcaacaagagtgaaactccgtctcaaaaaaaaaaaaaaaaaaaaaagattactataggaatgtttacccatgacttagaagtgaacaacacctgaatttggtcataatattctgttgggatggctgctgaggcttggctatgattgtggcacacagtaaatgaggtgaagatggtggaactgccttggtatggtattgaagaaagagttggaaagttccaggaggtgcgaatgttagaatggattcattatgtgagactgaacaaccgtctaactatgttcctcaggaagacattgccttcactaaggcaatgtaaaatgcactggtttgcaaactgttcatccaacaagggactaatatccagaatatacagggaactcaacagcaaaaaataataataataataataataataataatctcatta

SEQ ID NO: 37136 - DNA, 1035 bp, Homo sapiens
gtgaatatagctctaggtgtgctcctgaatcagttcatggtagattatgctgaacaacagtgagatgttattggaggtgtggatgagggagtttgttgttgcagtccttctttgcaccttattttaaagaataaatgaaacatttttctggttacttttttaaaaatttaaaatggaagggaagaataggggcagggcattattaggctatttctgatgcttcagtgttataaattcaacatagaggctgacaacctaaattcatggtgtaacacagctcttttccttttccttttttttttttttttggtatctgttcaatgaaaataaggtatgacccaagtttttacctagtctgactagaagtattccacttcaaggtctgaagtaggacttttaccttaaaaaacaacaacaaacaaaactatcacacaggatagataagaagattggttaaacagttttgtgtagatctttttggtgctgaactatgacatgagccttatagattgtaaaatagggatagttggaactaatgtacagaactaaattttttaaactttatttgctgttaaattctgtgaagtttcagttatctaaaataaatatacacaaatatgaaatataatgtttcagattgcaaggtaatatgtaatagtagtgtttgtaagatactcttgtctaatattaactagtagtattttgatttgtacagtcataatttgttaaaatgacttcatttaacattcactgatgtagattaataatgtaagttctgatttaaagaatggtggcaaaatggtgcatgtaatacttttgcaagtgttggggagatcggtatgttttgaaaagagtaatttaacttttgggtgccaggaaatgggttttctcaaagtccattgccggcaatgggcaggcctgcaaatactggcacagagcattaatcatacaccttattaacggtgaggtgaataactttgaaataaagttttagagaaatgtttcagatacttgagtattctttttcactcttga

SEQ ID NO: 37137 - DNA, 1141 bp, Homo sapiens
acaagtttggtaaatggatagtcttgctttttgctattatacaaattaggtagcaagtcaaaccgccactgtttgagttgcaaatacaagacgtaacaagtaaaatactgttacgtggtgggtctctgtggcaggcttcctctcccccccatatggataattgtatactaaattcaccataaggtgaaaaatggatattgagttcccttcatgaaaagttatataaaatatatatttagcataaacttctccagagttgtcctttattaagtttctttacagaaactttaattggtgccatgattcttgtgggggaaagaatcataagagccatcaacttttttcctttcattttagcatattccaagccctgccaagaaagtaccaagactccctgccacagcagcagaacctgaagcagctgtcattagtaatggggaacattaagatactctgtgaggtgcaagacttcagggtggggtgggcatggggtgggggtatgggaacagttggaggaatgggatatctggggataattttaaaggattacatgttatgtaaatttttatgtgactgacatggagcctggatgactatcgtgtacttgggaaagtctctttgctctatttgctgacatgcttcctgttgtggtctggccaatgccaaatgtactcgaatgatgttaagggctctgtaaaacttcatacctctttggccatttgtatgcatgatgtttggtttttaaacatggtataatgaattgtgtacttctgtcagaagaaagcagaggtactaatctccaattaaaaaattttttaacatgtaagaattttgtactttgaacaacaagattacagaaagtacctgtggtttttggaaaacatttctagcttggggaatgtgacaacattccccagtgtggtaaaattggggtaaaatgtggtaaaatgtgatacgcacaaaccctttgaaaatagcaaaacaaacatgccctttttctaaaattgataaatcctaaagaggaagaaaagagctgggacaataaaacactggctctggaatctggaatgttaagtccaggccagcagtgacaaaagttattgtaatgacctctgaacagagaaacactgccattgaagag

SEQ ID NO: 37138 - DNA, 1305 bp, Homo sapiens
actgtaaaactgtaaaataaatctttcagggatgttaaattagaagacacctactttgatagagatgtggagaaggcatttatgaaggctagctctgaactcttcagtcagaaaacaaaggcatctttacttgtatcaaatcaaaatggaaatatgtacacatcttcagtatatggttcccttgcatctgttctagcacagtaagtataaatttcacctactacttaactccccttatttgggagatgttagatttctaagaccaaatctagtgtcaagcatgttggtggtagatcacagaaaattttatcttgaggctctctaatctgctattgtccattgacttgaaagatgtatgggttgaggctacagttcttccagaagtatttgttaatttcatactggctttcctggcttctgttttcatggttttttaattcttgacctacagttgaaccataaatacctggttgatgaagtaacttgttttgtggcatgactttcacaagctctgtcattccccacaagatgaaaactcacatgctgcaatattaaaactaagttatattccctactgcaatattaacactttgagttagatccttaaaactttaagttagattctacttttacttatagcctaaatttttattgctacttttatagcttcccacacgctgtagctttggatcagttaaacttctgaactattgttacaccctacataggtactcacctcagcaattagcagggaagagaattggagtgttttcttatggttctggtttggctgccactctgtactctcttaaagtcacacaagatgctacaccgggtaagtgctgaatctttcaacaagaatgtattgagaactgagtccaggcacagtggctcacacccgtaatcccagcagtttgggaggccgaggcgggcagatcacctgaggtcaggagttcgagaccagtctggctaacatggctgaaaccccatctctactaaaaatacaaaaattagccaggtgaggtggtgcatgcctgtagtcctagctacttgggaggctgaagtaggagaatcacttgaatccaggagagggaggttgtggtgagccaagatcacaccactgtgctccagcctgggtgacagagcgagactctgtcaaaaaaaaaaaaaaaaaatgtattgagaactactctggggaagttgatttagcagtcttctcaagtgagcacctgaatctgtcccacagatcattacaatattttagtcttcattacttctttcagtaggtttttactctctgcccta

SEQ ID NO: 37139 - DNA, 1071 bp, Homo sapiens
aggacccacagtaagaagtacatgttacattgtatgtgtatgccagactgaaacaaaaatgtcatgacattacttacccttgctgcaagttattcagtttgctatttttctactgcattttgttttttaaaatactcttttatttaaaaaaaatactaatcctgacccactaaattgattatgtaacctgctaatgtgtatgaatcttaaatttgaaaattagtgacatagtacatattgtttcatctttgagtgtctttttaaatgtatactttaaggtatagagaggtttcattatacagtgtatttgtggttgctgtttaaacatatacaaatatcctagctttattctaaagtcaaactttaaaatttcatggcttatatgaatttcatagtttccttggacttctctttcagagggaaatgataaagattttaccttgaatgattttggcttcatgatctttcactcaccatattgtaaactggttcagaaatctctagctcggatgttgctgaatgacttccttaatgaccagaatagagataaaaatagtatctatagtggcctggaagcctttgggtaagaggagctattatgagttttttccttctatattagagcatttttaatatctgttaagctgttatttgtacagacctgagaaattgagagtcagaagaatcttagaagtcatccagtctaatctgtgtgtctcagtcagtgaagaatctaagtccagagaggtggtagttaacatgcacaaattctttagacatttctattcagattttctgatttatttctttcagctccattcatgttgtcacgataaagtaactgcacaagggcctatattcactacagcagcctcttaactccttacctctctcagcacccctgcccccatgcccttttccatcctgcacactgccacagctaaagtcagcttttgtactccacctgtctttttctcactttaggctccctagcatgctatgtgtgttcaactcgttctgtttctccctgtgtctcttgtgtgtcctttctctatctgataaaattatact

SEQ ID NO: 37140 - DNA, 1033 bp, Homo sapiens
caatgtagaaaatcttatttgagtgttgtttacctctaataatcatgttttaaatctagagatgcccaattttgaataaaatggaagcctttctaaaagactataattttaaatgataatattccattcatataataattgctacttcacatgtacacaattgagtgccctaaatactaaacttaaagaaactaatacttcaggtgattgctaaactcttaatatctatttctcaatttcaaagttgaaaaccagcaacttataacctaaaacaattttttttctgtttctcctttctaaagctctttcaccatgcctggatcacttcctttgaatgcagaagcttgctggccaaaagatgtgggaattgttgcccttgagatctattttccttctcaatatgttgatcaagcagagttggaaaaatatgatggtgtagatgctggaaagtataccattggcttgggccaggccaagatgggcttctgcacagatagagaagatattaactctctttgcatgactgtggttcagaatcttatggagagaaataacctttcctatgattgcattgggcggctggaagttggaacagagacaatcatcgacaaatcaaagtctgtgaagactaatttgatgcagctgtttgaagagtctgggaatacagatatagaaggaatcgacacaactaatgcatgctatggaggcacagctgctgtcttcaatgctgttaactggattgagtccagctcttgggatggtatgttacatgcctattccccgccgtcccccaaaatttttttctaaggttcaatagacccagatgacactttaattaatgcaatacgcaaacttttgtaatttgtccttgtttggatatattaagaaagatattttacctgtctgtcattatccgaattgtgaattggttatcttatcttgtaggacaaatggtctattcaaaatttagtcagatggatgacagagccttggcagatgaattttaaaaaaaaattagagcattttctttctt

SEQ ID NO: 37141 - DNA, 1050 bp, Homo sapiens
ataccatttgagcagccctaatctggaaatccaaaatccaaaatgttccaatgagcatttcctttgagcatcatgttggtgctcagagagtttcagattttggagcatttcagattttagcatttttgtattaggaatgctcaacctgcagcatcttgacaatggttagacatgcagtttggaaaaaactgttggcctatgacagagaagagagcagaggcagagctcacttaggagagactgatgctgaagtccttccccaacacagccattgaggagctaggttaggacttcccttgcaccagtatcatcagctagtttccctcccccttttttcccctttccagttctctttcatttccagatttattctcagaataactatataggtcttttatgtattctaggcaggaagcattcagaaaacattaacaaggcttccttatcttgctttactgattctggaaatagcatatggagtttcttttgtccaccagagggagtgagccttcactttaatgagacttatttaagactttagtcctctgttggtactactttgttggaagacttgaaaggtttacaaagttctctgaaagttgccttttctcgccttttttaaggatagaatttaaaaagaaaatgtgtgtattttattataaatacagagtcctcattattctctttagacttattttatggtgaatatagtactctgaaaataataaaatgcattatctgtaaaaaattaaaaacgtaatttttttaaccatcagatttttaaaattatgttctacttgaaagtttttgtgatttatctctttttttaaattttttaaatttttttttttttttttttgagacggagtctcactctgtgacccaggctggagtgcagtggcacgatcttggctcagatcttggctcactgcaacctccgtctcccaggttcaagtgattctcctgcctcagccttccaagtagctgggattactgttgcccgccaccaaaaccagctaatttttgtatttttagtagagagggggtttc

SEQ ID NO: 37142 - DNA, 1993 bp, Homo sapiens
gtttggagccataggccacatcatttgggccttgttttaattttgtttttcatcttaaatatccctccagattgcttttacatcttgtttcttttaactgtggattgattttgagattttgacttagattttagatagcttttctcagaagaaataaacgcaaaaacccgatattgttgtaacatcagtttcctgtgtcctctagaatcatttaaaacctggttggatcttccataatccagtggaattggatatgagatgtagctggagaagtttgttttgctacatatcagaatctccaattagtttcatttagaaaggaatatagccttataattttatgctgggttactgtggaaccaaatatcatagaaggatgtgtgatatttttatgtttttcaagaaggtagtatagatttaaaaggtgggatacatattacctgtcctaatgataggactagatttttttttttttttttttttggggagacagaatctcgctctgtcgcccaagctggagtgcagcagcgtgatctcggctcactgcaacttatgcctcccagtgattctcctgcctcagcctcccaagtagctgggactaccggcatgtgccaccacacccagctaatttttttgtatttttagaagagatggggtgtcaccatgttggtcagactggtcttgaactcctgacctcaaatgatccgtccgccttggcctcccaaagtgctgagattacaggcgtgagccaccatgcctggctagaactagactcttaatctcttcatcctaatgcatggcgtgtgttgatgttcacttaatgtctgtcaactgggtgtagttacaccagtagcggagaggctaatctttgaaagcctgaagtgttgtcttcatctttgcagggtttttagttgtgggtgcatatgggaatgattgtaagaccaacaaatgttttctgattccatatgggcttcttacatttttcaccttggaatctgggaacaattgaaacctaccatatgccttgaacagtagcagtaaagagccagtttctttaaactagacattatggtgctgcagctcatctcaaaactgatagcaggctactctggacacactacatatagagtagccctgctctgcaaggagcagtaataaattaaaaaaaaaattaaaaagtgatagcagaaagcacttactactgagggctgctacaagtattaaatctaaaagatttgtcctctagtagttataactccaaattcagccactgaaaaatgtgacatttgagtaccctttacttcaaggtctcaaagggatttcaaaaaatcaaaatatatagcccctctcccaaaagaagtgtaggaatcctgtatggataagaagactgcccataactagttttccatagagagtaggctatgtagacttgggtatgaatgacctacctctgtagaagtgcaggtccctgattagaaaacttattttctgtgtgatttatcgaggaaagcttccaggaagaggtgacttagaacagggccttgaagatgagtagaatctctgatacgcagaccagtaactctgggaggaggcagggatgtccatgctttttacttggagaactataccagagtgtacaggtttgagcaagtctttcttaacattagtttttacttgcttgctcctaaggaggaaaggttgccaacttgttcttaatttcctagatttatctcctgtaacaatgagaaagatcaataggtaactgtttatattttatagtttacataccaaaatgtgtaggcaatgaacttctccaaccacttctttgaatcaaggctaaggagggagccagaaggaagtattcagaacactgagtaaactccagaagaaactaccattgcataaatctggttggccctaggcagtcttatcattcttgtgttttagtctttgccagactcaaagtgcctatatttcatcccatgagtctgca

SEQ ID NO: 37143 - DNA, 1033 bp, Homo sapiens
ttcttatgttttatgtagtttaaaaaaaatttttttttgttttgtatttgttactaggaacagggttcaagagatagttttttttgtgggggggggttgttttttagacagagtttcactcttattgcccaggctggagtgcaacggtatgatctcagctcacctcaacctccacctcccaggttcaagcgattctcctacctcagcctcccaattagctgggattacaggcatgcaccaccatgcccagctaattttgtatttttagtagaaacggggtttcttcatgttggtcaggctggtctcgagctcctgacctcaggtgatcagcccgcctcagcctctcaaagtgctgggattagaggcgtgagccactccacctggcttgatatttttattctgtttctgattttcctcctatactagctttttatagatttgttctattttatcacttcatttcatgatattacatgattctttattctaacatattcttggttaaggcagtgttagcaaaaggaccaatgatgaacttaacatattgtggatatagaatttaaaaacaaaggtgaagacaaaagtagaataataatatagaaatggtacatgttctgatgaagtagaagtaaaacaaaatgtggaggagaaggcagggaaagaggagcgtaaaataaactctttgatgttcagaccgtaggtgagaggtaaagaatactcgtttgaggagagggtttataggattccttgttcaagggtggtctgatttgacagtgggacaaggtagagtctctttaataggtaactttttttcatgtggtcggaacattgtctgatttttgtttgtgttttttggacaggaaactacatttcttccttttactacttcttttccttttcaccatccagtctccaaagagtgtctctccctttcttaccatcgtctcccccagaatcaatacctttcagagtcttgaaggtccactcttaagtcctttccctgcagttagtgctgtgacctactaggacactc

SEQ ID NO: 37144 - DNA, 1051 bp, Homo sapiens
ttttaactttttgcctactttacttctgtaaaattgttctaactagacacccgcccccccactccccttcctaaaccaaggtatgaaagttaatcaagccccttcctcagggccgagagaattttgagcattagctgtctcttggtcactggctaataaaggactcttaattcgtctcaaaatgtggcatttttctaactcgctcaggtacaacaaatcaataagaagtacatcagttccatccagaaaggcagatacagctcaaagtaaggccccccccaactgagggcttccaggtcacaggtaggtgagagacagatggttgcattcttttgagtttctgataagtctttcccaagaaggcaatcagaatatgtatctatctctgtgagcaaagggatgacttgaatagaatgagaggcagatttgccctgagtggttcccagcttgaaaggacccaggatgttttcctttcacagtctgatgtttctttgttgattttctgtctggaagatctgtccaatgccaaaagtggggtgtcaaagtatccaactattattatattggggcctatctctctctttagctctaataatatttcctttatatatctgggtgctgcagtgttggttgcacatacatttaaaattgttatatcctcttactgaaattacatctttgtcattatacagtgaccttgtctcttatactttttgtcttgaaatctattttgttcagtataggtatagctattcctgctcttttttggcttccattaacatggaatatcttttcccatcccttcactttcagtctatgtgtgtctttataggtaaagtgtgtttcttgtaggtaacagataaataggtcttggtttttcatacattcagccagtctatggcttttgattagagaatttagtccatttatatttaatgttatcattaataagtaaggacttactctttccattttgttatttattttttggttgttttatggtcttttcttccttcttttttttttttttttttttttgacagagtctctc

SEQ ID NO: 37145 - DNA, 1008 bp, Homo sapiens
ttttgatggggttgtttgcttttttcttgtaaattggtttctctgtagattctggatattagccctttttcagttggatagattgcaaaaaattttctcccagtctgtaggtggcctgttcgctctgatgatcgtttcttttgctgtgtagaagctctttcgtttaattagatctcatttgtctattttggcttttgttgccattgcttttggtaacaaaagacgaagtctttgcccatgcctgtgtcctaaattgcctaggttttcttcttgggtttttatggttttaggtcttacgtttaagtctttaatccatcttgagttaatttttgtataaggtgtaaggaagggatccagtttcagctttctgcatatggctagccagttttcccaacaccatttattaactaggaattcctttccccattgcttttttttgtcagatttgtcaaagatcagatggttgtagatgtgtggtgttatttctcaggcctctgttctgttccattgatctatatatctgttttggtaccagtaccatgctgtttttgttactgtagccttgtagtatagattgaagtcaggtcacgtgatgcctccacctttgttccttttgcttaggattgtcttggctatttatgcatgctgttttttggttccatgtgaaatttaaagttgttttttccaattttgtgaaggaagtcaatggtagcttgatgaggatagcattgaatctgtaaattactttgggcagtatggccattttcatgatattcattcttcctatccatgagcatggaatgtttttccatttgtttgtgtcctctcttatttccttgatcagtgagtggtttgtagctctccttgaagaggtccttcatatcccttgtaagttgtattcctaggtattttattctccttgtagcaattgtgaatgggagttcactcatgatttggctctctgtttgtctgttattggtgtataggaatgcttgtgatttttgcgca

SEQ ID NO: 37146 - DNA, 1035 bp, Homo sapiens
caacatgctggagccgagtgctaacatgccttggctcaagggatggaaagccacccgtaaggatggcagtgccagcggcaccatgctgcttgaggctctggactgcatcctaccaccaactcatccaactgacaagcccttgcgcctgcctctccaggatgtctacaaaattggtggtattggtactgttcctgttggccgagtggagactggtgttctcaaacctggtgtggtggtcacctttgctccagtcaacattacaacagaagtaaaatctgtcgaaatgcaccatgaagctttgagtgaagctcttcctggggacaatgtgggcttcaatgtcaagaatgtgtctgtcaaggatgttcgtcgtggcaacgttgctggtgacagcaaaaatgacccaccaatggaaacagctgacttcattgctcaggtaattatcctgaaccatccaggccaaataagcgctggctatgcccctatattggattgccacgcggctcacattgcatgcaagtttgctgagctgaaggaaaagattgatcgcggttctggtaaaaagctggaagatggccctaaattcttgaagtctggtgatgctgccattgttgatatggttcctggcaagcccattgttgagagcttctcagactatccacctttgggtcattttgctgttcgtgatatgagacagacagttgcggtgggtgtcatcaaagcagtggacaagaaggctgctggaggtggcaaggtcacgaagtctgcccagacagctcagaaggctaaatgaatattatccctaatacctgccacccaactcttaatcagtggtggaagaatggtctcagaactgtttgtttcaattggccatttaagtttagtagtgaaagactggttaatgataacaatgcatcgtaaaaccttcagaaggaaaggagaatgttttgtggaccactttggttttcttttttgcatgtggtagttttaagttattagtttttaaaatcagtactttttaatggaaacaacttgacc

SEQ ID NO: 37147 - DNA, 1027 bp, Homo sapiens
tgcatgtaaatagttctgttaataacccactgttttacatttggtacatctgtgtctgctaatacagttagctttctcacttttctgcttgtttgttcagtctgaattaaaattagactttgaaaataaagcttaaatagttgtttcctctaaatttttgaagtagcatctggtattttaaataatttgctgttgaacttaaatgacataattaatttacttaatggtttgaaatcaaagaaatcatattagaagatattttattcattctctgaataagaattcagtaacaagtctaccttgaaaaactagcaaatataaaacattaaaactttaaaattccttctataaaggaaataatgtacgtaattgtggtttttggaagttgtagtaagaaatgtttttcaaaatggctcctgtaacatggcagctattaacataatctgcagttctctaaagatagcactgactataaatattggagggagaggaggtgtagagaagagatggtacattagaccagggacaaggaatgctaactgcatatacttgaaacttctagcagctgctctgtgaataactgtccagtatttgtctactagctcattgtcaccaactactgctctactcacagtagctaccgacaagatcaatatctgttcccggtattatgcttaataaaaaaagcacagaaatctagcatcttaaaacaatcattttattatgctcatggactctatagttcaggaacttggagagggcacaatggggatggctttattctatgatgtctgaggcctaggcaaggaaaactaagggctgagggtaatttgaatatctgagagctataatcatctgaattcatggtactgagatgacttttaaagccaagactagattggaatcgttcaccagaaccatctacacttgtccatgtagcttgaacttctcacagcatgttgcctggattctgaagggccatttcaaaagacccagaaagcagctgcatttggaagttacacagcat

SEQ ID NO: 37148 - DNA, 1122 bp, Homo sapiens
atatttgaagtttatagttcagtataccagtcttttttctgtaatggtctgtgaatttggttttgtgtttagaaagatctttccttttccaagatcttaaaaataaacacttatgtaattcttattactttggtagctttggtttgaataaggatctaattttatttagattagaataaaagtgaataatccatttttccttattgatttgaattgccacttttatcacacttgcattatttgggttttgattctggattttcattccatttatcacttattctgttcctttttattaccatacaattcatacaatagctattaaaaagctttttttttttttttttgagatggagtctcactttgtctcccaggctggagtgcagcggcacgctcttggctcactgcaacctctgcctcccacaggttcaagtgattttcctgcctcagcctacccagtagctgggactacaggcacccgccaccatgcccggctaatttttgtatttttagtagagacgggtttcaccatgttggctaggctggtctcaaactcctgatctcatgtgatccacccacctcagcctcccaaagtgctgggattacaggcatgagccaccctgcactgccaaaagctatcatttttaaaaatatcttagggtaattagttttttgttcttttgtgggatttttttttttttttccgagaccgagtcttgctctgtcacccaggctggagtgcagtggctcagtcttggctcactgcaacctctacctctgaggctcaagcgattctcgtgcctcagcctccccagtagctgggatgatgggtgcgtaccaccatgcccagctaatttttgtatttttagtagagatggggttcaccatgttggccaggctggtctcgaactcctgacctcaagtgatccgcccacctcagcctcccaaagtgctgggattacaggcgtgagccaccacgcccagcctgtcaaatattctttgctatgcttgtttcgtctaatgaactttagaatcagtgtttgaaattacacaagtcttgctagtatgttagatattttggagataatactcaatttataagctaatttagagaaaactagt

SEQ ID NO: 37149 - DNA, 1021 bp, Homo sapiens
tggactaggtcagaaggctccaggaaagacttccgtaataagatgagcacacatgctgtaagacataagaagaaatttacagagtagtgagtttagggataaatcaatgagaagaatataaaagtgtagtaaaaactgaatctagggaagacaaagttgtgcaaaagtaaaagcagtgtaatacatggttcagctataaatgaaaacacagcaaatgaataaaatcataaccatactgtgataggaggaaatagtagagtggggtgaaattaagcagggtgaaagctaaaagctcatcttccatgatgggaaactgtaagttgagtatcccgtatctgaaatgcttgagatttcaagcatttcagatggattttttcagatttagcatatccagtatataatgagacacctcagggagggtacctaagtatattacagctgaagggggttgacagggtcttttttcctttggggatgctgaataaattatgtgttgtacacctgtgttttgactgacctgtcacatgaggtcaggtgtggaattttccacttttggcattatgtggacactcatattttctgtttttggaggattttagatttttggacagggatgctcaagttgcagtaagaaataacatctaaactgaaaaattacgtagtgcggagatatggggattaaaacatttttggctgaagaagtcaaaagtggttgtctttgggagtaaaaccgggatgtaagtaggaaactgttgaatgacaagccttatagaacttgtctttaaatcgtgttataacactaaaaagaagctaaaggaaaacatgcagtgccaataatgggaaaaatgtaagggtgaaccaagtcttgggtaccagctaaacatacatgatgtcaggagaaatcactctttctcccttaatgtgacatatactggccccatgtgagcaaggaaataattagaaataaaagttagtaagtagacccaacatatagagtcagaggggtagcaggacatttgtt

SEQ ID NO: 37150 - DNA, 1022 bp, Homo sapiens
agttttgaaacactatttttgtagaatctgcaagtggatatttggactgctctgaggccttcatcggaaacgggaatatcttcacataaacactagacagaagcattctcagaaacttctttgtgatctgtccattcaactcacagagttgaaccttcctttttatggagcagttttgaaacactgtttttggagaatctgcaagtagatatttggagcgctttgtggcctatggtagaaaaagaaatatctgcctataacagctagacagaagcattctgagaaacttctttgtgatgtttgcattcaactaccagagttgaaccttccttttgatagggcagtttggaaacactctttttgtagaatctgcatgtggatatctggagcgatttgaggcctatggtcaaaaaggaaataacttcctgggaaaaatagacgaaagcattctcagaaactgctttgtgatatgtgcattcgactctccgagttgaaactttttttggatagagcagttttgaaacactctgtaggatctgaaagtggatatttggagctctttgagggctatggcggaaaagaaaatatattcacattaaactagacagcagcactcccagaaacttctttaggatgtttacagtaaactcacagagttgaacatacctttctgtagagcagttttgaaacactctgtttgcgggatccgcaagtggatatttggaccgctttgagacctttgctggaaatgggaatatcttcacatatgaactagacagaagcattctcagaaacttcttcgtgatgtgtgcattctactcccaaatttgaatcttccttttcatgaagcagttttgaaacactctatttgtccaatctacaatgggataattggaacgctttgatgcccatggtagaaaaggaaatatcctcatataaaaactagacagaaggattcacagaaaatgctttgtgatgtgtgcattcaaatcacggagttgaatctttcttttgttagagca

SEQ ID NO: 37151 - DNA, 1094 bp, Homo sapiens
tctgcaagtggatacttggaccgatttgaggcctgttgtggaaaaggaaatatctgcacataaaaactatacaacagcattctcagaggcttcttagtgatgtgtgcattcatctcacagcaatgaacctttcttttgattgagcagtttagaaacactctttttgtatgatctgtaagtggatatttggagcgcttagaggcctatggttgaaaaggaaatatcttcacataaaaactagaaagaagcattctgagaaacttctttgtggcgtgtgcattcatctcaaagagttgaacctttcttttgattgagcagttttgaaacactctttttgtagaatctgcaaggggatattttgttccctttgaagcctatagtgaaaaactaaatatcttcatataaaaagtagccagaagcattctcagaaacttctttgtgatatgtgcattcatctcaaggagttcaacctttcttttgactaagcagtttggaaattctctttttgtagactctgcaagtggatatttggagcgctttgaggcttacggtggaaaaggaaatatcttgaaatacaaactaaacagaagcattctgagaaaacactttttgataggtgcgtttaagtcacagagtggaaactttgttttattgtgcagtttggaaacagtttttttgtggtatcagcaattggatatttggagaggtttgaggcttatggtggaaaaggaaatatcttcacagacaaactagacaaaagcattccgagaaactactttgtcatgtgtgcattcatctcatagagttgaaagtttgttttcattgagcagttttgaaacactcattttgtggaatctgcaagtggatatttggagtgttttgaggcctatggtggaaaaggatatatcttcacatgaaaactacacagaagcattctgagaaacttctttgtgaggtgtgctgtcaactcaaagaattgaaacaatattttgatagagtagttatgaaactctctttttgaagaatctgcaagtgaatatttggagcccttttgaacctatggtggaaatggaaatatcttcatataaagacta

SEQ ID NO: 37152 - DNA, 1001 bp, Homo sapiens
cttacagagttgaacatttattttgattgagcagtttggaaactgtctatctgtatcatctgcaaatggattcttggagcactttgaggactatggtgaaaaaggaaatatattcacataaaaactagacagaagcattttgataaacttctttgttatgtgtgcattcatttcacagagttgaacatttcttttgattgagcagttttgaaacactctctttgaagtatctgcaagtggatatttggagagctttgaggcctgtggtggaaaaggaaatatcttcacataaaaactagacagaagcattctgagaaactccattgtgaagtgtgcattcatctcacagagttgaaaatttattttgattgagcagtttgaaaactgtctttttgtagtatctgagaagggatatttggagcgatttgaggcctagggtgaaaaaggaaatatcttcacataaaaactagacaaagtagaattctgagaaaattctttgacacgtgtgtatgcatctcacagagttgaacctttcttttgaatgagaggtttggaaacaatctttttgtagtacttgcaaatggatactttgagctctttttggcctatgaggaaaaaggtaatatcttcatataaatactagacagaaacattctgagaaactactttgtgatgtgtgaattcaactcacagagttgcacctttcctttgattgagcaatttggaaacactctttttgtagaatctgcaagtgaatttttggagagctttgaggcctatggtggaaaaggaaatatcttcacataaaaactagaaagaagcattctgagaaactacttggtgatgtatgatttcatctcacagatttgaacatttcttttgattgaccagtttggaaacagtagttttgtagaatctgcaaagggatatatgggggcccttgaggcctatggggacatacgaaataccttcacataaaaactaaacagaaacattctcag

SEQ ID NO: 37153 - DNA, 1035 bp, Homo sapiens
cattaaaatctcaggatacaaaatcaatgtacaaaaatcacaagcattcatatacaccaataacagacaaacagagagccaaatcatgagtgaactcccattcacaatttcttcaaagagaacaaaatacctaggaatccaactggcaagggatatgaaggaactcttcaaggagaactacaatccactgctcaatgaaataaaagaggatacaaacgaatggaagaacgttccatgttcatgggtaggaagaatcaatattttgaaaatggccatactgcccaaggtaatttatagattcaatgccatccccatgaagctaccaatgactttcttcacagaactggaaaaaaccactttaaatttcatatggaaccaaaaaagagcacacatcgccaagtcaatcctacaccaaaagaacaaagcaggagacatcacactacctgacttcaaactatactacaaggctacagtaaccaaaacagcatggtactggtaccaaaacagagatatagatgaatggaatggaactgagcccccagaaaaaacgctgcatatctacattcatttgatctttgacaaacctgagaaaatcaagcaatgcagaaaggatttcctatttaataaatggtgctgggaaaacttgctagccatgtgtagaaagctgaaactggatcccttccttacaccttatacaaaaattaattcaagatggattaaagacttaaacgttagacctcaaaccataaaaaccccagaagaaaaactaggctttaccattcagaacataggcatgggcaagtacttcatgtctaaaacaccaaaagcaatggcaactaaagccaaaattgacaaatgggttctcattaaactaaggagcttctgcacagcaaaagaaactaccatcagagtgaacaggcaacctacaaaatgggagaaaatttttgcaaattactcatctgacaaatagctaatatccagaatctacaatgtactcaaacatatttacaagaaaaaagcaaacaaccccatcaa

SEQ ID NO: 37154 - DNA, 1041 bp, Homo sapiens
attatctttgttgtgttctctgtatttcctgaattttaatgttgacctgtcttgctaggttggggaagttctcctggatgatatcctgaagagtattttctaacttggttccattctccccatcactttcaggtacaacaatcaaaggtagatttggttttttcacgtagtcccatctttcttggagactttgttcttttcttttcagtgtgtttaatcttgtcatctcactgtatttcattgaattgatcttcaatttctgttatcctttcttccacttgatcaattcggctattgatacttgtgtatgctccatgaagttctcatactgtgtttttcatctccttcaggtcatttatgttcttctctaaactgctaattttagttaacaattcatctaaccttttttcaaggttcttagcttccttgcattgggttagaacatgctcctttagctcggagtttgttattactcaccttctgaagcctacttctattaattcgtcaaactcattcttcatccagttttgctctttgctggtgaggagttgttatcctttgaaggagaagaggcattcaggtttttggaatattcagcctttttgtccttcccggatttatctacctttggtctttgaagtcggatggtgtctctgagtggacgtcctttttgttgatgttaatactattcctttctgtttgttagttttccttctaacagtcaggcccctctgcggcaggtctgctggagtttgctcaaggtccactccagaccctgtttgcctgggtatcaccggtggaggctgcagaaaagcaaagattgctaactgttccttcctctggaagcttcgtcccagaggggcacccaccagatgccagccagagctctcctgtatgaggtgtctgtcggcccctactgggaaatgtctcccaatcaggatacacagggatcagggacccacttgaggaggcagtctgtcccttatcagaggttgaacactgtgttggtagatctgctgctctcttcagcgctaccaggca

SEQ ID NO: 37155 - DNA, 1062 bp, Homo sapiens
gttgcagtattaattaaaggcaaagtgacctacttgtactatattctgaataaatacttattgaatgaatgaaaaatagaagagtgactcaattattttagaatcttaagttatacagatttatgtaatgtctattttgatttttattaattaaccatgaatttatcctactctagtattgagaaaaagaaaatggaactatagacccttctttcatatgatacttaggaatgtatctgcactgtatccagaaagtcagttacatgccctgtttaccaattgaattctgcttcactaaggataataataactgacattgagtgcatggcatatgatgggcactgtgcaaattgctttgacatgttttgttcatttaatccacacaatggtcctatgctataaaaacagttaatatctacttttttaatagatgaggaaactgcagcttagagagattaggtaagctgccttaagtcaccctgcctgtaagtgtttagagctgagattcacattcacggagtcctcctgaagaacctaggattaaccaccacgttgaacagctttggcctgcaagttacatgcttcttagaaaatgaggctattatctataatctgtattttttaatatcaattttattcctttcaactggtcagttatatcataaattccatggaatttttatggaatccatgctttgccactcttgtatccctatagtggtgctggggaatcaagacacatttatttgccttagcactctttctttctttctttttttttttttttttttgtaattttacttataaattgggagggtggccataaaatttatcatccaaccactgaaagtgaaagaaggtgctatttatgatttccccaggacaacaggcagaaaatagtctctggtcgtacatttagcctgcagagagaatttaagtacattatggatagtctgccatagacacagcagtagcatctgcaacaagtaaatgataaacaaaaatcaactttcagggaaatagccatttttagtagtaaacatagggaaatagccattttaa

SEQ ID NO: 37156 - DNA, 1036 bp, Homo sapiens
atgtccatagtatttggaattcattgtattgtttgtattaccacaatatattttttttgtttttttcctctctgcatattagtgtttagttgctcaatcagtgtgttatagtttaacagaagagattgaaataaaaataaacagctgacagtttccttgaccaacttgttaacgttggaatcacctctcctgtgttgacccaaaggcacattttatttacatgttgagatgtgagcagctctcccacaaggtccttgtgagccaaggagataatataggcagacattagaggtgcagatgtgcaaattaaggcacaatgtaagattcgggaagattagtcaagataaggaaaaacaaccacattgtctaaatctcggccagcaagaggtctaggttaggaccactcagattctaggggcaggtgattgagaagattgagaagaagaaaagaagtgaaaatactttattgcagaaaagattctagcatgactccaatgctgcaagtgttaggatattttttcagaggtactcatcaaacttgatatgtagactgttgatgcacagagaaaaaaactgaggcctaacattcatagagagtcagagaaagtaaagatggaagagggatctacccatagcaacacaagtggcagtggctgcgatcaacttttgtttttttaatatcagttttttttgtttttgtttatattaacagaagtattgatgtttggggctggatgattcttggttataggaggttgtttgcagaattgtaggttgtttaacaccattcctagccattacccactagatgtgagtgacacctgctaagttatgacagctggatatgtctccagatattgtcaaacattccctggggtacaaaattttccccatttgaaaattatccccactgttctatacattaaaaatgagagtcctgcatgtttcccatccccttatcttgggaatacacatgatttaataatcttgtgattaacatttagtaaagaatctcaccataaagttagatgatggt

SEQ ID NO: 37157 - DNA, 1058 bp, Homo sapiens
gctgcggctcgcgttcctgcgctctttggggcgagtcttgaacgaacagcgccccgcgagtcgggcgcgtaggtaacagggcagagtctggtttttcctaggaagaaggcagtggggtgtgtgggtggttgcagggaccagctagcgacttggcttgggcaaatatggcatgaattttgaaagccacatttccccaaggcctactcccttttcttgattcgagagtaaggctcgagtatcacctccttccctcctcttggcaggtgggttggctttgaggattttttttttttttttttttttttttttgagacggagttttactcttgttgcccaggctggagtgcaatggcgtgatctcggctcaccgcaacctcctcctcccgggttcaagcgattctcctctgtcagcctccagagtagctgggattacaggcatgcgccaccacgccgggctaattttatatttttagtagagactgggcttctccacattggtcagtctggtctcgaactcccaacctgaggtgatccgcccgcttcggcctcccaaagtgctgggattacaggcgtgagccacctcaccttgccgaggatgtttttttagagctgagtaggggaaaaaacatcataaccaactagccaaccaaagatccacaacttacaggataacgtgtgtgtatcttcattttacaccgtggtctttgaaaacaaaatgtgtgtgtgcatgtgtgtgtgtgtatgtgtgagatttttgcttgttgttttattgtttaagacactttgacagagggattacgtgcaaaacattaacaaagccaacacgaaagttgccattctaccttcacctgtttataattacttttcatattgaaaggattccatccaacctattgcaagtttctgtgtcataaatgttaccagccagtaagggtaataaaagaccacctctcaagctggtaaatattggccaccagtaactaaaattgggacattattctgcaaaaagttttcaaactctcatgggaatttattttcatgggcttgtaagatgtgga

SEQ ID NO: 37158 - DNA, 1047 bp, Homo sapiens
gctgtaacaaactgcagttgtgccaagacttgcaggccctatgacaatctgtgacagattctttttgatataaatgcctcgaaagtcattagagtggtttgcctttttgtacccctaaaaagagaagagttcttggctttaaaaagaagccagtaattgagactgtatctatcatactctgttagttactagtttgttattaataaccagtagttttattaatggttattatcactcctattacttgatatgtattattttaaattttgtattatactcgttaggacataactttgtatttctaggcattacttggcactgtgccttgttgagtcagatgtttgctctatcaatgaaaggattttccttggtgcccatcaggagggtttagtggatagattctaacaaattagctgtagcatcagcctcatctactgcctctgctgaatgctactgcaattaattactcttttctaactgtatgtttacgtaaaatagaactacagtataattctaagactgcatacctggattttttttcatctgtctagcagattctttaacacgtagattcagagatgatggtgatttttttttctcttcatcttgttaaagcttggttccagtgtcagaagcaagcataatcattgctgtgtcctcagcccacagagctgcatctcttgaagctgtgagctatgccattgatactttaaaagccaaggtgcccatatggaaaaaggtaagttaagaaaataacacattttagcatgtggacctgatttttctcaggaatttttagataaatccccccatatttatggactttttactgactgtagtatcttgttttctttatctgtgaaatatcttctttccaagatttgttaagcatgaaaaatatgtgccccaaagaatgcatggcacacagtaagcctcaatgagtgataacagtgagaattcctagtctggactgttggaggggttcatacatgaagttattttccttggattataattcccttgaattagagggtctttctgttggag

SEQ ID NO: 37159 - DNA, 1044 bp, Homo sapiens
tcccctgattcagcctccagaccaaatttttaagtaaaacagtaggatccaacgaagtcatataatatcagcgattaatcaaaatgtgtggttcgtaattgggtgtctgctcctaatgaaataaggggcagtggtcatcagtgtctgctaatgtcacagaagcaaccaggcatagttacatgcttccagatagaagtgtgaaataccaccgaggaagtattcgtaccaaaaaattgaacctgaatctgatcaaccctctggatctaacaatttgtagaatatacagaaacagaggaataggttaaatgacacatggtgacacaataatcaaaatccagactattggaaatttaaacaaatgagctggtttactaaatggcaaggtggaaaaaagaaatagagggaggaaatctgtagattaaaagagtatgaagagctccatcaaccaattgcagagtatggggcttatttggattctgtttcaaactagcaaaatgtaaaagaatacaatttgagacagttggagaaatgtaagcacttgttgaatattttatgaattaaggaatccttgattactaagctcttttaggcgtgataatgaaattgtggttgtgtattttttaaaggagtccttatttattaggggcacatactgagatctttatggatgaaatattatgatgctcaagatttacttcgaaataatctattaggtgaagagagaaatagaagtaggtggggattagatgaaataagattgtttgtgagtgacagctgttgaagccaaatcatggtgaagggggatagtgatactttgttttctgtctctaaatgtgtaattgacattcccccacccccttttatgcctctgaatatgtaattgacattttccccaaaaagttttaaaagaaagaaagaaaagagaaaatgaagagagtaaaaagacaagccacagaatagaagatattttcaacacaaacccaagactgttaccagaatatttattcagagctcctctaaatcgctaagaaaaaaaaaaaatcc

SEQ ID NO: 37160 - DNA, 1051 bp, Homo sapiens
ttgaggttcacagatgaaatattctttggcatactttgtagactttgaccacttaaaatactaagtggccaaatgataaaaaaaactgctccctgcacatgagtgtaaaaacatgtttgtaattttaagtaaaatggactgatacccaaataccacagactcacactatattacagaatgatgtaatacctggtaattctccagaagatagacttcagacccttaatgccatttaaatgtagtttttgtggtttaatcttatgagtagattgtaatgaaatcattacctttgaaacatcaaacacttctttaagctttttttttttaatgtcatgaatcaggaaggatacatagtgattcgtatacaattttgtctgcagcattcttgaatatttttaacactgtgtaatccctgagcagcacaaaacttttattccgatgaccagttacacaattcctgtttttattttgtcctgttgtgctcatcttctatgaaaaataaatgattattaggccttgctttccctgcaagttcattaaatgtagaatgttgtctttttaagacaccgtggctgagtgctcctaagccatctgttaaatgacttcccgtggtctgcgtgtgtgtgttcatgtgtgcgccagtgatgggcctctcctcaaacccacgactgtctgcagcgtctcagccgtcagaatgaaaacattatcaatcagtacccaacaacagctgtttttgacaagtttctgtctgacgcctaatgctttacaactgtcaataaggctccctctttgtctagcaggtcggagctcgctgtcttgctgcttccgcgcggcatcctgtccttgtaaccctagaatttgccatgttttggaaatccacgtgggggcggggtggggcctgaacgggtggggatgggtgggtgggtggtggggtgggtgggatggctgggggtgggagtgtaagtcccttttcctactttcatgtaaagtgccacaggtgtcttggtttgcatattcaaatattatataggaaaaacagtctgttatgtat

SEQ ID NO: 37161 - DNA, 1014 bp, Homo sapiens
gagtgtcttgctatattacccaggcaggtctcgaactcctgacctcaaacgatcctcctgccttggcctcccaaagcactgagattacaggcatgagccactgtgccctgccccaaacctcacttaatgtatgaaaggccaggcacagtggttcacgcctataatcccagcactttgggacaccaaggcaagaggatcagttgagtccaggagttcaagaccagcttgagcaacatagcaaaaccctgtctctacaaatagtaaaaaaaattagccaggcatggtggcatgcagctgtggtcccagctacgagggaggctaaggtgggaggatcacttgagcttggacattgaggctgcagtgagccatgattgcaccactgcactccagcgtcggtgacagagtgagacaccttctcaaaaaaaaaaaaattataaaaatagaattatgaaactgtaggtttttaaatggcccaagttaggaagtagcacaagaaacaaataaaaattcaagaaaaaagttgaagtgtctgcaatataggacaaatgaagaattttttttttaatgttgaaaattgaagcttgggaggaaacagattttattaaaggcagtagaaggagacttctgtgaaaatgctaaaagacgcttataagcaccttttgaaggagttgaattctttcttgtgtctaatatgtctaacttaacagttttctaatttgaatgtaattccttcccttctctgtaaatttataaatattgattgaggtatttggggctcccaaattacattgtatttgataagaattgaaagaaagaccaggagctattaaaaagaagagagccaaatgaatgtatatacctcctccttgggagagaaccaaagtccctgtgcacccttgttaggccaaagacagtttggttgctgtccagagttgggaggaggggcatggggagttacggtgagcagcctttaagtgagaatgaaaaatgaaaaacagtgtggaactggcactg

SEQ ID NO: 37162 - DNA, 1183 bp, Homo sapiens
tgaaggatccttttagaaagatcatggctaggacggtgacactgattttctaccaaaatgcctacatttactttgcagttaaaagaaaacattaatccaagtgctaatcctaaaatactgccctcatttaatatctaaactacctaagcaaccataaatcatacccttctccaggaaccttttctggcattcaaagtcagctatccgaatcttaactctaatcaaaagtccatctcaaatcctgtctcctccatgaagactccagtaacgttagttaccgtcagtctggctctgtgctgagaatgagtgtggagatcaataatattcactgacatttatgcagtgcctcctacctgccaggcactgagctaaataaattccttacctctcacctagtccacacaatagccttaaagatacatgttattattagcaacatcttacagatgaggaagatgaagcccggggtggttaagggaaacatccacggtcacagagttagtaaagggcaaagtcagactttgaacccagcctgccgggagtccagagaccacttccctacaggctgccttgagttgctgcagccctctttcaaatcatacatttttgattcagtgatgctcagttttcacctcactatacttgatccttcatcctcaattttttatgttatttttgatgtcccaaacacagctaccaagaccctaagctccttgtccataccatttttcagaaagcagaacatggtcctagacacatacatagtacgtgtgtgatcagtacttgcagggctgcactgagttgatatggacagtgccaaaaattagggaaggaaatttgatgcggacctagggaaactttattccaaaggcttcaagaggtgattgtagaggaggtgaattgggacccagggcaggtgcttaagcaggaaataacagagccaaatgtataaccacttacgaatgagagcttttagctgaaggatgaaaacataagggtggtgcacgtgtgtctgtgtgtgtgtctctgtctgtctgtccatcttcatttgtgacttggcaaggcacagagctgggcaggagtgagatggacagacatgcaatataggtaatgtcaaggctccattcttcagaaacatgaagctgatgaagttaccaaaagagaaggatttagaaatttgagg

SEQ ID NO: 37163 - DNA, 1030 bp, Homo sapiens
gtatctcactgtgggaatacattttaggatttactatgacctactggtttacatgaactttgctgagaaaaaaaaaagcatggagaagattgggatggaagatctctttattgtgtgtataaaagtagtaataggctattttaatttgtggcctggaatgggtagtgatagagcatgagttgaaatcttgcttcacgattaccctcaaatggagaagtaatctgtttcaaatggtaatcaaatgaaaaaaagctgtgagtagattgtgttagcttagccaccaaaatagagaatttctcagattccccctctgtctccagtccttattttctcctactgttaacagaaattcaaaccccagctgctcccatagttaaccagccgtcatgacatcgtcgtctttctgttcttagcaatttccatctggcttagtagaagtggttcctcactaccttgagcatagtcgtttttttttttttaatttttgtagaaacgaggttttactgtgttgccctggctggtcctgaactcctggcctcaagcatttctctcacctcagcctctcagagtgctgggattacaggcatgagccaccatgcccaggccgccactttaaacacttgaatactacatactttcactacttgattgatcttgcacataatcatcaaattacaacattcatgtttatggttttacttatttgtttttcacatttatgtagtgcctttttttctgcatcgcttaacatttgccaacaaatatctgcacgtgaactaagcaagtcattctgttagcacaatgaccttgagcaaaggcactttccttcttcatatgcatttgttagtctttagtcctaagtttttgcttttgtttagtttgttttttcactcttcacatacgagcagtcttttggaaagagttacttatagtatttctaacttggagaaacctttcatcaagttgaaaaagttcagtgttctgagcgattatgatagaatctcctgtcagaatatatgttccctttttg

SEQ ID NO: 37164 - DNA, 1057 bp, Homo sapiens
ttttatagactttcctttctcctgacactgtgaaatcccagtgctgtttcttatttgaatgttttatcatctgacacctaataataaaaagtcattggcacaataacagagtttcatctttcttaaagtttaaaaatgtttagaaattatttcatttcttaaataaaaattgcagtagaattaagtatttccctagagagataaagattgaaatttgaaagtaaattgctactaactttgagccaattaaaaaactttcatggaaatgatttttttcacattcattttttttaatgtagtgctaaaaccaaggagtatcatataaaacaggcccaaggcacgttttgtacctaagctaaaaattacttttgtggcctttgacatatcaaggaactttgctattataatgcaagcataagatgaaatttattcaaccttttgaaagtttaaacataaaaagtttaacataagaaactaaaaagtttaaacataaaaaacagttattgtctgtgcaaggactcaaattctttcactctcttcttttttgtttgtttgtttttatttttgagacagagtctcactctgttgcccaggctgaagtgcagtggcgtgatctcaactcactccaacctctgcctcccgggttcaagcaattctctgccttagcctcccgagtagctgggattacaggcacccaccaccatgcctggctattttttttatttttagtagagacagggtttcaccatcttggccaggctggtcttgaactgacctcatgatccaccctcctcggcctcccaaagtgctgggattacaggcgcgagccaccacgcccagctactctcctctttcacacacaatttccaaaatcacagcacagattgtccagaaaacatttgtactaatagttttgtttatggaatttgagttattccccaaagcacaaaatgtaaaaaaaaaaaaaaaaaaaaaaaaaattcttttatgtaaagtctaagagaacagtaaaaatatataatgtggtagctggtaaggaagaaactggttataattt

SEQ ID NO: 37165 - DNA, 1025 bp, Homo sapiens
atgtgcatttcagtgctggaagaagtatagagactttcacccaaagaactatttcttaggcagattccagaaagtgatgttggagtatggcacatatgttaccgaagagctggtgcaatgtggaaacactggagtggaggtcagaaattagatcgatgctctttccataaaatagtttccactttaagaacagtgtttttaaaaggaatatgttctttcctatgcaaagaggcagtgtggtcctagttagcagtatgttggaagcaaactttggataatgatgcctaattttactgaccgttttgagtattaaatgagtctatttatgtaaaatatttgatctagaggcctaacactgtgtggattctcaataacctaacctgtttacatgagttcttaaagttgaatatgagtttctactcacttttcaggttatcaagcatttggtgtgaaaggaaactgttctgtggcagacatgaaatggctgggaagtgggaaacgcagggacatgatgttcaaggagtggacaggtgatccagtgaggaattgggctatggaacatggaaatattcttagaaagtaattaccttatttttctccttttgttgtattaactgattagcttaatcacctccaaataatgagaaatcagtatacaagttctacaccttggcagagggcttggatcccaagacagaggaaggtatttgcagatgatggatggagaggatatatacagcaaccttactgaagtagctgggtcttccttgcctgtatgtcataccatgcttcttcaaatgttttatccagactaaaggatgccaggactgatttcccaaacattaggataattctaccacttagaggaatgcaagaaagctcccctgtctttggtgatttttttttttttttttttaagtagaagatgagaaatagcttgtatggaacagagaagtctttgtaccgatacatattcaactaaagatctgaaaatcaataatctcaggttttgaaaatagaatgct

SEQ ID NO: 37166 - DNA, 1056 bp, Homo sapiens
gcctcactcacatgcagatgattcctagatctgtctcctgaaggcagctctgtgtatccagcaccctactggacacctcacaagtcttaggttaaatgtacaaaactggatccatttttacctattgtttttctacctactcttcttattttctcagaggcagtgaatagcagcaccaacaccaattcttattttctttgtgatccctttgtctcctcccatatccagtttctaaattttatcaagttcactatagccttcatatcctcaaactaaccacttttctctccatcttcattgctgaaatctctcatctgcttttgccttctcccatttggcttgatcttatcattcaatacttttacatgcttttattgtcattctagtgaaattttgaagagagaagagataacttgtgatgaattcattgtgtgtacacggaagtctaagccagctttaaattaaagcattaatgttttggaaaagttagaaaatacaaataaacaaaaattttaaactaaaaaaacctgaaattataatatactgaacactgactcttaactaacatttgtctatattattgcagatttttccattccaatatgtatgtctattttttaaaggggattataatatatgaactgacttatattccagtttagtgtgtacctacttctttgttggtaattatacacctgcagtatcattttttcatgacattattatatggctgcaacacagcttattgaactagtgccctaaaggtagatgtataggatctttccaacatttcattattataatcaaagccttattcatacatctttctgtacttgtacatctagtttctgaggacagatttctgcatgtggaatttgtctcacatatttgcggggatgcattgttttagggcttttaaaatagattgtcaaatagctattgtttgggaaaaactctcaaaccaccttttctctcttctcttacaccaccacagtaacagtcgtcaacacggaataagacttctttgaccaaatgtgtgtgggttgctttccacca

SEQ ID NO: 37167 - DNA, 1050 bp, Homo sapiens
cctgatttttttaaaattttttttattttactgatttgatggagtcattgttgggatcaataaaataatgcgataatttcttcagaaaccattgtcatctttagatgtccttggtgttggacagtcttgggctttgtattgcaggttattattattttttatttagctggcggttattcagagccaagtctggtgaatattttgaatcatgttggttcccttccagatatggtcaaagatgaggtgatatctactaggcattgagactgtttgtcttgaatgtcttgttaactaactctctagataattccagtggaaatactaatgtttagcagtgacagtatcaattggaatattgcctatcttgacaatttttttagaccagtgttttggaagtcttaaatttgtagctcatttattgaaaaatcaatctacttgttttacttcattgtcattgctttgacacttataaagtaattattaaatgtaaggtgaatgttactactatgcatggattgtttagcaaatctcctgttcaaggagcagatttttagtcctgttgagcctgcccttcaggaagaaatgaagtgagtggggcagtgtttttgtgtttttcgggagggctttccttttactcaggtctgctaaaagaatgcaaatcgcttcaaaacagtcatcattctccctttctttgtggccttatgtgttggtcttaatctcctcctttctgtctttttgtttttgtttttttcctcagtaaagagagtcaggagcctgccctttcctccctttctctcacctcacctccagggtggcctgagaattgaggaagaaccttaaattctgctctttgttaagagctctgataactggaactgttggaatattgctaaaatgggttttggagatgttccctactctccctgcctgccatttccacagattactgaggattggctctgttgccaaatgaggctgatattgagcctcaaattttgacccatttttcatcaagtttgtcttaatatagaagttgcaagatttagtagt

SEQ ID NO: 37168 - DNA, 1042 bp, Homo sapiens
tgaggacagccagcctgtgaggttagaagcaagatggaatcagtcatgctagacttctctcactgtcataatctttgcaaaggtggtttcagatttttcagattttctgactagggatgcttaacctatatgagataaaacttaccaacttaaattcattggcttgcatatttttaacttgtaaaatgaaattagctttctatactcagttttcaaaactaatagagatgtcttaaaattgaataaaagaaagtaggaaaaagaaagaagtccgggcgtggtggctcacacctgtaatcccagcactttgggaggctgaggtgggtggatcacctgaggtcaggagttcaagaccaccctggccaacatggtgaaactccgtctctactaaaaattcgaaaattagccgggtgtggtggtgcatgcctgtagtcccagctattcaggaggctgaggcaggagaattgcttgtgagtgagccgagattgcactactgcactccggccttggcgacagagcgagactccatctaaaaaaaaaaaaagagtccagcgtggtggctcacacctataatcccagcactttggtaggccgaggcgggtggatcacctgaggttgggagttggagaccagcctgaccaacatggagaaaccccatctctactaaaaatacaaaattagctgggtgtggtggtacatgcctgtaatcccaggtacttgggaggctgaggcaggagaattgcttgaagctgggaggtggaggttgtggtgagctgagatctcactgttgcactccaacctgggcaacaagagcaaaacctcgtctcaaaaaaaaaaaaaaagaaaagaaatattattttttgttgtttgtttttcaacttgcatagcctgggttaaatgcagccagtgagtaataatgcaagtcctcaatcattcaagacaaaactaaattgttgtctttagtgatacaaaggagagtgaccaaataagagctagggaactgagagacttcatgggatgcatacaagcatggaacccataa

SEQ ID NO: 37169 - DNA, 1082 bp, Homo sapiens
tcccaaagtgctgggattataggtgtgagccaccgcgcctggcctgggtttaggaatatttgtatttcacttatataggggcaaagggaaaaccttcccttcacccttggaaggttcactgataaatcaattcaaaaaggcagatgaagagaaaaggcacacaaatatattaacttgcacacagggcagaaccacagagtgattacatacaccctaaaggggttcaggagctcagaagcttatatacgatcttgaggttaaaaaagaatgggaggccgaggcgggtggatcacctgaggtcaggagtttgagaccagactgaccaacatggcgaaaccccgtctctattaaaattacaaaaaaaaatctagccaggtatggtgacgtgtgcctgtaatcccagctacttgggaggctgagacaggagaatagcttgaacccaggagatggagattgcagtgagctgagatcatgccacttcactccagcctaggcgacagagcaagactctagctcaaaaaaaaaaaaagaatggggacttgggtcctggcaaaacaggttatgggatgggggacaagaggaattctgatgaagggcaataaatgattacttgggagaattaatggatgaagaacagagattaacttgtaaatagttctctttgggtctgctcaggtgtccttacattcttggtcttcttttctgcaataggtacaagataacagggaggagaagaaaaacagttgttctccttgtgattcccttggatctttaggtagagtgggaaaaaatctcttccagtgtctgttgttctccaagagcctttaattcaaaatactcattataccagggagtagtgttttggggtgaagttccctatgatccttcatttgtttgttaaacatctctaatctgagaatttgaaatccaaaatgctccaataaccattaactttaagcatgatctttgagtgtcatgtcagcactcaaaaagtttcagattttgaaatatttcagattttgtaatcacctaatgggttcttcttacccactgtgcagatgaagccaattcactgagacagc

SEQ ID NO: 37170 - DNA, 1035 bp, Homo sapiens
actaggcaacaagcctagtgattatatgggtatttcggtacttctaaatgctgctcatttaaaaaaaaatgtttacccctttttcttatttttagaattattcttcaaatcctgattgtttatggtatctatctagtaatgtggtggtttattaattttcctcttcagatttgccttagccatactgaagtccattccgattttcttgacgtgtaaggaagtgagagtgtcttttgtctattgcttaagttctggggaagggagcaagaacaagaggctctgggggttaatggaagggttagagaacagatggaatgggaaggaaaaggaggccttttaaaaactagttttcaaaagaccctggttactgcctctggctcatttttctagccttccctttgggagggtttgttgtgggtttttgttgttgttgttgttgttgctttggtttggtttgggtttttttttttttttttcttccacaaaggcactgattcccccagaaactctgacagaacatgctccttctgggtggtgtgggaatgtcaacctgagctggtaacaatgcagctagtagtgaagttatcataatagcctagagaatcgtggctgcagggcccctgataattctgtggagctgtatttgggactggaggtgagacagctctgtgtcaatgccttagaaccaggagagcctggcagagacataccaagctgaaaacaccaaagcacattcagacctcactccacttcatgacagttcatttgaaggtaataaaaatgactggccagggtgcacatgtttgcatgtgagtgaacagacacaccattttagggaaatatgtcaagcctaagctctctcttgtgctcacgggtggattctaaggtcaaatatactgatgaagattccatacacactattatcctcattgttgttatgatgtttcagtttcaacagagagctggatgcaacacagggcagaggcgacaaaggcggagcaaatccaatgccagaacttgagagaaaagtagagg

SEQ ID NO: 37171 - DNA, 1028 bp, Homo sapiens
ccttcactgttagatgacaaacttaggtacgtctcaactgggttaggaacataaaaagaaaaaaaaaaaacctgtttatctttttcagggtgtttcagaaagtcttatactttatgataataaattcatcaattttataaataaattaacatacatattttttcattaaatttagtagttaagatgccaatgcatttcattgacaaaaaactgtttaacaataaagaactcaatagtaccaaattcgtaaagaatctgatcttgttccttaatttagcctacatgcattatcttaaattgtgcagattatagaaaaaaacaacaacattgggaactataatagattattcactccgggtgtttagttctgttttgttgaagaaaagggagaaactttcttacatgtttgttacttctcttccccaagttaaggctagactttacggtttgtttagctgtgaagggatgacagacttgggggatggtgaggggagcttagttttggaatgtaaatacatgtagagcttgcctccttttgtttagcatctctttaaactaagacaaaaaaaatcagtgaatgaatgaatagcagcatggtgaaatacctaaatgtttgagttaaaatttttggatgtttgaaatcctatttggatccttttcccagatcacggtgcattcatatgcactcagcaggaaacttcatggagatgcacatttgggcagaaggtctttgacggtgcctttttcttaacttgtgccttttcttctttagaaaaaagtaatggcttaagtctgactgaagaacaatcttttttgtatgttccttataagaatttacttatggttcacagatttttacccaccatctatgtctgcaatccttggatttaaaatagcatatatcctactgcagactacaggaaacaccaaattaaagacttaatgacatactgttgaaaaagacaaaaggcaacaaattataaatcaatccactaaacctttaaagtgaaattcacagaaaaaaaaat

SEQ ID NO: 37172 - DNA, 1034 bp, Homo sapiens
gtcttctaaccatgatcttagactccccctggtttgggggagtttatcttgtcccaacctgtacacatgtaccatctgtacatagtagcttccacgtgtatagaaataagcagactctaagtatgtgctacttgcatttacagtggtttccaggtggctccttgtttgtgtcacattctcttcttaaatttaacatgttgacctaaatcatcctaatcttttcaaccatcattactttctagttttttcattagcttgaatggcactttcaacgttaatgtggctctaatattagaactgattttccttccattttagtgctctttgccctttagcaggtaggagattccttctaattctcatcttgatatcatggcacatctctgctgaaacccatcaaacccaactcaagagtttatgtaatcttgcatctgcttgtttgcctgcctttattttatcccactggttctctctctgttcttggcacaagccaaactcactgctgcctcgggacctttgaattagctggtgatgcttcccagaattaccttgcttcagatctttgtatgtctggcttcaactctcagctcaggtagctttctcacactcctcagtcactccctatcacatctctctgtttcagtgttcaaaatgtaaaaatccaaagacataaaattgaaaagacttttaaattctgatcttatgtccttccaacatttccattaatgtcctttctcttaagaaatgatagttacaatatgtagtaatgtgttatttctatggagcagtccacaaccttttatttattttttaaaatattatcccccctccaaaaactctgtgttgaagcccttatgtgtcttatacataactgctgctttggctttgcttgtcgtatagcaggtacttttccacttatatcctgactcactttcagaagtccttttttgaaacagggtgttgctctgttgcccagactggaatacagtggcacgatcatagctcatggcagcctcaagctcctgggttcaagt

SEQ ID NO: 37173 - DNA, 1048 bp, Homo sapiens
ttgattctgaaataattaggtttttattagtctgaaaatagagctcatcccatcccttttatccatctgccacattaagtatctgacaatctttacaagtgcttctcattcagcttatacaaaaatatagttttttttttcccccaagtgagttcacaggaacaaagtatggatttgaaggaaaacagagtcctacgcttggtataccctcagcgtttttatcagaggggagtaaacactgaaggaaatgaggtgtttgccttcagtcagtattggaatatgtagaaatgtagaagtagaaattggatggactatatcttttaaatctgattttaaataaaaagcatttctatttaacatattgatattattactggtgccagaaatgagactataaagtaatttattggataaattttatttgaaattttaaaaacattgcaaataatgtgtagtcacttttaaacatgtaatttacatgagggatatttcattttgaataatttgatgtttttctttgattcccagaatgtttcttatatctgatcaaaatccctttttttttttcttttttacgaagcggggtctcactctgttgcccagactggagtgcattggtgtgatcttagctaactgcaactttgaacccctgggctcaagtgatcctcccacatcagcttcctgagtagctgggactctgtaggcatgcaccaccatgctgagtttttctttttttagaaatgggatcttgctatgttgcctaggctgatatcaatgtcctagcctcaagtgatcctctcacctcagcctaatattaattttatttttctcactttataagtaagtagttgggagactttagctaattttttcaagtaatttttcttaactcactgtttaatggacttgggttttaaaaaatagtcaatttctattgaaagaaacatagttcaaatatgactctattaaaacaaaaaatgtatcggaaatagactctgtattggaaatagacactgcattggaaatagctctcatatttaaaagtggg

SEQ ID NO: 37174 - DNA, 1034 bp, Homo sapiens
ttaagttacctaaagtcaggtagctaggaaatggcagagctgagctaagaagtcaagcagtgaagtgagctccagaactcattttcctaattacgctgccatttggtcttcaacaaataaaaccaatattaacatattgtacttactaagagcctgttcagggtatcattacattgagatggcatgaccctgataagcatttcaattttttgtacttggaaaattccaattaggataaatttactgcagaatctcttgtctgctttgttttggctaattctccagtctgacaatttgctgcctattaataggatttatctcacctcttttatctgttggtcactctacaggactgggatctctttcactagggttatgtcatacagtctttcattcttccaacaaattataagttagagataaagaaacagaaaagagattcagttcttccccctcaaaaagttcacctagattggtccaaatggttgtggtcgattttccataaatgttggatacgttgactttctagagactatttctgaggtctctgcagttgtccatatcagtttcttgaattgtgctttctgttccttggtgctggtgcaatagaacccactgattgggtcttacttagcttctaaaacttctttgttctgctttgttttgtcttaattcacagtcttctcattccacactctgccttcactctcattttctctatagtctgttaaaatgggaagaagatagtttggagtgagccatcctcagttcaaatcatggctctacgacttttaaattatgagactgtaggcaagttcttggaaccattattttcttatcctccagctctttattgaagattaaatcagagaacaaagtgtcaagacatggtctctgtctttgaagtgctgacactttagtgggagagatagacctacaaacaaataattaaaacagcagtgataagtatcataaaggtggtgtgtgtgacatgctataaaaacttacaggtgagtagtaagtttttggtgagt

SEQ ID NO: 37175 - DNA, 1831 bp, Homo sapiens
tttttttgagacggagtctcgctctgtcaccaggctggcgtgcagtggtgcaatcttggctcactgcaacctccacctcccaggttcaagcaattcttctgcctcagccttccgagtagctgggactacaggcgcccagcaccatgcctggctaatttttttgtatcttttagtagagacggggtttcaccgtgttagccaggatggtctcgatctcctgacctcgtaatctgcccacctcagcctcccaaagtgctgggattacaggcgtgagccaccgcgcctggccggtagctcttattttctaatcagcttccactttccctgacacagttcagtaggaggttctgaacattaatgtaccaaaaagtgcttctgaacaatagtgtaccaaaaattcctttgagacttccaggtttcctacttgaatgcagaggttgggtctggctttgcgggggggggggggggaaaggcggtggaagagagagagcatctatacttgaaaaaaaaatctgatttagactgaactgtaactgttatttatcttgcctgtgattacctgtcactttgaaatcttatgggagtgatttgctcttctcctttgaaatttgagatgttcaatgtgtatattttcaggcttctcatcattttttctaattaaaaacatttatttattggtatatctaaagataccattttaagcagacatgcacacataatcatacttagtccacttgctgttgctataattgaatacctgagactgggtaatttataaacaaaagaaatgtatttctttttttttttttgagacagggtctcacgttgtcatctaggctagagtgcagcggcacgaacatggctcactgcagccctgacctccctgcctcaagagatccttgcacctcagcctcccaagtagcagggactgcaggcatgtgccaccacccctggctaatttttgtgttttttcatagagacagaatttcaccatgttgcccaggctggtctcgaattcctgagctcaggagatcctccctctttggcctcccaaagcgctgggattacagacatgagccattgcacctggccaagaaaagaaatgtatttctttttctttttttttcctttgagacaaagtctcaatctgtcacccaagctagattgcagtggctctgtgatctaggctcactgcaacctccacctcctgggttcatgtgattctcgtacctcagcctcccaagtagctgggactacaggtgctcgccaccacactcagccaatatttttttgtatttttagtatatacagggtttcaccatgttggccaggctggtgttgatctcctgacctcaggtgatctacccacctcagcctcccaaagtgctggaattacaggtatgaggcaccagacccaaccaagaaatgtatttcttatagtcctggaggctgggaagcccaaggtggaggagccacatctggtgagggccttttgctggtggggactctttacagagtcccgaggtgacccagggcatcacatggcaagggggctgaactgagagccaaaccaacttttttttttttgagacggagtctcgctctgtcgcccaggctggggtgcagtggcgcgatctcggctcactgcaagctccaccttccaggttcacaccattctcctgcctcagcctcccaagtagctgggactacaggcgcccggcaccacgcccggctaattttttgtatttttagtagagatggggtttcaccgtgttagccaggatggtcttgatctcctgacttcaggtgatccacccgcctcggcctccca

SEQ ID NO: 37176 - DNA, 1028 bp, Homo sapiens
actttgagcccttgacattttaaaataaatgtacatattgttagtgacagattgctaaacttggctttagacacttagctatgtttcttgccaaaagtaatccagatgtgcataatttatccgactgccatatgtgcactgacatgtcgttctataatcaactgttcagtatggttacagttatatgttcttttttatcaacaatcttttgaaatatcactgacttgataacttattttaagttttaacaacttctcaaaaagtaatgcataaccaatttggctttaaacctgagtgaccagacatgttgagtgtctagaaaagacattgacaatccacattccctgagggccatatgtatttcaagggggaaaatctaggataccatcttcagcgtgattctattttgatgagtgtcttaggggtatagaatagaaggtgtacccaattaaattttgttgaaacaaaaacaaagtaaagtctctaaccaagtaatttgttttggaaagggagtgggaaaaggaaattttgatacatatgaaataaatatgtggaaagaggatatttcattttttccctaatgcagtatcttctgtgttgtgtgcaggcaatgcttgtgacattcacatggggtatggcactgtgctgattcccaagctttatctttttgtttaagaaaggcatttttttccctagagaatttgagagaatgtatgtatgataggaaatattgcttgtctattaccatttcttaaattgatacttaaatatctcggagacatttagaccacatgatgatagcatttgtaccagcgctgagagatagttaccttgaaactatgtccttgttttttgtgcttagtgacactgagccaccatcaagtctagacaggggtattgccaaccatgtgtgtccttgtttgtgtttatccacagctgcaattaggtttttcacactgtccccatctgtggaggctagctgtgcagtgaccttggccagttcaaaatctgttcaaccaagcccgtgt

SEQ ID NO: 37177 - DNA, 1815 bp, Homo sapiens
atcatttatttttatataaattgtaatttaaaattgtaaaattttaaatacttgctattaatctgtaaatatcgtttactttttaaaaataacagtaaattaaatctgatgttttagtgaaatgcacaaaccactgaattcttttgaattaaataaggtattgatagtaattcatttaaataattatttcccccttttatcactttagttaagcgatactttactactaaaacaagcatgttatttataatagcacttaattgtaataaaatttaatgattattttaagctgatttttatgctatcaaggtttagtaggatagtgagttagcttatatgtgattatttttatttatgatttaatattttgcatctattaagatgtttttggtagttgagaatgatgctcataattgttttgtttaggaaatgttcagtcaatgttactttagcgagaatagtcattttagctattaatgttagggaggtcagaaattttggaggatactcctgtcttatgccatcccatgaagtaaggatagagtcagggttgaatatttgccatgggccaatgcttttaaaactaatgtgtggagtactagtatgccttctcatatgtgtctaaatagaaatttaaaataaaatttaccccgaaggagttactgagcttcctgtgtgtatcatttagtgacttgaaggttttgtgtgtggtcgttcgtgttgtttcttcactcatatggtgttggacaatgaattatatacagagagtgtggtactgctactgtctgacttgtcctgggttctacactttgcttttattcagaccagcctgtggagtaagcacaacgtatatcctaagcaaaagctattctgagggttttcagttgattacaatgtaagcatacttaggagcagatgagattcagtaatgagaaaaccccatcaatttgggtgttaggaataactcattgtgcttgctttttgttaaacttaagagcatattataagtaatagacaaattaaattcaattcagaagactcttgtggggacagttcctttaaatactggaaatgctgttatttgaaagaaataattactttagaatttacttaaatttattgtaatcaaattagcataactcaagaaagacattgtcatcacacatctttcccataacgctttattaattacatatttccaaaggaatggcgtcttaaggtcccagaatccaccagagtgttcacaaaaacattgtaaaatatcccttgaaaggtagttaaaaatcaggtcatgttagagctgccttacatacctaccctttcctgagaaaacctcacatctttgccaaatgacagacagcttacctggattaaggttcacaacttaaaatagaatattagaaaaagagactgacgcgacttacctattattaaggctagctgttgttgtacacactccagattttatgtgtgcatgttaattaagtaatgagaaccccagggcaacatttagtatacatgtttgaacatttttccccttagaacagtgagcatcatgtttccccgtataatggctgacatagacaaccaaattccttcagaccttttcaacacttgtttggaaggtagattgcttccttttgagttctttacatttatggctcagtgtctgcgttcatttttctgggggaatgcttccataaatttcatagccactgctataatctctctagtgattaatctctgaaaagtttaatgaactgtctaaagagggtgattttctacttgggcctggtaagacactttttacgttgc

SEQ ID NO: 37178 - DNA, 1045 bp, Homo sapiens
tttcattatttgtttttatttatactctagttagtcaaaattttgtcatatgtttctttagcctggtaaagccgaactgaaaaatatatgttatttaaagttgtatcatatttttaagatgttaaaggaagagttgtggctgtaatttgtgggtttactttcaccacaattatttttagaataacaactcttctctcactcattttgtttacaaatatgcatacatttgtaaagaattgtagttgagattgcttgatccatcctctgtcaattaagattgtatgactaactaaggttctatagaaaatgtatttctatcattttcatttggatccccatgtgatattacataatttttaaatcttcaatcttattttaataatcagcctgaatgattaataaagccatgtggtacaattttacaaaaaggtatacagtgaaaagtagttcacttttctagtcaagtgccctgttcagctctaatttacaattctcagtctgaaaccaggctgctttattactaaactttgaatgtcaaaaggttagaaatgccaacttaatgaattttctttagcaacaaaatgaaacatagactatatattaatatagtccgtatttgaattcattaaattccttcaaatttagtgattttcttaaagatggtacttctaaaacacttttaagaaaattaattttaatagtttaatctctaacttgttaccaaggtatgaatttttagcagtttactgagtcaaatgagggagaggacttagaggaaccatgtgcagtaatttcacaatttatttgtgattgcatgaggtaaacatctaagcagtcataccgtgtttattatgaaaaatttcaaacatataggtaagtatagaaaatatcagacaaacccatccaacccattacccgtgataaaatgttaacattttatcatgtttgtttcagatcttttctttaatgaaacaaatcatgaaagctgcatttaaagccccttcctttcccttcctcatcattttcccatcctttctccttcaga

SEQ ID NO: 37179 - DNA, 1026 bp, Homo sapiens
atctaatttaaatgataaagctataaaatgagagaaatcttaagggtaaataggttggtttctcatttgtattgaattgtaattgtaactaatttgttttacaactcccataggagagcatacttcagttctgaagttatttaatagatcaggagggttttatgagaagttaagttgatatagtagccaataaatgtaatcctattttccttctacacagttgctgattgtgattcttttacctcctggtttttaaaatcttattttcattttactggacattgtgtcttataaaagaacacgttttgttaacatgaaacagtctatattttctagcaatgtcatctgatttgatgtttgtctatatccttaatccaaaagtatttaactttttcagaaatagtatatcaaaagtacagtgttaagtatttgttgaatattttctattaaagcaaatactaattgagaaatatgaagactgtgaaacagagttttgaggcagaattataaggttgaatggctctatttgttccacggctcattaacacaggaaaatacagcttctaaattagggtgtcaacattaaagttaaaatttgtgatcaggccatttctcaatttttatgcaattttaattcagtttgttattatgacatgcatagaactttgtgttatgtttgaaaaacaagatataaatgcgagaaaagtatttgcaagtatttttgtaatgatataaacattactggttttttagaccatgttttattttggttataaatattcagatttttttgaacaatgcattcattactctgtgcatgaagagtttatttaattttcgctttttagtattagacatcttctggaagagggtgctagtgtgtttctatggtatttaactatcacatttaattataactacttatttataggtgattatttctaccttgtgtactttttttcctttctacaaaggatcagacagagttttgaaagactgaaattcttgggcaatctgtgtctctag

SEQ ID NO: 37180 - DNA, 1034 bp, Homo sapiens
ctgaaggatcacttttcaatctaattatcttccatttcttcaactatttttcctatgatgtggtctccaggtctatcacgatcctccttgtctcctggagaagtattaaattgtggggtcccttgtaaaatatgtgcctagaagcatgatgctatagatgtggtctgaccagtgatattcatctctttttaggtttgctttttcttttcatgccaacaacacgaatcatagcaccctactggcccatgttggataagctgtcaaaacatccagctgtttttagtcatgtctttcccattgtgttcttcagctgattttttttttattccaagtaccagacattacttatatctctattaaatttcattgtgtaagtgctggctcattgttccagcttgtcaagaactttttggctttttttcttttatcatccaacatattagcaattcctttcagctttgagacatctgtaaatattaaaataatttcttcaactttttaattcaattaaaatatgtaaacatgtatcagactgtctactctgtgctaatctcaggctccctgctagaaataacaagatggataaaatgtaatcattccagctgggcgcagtggctcacgcctgtaatcccagcactttgggaggccgaggtgggcagatcaccatgtcaagagattgagaccatcctgtccaacatggtgaaacctcatctctactaaaaacacaaaaattagctgggtgtggtggtgcgtgcctgtagtcccagctactctggaggctgaggcaggagaatcgcttgaacccgggaggcagaggttgcagtgagccgagattgtgccactgcactccagcctggcgagagagcaagactctgtctcagaaaaaaaaaaaaaaaaaaaaaaaaaaaaaaaaagctaatcattccttcagggagctcacaggctatagggaataatagacatgtaattataaaactgtaatggagtgtgataattgctatagtagagttacgtgtgaagtgctgtgaaaacca

SEQ ID NO: 37181 - DNA, 1062 bp, Homo sapiens
cagtcgaagatgctgataacaattctcttgtttaagtataacgtaactagtttatttttatcttgaaagtcatagtatctatcttgctttggcccctacaaatcgtagatcctacctctaacctctgtacaggattatgtagcattgttcactctatttttctttcatcctgggttcttcaattattgttttttgttttttttttgtacagtaaacatttggataagtctcaaagctctttgtgtgtatggtgtgaggcagggtatatacataaaataaaaaataactaatactaacttgacaaagttcctatcactctgatgttttccttgagaagcattacagtctggtgtggtaagtcctgtaacaagactgagtataagatgcagttaggatcatataggaaggagaaaggagacttcacagaggaaaagagtctacgaaaagggacagatgagacaaaagtcatggagatacactaagtttagtttacagatgaaacaagattggagatttatgaatcattgaaaaacaaaccataatcttaagggttcactgtactatagtataaaatatctcagcagtttcaagctggagggaaatttgccaaattatgacccaagatgcaagagtaatgctagacacttcacaagcaaaaggttgttttgttattgttatttaattcacttcagtgaatatttaatgaataccaactccatgccaggccctgaggatgcaatccctgccatgcccaggtgtgggtgaacacacacacacacgcacgcacacacacacacacaccatcctctgagactgtttctttgtatacttcggtgggagagtgatgttggccataatgattatggaagttctcagaaaaacataaaactagattcccataaatggaatggcaactcgacaactgttgaagaggtaatatgcttatagctatttatcacttaacagactagattgattctctgacacgttcaaagctgattaaaatagatctgagtagtgttcttttgaggaatcaaaaatttgttgcatttaatttcttgc

SEQ ID NO: 37182 - DNA, 1049 bp, Homo sapiens
gctggagatttagatttttctgagccagttaattgtggacatcaagacccttcacctctaaatacttagaggtattataaataattagaatattttctcagaacaatgatttttcttacataaccacagtacattgattaaattcaggaaatttaaccttatacagtactcttatctaatatgcagtctatattcagtgttcacttattgtctcaataatgtcatttatggctttttttttccccttttgatctaggatccagtccaagatatattgcattttattattatgtctttttagtcttctttaacatggaacagttcctcagtctttctttgacttttaagacattgatattttggaggagaacaggccagttgccttatggaatactccttagattggctttatctggtttcctcatgcttagattcagattgtgtggttttggcaggcaagctgtgggatgatgtcatgctttttgcagtgcacctgccatagcaggaagggaggcatgaagtagaaaaacatttcataactaagaatgttaactttgatcacttggctagagtggtgtctccaggtttcactgttctaaagttaccgttttcttccttataggtaatactttattcaattacctcttaatacttactcagtcattttaaatgtgactatggtttatttccatactgtcatttaaaggaacatttttttccccttcttttggcagtgttttagagcactttgctgcaagggaccaccacctgcacgaccagaatatgacctggtttgcataggcctcacaggttctggcaaaaccagtctgttgtccaaactctgcagtgaaagccccgataacgtcgtgtcgaccacaggtgggtactgtgctggggttctgtcccttcttctttctcatcccaagatgtcctagtttcctgtgcaatttatcccctcccttctacttatagtttaatgctttaatcagtttattttaattttaaacactatctctttttcaaaaaagatttgaaatgaatttaatagc

SEQ ID NO: 37183 - DNA, 1032 bp, Homo sapiens
gattttaagaaggccacagtctggagttaatgtaattgccaaggggataatggagattcatatttaggcaatataggtacagatgagcaattcgaagcagtgtgcatctgccaaaagtcttaccttatttatgacagtttaagactggcttctcagcagaaacgtgcagagggaaggaaaagtcaaagtcctaatttctgaaaacatgggcagtgcagaattcctgcatgtctcctgtgggaattacagcaaatagaatggagtctggcgtagataatagttatatgtgatttgtttttcatcatgtgtcttcatggatggaaaagttcagtcttgtcttcaccctcactgttattaatataattatcacaaaaagatattttgtggtttggttaacattttacaaacacagacattgatttcctctctcgaaaagaaaattgtatataacttaacactatgtcctttaccactcaaattttcaaagttgtttaggtagcagcttccagatttttggattttatagaaccataatattaaaaacaaacaaaaaaaccttggcggggtgggcaaaggtgggacttagtttgccaataaggacattagaaaaacaaccctcagggactattactgagttcatttcatgaccttaataccctcctgcccctgcctgtaggaacattataatctttgaataaataagtccttttaaattgaaaaaaggtagttttatgggaaaccaaccaaccaaccctttttgttcttggttttcctcagttcactttggattactgaaaacattattgaccaacagtgagtgattccttgtatggaatagtactagctgatggttctacacatacataaaaatgttgtcatgattaaaattatcttcaagaatcttaaaaccagtgttactgaggggaggtagaagcttgtgtatgtgacatggagatctcccaaaatataattttataaaattgactttagtcattggatattttctcatactttcaaagactttatataagg

SEQ ID NO: 37184 - DNA, 1032 bp, Homo sapiens
tatttagcctctctctctctctctctctctttctctttttatatttaccaccatcattctagttaatgtacttatatagctacttcttgatttttcaggtttaggcattgtctattggcttctgctttggaaattgaggatttcgctcttttctctctccattcaccccaacacacatctttacctccccctactccttcattctgcccatatagttaatgttctcattttgggtaaatccatgtgtttacattattatgcctttataaatgccattcattgctgtcatattatgatttcttctttattaaactctactttctcttgagttagtcattgtcctattttgtcatttacttagtttgctacgtcctcatcattcagtcaatattctgtctctcttgagttgtataaatctcctcttcataatttcaaataggtgtgctataaaattgtatctagttcatcttcttggtgacattctctcagagcttctgatctacgccaatctggactggttgttgaccagccctgctgcatggctgtcgtcactggggggccccctgaattatcatgttgaggggaccctttcttctgtaagatgcttgctggcttccaggtctttgtgttctttagcttactccaaagttcatgggaagtcggtttttttgagattttgcttattggactcatgactgatggtttagttggtatagaactctagcttggaaataattgtccatcatagttttgaagtcatgatgccatttatttctaagcttctagctgttgctatccagagcagcatcattgttttgatcctgaacattttgtatctgaagtactttttctggtggtggtgatgattttgtttttaatcctgtttggcaattccagtcttctgaaatttcatggtgtgctttggtgtgtgaatatgtgtgtgtgtgcgtgtgtgtgtgcgcatgtgcatgtatatatgtattagattttcatctcattgtatagttctgcataccccaagtttaaaaaatt

SEQ ID NO: 37185 - DNA, 1050 bp, Homo sapiens
tgaatgcagccaacattcaaggtgctgctcaagtgccacagcattcttataacctgctcctgacatgcctccagtactcaagtcaaggaagctcttcccaaccccggcgctctcataattgccatttattctcagtattcagtccattctgccttgtgttaagtttgttgttcagacagaccgtggaggtagattgtaaatttttcaagatgaccatgttgcaagtatttttatgccatttgattgatacatagtaagttcttagtcatatgctatttggatctattttcttaaagctctgatttgagaatcataaaattgattgttattttattgttattttcatatttagataatgctgttaccaaggttatctgtgaaagccccaataatctatctaatagaagtttatgcctagtgggccaaatagtttgtcaattgtcaatcaacctgtagacccttttctatctctaaaatgacctatttaaagaaactctgggatcgcattcaactttagctcctaaaccacagcctactgtgtgcgaactctaaaacgccacaagaaagctaccattaaattattgaaaatattctttaataaagaattttagttctttaaatctctgcattttaacaaatctgaacacaaacatatcctaggtggtcttttttaaccaagccgttttggacataatttttttacatgatgtaaattttaataaaaaatataagtagttttttttttacatggtgggaggatggtttagtgttctcatgaaaggaggagggaggacatttacccttccatggtcactgccttttaataacatgatgcgtgataattttaaggcccagtttgactatcaagtaacttgtctccttgccgaggctggcggatcatgaggtcaggagttctagactagcctggccaatatggtgaaaccctgtctcttaaaaaaaaaaaaaaaaaaaaaatccaggcatagtgacgcgtgcctgtagtcctggctgctcgggaggctgaggcagaagaatcactagaacccggga

SEQ ID NO: 37186 - DNA, 1019 bp, Homo sapiens
tttccactctggaggagtgactaaagcataattgacagacgcgacctttactcagaaaggattcgacccacgcggcactttagcgttcccatgtaccttggaacgggtcgtcactctctgtatcctccatttattgcatctttgccttcagcccatttgtctgctattgagaggaaatgctggatctttgttaaccttatttggaaatagaggacccaagctagggcctcattcgaaggggttttactgctcccgtatgccctttcttgttttaccagttttaacatactgcttgcaggactctgaagaactggcttggctgttttaactttttaattttcatcaagcagaattatagaggagaagataatataactgtcatcttgctttgtatcaggatgagggattgcacaggacatcaaaattagaactgtcaattatgttaagtataaaaaatagctctctaaaagaatattgtgtttattagccctctgatggaactcaaattataccttgataccattttttggactgtatagtaaataacgtttattttctgccatcttgttgaagttttgttttctcctttattttcatgcttacctttgaaatttcttagggaaaacaacaataaactgtaagtaatcacattaatttcaaatttagtattctttttctgtcttaggcattctttttctatagacctctcttaaacagattgtaaccaatctgtcttgtttttgacatcttttttgctgttttattagatgaggcagcaaagaagatgagattcatctttgaaataatattctttagttcttcctcagggaagtctagatgtagatttatgaatattactgtagaggctaccgggtcagagtttatctgagatagaaactcattcttttattggaaatagttaactacttatccttcattccaagttatgccttatgtctcatgggtttacagttaaaatagtttcttgcaaatatagcatctatatagggaaataatat

SEQ ID NO: 37187 - DNA, 1026 bp, Homo sapiens
aattcttaggtttttggtttgagcattgttttggttatctgagtaatgaaccaccttaaaacaatagtttaacacaataacaatgtattttactcgtgaatcggggtttgactgggttcaactaggcagttattgttcaggatccctcatgaagttgtaatcagatggagggtggggtcacctcaaggcttcatacacatgcctggcatctgagctgggtacattgcaacagctgggtgctggacaagggtggccccctggggcatctctcttcatgtggtctttctatgtgatggcctcaagatagctggacttctcatattgaggccgaaggcttacagagcaaacgtaccaagagaaactggcagaaactgcctggtcttttctacccaatcctcaacagtgattcagtgtcacttttactgtgttcttttcatcaaggcagtaaaaaaggcattgctaggttcaagggcagaagggagatatctcttggtgggaggaaggttgaagaatttttgggcatgttttaaaaccactgtaggtattgaggtgggtaatggggtcatgcactatgatctgtaaccctgaagaaatagcaggtttggtgggaaagggagaagtttgactttagagtgactgagtttgaactgcttgtgcagtaattcaacttgagatttcacataggtaaatggaaactcagaggtgaggtttggagatgtagttaaaactaatacctagggccaggtgcggtggctcacgcctataatcccagcactttgagaggccgaggtgtatgtatcccgagatcaggagatccagaccatctggccaacatgatgaaaccccatctctactaaaatacaaaaaattagccaggcgtagtggtgcacacctatagtcccagctacttgggaagctgaggcaggagaatcacttgaacccaggaggtggagattgcagtgagccgagattgcgccactgcattccagcctggcgacagagcgagactccatctcaaaaaaaaaa

SEQ ID NO: 37188 - DNA, 1104 bp, Homo sapiens
gggggctatttcttcaatttagccccttttcctttatcttcaaattgctttccaccccttcttctgtgagccttttcttcacctccctgagactacaaagttttagatgtcttcaccaaccctgtggtgttatggcagctgtctgtttggtcttttctctcctagaatcaaagtcccttaagccccaaacttaaaacataaaggatatcctaaaggtaaacatcaccttttaattgcttgtatcctgtgtactttgaaaaatgcccacccttcctgtgctagttttgctgatcagcacatattaaacatagaaaaacattttaggcaacaattttagattaaatgaagttgccattaataaattctttcaaagttctttaagaaattaagatgagatttccagaaacaaataaagaaggtacttgcaatctaggatcaagatttctgtcaattctttctcaatgctgaccatcctcattgagtaaaaatctccagagaaaaaggagagctactatggaagtagatgtagtgaatgaaaatgtgttcagacacatttttctggctctcaaattttagacattcttatgttttgaggcacctgaagtctttgggtgaggagaatagctgattctaattcttgactttccagtatcttttttttttccctaaggtaatttgggctatcgttagccaaataatcattagcatcctgtcaatttttataggaagcagtaatataaactacaatgttatttggaaattcctctaatcaatttgattatttgtgtttttaacataaaccaatctaggatgtaaagcaggagttaataaagttggttaaggcagcaggattttcatcttccacaacttctaccagctgggaaggaaacagagcctcacagaccctctcattccaagaaattgcccttcttaaagctgtactggtggctggactgtatgacaatgtggggaagataatctatacaaagtcagtggatgttacagaaaaattggcttgcattgtggagacggcccaaggcaaagcacaagtacacccatcctcagtaaatcgagatttgcaaactcatggatggctcttatacc

SEQ ID NO: 37189 - DNA, 1033 bp, Homo sapiens
actcgaggtcaggagtttgaggccagcctgggcaacacggtgaaaccctgtctctactaaaaatacaaaaattagccaggcatgatggcaggcgcctctaatccctgctacttgggaggctgaggcaggagaattgcttgaacccaggaggcggaggttgcagtgagctcagattgggccactgaactccagcctgggtgacagagtgagactctgtctcaaaaaaaaaaaaaaaaaaaaaaaaaaagagtgaatgcaaaataaagatatttcaaatgaaaacagctaaagatgtatctgttttgtgctttttaactttggagagtagggaggaggaaaggaagaaagtcaggtggtgggaagagatcagagatgatcagctgggttctttgtgatttaacctccttctgagccccaaaatactaaattaagatatgctttatatgagttgattgcttttgatgctgatgaaggatggatttgattgtgtctttgcgatttatgaggctgaacatggatgtggatgttggagcacagagatagaagaatgctcagtcgaggagggaactcacatgcatgggggcaggcggatgcaggcagatggctatgaatgctctcaatgccatgatattggggatcaggccaagtttaatcagctctgagaagggggtgccctggctggcaaatgtgaggaaaaaaacatcataaagttgccatttgaaatagaatcccaggctaggcgcggtggctcacgcctgtaatcccagtactttgggaggccgaggcgggcagatcacctgaggtcaggagttcaagaccagcctggccaacagggcgaaaccccatctctactaaaaatacaacaattagctgggcgtggtggtgcgcacctgtagtcccagctactcaggagggtgagacaggagaatcacttgaacccaggaggcagaggtggcagtgagccaaatcacgccactgcactccagcctgggtaacagagcgagactccatcacacacacacacacacacaca

SEQ ID NO: 37190 - DNA, 1024 bp, Homo sapiens
tagctttgaacttcataagtattgttttacttctccaaacatttttatttctttgataatttatcatatcccagaatctaagtaaataatgcattataaatagtctcagtttaaggattaggccacacttggcttaggtgtaaacttcatgaaaggttaagaattggcataaatggctcaaaggttagggtaaggaattaaaatgaaacaaaagaatatggttatcttgtgtggatcaaatgggcagacacatctctgcatttaattcagaagaattgatttagaacttctttattgtctgcttctctcagcgatgtgagttgacctagcatttgctggctttagagactcccctgcattcccattattaatggttaagtttcagcttacactacttctgaagatcagcttttaatctgtgcccagtattctgaatattcctagcaaactcattttctgtcatcactggcaagagccaggatttgggtggccataaactatgatgattatgactgggaagactcacaaaacatactacctgtttctggaaaatagttcagtgcctaagaacagctcatacctgagatgtggaagtttcaactgctgaaactgtggttgattaatatacttgatatgttttcaagaatcaaagattaattccaaaatgaaatgttagataagttctttctggctgctgatctgtgaggaattactgggaccccttaatggcctaaggaggcaatgtgtactgaaatggaaagggttcctctgttggcagtcagggataaccctaagcaaaactgtaaaggaatgacattcttggaagtacatatagtttacctctcctgtgacctgttctcagaaaagaatctgactaattcattcatgttaaggactataattagaactgtatttttatggggcttaacatgtataaactaagggcatttgctgtttacccaaggcagcacctttcactaaaatttattgaccacctactttgtttaggtcactctggtgatat

SEQ ID NO: 37191 - DNA, 1051 bp, Homo sapiens
gataaacgaagaaagggaactctttcacttttgccttaatcttcagtaaatgtcaaagttaacatcaagtatctatttaaatgtttgcatttctccacacttttgtacactgtgtctggtgaagtaagttgatggtgtgcactaacccttttggaatagtttatcaaggatttaatgtttgtatcttttaattccacatacatatatatcttaaggaaataactagaaatgcaaacaagaatttgtattcagaaatgttcactatagcatcacatagggtaatcaaaaaattaaaaataacctacatgctctcaaagtaggaggaatggttaaattatagttgattttgctttgtctctcttggtttcaaggagtagaaattctaactagattaagtaaaattgggctttgttgaaaagggtaaaaggtgctctaataaccccaaacagcaagatcactgaggccttttggcagtggggagccagagctactttcccatttcacccggttcagggaccaggctagtcactgcttcttcctctgtagacctgctttgttctcagcttcttcttcagccagtcttccttgtacatggctcagtgttgtttgccaccttggacttactcagtttttgttaaaattcacatatttccagaacaggaatctgaaagagctgttctttttgagccttaggtgggtcagtgaacaacctgtggtttggtctttttcttcatccccttccaggggtctgtatttaggtttagatagttagtgaaaatgaaatggcactgggtaatgacattgattcaatacatcttggctaggcacactggctcacgcctataatcccagcactttgggagactaaggcaggtggatcacctgaggtcaggggtttgagactagcctggccaacatggtgaaaccccatctctactaataatacaaaaaaactagctgggcatggtagtgcacacctgtaatctcagctactctggaggctgaggcaggagaatcgcttgaacccggaaggtggaggttgcagtgagcc

SEQ ID NO: 37192 - DNA, 1055 bp, Homo sapiens
gcaagattatgcagggcatgttattaggtggtaattagggaaagggaaaaatggaaattatattttgcagatacaacaaaggctgaagaggtgtgtgtgtgtgtgtgtgttttagatacacacacatctatatgtacacagagacacgatccacagttgtgtaggaataacttcctaaacatctttaggatctacctctttttcctgttcccactgttatttctttgtttcaggcccttaacatctctaatatacactagtatttctgtcttcacactgttttttttctttacacagctcttttcatagcccctccattagcacacagattggaattgtgtctccttgttacccacagaataaaacccaatgttcttaatatgtagtcttaatatagactctataaatagcccctttgttaatctatcttgaattactcacttttaggtttcagctccctactgagaccccaactggctttaccttctgttccctcctggttctgcttatcttccattgcccctgtggacctgctttctgtcattgccttccctgccctcagtctcaggagcctgagactggcttctagatgggtttggacaatggatagcactggcaggaggagagtagagttgctgtgtttattttcctggtttcctcctgcaagatcatgtcatgttggctctcccagagggcatggctcatatcatggggccctctttgtctttccaagtctgtagatgatagcagcttcaggaggttgcactatcttttgactgtgcccacacccttcacaccttgtaaatagtccctttcttaaactctccttaaattacccagtttgggggtgctatctgtttcctgctgggatcctgatggctgtgttgcccaaacctaaatgtcagtcatgcttgcagttacagctgtgttattttcctgtagtactgatttccctcttttattaaaagttctgtggtggctgggcatggtggtttatatgtgtaatcccagcactttgggaggccgaggcaggaggattgcttgagtccaggagt

SEQ ID NO: 37193 - DNA, 1027 bp, Homo sapiens
agcacaggcatgcgccatcatgcctggctaatttttgtgattttagtagagatggagttttgccatgttggccaggctggtcttgaacacctgacctcaagtgatccggccacctcagcctcccaaagtgttaggattacaggcgtgagccactgcaccagccagttttattaatttctaatgcaggaatttaagggtttacaattttcatgtggtattttagctgtatcctttaagtttcgacttgtggtattttccttgttcacttttaactattttgtcattgaccttttgacttttcttgacctgtgactcattgactcttaagttttcaaacatagatattttggggagacctttttttttctccgttacagaattgttaagattagagataatatgtgggcaaatatcaggcaaatagtagatactcaataaatgttttcatttttccttaaagaaataaacctctgctatttgtttttttttttgcgtgtgtatagatgtgtagagatgggagtctccctatgttgttcaggctggtcttgaactcctggcctcaagtgatcctcctgccttggccttccaaagtgttgggattacaggtgtgagccactgcaactggcctaacgtctacttttgaaatgagaatgggaaatacacaattgccaataagtgtaaataatactaaaagtgactttagttctgcatgatagccaattgagtagatgaagtatagaaaatatagggggatgataagaagagggtaaaattgggaggaggtaagggagagaaggaaatttagcccttccaaattctttctctagaatttagagaggatggctcacacctgtaattctagcactttgggaggccaaggcggacgcatcacttgcgaccaggagtttgagaccagcctgggcaacatggcaaaatcctgtctctacataaaatacaaaaattagccgggtgtggtgatgtgcacctatagttcaagctactcagaaggctatggtgggaggattac

SEQ ID NO: 37194 - DNA, 1008 bp, Homo sapiens
tgtgccaaatgatcaggaatgataatcaggatggagtctgtatacttgacctacagaggaaacaagctgtcttatctggcaaactttttagttttgcttattaagttggtaaaattttgaatgactttctttactcttggacatctaatgatcttttgtaaagaaggggaagagaaccctttctgttcagaaataacacacaacttgattagtaggagaatttttcatgtgattctggaaagaatttgcaacacctgtttccaaagaaagcaagaaatatattgcatatttttctccccaaaatgtattttgtccaaactgaattggacacagagaacattccttaagtttggaataaataaactttctgaaaactgctcaggtaacaaagtagtaaagagccaaaaaaaattttatttacttctaacctttgactactaaaaggagaaaatgaaagggttcatggaagcaaacttcacaaaagtaactgtagacttaacttgtcagatccaaatatacatgtagaaaaatgtacaaacatggttaaatttacatatgccggaattttggggggaatggaatgtgtttcttacatattagttttatttattacctttttggtaaaaaatcagctcctagaagcaactcccacactgtttatttttcttatacattttgctgaggtttcaacatttctcttccatagtttgcagcaggatggctacttaaccaaatttaatagggttaagatttattgtgtgtatcacatagagaccctggaagttaggctcctttcctaagagagaggctgtgtaatgtggtgaaaagaagagaaactttttgttaaagttttggtttccctgcttaccaactgtgtaatactggattatctgccttagtgttcactcaagtgctgtgcacttgggtgagttacttagtgtctctgagtttgatgaaatttagcccagagatacaattagtgccttttttttttttttttagtaattt

SEQ ID NO: 37195 - DNA, 1047 bp, Homo sapiens
gagaatggcgtcaaccctggaggcggagcttgcagtgagcagagatcgcgccactgcactccagcctgggcgacacagctagactccatctcaaaaaaaaaaaaaaaaaaaaaaaaaaaaaaactcaacacgtgttaaatcgctaaagtctgaagagcccagaaaagaaaataaatatcattagtaatattctcaccatcatccaaagattaccccttttaacattttggttgcttatctttccagtgctttttaatgtccatatacccacatttttttaaacccatgctttaaaagaaaaaaaaacttgtgatattactgcatgtatacatatattttgtaattttcaatataattgtctgaaattttaatggttatatggtatttcactgtatgtatttggtagaagtcactttgcccccatttttggatatttaggttatttgcaattgtgctattatgctgtgtacaacgtccttgtggaaactttggcaaaccttgggttgtccatctcaaactctctcattgtactctgtccttttcagcctgcttctctctcttttccagtaactcctttaacaacaagatcagatcaggtggacagattattcttcaaacaatttactattaggcaatgaatatgctggtttctgtgaattctgggattaaagagatacatagacacattttatttgcagagataaagaattacaataataaactaagtgttgtgataggtttatatatgtataaggtccatgggggctcggaaagagagcaggggttgtgagggcagtaggcagggaagaaagatcagggagtaagcatttattaatcctcttaatgtgccaggcactaagttaggcacattactaggctcttagtttgcagcagttctgggaggtatgtacacagtattattcttacttaccagatgaggaaactgagctcagacaggtaagtaatttgcccaagctcccacaagtagtaactgggagaaagccagaagtaaacccagccagatatacttgactacccaactctgtc

SEQ ID NO: 37196 - DNA, 1050 bp, Homo sapiens
gcactttgggaggccaaggcgggcggatcacctggggttaggagttcgagaccagcctggacaacatggtgaaaccctgtctctactaaaaaaagaaaaaaaatacaaaaattagccaggtgtggtggtacctgcctgtagtcccagataccctggaagctgaggcaggagaatcgcttgaaccctggaggcagaggttgcagttagctgagatcatgccactgtacctccagcatgggtgacaaagcaagactctgtcttaaaaaaaaaggagtcattatagtagtaatactatagtaaacacatacttgatattctttggaatatgggccttactatgaaataggagaaattatttctttcccagttactaataagggagacttcattggttaagggaattttgtgggtagaattgctaagactagaaatctcattgttggttcaaagagagaaataagttaaccacgtgttctcacctgaatataggatgctttgctttacaagcttaaataatacccggacaaaactctacaggtcacaagttctttaaagacttaataaactctgtagaaactatacttcaaaggggaaccttctccttgattcactatcctgccttgtcttctgaaatttattggtttttgacaagcgtttgaagaaagaccactaaaatacagtgttgttaatatttggtgaaatgttcttgtacatacatctgttatagattttccaagttaaaaattacttttccattagaggagctccccataccttgtttctttccccaaaggggtgtgtgtgtgtgtgtgtgtagtttataatgtattttactcttttgactttggaaatacatagtatttcattgtataggtttggcacaatctactttttaactctaatttttagacatttgaaccttggatgatatggaatactgtcattagtaagttttatgttacctttctttctttctttctttctttctttctttctttctttctttctttctttctttctttcttttcttttcttttcttttctttcttt

SEQ ID NO: 37197 - DNA, 1059 bp, Homo sapiens
gatttagtcctcagttgtcactgcttggaaatgtttcctgagtctttttcagggtggggtgtccaggaaaatgacatataggaaacgtgtagcagatgagcccttcagttaattggcagcttgtcacggcagattctgccttgccttttggttcatttgcatcagtagtaggagagatgggtttgctgcttggtgctggagaggtaaatgagtagagaagaaagctattatctattgaatgcctagtatatgcgtttggtaaatgtttcacatgaactcatgtaatcatcacaaaactctgaggtacatagtattagcctcattttatgccctacctaccactggagataccaaaaataggtatgcatttttcgatcaagggaaaaatataacccatggatttttactagcttattacttatggtagaagacagactcataggaaaaatgataaaactgtataatgttattgagtgcctgttagcactgagattactaagaatgagtgagacaaggtctccatcctcaaaaggtacacagagctttggaaggtgagataggcaggtattttaatcaagttttttgttttttgttttttgtttttttttgagacagagtctcgctctgttgcccaggctgagtgcagtagcatgatcacagctcactgcagccttgacctcccagactcaagtgattttcccacctcagcctccacgagtggcaaggactgcaggtgtgcaccaccatgcctggccaattttttttttttttttgagacagagtcttgctctgtcacccaggctggtgtgcagtggcgcaatctcggctcactgcagctctgccacctggattccagcgatcttcctgcctcagcctcccgagtagctgggattacaggtatgtgccaccacgcctggctaatttttgtatttttagtagagacagagtttcaccatgttggccagactggtctcgaactcctgacctcaagtgatttgcccacctcagcctcccagaatgctgagattacaggcatgagccaccgcccccagctccggc

SEQ ID NO: 37198 - DNA, 1108 bp, Homo sapiens
ctcatgagtactcatggaatgcttttgaaacttagtgttttattagtcatgtgtgaaagccacatacatgatttctaagtagtggtaattccagccatggtgaaaattgatctgtgtaggtctgtggtggagagtaattaaacgaatggaaaaactgttattttatacagtgataagtcctgaatttcagcttactccagaaagtggagttagctacactctagtcacctttttattgctgaggtcttgggaatgattactccacttataaaaaagtagagttaatattcctaaaacttttttttggggggggacgtagtttcactcttgtcgcccaggctggaatgcaacggcatgatcttggctcactgcaacctctgccttctaggtacaagcgattctcctgcctcaacctcctgagtagctgggattacaggtgcccaccaccacgtcgggctaatttttgtatttttagtagagatggggtttcaccatgttggccaggctagtctgaaactcctgacctcaggtgatccacccgtcttggctcccaaagtgctgggattacaggtgtgagccactgcacctggcccaatattcccaaaacttttgaatgaccttaattatacatcctcatttgtataaattctgttatttgaattgctcttggcgattaaacaggcagcaaggaaaaaccgttgtgtaatacttctctatatcctccctctccctaaaccaagcttgtccgacccatggcccacaggctgcatgcaacccaggatggctttgaatatggtccaacacaaatttgtaaactttcttaaaacattataagatttttttgcaatttttttttaagctcattggctattgttagtgttagtgtgttttatgtgtgccccaagacaattcttctagtgtactccagggaagccaaaagattggacactgctgcatctaaactctttttcaaacattgtgacatatgttaaactcaaattgtttttaaaattgtgtgagcacaatgttgttttaaagtatttgacattgcatcattttttatttatttattaagcagacattatttgctgtaatacaatgctaggag

SEQ ID NO: 37199 - DNA, 1067 bp, Homo sapiens
aacattttttaaacttggtttaataaaaatgttaattttggaaaaggcgcgatgttttagcccagtgtattaaaccatatcctgaatacaacttattagtgtttaattgctaagggtcatttcagattttagccactatggcattaggctgccgattaatggacactgagtccattaatttattcaatgcatattgatggaaggctagcttcgtggccagtaccatgttaggtactagggatacaaagatgaataagataatccctgccctgaagggctcagagtctaatgatgaagaaataaacaagtggttataatacatcatgataagtacgataatggaggtttggaatatgttccctttgagcaaagacgagagccttgtcttagatctgctccattgtagataaatgatttgtctgtttactcttagagacgcagaaaggtcagaagttacctggaattactcgtagctgctgctgcttttttttttcttttccaacttgatatagggcagtaggaacccaagtaagtaccaatgtttatgacttatttgcgggcagtcccacaatatctagaagatttagctggaactgacaaaactttgattccttatacctgtgttttgctgtttttgacaatcatttagaatatctttctgtgctgtgtgtgttccatttgcccttccagatcttttctccactctgctctgtgcttctgggaaatgaattacatggggtacatcaactgagcccttcctttttggtttcagattagctttgcccagtgggagggacatcagaaaggatctccctaaaagctagttccctcttgctggatttagtgttgccaaagctgttctgtgagtagttcacaacttgtattcaataatggccctctctgccagccatctatagttacacatctttctgggttctaataacccttccctagcccctttagacctggagatgataatggcttcctgacgttgctaacctggagttataccaccatcttttgctgttttccctaaaccctgcctgtaccttttgaaatggttcctt

SEQ ID NO: 37200 - DNA, 1033 bp, Homo sapiens
tctgtacggtagaggagcctggtcactggcccatctcagtagtgaaactggaggtttgatgcacaggggattctcagtagcaggcgccagtgcctgatttatcgtgagaagcagtttaatatttcggctataaaaggctagaactagttcctaattagaaggtgtgccaggttgtaaattgtcaggttgcaagtagggatgagcacgccaagtttttgcgtataggtctaaagaagttttgggggtgggggaggatgcggtaccccagacctgtttccttgtctgcccagaccttgccatggtgtagctttccatctcttgtgacagtgtctcaaggagcagtagacattctttggctgcagcagatttcgcattgtcttcctgattggaagagttcagttatgaggcttctggttgccagttactcctttcttttgaagagaaagaactggaatcatttggataagggatgggcgttggaaggagtagttttcactttttatgtattgtataaggcagttatgctgtgaactatttatatatgatggaataaacaaaaacaaagcaagagctgctggaggtttggatagtcctactcatgttgaagtaatcagaatagtagtagtattggcaagttctcagggtgggagatctgtggctttagccacctggatggaagtctgcgtaatggtttctcagtgacaggagattccctcggttttaatccagtagttcctagttattccactctccagtttccaaccgggtcatttaggcccttgcaatcttgtggaattcttataaattctgttaccaggttttgttgttgttgtaaggaaaaattccattttgttatcttttttttttttttttggatacagtctctctctgtcacccaggctggagtgcagtggcgggatctcggctcactgcagcctctgccgcctgggtccaagtgattatcctgtcttggcctctctagtagctgggattacaggcaccgccaccatgcctggctaatttttctgttttt

SEQ ID NO: 37201 - DNA, 1129 bp, Homo sapiens
tactgctataattgttaacctcttattagggatgaaggagttgtgagttcttttgaaaatcttttcaaagctggttaccctcatccaagagaaatttctttttttttttcaagagaaatttctatatgtcatttcagagtttcccagcagccttcttgtggacctttggttaactcctacccttacattaagtctttttataggttcatcttagtgaaaagaacctagtccacttttattaggcatatgttcttttaaagaaagataacttaaataaaatttgaaaaaaattgcatttacagtaagcaactaaacaagtggtcttaatcagttcttgtttaaaatgaactgatgtagtctgcttcttcgataaataatttttgccataaatatgttggtttcaaaacaaagcaaaagtcaggagttaccaggtctcaagcactgataagtatagcagcagctatggttctagtgttattatccagaagattggagctcaataaatgtaagcctctgattgtgtttctactctgctgtatttatattcatcaaagaaaataaatacagtgaagtcatagatgaaaaaatgctaagcaaatacattattcctgttttctaccattattttgcagaatgtggctatctttacaataatgttttttcttcttggaaaaagtcagagatttcccttttgttttcacattacagttcttcccctaccaccaagaacacattgtcattttcatttatccgacagttataagcactttatagagtgtgcatactttggagcataatttttggtctcaggaccctttatgctcttaaaaatgtattgaggactccaggagctttagtttatgcaggtatagctatcagtatttaaatattaaaaaatagaatttaggttttttgtttttcgtttttttgagacggagtttcactcttgtcgcccaggctggagtgcagtggcatgatcttggctcactgcaacccctgcctcctgggttcaagcaattctcctacctcagcctcccgagtagctgggattacaggcacccaccaccatgtctgcctaattttttgtgtttttagtaaagatggtgtttcgccatgttgggcaggctgg

SEQ ID NO: 37202 - DNA, 1028 bp, Homo sapiens
cataaagcaatgctttctcgatctatctgtggtgaaggacaaaattgtctttgctgttgctttaatgttaaataaattgcaggctgatacttttgtaaaatagaataaaattgtggcaatgtcagattcctgtaaaagtttctgaacactttcggtttctatacttacctcattgaaaaaatacttaacaagtagttgtggatgggcactagtccacaaaccacaatcggagtagcacctgtgttcaaaataagcagaagacattccattttatgaatgtgtgtactgaatttgatttttaacatgacctcattatctttcttggattagaattttttagacaacttccctagcagtgacaccctgtccttcattgcaaggatattcctgctgttccagatgatgactgtatacccactcttaggctacctggctcgtgtccagcttttgggccatatcttcggtgacatttatcctaggtaagggctcttctcttgaccagcaggatgtgccaagcaacaaatgactgtgcaagcaggtcagtttaaagtgtgactgatccttttgctataaaaatgcctaatgcaagtggtgactaaagatagatcattggtgtcctcttccctgaagagctttaaaaatagaagccactcccttgtctagaatgatttaaagttcattccttccagtatagttaattagctccgataccatttatatttatcttattatttaattgctattgatttacatattgtcaagaagtttatagtgtatagtacctatgttggcaatgtgtagctaatgagaagcaacacttttaattattggtcattgaaactatcagggccaagggaaaacttcccctttgccctctgaagttttgttgaaaatgaccgacaagaggcagattaataggcaaaaagggcccggctcagtggctcatgcctgtaatcctagcacttttggaggccaaggtgtgtggatcgcttgagcccaggagttcaagaccagcctgggcaacatac

SEQ ID NO: 37203 - DNA, 1033 bp, Homo sapiens
ggtcaggagattgagaccttcctggctaacacagtgaaaccccgtctctactaaaaatacaaaaaattagccgggtgtggtggcacatgcctgtagtccccactactcaggaggctgaggcaggagaatcacttgaacctgggaggtggatgttgtggtgagccgagatcgcgccactgcactccagcctgggtgacaagagtgagactccgtctcaaaaaagaaacaaggaagggaaaggggaaggggaagggctcaaaatgagttagattacaggcagttctcatgttgcatggttcttacatgcaccagtttcattaatctggtttagttaaattacatcagttcctcctaacaacatttgttcaaatctcagttaccaaagaatttgaactattagtacttgtaaagtagtagctgctagccctcacttcacaaagcactacataaataacaagtgcacgtgataattagtaaccaatcacataacttctttcaaagtctgtcaatgactggtcactgtgtatgtttttcactgtacagtctgcaaagcagatagttgtgttaactccttgtctcccagtgataaactgacatgatattttacaaaaaatggatacttgaatggggaattgtcaaacaaagtgctacaatgaaacaaaacaataatgcaagaagtgaaatttgaattgaactctatatagagagttataaaagaaatagccaactgtggaaatgttgacactgctgccatacaagagactccagatatgcagctagagaaacttaaggaaggtgagcttatcaacgtgcattcagaaagtggttatgattacaagaatgaagatatcccagaggaattgacattgtcagaaaacttcacattaatcgaattctcagagatgtctcacaacattgaaagcacaaaagatgaaatgttagaagctggtgcacagtaaggataaaggagtatggcagttcaccaaggcatggaaaagatgcctgctccatattgttaagttatacagtgaga

SEQ ID NO: 37204 - DNA, 1025 bp, Homo sapiens
gcaacaagagcgaaaactctgtctcaacaaataaataaataaataacccagcatatcaaggaacaaggcagtggcttctaggtttccagaagaccaaaggaaaagttaaaattatttctctttgcctgtctgcctcaggaacaggattcactgtaagctgccatagacacacagaagatgaagagttgtggttatataagctctggcgtcctgttttcatcctttctgaatcagctaatctccaaacccacagtactgcttatatcgctcattcgtggtttcctgatttgcttgccaacttttctgtgaaacagatcttttaaaagaatataaacttatagaaggatttgctcaattgggcacaacaatcaccagacttccaaccaggttgattgttcattcttcagctccttaaggatattctgcttttgttcttttccttggtactttccctttctcttaaaaccatagcttcattagaggaattagcatctaaggccttcctgaattttctgactctactccataatgactagacttaatttcttaaaaggaataatcttctaccttctacactactaaaatattctgaatgcccattttaccttgtatataatacctgagaatggagtctggaatctctgtctagcaagtagtgctacccagtcaaaacctcatctagatactagatcaggattgttcatgtatttggcttctcacctttctcaaatatgcttttgatccacattcactgcttttctttctttaccctcttaccatctcacattaaatactgtgacagactgactctaacacttccaattcaaagaataaaagtaagtttcatgttgtttttttcaatcctatgtaatcctataattttgtaatggactctctgcttgtatcttctgcttaaactcaactcataagtaaatgaagcagttttgcattcagcattgtatgagctaccttcatctgattcttcttttcttattcttttttttttcctttgagatggagtctcg

SEQ ID NO: 37205 - DNA, 1047 bp, Homo sapiens
gattgaaaatacagccatcatcttttgaatgaccagtttgtgtaaaccatttgttgacagtgtctttccagtggtaaagcagaatttctctttgtctgtctgcctttcttgagagctatgatgaggatttctaaggcttgatgtatagaatcctttccttaagtgccttgtccatttggtgctgtgtaaggaatacttgagactggataatttataaagaacagaaatttatttctcacaatctggaagctgagaagtctgagatcaaggcactggcatttgatctgacacgggccttgttgctgtgtcatccatgtcagaagagctgaagaacaagctagccaaatgctatgctaagcctcttttgtaagggccttaatgaggggggacccctcccggcctaatcacctcctaaaggctccacctcttaatatcatcacattggcaatgccttaattttggagggaacacactcaaactatagcattaagatatgggaaaggaacaagaaagagtctatttttctttggtgatctgtttaaggagtagatgtgtttcgtttgcatcacatctatgtacagtattaaaaataaaatgtatctctctctctctatatatatatagatatatacactgaaacctttactgtctttcattgtctttctagtttttaaggataggaaattttagttaaaatgctagcctggcatttttcttattccccacttttatttcccccatggggaattgggttatgaaactggaaattttattaattttccagaaattgttctggtgggtttgtgtaaggaggagagtaataactggcatggcattgcagttactctttatttataattaagacatgctctttatttcaaaatattaagttaataatactcttaacttattgcacttaagtagattgagacaatttgcgatttattttgacatcctaataaagtggataaaaggagaagctgcttggaaaactttcccacttgggaattttttccacattcctaattttcctttgtggaatgtcac

SEQ ID NO: 37206 - DNA, 1047 bp, Homo sapiens
gttgggcatggtggcaggcgcctgtaatcccagctactcgggaggctgaggcaggagaatcgcttgaacccaggaggtagagactgcagtgagctgagattgcaccgctgcactccagcctgggcgacagagtgagactccatctcagaaaagcaaacaaacaaacaataacaacaacaacaaaaaccagagtctttgccagcctatagggctagaggaagaaaatttggaatccagggcccactaagagagacttcacgtaaactttaggttggaagcccaaagggctacagcctagaaatgtgaatgaatttgaaatagaatggcctcctttcaggaactgaagcccaactttaactcatctcaatcccccaaactggattaaggtgatctaggattgctcctgtctcaaattgacttcccaaagccaatataaactctttctaaagaaaatactttaggtttcaagttatttatacagtttttttatttacaatgtcaggaacttgctaaaaactagccaagtgtaagagaagccaggacaagatgattggaaattaagaaactcaatacacaatagaaagagacttacaggtgatccagataatggagttatcaggaacagacttttaaagaactgtctttaacatgttcaaggaaattaaaataagactgagaatttggcagtgactagagataaatatgaaaaaaataaatttgtggaaaatgttttttcaaaaagaatcaaatagaaattctgtaattacagtacccaaattaagaaatcagtgacaataatgaatgttgactagaatgtggaacagtgggaatgctcatatagtactagagtaagtataagtacagtcattttggaaatgagtttgtaattatctgctaccattgagtatacaccacgtttataatcagtaaaaatgtatgcacattgcacaaagggacatgtaagagaatataaattagaattgatttataagagctccaaagaaacccagatacccatcacaggaatggataagtaaattgttgtgt

SEQ ID NO: 37207 - DNA, 1098 bp, Homo sapiens
ccttattccttgataagggattttaccacatgaagtcatccagtgaccctagctcttattgtgaagttagtggagtatacttagaaatgttacaactttaaaatgttacaaaacattcattaaagctcatatttaaagtagagcatctagtttgagaaatagaaatcaattattaaagatgtcttttttctacccatttaactagttaaaaccatgacatgtaaatgtagaagtagaataatcatagaattccctaaaatatttctgtttactaacatatattgaccaagtacatcaagcaggagagatcttccttcattctgttatagtccacatcattctaattttgctcagttgttattaagagcatattcctaaaccatacacttttgtttcaataaagttttattttgttgagatgaataaaataacaaagttataagctgcataagacaaaagttcaattgttcaaaaaaaatttactgggatagctttctattacaggtattgttagattatattgtgctgataagattactttctaaaaaatttgtacttttctgtaaattaaaagaatatggagtcataaaatggcaagtgttttaggattagcctaaaattggacattgtcattgatttcaaagaaggtatgaactagcagtcttacagcctaattcttctttggactggtccttggcagcagttccttttcagactcgataaacagaattcagatgatgtaagtcaaaacaaaactttacaaagccaagcgtattatcttttgcattaacctatttttttccatcatacatgctactagtatgtgcattagcatgatattctcatatacattgcattaaaaattaaaaggtggcagctcagggtgagctcttctgttgctcatttgttcctaaatttttaagggctttttctcagtcaatagtttgtacaaactggttagtttaacttcattacccatttcattaaagttgatgggtcgtgtgatgagatgcatttaaggccgatagtgatagatgttttttttatttcttgaacacaggctttgtctgaatgatgttcttttatctcttgaacaca

SEQ ID NO: 37208 - DNA, 1049 bp, Homo sapiens
acacacatacatacccatatcaatatatatatacacacatatatcaatatatacacacataaatatatatacatacacccatatatatatatatatgatgcttagcatttaagagttaatatttgccaacccatagtttattctcaagcatttaactgatttcttgatttctactgagcttcataggatgttagttacttacaaagggatatgtgtggtggaaggataaaattaagtgaatagtatatggctgcaatattactttcatacattttttactgtaaaagactaagtaaaattcaaaattaatcaggacagtcatttaaaaaatctccaatgttaattatcccaattagtgattaatttgatgaacaagtcctcttttaaatgcagatgaggatttgtgtggtatttagggatcttaggcttgtttactttttagtttattcctactcgtgccactcctcatgcccattgagcagctcctaaagttcttagccctgtaccagctatatcctccttttgaaaaatggtaaataactcttaaaacttctgagagttgcatttttattttttagaaggttaaatgtgtagttcaattatgtttttatagcttttccattttacccagtatttatatttgttctgacataatttctctgttatacagtattagaactcagagataaacttttactaagattctaccaaatgcagatcataaatgttacaaatggttatgtttgaaagctctaacccagtagattacccgatacactgatcatttttatcccccaaccaacatatattttatgctatgcggccaggttaatgtataagacataaatggttgggatgtgatttaccaaagagagaagagggtaaaaatcatcaagtctgaagagaccttgaaaaataattaggattgtattttatcttttcaacagtaagtctggttgggaagttgtattatgtcttcttagttcatatgtcaacattatttcccatcacacctctttttttttttttttttttttttttaagctcaa

SEQ ID NO: 37209 - DNA, 1094 bp, Homo sapiens
caaacatagggggaagtcaattctttgcactcctgagacacatacaagattaatgatgataagtcaggaatgcctgtcctttgatataggtgtcatacacacaggagtcatgctgcccttttatgatgaactcgacccacagtcctttttttaagagacaagttctcactatgttgcttatagtcttttgatgaaaccagatcatgtactattcttcccaacccagagaatactgggaagaattttccctatggtgccaattaggccacagatcaatagctgctatgaaaatatgtccccatttctagttaaaataattactaccaatgttttcaatttataagaaccctgaagtctttttttaaaagtcatgattaaatttgcaaatagataaacacgttaagatagaaattgaaatccatttgggacttaagaatatttaatctaaatcttcagcttatatgtaatagtctgttatgggtttttttcccctgaactgtttttaagacccttgctttgggctacaatggtggctgttgttctcaactcattgaaaaacaagttctgatcttttccttttaaagtattctgtttccaaatgcttgtcttgtttgaaaaaaaagaaaagaaagaaagaaacgaaaaaaaaaagcccatatcctggtgccatgaattggaggctgcatttttctctagttaatggcacactatttactttctagatgtgtaaatgagtaatgagtccctggggggaaagatagtattgaagagcaaataaattccatggataagatccatagaatttttaaaaatgattataaacccatgctttcagctattaatagtaaaggttttgttgcagagtaagaacactgaattgaattacacaagtggggaaagagcaatgcatttccatagttcactttgaattacagaggttcaatttctatgttcccttgttctggtttcaaaaaaataatgttaaatataaggagaatgattctttggagaaggcaaagttcttttctatgagatttataaagcctgggtgttgtttttttcccccactctgggcattgcaaattgcttctgtg

SEQ ID NO: 37210 - DNA, 1044 bp, Homo sapiens
cttttaattccttgttaaaatgaggcaataatttgcaagatttttgtatataagtgtaaattcttcatatctttttagatctaattcaatattttctgactacttctgccatgtataataccatttttgtgcatgcttgatgtgacattcataaattgtaccactatgactttatccatgtaaaatagctatttattgaattttcttttaaaagctggatttactgggttttttttttctctcagtttaaacatcttaacagagaatttgttactgtttattaaaagaattgcatttggaagcaagaaaacaaccggatttgcaatcatgtgaagaaacaataatgcctttattatcaagtgttaagcacaattcttataacaaactgtgataaattctttttgtttttttttcctttgccccattattttcttatgaacaaaccaaaaattcatggtgagcagttgcagtgttggctgatatatcttttatgtacagggaatttgaaaaggacagtggattcatttagaagtgtaactggtgctgtgattatagcaatacatttgttagttgtacttcatctttttcatgctagctttttaaatgtttagttttcctcttgtcatggtcagctgctgaatttacttgaaggatgtagaatactgtttaaaaaatactaaaatttgtacaattagatcaaagaattgtgcaatcatttcctttttaatttttaaaatgttgaggctcataaatatttgagaacatcagatctaatagagcatagtgatactatttaatttaaccaaagtctctagtgaatatttcaactttgaatgtaaactaacaaataaacctgaccaccaaggagattgtttgcccagagtttcaaagcacattgtctacaaatggaaattgaaataatttataaaatattgacgttactatgttttttaaaaagttcctaattttttcactaaatggaggaaactattagttttattgttaaatatggtagatattaatattcctcttagatgaccagtg

SEQ ID NO: 37211 - DNA, 1767 bp, Homo sapiens
tctgcgaccccacagatgtgaattgtttggatgatagctttcctccactgggcaacacaccccgtggacaagttaatcatgtgcctgttgtaacagaagagttactcaccctgcccagcaatggggaaagtgattgttttaatttatttgagactggattttatcactcggagctaaaccctatgaacatgtgcagtgaagagtcagagagaccagcaaaaagattgaaaatgggcattgccgtccctgaatcctttatgaatgaagtttctgtaaataacctgggtgtggactttgaaaatcacacacatcacatcaccagtgccaaaatggctgtttctgtggctgactttggcagtctctctgccaacgagaccaatggtttcatcagtgcccatgctctgcatcagcacgcggccctacactctgagtgacctgagtgaggatcccggaactgcgtgtgcagcaccagtaaacttgaggggagctatcaggtttgcatagtctttcactggaagtttgaacctttctcactatgacatcagtgatgtcagtatgtatagaactatatcttgatttatcaagagtattttcatttttcaatccataaatgtggaaatgaactatgatcagcagagttgggaactaagattgaactctgtggtgcagctttaagctctgcttctctcttcctcatctcccaatacctcttccccactcccttctttttctattcttttgtgttccccactgccctcactcccaattttaaaacctgtagacagaggccaccagctcaaaaccagcacagatgttctgaactgaatggtgtggcctgtttttgtgtaaattccttttgccgtaatggatgcagtggaataacaatgtttacaggtaccgatcccgatccctgctcaatgtagcatttttttggttttattttcttaataaaagcaggggtaggtttctttaaactgcacaaacatgcaaggattttttaaaaatggaaacttctctcatgttattcaactagagcacttcagtttacaaaacagcaagtccatctttatggaagccagcacaaggaactgtgtgcaaataatgaagacgcttgcttggatcctgtttcaaaattctagaccagggctaccttacacagaattggtcatgttactgccaggagatttctgtgtaacttcatttattggctacagttttggcatttgaagatgtggtactcagatggggttttgtccaccattgtcaagattgtaatcttaaaaatcataccagtcattgataatttagtttatcctgaggcagtcgacttgcagaggcacagtctacaaagcctaggatgttgccactcaatggtttacattttgggacatcttttaagttgtttgtagcactgcagttcaaagtgttaatatttagagggacttctagattttatacctaatgcagtagaaccttgaagtatatttaagcttttttgttaagcttgaacagttggcaagaataatgtgagttcctatctgaaatagaatggtacattaccacttttaagttttaaaaattgatagatgttcagatgtatctcaaactcagttttatttttattccaaatattgtgaatgagaagccattgtcctaaactttggccatttttgtgctataaacatgcatttttaagttataaggtgaatcaaacaatatgtaatacagtattaggatgtaatctttgcttttgtagtactgttaaaa

SEQ ID NO: 37212 - DNA, 1060 bp, Homo sapiens
aataattacttttttagagatggtctcactctgtcacccaggctagagtgcagcggtatcatcatgccaactgcagccttgacctcctgggcttaagcagttttcccccactcagcttcccaaagcccagggattactggtgtatcccaccaccctggctaatttaaaaaaaaattttttttatagagaaggggtcttgcaatgcccaggctggtctccaactcctgggctcgagcaatcctaccttggcgtcccaaagtgctgggattacaggcagcagctaccgcgcttgtcccaggtcaccaataattcctgattgccagatactaagatttcttgtctttctcttgctcagtttctttttggaatttgacccaagtgaccattcttgattatccatacttgtttctgccttaatttaagtaatcctactttttcctcgttctattttctggcttctccctctttcttattttatgatcttttctttctttgcccgcattttaattaacattctccagggttttggctattatcgtctcactctgtgtgccttttctgggtgttctcactcaaacccactgctttaactttcaccttaaactcatcgttaccatcccatccttaagtttatcttgtgcttctgtctcatagtggtgctatagttacctaacttctcaggccagaaatctggcaatccatttagactcctgtgttgctttcattccttgtatcaagtaactcaagaaagggatctttccctaaatttcactcaaataatccccctccttagttcaggctctcattctacttcccttacaacattatttccaaaatacaaatcatgtttaagaattttcagacatacccattgcccatagtgtaatacatctgaaagttcttctgataagcatagatcccttcctcttttctctctaccctctccgtgggtgagctcatcaacttctgtggctttaaatatcatctagatgctaatgaatgccagatttatatctttagcccagcctggttctctgagctccaggctcctggccaacct

SEQ ID NO: 37213 - DNA, 1113 bp, Homo sapiens
tcttgaaaagggcaagcacattcttatatatatcatctcctctgcttagtagctttgtgaggcaggagtggagtattattttatttccttcttcatgttaatacacagggaaacagaagagtgacttaactgcccacttgctctgatctgttgttcttatctgtagtgaagtacaactgtatacatgtggtctctattctttttattgatgtttaatgaaacatgaaaatgaataaaagaaacagtagagacacaaatataaagagtaaggatcaagcttttagaaggaattttaaattatgttttgattatttctatatcacttgaaatagtgtattctcttaatcttttttagtggaatagggatttaggtattggtgcatgttaacagtcttaggggattgatgttaatgttcattttcaagaattataagtttttatgttcatagtaaataaactcagttgtgtgttgactgtaatgtggcccatattttggtgtttacaaatttttagtacgtcgtgttatggaaaataaggtaagtactaaagcaattttctcgtagtagcactttgagtatagaatatgtggctagattttagttactaaacatactaaaatagggtttatgtaatatctttatatattttaatgtatgcatattactgccatctgagagcttttaatagacctagatttataggtagaactttttttttttgagacgaagacttgctccattgcgcaggctggagtgcagtggcacaatctcggctcactgcagcctctgcctcctgggttcaagtgattctcctgcctcagcctcccgagtagttgggattacaggcatccaccaccacacctggctactttttgtatttttggtagagacggggttttgccatgttggccaggctggtcttgaactcctgacctcaggcagtccacctgcctcggccttccaaagtgctgggattatagcatgagccaccacacctggctggtagaactttttaaagagttcttatttctacttttattaatacataattacccccttgatgttcactgtgagaaaaattcaaaaattcagaaaagcacaaatgagaaagtaa

SEQ ID NO: 37214 - DNA, 1283 bp, Homo sapiens
aaaaagaaaatttgtaatggtggatgtgagctaattaataaatattcttatttcttttttgttgtttttttgttttttgagatggagtcttgctccattgctcaggctggagtgcagtggtgtgatcttggctcactacagcctcgacctcccaggttcaagcgattctcctgcctcagcctcccacgtagctggtggtattacaggtgcccaccaccatgcccggctaatttttttgtattgttagtagagacagggtttcgctatgttgaccaggctggtctggaactcctgacctcaggtgatccccccacttcggcctcccaaagtgctgggattacaggcatgagccaccaccccggcctatatttctttttaaattaaaccacatgtaaatcaacaagtttttaaatgagcagatatttttcaacattaaggaagataacataatgtaaacctgccaaaaaataaagtcctgtagaaattgtatttttagaactaattagagttctctgaacccagaatcaaaaataatgaattatgtgtgtggtttttccatagtgaaaaatctttggcccagttcagtgttttggtaatgatctcacactgtcctgaaatgtttgaaattttaaaatattcagtagcttgactaagaacagattaaactttttatgttgagtatgcttccatccacttcttccttcccccaacctcagtttctgatactttccttccttgctctgagggttacgggtctaattgaattggatactagagtaaaacaagtggagaaaatcctgtttttttataaatttgatttcatttctttgggattatggattttagtcatttcttctcttggtttttggagtttcctattgacttcatatttgctattaaaagatattatagttttataaacaagtatgaattatccaaaacaacttgcaatggatatatcttccaaaaccttcagatgtgattttctgtattccctacacataatcctaagaactttgttagtaatccaaagtaaagcaaagtcttacagtttaatgcttgtctgattaatgctagggaacttgaagtactgttagagaaatgtaaagtgatacaatgcttttaaaagctgaatggctgtatagctgcttcacagaaacttatatttgttttataaagcagatttttgttgtgttttctgtctttatttgagggttagaatttgagtaaaatttatattatcctgaagtgtgcatcttagtgtatagtcgattcttgtgaaa

SEQ ID NO: 37215 - DNA, 1049 bp, Homo sapiens
attattatactttaagttctggtatacatgtgcagaacgtgcaggtttgttacataggtatatacatgccatggtcgtttgctgcacccatcaacctgtcatctacattaggtattttgcctaatgctgtccttcccctccctacccgctcataggccctggtgtgtgatgttcccctccctgtgtccatgtgttctcattgttcaactcccacttatgagtgagaacatgtggtgtttggttttctgttgctgtgttagtttgctgagaatgatggtttccagcttcatccatgtccctgcaaaggacgtgaactcatccctttttatggctacgtagtattccatggtatatatgtgccacattttcttaatccagtctatcactgatggacatttgggttggctccaagtcttaagcaaagagttttttaaacctgtgtatgcatgacattttagctgtgcttttgagacatagctatggtttcccatactaatgctattccaaattctttatgggatttgagaaagaggagctagctatttaagtaactatttttatggttataactacagtcaaatccttcatctgtctgacctgcaatgataaaaatcagctattactttaaaaggcccaaaagttatggaccaagtgccagaaagtgagctgggagaaagaactcaaataatattgagcatctactatgtgccaggctaaatagaagacacttctatattagctcattaaattatatgatagcccataatttactcaagaaaatataactttgtaaagagggacagaaaaaattttgaactctattataaatgtctacaaatattcttagaaggcccaaagtttatttttttcagtaggttataagatataatgctgagtgaacacaagcagtaacctatgttctgtataccacctgatgccagttttaaaaatatgtattcacatacaagggtagaaaaaaggcataaaaggaaatttaacaaattatctgtggttatcttccagcagtggggatttacattattttcttt

SEQ ID NO: 37216 - DNA, 1046 bp, Homo sapiens
ctactgtgttttcttctagaagttctttagttttagattttacatttagttctatgattcatttcaagtagatgttagtgtggtgcaggataaaggttgaagtttcttgttttatgagtggatgctcaattgttcaagcattctttgttgaaaagaatatcatttctcttttatagctcaaattttattacttaaaattattttaagatgcacatattaaagtgatatgtgtaaaagattatatatttctggaagcatgcctatttacactagttattattactttaggagacagatattctctttgtttaaattgtttccacaaagcataccacgaagtacagaggggacattagtaactattttatgatgattatggtattcatttaggccaatttaagtgaattggagatcctaattttctctataaggagacaatactttttcatacaagattatttttgtggaggcttcatttatgtgaagtttttgcacccatttattgtcatgattattcttcagtgaaacaaaagtctgtagtagatatgctgctgctgctggttttaggtaaattgactaaatagttatacaaaactctgtctctaccatatatgaattcaaactgtatcaacaattacagaatactatgctaacatctaataagagagttagcccatgtagaagagaaatataaatacagctatcagatcagtctcatgttatttcagcttcaaggagcctcttagcaaaaatggtttcctttctccatacatgttgcaggtgtttactattttaaatgagacttttttgttaaaaaaaaattaaaataagatcatttagagaacgattctcagcttgttcagatgattatttggttttaaaaaagcagcctggagttcctcttaatctcaaatctccataaaacttacaagagatgttttcatttactgaaaggaatagttttttcttaatcaaatgtagagccattatcactagagggcagtaaatacaaacagatttagtggatttactggcactaacgatgt

SEQ ID NO: 37217 - DNA, 1025 bp, Homo sapiens
gcttttaactactagcctgcgattcgtataatcatgttagtttgagaaacactacagtaatcacacatgtaagggctttggagtaagatggaccttggttatccaacgcttactgtgtgactttggtaaattacctaaacttttctagccttggattttaatgtgtaaaagatagataatactaactcagtaattctttatgggttccatgagacaatgtatttaaagcacccagcatactatctggttcatagtttacagtcaataaatgttaattccattatttgatcacaatgtaagactattgaggtttaattttgattgttttttcaaaagtttgtaatctgttaggaacaatttctaaagtaaaattcagaaaacaaaaccatcaaaatttaattcagctaacatttttgaggttctatatagtctcgaacatatattatctaattcgattatcactataaaccctgtgtatagtagatattatcattcccattagtggatatgcaaaccacggctgtgggatagttttacatttagtaagtggcagatccaagtctagacagcccaggctggttctctttatactctgcctggcaacatttgccttcatcactgtctgttttcaaaagtaactaacctctacatccctgctcacacatacaaatagctctaaaggtacaaaataaagctaattttctgagcaattcattttattcaaatcagtctaatgatctgttccatgaaaaatgattatgtagctcaaaggtcttcaaactcgtctcaaaccaggggtcaggcagatcatattcacataaagggagaagcttgccagccagaagtcaataaagattcctgggactggggtgacctggaagctacaacctgtttaaaggagacagcttctgcctagctccaggctagtgctcaagtgccaggatgtgggctccctattgtcaaatcttttttttttttgcttttttaagactggaagaaatccaatatttaatgcgaaacttccc

SEQ ID NO: 37218 - DNA, 1032 bp, Homo sapiens
taacctttacactagttgtgaaactcactgaaaacaaaggagaaactcattataattcatctaaacattcctgaaatatcactttaatcaaaaaattaagaaatattgctcagatttaaaagaaaaatggaaactcccttggcaagtgggtttgaggtttggtcattaggttttgaataatcaggagctatgtgttgtagtaggaaaagcataccatttagagagagacagctttagtttgtcagtcctgcctcttaataggtggatgaccttgagtaaagcatgacgcagcctttgggcatcagtttcctcacttaaaggtagaagggttgaaccaggtgtaagctgctgttcttccatgttatgattctaaatagttctagatggaattatgttgcacatttcatatgttgttaaacagcttctctctggaacagttgctcctaatctcctaataagcttactatgggtcactcagcaatcttcaagagaaacaaacattatttggttggtggataccaagacaattctgatgtgtttgtgtcaaagattggtcagatgaaatctaactagacatgtatcattccatcatcaagcgaaatgaccttgactctaaacatcttaatttgaactgtagacatttcccaaatgctttagggtagatttggaccataatacactccactgtaaatggagaaagttcatcatccccataataattgcccccaaactgctaggtaggaatgcatactgggtttagtatgtattaactcccttgtgaattcagcttttgagagcagacctcttaacaagtcatgagtatttagagtgaaatatttaattcttagtgatactattttcctattctgctattattattcagctatgattattttccttctcctcccaacctcctatttctttttctttattaaaaaaaggagaggaggtgcatgctgccatctggggtgaatatgggcttcacgtggggacctgggcgctggttctgatccagagagtgagctaggagca

SEQ ID NO: 37219 - DNA, 1061 bp, Homo sapiens
atgtacaaggtaatgcattactaagcttgtcagagcttcccaacaacaacaacaacaacaacaacaacaaaactagttgctaagttacaagggacattgcctgtgaggctgtgtcgtaaaacattccacatggagaagaaagggtgagcaatttttctgtgcataggtcttttgtctctcattggtcaaagtttgctccatggtacccttggccctcccagagtccctggggaatacagagcctttgtccatctcacgtgtagctggatggttcctgtcaagtcagaggccattgcccacgctaagcccgcaaggatggggaggtggaaaacatgaggcaattgcagtgataaccgctgctttactggggctgctgtggcatgcctgggaaactgggagagtggcttatgcccaaggggtagggtgggcagagctgacctggggaggccacaaacaggacctagtgtacttttctacagtatactagcagaattagaatgaatcagacaagagatttattaaattaagcttttgtaatgtcctgatgtagtgcactgtattttaatgctgtgtcttctgttgcttgagttcctaatttgtaccaggtgttgtgccaaatgcttcaaataaattaccttgtgaaatcctcacgactctatggactccaatttacaaatgagaaaactaagacttaacttgcttatcttcaccaagctaggaagtggcagagttaaaatttgaatccaggtctaaagccattggtcttctatgccatagaatcggcatccattttgctactcttactagaaaatcatgaatcctagctatgaattgtagtgaggaggaaagttttttctgtttcatgtttatgaaaaaatctctacctttttcattttgtgtttcatgcatgtgacagcattttcagagattttgtgtaagagtgtgtgtatatatatattgtatatttacagacagaaaaaaattgagattaatttttcaattctctaagtcataagagaatggaaaaacagaaatggacaagcagaattttttatcccaat

SEQ ID NO: 37220 - DNA, 1035 bp, Homo sapiens
tgcctccctcaaattttatctcagttcatttgttttctccgatcttctccttttcacatgttctctactctattctcttgcctttttcctttccttatatctgcctcttctttttccagtctcttccctcactccttcccttatttgtcttgtttcccattctttgtctaaatctcctcttttctctccctcttcaccctattcattcccagctccctaaaattatatcattcttccttcatcatgctccctcattcctcactgcagcatcacccagtccaactctgtcccatctgtgattcctcacttctgctttcgcaccatctctctccctaaggtagaagtggtgcccagctttaaacacaaggcaaagtgagggtatgttccactaggacagcgtgtgtcactctgctgccatacacagggagtaccatcagtgattataaagaggaatttcattcctgccagagagctcacaaattaggttattgttgatgttcatatagtttttagtgactggaaaaagataatgcctccttctatggtcactaccaggaagtgagctccatgcagcagacagaaaccaaccagataactgtgagatcccagccaagcacaatttctacatgttagtcaattgcaagaaacactgagatgtaatgtagtactttggactcatattactcaggtgactatgttttcaagcagccagtacaggacagaagagattcatttccttgaatcaaagctatttggtgacttttcctggaaacactctgaggcttacaggaagggattccagattcccaagctactggcacagagtaagcatcttttctttacatagtaattcacaaacgtccctcatcaccatatgacaatatcctcactggatcagctcggttaccagaaataactagatcaaaataaatgtcattctcacatggacacaggtggactagggtttagaagttttgggaaccatcacagttctaggcacctgaaacttcttcttttgcttgtagtaaatatggt

SEQ ID NO: 37221 - DNA, 1049 bp, Homo sapiens
tgactcttctgaagtgcccgttgtcaccagagtgcccaggggcagagcattgacaaggaaaggcccaggtgtgtgtgagaagtcaggcagatggggtgtttcggaggaaccagggtaacgcagtgcttcagcgttagcactcaccttgcttctgggaccacttaccacgaaggcctgaaagggcaggccccaactactgggaatattaatcttctctttgggtgaagtctcttcatgccattatcatctcttagctaccattgctaggcaaaagtttcctagctcaccatgtcctgaatgcacttccttgagatatttctgatgcttaaatatccagtgctttctagtgtgccgtcttccttctgtatttttgttttgttttgttttgtttttttgtggttccttttcagcactgttggtcctgtggaagtatttctaattgactgtattctatatgccacacaaaacagatgggtgtttatgacattcttttctggatatgtttctgatgtttgcatattgaacacagaactgtccacatagagaacttgatttctgcctcttcctggctttgcttttactcatttagtccctagtatgtgaaaggctatgcttaggctccaaggacccaaggatgaataaaatacctccagtaagcttcaggaccattactctagaggtttgtggaacttaaaaagctaaaatgtgttctgttgaatgacaaaaagcattaagttaatagaaaacagagggcttataagtgaatggataaatgaataagtaaaataaagaagagagaaaggaagggagagaggaagaatggagcagatgcaggtgagattgtttttctaaagagctaagaagctgcctacagtgttagcttagagactgaaaatggtttgggaaaataattcagaaatttagggaatacttcacagcatgagaaagtggagggctgagattggtaaaagaagacatgtttcaaaatagccaaaaggaaaatagaaaagaactggtcgtgaaaccgagacctcagagttgaatgacaa

SEQ ID NO: 37222 - DNA, 1070 bp, Homo sapiens
taatatacaatgcagaaaaagttcaatgagatcaaaacgttgggatctatagatgtttgggaaagaaaaataggaggaaagatgagaggagccaagtgcataaaaataaaattatctcaattcctattagtctgttttaggcacaggacttgaccccagctgaaccaaaaacagaatgcatgatctcattttgctgaacctgaaaccaaattgaactcttttgactatttcttgaaaccccaattgattcattaaaataattgcctggaaaagaaaacctatgttttctaaaattattaccagaagaaaattagcatattctccaaactaaaacaattcgtcattggattcaagtgtcttccttgagctccaacccataatgtgctgaggagctcttattaagttattagtgagtacactttgcttgaaatttaactttatcatgtccagacgtctgtctgtgtttgtggtcaccacattagagttgattctggaatcattgttaatgtcatcttttctgaatgtcatcaagtgaaacttgtatttcaatgaatgttaaattattgatctcttcttcatgtttctctttcaacatattattggtgatgacttccaattatcattttatagtacatatatggttaaccagttttgttcttgatattgatcaagagatgaacaatagggccaggagtggtggctcacgcttgtaatctcagcactttgggaggccaaggtgggtggatcacttgaggccaggagttcaagaccagcctggccaacatggcgaaaccccatctctactaaaaatacaaaacttagcatggtggcgagcacctgtaatccaagctactcgggaatctgaggcaggagaatcgcttgaacccaggaggcagaggttgcagtgagccgagatcgcgccactgcactccagcctgggcaacagagtaagactgtctccaaaaaataaagagaaagagagatgaacaataacaattcctatatgctaaaataaatactttgagtaactgatttcttctgccaaaattcaaattcaacataaatgagtc

SEQ ID NO: 37223 - DNA, 1067 bp, Homo sapiens
tgttctataaccttattatacttgaatattgttatatttctctaggtttaggaaggtctctgttattttccctttgaataaattttctacccccatctctctttctaacttttttttaaggtcaataactcttagatttgcccttttgagactattttctaagtcttctaggaatgcctctttcttttttattattttttcttttgtcttctctttgtattttcaagtaggctgtcttcaagctcacagttctttcttctgcttgattgttttgtgctgttaagagactctgagacatttttcagtatgtcagttgcgtgttttaactccagaatttccgcttgattcttttaaattattttaatctctttgttgaatttatctgataggattctgaattccttctgtgtgttatcttgaattccattgagtttcctctgtctaaaaggtcacatatctctgtctctccaggactggtcactgatgccttatttagtttgtttggtgatgtcatgttttcctggataggctttatgcttgtggatgttcgttgttgtctgggcattgaagagttgggtatttattgtagccttgcagtctgggcttgtttgtacctgtccttcttggtgaggctttccagatgcttgaagaaacttgggtgttgtggtctgagttttgggtcactgcaggaatatctgcattagggagcactccaagcccagtaacactgtggctcttgcagaggtaccaccttagtagtcttggataatatccagagtcattctctggattaccaggcagagactcttttttctcttctcttactttctcccaaacaaacagattcagtctcagtctgtctgtctgtctgtctgtctctctctctctctctctgtgtgtgtctctgtttcctggatctgggggaggggtaacacaaatacccctgtggccaccaccactgggactgcatagggtcagacctgaagccagcatagcactgggtcttgcccaaagcctgcagtaaccactgcttggctcctgcctatgtttgctcaaggcactagggc

SEQ ID NO: 37224 - DNA, 1037 bp, Homo sapiens
aggtccaggggaaacaggtgtatgttttcttcacatttgggtagggaggtagatattcctgtattgcagaatttctgctcctcagttcagctaaatccaggttctgtgtcacgaccaggaaaagttaggcatgcagacacgtggaagggtgaggggaatggaatttattatttattgggcgaaaaggaaaacaagaaaagaaaaactttcagcaaagtgagaggggtttctgccagcaggctcccatctcacagattggattccaagcccccacacacgagctaaagttcccaggctctttccccccaacaaggcatgaacttcctggtagctttaccccatcgtcgcagtgcacaggcgggcgggagattctccagggatcctccctcttatctgcctcctgcatctatcacctgcattattgggaacttggtttgaaattgttatatcctggagaagacaaatttatctagtaggttaaaaggcaggggccaaaaagaagtagacgtatggagacagctggttcgagcaggggaggaaccatgtgagcaatgggagagcagattttacagagttccagatggaatctgctgagggattttctttcccagagtcatgaagccacttagcgtggtcacagattctctttatatgttcctctacttgcccactattgttgacacaagtgcaatagggtttattgatgacagcacagacgactctgttctgcaaggaggtaatctagagctagtctgttgtccatgactgcattagctactgaattcagtgaagccttgagtttagagattctgttcccagttctctgacctaggtctccaatttgtgtagagaggttttggagggtgactttatgataactgaatcctctgtatggggcagctaatcctatggcagcccctagccctaccattataaggccaagagctctccttttttaagaatttgtaatgttatagatggttacacctgttccttgtggccccaggagtcctagggcacatcccctgtatgttggg

SEQ ID NO: 37225 - DNA, 1002 bp, Homo sapiens
tattgaagggacccatgcaccaccaagtattcaaatcacaatataatttcattattctctaccctcccttgcaaatgtaataactctgaactgataaacacattgtacctgtgtagaaaaatgccacccagaaggaagctgactgctaatctaggcctgtgctgtccaacaagagagctagtagccatagagcacttgagctgtggctaatccaaatcagatgtgctggtaatgtaacatgcacaaaggatttcaaataatagtgtgaaaaaaagtaaaaattttctcatttgtaattttcataatgattacatgtttaaatactaatactgtgtatagggttaaataaaacatatttaaattaatttcacctggttgtatctaagtgtccatcagccaattaacggataaagaaaatatggtacatacacacaatggagtactattcagccacaaaaaggaatgagatcctgtcatctgcaacaatatggatggaactggaggtcattatattaagtgaaataagccacacacagaaagacaaactttgtatgttctcatttgtgggaggtaaaaatgaagacaattgatctcatggagatagagtggaaagatggttatcagaacctaggaagggtagtgagtggcaggggtgtgggagtggagatggttaatgggtacaaaaatatatttagatagaatgattaagatctagtatttgatagcacaaaagactgattgcagtcacaataatttattgtacattttttaattaaagagtataattggattgtttgtaacacaaaggataaattattgaggtgatggatacctcatttaccctgatgtgattattaggcattgtatgccttatatcaaaatatctcatgtaccccataaatatacctactatgtacccacaaaagtaaaaagtaaatacattaatttcacctggttgtaaaaataactttttgtaatatggctttttaaaaatttaaaatt

SEQ ID NO: 37226 - DNA, 1050 bp, Homo sapiens
ctgacatcacgcccggctaattttttgtgtttttagtagagacggggtttcaccgtgttagccaggatggtctcgttctcctgacctcgtgatccgcccgcctcggcctcccaaagtgctgagattacaggcgtgagccaccgcgcccgactgggaactgaaggttttaaacctcctaaacattcaaaagaagcccaaatctcaactttaatgtgacattttctgtgtgctttaaatgttggatcaaaaggaaaaacaaaattaaaaatatgttggacaaactcaggcctgctgtccatatttgatccaaggaggaccaatttacccactctatcctacacctttcaggtcatagcattttcctttgttatctttcggcattaatgtcatattccaatttttccatatctatgagcaaggcccaaggtctgtagccaagcccagggtttgcatgtgatatctttagaaaaaccccagagaagctttctcttgttttctcactatgctgtaagtatgaatagcccaaagcaaaaaagacaagtaccctgactatcatgatcttctaagtattcatggagctcgctaaaattatagttccctgtgaagagcgtgtcgttgcagaaaagcactggagagtgggcttagataccttcctgtttgatctcaatagtttaatgtttactagctcactgagaagagactgccaccttagtgttaccctcttgtaccaccctaaacaagtcatttatttctcttgttttctctctttaaaaaaatttccatatgaaattctgtgattttttttcccctcattacctattttctatcatcattgtatccaaaaggtcaagagagagaaaaggccacttctccattgactggttatctcttagactgtatgacagcaaaaatataagcaagggttaaatttcaaatgcatccactctgctcatacacatttgtgatttaaaaaacacacttcattgaataatttaaaatatggttgtaccatctgttcttgtggggattaacattgttcatgatggcaaa

SEQ ID NO: 37227 - DNA, 1035 bp, Homo sapiens
tttaatcaatgtaatcttaaaatgagatgaccttgtagccaagcattttttctttcctttataagcaatattaactatattaaatcaagaaagctaatagtttttcgtatttctcaataaccattaagttcaaacattggaagagtttaatattttacatgaaaaatccacaggcaataattttaagtgacttagaaaatatttaccgtattttaaccttaaatgactgtgtatgtgtgtgtgtgtgcctatgtgtgtgcctatgtatgtgtatgtatgtttataatctagtagttctcaaggagtattggagaaagaatatgtgatcacatgtagtttataaaagctctcgtgttttttgaaagacaaattttttgtcaatctagtggtaacatgatactaattttttaattaattttaatttccctgataatacatttaagccttaaaaatattgttagtgattcatgtttctttttctataaaaattatttctaagccttcctcaaatttcttccagactcttttttctgattgatttttaagaattttaaaaatattctgcaatttctcttgatcacaacaagtgttggaaatatcttctcccgaagaaaagaatgattcttaaaaaaatactttagtagcagtttttttctatgaaaaaattagaagtagctttttcttggcagcgttttcttctagagcaatagggaggaaaacagaaagctgtagactgttatcttcgtccatacatatgttagtgctggaactcaactccaaaaactttgttcctttgaaaatcatatccctccagaattggtggagtggtgatggtgtggtgttgaaggcctattgccaggactgagaaggaaaagctaaagaaagagggaaaaaaaatccagagaaagtgactgcctggggaggagggataggcaagagaccaaacatcgattctaaagggaatcttgcaaatgctctggcaagtctatgtatgggaacatcatttgcctagaagatgctcccctttactccctt

SEQ ID NO: 37228 - DNA, 1055 bp, Homo sapiens
gaagggaaggtaaagaactataagttgatagacttgcaaaatggagaggctgcttttaggaaaccattgataatagtatcaatcccattgataatatatgtgattgcccttttataaggccatgtgctttctgcacaattatgataaagtatttagccaaacttgtattccctatataaagggggaggagatagtatcccatggggaattccttcccatattataaactggtagacaacttaagcaaaaatgtttttactcatatgaacactgttgaagtataaagccaggtatttaagtcatgataggtgtttatttactttgaacatttgccagaagtttgatgatgggtatatttgtagactgggtgttagaggttgttatattctaaaaagatatcttctgattaattttcttcatttataaaaacaatctattttgataacatttaatttatgaactttggtgtcatgttacactttatacattttggttgtacattccctgtaatgcttacagagacagccagtcaggcaataattgctacatactgagcgccttctattttctgagtactattgtaaattatagagataaagcagtgaaccagacagagtctccatcctaaaagagcctagtagaggatgggaactgatgtagtatcttgtaattgtcacagcatggtacacttgcttcttcagatgccattattaagggcgtcgtttctttaaattctgagatccctaactcagcttatgccagaactgatgagaattagaccttcctaaggtcttctttcttcctaaaatgaatattgaaataaatctataagataaaaataatcctaccaccaagccccaattaagactggatttttaacttgctcttctcagcacaatgacacaacagaggacacagaggttaatggaatgtctttggagcaaaggagatttcaaaaccaccagtttgttagatttgatgatcagctctgcaaaatgtttaaagaagatttcttactcatatcttataagttaagactataaatggtttaaatg

SEQ ID NO: 37229 - DNA, 1075 bp, Homo sapiens
tggttgtgaggattgctgcaggccctctcatgatttgattgagcgtttgtctctgtctttctctttctctccttctgtctcactgtgtttctaagactttctctatgtggtagcaaagaaagctcagacagcacaaggctgcctgtagtaattcttgtgacatgagagcatacatctcccagtagttccaaggaaaacccagggctgacttgaaacgtgtgcacttggattacaggtcaaccttgagtcaattgtgactgactgaccaggcctctgtgtgtcccggttgtggaggtcagttccatcagtaggagggggattaatcaaaggaaaatcagaattctttatcagaataagaggagaagatgcatgacaagtattcagagatacactgtaaccagaaaaaatggtcatatgtgaagagtatctcattacaacagggaggaatgtagttctaagtcttttaaagttctgctttcctataatatcagatgaccacatatttcacagcataattgtgaaaatgatattttgaaaggaaaaaggaattcttatctgagataaaactgtcaaaaaagtcaaaatttggctgtgaaaaaagtgaacgtttacttgaggttgtcattacttatttccttcttatataattcatataattctatattattatgacattcatataggcaaggtgttaaattctaatttgattttataatttttcaaaagagacttagaatgtgctagaaatcctaaaaatttctgttccaactattggtatttgaattatgtatatactgcccctttttttcctataaaaaactgatagaagttcatagataaataaaattcacagataatgttacaaatttatttcaaatgttacttcttgcctttttctatgccaagatacttaacaaatacttcaaaattgaaagtatttttactccttattttatctattccacagaatagttagaggtagaggaagaattagataatatatttattaataagtcaacatcctattaatggatgaacatagaaccaactcataggcaacacagtcagaaaatca

SEQ ID NO: 37230 - DNA, 1112 bp, Homo sapiens
ccaggtggggtggctcacgcctataatcccagcactttgggaggctggggcaggtggatcacgaggtcaggagtttgagaccagcctgaccaacatggtgaaaccccgtctctactaaaaaatacaaaaattagccaggtgtggtggcacgtgcctgtaatcccagctacttaggaggctgagataggagaatctcttgaacctggtaggcggaggttgcagtaagctgagtcatgccactgcacttcagcctgggcgacagagtgagactctgtctcaaaaaaaaaaaaattcttagaaattaataaggaaaaaaatgacctttcttccaggaaaatgaacacaatccataagaaacacaattggtgagttacatgaataaaaccccaactttaaagaaatacaaattaaacaatagtgaactaacattttctctaaagagtattcaagattaaaaaacaaagtcaaaactagatgataacaaattcagcgtattgactaaagtcaggacattcttattcattagcaatgaaagtgaaagtttgagtagctttctagaagagaattcaagtcacactatgaaccaacaattttactttgaagaatttatcctaagaaaaaaattaagaatatgtgaaaagatttagttacatcaatgtttattatagtggaaaactgaaaatgtgccaagaaaaaaaatgagccaaatattcagcagcgggaattagcacaatataccttgatatgttatcaaggtaaatgtgtatgataggatactgatgcataaggataatttttaacatggtagattttcattatgttaaatgaaaaaataaaaaatacataaaatgagagcccatttttataataaaaaatatatagtcattcaaggaaaacatgtagacggacatcacaaaataccaacaacaggtatggttcaaagtgttataggtggttttcagcacatagattacccctagcaaagagacctctgtgacacttcgtttcttcatctgtgaaataaaggaatcatactagattagttctaaatgcttttagcaaaaatatttcataattctatgagtattgatggttaataaccttgagaaaat

SEQ ID NO: 37231 - DNA, 1068 bp, Homo sapiens
agtggagcaagagacagggattaatttgcatagccaccttggaatcccaaactgtcaatggtgtcagtgatgctgtttgcttgagtccctaaagggttgaatgaaagaagttaactagatacagagttcacagaaggtcaataatcttagctttccaacaagttggagatcggggtaaggagaagggcagaccttaagaaaagagttatacttattgccaggaaacagtgcttccttttgctgtttttccacaaacagatttacctttgccctatgcatttcatcttattttaaaaaacaaaacttttattttaggttcaggggtacatatggagattttttttaatataggtaagctcctgtcatgggggtttgttgtacagattatttcatcacccaggaactaagcctactacccaatagttattttctctggttgtctccctcataccaccctccaccctctggtaggccccagtatgctgatcctctttgtgtccatgtattttcattatttagctcccacttacaagtgagagcatacagtatttggttttgtgttcctgcgttagtttgctaaggataatgcctctagctccatccacgttttgcagaggacatgattgcatttttgtatgactgtatagcattccattatgtacctgtaccacattttctttatccaatctgccattgatgggcatttaggttgattccatgtctttgctatggtgaatagtgctacaacgaacatatgtgtgcatgtgcctttatggtagaattatttatattcctttgggtatatacccaggaatgggactgctgagttgaatggtagttctgtttttagccttttcagatgtcaccaagctgctttccacaatatttagtcttcttacacccccaacccccttggaagtttagaatggaagcacatttcttcagatgattattaactctttgctttttctgtttttactgcatcatttaaattatggtgtggaacatcgaaaagggccctaaagcctctattgtcaagtatgactgacctctcttggtaaagcgaga

SEQ ID NO: 37232 - DNA, 1440 bp, Homo sapiens
acccaagcccctctgaagctaaagcctgtagagtacatgctcccttcctccacatcacactgcccctgcttgttcacactcaatgtgagaatccacttctcaagtttgtcttgcttattccaacctgttttgcaatgaatctctttcaacagctctatagttcctggcactcacttggcatccatcattttctatgttgtcatgtttggtatcttttcatgtatgtaatgtgcatctcttcttaggagtaagaccagaacttttctgctctgcagttttctccctgtgagggatggtgaaacttggtggctaagagcatggtttatacagacagacttcttaggtttatattctggctctcctctgtacttgctgtatcagctagggctgatgtcttcacttttttatgattccatttctacctctgtacaataaggcaaatatgaatacttacctcagagtgttgttgtgaagatggaatgaattaatggccataaagcacttacagctgtgtctggtacatagtgaccactcactaatggtcacttataattccttcacaacctgtaagggtcctttccacccaggtgatgtccctatgtctcaactgaatgactggttagggatatctttccatgggctactgtggctgcagataattgcattcttatttgagagttatgttaactagtgtgggcttttatttgcttctctctttctatcaatgagtcctgctgcttcaaccctgggttaactgaaatttgaaacctttttctactcaaattcctttgatgctgaaattcctctgcggtcacagctaagcactttgtgtggtaaccttctcttctgtcctcaggcctgctgagatcatctgctcagcagcatgtctgacacctgttgccacctcacccagccacttccttggtgacctggcaatgcccagaggggccctgccagcttggagccctgtggcaatgctgtttgattcagcaaactgatagccttctgacatcctttcttcattttagcagccaaatcacatgcaccttaatatttatcaatagctaagcaacaccggaaggaagtgagacagagcctctgggctagtcactatctctgattttacagaatggttaagccaggtgtaaaatatctcacaataacatgccctgttgtcctgaggattcaattccaccgagatataattaccatatgaggaagtgagaaatagggtttctttctaatacacagaaaatagaaaataagatgcttttcttggccactgttatcagtttcctgttaaggttctgctttgtttaaaacagtcctgttttgcttaaaaacaaactctaaggaatttttctaaaacatgactcaacctaactaggtatatatactgtactttaaagtgaacatatttgaaataattgtgagtgacaa

SEQ ID NO: 37233 - DNA, 1051 bp, Homo sapiens
agtgaccatacatgaatatgtgcctaagaaagaagaaaaagcaatattcatttctaaaggacagcatggcaaagcaacctgaagttttccatttcccttctaacacttctttaacaaggatatcaagaaactgtcttttgactcctttcttcccacattccagagtccttccttaaggatgcattaatttacactcaaggcggttagattttaccaggacaatatttgccaccatttaggattattagttgaactggttattttagtatgttgactaactagtggaacctaaatggatggacccatacctgcagtgctctgtgatgtttcttttttcaaatcctggaaggccttttgtaattgctatttgtttttattggtggggggagattttttttttttttttgggattcaatacttgttgcaataattgcccacgatagctgctcaaacaagagagttggaattcatctgtaaaaatcactacatgtaacgtaggagacaagaaaaatattaatgacagaagatctgcgaacatgatgcacgtgaataattttccctttagaaggcattcctggatatggtgagtaatcaatattcccttcagtttgtaaaactcagaattatcaaattccgtgacaggtaccagatgaggatttgtcttgaactagagtattggtatcaagtgagaatgaaaagtaaactgtgcaaaaccgaatattgtctgagaaagtaatggttatgcaataaaaatactttgttaatatgaagcatccccaaataagtcaagcatgaggacttgagaacatttaaattgctaatatttcatggaggaagaaaaaaactttgagaatggcaacaatttaataaatttttttaaagatgaggcttagggtttgttttttgttgttttgctatttttatttgaaaattccctggggaagggcacacatgaatttctgatatatcaatttgtctgaatttctaaaagaaggttaagggaaacttagaatgttgactcaattttaaaataatgctaaaatgtgttggt

SEQ ID NO: 37234 - DNA, 1046 bp, Homo sapiens
atttatatgaacccaatatgtagaatacagggaccaagtgttttgtttttgacatctaagggacaaaagtaatccagcctcttgaaagaatggagactttccaaaaatatctgaactgattattggtattcatataagataaataagtcatcttttaggtctttattctttgatgtctaaatatacaggagttttatttcatcaagttatttaagaggcaaacattgacattagctattgattataccaaaatgcaatgatgacaaaaaaatataccttaacatttgacattaaagttactttctgaaagtgaaactcagggaaaatcaatgaagtaactcatcacaccctctgataagtacaagtgactaaagagtctaggaaatacccaacctcaggaactagggtgtgactttattatactatgcttatactagcataaaggttgaacttaatcattcttttatgctcattgtgaaggaagtgtgtaagttgaaggcattttaagaggatgaaatactgaaactgatattacagagataagaatttgtgtagaaagtattaattctgtatttctactgttacatttttgtaattttttttaaagagccagactttttttgtatgtattatcaaactttgagataaaactagttaaagcagaagagctcttgttgaaacagcacaaagtacctggcttcctagacccagcacaaagtaccttgcccctcagctgacctgatgcaactttgaaaaaccatagggttcccagaaacttagtttgaaaaccttcactcttatgagcataaccctataaccatgagagaaaagggttttattggaaaaggacgtgggacaccggctagttaatacttctggctctgattctggatgcattaagcgatctttcaatgaaaatgttgaaagtattttggtttgctctgagtttgtagtttatcaattaattgagctttttattgaatcagcctcatttaagggtagttaatataagttcacttactcttgtgcttgctgtgggattaaaa

SEQ ID NO: 37235 - DNA, 1043 bp, Homo sapiens
ttggcaactacagtaggtcttccttaagattgggcatggaagagacaaatgtcggagaaaaatacccctcttgttttgagtggagaaaatcagaagaaagggagagagatcggggtgtgccgaaagcaaagccaatgtgatcatcaagataataatagccatacattaaggtagtcaagatcatagacttgagatctgaacttggatggagatgatgaactacacagttttagtctcatcaaaaagtcagctacatcagatggaactgaagttgtttgttttgttttactttttgatgctgtaataactctggcatgacttttcacagcaaattagaattaagaccttttaaatttgtcccaaatggttattgatacctgcaataatacttttccccctggaattatattttcctcttaaaatatatgtgtgtatgcatacattcgtatatatagtgtgtgggtatgtgtttgtgtgcatatgtgtgtgcatatatatatataaagaaaatagtgtagcggaaagaactctgttttctaagtcaaaatatctgattttgaacttggggtccagtgagccacttaatttcaggtttaacttctggcaagttttatcttctgaagccagaagtcattttcttttaaaaagaggcaatacttgtaactcttttaaagatcagatgacataaaagatatgaaaatataaactataacgtataaatatactgaactgtaaagtcatacaaatttaagtcattaatgttactgattggagttcatttctcagatttcacatagttgttgggcacagaaaatttggaaactttggctttcattcttgcacagactaatttagcatcatattcttgttctttgctgatttatcaggtaaggaaaaagtcaagtaaaatgatttggatgcctcactgccagggaatgcttgataaattaaaagcctggcttcctagggacattctgactactgttgtttataaccaagatcttttgcaaccttagacttcccaggaaaagcctgggctttgt

SEQ ID NO: 37236 - DNA, 1034 bp, Homo sapiens
catcctgcctgtggtttagatttgagatagggacccctactttctttcccctaagagcagatctgtgtcattggctataactgctttctggtcagccacatgacacgtggacttaacagatggtttctaataagattgaaagcatatcttgactccacttacctggccagcactggagaaaggaagattaagagagatttggatgagtgtccttgtcacataacttcccctccctagaaaacttggtccaatacgttgtaatctggtggtgcaaactcacaacttttcttcccttctgtgagtgtgtatatatgtgagtttattgtatgtgtgtgtaaggtgtgaatgtgtatgtgaagtctgtgtgtgatgtgtgtatatttgaatgtcctgtgcatgagtttttttgtgactgaagtgtgtgtgaggtgtctgtatgtgggatgtgtgtgtctgtgaggtgattgtgtatgaggaatgtacatctgtgtctgtggtatatagaaaacgtgtgtgtggtgtatgcacttgctgtgtctgcatatgcatgaattgagtatgtgacttgagtattgtgtgtgtaggaggaggggggaagtaaaaaggcaaggtgacagtagagactggacaaatgaacatagccgggcactattcctttaactcctagaacagacataacttgaagtgatctagacttgaactttggagtatgaagttccagccagctgtgtaactatctatttaatatttggaagcgcttagcctgcttaaatcttgattttatcatttctattagagaagttttaacttaaatgctctaaggtgggggtgtccaagggagaaaatacagtcatgggttcttagtttctgtttctggttgggccagaaaagctccttcctcatccctcttttccacttatcaacagagacagaagctaaaaaccatggcttctggctgctaaagcctaaaataaaacaaaacagaacaaactcatcaacaataacagcaaaataaagcaggttggaaatgactg

SEQ ID NO: 37237 - DNA, 1048 bp, Homo sapiens
atctccattgctcatctgccctagatggttcaggttggttgctgtctctattagtgtgacaagagttaataaaatgattaattaaaaagagccttaaacgtctacttagaaaacactagataaatgctaagtagggtgctttttggtggatcaagagagtccagatcactaatatatggatggcgtataaattaaatcactgtgtaagactgcaaaatgtcagagaaacattttaatatgttccccccagcatttgcctttctgtacatatgtcttagaattataatgcctacattttaactatggttttctgtgggtatatatacaaatagatagcaactgattaaaaaaaaagatctcaacttttttttttcaattcacaagattggagtatttggagatagggctgttttttctctttttttccttttaaagccatccacattttcttttctactgctttctcactcaaaaaatgtaagctagaaaaagttgatctcatggaagtaaaaaggagaacagagattactagaggctggaaacagtagggagaaggggaggatagagaaatatttgttaagaatacgaaatgacagctagataggaggaattaagtggtagtgttctatagcactatagtatgactatagttaacaacgatatattatatattttcaaatacttagaggatattgaatagtcccaaagaaatgaaaaatgttggaacatatgctaataccctgatctgatcactatgcattgtatgtattgaaacatccctacgtacaattattatgtatcaatttaaaaaatatctaaaaatatatgtgtacctaagtgtatacaccttatatatcctttgatttccttatgaaacacagcatagtttgagatttaaaatgaataaaatggttctttatgctctgtaaaattagaaaatccttcagcttttagaagctctctgttggtttattagttgatcacaaattaatatgtccctttggtttaatctgtatcataaaacaaaagttgactgttcccaaacatg

SEQ ID NO: 37238 - DNA, 1035 bp, Homo sapiens
ggttggtttaacagagatgagatatttcagtgaagtctgagttttaaaaggatatgcaaagaagtgattatgctgccatatttactctaagctcactaaggaaaaggggacataagtttggtgagggtcagaacaacttctaaggtcaatgcactggaggactcattgggtttggaagatttttggagtcagaatactggaggggatgagctagaaagagagaaggtagggagagacgcttaacagtggttatggggcaccgttatctgtcatggcaaggccttgcttatggtaaggaaaggaggtttcaggtaagattatctgaagggagatccagaaactgggagaccgtgggaggaaaagataattatgagttatgtaagagtttgcgctggagagagacagggctaaaatgtttaaagactgagaggagagacctttaggtcagtagaaaactggattaggaggggagcagattaatgatgtgagttacaaagacattttagggcaaggaagagatcatggtctggaagcagcagagaagaatgagaaagactcctacttcactaggggcagaggtacaaacatgtggaaggaaaaatagccactgcatcagagggctgaagtaaatccgtattctcggtgggcagccagtagtgtcagagcaagatggtgcaggaaagtcagagaacatgctgaagatacaggagcataaggagattttgctgatgacagactgaacgctaggagtcacgctggcgagtttgcaggaattggggaaggctggggatttcaaagtaggggatttacagagccatctggtgatgagcaatgacctggcagtcttggactttgtgtggtgacggttgtgtattcaagacaaggaccttggttttaagaccatgtagtcagacaagcacaaactcctctgctgggatggccggtttctttggtctatttaattagttccagaaacagtaattcatcctcactgcatttatagaaattgaggggagaggtggtgggtaccagact

SEQ ID NO: 37239 - DNA, 1044 bp, Homo sapiens
tttctctgtctcttatggtaataatacccggagaagagcattgctgccagtctcctgggaactaggaacccagaggagggctgtaggcaaagtgtaataccagaaggtggggagcaagtttctgggggaaatcatctgagaagcacaccaggaagtgctgctggaatgtttggggaagaccagtcagccctaaccttcagccatgtctgtggcataactggctgttgccctctgtggaaatcatgggaggtggaggcgctgcaagttgagggtgtctgtaccatttgaaaggcatagttggctttccacgaaatcaaaagacctgaggaagattttccttttaaagaacatgccgattggcttgtcatgtttaaggaattacagggattacattatgacaattggcattgagaaaaaagtgaagaaaaccttggataaccttgcagcttattattcacgtgtgcttcccatgaccattgacatttatcttaaagagaaaagatgtgaagcctgttcgtacgagctgaagccgttgctactgatggtaaaatctcttcttaagaagacatggtctttcttgcaaacttggcagaaatgttgataagaagaaaataaaaacttgaatcttaaagttcattaaaataatgaaaatcatggctttgattttttaaaaaatattctttgtgtaaatttctttataattgaaaagctcctatgtattcagataactaaaggagtttcagcactttttttttcttagatagaaagctaccaaatttgttcttcaagtagcactttcaggaagaagctttactatctctaatgtagcaaaataatgtcttttttttaatggttttgctttttaaaaaatcatgtttttaaagctgcgattcattcagtatattgaaatcacatatttccaggtcttctggtcatttgatacttgaccttagttattcaacctttttgacttggagactctattaataagtcatatggttataaaggcatttggcatttacaagtaaaaagtaatgactaatt

SEQ ID NO: 37240 - DNA, 1045 bp, Homo sapiens
gaaaggacatgaactcacccttttttataatataatgttaattttttagagagtaagacctaaaactatatatacgtgtatgtaatacgtatatagtataatctcaactacataaaaaaagacaaaaaattaaaagattgcaaaaaaagtcaaagtattaataaatattatctctaggatttgaataattattgctattttctcctttatactcttcgtattttcactttttccacaatatgtctattattttaataatcagaaaatcaatataatttattttaaatcttggcagatgaacatagtgaatgaactatgtcaaaatgcggttggaattttgttgaacttctttacagaagactatatagatgagtgtttttctaaaaaatctttggatagataataagatcaattaaaattgagtaaattcatctgtttgcgtgtgtgtgtttaaactatttatctcttgtgtgctacttagctcctgtattgctttcgtaataagactgaggtagttggtgaaaatttgaacaattcttgcataaagattttattgcataggttataggataaaatgcaagagaaatgttttgtggaaagagtacttagtagagaatcagaaaggctttatgggtccttcattttggtcactgttatacctttgtctaatagaccattgatataactttctactctataagagattgatacctagttaaggaaggtcatgatatattcactttgttacaggaaatttaaggtgcccagaaaaaaaaaatcaagaaccaaaactaacgaatagagagctctattgttattgactgaagtataaacttagatcccttagcaaagcgaaactcacagtccatacaaaaccccttgctatgtccgttggagaaggattggcagcaagatagcaagtatgtggaggatcattgttcatgaagcaggggtagataggagccttttcatatacttctaaccttttttattgtctaacctattgttatgttgtctcattaagaagaggcaatataatgtagtg

SEQ ID NO: 37241 - DNA, 1049 bp, Homo sapiens
tagtttttcaagttcggttttacattgcagacataaaggaactacttttgtatctcttagacaacaattctgttatagaagtttacaggctaatggcaaacacatctcataattgtccttccagtttcttgacccatgtttacttccctttaatttcatgccataagtcagtgctcttgacaaagtatactctgaacatatttataaatcattattttttccaagcagttaatctctaactccctttttcatttctgtatctccatcagcattttctttgcagggttcaatactcttaatttgacatacagacccatccctgagagcaagggagagagaggaaagccctggcctttctttttgtaccttgattttttccattcaaactcatcattgttggtgcattgaaatctggaggtttgagtgagagatggaatcagagagatttaggaatggattcagattctacaactaaaaaccattaggatgcctatgagctttgttttctgcataatatctgaattacaaattgtatttaacaagtaaaactaagttgtgtccgactaattgaaaaccactttggttaatgttacctctttttgtgtccatttaaatccattaaatctttcttacttttgcctttaaaattagagtaatctatacaattcatgctactgactctgccttttaaaacacacaaatattaaaaaaaaaagagacatgttctggtgtcttcccctcagcccagtgagatgtgttacacagtagtctttgttatcagcctttggtttctgataatttagaaagctttcaatccccatcacttatgaaagtctgtgaacaataatttttatttaaagatttcttacagtgccgaatcttacaaccatttataaattcatgtcatgttttcttaaagttacagaactcttttcaatttttaagccttaacctcttgtctgcatagcaaatcctatttattttttaaaaagctgaattcaagtgtcatctcttaaatgaagattcctgatcatgtcaatcaaagagag

SEQ ID NO: 37242 - DNA, 1041 bp, Homo sapiens
ttttatttttttgtaaagttgtctccttgaatactggactgtaaaggtgtgtggatgtgttctagcaaattgagaattgtagttaattgagttctggttatttaactttttactgtagtttgtacttgttgcttgttcagagtctaggcaattttacatgggcttattttatcctttctccctatctccattagtcttcaagatcaggaaaatgatttatgtcattttaaaatagagccttcctctgtctctcattttccttcttctctctctctaaggtatattattgcctactatatcctgtgccctgtgctggaatttctcttgtgctaatttttattgataacatatgatggcttaaaatgtcatctagtgtttagtaaattcataatagaaaataactttgttccctcacaaatttttacagacatttaaaattagcacttcaatatccaagtattttgctttttcttttctggagagaaactaacacctgtaggtatttgttgacatgcaaaaaatgcatgcaagaattttaaaattttataccctataattggttgtatactattaattagacctcttctttagctctcttactgtatacactcttctgttttcccaaattctctcctctttctctaaattcctcaccctgttccccaccctttccctgccttgtctctgggtttttgtctctcttgcctcatttttccttctttctctctcactttcttcccccaccccttctctcttgtttacactccccgctcatgtatgtgccgcttcgtctttgtgtttatatctaccaggggaaagaccaaccatctttatttttaaattttattttactttaagttctgggatacatgtgcagaatgtgcaggtttgttacataggtaaatgtgtgccatggtggtttggtgcacctatcagcccattacctaggtattaagccccgcatgcgttagctatttatcctgatgctctccttcccctcactgcctcccaacatgccctggtgtgtattgttcccttccc

SEQ ID NO: 37243 - DNA, 1093 bp, Homo sapiens
cagacattatgtcatgccaacgcaaaacttcaaatgttaaagagagaaaaaaaaataactttacctcctggaaattaaagaacactctctatataatttttcagtctcatagagaaagtcatcgctaaaaatgcagaatatttggaaagcaacacgaattaaaacactgtatattagagactatgagatcttgttacagcagtacttagaggaaagttcataactttaaatacttgtaacaaataagaattaaatgaattaagcatccaatatcagaatgtattaagtaaaataaagacaaggcagaatagaaattagtaaagataaaaacagaaattaattaatttggaaaatttaaaaaatgccaaaataaagtctatgagttgtgtttgaaaaatttttaagtaaaaatgtgtgctatgctctttttttgaaatgataactttttaattgtggttaaaaatataaacctaaatttgctattttagctatttaaaaatatacaaatcaatggcattaattatatgcaaatgttgtacaatcatcaccagtactgatttctgaactttttcatcaccccagcaactctgtgtcctctaagcagtaactccccattctccctaccccctagcccctggtaaccttcagtctacattttgtgtctatgaagcctattctagatgtttcatataagtggaataatataatatttgtcattttttgtttggcttatttcacttagcatgtatcagaacttcattcctttttatgtatgaataatattctgttgtacataacataccacattctgtttatacaattgattttgttatgtgctcttggatggttctaccttttagctattgtgaataatggtgcaacacccatcttttttttaaagggaaaaagcagaaatagatgatataagaaaacaagaattgagaaataattatagatagagaaaattaaaggagattataggacttatatgtaccataagcaaataaatgtaaaaacctggataaaatatgtaatttctagaaacgataaagttctaaggctggccccagaagagttcgaaaatctaaagaga

SEQ ID NO: 37244 - DNA, 1005 bp, Homo sapiens
attggaacatagacacactcattgattatgtcttgtctatgggttttgttctgctatagcagaattgagtagttgcaactatgatcatatggcccataaggcctaaaatatttattatctggccttttacagaaaaattttgctaaattctgttataggaaatcctgaattttaagactaatcatgaacataatttgttaatcgttctcagaaaattgacagcactaatgatttataagacatcaaacaatagaatatttaatttgatttactagaaaattatgaataatgcagaataatatatactctgaattaaacttattgatctcaatttggaaaacagaaaacaatgaagagatataatcaaatctagagccaaaagtggccaataactacctaaatattaccatatattaaacatcagatggaatcaactgtcaagaatataattaaaaaggtggaaggactatgctgtgaaaaaaatctatcatcttaacaacttgaactcatttttattaaatgtatatacatttagtttaaatgaaaatatagtatttgtgttatatactttatttctcactttgactttttaattaaatatgtcttgatttcatcagataagaaggcatctggtgtattaagttttgttaattgaaaaatctcaacttttttattgcccagcagggtagaggcttgctcagaagcttggactagcaaacataactagctttttttttttttttttgtctttccttctcttttctctcctgccaccttaatgtagggtgaatgaatttgccacctcaaagctatctacaatgggtcaggcaaaataaccacaatatgggtttgtacataatttgggaaggagttcttctcctgtcccttcttcctttggcaatgcctcttaaatcacagttgtgttggttgaacagctctatgaatatatgaaaagccactgaattgtgcacttaattgggtgagttgcatggtatgtaaaataca

SEQ ID NO: 37245 - DNA, 1025 bp, Homo sapiens
agcttgaggaggctttaatttcccacaccttaaataaacataattaagtaaactgtgtttgctatgcaaatacagtctaaaagcaagactcctagttccttctttcgaactaaattattacccaacggtccttcctattagaatttgtagcaccaatattagttagaaatcagaatatttggattttaacttgtggcactgccagttgggcaagtgaccttgagcaagtcacaacctctctgagatttgtctttttctcagtaaagtgaagggattggatatggaaggaacaaactccagtgttttccaggacaggaagatattagaagttgctgagaatggaggggtcagtggagaaatggagtgtgcagaccttacaataaggtatctgatagaaacaaagtgttgaatgctctatgttggccaaacttatgctttatgtagaggtgggcagacagatgcaggtaagaaaactgggagagaggtgcccagttacaaatgcaaaacttcaactctggtcttctgtccgatgatctggagttcttcccacttcgccacactaagtcttgtcgctgacaggagtgtgtgggcttgatctaagcaaatctctgaaagagagggcttatatttggttccctttatcctccatctatgccccttctttattttttgggtccctttctctttatccactacatccttagttgtgctcaggtgtttcctgagcatgagctttgtaggcgacacatttcaggagctgaaacagcccagaccccacctctcttttcaggctccccactatgatgttgacatttgccctccacagagcttataccaggctgcattatgtttcttcatgaagactagttagctaagcaagtacttagagccctttcattcattcagtttattgtagagccttaatactgcagatgctaggctgggcaatgatgaagggagaaagacggctttaactctgaaggagcctcagcccaatgaggaaagcaatatgtctacgtgtaact

SEQ ID NO: 37246 - DNA, 1023 bp, Homo sapiens
gtaaaatgtttagagtttaaaagccgttggttttagatagccactatcaaattagtttcttgcctcaggtatcagtacaagtttttagttcctcttatgttagggaacacagcttagggttccagcgaatcgtttttaactcacaatatgttacttttgactattcataaaggttgatccatgatcaggtgagtggtttttgtttttaaagactgaactctacatagttggattcagggaacaccgtacatgtgggattacacacagagcaccagagttctgggcttctgatcatattattctcagagtaattttggaggagagtttagtggtaaagatcaacagaaagtatactgcctctcttttaagcttttcacaaagtaatatacaccagaatattccctcttccatttgagcagaagctggtggggctgagttggagaaacagagaaatgatgaaatgtaattgggccaaaattttatttaactgtgtagaacagaagttattttgaagtcagagttacttgtgaatatataaaaagtgaggtctatttatagttggcagtggggggaattttcagaaacatgattaaaaggggaacttatttgaagcttagatcaaaggaaagatggattagctctatagaaattggaatgaaatgttttaacaaaaataaacaaaaacaggaaaatacaggctcagaaactcttaaaatttggctgccaaattttattggcttttatgtgtctttttttactcttcttggaccattcatttttttagtttcagaaatcctatcctgaagtctatcaagaacgatttcctacaccagaaagtgcagcacttctgtttcctgaaaaacccaaaccgaaaccacagctgctaatgtgggcactaaagaagcctttccaaccatttcaaagaactagaagttttcgaatgtaataatacttccacagcaacaggtgctagagaccactgttgttgttttgagtgaatggtggttaggagaaagactttgg

SEQ ID NO: 37247 - DNA, 1050 bp, Homo sapiens
ttcaggtgtggtattggtatcttactgtaaagtcttcctgtaaagtatattgatatttagtgtggtgttggcataaggatagatatttaggcctatggaatagaatagagggtccaatagtagattcatgtatctgtagtcaagtgattttcagcaaagaagccaagggaagggatcatcttttcagggtagtgttggaacaactggatatctattatggaaaaagtgaacctttatactgtatactgtatgcactcaaattttactttggactggatcacagattcaaatataatagagatatctaaaaaccttccaaaagaaagtataggagaaaaattcttgcaattttgcatagacaaagatatcttagttcctagaaaacataaccataaaataaaaattacatcaaatagacttcatcaaaattggaaatttctgctctttgaaatatactgttaagaaaatgaaaagacaagaaaattcccattacatagctcacaaaatacttataactaggatatgtagagaacacttcaatactaagacaatgcaataaaaaaacaaaaaaactggacacaacaagaatatatatgaaatactcataagcacatgaaaagattattaacatcattaatcatacaggaaatgcagattaaaaccacaatgagatactaccatgtacacactaaaatggctaaagccaaagacactgacataaatttttggtgagtgtggggctcctggagccctcagacattgctgataggactgtgaaatgacacagccactttggaaaatgagttcatcatttctaactaagttaaacatacacataccttaatttcattcctaggtatttatctaagggataagaacacatgtgttcacacaaattgtgtggtgttcatagcagctttattcataatatcaaaacattggaaacaatctacatgtctatcagcaagtgaatggaaaaatattttgtagtatatccatgcaatgaaatattacccagcaataaaaataaactatgggtacatacaacaa

SEQ ID NO: 37248 - DNA, 1032 bp, Homo sapiens
ggaggaggggggtagaatgtatctttttttgtcccctatgactgctgttaagattttattattgatttttaggaattgcattatatcttggtgtggttgtttaaacagaggtatagcttatcaaccaatggtggagctaaaatagaatacttgaaagtacttatggatgcacagaatctaagatggcccccaattttcctgctaccttgtacccttgagtatatgtgggacctgttacttgcttctaaccaataaaatctcacaccagttagaatggtgattattaaaaagtcaggaaacaacggatgctggagaggatgtggaaaaataggaacgcttttacactgttggtggaagtgtaaattagctcagccattgtggaagacagtggcaattcctcaaggatctagaactagaaataccatttgacccagccatcccgttactgggtatataaccagaggattataaatcattctactataaagacacatgcacacgtatgtttattgcggcactgttcacaatagcaaagactcggaaccaacccaaatgtccatcagtgatagactggatgaagacaatgtagcacatatacaccagggaatactatgcagctataaaaaatgacgagttcatgtcctttgcagggacatggatgaagctggaaaccatcattctcagcaaactatcacaagaacagaaaaccaaacaccacatcttctcactcataagtggcagttgaacaatgagaacacatggacacaaggcagggaacatcacacaccggggcctgtgtggggggtcgggggcagggggagggatagcattaggagaaatacctaatgtagttgacattactttggtttgacattactttggtttgtgggtgccacaaaccaccatggcacatgtatacctgtgttacaaacctgcacgttctgtacatgtaccccagaacttaaagtataataataataaaataacatgtatgtcaagggtgacatgtaattaagcaaagctcagtaaatt

SEQ ID NO: 37249 - DNA, 1026 bp, Homo sapiens
ttccaatgcccagtaatgaggaagctgttccaatatttcctcaatgggaaggttttcacttgcttttgagtctaccttgacctcaaataaggtctcctcctctgacctgtcatctggaggctcctccaccaggtcttcagcctgagcttcaatgaattgttccccagggtgtattctgttatgtgaccagatgtggatttttttcacccactgcttggcgtgggcagcggatcttctggaccactgaagacacattctcatattctcaaggcaaaattctgaagaaatcataaaactgttcccaccacaaaatgttctttgtaggtggttcatgtctgatgcattcttctaacattatccacaatgtagaggtatttctggaggttcacaccctttcaataacaggagcacaatattctgctaggtacagatgtcttcagcagtaggagttcttgcgctcatttgtcttctgagaatattgttgaaaatttgaacatgtctttttgattctcaaagtcagcaagctgtggatcagctcctaagtgctaaagagcccacagttgcagagttcctgagtgggttgagtgcagtttcagtctgtggctggtttttatttgtgcttgcagaatttctttcatggcaaccagagttttggaaacttctaaaggcttttctgcttctttgttttgttttgttttggtttttggttagaaatgcctttctttccagaacagccatgcttttcagggcctgcacagtgcctgttgcagatgtgcaaggcatcccaagaggaagcaaagccctcactgcttggtggggccaggttgcctgctcttggtctccatgtcctccctttccccgtccaaggccgtcactggcttgggctgctccgttggtccttgcagccgtgccgagcgcacatctcctgatagctcctactctgggcaaggagctgactcggcagtggacaaattgaggcaaccaaataataaacacaaatggatagtcaacacattttttgaaaga

SEQ ID NO: 37250 - DNA, 1028 bp, Homo sapiens
gcaatctggatgaaattggagaccattattctaagtgaagtaactcaggaataaaaaaccaaacattgcgtgtcctcacttataagtgggagctaagctatgaggatgcaaaggcataagaatgatatgatagactttagggacttggggaatgggtgggagggtgatgagggataaaagactatacattggttacagtatacactgctcgggtgatgggtgcaccaaaatctcagaaatcatcactgaagaacttattcatgtaaccaaacaccacctgtccctcaagacttattgaaataataaataaataaaaaggattctacaaaaaagaaaccttataaactgagttcctagccatgatgggatagggggttggacaagcctcagtatgtcccttccttagtaacctttaaccagatttctttcctaagaaataaacagaaaccagctctggagaacaagaaacagatgactcattgctttatcatcttaagccaatcatctgaggctgtgactggactcttcctactttttttgcaatttcacaatacatcccttgctaaaaactgaccaccatctccagaccggttttggctgactggtggaggatacacggtgatggttttgtgtcctctgcttcatcttttgacatcagtgggctgaaaactccattttcagatcatgctaatgccaccattttttgaacatgcaacccatgaaaggtgcatgaagcgcaattgcacatgtgcatatttcttctttcataaatattcatgactcttcctttagcttattaaatatgcatatttggctacctcactcagcataaattcctgttccctttacccctccctcaaagtgcttgctctcagctgctgttggaggctttgtttcccatcctgtgggatggccagcatacaggctgaaaccctttatgagaaataaagctcttcttttcaaatttatccacctcatcattcttaaattggcacaatccacacctggttattgcagctgttataaaa

SEQ ID NO: 37251 - DNA, 1052 bp, Homo sapiens
cttacatgacaaggtagagctggagtctcttctggaagggctgactgaggagatcaacttcctcaggcagctgtatgaagaggagatccaggagctgcagtcccagatctcggacacgtctgtggtgctgtccatggacaacagccgctccctggacatagtgtcatcgctgaggtcaaggcgcagtactaggagatcgccaaccgcagctgggctgaggttgagagcatgtaccagatcaagtatgaggagctccagacgctgtctgggaagcacggggatgacctgcggcatacaaagactgagatctcccagatgaactggaacataagccggctccaggctgagactgagggcctcaaaggccagagggcttccctggaggccgccatcagagatgccgagtagcgtggggagctggccgataaggatgccaacgccaagctgtctgagctggaggccgccctgcagtggaccaagcaggacatgggcggcagctgcgtgagtaccaggagctgatgaacgtcaagctgccctggacatcgagatcgccacctacagctgctggagggcgaggagagccggctggagtctgggatgcagaacatgagtatccgtacgaagaccaccagcggctatgcaggtggtctgagctcgacctatgggggcctcacaagccccggcctcagctacggcctgggctccagttttggctctggtgcgggctcctgcgctttcagccgcacctgctccatcagggccatgattgtgaagaagattgagacccacgatgggaagctggtgtccgagtcctctgacgtcctgctcaagtgaacagcggaggcggcagcccctcccagcctgtccgtcctgcggctgccccagagcacgcgagggaggcggctgtgcaggggagcacagggaatgggagacccacctgaggctcagccctagccctcagcccaccttcaggggagtttcctgcctggggatcccccatgcccatgtctccagctacaaaacaattcaattgcttttttttttttatggtc

SEQ ID NO: 37252 - DNA, 1044 bp, Homo sapiens
tgagtagtaaaaaggttgctgcactgcacagctccagggaacatttaaatatagaccctgcggttgtgcaattttgtggttctgaatagtggatccatacttccaactggcttttgacattataccacccattatcactctcagggaggctagatttaaagatggacttctttgcccaatagtgcactccctgcactttgggagtgcataaacataggtaggtaaagaattgttaactcttcatatctgaataattttttttcacgttttcatttcttaggtccagtttgttattgtcgccatccacataagccagttctttttcatggaggattgcaagtatcagtttccagtctttgcgtgcatcattatgagttacagtttcatgtttctgctgctctttctccatttttggtaccgtgcttacaccaaaggtcagaggttgcccaaaactgtgaaaaatggaacttgcaaaaacaaagataattgaagcccaacataagtctatgatcgaaactgatacattgtcttccttgacaatcaagagatatttacctatgcagtgcattttgtatatttttcaaaactaagagcttgtatttttatggtaagttattgggatgtctgatatttgagagcccgaagcttccagataacagtcttctgataattagagcctacagcagccagaatttgtttttgtttttgtttttgtttttttagctgcttttaaacctaatccaaaggttttgtttaaaacattttgttgcagtgaaaaaaagatatgaagcaatacagtactcttcaaagaagtccaataaagatgaaaaatatcattaggtattttgagcacagacggagatccatgtgataaaatagattccttctgctgggtctggaaagtctggaaaccacctgtaggccctggctttgtcatttattgactgtattcagaagatactatatttgctctagagttaactcccattttagcaagctagcacaggtgaaaattgagtgagtttttgataacttgtcatttaa

SEQ ID NO: 37253 - DNA, 1032 bp, Homo sapiens
tggaagtctgagatcagggtgccagcacggtcgggtactagtgaggaccctcttccaggttgcagactgccatcttctcattgtatccttacatggggaaagagggcaggagagctccctggggtgccttttataagggcactaataccatcatgcaggcgatcagtgcataatacagctcctctcccactgtttctagccccaggatacttccttattcctgttgatttctttttcacctttctaaagatactagtgatcactgcccaaatagctcacagttaatagtaggatctgggtgctcagttaaagaaatgttggttgctgttagttaccccttggctaagcaggtgtgtactcacatattgtttttctcttagatccaagagttgaagattggctcctcatgtcctcgcctctgccacaaaccatcctcctaggattctatgtctattttgtcacttccttgggaccaaagctcatggaaaatcgcaagccctttgaactcaagaaagcaatgataacgtacaattttttcatagtactcttttctgtgtatatgtgttatgaggcaagtgtcttcagtattcctaatgggagaattttgcctgagtttttctgtttatgtgtcattatgttttctgttataagggtaaactttgcaatttaaggaattaagaaactgatctcactagagcaggtatttgccaaaatagtgttaggtatagaccaaataataaactcatttgaggatctcagtataatctgtctcacagataatgagaaaaactaacatctattccatggatttgtacataattgccttaatggattattgaattaatccataaattttagttttgaggaaactcttaaagtaacatagctggtaagtggagggctgatatttgaacccaggtctgtctgacatcagagttcatcttgactcagtaaaaagttgtcatcatcatggtaggcacctttggtttctggatactctgatgaactatgggatggtagactgttttggtt

SEQ ID NO: 37254 - DNA, 1020 bp, Homo sapiens
ttcatctatcacctgtatttatctggcttaagattctgtgctttccatgtcttcttcagttttagtgtaacgtctgtcagtgcacattataatattccgcttggacttgcccggcttttccccaaaacagctccagatgctcatttccattaagggtcctgccattatcctggtctccaaggtgccgtgccattcctctcccattcgttaaatatcttctatccaatttttacatggtgtcttctagcctttatcagtctcgcccactcccatcctctcttcaccactctccctcttccccactttgaacacatatgcccttctctgctatttgttatcatcttttatgtttgctttgcacaaaaagattgcaaacagcttaggacattaaatcttcaggccttacagctagtagttgcttgataaatgtagaagatgatacagtataaattttggtagcacacatcaggcaggtttgatgatggaaatttttaagccaggttttacaggaagttacggagtttgcattggtaaacgtgtaggagctggtagacattgtacatgaaggggagaaaagcctgtgttcactccattgtcacaaacaggtacccagctgttctgatgaaacattacatttagaggtataatgaagcaaatcagcagaaaaccatttatccttatcttgacaaaacaaaatatgaaaacacataaagttaaaaaaaaacctttttattgaaaaacgtagcacatacataaaagtgcataaaacataaatggacagattaacacagtagatgtattcagcaatagaacgacagtgttattctggccatagataggctacagtcaggccaaataggaatcttttcacaaaaacctgtataaggtgaagtgggcctggactgctcccaagaggcattgccaagaaagaattggctgtgcatggagaggcttgaggagagagaaaataagactggaaattggtaccaaaaggataagatcagggagccaagaagagag

SEQ ID NO: 37255 - DNA, 1026 bp, Homo sapiens
gaaaaatatagcagggaaagctaattacagaaaggaaaacaatcactttgctttctattgtaatgaatttctggacatcggaaggttaaatctagggctcaggatagtgctagttcttctgttttaattctggaaaagtattaaattcagggaagaaaactaacgaagtttaatcataaacattttttcttctttgcaaagaatatgtgtgtagttcttaatgtgctacctagaatcactgttgtaaacctcctgggtgcttagaattattacaaatcatttattataatacaaatttttctatcttgctagctctatcagcaacatcctcagatacagaaggcatacttcttttgctgccatgtggcttcttgttttttgtttttattaaaagtaatcacaaaaactgcaattacttttgcaccaacctaataattagacaattaaaatttcaaaggaagggggtaaaattaaagaactatgttgcgacctctcttagttctctgtgtgtaggacttttcaggtgcccaatgtcctcttgactgaccactcctcatgaagatactggtaaactttgtgctagtggattgataaccgctctccgagttcatgctcttctgaggtctagaaagaaatgggtgtctctgtcccaacctggttagttattctgtctctaaaaacacaattaagtcaatgttaagactaagttcattaagctgctcgtgtttttatgccttgacagtttgttaatggtggttgcataagttttacagaactagtttcgtcttgttgcccaggctggagggcaatggtgtgacctcagctcaccgcaacctccgcctcctgggttcaagcgattctcctgcctcagcctcccaagtagctgggattacaggcatgcgccaccatgcctggcttattttgtatttttagtagagacagggtttctccatgttggtctggctggtctcgaactcctgacctcaggtgatctgcccgccttgacctcccaaagtgcagggatta

SEQ ID NO: 37256 - DNA, 1084 bp, Homo sapiens
gctctttgttttttttgtcttagggaagcggtgttaagatgaaaaagactttcacttgtagtgctgttgggaatgagccagtggggacagaggttatagatacccagaagataatctatagggtgagatttctgacagtgctgaagggaatctgaacacaagtagggggattgacattaaaaatggggaggaatctcaagaccagcctggccaatatggtgaaacctcatctctactaaaaatacaaaaattagccgggcatggtggcgggcacctgtagtcccagctactcgggaggctgacacaggagaatcgcttgaacccgggaggcggaggttgcagtgagccaagatcgtgccactgcacaccagcctgggcaacagagcgactccatctcaaaaaaaaaaaaaaaaagaatcatgtttctatgataacaggagtgaagaaggaaaaaggataagtggaagcaaatgtgtttgtaggtttgttggtaagacattaaggaaattctgattgactgcctcctattttctccttgaaataaaagatcaaattacctgttgtgactgagttggtatatttgtggagaagatttgaaatagctgaggaatactgcagagaagaatacaagtgaaatatagtgggactggcagtcattactgaaatccagaggaaatgaataatcttttatggtgatgtcacactgccctaattataagattttttacctgaggagagcaagggattggctaagtctgggctcatgggcaagtctggctcatggcctttttttgtaaataaagtaggttttggacacaaatattgaaactgcctttgcaaaacttatatcagtgagaaaactgtggcagtaggggagatctgatctagccaccaccccctcttgcctttagccttcaagctgccttaattattgctgggctttggccaagctaactttggaagacatttagttaatactctattttttttattttatgtatgtatttgtttatttatttatttatttatttatttatttttgagacagagttttgctccgttgcccaggctgtagtgtagtggc

SEQ ID NO: 37257 - DNA, 1556 bp, Homo sapiens
agaagtagggggagggatagcattaggagaaatacctaatgtaaatgatgagttaatgggtgcagcaaaccaacatggcacatatatacctatgtaacaaacctgcacgttgtcacatgtaccctagaacttaaaagtataattaaaaaatatataaaaataaaaataaaattctctgcatactaggaatagaagagaaattccttaatttgatacaaagtatctatttttttaaaaaactaaagcaaccattttatttggtggtaaaatgttgaaagctttccctttgcattatcctcattatttcctctgttcaacattgtactgaatgtcctagtcagtgcaataaagcaaaggaaataaaagggataggaactggacaggaagcatttaaactgtcattcacagaagacatgattatgaacgtagaaaattcaaaagaatctatagccaaattattagaattaatataagtaaatttagcaaatttgctggatacaaggtaaattatatttctgaattccaaacacaagcgattataaaatgaaatttcaaaaccaacattgtttaccatagcatcaaaaatcatcatatacctagtaatatatttaatgaaaaatatacaagactattccgaatacacagagaactttagaacattattgagagaaattaagacctaaataaatgtggggtattccatgttcaagaattaaaaggttcagtgtgataaaaatatcagttctacccaaactgatctatagaatcaatgcattttctatcagactcttagaagatttctttttttgaaaattgactagctaattctaatgttcatatggaaatgcaaaacagcagggcactcttgaaacaaaagagtgaagttggaagacttcactatcagatatcaagacttgctataaagttatactagtgaaggcaatgtgatattggtaagtaaaaaagaaaaacaccatacagtggaactggataatcaagaaatgtacccgttgatgacattaatttgatttatgataatacaggtaacccttgaatagtgtggaggttagggaagctgacccccatcacagttgaaaatctatgtataatttttgattaccccaaaagcttaactactaatagcctagtgttaattggtagccttctggattacataaacagtcaattaacacaactttgtatgttatatgtaatacatactgtattcttttattattattatttttttttttttctagacggagtctcgctctgtcacccatgctggagtgcagtggccagtggcgcaatctcagctcactgcaacctccccgtcctgagttcaagtgattctcctgcctcagcctcccgagtatctgggactacaggcgtgtgtcaccatgcctggctaatttttgtatttttagtagagacagggtttcgccatgttggccaggctggtctggaactcctgacctccgttgatccacccacctcggcctctcaaagtgttgggattacaggcgtgagccaccatgcccggcctatatactgcg

SEQ ID NO: 37258 - DNA, 2088 bp, Homo sapiens
agaagatggcatactctaattgtagatatgtttgagtggcccatggtaagaccagaaggagctatagcagtctggactctaatatctttccaaagagctaaccagtcaaagtgcgcccccagtacagaactatatactgaggaaaactgctggaaatagaatccaaattgagcagtacagagacaatagaaacaaaggaaaaagatgtccccgataaaattggaaaggtgaacagaaacaggaaatctctgaaagtaagcttccatattttgaaatcttaccccccaaaaaaaatttttaagggaagaagaggatgttttaatatataaaatttaaacattattgtaagtcaagcctccattctaaaaggttaagaaaattaattttacataaaaatgagcaaaggaataggattaaggtcaaagttcctacaaaatcattataaaaacaaagagaataagaagtggactaaagctgctacagatagtgaagtcacaccggaaagaagtatctataaaacagatgagaactctaacctaatatttcaaaactaggtaaaagttgttttataaacatataataaatgagagaataatgttaagttattagaaaacctcagaaatgagatgctcaaactcagaaaattagaaataaaaatatttcagaaatgaagactgactaaaacttaaagaacacaaataaatggaagaggtaatgccttagaaatagaaactagaaaggaggaaaattttaaaagccaaaaagaaatgaacagaggaaaataattcaagaggtgtatatatagaacataggcaaagaagatccagcataacatatgatagaagttcccaaaaaagaaaccaaggcaaaagagcagaataaatattaaaacaataattcaagaaagcttttctaggataaataagatctggaactttatataagagggggggatttatattgtcactagactttgactttgggctttctggcagaagaaatgaagcttcttatccaagatgctcaaggaaataaaatgtgagtcaaggattttatatccagccaaactgatttcagatacaaaaaggacggataaattgtcaacaacacaagaattcagagactgttgttctcattagccattccttaggaatcaaccagagaatgaaatcattcaaccagaatgacaagagagacagcaacttaaggattgacggtgagcaataatattagcagatagcaacactttatataaatgtataaattgatggatctagatattggtttgtctgctaatatcacatcacaacaaagagcaatgggaaatagaaattattttaaattatagcacatgaatgcagtcaccaaagtccaggctggaaattacaggacaaatgatctggtttttgcaacaaataaattacaagagaggggaaaagtacaggagggaggaagaaaggtagaggagacctatagcttaaagttaaaagacattaaaatttttttaaaaagcaaagctaatattcatgtgtacactctaaggtgatgaactatgaactatacagaagagaaagacagtgactacgataaaaatcatgataatgagttactttgaggtgaaaaggaaagagtgatgatgtagagagattgcattgtttggatctctgtgaagaatttttgatggttcccctatttttgattgggataaatgtatatttgtaattgggataaatgtatattttgtaatggaataacattcacaatgtctaagattttataatatttaaatttggtgtaacttccaaaagagacataaagaatttgttcaaggagaattttgtcttgtaaaaaaataagtatactaaagaaaggtactttgaattaaggtaaaaacagtgaaaataacctgaaatatttgcacatttcaagaatatcctccattttgcagaattttctctgaacttatcatatacctcatcaactattgttatttcctaaattaaacattatggcttttagggaagtcagttaaaggtgtcaacaactccagatttaaagatgatttttagacaattttatgccaaaaaa

SEQ ID NO: 37259 - DNA, 1103 bp, Homo sapiens
ccagtgctccagccggtgtgaggacacgatatgctggggtttttgtccgcacgccaaacgggtttggaggaccctcttcgccttcggagagcagagtcaacacggaggtaaagaaaaccttactttttggctaacaggccagttagaatctggaccaatgactgtaagctttgccccacactttcccgtctcatcgctctcctgccaccaaactattatttgccctctaatgctgtgtggcttgctaaaataggatcccttttatttactggtaacaacttgcaggcggggggcggcgggggtggggggggttccccgggggtggggggggggttcccccgcgggctcaggtgaagacactataaacctaaataagaatacttcgttgtactgtattccttctctcttaagttactccaaagaataactgccctccacggactcgttcattcattcagtctgcatatttagtgaattcctacagtgtgccaggcagcctattaaaggcagaggacacaggccaggaattgaacaaagttcagaatgactagagcggagaattggggtagggaccattgacaagagatgaagtagacagaaactagatgaggaagagccttgtgtacttgagtagaggtgtgaagatgagaataaggtaacagctattgcattttgttttctgcttggagaatgggttgcaactgagaacaagagtgggagccaagttaggtaactgttgtgattacacttgtccgggagagagttgttggaagcctgggccacagagttgccaagtagaataaagatagtggagagatttgaacaacgtctgagaaatagaatcaacaggccatggaaattgagtggatacgtgaatgacaaaaagagaagaatgaataatgattcccagatctatgccttgtataagaagttgaatgttggtaatatactctgagagagggttttccaaagggaagaagcaagttgtacttttaattttgcccacattaattgaggaacctgtgaagatatttacttggagaacacagttgcttatgagttctgcgttctggagaaatttaaatattagtttccaacatttt

SEQ ID NO: 37260 - DNA, 1080 bp, Homo sapiens
aaattctttataactgacttagtcatttgccgcttagcagtttatatactgaaatgaaaacatcttgtggggaaaagtgactttagattatgaactcaattcaaatgaactctatttaaaatggggtcctattttggacaaaggaaattaagaatgtaaaagtcagaacagtcttgaggtaaaaagtgtgctttggcttaaaagggatacagtatattaattacatcttttattattattgtttatttcttagaatcatttctggctttctcaaaacaaaataatattaatgagtacttctatttgctgcatttttcttattacagcctttgagacagctggtaattataagtcattttccattttttaaaacataattttataaagaattctcttatctcgactatgtagaataccacctactggacagaacaatttttgtactcacaaacactgccattttcttagagatggcttgagaggagtaacactatggtttaaagcttgcagtaaaaatgccaaacactgtagtaccttggaacccagtttattcttgtgctaagcagaactgtaaaatagttaaaatgtcttatcaagtaattcgccgattacaaagacaccatttgttttttatttcattctttgttttaactcatgtggtagtgatatttaatactttctgatcaaacaggttcaaagtaaaacgttaaatttcacatttcttttaaagaactcttaaagtgtaacagttacgccatacttcataagtggtaaagaaaggtataaaatttggaaacattttgttgggcatagtagtgattgggtgaaaaggataaattatatcaaaatgagaatgtgctgtaattggaagtagggagctaaaggatgtttctttcagtttagtagaactggaacgttttactattaaacatggcttttataaatgcatggtccaataattttattcactgttagtatttaattcactgtcagcttattaatgttttctgtacccattaatgaattttaaattacaaaaaattgtctagcagctacagtttaaaaatgaaactagacatt

SEQ ID NO: 37261 - DNA, 1012 bp, Homo sapiens
tccggtctggcggtgagtggggagtgggatccgatcccgtggggctatgtaggggaagttggtggctgcagctgccgtggttttctcctggtgtccagcagaaacggcggcggcgcaaggtgtggctgggccaacccaggatctcccaggaccctccgctctgcgcgacaaggggcccgcgcttgccaaggccgacgggcaggagtgaacgtggcctccgtgggtctgcagccccgatagggtaaggagggaagagtgagcaagggagaaacgtaaggaataagggaaagacaaaggaggaagtgcggacggccgtcaagtgctacccgttgcagccgcaggggccacgcgggtctggttgggagatcgagcctggtcgatccgttttgggcggaagagtaggatttattcctgaaagtgtggaggcgcgagcgtttgggtccgaagttgagttgcagggagatgtgtggcctgtggaccatggctcttttactgcaaagttcttttgcttatttctgaaacttacattgtttattcgctactgggctggagaaggtgaaggcagatcgatctcagtagtacctaattctaactgtatgggtgaggtcgtatgaagtccaggagctaagatatttaacgtattaggcactttcatgtgtgttcagttgaaaatcgtggggaagatataattaaaactagtcacagttttcttggggtaatgggactgtgggtgaattactataatttgtttggttatgtcttctaattttttaagtaaaggacacaaattgtatgatggacccaaaaaaacctttataaagagtaagatgagctgtttgattttgtagtggtgtacctaatccagtaaataaatgagtggcaacatttttagtataaaaattgaaaatctaggaacggatacgctgtgtaagtcagtcagtgagccaacttgtctcccgtatgtcaatgaactaaaaaaattttattattgaaataagtaacttagtaaaat

SEQ ID NO: 37262 - DNA, 1048 bp, Homo sapiens
acggggccagctgtgggacttgtgtatgcgcaatttgggtatattcaggcagtcctggaaccaatcctccatgtataactgagggacaactatatacaatatattcatattttcgtcctatagcaagtcagagcttctctgattccaggccatgttcagatgatgattaaaaaacaaaacaaaacaaaacaaaaaacaaaaaaaaacttcggctgggtgtggtggctcactcctgtaatcctagccctctgggaggctgaggcgggcggatcacttgaggtcaggagttcgaaaccagcttggccatcatggtgaaaccccgtctctactaaaaatataaaaaattagctgggcatggtggtgtgcgcctgtaatcccagctactcgggaggctgaggcaggagaatcactttaacccgggaggcggaggttgcagtaagctgagatcgtgccattgcactccagcctgggtgacagagcaagattccacctcaaaaaaacaaacaaacaaacaaacaaacaaaaaaaacttctccgatctctagagcgtgtcttagatgctgttccattttaatctactttgttaagacaatatagcaataataatatgtacacacgcaccaatacttaactaaaggctaatgctgagtcatggcaagataattccctgggtgtggcaaaggtgacagaaatgcacactctctcaaacatggaggctgtaaaaactcatgatgtcatactcccctggattagttctggtcatctaacctctccaaattaaggctctacagaggcccaatagatgcaataataaaatggaaagatatgtatagggagtacttatcttgctctggttttccacatctttgggaggtaacatatctagatgcaatgcagggtttactttaaagagtctaaaagcaactacagtctctcttaaaaattctggacataagtgatggactgaggccagaatctcatttttagtttttatggttcaaagtttagaactcttagtttgaaccaggtttttccagtcttggaacta

SEQ ID NO: 37263 - DNA, 1976 bp, Homo sapiens
tgcccctttgtttgccttttaggattttgaatgatatgactgcatgaaaaaccaaaaatcacagaaaaataatttcatccttattgactttaaaactcattacattagtattgagtggaatagatactagttttgttggtttctgtgaccaagcagcaaaaattctaaattcatcgttttaagggaatgcaaatatatgaagcattttttaagtttatgtttatactccctaccttactccaagaagaatttaaggcagttcaaatcccacttaaatttatctatcagtcataaatgcaattctcagtcagtatgtattattatccataggtcttactcatccagttccactgaagaggacacttcaaaacaaaagaaacaaaaatatcagaagaaagaaaagaaaaaagaaaaaaagagtaaatcaaaaaaagggaaacatcacaaaaaggaaaaaaagaagagaaaaaaggaaaagcattcttctacacctaatagttctgaattctccagaaagtaactgagactttggcttaagccgttaaatttaaaaatttgtttttaaaacgtgtttgcccttccttggaatttgctatatattatgctttgcaataaatcacagccttttccatatagacatttttcgtatttgggaccattatccctctggcaatatatttttaatgtgctgtaactgtaaagtattaaatcagtcttgttacttgatagccatgccccaagtatagctatttgtgtatactaaacacatcatttttggtatttgtgtctctgtgtgtttggctagtgttactacttcataagttcattgtaaaatggctttactgccatcaacatgggtcatctacctagcagttaatgagtattgctggatcaggtgtccaccttccaatgatgaagcaaggtaaggggtaatgttttgctcttgacacagagaaatttaatagctttatgtactaaaatataatatcttttaaagatagtgaaattcttcagttttttaaatctctagggattttttttcaatgttgtagaagatgcagctgcttaatggtcttgactaggactttttaaatgaatggtgtctgcaggtagatgatcatgaaaatatctctaacaaagttttactcttctatgaaatgcagaatttctagtacctgcctcctttgtttttgtaataattaaaatacttcttgtataaagagattagttcagcctgttagtaagtctgcagagatgatgctgagttggttgtgatttttagaatagactcctgggttgttttacaaatgtgccatattggcatgtcttacagtgatacctcaaacacagaaatttttatttaggaagatagctaaatctttattagaactgatttttattgtattcagtataaattttatgaagcttgtttctatgagtactgtggaaaattttataaatgtgagcatatatatttattttgtctgacataatttgtagttttaaagcaagtttcacactgaacttaacgttttcataaatgaccagtttgggatgtttctctcttttactttagtggcaaactcaagagtaaaaagtgtcaaaaaaagaattgagaattttattctgtactttttaaaatttaagagccagggagttgcatcatgaaagcctttgtataataatggaaattttatatgggtaagcattttcaaacacatattagtagatacgttttttaaatttctattttcacattgatcagtgttactttgcttaatacttaggtagcccttatgtccactaaagtaaatgcttatgttgtagaagcatcgaacatcaaccaatgtcatggcacagcaccaaagattgcaaatacctcactatggtgcgcttagaaattttcaaattgataacctatagatacggctgcaggtgaattcatgatagtgaaatcagctaagtatacttaacct

SEQ ID NO: 37264 - DNA, 1106 bp, Homo sapiens
atagaatactatgaattgctatagaattactatgaactatagaattactatggttcagaaccctaactttgtttaaacctgcacttcccagtattatttgaccaggttctttattctgtggcagcctttttgaacctccttctacagatagctgttattggaacactgtgcttttgtactaactgaagtttgcggaggagtacatctggagctgtgagagaggaaatgtacactctttattaagcctactgtgtgccaggcactggtactgggcattggaaatacagtggtgagcaaggtagacatggttacgcttcacacagaacttagaatttagcagtgaagagagagaaatttacagaaagtgggacaagtgccatggcaaggaaaatacaagaccttagcacaaagtaagggcaccaaacacatacaggatgggcagaaggactttccaaaggaggtagcacttaggaggagatctgaattgtaggaggggtggcttgaagggagaggagactgcagtcggaggaactggatacgtaaaggaagaggaaatatgtgaaaagaggaaatgaaagatgttttctatggatggaactcaaatacagatgggagataagtgagaaattaagtacagaggtagtagctgtagctaatattgactaatatttatgtgtcaaatatgtcagaatgaaagatgttttctgtggatagaactcaaatacaaatgggaggtaagtgagaaattaagtagatagtaactgtagctaatattgactaatatttataagtcaaatatgtcagatactatatcaaacattgtattctatctcatttaatattcacaactgcactgtgaaatgagtattaatattcccattttacagatgaggacactgagggacaaagaaatcaagtaatttgcctattatgagacagctggaaagcaagaagtcagtctggttcctctagactgtgtacttcattcattttgccatcgtataggataacttacaaggtagtttccagctctttaaggacctgtaggccatgacaagaggtttggcattatcctacagatggcaggaagccatttaaggatttta

SEQ ID NO: 37265 - DNA, 1052 bp, Homo sapiens
ccagctcctccggaggctgaggtgggaggatcacttgagcccagtagttcaaggctgcggttagctgtgatcatgccacttcactccagcctgggtgacaaagcgagatcccatcttaaaacaaaaacaaaagaattaaaacaggaaaactatcccatccctcaaatatttaaatcaaggttttactgtatataccagatatggttactagaaggaaaatgtactacacatgtagtaaacgtgtagaaatgtacaaccaatttaaatccaccttgcagatacatccccacatttgctttactggaagacacttgacttgtaagccttgctaatttgtacaaatatagccaaatccatttcaaaagtcctttgtttattccatgtttctaaatgctggttcatttttaaagatccatatggttttcctttatattttatttcatatggtgttttattcttctgtaaaaatgtactggaaaaggagaacaagacttgtctagactacattaatacaaagcaataggtgcttccagagaactaaaacaaaaatacacttttgggataaactttcttagaagagttttgaccacaggtgcctgcagttcatggcattcttggtggggtgaaggccattgcagttgtcctctggtttggtattttttaaagaacatgaaccatgattagaaaaccactaatattaatatattgaaacaataattttagatgaagcaattattcttgcttccttctgggttaagtcagtttccaatttgccatcagaaaagaattttttcctcaggatatctattcttaaattcttctttgggatctacacagttcttcctctgattctgggttaattttatgtattactaaaagtaattattttaaaatttaaataaaataagttggtgtcaccaaaagctggtgtcacttaggtgaatatatcctgcacttttttggttatgccattgtaaatattttttgcctattggatacctacttcagtacacaatttaaaataaatattttccataaaaaagatttatagt

SEQ ID NO: 37266 - DNA, 1086 bp, Homo sapiens
gtgttttggtcagtttcttctgatagccatgcctaggcaaaagtgactagaagattaaagagttgaaagtatccatacccaaaaagtataccaacgttacagtctcaaccaaattctctagttttgatcttgctcaattgtccaacgtcattatgaatttagggtaaaagaatggcaacatatgcattcatctactcactcaaaagtggaaccctgatttccctaaagtactgggctttatgtagattccctatgaccaactttcttaattctttttcatctgaagccgttattacactttcacgaaaagaaaaccaaaaaagtaccatagggataaggtgctatttttctatccaaattcagaataaagaacattttccaattttatttcagcttttcttttaattcttagcattccagtgtacttcttagcctagtctgaagttaggatcacaggcctaagtttgggggcttctgccacctgtgggttggtaaggatttagtagtgactgatttttgtaaagggtgttgagagtaagcaattagaattccttttcctcaatctcttctttcttcaatttgtactgctgcaataaaagtcctaaaagtataccaattatatatttgggataaagcgagactccttgcattatttttctttgtaatttttcctgaagtggcttggatctggaggaaaataaggtaaacccacagtatggcagagaagagttgatgggatgtagagtgaatatgatgcaaagtaaaaatgagaaagttaggtaaaagaaagaaagagggtgtgaagttagtgaagattattattatagcataaaatttaaaaatgatatttaaatataagatgggagacgactgagagttatatcgaggaactgaaataagctggttcatatttggcctactttaagagacattggcttaagtgtagtagagcttgaattaaatgatttctcaagatttttacatttgtaagaaatatggggctgacagcacagagaatagtttgtgggaaaggaaagaatcaggaatttatacatgaagaagaaggaaaataggaataagagaatg

SEQ ID NO: 37267 - DNA, 1092 bp, Homo sapiens
ggcgtacaatgttatgttctgatatatgtatatattcattactggatgattaaattaagctaattaatataattatcaccccacatacttttatttgtggtacaaacatttaaaaatctacttccttagtaatttttaaatatacattacattcttaactatagtctccatgctgtgcaatagatctcaaaaacttattcctcctaagtgaaaccttgtatgctataatcaatatctccccattcccttctctcccatccctagcctgtggtaaccaccattcaattctctacttctatgagttgagatattttggatcccatatatgagaccatacagtatttgtccctctgtgcctggcttatttcacttaccataatgtcctacaggttcatctatgttgtcttaaataacaggatttccttctcttttaaggctgaatagtatttcattgtgtatatattaacacattttcattatccattcgttgtagatagacagagattgatttcatgtcttagctactgtgaattaccccacaatgaacatgggagtgcagatagctccttgacatactgactttggatatgtactcataaatgggatagctggatcctatggtagttataattttaaaatttggagggtcctccacactgttttccataatactaatttatattctcactaacagtgtagcagggctccctttctctacatcttctgtaacacttgttatcttttgtctttttgatgatagtcattctaacaagtatgagatgatttctcattgtggttttaatttgcatttccctgatgattactgatgttgaacattctttcatatgtttcttggccatttatatgccttcttttgagaaatgtctgttcatgtcatttgcccactttttgttctatggatcagaagattctttgtacatttttaatagggtgattagttttcttgccattgagttgtttatatattttggacattaacccctgatgagatgtacggtttaaaatattttctcctaatctataggttgtcttatcactgttaaatttcctttgctgtgcagaagctttttc

SEQ ID NO: 37268 - DNA, 1088 bp, Homo sapiens
tggactcacacttctaaaaaaatacagatttggaggtttcctttctagggctccctactttttgggattttccgtcactttccagcagccctcccatttctgtagcattctgtcctttgattcctcaaatcagaagactgccatcttctgctttatattttaccaccctgccagtaaatagcttcaataaactgaggatagggaagagaggagggagctaaatgaaatagattgtctcctcttaatctttcttgtacagaaattctagagttcgcaccttgtgttttcgtttgtttgatagtttatttctgccaaatctttatgacctttggtctaataaatggttataaaatcttttcaaatatatttttatgttctgaataaaaaatgtattaaatgaagggaagtagctaatgtaaaggcaaattaagtgaaccccaaagtacatactatatctgcagcactgtccaagggagaagatggccaacagcaaaaacaagtatttcaagatataatagcagatattttcttgtgtgggagatggattcaactatagttttctgacactgcctgttaaaatatataggtacgatgtaggaatctgtttcttatttttttatgtatgtatgtatgtataagatggaatctcactctgttacccaggctggagtgcagtggcgtgatcttggctcactgcaccctccgcctcctggttcaagcgattctcatgcctcagcctcccaagtagctgggattacaggcacccgacaccacggctggctaattttttgtgtttttagtagagatgggtttagctatgttggccaggctggtctcaaactcctgacctcaggtgatccacctgccttggcctcccaaagtgctgggattacaggcatgagccaccacgcctggccagaatcttttttttatactgagcattggtgaagcctctggtaaaatattatattccattttgaaaatcagtttgaggtgaatagcaaaatgaataaaaccttgggaaataggttttgtgttgagaggctaatccatctaggcttatgtacctttggaggtgacaaaaccaa

SEQ ID NO: 37269 - DNA, 1028 bp, Homo sapiens
ggagtagttttcatcatgtttggggtcagtgagcttcttagatctaatttaatcagattttcaccattttagccaatattttctcaatatattttttggttttgcccttcttgccttgctttggtgactttaattgcagatatatttggttgcttgaaggcaactcacgtatggtctgcttatgattttaaagtctctcttctctgtgtattcaattttgggtagtttctattgctatgtcttcaaggtgacttttttctacaatgagtaatccatcagtctggtctaatatgtattttcatcttatgtagtataatttttttcatctctagtggtttaatttgggtcttttaaaaaatctttcagatctctaggctttagaaaatacaaaaactattttaaacattttgtctactaactttattatatgtgtcagttttggattggtttcaattgacaatttctttattatgtactgtattttattgcttctttgcatacttcgtgatctttgattgggtgcctgacattgtgttattttaccttgttgggtgtcagatatttttgtgtttctgtaattattcttgagcttttccttggggtgcagttaagttccttggaaactgattctttcttttaaaatttgttttgtagtaccaattcagtgttcagtttagggctaattattccccagtactgaggcaagtcccttctgggtactctacccaattgccctgtgaatcttgtggttttccagttggtctgggtggatctaggccctatatttaatgttgtgtaagtgctaggcattattacctctaatccttttgggtgataatttgcctggccttaagtgcttctcttacgtcatatgagccagattcacactcaactgaatagttaaggggaatcctttgcaaatctccacaattatctctttgtgtagctgcctctgctgctgtacttagtcctgtaaattttaactgtctttgtctcctgtattttctgttctgtctcttcaactcaga

SEQ ID NO: 37270 - DNA, 1034 bp, Homo sapiens
acattaggttctagggagggaatacaaagtatatgagttagaatcttgagatccagtaagataatgtaaactttagaaaaagttcccgggtaactgagtcatacagtgaaatttctgaatttttttaatagttatacttactttaattgactttatctacctggcatcattggtgagaaaatttggtttatgacatgcttgctgaataaaatcgtatggttctatattaatatatgttgacattttagtctgataaaatgtgcaacaccttagagtcttgtggtctggaatattcttaaatatacttaaggaattaaaaatatactaggaattgtgcgaatgtggaaacctttctgttaaaaaatatggacattgattagtgtcaatgaaattactagaagaagatatctgttatatatagctaacaaaacgatcataaatatttacatggcttttgtatttatatttgtaaagccctgtcttcccaaatatgacgcacagtgggctcccaatacttcacatttgcattattatatctccattggatttttaccttttgcctcaaatgacagaagttacaccaagcacatatataggtattcaagtagtagagtacatctgggcaattagcccacctttctttgcactggctacaacattcagctgtccaactttttattctgaattcgccttgatattttcccgattctctgcagggctcttctttgcttttgtaagctacttcgagtgcctttttgatgtttgagatttaaacataaatttttattttttatttttattttatttatttatttatttttgagatggagtcctgctctgtcgcccaggctggagtgcagtggcgtgatctcggctcactgcaacctccacctcctaggttaggttcaagtgattctcctgcctcagcctcatgagtagctgggattacaggtgcgtgccaccatgcccagctgattttttgtatttttagtagagacgaggtttcaccatgttagccaggatggtctccatct

SEQ ID NO: 37271 - DNA, 1025 bp, Homo sapiens
gttctgtccctctagataaccctgactaatatagcttctattttttggtttttgaaatatatacatgtaaacaaatttcttcccctcaccaatttccacttatttcacctttggtttcctgaatggggttcacttaagtatatcagttttctaaagactgctagcttttttttttttttttttttagatgtgacgaaggagtttcctgtcaactctattctgcccataatcttcatttcttaaacgaagaaggaaaagaaaagctggagtgaaaagttttgaaagagaaaaaattgatctctgtaataattttcaagaatttttactgcaactaaaattcagtgtttagtttatgaagaaaaaaatgaatggctatagtacatacatttccatggtaacagaagtgctaaatacggtattaaaaatggcaagatatgcctgtaatcccagcactttgggaggccgagatgggcggatcatgaggtcaggagattgagaccatcctggctaacactgtaaaaccccttctctactaaaaatacaaaaaattagccgtgcgtggtggcgggcgcatgtagtcccagctactcgggaggctgaggcaggagaatggcatgaacccaggaggcggagcttgcagtgagccgagatcgcaccactgcacttcagcctgggctacacagtgagactccgcctcaaaaaaaaaaaaaaaaaaaaggcaagttgtttatataggatttatattgcaagaaaaagaagaaggggaaacaagatttaatagatttagtggctgggtacagtggctgatgcttaaaatccaccactttgggaggtcgaggtgggcgtgagaggtgacagctgctggcagtcctcacagcccttgctcgatctgggcgcctcctctgcctgggctcccactttggcggcacttgaggagcccttcagcccgccgctgcacagtgggagcccctttctgggctggccaaggccagagctggctccctcagcttgcggggaggtgtgga

SEQ ID NO: 37272 - DNA, 1713 bp, Homo sapiens
gcctcctgaggtagctaggattacagacgtctgccaccatgccaagctaattttacaattttagtagagatggagtttcaccatgttggccaggctggtctcgaattcctggcctcaagtgattcacccacctcagccttccaaagtgctgggattacaggcgtgagccactgcacccagccttttgtaattatttttgtaactgtgatttaatcttaactctgttaaattgattttttttcttattgctggtccttttatatgtcaatttctcccatttttgagttgttattttttatatcacttagactgctgatatatgccttcaataattactttcaaatacatatcttatagtcagtattcaataaatattgcctgcataaaataataaatgaatgaatgaaggaaggaaggatgttaagcctttacacatcatagaatgtctttctgttctgtggtaaaaagcgtatgactttttgttttatgaaaagtctactttttactcttgaatgatggtctcatgtctctctctttttttttcaacaaacaattttttagctttttttttcttttaaacatttaaacattttaccaggatatgtctaggttttggtttctttacattgattttaccaggaaaagaatgaaacttttaatcttctaatttaagtcattcttaaattcaggaaggtttttttctggtatgtatttgtctgtttttgtacagttgttctgaatccatttttcaggaatatgactaattttgagattggatcccaggttctaaccctcatatcaataattaattttcatctgtttgctcattttatgtatatttagaaggatttttggcaaatgacataagatgaggaattaagtttttttttctaattagcttgccttctcaaaactgaaaaaatacacgtttattttctatatctttcattctgtttttattttttaatttattttttattttttatttttatgggcacatagtaggtgtatatatttatagggcacatgagatattttgatacaggcatacaatgtgtaataatcacatcagggtaaatgtgatatccatcacttccagcatttctctcttgtgttacaaacaatctaattatacttttttggttatttaaaaatctaccattaaattatatttgactgtaatcaccctagcaaatactaggtcttgaactagcaaatactaggtcttatgtattcttttttaaaaattttattttaaattatgttttgtagagacagggtccccatatgttgcccaggctggtcttgaactcctgggcttaagcaatcttccaccttggcctcccaaagtgctgggattacagccactatgcccagccatgcatttctttattattttgtacccattaaccatccccacttctcctcaaccccctgccccccactatccttcccagcctctggtaaccgtctttctattctctgtctccatgagttcaattgttttaatttttaccttccacaattaagtgagaatgtttgaagtttgtctttctgtgcctggcttatttcacttgacataatgacttcctgttccatttatattgttgccaatgataggatctcattcttttttatggctgaagagtaacttcattgtggagtactccactgcataccacatagttaggattgctagtgagattgagcact

SEQ ID NO: 37273 - DNA, 1050 bp, Homo sapiens
atatgccctcaatccctagatgtattccttgaaggttgggaatatatctatatgtgtatattgatatatatttacataacattagagagatatataatatataaaaatgtttcagaaattattaaagatattttaaaagtaaattatttctaggctagggtagcaaatgataatgtaaggaaattgtagcctagtcttatgaacgtagatgcaaaatccaacagaaaatactagaaaaacaattcataccaattatacatacagtataagaaatttataatgctgaaattcaatttcttccttcttggcatttttgttattgtcagatcttttattttgacagatgttacaaactccacactatattgtttttattctaacttaaatagacttttgaatatatatgtgtatattttatttatttatttatttgtttgtttgaaatagggtcttgctcagttgcccaggctgcagtgcaatggcacaatcatagctcattgcagccttgaactcctgggcttaagtgagcctcccacctcaccctcaaaaagtgctggaattacaggcgtgagccactgtcctgcctttttattggaacatttcgttcatttatatttacagtagacagacttctaaaaccctgttcaataattttcacctcctggtatccctggctttgtgttatccccttcccattaggtgtggaccggggaacttatgacttgtttgtaatgaatcaatagaacaaagggacatcacttctgagactaggttacaaaagactgtgactcctatcttgctgtcattctgttgctctttctcctttgcttactttgatgaggtcaactgccatgttgtgattgtccatattgtagtttcttatcactaagggtgactgcttctaacagcccgtgaggaactaatttttttcttttttttttgaaagggagtcccactttgtcgcttaggctggagtgcagtgggggcaatcttggctcactgcaacctccatctcccgggttcaagcgattctcctgccttagccacccg

SEQ ID NO: 37274 - DNA, 1100 bp, Homo sapiens
gagacaagggaacagctggttggtggaacagtcaaaatacacacaacatttattatttaagtttgctgttttatatagatgtagttcttgattcctccaaacaattacactgatctgtgattacacatcaacataacagacataataataatgaaaagttttgaaatgtgaaaattatcaaaatgttacagagagacacaaagtgagcatgagctgttggagatattgtagtggtagacttgctcaacacagggttaccaaaaaccttccatttgtacaacagacaatatctgtctgtaaagggaaactcattaaaataaagcatgcctttatatgatctagcattacactcctaggtattgacccaaatgcgttgaaaatatgtccgtacaaaatcctgcatatgaatttttatagcagcattatttgtaattgccaaaaattggaaggaacaccgacattcttcagtaaataaatggataaacaaaatgaggtacattcgtacaatggaataatattttgcaaaaatatttggagcgatgaagctatgaaaagacatggaagaaccataatgccagttactcagttggagaagccagtctgaaaatgctatatactatatgattctaactatatgaattctggaaaaggcaaaactatggaggtgggaaaaatatcagtggttgccagaggttgagactgagaagggagagtggatggaagcaatgcataggttgtcccagtgaggactgactttcttaatatagaggtgagaccaagcgtattgtttataactgagaatctgcctgactcacaaagcaaaacccaaatgcactatacaggagatacgccaagacaagatgattcagaaagggtaaacataaagggatgggaaaaagtgtatcaaatggaattcttttgcccatgtttaaagtgggtactcttattgagttttaagagtttttttgtattctgaatataagtcctttcttaaatgtatgtttacaaatagtttctcccagtctgtgtcttgtctgtttttattttcttaatggcatcttgaagcacaaaaatttgaaattttaatggcattgtattta

SEQ ID NO: 37275 - DNA, 1052 bp, Homo sapiens
tttttttgtagagatgggatttgcaatgttgcccaggcttgtatgcactcctgggctcaagtgatctgcctgcttcagcctcccaaagtgctggaactacaggcatgagccatggtgcccgacttcttttcattttctctgtggtgttttggagaacttaagttcataatttgattaactccatttaatcaagttttctattaaggtctgagctcaaatctaagaactgtttgcccaactcagaatcacaaagatattctcctgtattttctgttaaaagtttttaagttttaggtttcagtatttaggttcatgatccattttgagttaatgtttatgtatatatagtatgagttagtgatatcgggtcatttgttttcatttggatactgactgttccagcggtatttgttgaagaaactatcttttcttttttgaatttcctttacacttttgttgaaaattaatgaccatgtatatgtgtatctatttctgaactctgtttttctctattctgtgctttggatatttctgtttttttgttctgtgtttctgtctttaagccaataccacattatgttttttaccaaagctttaaaataagtcttgaaatcaagtattatgaattctctaactttgttgttcttttcaaaattgtttcatatttccatgtaacttttagaattggtttgtcattctgccccataaaaagctggaactttgattgaaatttccctgaatcataggttaatttgtggaagattgctatctttaacatacttagtctgaatgcagatccattagcactgtatcatctttgtatttatttaggtccccatttatttgatatttaaacattttgtctcaccagtgttttgtagttttcagcatacaggtcttgcacatcttttgtcaagttcatccctttattatttcataattttgactattaaatggtattcttttaaatttcaatttttttctttttcctttttttttttttttttttgttgagacggtgtctcgctctgtcacccaggctagagtgcagt

SEQ ID NO: 37276 - DNA, 1048 bp, Homo sapiens
caaagtacaaaaaaattagctggtcttggtgatgtggtcatatgatcccagctactcaggaggctgaggcgtgagaatcacttgaacccagtagatggaggccgcagtgagctgagattgtgccattatactccagcctgggcgaaagagtaagactgtctcaaaaaaaaaaaaaaaaaaatagaacaaaggcggctaactttgtgttaggtataatagtcacagatattttactatctgtgtcgaatctgaattgattttactcttggcctaaaaaaaggactgacattcattataataatcagaattatggaattgctgtaggaatagatcagtggatcagtgaaacagattaagaattaaaataaagttgcctctggagcagcgtgagagttagggatgccacccccctgcaaagttttaaaatattaagaatgtttatattttcatctatgaataggtatgaatagtccacagaaaatgactttgttttcttcttttgtagctatcattgttaattatgcaagtaaaatgtttaaccgctgaactcagtcaatggcagaaaaaaacacctgaaagtaagattcttattttaaatttgaattttttgtaaacctattaatagcaaattaatttaataattgtaggaaaaattacaagatccatttggcctttttgaaattgcccaaatttcattgataccgagaagccactttttttctgtgaattattttgtacttcttttattattattgataaacatatcttacattagattataataagcttgattatggagacgttattatagctattatgttatcctcatagacactgccttatgctcgctagaaatggtaaattgttcctttttttttttttttttttttttgagacagggtctcatcgtgttgtccaggctggagtacagtggcacaatcatggctcattgcagccccgatctcccgggttcaagtgatcctcctacctcagcctcctgagtagctaggactacaagtgtgtgccaccatgcttggttagtggttgg

SEQ ID NO: 37277 - DNA, 1377 bp, Homo sapiens
ggcatattttatgtctttttttctagctaatttatttatttttattttttacttttttaatttctttgttaagaacgaagacacaaacacattagcctaggcctaaggcaaggtcaggatcatcaagacatcagtaggcaataggaatttttcagctccattggaaccactgttatatgtgcagtctgtgattgaccaaaatgtcattatgtagtgtgtaagtcttatctgtgtgatgatggctgtcaaattcatattgctagctcaaaactttgctttcaactgcagacatgtatatctaattgcttaatcagcagctccaataattgacacctcaaatgtagcatatcctaaactgagtttttaatcagcacttctcccatgtttgccaaatctgtttcttttaccatctttctcacctcagtaactggcaacgtaataattcacttctctctgacagtccatatacatgctgttaagaaattctgttggctccatcttgaaaatatatccagaatgggacattctgtgctgcttctatcaatattatcctggtctacatcttgcttgggtcattgcagtagctttctaattggttttcctgcttctatccttactgcctgtagttaaccagagttgtattgttaaaatgtaattcaaatgattcattcctctgtttaaaactaattgcttatcatctcaaagtccttaaaatagcctaccaaacccacatgatctcatccctattgtctctctgacctcatattctactctgtcttacttaatctgctgtaatcacaccagctccttcactactgtggaaacatggcagtcatattcctgcatcaaggcctttgcacttgcagttccctctgtctgaaccctctgcccctcttcatccttgacctcatttctttatcttcttcatgtcttcttactcagttgtcaatttctcagtaaccttatatgaccaccttatttaaaattatattgtccttgccctagcatttcctatgtttcttccttgtcttttctccatggcacttataaatcatttgatatactacagtatatatatgttttattttttattttattgtctgttttccttacttagaataaggttcacggtaggagggatttttgtctattttgttcattgctatattcttaccccctagatgagtatctggcaggtaataagtgttcaaccaatactgctgaatgaataaatattttttgctttagtttttcttataaggctaaaaattcacaaagcatatatcaatgaatcaggaggatctagatccggatagtactacagatgtgggagatgttacaaatactgaagaagaacttattagagaatgtgaagaa

SEQ ID NO: 37278 - DNA, 1024 bp, Homo sapiens
acaaccatgctctggttttactttaaactcatgatactaatctcaggtgagcctgtaatgctactactgaataatcctgtaactttatcctctcccatttttttatatatctgttttatacatctcttttcctgtgctcttaaactcgcagtactttcttcccatcctttcatagctgataaccgtagttaccattttacggagaaaagagaaacaatccacatagaatttctacaagttcctagcaacacgtctacttacctacctgcatctacactcttgatattctgatgaccctcccattaaaatggatgaactgcatgtccatttatcttaagccaacacctctacttatgtactagatcccattctttcttctcccctttctctcttgtattagcaacatttccttcttttactgtaccgtataaagatgctatattttctcccatctttaaaaaagaaaaagtctcttttaaccctatatctccctccagctactaactgtatttctctcttgtgctttaaagaaaaaaaaatgtgtgtgtgtgtgttttctttttgtttgttttgtttgtttgtttttggtatggtcttaacggtcttgctttgtcacccagggtggagtgcagttgtgtgattgtggctcactgcagcctcagtctcctgggttcaccgggctcaagtgatcctctcacctcagctcctgaataccttggaatacaggcatgtgctgccatgcctggctagagaaaacgttcttgaaaacgtttcatatacttaatatttttaattccttgccttccattctttcttgaatccactccaatcagatttttattcttgccattcttctaaaactactcctatgaaggttatctgtggccttcatttttgtatgtttactccaagaaaattgttgtgataaattaccccagaatgtagaggtgtaaaacaactatttattacgctcatgagttttgtgcattagaaattcagacaagacacagcaggagcagcttct

SEQ ID NO: 37279 - DNA, 1030 bp, Homo sapiens
gccagttctacattgccataatagtgtagggtatgtcctcccatcttatttttcatgaggatcttaggctagttttggccctttgtgcttccatgtaaatttttttttttttttttttctgagacggagtctcgctctgtcgcccaggctggagtgcagtggcgggatctcggctcactgcaagctccgcctcccgggttcacgccattctcctgcctcagcctcccaagtagctgggactacaggcgcccgccactacgcccggctaattttttgtatttttagtagagacggggtttcacccttttagccgggatggtctcgatctcctgacctcgtgatccgcccgcctcggcctcccaaagtgctgggattacaggcgtgagccaccgcgcccggcccttccatgtaaattttacaatttgcttgtcaagtcccataaagagaaacaaaaactttcaggattttggttaagattcagtagctcaacttgggggagaattaacgtctttacaatgtgggtctttcagtccatgaatatgaagtatctttccatttatttaggtctgccttagaacttctctgttaataagttattgattaagcagtataaaatgcagaagttccatatgaataaagatattgaggaggggtattctgatttgcgtttgatgtggggtagacatcctcatcattctttattgcactgtctacctccttaaaattgcccagttttgaatcttatgccaccagactctaatcctcttccattctttgcaggaatcatctagcaagattgttttactcaccctcattccttgaagatttttagctcctggctcattgccctttgcagtactactatcataattcttagtgattttaatatccttatagatgatccaataacttggcctctctttttcttgaccttctttcccctagtgattatgttctctcttgtcttagctacttattcctatggccattctttcactttgtccctgtctgtacctgtggtgctacacca

SEQ ID NO: 37280 - DNA, 1035 bp, Homo sapiens
atgtgcagagttttgcattacttttgcatattgataatgtattttggtggtcagtaaagaaatatttatgtttgactttttcgcttaaaaatattctaaaattcatgatgactgattttggctttgtgaacttaaactgtatcttatgggtatagcaggtgagattttcagccttctactagttgacattcaaattgttaatagctaacactgataaagctctttatatgctagctacagtacttatatatatatatttatatactcatttaattgtcataaccctagggagtatttaatattatcttcattttataggaaaggaaactgaggcatagaaagtttaagtgacttgcccaagtctcatagcttttaaatatcaaaacagatttaaacctgtatagtctggttgcagagttcatacctttaaagtttttttttctctaagtaatgtgccagtaaacataattgtatagacttatgcagacatatctatctttaggattattcctaagaatagaacttctggatcacaagaaatgcatgtaaaattttgatggatattatcatacaaagtgattgttccaccaacagtgcaagcctcttatttcacatgcttgccagtattatctcttaccaattttacattattgccattctgaatgaaaattaatgcttgtttaatttggattttcataaattatatatgagcttatgaatgtactttttctgtatttaaaaggtatttgttttttctttgaattcctcatttgtgttctttgccagtttctattgaattgtttttgttgtttacctttttattgtaaaaatgcagacacaaaataaacgtaaagtttactaattattatgaggtgaacacccttaccatcatgctagtcaaaaaataaaactttgataattacctcagaaatctctccatttggcccatcccagccacaacccttttcccccttccactcttcctccaaagtaattggtaacctgacttttttggtaatcttttttaaatttttt

SEQ ID NO: 37281 - DNA, 1299 bp, Homo sapiens
tgttgtaaggacttttatatgtattcttaaaaattaatcctttcaagaatcctatgtaaattttgtactattttaatcctccttttatgagatgaaagaagtgaagcagagaaatcatgcagctagtaatatataaaaatgttcattatagcattatttgtaatatcataaaatcagaaattacctaaaatctatcagttgggggtttagttaaattgtggtttatgaaatgtaaagaagccattaaaagaaaaaggttggtcaatatgtattgacaggattccataatatactgttgagtgaaacacattagtttcaatgtgtgggtaatacttttttaaaaaaaaatttgttttgtttgtgtatgttggccagtatgtgcatggaaagtgtctggagggatatacatcagattcatagtagaaatttctgggaattgagcagcactttttcattttaattgatttacccttattgtgatttttttagtatagcataaaaacatgtttaagatttagaggattcatttgagttagaaaatctgagaaaattaagtgggtatgtatattctgttatacaaagacaaagtggtcagttttactaaggcaagatttagccatggggaaggatttcatcttcttgagatcagactcagtattttgaggaatacaattcagattgcaatggttgaggaatgaataggagatgtagaaataataaaggtgctaaatgctattactttctaactgcatgtcaaacatatttaaaaatatttaaattgtaggataatcgagttcacattggaccaaaaatggaaattcgggtcgttacgttaggattggatggtgctggaaaaactactatcttgtttaagttaaaacaggatgaattcatgcagcccattccaacaattggtaagtatgaatattggtttttaccttaatagacaaaccctagcttacagccaagttcttggggtcttatttgatactgatctgtcatggtggtgggctcttttctggctctaagatatcagcatctcagagaaaaaatgcaagattgtatgactatgggattgaaatgtggatggggataaaaagaagaaacagagtattggtgggacagttggaaggaatagaggattggtgatcctggctgagggtgtggggtggggggtagttgtggaacagagctggaaggtacatggatcccaaggtcctaaggaccttggtggaggtttagagggctaggagctgttacaggtatacattcaccacgtaggagtaggaatggggttga

SEQ ID NO: 37282 - DNA, 1030 bp, Homo sapiens
ccaaggggaaaatgtctctaggccatgtcagagaccttcatggcagcccctcccatcacaggcctggaggtccaggaggaaaaagtggtttcatgggctgggcccagggtccccatgctgtgtgcagcctggggacttgatgccctgagtcccagctgctccagctgtggctgaaaggggccaatgtagagctcgggctgtggcttcagagggtggaatccccaagccttggcagcttccatgtggtgttgagcctgtgggtgcacagaagtcaagaatagaggtttgggaacctctgcttagatttcagaagatgtatggaaacacctggaagcctaggcagaagtttgctgtaagggcagggtttggaggggcgaggggcagaatgatatgcttgagattttgggtgtgcccccacccaaatctcaacttgaattgtatctctcagaattcccatgtgttagggagggacccagggtgaggtaattgaatcatgggagctggtctttcctgtgctattcttgtgatagtgattaagtctcacgagatctgatgggtttatcaggggtttccgcttttgcttcttcctcatttttctcttgctgctgccatgtaagaagtgctttttgcctcctgtcatgattctgaggcttccccagccatgtggaactgtaagtctaattaaacctctttttcttcccagtcttgggtatgtctttatcagcagcatgaaaatggactaatacaatgtgtataccacattttgtttgttcattcatctgttgatggaaacttgggtagcttccacctcttggtttactgggaatagtgctgctgtgtacgtgagtgtacaaatatctcttcaagaccctgctttcatggtcttttggatatatacccagaagtgaagttggtagatcatatagtagttctgtttttaattttttgaggaatccccatactgttttccataatggttgcaccatattacagttccaccagtggtgcacaagggtgcagtttctccaca

SEQ ID NO: 37283 - DNA, 1053 bp, Homo sapiens
tagtgactggatatttagaaaattgtcaagactatatttttaaatgatcacttagtgtacttcttaacctttatgtaaatagatagaactcagcttgttgtagaatatgtgttaaaaattaaggagaaagccttctaggggcaaggctgaggatagatatgttcagtccagtttttttgggagaaccacaacacagaatggcttttttttttttaagagccaggaggaaggggggccctgcaggcaatgactccatcaaccttttatatatttattcatttaatgaatatgtattaggtggcagctatatcagatgttatttgttgcataggagtttaccataacaaatattccttctgctaaaggatctgacttttattcataggttcaggaagagtgtgtatgttgtcctgggttacaatgttatatgtatttcttaaggtaggttgctgcaaaaagtatttgaaaatgcttgttttagcatgtatagtaaaagtcaatgacaaaataggacttgtaaaattaaatgatagagaaataggctgggcacggtggctcacacctgtaatcccagcactttgggaggctgaggcagtcagatcactttaggccaggagttttgagaccggcctgaccagcatggcgaaaccccatctctaccaaaatatacaaaaaaatcagctgggcatagtggcacacacctgtagtcccagccacttgggaggctggggcacgaggatcacttgaacccggaaggtggagattgcaatgagcagagatcacgctactgcacaccagcctgggcaacatagcaagactctgtctcaaaaaaaaagtaaaagagatttaaataatttttttaaactgtggcaaaatatatgtataacataaaatttgccgttttaaccatttctaagtttagggacattaagtacattcatattgttgtgcagcctttaccaccataattttttttatgtgtatttagattttttttttttttttttgagatagagtcttgctctgtcatccagattggagtgcagtggtgtg

SEQ ID NO: 37284 - DNA, 1028 bp, Homo sapiens
agtttctagcataactatcttgagtgcattaaaaatgcttttagagcaataagataagcttctagctgactgcctagaaaaacagaagatacaaattcagtgtcagaaatgaaagggaatacactacagacactatagttattaaaaggctaactagaaaacaccatgaccaactcaaggattgtatatttaacaacttagatgaaacagattccctataggatacaaactagaaagctcactgtagaaacagataacctaaacagaaccatatttattaaggaaattgagtttgtggttaagttaaaaaccttccagtaaagaaaactacaggcccagataacttccgtgatgaattttaccaaacacttaagggagaaataatatcaattctaaacaatctcttccaggaaacagaagaggaggaaatacttcccaactcattttatttgaccagtattacccagacaaagatactataagaaaaaaaactttaaaacaatgtcttcatgtgctaacatctgtagttaaattagccattctttttacatgaaataatgggaattggtatatttcttccatttcatttttctatttctttgctaatataccacctgtaacaaattcaatctagatgctatctgtccacttgcctacatttccattctattcaagccatttttgctcttcaagtaccttgatcactttggaatcatagcattgcaagctatttcaaaaaaagttgcgtggttggattgtgctagctacttttaaatttataaaaaatgccccatatattttcttgcttgtctgggaaatatagttgctatctaactagaaaaataagagggcattattaaagtaactctttaagcatcgtactaaatgtttgacttccattaaccatatttcttgtagtagctgtagctattatgatactgtgtaaaacagaacaggttctatatatgcaaatgacattttcatttaatgtaccaaattgtgtatctaacttttataatataggttaa

SEQ ID NO: 37285 - DNA, 1054 bp, Homo sapiens
caaaaaaaaaaaatagccctataggacagcggtccccaacctttttgtaacagggactggtttcatggaagacagtttttccatggaccataccgggtgtagggggtaggggcaggatggggagaggagcgttagattctcttgaggagcactcaacctaggtccttcacatgcgcagttcacaatagggttcttgctcctatgagaatctaatgctgcagctgatctgacaggaggtggagctcaggcagtaatgcttgctcgcccaccgcttacctgctgctgtgcagcctggttcctaacagtctgtggcccaggggttggggaccgctactataggaaacaaagcagtcaatggtgcctcttttctactacaaccggtcagtctgtagcaggcccatgctaggaagggagaagttttacctgtaaatgaagctttatgtatttgattgttacactgagacattaattgctgaactggaggtcattttatagaacttaaagtgacaggaggattgcttactgaaaagtgactggaaaagcatagatctgttctaaatttcctctaggtcctagattgtgggagaaggggaagaactactgctgcagaactagtttaaagggattgcaaaacacagcatttcatgtttatagctcatacatcctgcttttcctgtgtaatgcctttagcacttatgggttggctcagaggcaccaatcctgactgggacttgaggaaagttttgaattacttacgaatcagtcagtgatctttctggtaatataagcaagtggtggcttttcccaacacctcatagagagtctgtgaatataatctattgtctacaaagatttagactaaattcaaattttacataaatattgtcgacattaccaatttgagggaaaaaatgtgatgctttcaaaatagaatgttttaaaagtatgtgtgcacataaatataattccttgtgccactgtaagcatgggaaggattgaaattgctgggccccatggagcaaagtcacatctcttaaaagctcgtttggaatgg

SEQ ID NO: 37286 - DNA, 1025 bp, Homo sapiens
tctttaatccatcttgagttgatttttgtatatatatggtataacgaaggggtccagtttcaattttctccatatggctagccaattctctcagcaacacttattaaatagggaatcctttccccattgcttttgccaggtttgtcaaagatcagatggttgtgagtgtgcagtcttatttctgggttctctgttctgttccactggtctatgtgtctgttcttgtaccagtaccatgcagttttggttattgtagccctgtagtacagtttgaaattgggtagcatgatgcctcagctttgttctttttgtttaggattgccttggatgtttgggctcttttttggttccatatgaattttaaaatagttttttctaattctgtgaagaatgtcaatggtagtttaatgggaatagcattgaatctataaattgctttaggcaatatggccattttcacgattttgattcttctatccatgagcatggagtgtttttccacttgtttctgttctctcttatttccttgagcagtggtttgtagttctccttgaagagttccttcactttgcctgttagctgtatttctagatattttattctttttatggcaattgtgaatgcgagttcatttgtgatttgactttcgacttgcctgttgttggtatgtaggaatgctagcaatttttgcacattgattttgtatcctgagactgtgctgaagttgcttatcagcttaataaacttctcgactgagacaatagggttttctagatataggatcctgtcatctgcatatagggataatttgacttcctctcttcctatttgaatatgctttatttctttattgtgcttcatttccctggccaaaacttccaatactattaatttgttgaataggagtgatgagagagggtattttgtcttgtgctggttttcaaggggaacacttccagcttttgcccattcagtatgatattggctgtaggtttgtcatatatggcttttattattttgaggta

SEQ ID NO: 37287 - DNA, 1047 bp, Homo sapiens
atgacttacatatttgtcctttctatagcaaagcaaacagtgaaaggcagcctgcatacttttttctgcacagaagtttctgagcttttttttttcattttattacataattatcttagacagtttgacttagaaatttagtgggagtgatctacaaattggaacaagaaaaaggtagtattattagtacctgaaaatctaaattagtgccttgaaaactgcctttaataaaattctgttttctttctcttagggctgctgctcagagcaaattaggtcactacacagatgcgataaaggattgtgaaaaagcaatagcaattgattcaaagtacagcaaggcctatgggagaatggggtaagttctgggaggatgttccaagtagtaccatgtagcatcaggtatgctgttcttaatggcttggttttgaatttcctgcttaatgttttaccctctgaactaataagaggataaataaaacataagggaggaaatgactacaatttctttgactaggaagtgagatgattgatgactgatttgattgttggagaaaattatataaccgtaccacaaatctcagatgagcactcaatattgcagacagttaggcagacagttctattatttttccttctatagtcacctttccactcgctgatgtgacgatttcatacctcttcctctcccttcaaatttccactaccccctctctggtgactctcaactgatgctattgccttacacttaattgagaagctagatgctttttgaaggaaaacaactcattttcctccttgcaaatccatcagtctgcctacatttgtatctacacagaatgcccttttttcttgttaaaatggaagcattctggctgggcgtggtgactcacgcctgtaatcccagcactttggaaggccaaggtgggcagatcacttgaggtcaggagtttaagaccagcctgcccaacatggtgaaaccccgtctctactaaaaatacaaaaattagccaggcatggtgatgagcacccgcagacccagctact

SEQ ID NO: 37288 - DNA, 1132 bp, Homo sapiens
aatggtaactctacttttagttctttaagaaatctccatactgttttccatataggttgtattaatttacatttccactagcagtgtatgagcattcccttttcaccacgtccatgccaacatctgttgttttttgactttctaataatggccattcttgcaagagtaaggtggtatctcattgtggtttcaatttgcatttccctgaaaattagtgatgttgagcattttttcatatgtttgttggccatttgtatactttgagaaatgtctattcatgtcatttgcccactttttggtgggataatttgtttttttcttgccgatttgtttgagtttcttgtagattctgggtattagtcctttgttggatgcacagtttgcaaatattttctccaattctgtgggttgtctgtttaccctgatgattatttcttttgctgtacagaaggcttttagtttaattaggtctcacttatttatttttgatggttccagactctgtggattctaatttctggctctgacacttactacctatgggaccttgagcaaatttcctagtgcatctatgccttggtttccctatctgtaaaatgtgggtaatactagtatttaccttgtagggttgttatggagatcaagcagtatagtacatttgatgcatttcaagtcaacttgcagccatcaatatacatcctccctaaatacttagcatgcatatcattaactagagtttagtatttacttttttgggggtaaaatttgcttacaaaaaatgcataaatcttaactgtactttcatggagttttgacaaatacatacacctgtataacctaaaattctatcaagatattgaaaattaccatcctagccaggcatggtggagggtgcctgtaatcccagctaccatcagatgtccaggaagttccttaaaccccttcacagtctgttgcctacaacactcaccagaggtaaccactgttttgatagattagattcatttcctctagagtttcatatgaaagaaatcatacatattttctgtgcaagactttatttgctcagcgtaacggttttgagattcaaccatgttgtggcatgtattagttcattcttttttattgatca

SEQ ID NO: 37289 - DNA, 1028 bp, Homo sapiens
tattagtatactgcagagatatctgccctcccatgtttactgcagtactattcacaataactaatatttggaagtaacctaagtgtccaccaacagatgaatggatagagaaaatgtggtacatatacacaatggagtactattcagccataaaaaacagtgatatcctgtcatttgcaacaacatggatggatctggaggtcactatgttaagtgtaataaaccaggcacagaaaaacaaactttgcatgttctcactcatttgtgggagctaaataattaaaacaattgaactcatggagatagggagtagaatgatggttaccagaggctggaaagaatagtggggtggtggaggcagggtagagtagggattgttagtgagtacaaaaattagttagatcgaatgaagatctagtatttgataacacaacagggtgacaatagtcaacaataatttattgtacattttaaagtaactaaaagagtataattggactgtttgtaacacacaaaaaaggataaatgcattgtgtgcctgtataaaaatatctcatatactccataaataaatacacctactatgtacccacaaatattagacacacacagatacatgcatgcactgactcacaaaactttctaaaatgctctgcttaaattcttaacccacagaatccgtgaacaaaatactgatttcttatgccactaagttttggagaaacttttatagcactatattttgtagaacagttattatatttaactactattaagaagattttggtaactaatattaattatagtaataatagaagaaaaatggagggtagtaagtagaagttgtttagtagctagttttttgcttgatttgggagaagggtaaagatatttaataaactcgggctttgataagattttatagttaagtttgtaggctaagcttttgaaaacaaccattaaaagaacagaaatttaataaatgaatccaatccagaaatgaaggaaaagaaaggaggtaataatga

SEQ ID NO: 37290 - DNA, 1094 bp, Homo sapiens
tttttttttttttgtattttagtacagatggggtttcaccatgttgcccaggctggtctcgaactcctgagttcaggcaatccacccacctcagcctcccgaagtgctaggattataggtgtggaccaccgtgcccagctgttacagttatctttatacctaaaatgggctcttatcaatagcagtacccttattttccctgatacagcacaactctgcctattctaatcatgacctagacacattcaatgaactacaagttctcctttacacggacacattcatatgcacattatttgttatatagagataacacattcaaaagatatcctcaatgttcaacaacagaggattggttaaataaatgattgactgcccatacaatgtaataatgcagtcattaacaatgtattagaatattaatcaacatgacattattaagtggggagaaaatttataaaacattacgaaagttttttgccatttttattttcaaaattttaatatggaaacaacttgtaaaaatgtttctttacatggctttttgtagaatgggaaggaaacaaaaagtatttctttccaggtggtaaaattatgtgatttttttttttcttttttgcacttttctatattttgaagttttctgcaatggatatatatacatatatatatatattttgttgttgttgttgttgttgtttgtttgtttgtttttttaagacagagtctcactctgtcgcccaggctggagtgcagtggtgtgatctcggctcactgcaacctctgcctcctgggttcaagcgattcttctgcctcagcctcccgaatagctgggactacaggcacgtgccaccacacccagctaatttttgtattttttgtagttttagtagagatggggtttcaccatattgaccaggctggtctcaaactcctgaccttgtgatccgcccgcctcggcctcccaaagttctgggattacaggtgtgagccgccacgcctggcctacaacagacatatattattattgaaataaaaaatactttaggccaggcgcggtggctcacgcccataatccctcactttggaaggcc

SEQ ID NO: 37291 - DNA, 1048 bp, Homo sapiens
ccgaagtccatagtttacatgaggacctgtgtatgtaagtttctgaaggtgacctaagcatatagttgaaattcaaatggttattaagtaaagagaatgagtatgcaaaatggatggtttaaaaatatttctggttctgattatgtctcagctaagaagggttaagagtatgtttagtccaggcgcagtggctcacgcctgtaatcccagcactttgggaggccgaggtgggcagatcacttgaagtcaggagtttgagatcagcccagccaacatgatgaaaccacttctctactaaaacacaaaaattggccgggcgtggtggcgggcgcctgtaatcctagctactcaggaggctgaggcaggagaatcacttgaacctgggaggcggaggttgcactgagtcgagatcacatgactgcactccagcctaggtaacagagcaagactccgtctcaaaaagaaaaaaaaaaaaaaagggtatgtttaaaatcctggccgggcatgatggctcacaactgtaatcccagcactttgggaggctgaggcgggctgatcacttgaggtcaggagttcgagaccagcctggccaacatggtgaaatcccgtttctactaaaaatacaaaaattagccaagtgtggtggcagacacctgtaatcccagctacttggaaggctgaggcaggagaatcacttgaacccaagaggtggaggttgcagtgagctgagattgtgccactgcacttcagcctgggcgacagagtgagactccatttcaaaaaaaaaaaaaaaaattcttaccacattcctttaaattgtttttatttttgtgatacgtgtaaattccagactattttgaagtaggaaaaactatatttagatttttgtgttccaattatggcaataaaaatattctcgctcagcaaggaaatattaatgttttagttatttgaaagccacttttttccaggctaaactgtgaaaatgcagtcctcaaagagaatttgaaagtgaaaacagaagaaattaaaatgctgaagtctgaca

SEQ ID NO: 37292 - DNA, 1027 bp, Homo sapiens
cacacacacacacacacaccccacaccatattttcttcacctgttcatctttgatggacacttaggttgattccatatcttggctattgtgaacagtgctacagcaaacatgggaatgtagacatctctttgacatactgatttcaaatgttttgggtaaatatcgagaggtggggttgctggatctactgatgttttcctaactactgtttttcttaactacagacagcccattttttcttatgataaagacggcatttggctcatgagcaaggtggcaagatcatcaagtgagtcagacgtgcagctctgggaaacagaagaggatgacatgacagaaggtgatttagggtatggcctcggaaggaaacctggtgggatttatgaaatagaattttcacataggtctagaaaaagatcagatggaaagaactttagccctcctccatttccgagaaagggagaagaaagaaatgaagcgagttttcagtattccaagcataagagccagcaagatacattccctcaagtgtccagaatttccaattacagacgacaaagtagcactggtaagaatgctgaatttcctctcctttctttctcctgtgcatagtatcaaagctataacccttccaaaatctaaaataaataaccatattggattttagattttcttttttttctggacggagtcttgctctgtcacccaggctggagtgcagtggcacgcgatctcggctcactgcaacctccaccccccgggttcaagcgattctcctgcctcagccactggagtagctgggattacaggcatgcaccactacacctggctaatttttgtgtttttagtagaggcgaggtttcaccatcttggccagactggtctcaaactcctgacctcaaatgatttgcctgcctcggcctcccaaagtgctgggattaccggcatgagccactgcacccagcttttagaaatttatctttattcatctcttgggattggtggtagtataaaagtagttgatag

SEQ ID NO: 37293 - DNA, 1063 bp, Homo sapiens
caaccatctggatagttcccagatgtttacagctctaaattagtatgtttaaagcacgtgctctgaaagcatccttgactatacttgcccactcctctgatttctacctcccaagcatataaatacacattcactctctccacacagatccacttggcctttaaatcttgacggtttctcctacacatccctacagtacccctatttcatcaagacccctggtgctgtgcctagaatcctacctagaatctcctgtttgacttcttcagtatctctttcttccctcttctacactatcattttcttaaaagtggggaaggagaatgacatgatttgaactttttactcacatagtccattctccttcaggaaatataggagattctttataaaatggccacagtttacctgcagccgttctctcccctatgtccccttcagtgcagccatcataccctgttctcactaggaattttccacctcgagtatttatgcatgctgttctctttataggtttccttatcttccttacaactccttggaggcccaactccaatgtcatatctttggctgtctaacttcactatgcagaattaattgcccttttcttttcgcataaaaagccaggtattttaaaggcacccaatcactctaaaccagttaatttcttgttctaattgctttagagttatcagcttcttgttgagttgaggtaaatgtggtgaatatgttttcaaaagaagaaatatgaaaataaaaattttaagtattggcagcagtgtcaaaacaaccagcatcccaatatgattaaagaacagctttcacttgagtgtatataagttctaggatggcagttaaacataatgtcatgattttacagtttgacaaacagcagcagctgggaaggttttttaaggtaagaatgagctttaaaaaattttgtggggcctggcgcagtggctcacacctgtaaacccagcactttgggaggccagggcgggtggatcacctgaggtcaaaagttcaagaccagcctggccaacatggtgaaaccccatctcta

SEQ ID NO: 37294 - DNA, 1050 bp, Homo sapiens
aagataggaaaaaagaaactgaaggaaagctgccgccaacttttccccctccattgtgcctagatggggggagaaggggatgtaaacagcagggcagggttcaggtagggtgactagccctcactggttcccagggactgaggggttttctgggacacaggactttcagtgctgaaatcagggcagtcctgagcaaaccaagatagttggccaccctggcttcaggccagaaggaaggcttcctggaactgaacaatttggcagtggaatagaaaacaacttatttactatttaatttgagtctgatagatgaaattaaaatctgtaagtgatgatttcccaccctgagtgctcacatgcttaaccctttaatttctggagggatttcagaatccctcttagcaagcagtgatttctgataggaccattcaatgtagccccatggtttggaggggaaatgttaagatcaaaaggagtggatatgacacacagagggatatcataataactcaggacaggctgctggggtcttttgaggctaaaggaccatctctgcagacaggcagggcccagtcttggaggtctctattaagaaccttatgggcatgttttttgtggccacatggtgggaaactgaagtgccagggcctcccccatttacatgctgccattgtgagcagtctgtgctccttaacatatgctgatcctgctctctgctgagaccctgtgtgagctcttgtctctgcctggaatttacttttggtccaaccaatgcacacacacacacacacacacacacacacacacacacacacacactccagagctcagccgagacatcatttgcggtgcttttcctatggtcacctaagctcgctcttgaattttaggagcccccatcacgatgtggtatcattgcctctgctggtctgtcttcccccaatcagttagggcagcagttaggttatatcttgtaatataacctactgccaggtacagggtaaatgtgtaataatcatttgaatgacagggaggaaatcctcctcttgt

SEQ ID NO: 37295 - DNA, 1030 bp, Homo sapiens
tatataactcatcctgggctgcttcagacttttaagaccctgtggggagctataggaagtaagggataaactgatgagctacaatggaactgtgaagaaggcagtgtgggattgtggatcttggaggacatgaatgttaaattttactcaacttttatttcttttcctctgttttcctttgactcagtgaagagtgtcccagtctctcctaagagccacaggaagtatcactgttactcaaagctgattctcctctacagagttgctgtgctatcctatttttcattttcttcatttgttttaaacttccaaagtttcagcttaagcttcacgtctcttctaatgaaatatctgtttacataatgccatgattagtagagtatttttcccaaatcatttttcataaatctattaaaatgaactgttgaagtaaggggtataaggaatacaatttttgtaaaattttttgttatttattagtttgccttctctttaccatttcagactttgtggttaataagtttcattctcaagtttttatcaactgttgacttttatgaatttctgtcacattgcactctgtaagtatctaagagaaggacctatcgatggaagatgtgttttaacatataagagttaacaccagttttctctcttcttgtgcttatttaggtttcgacacagccccaactgctggtacctgagaaactggactatccacacctggattaggcagtgtctaaaatatgatgcacaagacaaagccctatatacccttgtaaataaggtgagttgttccgtggatctgcagcctgttttcctgagtttaggtgatatggtgtttgtacctattgtagtacagcaaagaataacaccagaaataactttaaaaaattatttggcctcaaatattcttattaacagaatggagctgggtataagttcattaataaattaaaaaaaaaaatcctgtagctgctacttttccaaatgtagtgactcagaaaaggacaggtataagcaaaaggaa

SEQ ID NO: 37296 - DNA, 1192 bp, Homo sapiens
agtcagcatagaggctctgagaaaatgagaaaataacagacctattgttttgttttgaggatcacttaagcaaatatgtaaaatcagatcacatagaataattccctgacctcagtgagtcttctttctaaactgcttcctgtctgcctcacccatctatttctgcagttccacccactgcagttttaaagtgactttggatagctgggtgaaaaggaagagggcaatacattaagactcagttaatataatttgcataatgaaattgtcaaagtgttcttggcccaaaaaacttgtttataaatgaaagtgaaagggttgaatggataatttgaagagagtgccttttcggctctatatattcaatcataggatgtcttgccactgagtcagcaaaggtttttctccaacctactccattaaattttattttacgcattctttttttaatacatataagtatttaaaattttgaaatgtcttagttgtgcttcttaaatgtaaagtgcatgctatcccatttgatagcaatttctgcataagcctgtaggtgaataaaacagaacttcataatacgtggaatatatcggatatacacatttgtggtaaccttagatattatagtcattgaagggatataatagcaaatggtgacatttgattatcaaaatagtagtggaagttctagggctgaggtggcttgccaaatctacttacttcattccaggatcaggagagaaacaagacaatggctttcattcagtatgcttgaaaccaaatgattttatctttaacatttgaaataacagagttttctagacaaacactccttcttccagaggttaatcttaattgagatagcactccctggtttattgattccttgcttgggtcgtgaagaagccccagttgttggttcaaagttgatagagactttgctccctagatcacctattttagcgtcaggcaggacagcttagtagtcaagagctctggagtcagactgtctgggtttgaattttggccttgttcagtattaactgtgggatcttgagaaagttacttaaccttttgatgttcagtttcctcatctgtaaagtgtggataatatacttaccttatatagggttgtttcgataagtaaatgaaataatctttaaaaagcaattcgcatagttactaaaataatgta

SEQ ID NO: 37297 - DNA, 1051 bp, Homo sapiens
tcttcctttccaaatttcaagccttttaatttttcttgccttgttgcactagctaggacttccaatacaatgttgaatagaagtagtgggagcagacatgtctttgctttgttcccaatcttagagagaaaatatttaatatttcaccattaacgatgttagctgtaggtttttcatagatgccctttattgggttgaggaagttccctttcattcctggttttctaagagttttcaatcaaacatgggcattgaattttgttaaatgttttttctacaaatatagacaattacatgagttttctttttcactttcttaatataatgtattactttgatcagttttcaaatgttaatccagacttgcgttcttgggatgaattcccaagagtgtattgtcctgatgtagtattaatttgttaaattttttaagttttcagtaacactatgttgtcagtaagactggactccaaatttctttgcttatgttgccttgtgtagttttggcgtcaggattgtataatgtcacaaaatgtattgggaaatgttcccttctttattttctgaaagtttgtttaagagtttcttcggtgcttgatagcattcaccgaaggtattatctgggcctggagttttcttaagaagatgttaaattataaattaatattttaaagtagatatgacttctcaatgtagttttattttatattgttattactgaggttggcatgttctttttttaactcaactaattcataaattcacaagcatattcttatgtgcttaagagtcatttgtacttccatggactttcttttgccttatcctgtctttctgctaggttattggtcttgtcttactgatttaaggaatagcctttaattaatgagtattttttctttttttattactttgctttatgatagtttttgctatgtaggcattttaatattattattattattattattattattattattattattattgagatggagtttctcttttgtcgcccaggctggagcataatgatgcaatctcagctcac

SEQ ID NO: 37298 - DNA, 1054 bp, Homo sapiens
catatcttgcctacttgaccatacttggactgtttgacaggaactggccacagacctttggagaaagaacaattgccaaaacatacccattgggtcttcctggtgtattggcactagttggaaaattttagaccagatgacctctgaagtcctgccaacttccggaatctgaaattgcaacctggatagactaagtgagtcccttggagccatgtgacaagtccaagctccagctgtggatgaggcctgacttcaagttcagaagctcatcagctagcccagtgtatctctttgtgtcagttttttttcctaagcagtttcagtaatataccaaaagatacagactcaatgaacattttgaaacctcctaacagtgtgacatagaattaattaaacctagaaaaaaattaacataaaaagaaattcaacaatgaaaatgtattatcttgtgggggaggtactaaaaagaccctgaaggagtcaggatgggaagaaagaggtgactggggtcttaggaccagtttagtccccactttgatctgtagctttgaactagttagtgaactctctggacatcagctttctagatgagcagatcatcttggatgcctcccaaggcacttcccatagctaaaacataatgtttcttaatgtcactgataagattttatcaccagatgcctcagactttgaaagcatgtagctctggctttttgtttagtttctcacgcagaattttattcactttaaaattgaagttccagccgccttaactatgaatatcaagagaaaaactaatagatgtaaaagtaaacaacagaaagggtagaagatctcttattctcttctggatttaggtgacagacttcatttactatcttgtttgtgaatatatttagtaaattttgtggtatgagaagttgggtatccactcttatttatcctctaggtaactaatttttatacatatgtacttgcctttttcctgcaaggcccacaaaccacatgtttttgatgccttgtatatacatgagatttaaaaggagaaggctaa

SEQ ID NO: 37299 - DNA, 1052 bp, Homo sapiens
tatgcccttaatggatttctaagtcaagtccagaagtgctaggcatttttagaaagtctccctctttttactctcctctctttcttttatgaggttttcattatattcacaacatgcattgtcttctacgctttttttttcttttttgcctctgagtctctattttagaatagaatctgtgtttggaataatcctttttatttgtttatttggaccatagttaatgagcatactcagagattttatggtttgaagggagagtttgttggtaaaggaatcataggtttactgttgcatagcagagctaaatcaaagtagaaaaaatcgttgcaagactgagttctctaaatttagatgtttatgttctgggcaatagttttttagccatcagagtcttcattttttcagccatatgttcccatgtttggaacataaagaaaataatatcagggtttaaagataaaggaaaaaataggtaactagttataatcagtggaacactctccttgttctgagcaaggttcatgtttggctttcaatccgttttctgatcaaggttattctacacatagaaaaagagaagccattgtatattctttgtttgcattagcataaaggggtttcaaggatggagccataccacgtgaacattgttccactaagcatcaccatcgttccaataaaatgggtgtcctgtgttttctaaggtcaatgtgtgatctaggccctaggccaaatatatgacataatttatattcaaccaaaggtttctttttctgtcttttagcttatagacaacatttcctctcgggaagagatagatcatgcagagtattacctttacaagtaagttttccatttgatttggctatgtactctgtgatttcacaccccttttttacataaaagttggtatatgttgtgtataattttgacaccttctaagtttatattttaaagatcttttcatatgagtatagagagagtttctgattttttataactgcattttattccatactgtgagtttattatttaaaccagttcccttt

SEQ ID NO: 37300 - DNA, 1161 bp, Homo sapiens
tcacaagactcgcttccccggccttcgaggatctcgaacggactatagtctggactcgctgggctggaggaaacttggccgctggccacccggaggagactgagaagcctttggtcaacagggcgcctttccttgaaccaaaacaaaactttccgaagccggaaaggaaacgcccagtgtcgcctgagagccctggagctgcgcgagacccaggcactgagtgcggcctcggcctctgacctctaacacgccgggaacaaaccagctggggcggcccgcaggcctgcgggagcggaatgtgacccgaaaccgacggacttcctgacccatagtccatagttctcttcagcaacttgaacattttggaaaaagaaacaagtcttaacatgccacgacctaatggaaaaactaaatccccttcctacaccttgctttccaaaagttaaaaaaaaatagttaaacgctattagaggtctcaagttcactgtcaccagatcagctaggtccagaatcttcagttcttgaagccaagccctacaaatagatttattgtagcatatcacacctcttcaggtgacttaaaacaatgagaattcatgagaaattatcttcatcctcaagtaaaaatcatgaggtgcctttcacatggatgaaattgtaagtgcttgttgaacaaggaataattggataatggtattgtggtcatactttttaagaatatctgttagaaagatataggatgcagaacatctaggatttgctgaaagtcatttattatggataggggtatgagtaaggtcatagatgaaaagggatgaaacaagattggccatagttgctctatttttgtgtatcttgtttctttattttgtttctttaaaaagtcctcatatcactgacatttacacttagttttagggaaagtcaaatttagaaataagctacagctctctaagctatcggtctaactggatttttctcgatgctgaagaactttttaaaaaattcagccatctaggtcacacagcaaatacatttggcattaaattcctagtatcactaaagtactccctcccaccgccgcgcccccccccttccccccgcacccttagacctgggcaagagagacttctatcctggactccatgctttaaaggaact

SEQ ID NO: 37301 - DNA, 1052 bp, Homo sapiens
gcgaattctcggacaaaactgtcaacagcccgggcgcgccttttggctctgcgggtccctctatttatgcaaagccgacctatgctacagccccccaacccccgacctggggtagggaggaagagggtgccggggaagggagtccgccctgtccaggcactagaggctcccttgacgtttggcagatgaaaaacaactaagcctttttgaggtgtagagattctcaggtccaggcgttaaaaaataatggtcaaaagaataatacaaaaatagtaaaggtcttgaagaatgccagcgaagcaattcttttttatttgaggacacttgtctggtgtactttttcatgaaaaggaaaaatggttaacatgtttacacaagaaaaaaagtcaaaattatcatttatttcaacctgtgttttgtatcataacagacgtgtggatttttttgtacttactgcgtattctttacaaggagtattgtaaattttactggcaattattattgtactattctaaatgtaagatttttacactttttcagaaataaaaatgcttaattttcaaagaaaattcaccaaaatgattggcttcagttgtccccttcttagtttttcttttctacttaaaaaaactttctatgtggggtaagcaggaactcaatatagaacagacttaaatactttcagagagaatttaacaacagcatcatgccatgatttttcacttgaacttcctaagtgaaaaccatggtaggagatcagaaattatttttaaatgactacaaataaaataagttactttggtatacattttcagatctgactctatgccattttaaagcgcattgaagtatgttaaaattaaagccacaggtacccaaagataattttataggaactttgcatttcatttttgagcttccttcctcatttaatttccactcagttcacgacaatattatatctgcagaaactgtcaacataatatgttgtaatggaagtgaaacaaagaggcagtctagttttaaaattctaataggaaaaattagtagag

SEQ ID NO: 37302 - DNA, 1021 bp, Homo sapiens
tcttgactgccttgtacccgacattatgtcatgtctggtagtttatactttaagtaatatgctatctgaacccggctatgtacattgaggcatattttaatacactcagactacaaattacaacaacatgcaataaataggacaccaacataaagtcagcacaaagtgaactttactgagtattataatcagctctttggaatgccagtttttcatagtgatattaagatatggttgttaaattagatcacaaaaattgcttttcttttaaatagaaaatgttatcaatcacacggatgaagaaggatttactcctctgatgtgggctgcagcacacgggcaaatagctgtggtagagttcctacttcagaatgtaaggaaaatgcctcagaaaatgtatatgtatagttacttaagttaagtctttagtagagtttttatatatccagccagctagatataatggtagaggctaccaaaaaaagtttaatgcttttcatattcttgtggaacttggatctagttgggaaggcaagactaatcatacatgcaacagtgagaaataatttaacgcccagacccctctacatcccacgggaacagaagtactgtcagctttgaaggagaaggcttcatggaggagctgtgacttgactccagagtgaaaggataattaggattgatacaggacggaggaaggaaggcatccaggcaatctcaataaaagcatccatgagtaaaagtttccattatttctttattaagcccagaacattaccaggcctagtgttgaactataattattgttgacaggaataacaatattcttgtttaaactaattgagaagtcttttatctctacttcccataccagggtgctgatccccaacttttaggaaaaggtcgagaaagtgcactgtcgttggcctgtagtaaaggctacacagatattgtcaaaatgctgcttgattgtggagttgatgtaaatgaatatgattgggtaagtttgtaatactaaatt

SEQ ID NO: 37303 - DNA, 1026 bp, Homo sapiens
cctgggttgccggcaaagccatctaacaaatacatctgcagcacacttgcactactctgctttctgtcctcaatgtttttatatccaacttaccctgaaaaaagttaaatcatctgtttggaggaagtgatatggctaagccacaaaagtggcaacatcacttttccctaatagtcaaaagataatcagcaggaagagaaacttgaggcttaaatttgataatataaatgacttaaattattttgattagggttattcaactgtgcttcgaacgctaacatcaggctcagctacttttgccttagaactatctacttatcaagccatgaatcctcaagatcaaaatacactgctcaaccggagaagtggtttgacctaaatgttttagtttttggagagaaattcaggagcacctagctacttcattttcagtaagaacaatttttattgctttatttattggacgaataaagtactgtttcagtacattcagagaactagataaaagatataacttaagctttgatagtggcactggagccacccgttttaatttatataatgagaaatgtgctttgatgtttaaagccactgtacctgaatcatgctgttcatctatgaagttattactataagtagccttcagaagagtggtatcacaaagttgtgtttcttttgtgtccttaagcttgtctcacaagaaagatgccaggcctctaaatgtaataagatagagggtcaaaggttcaatcaataaaaatattttattcaaaaaacagtctaatatcttattttacatgatttcaaaataaagttgattgtagtacagattgctgtggcctttttcccctccattttttacatgttctcatggttacaatatccagcataaagaggttgtgcagctattccacgtctgtagataacatgaataaagatattttagattgatttagattgatatcattcataaagatattttagattgatattcatgtcatcttagaaacttaaattagaatcact

SEQ ID NO: 37304 - DNA, 1026 bp, Homo sapiens
gctaatacttattatacactagtatatattcttaaagcataatttgaattatttaatctttataacagcctcaagaagtagatactactatcatctttgtgagttactaaggcagagaggtgaaataacttgaccaaaatttgaacaagtgggtaagtggtggaaccatttctaggtagtctgattccagaagctgagcttaaccatcacatataatgctttccagaaggatggttaggtacatttctgctatacttaatcctgttaacagtgtggttttttttttttttaccaagtttgaacgttttgctcccttgtactgttatatgcttttgaagctgttttattaatttgtcagctgaatgatcccatttcgtatagtcggatggtcatgaaaagaatgtgaaatagacaattgcatttttattattgaaatattgcctacgcctcccttccctaacataaatgtatttcttcagtgcgggattacagcaacattaattctcttagtttgactgtcttgggagatctggtgaacattcagaatattagaggaaaaccagatgaaacttttttataaactaaaacctccagatttatctaagaaaggccaatccattgtatgtgctatcattgtaagttgcacattttctttgatttcttttgagcacactgatagcatttaattaagatgctttatcaggatctggctttctgtgaatttaggaaactcctaatagtatctttagttttccatttcttttcctttcaaagaaaaacatttttctttatctctttagaagaagtgaagagttgcttggcctaggtaaggtagctgtcttgaaatatttgaatattgtctgtttatggtgtttggacaaattaatagttaatgaaagtaaatgcaagttatagaactctaaaacctttctttataggttgcagatttggatgatgaatttgctgacttggttttagaagaatttagtgagaattttgatttgttaccagctgaaaaggtaaatt

SEQ ID NO: 37305 - DNA, 1028 bp, Homo sapiens
atggaaaactgttaaatagtgagcgttaaggagaataaagtgagttaaaattttagaaaacattcttaaaacctgaaagagttttttttcctctcttgatacctttggtaaagaatttttaaccatgtttttaactataattattttgctttctacagctttaagtatgcagttgaaagcatcagagagaagttaaaggcaaagcctttgcttttacaggtaaattggttaatagcatcagcttcttctcagtttcctcattaatttattttgtgacaatatatacatttccaaagctatctcatcatttttgaagaagttggggtataaatagaaatagccacagattatagtaatggtgataatagacattttggggaaaatggtacaattagaaaagacttgtcatcattgtagttttcagtgagtgatcatgtaataatgttaatctcactctgacttacagttaccaattggtgaagccaaaactttcaaaggagtggtggatgtagtaatgaaagaaaaacttctttggaattgcaattcaaatgatggaaaagactttgagagaaagcccctcttggaaatgaatgatcctgaattgctgaaggaaacaactgaagcaaggaatgccttaattgaacaagtaaagtataatgaatgataaaatgaacaccaatgtgtgcaccacttatcttaaaatatagtcatactttagcatctctcggggattggttgcaggacctcctgtggataccaaaatctgcagatgctcaagtccctgatataaaatgatgtagtatttgcatataacctattgatgtcttcctctatactttaaatcatttctaaattacttataatacctaatacaatgtaaatgctatgtgccattttttgttcatctctctctcccactaatcatctacctgtcccccaaattattatttcaatatttctctttcatttgcttttcgttgagatggagtcttgctctgcggcctaggctggagtgcagtggcacaatc

SEQ ID NO: 37306 - DNA, 1292 bp, Homo sapiens
tggcacgatcttggctcaccgcaacctccacctcgtaggttcaagcgattctcctgtctcagcctccctagtagctgggattacaggcatgtgccaccatgcccggctaattttgtatttttagtagagatggggtttctccatgttggtcaggctggtttcgaactcccgacctcaggtgatacgcccgccttggcctcccaaagtgctgggattacaggcatgagccaccgcccccggcctgattgactatttttctaggtagaggcaactctaatggtttccatttggcctgtcccaccataatagccctcaccccaccagtcagggagccattgtgggggctctgccagctgttaagtatgtctatgccaattaatgcattctggcactggggaaatgaccacaggatgagtccggggacccactggaccgactgtaagtcagacctgagctaaaactccattagattacctgatcttcataagcccctactttaactggaggaccacagtgacgttttgggtcccccggaatcaacgtcagctcagagccagtgtccagtagtccctgaaatgtctgatcatttccctttccccagtgcacagttaccctggtaaaaggccagaggtctccttggggaaggatgggagaaagactcacagcataaattgtctctactgtagtggggtccttcctcaaggggcttcattcaaggtgttctgggtctataaagtggctcaagtctggaaattgaggggctgtgattctctcttttttttaataattcagattagtcttttgtccactcgacctggaagttttccacttatatgaattaagtaggaattcagtaggcttcctatcaattccacttctgggaacactgtgattaattagccagtgcaaaagctgtacacaagtcagattattctgattgctgctttgcctctgctgcggtccattatggtagctcgcccaccttgcatttgatggttgagtgctcccacttggcctctgccacgtcaggatccaattattcccgttctaaattttgtagttgagtgactgcagttcccactgttagatttggcatacagagaagagtaatcatagagctctttgaagattaacatgctgccctcacaaatctctttcgcaaagcatcggtcaagggtatatcttctggaccctcccagctgggatgagtaggtctaaagtgactaatccactccaccatcccaatctctctaagcctttggatctcttcctctacattaaaccaagggaga

SEQ ID NO: 37307 - DNA, 1050 bp, Homo sapiens
ttcatcacctcagaaagaatccctgtactaattggcaatcacttcccatttcctttaccccacagtcccttgaaaccactaatctagtttcaggctgggttgtcttttttttctttttgagttgtaagagcccttcatatgtgttagatacaagacccttgtcagatacatactttggaaatgttttctcccattctgtgagttgtcttactttctcgatgatgttctttgaagcccagaagtttttaattttgatgaggtctaatttatctactttttcttttgtcacttgtgcttttggtgttatatctaagaaggctctgcctaacccaaggtgacaaaggcttgcacctatgttttcttttaagaatttgagtagttttagatcttatgtttaggtttagaatccatttgcagttaaaatttgtatatgattctaggaaggtacctgacatcattattttgcatttggatatctagttgtactagcagcattcgttaaatatataattttcctccatagaattgtcttggcaccctgttgaaaatcaattgaccataaatacgaaagtttatttctggaccctcagttctatttcttcgatctgtgtatgtgttcccatgccagtaacatactgtcctgattactctagctttgtagtaagttgaaatttggaagtgtgaatcagtcttgacaagttctttgtcaagattattttggctatttgggctccttattttcctgtgtgtttgggatgaacttgacaattttttgcaaaacaattcgctaggattttgagtctttaggttgtattgggaaatatggacatcttagcatattaagtttttagatccatgaacatgagatgtctttccattttttttaggtgttctctaatttcttttaacaatgtttgtaatctctattgtacaagttttgtatgtctgttgttaaatttattttttttgatgctattatgaatggttttcttaattccattttttggattgttcattgctaatgtgtggaaatacaaatgatttttatat

SEQ ID NO: 37308 - DNA, 1021 bp, Homo sapiens
ctgtgtacacatacaatccacaccttgtgaccatcaaagaacaaagtctgccttgttttgtaccttgaccaaaagacctttcacagagaatacacttagtttctttttatttccatttcagattttccaaacttagttcttctggtcacatccagtctaaagatcctaccaaattcactgctgatctaatgaacagttgtgactgataccttgatcccataattagtacacatttgtgatgagaattagtgcgtatagtccataaaaggaaggtcattttttcccaagaataaaaaactgatgtgcagtttaaaatggtttttctttaggtaaatactttgggtgccctttattgtctctgttcttgtataaatttgaaatagaaccagtaacttttgtaacttcagaaaaatactgattatacatgaggagaaagagttttcaatggaaatttagtgtgcattgcagagaagacatcactttgttgtttttaaatgttttaatgtttgcagttggggtgtgaattaattgctttgtgatttattttatataaggcaattcctgtgggaattggaggctttttgtttctaatactggctccaggggagtttcctacctgatagacatttggagcataactagtttatacttttgtattgagggcttctttctatgaaagacacacaaaggcacagccttcctatttagtgtttctgatcagtatttaactgcaggagtgtgctcttcttattatgcatgttgaggctccttctctggcacctagcctctatttctgcttgttctggtagttaactattttatagcattgagtttccaggtgctactgtatctgccacttttagtcccttccatatatctctaattgtcttacatctttactattttagttctttccccgttgtaccagataacaatggagttaagtgggcttatactagcctttgaatcagtagccatttaattcaggctggaagtgttttttctacaaaggaaacctaaa

SEQ ID NO: 37309 - DNA, 1076 bp, Homo sapiens
ggattgctgaacagtgttgaggcccatctgagattttgatagttgtagcagttattttgtcatattcaaaaactcggctctcatagtagaaaaagatgagtggttagaggaatctagcgtttaggaccttgtgtagggcaggagtgatggaagaaaaagtaaggtaaagggattagttgagctgatgtagtacagggcccaggttaattagggaaggaaatgatgttagaaaacagaaaagggagggatcaagagaggaatcataataaggttcagaaataaggttgagagcattgctgattatgttgcctggatacctaacctattctcggtgttggagagaccattgtgagagttaggatcatgaattggattggttgagataattatttttttccctgagaattctttcagctctatagtgtacatacttctttttgggtctgcctctctccacaaagcccccaaataatagcagtaacctgtaagaatcatgaaataacttacgagctgaacatgtagaatatgttcccatcttttcagaatatagttggcatccagtaatcaacaataaatagggaaaaaatcacaataatataaatttgttttctaactcttttcatgcttttcttaaggttatccattctgtcaaatacataatttttttgggaaaaaggaattattaaaaggtagatacaatatagcagatgctcatgatcttagatctcttatataagaggtcttggtattatgtttttatacagcttaccctggattaatgagcataccattcgcttaatttgtaaattagtttggacactttttacacttcgctgtccattctgtgtcagttttttgatgagttcacttaaggctacattaagctttctcattcatgtagaatctagttaggccttttggtttatctcatggacagagcataaagtacttgacagaatttgatctgacagctttacagttacataacatagaacagaagcttaaaaacaacaaaaaagagagagaagcaagggatttatcatagcaacctatatttctctctggaactttaccac

SEQ ID NO: 37310 - DNA, 1097 bp, Homo sapiens
ttgttatgtgataagtatattaaaagatttatgcacaaggtacttaccatagcagcacctcaacttgtctcccttcagttcttcctaccaatccaacctatatgtagctgtcaggtaatttgtcttaaagaatagccttgaatgtctcttccctgcccaaggtcccttaatggcctgctgcttgtataccaagtgaagtctaaattctttaatctgggattcttggcctgctatgttctgtccttaatttattttcctagtacttccaccaccatttgccgttatataccttaactctcttggtaaatccaactacttgccgttctcggtgtactttcagtcatccattcagcatattctttttgagggtcttccccactatctgcctcttgaaaggacatctgttactttttatctagcagcatgttcttgttcatctgtggcagctcttcctcctagcaccagtgtttggtttatttatacaaacttttattcagtcattcatttatttagtaaatatgctttgaagttagataagactactgtctcttgtaccttcttcccatgggcctgctgccaatgagaggtaagaattgtactgaatctgggtaaataagcccacctgagtttgcaagagagtagcacaagcaggttaatgaggccatagctccaagtgcagagttggagaggcccaaaagcacagaattggagagcctgtggttcaggggctgccatttttccaaattgctgagatactctgctatataatggcagcccatggttatatttcttagttgtctagtgaaaatactagggagtttggtcgggtagtgatggggattgtgactcagcagaatatttcgcaaatggtatgccaaaattaagtgccaagttttggtttctttttgcttttgttgtgagttagacatgtttcctttaaaatgaaaacatcagtcttcattgttctaaatgagacaaatctctgtgatattttatgttaaaaatatctacaacagtgaacatatagttagactcgtgtttttaaaaattggttgtatcctggaggtttactatgtccaatccctgttaactttact

SEQ ID NO: 37311 - DNA, 1033 bp, Homo sapiens
tgcaaaccagtagtttgtgttgttaaagatacttctagatgctggcgggcgcttgtagtgccagctactcgggaggctgaggcaggagaatggcatgaaccctggaggcggagcttacagtgagccaagatcgcgccactgcactctagcctgggtgacagagaaaaaaaaatacttctagatgcaaagtgttggatgagtaatttgagagacattcagaactatgatcagagataagctataccagtgatatgtttagataatcctatgacagaaaatgtaagattgtgacaagagatgagattatgttaccctgtgtgttgtcagcttcacccagctatggtaacccttaaaagtagatcagaaatagtgcagtggaaggtggtgcagcagtgacacaaggtaagcaaatcctcctactttcagaagagcatatgtaacaggtggatgtcttactgcaaagatatcttcctgttttcaaaacactgaagattcaaaatagcaaattagactttgatcactgacctaataatcttattttctcaaacttcagtgaatatatgcaagcccttgatgactcacatattttttgagttatgatttataaggtggaaagtagttcctgataaattcagatctgtgaatgtaaaaattagttaaaagtagtagctaaaagtaaggtaatttaaagtacctcatcaaccttttgtatagcaggatataactgttcatctcttgtcctaactcatgtttgtatagtctttaaaaaaatcatctcctttaaaattttgcacattctacttttcgtcctggcctaacatggtacgtgttatgtttggaggaaactaatataaaataattcatacccccaaacaaaaaagtacagttagtatatttatttcatttactatttgtaatgtcttttgcatccaagatgatttttccaagtttataatttttttcattatgaaagtcatacagatatacttcgagaaaaagagaaaaatgctaaaattagctactgtcccatcac

SEQ ID NO: 37312 - DNA, 1087 bp, Homo sapiens
caatacagagcttttagttgttgaaaacagaaatttaaataaatagataatatatagatatgtgcagcagggttacaaggcaaagctttacaagtctactaaggacaaaaaaagaaaaagctgaaaataggagagaaaagataagaacattaaagatcactccaggaaatccagggagaatagcgagtgaacagtagaagaaatcattaaagaaagaatacaagaaatgagataggcatttccatattgaaagtaccacttagtgtctagtacagtgaacaagacacctcactgaaattttagaacaggaataaagagaagatcctgaaagcttccgagaagaaaaaactggtcacataatggagagaaatctaagtatttaatagcattatacttattaatagtaacatcagattccaaactacagtggagtttttgaagaggtttaggatgagtactatttgtttccttttgaatttctatcagattttgttattttatgtttttagtcaaatgctgtacaaacttatgatgttagtaacattgagaagtttttgagtttttgctccaaaatgtatattacatggctaccttctttgctacaaacacaccaggaacaagaatttataccatccacagtaagaattattgggagagtttgttgttgttgttgtttgagacagggtcttgtctgtcacccaggctacagagcagtggcacaatcacagttcactgcagccttgacctcccaggctcacatgattctcccaccccagcatccctcagtaactgggactacatgccaccacaccccgctaattttttttcttttctttttttgaaacggagtctcgctctgtcacccaggctggagtgcagtggcacgatctcgactcactcaccctgctaatttttaaatttttttaagaaatgtcatctccctatgttgcccaggctagtctcaaactcctgctgcctcagcctcccaaagtgcaaggattacaagtgtgaggcactgtgcccagctgggagagatttttctattcaaacttgcagtctgcaggcctgcaatctgagatataatttt

SEQ ID NO: 37313 - DNA, 1198 bp, Homo sapiens
agtctggatgcaaggtatgctcattgctattggatgttattgcttttaggcgttttcagtgaactatatccttttagaaggaaaaaaaatcatgagtttatgctgatattttcatttcagacttcatagcatagatttatgcttaactttcgttctctacctactcgtatgtctttttttaagctaaacatttgtttcttaatacagtaattgaattatttctttatcatctaatatacttacaatattactactaacaatgccagtattactattaacagtgaaactactaatgatgtttattttggtagttctttttcttaaagtatatgctattagggatgaagagtcagaatactgtcttttgaagtacaagttgaatattctttatttgcaatgcttgggacaagcagtgtttaggattttgaattttttttggattttggagtatttggactttaaacctttatgatcacatggtccataccatggaagtgggtacaaaaaattacaactctgaaagcataagacattgaatcacaacaaaggacacaatctaattgtaaaagctataaaatgtcttggagagaaaaatgccatacatatcacagggacaataacagtcaaatcccttaaaaattattaagacacagcaacctaaaaattctacctttcaaactactttacattgggaatttaaggccagctagggaaattgaaagcaatggtagatacgattaaatctataattcatatacaagccatatacaagcaaaacataaagaatttatgcctggatatttacattttgttcagcaaagaaaatacagaatgcattggtttctttcaggaaaaatagttttataaggaggttgctataagagctgtggtgtttatctctggatgttttgtgtcaaattcaggatcaaggagcatgagaaaaaggtacggaggaagggaaaaggcagaagctagagcctcactcttctggaaatccagttggtgatcccaagggagtgaatacattactttggcagtaactaatactttggcagtcctttcgccaactatctacacttaccaattcctctgtagcccaatacttggaattctgacgcctgcttatgtactctctacctttaaaaagctctctcctcaccaaagagtaataaatgactttcagtgagtgtccacctac

SEQ ID NO: 37314 - DNA, 1027 bp, Homo sapiens
aacaaatagaagatactgggttttgtatatcatgtaatatctgtttcttcagtcaggatttagcagttttgatggacgtggtctatatgatatgttatagcagaaaagcagattttaacagtctcacttttaagctaaagtatctccaaattatattcaacaaggaaatcactttttaataatatgtttcatttccattataatactaagctctattgagcagattgtgttttccttatgcaaattacctttggatattataaatgaatatttctgttcatatgctaaatctatggaaatttgttttaatttttagcattggtaagggtttaggaatttaagacaggaagctggatgcttgcggtctctaaagtctgtaccctcaaaataaaatcagattaccattggaagaagttttttttagtgtcagcgttagttctttttttaattttcttaatcttcacatctttgccattcaactttttatctttctggtgattgcattttattggactagattatattatgttaatcttatattaaagacctgagcactctggtcagaatgactcagtttaaaccctggttaggtgtatgatcccagtaagttttctaacttttttgtgcttcatttttatgatttagctagaacctgacacataataagtgctcaataaatgttaccttgtattgctattataacataatttctttgagctaataaaagttatctacatcattattttttcctctgtgagagtattgctataaaagtttttaaaagtcatagtttaaagagatttctattatttttatgtttataaataaagtttacattagtttttaacctgcaatagagaagaatattaagactttaatttttctgacttgtacagcgtttttctccttgaatactcttaagaaaaagatttagcaattctggatcagaaatcatccataaccaaatataccacagtatattttaccttttgcttgtccatttatgcatttttttttaattttactt

SEQ ID NO: 37315 - DNA, 1044 bp, Homo sapiens
ctccaagtgacacttacatcacacatgtttgagtttacgttacttgcaaacatagggaaagaaagatacatgggataaactggtgcatgagaaatgagatcttagcagttggttgaaataaatgagaacaactgaggcaaactaaagaggaagaagggcaagtggcagcttaacaggagtaagatgatgagatgaagggcagaataccttcatggagaggaggcaaagagatatacatgatatgttcttaggaacataactgaagcaaacaatgatattatttctaattatatataaacctgtgagtcagccttccaggggcggcctgctaaggtagaatcattggaatgatttggccagggtttggataggagagaattggcagcagcgttaagattgacccatgataaataatgctatgcaggtagcagggagtctgactaggagcaaaatcaacgaacttatcccttgcctaacatagtatctgtggagtcagaaagaagaggttaaattgggatatctgaggcaagtatcaggatttgccatgtctgcggagtagtttcataattctaatggttataagcactaaggcgttcactaagtgaatgttggtagttccaggttatattatccattcttgagttacaaaatacactttaaaaccttcccatcttaatattatatgtttttttagtcacagagtgaaaaggtgagattacattggcctacatccttgccctctggagatgccttttcttctgtggggacacatagatttgtccaaaaggtaagctaatgtcagagtttactaaaagtacaccttgtattgttcttcattgttggtggaaatatcttttatttgagacggagtctcactctgtcaccagagtggagtgcagtggcgcgatctcggctcactacagtctccacctcccgggttcaagagattctcgtgcctcagcctccctggtagctgggattacaggcatgtaccaccacacccagctaatttttgtatttttaatggagacagtttcaccatgg

SEQ ID NO: 37316 - DNA, 1044 bp, Homo sapiens
actattattatcttcaaagatttcaactctatactcagtgtggatcaaattgaattattagaagagtccctgttcacaaaaaaaaaacaatgtattgaaaaacaggacaactccctaaatacattagactaatggttcaagattatcattcagctagtccagactagcttatttccaactttttggcaactttctctctctttagtctctttttccttcactaagggatcatattctttggtcatatactctaaccacattgcctaaaataattttttttaaacctttgcacattatataccacttcctgattattttagcattcaagtttatttgccatgttgaaaaggggagatagatttttgattgctttcagcattgttaatcttaccagttctctttctttattgggtagcaatgagcagagcaaaccaaagatctgcgggaaaaaaaccacttttgttgcttctccatgcaacactctccaccaaagaacagccagaaaagatggcaggcagtattggttaaaatctggacactactgtgttttatagtcttcttacagatctatctgatgtcaaattttattaaccttttccactgtaattttttctcaaggttgaaataactggatcccagttacattttacatggaatgtaagtgtgtgtgtatttgcacatgtgtgtacacacagtatgtgtgtgttcatatatatatacataatatatgcagggtatgtgtgtatttattggtaagcaactctattcaagaactttctaatcttttgtatgtagagtgtgtgtgtgtgtgtgtgtgtatatatacacactaaagactagaaagttcttaaatagagaaagttgtttatcaacaaatacgtctttcaggtaattcttagaattgagaaagaaagtacaatgataacaatatggtttcactgaaattgtttcattcaggtgtgtgcctgctgtgtgcttgactctaagctaggaatgggaaaacagtgatgagcaggaaatagtctctcaaggggcttaaaatct

SEQ ID NO: 37317 - DNA, 1062 bp, Homo sapiens
ggtgaaataatttgtccaaggtcaatcaactagttagtgaagaagtcagcattcagacctaggtctttctgacccaagaaccagggcttttggccaggaagcaattctgtgctgtaagtatgtatttctgtgaattatgttttgttgacataaatcatgggcttcttgaatcacagtattcttgtattttctgtttgttcctcatatctatattatttagaccataacttcttaaagactcagacatattcttattaaacttctttgtaggaatcagcaaagcattgggcacgcaaattttttatttgaaataatttacagtattgtaaaacagattttatgggagaaatttgtgatatttgaaggcttttcccccttaaaatcctcatggtttgtattacagtgattactgacagaatactttctgtctagctttactgtttttgccctccttggcatccattctagaatggttgctcactacaagaaaagttttaacgaaatgactgtatgatttaaatattctcaatgtattagaaatcacataattcaatgtgacattatacagcagcccctgcagaaaaaagttattcccgaggtcattcttaaattcaaaaattatatttcaatttataacatagaaaaggacatatgtataccagaccagtaattttatttagaaatattgtgctggctttaatctgtggagtccattaatattctgcatttctccttatgattttgagacaatgctaaattatttttaaagatagggttttgttttaaatatcttagccatctttcatgctgtcttgaggtcaaatgagatagtgtttgtaaaagttctttaagaaaaaactgaaagctgtatgaattaaagttaagattgtgtaaagttaagctaacatttttctagtaaagaggtgcctgttgtcaaagggctctgtgagcattttctgtataatttgtcaaagatatataataaaccacttttgatgctattatttttttaaattataggattattttcagaatcttctacaattagaatacatgtgattt

SEQ ID NO: 37318 - DNA, 1072 bp, Homo sapiens
taatgtctattcagatctttcaaccattttttaagtggattactagatttcttcttatagacttctctcatctccttgtatattctggttattaatcccttgtcagatgggtagctttcaaatattttctcccattctgtaggttgtctctttgttgattatttctttatctgtagagacgccttttaacttgatgtgatctcatttgtccatttttgctctggttgcctgtgcatacgtggtatttctcaagaaatctttgaccagtacaatgttctggagtttccccagtgttttcttttagtaatttcagagtttgaggccttagatttaaatatttaatccatttgatatgattttaatgtatagcaagaggtaggggtctagtttcattcttctgcttatgaatatccagttttcctagcactatttattgaagcgactgtcctttccccaatgtatgttcttggcacttttctcaaaaataagttcactgtaggtgtgtggatttgtttctgagctctgttctgtttcactggtctgtatatctgtttatatgccagtaccaaactgttttggttactatagctctgtagtataatttgaagtcaggtagtgggattcctacagttgtgttctttttgcttaggatatctttggctattctgggtcttttgtggttctgtatacattttaggattgtttcttgtggtttggtgaacgatgtcattgttattttgatagggattgcatcaaatctgtagattgttttgggtagtatggacattttaacaatattgattcttccagtccatgaatatgtgatatctttccgttgttttgtgtcctcttcagtttcttgaatcgctgttttatagttttcattgtagagatctttcacttctttggttaagtttattcctaggtatcttattttatttctagctattataaatggaattacttgatttctttttcaggtttttattggcatatagacatgctgttgatttttgtgtatgtatttttgtatcctgcaactttactgaatgtatcagttctaatagttttg

SEQ ID NO: 37319 - DNA, 1021 bp, Homo sapiens
caagaatgcagacaaaaaaatgaaaacgtttattcttgtgttaatttaatgtttattgtatattcttacatggttgatataaggagttgtatagaaattgaaattattagttgggcgcggtgcctcactcctgtagacccagcactttgggaggccgaggcgggcagatcacctgagtcaggagtttgagaccagcctggtcaacatggtgaaaccccgtctctactaaaaaaattagctgggtatggtggcacatgcctataatacccgctactcgggaggctgaggcaggataatcttttgaacctgggaggcagaagttgcagtgagctatatcacactgttgcactccaacctaggcaacaagagcagaaatccatctcaaaaaagaaaaaaagaaattgaaattattttttcccattgacttttaataataaaattaacattgttttcatgggaaaacatttggaattgaaatgaaataaaatccattctaaagaatgcaataggcctcttgaagttaaatattaaaatgaaaaaataactcattacagcattaaattgttaagattaaaaataaatccataatacaaataattttctgcagttcactacgacatgcaaaaaatgcagtcccctgaggtttggcctatgggaaagtgtgttgtacctagggtcactctgcacttcaaatactgaaggtaacatttacattataaaaattctgttaatattgcaggcatgtagtttattttatttttttctgaaagggctgtctgtggctcttaatgtattttgtttaacatcctacataaaagttttacagtaaaaaatggtgtatctttttgtgaaatgaaaatacatcagcaatattcaatgggactggataaaattccccttgtttgaaccttgattttaaggttaggaatgaaagcattttgttgatggagataatagaggtaagaggtaccttttaaaataaattgcacatagcagaagaggtaagtgacaaactttttaa

SEQ ID NO: 37320 - DNA, 1034 bp, Homo sapiens
atgtcttgctagataataaattctaagaaatgattatttacctcatacaagatacaggttctatcagaaactgacagaaaaattcatagccattggatttattcttcctattaaacatatcagcataatgtcattttaccctcaccattgacttctgtgttcttgatgttttaagagtgtttgctttgtaaactacattaaaacatcaccttgtaacccataaatgtataaaactattatgatttgtcaatttaaaaaaaatttttttttaaaaagagtatgtgctaaatgtaagtacactagtttttttctttctaatcctttcttcctaaccttaagcgaacgtgaaggaacgagcattatctacattttaaaccatccttttaggggtcattttaaggatctcacattctttttttaatctctctctttttgaaacagggtcttgctatgttgcccagagtggagagcagtggctattcataggcataatcatagctcactacaatctcaaactccggggctcaagtgaacctcctgcctcagcccctgccagggactgcaagtgcataccaccatgcttgggtttaagcatctcaaattctatctgtgatggatgtgttttcattaatgaaggctttcttcattttattgataaacacagaaaacatcttttatttcactttcctttagcttcttaagaattcgagggtaagattcaagtctgtgctaattttttgcctcctgacacagtacctggagcaaagcagatgggcaacaaatctgtgcccggctataaatggatgtccggaggggcatccacttatggataggagagtggtgttgttcagaagaggaggacttgggcagacacctcagctgcttgtctgcagaagtagcacttaagtgttttcatgaattaaagattataatttttttaaacataccttgatttcgtataaaattgaacattttatagaattttttttgaaacaatggattttaatgtcagtcattttctttgttatactcaa

SEQ ID NO: 37321 - DNA, 1024 bp, Homo sapiens
acgttataaactcactaatattgggactgggtcttcaactgttttttgcccagtgattttttgcctgtaggtactcaatatgttgaatgaatgattttagcatatcacaggaagattgcagatttggatactgttgcacttatatatatctggaaaggattttatcttaaatatcaaggaaaaaagctaaagttagcttctactgttttagagcatttgtgcagaatgtcatcagatgaggagaaatactcacttccagttgtgcaaaatgactccagtcgaggcagttctgtctcttcgaatcttcaggtaggaaaaaatttctaaatttaccatgactttttttattttaaacaaatgaatgtaagggaaaactaggattttttaataattttttcatccatttacaagggagtttttcaatttataataatatcaaacttcaggaattactgtacacattttaggagtgactttacattgttttaacttttcagaaaatattgatgaactcttcatacactctgtacaaaggcttcaaccaacacagtaagaggtgaaacaaatgttcaagaaacatttttttgtttaaatttttttcattttagctacctctcatgaatgctactttcacttttaatgcaaattaatacaatatcaaaccatccaaagttctagagctcaagattcccttgtgttctacttgctgaggtttggtctctgttgtcacaacattcagtacaatctgctgcccaggacctggacattgacagataaaatgaagtgggtcagttaactacagagggtgtggtatttacatgaaatgttttaaatttctcttatttctaaatatttcatcatcaaaaatatggatttagatttctggagtagattttaaatatgagaataatgacatggtatatcttaaattttacagttgtattactcaaggggaaaggctgtttatgcctaagcatatgaaattgttattgattctgtacgatatgagaaaagctttaggaaa

SEQ ID NO: 37322 - DNA, 1020 bp, Homo sapiens
ttaaattggtaattttttttgtcagtccataaaattctacatgtttaaattttttgtggacctaccaaccaggaacatgttgcttctcaggtcctagtatatcctccaaagaatataccacaagtttttccatttgactttgagctgctgttgaagtggtgagtgctgtgttttgagcttattttgaacctagatccttgtgaaaggtacaaatagaggtaatagttaagttatggcatttattagaagttttattatttggcttcctttagaattattgtgaagtttaaaaatagcctttctcctgcaaattttcctagtctttagtaactgttagtgttctatatagcacaaacttgaatctctcagccaaaaaagggaacatatatactgtttaagtatggcaagttttctttggtaccaatttgtttagataattttaaaaatgttttttagttctagctactaaaacctgtatgaactcaaatggataggcatcttgtgagggtgtgtttttcccagtgtgaattggcttgaagagccatgggctaaatgggtactagaacaacaactgcccctcatgtacgccaaggatgagctctagatcatttgagaggcacagtgtttccggagtcagggactgcagctgagcgcaactgccccatctgaccactgactcaaatacgaactgcttgagacagacttcttttatgtagttctttgcagtgtccattgagacactataaccagccttgtaacaatatgttttctccttttggtgctaaaaaatgaaaatattagaaagtagtctacacattaaagattgaaattcttaaactactgatgaagaaagggcaacgtgacagatgttagcagactgacccttcttacagaaaacctacagatttatttgttcattatacaaatatactacaaatataccctaaagggaatctccataagttcttttactagttttagctttgacagttgcttccacaactacctacaaagactgga

SEQ ID NO: 37323 - DNA, 1031 bp, Homo sapiens
aggtaaaaaatgtatacactatctataaacttgcctttgacatatataacccaatttctgattttaaaaatttaatcccatgttggacataaaaaaggtatcattcatggtttcaggttgtgctttaaaatggtctttttctaaaattggatgatttgtgttaagcattttaatctttgcttctaatctcgaggcaaggaaatgattaaatggccacagatttaaaaattattgaaattttgggttggattaaataatcccattggatttgaggttaatgcttaaaattgttttaagaaacactgtgaaaaagagttcttttgaagatctgacacatttcctagtgaggcaaagaaaattaaaaattttaggagtgtttctcagtctgctggcatcttggggcaagataaattgagtgagaattgttggattccatcttataggacttgggagtgatgctcttgaagcactttagatctgttttgctgtgagagattagtaccaatggactactgaatcttatctctgatctgaaaaaacaaatctcttagcatcaggggctcagaaaatgtttttaaagggcaattaacttttctaaatgtaatcacaagaaatgtttatgaattgtacccttcgaggagaaggagttggggaggcttttctctattttgtgactttctatactgtttaatttttctaacggcatgcacgttatttttattaaaaatttcagtagtagtgttatgtagtggggggagaatatgatccatttttctttgtaccactctttaaaaacaaaacaaaagattaggataggaacaggacttagaaacactaatatattcaaagattgtttctttgtatcccaactttattttgaaaaaagttaaatatacatgataaagacagtatggtttcagaaaagatagagactagatcactaagagttgtagccctacaaattatctattttaaatgttacatgttttttctcacttttgtgaaaattaatatttaaaagttttgtattt

SEQ ID NO: 37324 - DNA, 1024 bp, Homo sapiens
accacgcccacctaattttttgtatttttagtggagacagggtttcaccgttttagccaggatggtctcgatctccagacctcgtgatccacctgcctcggcctcccaaagtgctgggattacaggtgtgagccaccgcacccggctttttttaaaggttttaaaaacttgtaaaagttatacatagtcatagtagaaaaatatgaaaatagtgaaaaacattaaaaatataaaagttaatattaaaatctttccactatccagtattaaacaccagtccacatctttctaggtgattttctgggcctatgtatgtgtgtacatgtgtattaatatggtttactgttttgtaacaatatgtcataaatatatttccatatctaagtttatattgttaagcatacttttataacttaatttttaataacagcattactatttcattttgttgatgtcttattcaattctcaattcgatgtgtagttatcttcagatttttaagattgtgtatttgtacatatatgtatgtaacaaccttgtacatttatgtatttccttcaggataaattcctagaagtggaattgttggatcgagatttacatttttcaaggttttgatacatattagcaaattaatctttgaaaaaaatactaatgtatagtagggcattaggcaatacaggaatgtgctgatttcttatgcttttgccagtactgtgttgggtattttcctgttttatatttcctgattcacaagtcaataaatggtatctccttgtttttagatttctttgattattaaaggagttgaacatcttttcacgtttactgaccatttgtatttgttttgccttttcaggtccttttcccatttttttttctgctgtatttatcttgttcttaataatttccaagaactccttatgtatcaagtataataaacctgttttgtcatccaagttgcaaatttttcccagctttttgtcatttcagtgtatttgtgtgtgtgtgtgtgtgttttaga

SEQ ID NO: 37325 - DNA, 1052 bp, Homo sapiens
agagaaagctgatgttggaggtgattgagggatgtgggctagtcactgattagggagggagtgagttgagataacaagacatccgttgaaaccctagagagaatgggagcttcactgtttggaaaagtcagtaaaggaagagagttcttcaggacacattcagtatgggttttagtagatcatctcaaacatctcaagcatttgaaagaaatagtttaaagtagtatgaataaggcttttttttggagatgggtttttcagtatggtaggtatttttcacttaatgaaatgcttgtttttagagcaggagtagtattttatcctcttagagcattgtaataaaattttatctgtctttttcatttagtaattttcaggttggtagcacccacagaaggatcactagaatgggatattcttgaagttaagcgcctccttgatcaccaggataatattctctcattgattaatgtcaatggtaagctcattgtgtacatttattatgtacagttttgtgcttgttaacacaacctgctctgaacacgagccttgcttagttctgggattctagaataagtcactaaaataatgggattgtcattctcttttactctgaagttttagccggtggagctgagcaagtttcctagattgctaggtctaagatttagggacaaggaaaatagtgtaaggcagagaaaatagaggagaacataatgatctcaggcactgcttggtagctgtgggatgactgtcacaggctgtttcagcatttttggcagctgtttctggctagttcctcttttgtagagagattggaaatatgcccttttgtcttgctgtccacaccatacaatatcacatagcaagttacacacttacactagaatgagcaggattcaagccagttgtaatcctggttgaagactctcaaagaataataccaaactaaagtaaaagtctgcagaaaatgggtcatgtcttcccttccttcctcgtggtgggggttttgacctgctgtacatcctatttggcttcctaaatgattttaa

SEQ ID NO: 37326 - DNA, 1068 bp, Homo sapiens
tcttatctgggtggttctggctcagggcctctcctgaggctcctgctatctgaaggcctgactgcggtggaggagctgcctcccaggaggctcacctacgtgcttggcaagttagtgctgtttgttgcccagaagcctcagctctttgctacatggacctttctccatgtgactgctttagtgtcttcaccttagagcacgtgatccaagagagaacaaggaggaggccacagtatcttttatgacttagtcttgtaagtcacacaccattcctcttgccagaatctgtttggtagaagctagtcacttagtagtgcccacatgatctactaaggagaaataagctccacctagtgaaggaaggggttaaagaacttgtggatatatttttaaaccactgaacaatgactgcttaagtttctaacctgatatacatttcaaataaattttgcagtgtttaactgttcttcagagactagatgtttggctttctggtgggaatgacctgtgtgtgtggaaccgaaaattagatctcctgtgtaagactagccacctttctgatacaggtaaaaaacatcaaggtaattttgaactatgattgacagactagaagacacagcagatcttcagagagactttccataagtagaaaggtcaatataggggatttttctttttcagttctgaagataacaggtagccatattcaattcagatcggggttgtgtaaaatatatttttatcctgaatcaggaggagaagactccactcaggaacaaccttttccaatgctcttgggctgttttcctgaactgtgtttggtgagcacgctgatacctagaagcagacccttacgactttacagtagcatttgtggggtcattaactttgaataaatgcctaaggatgacctctttttacaattgtccttaccaaaaagatcatacatgtgcaagcttactgataaagtttcattttctcacaattctgtgtacatacgattttggtttcaacagaaaaaaaataatcaaatcagttttgactttttgataccaaggatcttaaaaa

SEQ ID NO: 37327 - DNA, 1043 bp, Homo sapiens
tcttagatttgatgaaatacggtacatttctaaacaatcataaagttttaagatctcaaagcaagaaccacatgtaaggtgtcttcacatttccctaactcctagcacggaatcacactgaatacattttttgctaatcggtaaagaaacatttctctcaaaatcttatctttaggcttaagtttttgctttctgttactttagaatgtttttaaaaattagtatgtaaaatgttatctggcaatattactattcttccattggatagaatagcttaaactttattgacattttaatcctttttttattttatagttcattacttcttttcagcagttacactataccttacaattaggaattcttgggttgtatttccatttctgatttggagatggttgaagtgtatgcttgactgactaggatttagtttaagataaactgataaagtatagctagttttttgttatccatcataataggatgggtaattgtaatttgtgaatgatatctcaaccctttattagtttttttatgacaggtactaatatgtgtcaaagttatactggtttgtattttaaagcttaatgtttcctctttaggggaggtagtaataaatactgaaatggcaaaaaaaaaaaaaaaatggtagcaatagaatatatataagaatagaaggcctgaataatctaccaaccaggtaattgaccttgcagcaataaaaaattgactgtgatttcatgcattactattgagccttatttagatttaacttttgttccctactgattgaattaaagtttgaggttaaatgctctatatcccatttctaaactctcagctgttctcagtcatctctcattgtgaactcatgaaagtcaaacatgataaaacaatcataagaagttaaaaattagggttagaaaaaaagtatgtattttaaacttgctgtcttctaaatgcaattttaagtttaaagaatcaatagaaattgatgttttataccaaagaacacttaagaccttgagtcctgccctccccac

SEQ ID NO: 37328 - DNA, 1044 bp, Homo sapiens
tgtcattatgatgttagctggttattttgcttgttagttgatgcagtttcttcctagcctcgatggtctttacaatttggcatgtttttgcagtggctggtatcggttgttcctttccatgtttagtgcttccttcaggagctcttttaagacaggcctggtggtgacaaaatctctcagcatttgcttgtctgtaaagtattttatttctccttcacttatgaagcttagtttggctggatatgaaattctgggttgaaaattcttttctttaagaatgttgaatattggcccccattatcttctggcttgtagagtttctgccaagagatctgctgttagtctgatgggcttcccttcgtgggtaacccgacctttctctctggctgcccttaacattttttccttcatttcaactttggtgaatctgacaattatgtgtcttggagttgctcttctcgaggagtatctttgtggcgttctctgtatttcctgaatctgaatgttggcctgccttgctagattggagaagttctcctgtataatatcctgcagagtgttttccaacttggttccattctccctgtcactttcagttacaccaatcagacgtagatttggtcttttcacatagtcccatatttcttggaggctttgtttctttttatcctttttttctctaaatttctcttctcacttcatttcattcatttgatcttccatcactgatacccttagcattttttcaatgttattttattgtaaatgtaataatgacttcaggcagtgattattgatgggtgttaacatcacacacacgcaaaaatgactgccagaaatttgtttcctaatggagtatacaaactgcttatgaaatggtcttaccaaagagtcagatttgaattggattaagtctgtagatttaaggatcagttttctaaaaatacagaatacagaggtgcatgttagatgacaacagaggaaagtagtcagcaaaatctgggctgtgagaattatacaggagagacaactagggtacatgtg

SEQ ID NO: 37329 - DNA, 1032 bp, Homo sapiens
ctcttattagtttgagatatgtcccatccatacctaatttattgagagtttttagcatgaagagttgttgaattttgtcaaaggccttttctgcatctgttgagataatcatatggtttttgtctttggttctgtttatatgctgaattatgtttattgatttgcgtatattgaaccagccttgcatcccagtgatgaagcccacttgatcatggtggataagctttttgatgtgctgctggattcggtttgccagtattttactgaggatttctgcatcaatgttcatcagggttattggtctaaaattctcttttttggttatgtctctgcccggctttggtatcaggatgatgctggcctcatgagttaaggaggattccctctttttctgttgattggagtagtttcagaaggaatggtaccagcttctccttgtacctctggtagaattcggctgtgaatccatctggtcctggatttttttttggttggtaagctattaattattgcgtcaatttcagatcctgttattggtctattcagagattcagcttcttcctggtttagtcttgggagggtgtatgtgtcaaggaacttatccatttcttctagattttctagtttatttgcatagaggtgtttttagtattctctgatggtagtttgtatttctgtgggattggtggtgatatcccctttatcattttttattgcgtctatttgattcttctctcttttcttctttattagtcttactagcgttctatcaattttgttgatcttttcaaaaaaccggttccgggattcattaattttttgaagggttttttgtgtctctatttccttcagttctgctctgatcttagttatttcttgccttctgctggctttcgaatgtgtttgctcttgcttttctagttcttttaattgtgatgttagggtgtcaattttagatctttcctgctttctcttgtgggcatttagtgctataaatttccctctacacactgctttgaatgtgtcctagag

SEQ ID NO: 37330 - DNA, 1050 bp, Homo sapiens
gcctcctgagtagctgggattacaggcatgctccaccacgccctgctaattttgtatttttagtagagacagggtttctccatgttggtcaggctggtcttgaacctcctgacctcaggtgatctgcctgcctcggtctcccaaaatgctgggattacaggcgtgagccactgtgcctggcctttctaacttctaataaatacaatttaagttaaaatattgaaccatttaacataaccataacttttttctgattcctcttaataaggatatacttaccaagatatgagctaaacacctacaagttctgccatctttgaacgtctcacagagattctcattctaggcagagatcctacaagaatccaggatgatgatcccagattgccagcgcaggttggaagccgcatatttggatcttcaacggatactagtaagcaaagacttctgtgtcatgtttaaattttttttttcaatccaatacatggaaagccaaaagtttaaatatttaacactgagaactagttggcagtatttcttattcacttgccctttataccgctatattttaaaataattaatggagtttaaattgtgttttgaattatgcctccagtaaaagtactgttttctagcatgtttgttcagtttattaaaatttagctagttaaatttatttaagttatgatagtaccagtattgtccagcaatgtcttgattatttggttttcatacataaagatcttttgagacattgaggatgagttgactgattaaaattttaaaagatctaatgtttcaaaagaatttgggatcttattaaaaggatcttgaattctttcacattcaaacctagatcagtttgagagggggaaaaaacctggtaatctatgtagtcccctcatactaacttggagctgaataacacttatacttgctggtataaatgccttgtgatacagaaggtagataaagcaggaaataataactgttaaaatactatctaagacaggaagcatcatttgtatttcttgacagtttaaatgcttt

SEQ ID NO: 37331 - DNA, 1033 bp, Homo sapiens
aagatattcaaagaggtgtcgttacatccttcatccttccttccccaatgttagtatcttgtataaatataatacagtattcaaaccatgaagtttgccttagcacaccacagagcttactcatatttcactagttatacctgcactcatttgtgtgtttgcatgtatagttctctgcagtagcatgtgcagcaaccaatcaagatggagaactgttccatcgcaaagctccctcttgccacttctttttagccacccaatcctctctgctcccaaaaccctaaataattacactgcctcaagaatgtcacataacgtagaatggaatctacagtatgtaaccttttaaaattggctttttctattttatataattccctttaggtccattgaagttactgagtgtatcaatagtttgttctttattactgctaagtagtattccatggtttggatgtactaacatttaacctttgatgaacatttggattgtttccaggtttttgctgttgtgagaaaagctgctgtgaatgttcatgtacagttttgatgtgaacataggttttattttattttattatttctgtaggttttgggggcacaggtggtatttggttacaagagtaagttctttagtggtgatttttgagattttggtgcacccatcacccaagcagtgtacactgtacctgatttgtagtcttttatccctcaccccattcccaccctttccctctgagtccccaaggtctattgtgtcattcttacgcctttgcatcctcatagcttagctcccacttataagtgagaacatatgatgtttccttttccattcctgagttacatcacttagactaatagtctccagtcccatccaacttgctgcaaatgccattaactcattcctttttatggctgaggtagtattccatcatatatctatatatactgagttacctcacttagagtaagtctccagtcccgtccaagttgctgcaaatgccattaactcattgctatttgtggctgagta

SEQ ID NO: 37332 - DNA, 1035 bp, Homo sapiens
ataaaactactttggaaagcaatttgatgatatttagtgaagtagaagttgtatatatactctataaaacctctttagcatcatctgacttgtcatcagtacattgatttgtactgtttaagagtggaacctttattatttctcataccgcatcttaccctagcctttattcactataattttacatgcttgcattattgggttctcactaactgactgattttttttttttctttttcagggcaacacatgctattcaataacttgtttcctgggccttttcacaaaatatgactttttaagcaaaaacgtaacttgtatttattttgatattccaataaccatgcaaatacgcagcacctttacttatcccatgtgataggtagttaagtaactctttaatgttgctggagccattgctgctgttttccatagacaagcacaatgaagtaggatgacttggattaccagtcagaattatctgtgggcttaggcatagaatcctcctcttctgttgtatacttcttcaaaagttaccatgttgttcttattgctcaatttttgtgaatcactttttttctgcttcagaattgttttataaatatatatttctatctttaaattgaaaatgttaaaagacagtagtgagatttctagactcaattttttattcattcaaccaacattgagtgcctactatgtaggaagatcaattaaacaatatgaatacaaccttatcctctcttcaaggaacttaagacctagcaagtaaatggcttcggtgtagtgtgttaatgctgatataattaagtaggtgatggacagaattaagtggaagtctttcaagtcaggggtcagcaacccttttttgtaaaggaccagatattatattttaggttttgcaggccatatggttcttctatcacaactactcttctctgctcttatagcatgaaaacagccatacatgatacataaatgaatgagtatagctgtgttccaataaaactttatttatggatattaaatttgaat

SEQ ID NO: 37333 - DNA, 1048 bp, Homo sapiens
tatgaaatacttcacaatcactaacagctgtattttcaaagaacatttaatgacattggaagtgattattatccaaattattgttatttattagtattattatatattttttgagacagtcttgctctgttattcaggctggaatgcagtggcacaattatagcttactgcatccttgactccctaggctccagggatccttccacctcagacttctgagtagctggaactacaaaggcatgccaccacgcctggctaatttttaaaaattttttgtagagacaaaatctcgccgtgttgcccaggttggtctcagactcctggcctcaagtggtcctcctgcctcagcctcccaaagtgttgggattacaggtgtgagccgctgtacctggcccaaattatttttttatatatctaaatataaattttcacacacacatgttgagagaaaaagactactggacagtactcaaaatgttaatacaggtccataatcccttactttgaaaacccttgggcccatatgtgtttgtgaattccaaatctttcaaattttataaaagtaatgtatatttccataatagcatctagagaaatgctctacaatcatacacattaatatttctgcagtgaaacgtaactattcacattagatggtacacataaattctataaatcattttatctcatttgaggttacactttgctgctaaatgagtttgtttcaaacaataaacaatgttctttttttaaaacttctttgggtttcaaaattatgtgtattttgaatctgtagtgattatgagtgatttttaaaattttgtttttttataattttttataaatatgtacatatgtacattacagaaaaatatcttaatacaaattttaaaatacatacttgtcttcagtattcttattaaatcttagcctttcctgcaaacgagaggagccaaattcaccagaagatactaatttgttgattcaacaaatatttatccagtaaatactagagagaaaactaatactattttaataagcataaaga

SEQ ID NO: 37334 - DNA, 1030 bp, Homo sapiens
gaggctgacgatagttgccctgcttaccacgcagggtaattatgagttatttcattcagcaaatatatctgtgaggcatatattctgctaggtgtgatatgagacatattttcacaccttgggggatttatttttaattgtcgaagtagacaaaatttcaacctattgtgatgatgcagataaatatgctatgaagatacatagacaaaggatccacagtgtcagcttgggagagtggaaggattgatgttagagtggtcctcctggaagacaggacatttatttgagttaagttttgaagaatgagttggttgggagaggatgaggagaggagacattccattcagaacaagcagcatctccagccccatctcattttatgtgtttctgggtagcacacttttgttttattttaagttttgttaggagaggatactgtagcaggttcttccttagttttgctgactgttgacatcttaactataattctcaagtttgggaacagtgaaaaatctcacttaggactttataatgaccacaaggattggtggaaaatgactaaaactcactgaattttaactacatacattgtactgtatagaccattagcactaaatcatcagcttctgatgtcaaccttagttcttccgtactaaggaactagtgagaattcttaattaatgcagttgacttgcatttttccaattgacttttttcttcctgcatccaagtagtaagtggatacacttcctggtgccatattgtttcctttgaagcacagtgaaacttcttaccccataatggtctatagatttagtatctagctacttaattcccactctccattaagttgcagtttataggccttgatattttactattcaacacctaatatcctgtaagttacagaaatactttgaaaatgtgatgtagatagaaggtaatattatttattctgagtattatcctttagtagccaccatgattattaaaaacaaagtggtcttggtttgttttttgtttttttgag

SEQ ID NO: 37335 - DNA, 1034 bp, Homo sapiens
gttgtgtagaactacaccttagaaatttaggaacaaatttatcagtcactaaagtcagaattttgcatattactttttcatcattttggattccaagttgatggaatctggttcactagctcttaataagcatgttgaaaaagtgttctgtgctcgaattagtttgggaagggttgagttaaacaaagtttaatatgtttctttactgtaagataactcaaaagctgtgattatgtgaaacctttaagaggggaagagtgtacttccaaatacactttggaatttccaaaagtttatttttggaatttggtatttccaaaactttatttgttcataaaaacgttgttactttcgtttacttttgccatatctattaacatttctttgaagagcattcctttttcctctataaaagaaagcagttgttaccacatttgaatggcagtttggttatatttacatgatcaattaaaggacagattttcccctcatacataatacaagttagagtcagctggctgtaattacagctcctgtgtctttgtttaatcccaaatgttacagttattacttggggtttttaggttgaccagaaaaaggaatgtttgtcacagatgtatgtttatgtataatcatgatagtctatccacagtcagggtcctgaaagattctaccaagtaattcatcagaaatagttcaggaagactgcagaacaacagcttgcaaaaagttgtgatgctcttcaaatgccataaaagacataatttatatatttttttctgtttttgtgagataaagttagagatttttcgtgtttttacatgctaaaacaatactattctcctgtttaagcctccagttgtgaaaatgcaacattttaaaataatgtttactggcaaattcaggaagtcaggctgtaaaatgaccattttactttgagtaaacaggtgaagaatgaaagggtaaaatatttgatacagaatagactttttttaaactacaggctataaataaggtgacttagacaagaaaga

SEQ ID NO: 37336 - DNA, 1053 bp, Homo sapiens
tctggataatttttgtatttttagtagagacggggtttcgccatgttggccaggctggtctcaaactcctgacctcagcaatccacccgcctcagcctcccaaagtgctgggatcataggcatgaaccactgtgcttggccaatcgtttctaacttttgatgtaaagttagagacatgtgattcttcctttcacttgaacacttagaggccattatagagttattgactgacctgattttaatattgtgtctcagggagtagagaggcctgaagagagcaagagaaatgagagaacagccagtcattggagcagtcagaatatacacattcatcgattgagtttgccatcttatataggcacagtttgtgggaccgtaaaacaattaacaatagtaacataaaaggtcagtgatcacaaatcaccgtaaaatatataataatagtgaacaaggttgaagtattgcaagaattatcaaaatgtaagagacacagagtgagcacatgcttttggaaaaaaggcactgacagacttgtttgacacacgattaccacaaaccttcaatttttttttttttttttttttttttttgagacagagtctcactctgtcgcccagactggagtgcagtggcacgatctctgctcactgcaagctctgcctcccgggtccatgcctttctcctgcctcagcctcccgagtagctgggcctacaggcgcccgtcaccacgcccggctaattttttgtatttttagtagagatggtcaaaccttcagtttcttaaaaagaaagaatgaaataaaaaaacaaaaatccaacatcagcaaagtgcagtaagataaggtaatgcctgtgtatgatttcataggacccagatacccatttgtttatagagaaaacgttttaagattgagagaaattctaaaactggaaacctgtagtcactctgtggagaagctatagctctagaaatgttttcaggagtgtttcagattacttattgggaagacattttcattttttgacaccagataatgacatcaaacataccct

SEQ ID NO: 37337 - DNA, 1049 bp, Homo sapiens
ctgcataggggatttcttttaaatagaggcagttttgttttattgcaaaatttgttttattttgttttgtttttaatgcaaatttatgaatagagcacataaagctggccttgtcatatttgccaacaccatttcgcatgtaggtaaagcatgtatgaaagaataaacagtaagcatatgagtgaatgaaggacaaattaagccaaataaacttgaatgctcttagttgtattgaatttttaatagagtagaattataaaattaatatttgatagaaacgaatatctaattttcactaaaatgattaatcctattttaggaaaattaaagtcaagttaattataaatatggactaaaattagcagttgaatcacagcaaagataatgacaggattatattgaattgggggtcatgtttgacatggtgccataggtgttatgttaaatacagttttatttaaatcatattaattacttggaagaaagcatgcaagaaagcctcaaaggatgctaaatttggattgtaattagaacagagaactgaaaagagctagagtgacgaggcatgtctcggtagataaacaatgaaattccctttgaaaaattaatccccttgagggaaagtagagtagattttcgcattaaatattttgtttctgatttggcatttgccaatctgagtaaaatttgagtaccttatttaagagactttctttttatgttgtgatcctttgtatttattcaggatgttaataaccaaaatcttcataatatgtaaaatctagatacaggtaccttggagatatcgctggttcagttccagaccatcacaataaaatgagtcacacaaattttttggtttctcaagtgcatataaaagttatgtttgctctgtattgtagtatattatgtgtgcaatagcattgcatctaaaaaatgtacataccataatttaaaaacactttattgttagaaaaatacctaacaatcatctgagccttcagtgaattgtaatctttttgctgttacatatcttgcctcaacgttga

SEQ ID NO: 37338 - DNA, 1049 bp, Homo sapiens
aactttataaggttataacctagtaccctgctatcctgttcagctttgctgctcttctcctgtgcactcaacaaaccagccttacttaattttcaaagcaaattttaatgttcttttttgctttagagtcttctatgttcttagcacctagaatgctgcctccctgcttagtactcctgccagatatcctttttccagtctctgtcctgctaattcctactcatccatcatatcctaactttgacatcattttctaggggaagtattcttaatagccctcccctagccccacatttaatttggctgtcttttagcaaacagaatatcatccccaaaatatatttattttactgaagagttgtggttatgaaatacattttaaatgttgatgttgtattcttatttggataactgagtttctagttgtggaattccttagtgtcttttttgtttgtttgtttttggtaaggcccccagggtgccttttacttgccactgtagttcaaaagaagaagatataagatgaggatttgatgaatagttaagacgggacaaattattgtgtccacttcttattcttgttaacagcgcaggaaacgtcaagtttttatttagctgttatatggaggaacagtgctagtgggtctcttgatgtttaaaaactgatttttaaggactcagtagtatatttgcctggtgaaagtgggcagggaagaggaaggatccagccaaagatgattggccttctctatagagcaagatatttcaaacttttgttgttgttgagacagcgcctcactcactctgtttagagtgcagtggtgcgatcttggctcaccacaacctctgcttcctaggttcaagcgacgctcgtgcctcagcctcctgagtagctgggattacaggtgtgcaccaccacacccggctaatttttgtatttttagtggagacaagggttcaccatgttggccagtctggtcttaaactcctgacctcaggtgatccgcctgcctcagcctcccaaagtgctgggattacaggcatgagcc

SEQ ID NO: 37339 - DNA, 1026 bp, Homo sapiens
aaatattcttcttctcaaatattagagagagtactctgattgggatattcagagtagctcagggtagttctccctgagctatatcagcagcccaaatgaaattgagccaagggccaactctaaactcaagccaactttcctactctttattgttggacttggtaaatatatcaacttctgaatataaaatctcccttcaggttttcattaaatattcggtttcctctgactagaatactccctagccatctgctctggataatacttaactagtccttaacttttaggtctctttttaatcattacttttttaaaaaaatctattttttttcttttgctgttacttctttcttgaagtcttccatggttaatggtaggatcaggtgctctttgtatgtgccccacgcaccatcaaacctacagacttacttgcatcgcacccctactatccttattacctcctcttggaataaaagatctgaacctcttattgaaagccaacattctgtgatctcaatcctatccttttgccctgtgtgttgtcttttcttaatcctgtgtctctaacctctaccagtttcttctcaatagcattcaggtatggtgaagtcacttttatcttacagaaacaacaccaaaaacctctatcctatttctctctctcggaaccacacttggcaaaggaattatcttctccacaaccctacctcctagtcacttcttaacccattgtagtctgatttcttttcttagtagtagcagtaaaaaagatcacccataatttttaaagcctttatcttgccttcttagtaacagttgacacagttgtcctttcccactttcataaaaagctttcatcctgttttcttgttacagtgatacttcagtgctttggtttcctgctatattcttcccccttattattatttttgactcttttctctgttatttatgcaacaaaaatttattgagccatcaatatatgtcatgtactgtttgaatgacagagatacaatagtgaataag

SEQ ID NO: 37340 - DNA, 1047 bp, Homo sapiens
ggataaaaagaaaaaactaaacaaaagttacctctgagacctgtggttacagagaagatagttaatgtgggggaagggtaaaaccaagtaactattaaaccatatggtataatgtaaacaaattgttccatttcgtaggctggtatcatcagcttcctgagaaacctttactataatggattgtaaaaataactactttaaggacaaatttcttaattgtaaatgctgcaaaatgaaggagcttgtttgggttgatgcaggacccacagcaattaaacaattgctgacgagtatatgtgatccagatgcacaggaggttattcttgcaaccagcctattggaccagatgatcttggtaccacccagatcaataaactggctcatctgatcttgtggcaccccctacccaggaactgactgagcgcaagaagacagctttgactccctatgatttaatctctaaccaatcagcactcctggctcactggcttcctcccacccaccaaattattcatagaaactctgatccctgaatgctcagggagactgatttgagtaataataaaactctggtctcccacacagctggctccatgtgaattactctttctcttgcagttcccctgtcttgatgaattggctctgtctaggcagtgggcagggtgaaccccttgggcggttacagtgctatgggacaaaattaagatttggtggccattgatgttgcctctggccacatctcctctggggagaatgtaaatcaaaaataaaattggaaccctcccccacccccaaccatcttaatggactcccttcttggccagggcactaaaatttaacctgaaagactggtcaggctggccggcgcggtggctcatgcgtgtaatcccagcactttaggagcccgaggcaggtggatcgcctgaggtcaggatttcgagaccagcctggccaacatagtgaaactaaaaaatacaaaaaattgtctttactaaaaaatacaaaaaattagctgggcgtggtggtgggcgcctataatcccagcta

SEQ ID NO: 37341 - DNA, 1050 bp, Homo sapiens
gtggtaataacatctaattttgtgctattacccccacctgatgtaactactatttttaatcttgtgtttattattaccttttaaaatataattttatttgtgtattgctaaaacgtgtcatttacttttggttattttttactttataagaagggcattttctgggacttaccatttttcacctatgttgataggattcagccctaaatttttactcttaggtgcagtacatttttttgatggttgtgtaatactccattgtttgataataccgcaatttatccattcctcttattgatgagcatttggattgtttcacttattaactgtgtttctatgtacattcttgttcatgtctctgttaattatgtctgagggtttttcttgggtatatacccaggaatgaaatcgtttggtcataagtatgtgagtattcatcttgtaagatgcgtatcttagttcaagctgccctaacaacataccatagactgggtggcttataaatgatagaatttatttctcaaagttctggaggctggaagtctgagatttagggtgctagcatggtcacattctggtgagggctctctttgggttgaggactgctgtcttctcattgtatcctcgagtggtgggaagagatctggagagctctctgaggtctcttttacaagggcactaatctcattcatgagggctccaccctcttgatttcattaccttccaaagaccccatctcctaatagcgttacattgaacgttaagatatatgaattggggcattggggttgggaggaagggatgggcacacaaacatttagtcgcttgcaatgccagacttccaaagggattgtacccttttatgttcccagctgcattatgtgggaattcctttcattgacccacatcctctccaatacttgatagacttcttaattttactccattatactgtctttgtttagttttcattttggaaaaaaattgttttgcttgtctttttatttatttatttattttatttatttattttttttgagacggagtctt

SEQ ID NO: 37342 - DNA, 1034 bp, Homo sapiens
ctagtctattgtggaaaatttaaaaattattacagttctgtcaaaaagtttttgtagtttacctagaattaactagaatagattcttaaattctagtttaatagaggggtctgtgtttgtgtgtttaactgcctgctaagttacatagactaatccactccaggttattattattattattattttgcaacttaagaaaaatagtagggacataggtatgtcgaaatctcatggggagtaggtggtatttcagggaaacaaaagagcaaaggtttggtcccagtgcttaaggaatttgtacattgttaagttatgcagtatacatgtatatgaggatttattcctagaacttcaagtatgaatgtacgaatgtatgtttttattctcattttaatggatatgtagtttagttttctttttttttttttttttttggccctagtttttcacttgtacaaatggtgccacaatgtacattgttatatatggcccctagaacacatatgtaatggttagcgtaaggcagaacttctcaaagagtagacccagaatggatttcaggtgtgtggaagtatatctcttctcagctataaggatggccaggtgtggccaagagcagccatgagatacatgggggaagagtcattcagacagaagaaacagcaaattcaaagacttgaaaaagggagtaagattggcgtgtttgaggagcagcaaccaagtgaaagagaggaaaagggggtaggagattcagaaaagtaggagggagagggtacagatcttagaaggacttcatgtaaggacttgggcttcaggtgtcaccatctctatgagagtttcctggctatgtccaatgttagtgcccccttttctgtgttcccagagaactttgtagttttcactatgatagtactaaaaatgcattaagctatttgttctgtttactaggctgatagcttccaaagtatggtctaggaaccccttggggtccctaacacccattcaggggttctgcaaagtagaaattagtttta

SEQ ID NO: 37343 - DNA, 1096 bp, Homo sapiens
aagaatgcaaatgacacgtatacttaagtagacgtaaagtctccccccattagctttagctgtttatatacttatatttaaagcaatggtgcatagaagtatggtggactgtatctgggataggttaagaacatagtcctgtaaattattcctgtaagatttgctagctttgttttcttttatcctcttttgcactgtaccccattgctaagttcagccagatggctaccttcctactttgaaatttagctagttcctttaggaatttgtgtaatgtattcagttctccaaagtggtggtcagaggccatgtcaaaatggattgcaggtggtcagctcttcaccacattctgttaactacttggcaagtagttactcttaggagcaatatagcaggcaaccagatgtctcttcaagctggagagggagaaggctaaggccactcatcatcacagttttcccaacacaaggtattttattctccaggttgaatgtggagatgaaagatctttggccctgtatgtgtatgggtgttttgttttttcattgcatttttttgtttggttggaaattttgaaaatctgtagtaagcaaggttggaaaattttattaataatggcagtctaaaactcttaagacagtaaatgcttagatgtgtgatgtctattccagtattctacttccagtaatacctttataaaagaatataataatgttctattgtgatgctgttgtgtccaaatagaactgatttttttcttaataacttgtcataggtctaactaaagatcactcatttagcagcctcactcagaacctacatcttactgtctttgaatcatctggtatggtgttggcacattatactcagtaaaagtctttgcaatacacagatgaaggaatgaaatcttcctttataaggattttgaacctgatcggataagcagtagagagccactgaatcaattactatattacagcataatagttactatattcttgcaatatagtaattgcagaatagttatttattcttgcagtgagagttaaatagatgggctcccaggctccacttactacacgttattacatatgtg

SEQ ID NO: 37344 - DNA, 2006 bp, Homo sapiens
tatttgtcctagagttcagtttgggtaggctatactagaaagggtggattaatttagtttctgattagacctggtggaacacttcaggtgactcagaagttcctgatagtgggtctgaggaagaaatgtggacaggcaggttgaatgttaggggaatatggaaacaggcaataagtagatgatggtatttggcgtgtaggagatccagccatgcgtgcaagacggccatttcagcatgttggcaaaatggcagagttgacctaatggatagcagcccacattataaagtagaaacaagtttcagggccagtatttttaggccctgggaaaataggccggaggtttacggtgagtgtcttgttcctagagaaactttgttaccttgtacagtaaatggcaaagcatctgatttctgggaagtgagtttcaagagagagaggttagattactaggaataaagaaagagtctagatactaggaatggcttagaaggtgagagttggacagaatgaggctgaattggtgctaagcctctgactctgagggctccttaaatatcttccagcaacaagattttaatagtattgttgttatttttagttgacacatacatatttacagggtaccctgtgatattttgttacatgtatacttttttttttttcctgaggactaattcttgctgtgaaactagagaaatgtatgtaacagaggctagatgggttattatattatttttatttttattttttcagagtcagagtctcgctgtgtcacccaggctggagtggactggtgtgatctcggctcactgcagctgctgcctcctgggttcatccctgcctcagcctcctgagtagctgggattacaggtgtccgccaccatggctggctaatttttgtattttttagtagagacagggttttgcctggctgatcttgaactcctgacctcaggtgatccacctgccgtggcctcccaaagtgctggaattataggcgtgagccactatgcctggccctaggtgggttattatactaagtttctttgagcagcagcctttgttcacatgtgactcactggtagtgggtattagttggcaggtttgggtgtagctggctctttgttttttttcttttttttttaagatttggatctatgtttccagcagattgctagacctattgatatctgtgacagggtcacaactaatctggcagctctagcagagttaccaaataatactcagttttttcccccagcacagaactgttgaacactctgttttttttttggagcgggggaggatatctaggtggcatcaattatcacagtttgcctgagactgaggggtttcccaggatgtggaacacttcactgctaaaactgggaaagtcccaggcaaactggaatgattggtcacctcttctgtaactagctaacatagctctgttttatgtgttctgtgatttatttggaggctatttacagatagtacaactgtgagttgtatgttgtaccttaatttaaaacttaagtgcatggtgtaaatatgaatccttgacagagtagcttttgttctgtatttaaattattaatgatttagaaaataattttcactaaagtaggagaaaatgcagaattgatattttctaaatgtggtatttcagctaagtgacttatctgcaccaaaaaagtttccaagtgggatttgtgttcataaaaaagtttgttttttattagacttgtgataaattcaagaaattcttctgcaagtaaaaaacactcacaatcatttaacataaaaggttatttaactttaaagccagctttcaataaagcctgttaaactagttcactggtgagtgaatgaattgattaaaaatactttcttaaatatatctttttataaccattttggattggtaatggcttaaaatccaatgtgaacaaagaatgttagggcattggaaatagcactgacattggcccatagttttcctct

SEQ ID NO: 37345 - DNA, 1061 bp, Homo sapiens
tattttaatcctatttgaatgtatgctatctcctttaccctccccatcttatgataaaaggtctctcttttttctcttccaggtttgcagctaaaactgtgcacagtgggtcattgatgctagtcacagtggaactgaaggaaggctctacagcccagcttatcataaacactgagaaaactgtgattggctctgttctgctgcgggaactgaagcctgtcctgtctcaggggtaacctgcttacatctggactttagaatctggcacacaacaaaagtgcctggcatccactactgctgcctttcatttataataatagcccttccatctggcagtgggggtagaatacactcttgacattcttgtctcctgctttagaatgctagtgtgtatctatcatgtatgcaatactttccccctttttgctttgctaaccaaagagcatatattttactgtcagttgtctcaactcttgaatccatgtggcgttttctctgtcctgctgcttcttttggcctcctcgttttccttctctttttcgacaatggtagacatgaatgagatatttaaagttcattggaaatcttcttccctacagcagtaagcaaaaattagcaaagagatagtctaaatggcctctcagcttggtatgtgaaaatgagatcacatactttttaaatccaaatacaaaagcatagtctctgcaagattttgttctttgaatttcttgatattgtaattgattattgataactgtcatcatgaaattatctctcaataataagataaataaactagcatatgaatcatatttgtctttgcatttttaatgagaaactattaataatcctgaagttcatatgctaaagttttcttattttaaagcaagtattttgagtgttacattatgcagagaagcaatgtggtttagttagcgaaagaaaaaccacttccaaaccaagtaaattttctacttatagtttactccaaggaaaaaaaattggtgtatttaataacaaaaacaaaaatcttcatattgcaaaataaacatcttctaggt

SEQ ID NO: 37346 - DNA, 1030 bp, Homo sapiens
gagaagagaattgatcgatggcaaaaattagtttaaatattgtttaaattattaaagataaccactaaaataatagaaatgtgatgtattataacttctaaacagctaaaggtaggaagaaagggagtaattaaaacctgatcagagctgcgtgtggtggcttatacctgttatcccagctctttggaaggccaaggtgggaggatccctcgaggccaggagttcaagaccagcctggccagcatagcgagaacttgtctctattcaaaaaaataataataatttaaaataaatgtttaaaacttggtcagtttaaccaagaggaagaggaaaaagcatggcaaatataaaacaaaaaaaggtggctggagaggccatgcacaccacacatactagttttcacaattcacgtcagagattaaatcctacttttactaaacaggtaaaaaacaaaatttaacatatgctatttatgagaaacctccctaagagagaatggcacagaaaagttgagattagatagatgaagtgtgtgtgtgtgagcgtgtgtgtgtgtgtgtatgcatttatcagatagatgtgctaaaactagaaaaattaagaagtattttaggtaaaaagtaataataaaatattttgtgttcattgtaatcctccaagaaaatacaattgttacaaaccattaaaccatgcacttttgtaatttataaagcagaaaacaatacaaatactaggagaaattgtcaaagccataatcatagtatattttaacatgcacatcagaaatggacaaatcagagagtaaggttaaataggtatagatacatacaggtttaatgatttaattaacaagcttgatctaagatatatatgtttacatagaattccttgtttcctgtgtacagaaaatactcattttttaaaagaacatataggatgtacaaaaaaaaggaaaactatgggataatatgattaaagaaaaaagacaacgaagaaagattagagaggagaaagatgacaaagcacagag

SEQ ID NO: 37347 - DNA, 1035 bp, Homo sapiens
taaacttaggaaacaaggttaaaaaagtaatcaaacattttctttttctttgtgttttttttttttttttttttgagacagagccttgcttcatcacccagacttgaggacagtggcactatctcaggtcactgcaacctccacttcctgggttcaagtagtcctcccacctcagcctcccaagtatctggaattacaggtgcatgccaccacgcccagctaatttttccatttttagtagagatggggtttcaccatgttggccaggctggcctcagactcctgacctcaagtgatccacccatcttggcctcccaaagtgctgggattacaggcatgagccaccacacctggctatgttttcatttactacctttctgtagttaaacaagtatatattattaccacgaagtgtcatttatgatcctgtttattgtgaaagagtgcatagacctctgggaattatcacagataacctttggaggttgtaagggagggcctttttagacggtgaattcattagagaatgctttttaccttgaacttggttgaatgtggaaagaatgagtggagagaattatactgtttttctttctttattcatcccttaacatattttttgataattataataaagctgtagaattttgagacaaagttgaaaacacaaaataaatgtttggaccatgcatcctaggattagactgagagaaggaatcagtgagtctgccaaggcttgatggctcttaaatgactaaaggcatacttctaaccaccttgtatgatatctacagtactgattcctggccgctgtgaaccagacctttgttctgttctgctctagtcccactcctctacccttgcctttctccaactttcaaatagtcttcccttttacattacagtttcagctttctttccccgatattatatgtaggccaactttttatgaatttccacagagataaagctggctacatcaacatttatttaatgatttgataacaaatatgtttgtggaacaatgtagaataa

SEQ ID NO: 37348 - DNA, 1078 bp, Homo sapiens
ataataattaaagaaggagactttcaccagcaacacactgtcacatgcagtgtcacactgactcctcaaaagaatcctatcaattagatacaaatacaagcacagagaagttaaatgattttcttctcatcaaatagcttgaaggtcttctaacttaaaatccagtgttttccttcgtaccactgccagctgtaattctgcctcatgagaaggaaactaaccattcttacttctgaggaaaaatgtttaatatgttaaaaatacgtatagcctgagaagacctggccagtgccacagtgcaggagtgaggctcaatcccaggacttgacccggaacagccatgcagccaggtgcctttgccatgaagaaaaccaggccttatgtagtaaatcacgttctctccatccccacctccttactgaaaattttaaaatatttacacacagatcaaggggaataatgtttatataagtaagtgtgtgtgtgtgtgtgtgtgtgtgtgtgtgtgtgtgtgtgtctgtaggtctgtctgtctgtcttatggtctcagggaacccatttccccatcctttccctgcatcaggaaattttcagcaacttgtggtacctggaactggcatctaggatgtatgaggatccttttcccttctgtcagattcaaagaaagcatctgtagtttaaaatcactatacccataataaaattccctttccaatttgtacatctcctaagacatacttctttccttatcgccaggacctcttctaggtgacatccgcatccttcatcaaggggaatccatgtccctaagtcacaattcacttaaatgcaaggcaacacagccagcttttagaggccacagtcccatctctgaaatatgtagaacagcttacggtttccctcatacaattttgtaaggttcatggcctagcttttctctgggaatctccatttggatcttgaagtcctgttgtaaatctgttcagcatggccccattcataatggctgataattctgtcttgacgaaatcattgttactaccaagattgtttgtgtgaagctcacctgttcctttta

SEQ ID NO: 37349 - DNA, 1054 bp, Homo sapiens
atggggtttctccatgttggtcaggctggtctcgaactcctaacctcaggtgatccacctgtctcagcctcccaaagtggtgggattacaggcatgagccaccgtgcccggtgaagaactatctttaaaaaaattttttttttccattttataaagttaaggtatattcaggccccaggctaagagacaagtccagctaagatcaaattcctttgagtttggaagagggagaaattgtaagtcaaaattaaaaataattttgtcattttaaatttaggaaaaatcctttatttgttctgatgaaaatgtcagtagtcatggaactgtggtaaaaataatgaaaaatcactggcctgggtctgcttcaattgaaaacatttttaaattaaagtgtgacagtattttgtgcttccattgcctagccatgccccatcttattcttttattcaattctctgggtatgaggttgctttaattcttaaattaaaccttaaggtatgtcatcctgctgcttgatctttctatttctatgctacttctgaggtactcataacagaccattttcatctctccttttcctagattactaaaaggagctactttttaaaaagagattgttattaatttttagttggaatttttttattgcaaaatatttttaattggcttaagcaaatatgtgccagtttgtcctaactggcggatagtactcataatgttagttgttagtattttagtaaaattccccacagtgacaaatccgctgaatcagatgctaattatagttattaatgaactagcaattatttgtggcaaaaaacccaggtcacccaaaaaaacaaaggaaacatgcacacagatctgcaagaaattgaaggattaaagaggttgtgataaagaaagccttaggcctttcgacttcccttcctcctcctttgtggtaagtagttctgctggctgtgagttcacttgtttcagagctgagagttcactgaacatctatccacttttccctaagattatgatttttagcttttaattattattattaaat

SEQ ID NO: 37350 - DNA, 1101 bp, Homo sapiens
tcctgtgaggctagaaattagctttgacttcttgttgatttcaaagcacagtatggctttgacagactttacatactgcttatcctattttatagtttcaaatttcaaacctctttacaatggtttcctcttagaatgcatatttgatgcttgtcatgtcagatcttttttgctatttgccttttttttaatcagcatgaaaatgaacatgcataatacattaacaaatcttttcaggtgtattgtaacatatttttgtttgtattatttggaggttaataagtatttccaggatcttttatttattatttgaagtgaaatacattaaatagaaatcagtttttttgaccctgtgactttgtattgcattttgaaaatgttgatgtgttgaggtgtataattgaataccatagaaacaaaatggagatttgaggatgatgaattgataactaggtattttttgtggtgagattctaagatcagttactgttgtccttataaaagtctaatacagtcactcagctgttaaaagcctaatcctctatttaaaaaaatatacaaaaacaaattgtctatctttctgcctgatctcttctcaagtactaacacaatggaaacagtgggtgatctgtcaatgtgtttggtttgtcgatgatggttttgtataaatattgggagggtaagaaataaaatcgcacagtaaaatatgatttcatctgccttttctctgcagctccatggctcatgctgcggtgtgaaattctcattttacacactttgcaggcggagcacatgaattatgcattgagcaagaaaaatctcctgcctcaagtcctatatgcatttacccaggttctgtctctattaccaagatgaattgcaaatggagaaatgtttgatggaatagagctcttaacttcttcgtttagaattcagaattttatttttatagtagatcctttaagtatgaaaatgttttgaacttactatggattttttaaaatgaaaaatgaaatataagaggaataccaaacacatcatgaagcattttatagcgttgattcagaatgcaagggttttccaattcagtagaaatgacca

SEQ ID NO: 37351 - DNA, 1031 bp, Homo sapiens
cttttggttgcttcactttttacacgcctctgacacccaagtgtgaatgttgaccccaaattagtacttagtacacattagtcttttgagatattaattgatgtgaatgaatttttctttaatcttcttttttccctctaaatttttcctgttgtgagacctcattcactcctatagcttcagctaaaacatttatattaattacttccatggtaacatctttcagtctttacattaagtttcagcttttcttcccaaattcataccaaatttttagacctctctgaggctactggttttccaaacctaatacaatcaaaagacatgctctaccatttgtcaccagcattcttttcattctcccagatctgaagccccagaattatctctgactactctgtcattctgtatgtttagatagttaccaactcctatatgttctgtgcgttatttctcatgtctgtttcttctttccctactgccactattctagattagctcttcattacctgcatagaccattgccattggtcatcctctgaccaatgctttcccaaccccaagtccttctatacaactgccagatggatattaaattcacctgtcctgatggcccactgccatttgagttcagtaaactcaggctagcttgcccaaacctaccttgtcttaaccctacccaccttgtgttctttctttctttctttctttcttttttttgagacagagtcttgctctgtcacccaagctggaatgcagtggcatgatcccagctctctgcagcttcgacctccaagtctcaggtgatcctcccacctcagcctcctgggtagctgggactataggcatgcactaccatgcttggctaattttttgtatttttaatagagaggggtttctccatgttgcccaggctggtctcgacctcctgggctcaagcgatccacccacctcagcctcccaaagtgctgggattacaggcatgggcaaccgtgcccagccacacacactaaattctaatcccagtggaa

SEQ ID NO: 37352 - DNA, 1032 bp, Homo sapiens
aacagtgggaggcctttaccatgcctcagattgaagggaaggggtgtgaggagcaggagcagttaccagaccctgcaggagtgagccacttgcagtaccttcagtaggggattgcatgtaataccagggagaggaggctggcagagtagggatccaggataacaaatatccccgccctccccccaccatctcctgctgaagctttctattgactaaacacagctataagccaggaccaagggagtctggttgaggcagactacaggtgggcctcttagggcacagtgctggggagagaaaggtagagtggactttatagaacaaatagagaaaatccatctcactctcacaatcccattctttccggctttgcactccatgctatttctacagtgacttctttactactaccactcatctttactactcacttttctgggcatttcacttaaggaaaaattttttttttagtttgctgttttctgcagaatagggaaaatgttgtttagattgtagataattgatttccactatataatttataggaatcaaagagcaatatttgaggactctggttaaaagccaaagacatagaacactatggtgagcagcataatccaacgtcttttgctttcttaatctaaagatgcagagataagaaaggaactacagaagctaggagacagcaacagaggttagaaattaaagttaactctcctagttaagacagttgttcacacctcaaatttggaagcgcactcatggttatgctttcacatagtcttttaaggcttgtattaaatagaatgtttttctaatttaagtttacattttacgaagcatattgcatttgaattgaattatacatatttagtatgaataatttctatctttttcagaaatagttgttgctgaaagtgtggttgttataaagaaattactgcaaatgcaacctgcacaacatggtgaaattattaaacatatggccaaactcctggacagtatcactgtgagtatcaattaagagatgtt

SEQ ID NO: 37353 - DNA, 1060 bp, Homo sapiens
ataccctttatgatggaaaggtcatctctgaagccttagttgtagagcacagcaatagaaaactttacatcagtattatgacttttatattccactatctgttttcttaacaaaaatataccacatactatgcactaatcacagagtttttcttttatcagcttccaacttttagagatgtattttttgccatagttctcctatatgccaatattaaatttcttcttggttataagacactgtatacacgatttctttttagctatgtgatttttaaactttttacaggaatagtagaataatatggcatgtccataatttatattttcatacctggattactccacttttatgttgtgtatctttctagacaaatttcttaaaaaattaagatgttctagaaaatatactattttatgttattattcagtaatcttatagctgcagatcattgcttgaatctgattttcacttcattcctataattttatttatttaaagtattggtctttgtgttttttcttgttcctttcctgttgtcctatctagtctctttgggtgtcctctcactgtccagtttttgcttatatcaagtctcctgggattgtaggaaaggagacttaggtaatgttatggaatgggttgtatagagggcacatactagacctgtttcaaaatattggtcatctagtcttttcatttaatatcaggatgtttaataaggtccatttttcagtcaaacttttaagtatttttttcatgtattcatttttatcactgtctaaatttgtaccttctgtctatgtttgtgttatgctcatagttacgcttttagtaactttttgggtaaaatagggaatgtttctaaagactcataagttcatatttttctttaaggaaattaaataatttatttgggaacacttttaaatataattggtcttgccttcatggaactaggagagtttaattaatttaatttatttgttcaatgtttaatcacctggttggtaccatttttagcaaatttgtatttttttagacatctttaggttttctc

SEQ ID NO: 37354 - DNA, 1055 bp, Homo sapiens
aaactcaatgtgcaaaaatcagaagcattcctatagaccaagaacagacaaacagaaagccaaattaatgagtgaactcccattcacaattgctatgaagagaataaaatacctaggaatccaacttacaagggatgtaaaggacctcttcaaggagaactacaaaccactgctcagtgaaataaaaaaaggacacaaacaagtggaagaacatttcacgctcatggataggaagaattagtatagtggtaatggccatactgcccaaggtaatttatatattcaatgccctccccatcaagctaccaatgacttccttcacagaattggaaaaaactactttaaagttcatatggaaccaaaaaaaagctcacattgccaagacaatcctaagcaaaaagaacaaagctggaggcatcacgctgcctgacttcaaactatactacgaggctacagtaaccaaaacagcatggtactggtaccaaaacagatatatagaccaatggaacagaacagaagtctcagaaataacaccacatatctacaactatctgatctttgacaaacctgataaaagcaagcaatagggaaaggattccctatttaataaatggtgctgggaaaactggctagccatatataaaaagctgaaactggatcccttccttacactttatacaaaaaattaattcaagatggattaaagacttaaatgttagagctaaaaccataaaaaccctagaagaaaatctagagaataccattgaggacataggcatgggcaaggacttcatgactaaaacaccaaaagcaatggtaacaaaagccaaaatagacaaatgggatctaattaaactaaagagcttctgcatggcaaaagaaacttccttcagagtgaacaggccacctacagaatgggagaaaaattttgcaatctacccatctgacaaagggctaatatccagaaaaaacaagaaaagagcaaccccatcagaaaatgggcaaagtatatgaacagacacttctcaaaagaagacatctgtgcagtcaacaga

SEQ ID NO: 37355 - DNA, 1055 bp, Homo sapiens
agctgggattacaggtgcctgccaccacacctgcctaatttttgtgtttctggtagagacggggtttcaccatgttggccaggttggtttcgaactcctgacttcatgtgatccacccgcctcagcctcccaaagtgctgggattacacatgtgagccaccgtgcctggcctaatttttgtattttttataaacacaggatttcgccatgttggctaggctgatcttgaactctggggctcatgtgatcctcctgccttgacctcccaaagtgctgggattacaggcgtgagccactatgctaggccacatttttgtctttttgattgcatttatattatttcaagttgtttcattgtcagtaatttgattttcaatggtctaatcttttttttcagtttttatttttaattccgtaaatgtagtaacaccattgctttgatctgttgtttacttactcagtttgaatttcatatttcctttattctatagtttatcatcttatctttgaacttctgtttgattgatttcgtgttcttagtaacgtgttgagtgatatgcttttgacacttacatatagtccgttatatatgtgaggagtgtggtcagggagaaagatccttcttcctccttgccctactggctgttggaggtaatcaacagtctctaccacattctccataataacctaaaaaatttttgaagacactatgatttggaaagaataattgtttcatctgttaagatatatactattcatgtatatatatgtggtataaatattagattaaaatgaagtgttctgacaaaatttttttatctcaggagtacacctcctgttccctctagattttgaaatggtctattttagtttgatcacaatgtagtatattttaattcattaaaatagatgtctggtaggtgaggaaggcctgatacattgtaggttggaagctcttaattaatttataagtgaaataatggaccttttctcattctcatttattaggaaatacttcaggctgtgtcatctaagttgctgattcattccaattt

SEQ ID NO: 37356 - DNA, 1036 bp, Homo sapiens
tcactacaacctccacctcccttgtttaagcaattctcctgcctcagcctcccgagtagctgggattacaggcatgcaccaccacacccggctaatttttgtatttttagtagagatagggtttcactttgtttgccaggctggtctcgaactcctgacctcaaatgatccaggccacctctgcctcccaaagtgctgggattacaggcatgagccaccatgcttggccaacctgagatgactttggtggtggctgatcacacttttgggaacactgatatgaggacatgcagacatatggtccatgggtgagggtcttaatctgtttgtgttgctataaaggaatacgggaggctggataatgtatgaagaaaagaggattatttgactcatggttctgcaggctgtcagcttcagatgagggccttatgctgcttccactcatgcagaaggcaaaggggagacttcgtgcagagatcacatggctacagtgcaagatggggcatcaggggagagaaagggagaagctgactctcggttcttttgaacaacctgttctcaaggatgagaactcactctcaggagaatagcaccaagccatttgtgaggaattcatccatatggcccaaacacctcccaccaggccccaactccagcactgggactcatatttcaacatgacactttgcaggtccaaagccatacccaaaccatagcagggagcttattaattcattagcctccatgaaatttagaattatagaatgtgcgagctgagaaggaacctcagcctctctcatgattgaagaaactggagtttggacaggttaagtaatttgtctcagacaccaaggaagtgaatggggaaacagggaacagaactcaggtctcttgactaatgttttagacattaaataaataggttattaaatgaatagaattattctatatgaataatttcatatagaaggaagaaatgctatgtgcaaggtagagagaaattatacaagaagcctcatttggtgcaggagttcat

SEQ ID NO: 37357 - DNA, 1043 bp, Homo sapiens
ttcacttgagataaatgtaccaccccgggtctcagtgttctccttctgaaaaatagggagattggaaaatgtgaccttcctttggactttttaggcttagagtttgattctgtgaagctccttgtccccttttgactcacttctgaagatgactctccccttcagcttggcatctcaccacccagaaatattaaaggtgggtttcaagattgattcatcattttcttgtcagagaaatatccctgctttattctccttggacacacggtgcctcaggggcatgtgtgtgtgtgtgtgtgtgtgtgtgtgtgtgtgtatgcatgtgtatatcttaaaacttttgcagggaagtattactgaaggcttttgaagagtcaaacatgtagctcaagggaagccagcacacactaattattaatcctgttgaagagccctggttgaccagagagtaggatttctgtttagttttccctcgctctgttgtatttgcacatccttgatgatttcatgcctttattatgggctttattgatttgctggtatgtagatgagactcctggtttgtcatgtaggagtgcttcttatcctgaggaacttgatggtgatctaactaccttcgagcaaaccagtggccatttactggaaggggtgggacatcttgggccataacactaaacctatctttggcagtcattcagaagcaaagcataggtatccttcaagactgtttacatgcagtttataataaggcgttagttgagtgaattccatgtctgagtgtggattagtccaacatattttggtactctggtgtgcatcacattaatggcaaggtgttcattattgcacaaagattagtatggctctcaggtattatttgaacactccagtgagttttctttttctttttcttttcttttttttttttaagacagattctcattctgttgcccagcttggaatgcaatggcaggaacttggctcactgcaacctccacctcccagtttcaagcgattctcctgcctcagcctcccaagtacct

SEQ ID NO: 37358 - DNA, 1028 bp, Homo sapiens
atagctgaatttgtctttcctttcgagcttctctgtggaccatttcatcatttttatcatttctctcagagaaagtagagatagccgattaaaaatacccaattttattactcagtgatagctcatatggaaggcttgtgggaataaaagttaaaaacagttgactaataggtgatttatgattaattctacaggttctaatttataaaggtcactttttgaaaatattagtgacgataatagaggttgagtaatcttgtacagtacacatttaagaaaatcaaggcagtacatagtcaaataattgtcccaaaagactttgatccagccctgcttctcccaagggagaagcctattcagccaggtcctctcaggtcttattataaactggaggttcggctcagcccaaagaagccagctcaaggtatggatttgggactgactgacaccctttccaggagggtctgccatgttgaagggatttgcacacagcattttcacagataccgtctcatttgtagaaaagtcttttagcttgcagattctagggaaggaaaaattgctcttatgttatgaaatgaactggtgactcctcaaatgttaagttgttctaacaacttctactgcttaggttaggaagcttgaggtttttgttgttgttgttaaacaggaattgtaaatacttgtgtgttacgaaattatttgagcagaattccttctcataggaatgccagggctgacctgagacagatggtgtcctgagcaggctaatcattggcaccttatcaaactgataatctttttttttttttttttgaagtggagtctggctctatcacccaggctggagtgcagtggtgtgatctcagctcactgtaacctccacctcctgggttcaagcgattctcctggctcagcctcctgagtagagtaactgggactacagacatgcacaactacacctggctaatttttgtatttttagtagagacggggtttcaccatgttggccaggctggtcttgaact

SEQ ID NO: 37359 - DNA, 1034 bp, Homo sapiens
cattaggaaatcactgtctccccagctcatttggtgccagccttaagggcactttaaatgcaggattaagtgctgctgtaaaagggagtccagctctttgaagactgcgcctggcaccaggcctctgggttgtcgctgtttactggagctggtttcatagaagtgattctggggattggggcaaggaaaggcagcctttatgtagaggaagtgtgccatgggtaggtagttgactgcttattagtttactctttcagccaaattatttttgttgctgttaaaaattagttttaataattgcttttggatcaagctgttgaataactgagccaagttttcatgcccaatgaacttttatagcaaactctcctctctttatggggttattttgaggatgatatttgtaaagcactttaagtgcctagggaaggctgtggataaatagtagtcatattttcagagttctggaggaatgactatacaatggcattccagttctgaaagatgcaaatcctactctgctactactgatttgttttaatggctattttcctatttttaatttttaaagggaaatttatgcaaagatcaggatgatttttatattttcattaaaattttcaactagattaaaaaaccctctttaatcggatgggagaagtcttcacaaagtcagtttgaatagtaagtaggagatagtaggaaaaatgctccattgtcagccaacagctaaccaaattaatgtgtaatggaatgtcataatccttttctataaagtaatattttgtttctctcttcctattctcttttgtcttttgggagaagaaacaaataaataaaaatagttgtttcgttgtttcggagagaaatacactgtctagaaaggactgtcttaaaatgcactgtggctttttaactcatgaagctcctaccatgtgtgcatgcgttctcagaactcgtctgtatcacatgtgggaaaatggaattagaaagacttctccctttgtggcctccgtatattctgagttttaacg

SEQ ID NO: 37360 - DNA, 1049 bp, Homo sapiens
tgtttgaacttctcatgggggctgttttttggcactgatatagttatctatgagcttgtcctgttgtgtggtgctagcgtagtgctttggagcaaatggtaaatgtttacttgaacccaaaatatactgtgtgcaaagccatgcaaattagaaacaaattaagaatacatatgtgttaataaaaaatggcttatttggaaaatctagtttcattcattcatttacatgtggggaaaacttgattattctcttcaggattcttgaaagtataaacaaaagtgaggtgggagtgcccaccttccccagctatgagccttaagcatttatggagggtattttagaatgcacactctttagtgcagaagagtttcagcattgcctgtggatgaaggcacaccttttgcttatttgtatacttattgcatgtgacatagtttcaatgcaatagttctctctctctttctttctctttttaaagcaatctatgggggtctataaccatagtggcagaaagaaagttaatggagactaaacaatagtgttcatgtttacaaaattaaatgctgaaacatgatggaattctgtattaatggggtttcaacttgctataaaatgaaaataatgtgatggagttctgtattcgtaagattccaatccgctataaaaattaatgttaataagcaagaagattggttcatattcgtggttttcttcctgcaaagtcaaatagtatacatgcatttgttaatgactccctgaataaggtctaaatcacttaagtacagttttatatggagtggaagtataagaatcaaagtttgtggttattttgtaagaatttgcttccatttttacaatgcaagtcagagaaatcttgatgtgttccatcttttcttccatttgtatcttctctattttcctctagatgatttcctcccctattacacatgctgttttcccacagcctagataagatccccaatcatcaccccagtttcatcccccttctttacaaggcctgaccccgttaagggtctccaagttcttcc

SEQ ID NO: 37361 - DNA, 1083 bp, Homo sapiens
caggctggagtgcagtggcgcgatctcggctcactgcaagctctgcctcccgggttcacaccattctcctgcctcagcctcccaagtagctgggactacaggcgcccaccaccacacccggctaattttttgtattttttagtagagacggggtttcaccgtgttagccaggatggtctcgatctcctgacctcgtggtccgcccgcctgggcctcccaaagtgctggaattacaggcgtaagccactgtgcctggccggttttgttttttaaagtcagtttggttgtgagagagaagctaaatccaagacttggaaaatgatccattttctgtacctgcttagcaggtgagcttggccagcggcagaaaccatcccttttccctgggggaagagggggcggtgggagtgttgggggcgtctttcccagaggacttgaagagaagggcttgactctcctgagattgcatgccacctaggtaatgtgcattagtgcatgctttctctgtcgtatctgaaaagagtcattacatttgcagagttctcagcctctggctggcaaaaagaaactgaacttgggcattctgctgccaaagccaaagcttgtgtaagtggtggagtatgttttgagaacagagtggggatgggttgggagattctcttgtctctgctgtcggagtaaaccagaaccgacagaggacttacacagaagcactcccgagggaccagaactctgggaatgtctgtgaagaactgacccactccacggctcacagccatttcccgactcttcttcccctggtgtccctagattgggcttagtgccccacattctaagattcataagatgttcctccatgttcttgaaatgaaacacacaaaaaatgattccattcttatcacaaataaaatgtctttgtcctcaagggggcatggtactcaggaaagatgggaacacagcctgtgaaaggcagaaattgataagaactgtctgttctgcctccctgaccttcctttgctgttagcttgctctgcggccttgggcaaatcattttgcctctttggattggaaagggtgagggga

SEQ ID NO: 37362 - DNA, 1003 bp, Homo sapiens
gtgaagcctcttgaaagagaggtcactacctatctctggccatatgtcccaatcctgccattgtatagggcagtggtttttactgagagtattttagaaattcacttgagtgttactgatagttagtgagtagggggctcaggatgcaatgcccgtaataaccccacacagtgaggaattgtcccaagtcctgtacaacttacaaaatatcctgctggttagtcatgaagattaaaagcttgtttacaattttctgagactagaacctaagtctagtctctatgttttacacataaacacaaagtattttttgcgtggttttaatatataattaatattctaatctttattttagcatttatccctgctctctctttttttttgtatttctactatagaatggccttaagtccaaatttatttcgtctataactgtatgcactcatctaaccactttgctatgtcttttagggttgaacctgcgcattttcctatgaaatacatgctattttattattaattgcctttttctactctgtattacactgagagttattttttttaattagacatatagttacagtattgtatataaattccatttcaggacaaaggagcatcacaaaatatttgttatgaaaagggtggggatgttagatttgaaaagcctgagaggcatgttatagaaacaaactttcttctgatttcagtacttttcctatcattatagttgctattacataaaaatgtaaagtcttggaatgagtccatattactgcttcaaaataaccaaaacaataaaaatggatttaacttctatttcgcctacaaaatagcctaacacaattattatatccatcaagtctaggacatccagccatagtgctcacacatatgcatagtaatcacaaatttcagtgcacaaacttagatctgcaaagaatataacttacttcttttttaccctgtcactgaacgcagtacctctggggtccctattctg

SEQ ID NO: 37363 - DNA, 1027 bp, Homo sapiens
ttcaaggtgagctgttgaaagaactggtaccatttctcagtgtgaatcagggctttctcaatgctctgtcactgaaacaaaatacagaaatagggtctacataagataacttctgtcttctgtaaacctagtctcaaatgtttgtttatgaaaataattttattttgaatgacttaactgcttaagtgtgacatcccatgccttctgttaatatatggggctttgatgttgtcgtttttaagggttggggaggtgtagctaagaagaagttaaccaacaccactttctttctgtagcttatttgcctctcttcaaagtcaagttttagaggcttatgtgtattgtgtgtttctttttacatgtattattttgatactgattatatcacgaggaccacgtaactttgtgtttgcattgctatagaaagtttagagagttaatatttctgttatcttaaatggtcctctttttttcatatttactcataaacttaactgcttacaaattatctctgatagaagtgctctcaaattatactctttgtatttggttttagactactgtatgatatttgatttttatttctagtttaagttacaattaaaattagtctgaatttgagtagaatatgacttacactacttggtcaacaaattgagcatgttcgacggtccaggaagaaaaaaggagcgatcagtactcaacattggctccaaataacccacagaatttgcaaatcacttgcaaattgtctaataaagtttaacttttaaacaacttttgtttatatttttctacttagtgattaatcttggtctcctgtagcagagcctttattttacaattacaatctgtgcattaaaatctcagcgttatacataatagtataaggcatagaactacctagactatggtgcatggccaactactccatctcacaacagttttcatacaatttcatgacctcagtgttatcgttatccccattttatagatggggagtctgaggttcagcaagataaagtga

SEQ ID NO: 37364 - DNA, 1121 bp, Homo sapiens
ttctctaatatgtacagttattatgtatcttcactacagtttctagcaattgagtgatactctctacatatacatttatttgatattgaggcaaagcaaagaataacatattcagaggatcctaaaatcacattttagagagttactttcttgtctaaatctttctctagagttgccagtaaacagaaaaagttaatttctttttctttctctgcctgctttcacctgtgattgctaataattatgcattaggagaaataggtggacagcaataaaaatgagatctaagtgatccataaataggtcttcaagcctgtcttggtatttgaagtacctagagtgttgcctggcacaaagtaatgagtcagtagattttcgttgagtggttagatagattgataaccaagccagtcattaaaatcgtattgctctctgggatggccaagtctaaaatctccttaaattgtgctaaattaagattctgcagctcatcctgacagtcaaactgcattgattaccgcaatattggtaataacagagagttgtattgttttctaagtgatgaattgacatatatacatgttacacttttgtttctgaaggaagtagaaattcggaacaaagacctggagggacaactgtctgacttagagcaacgtctggagaaaagtcagaatgaacaagaagcttttcgcaataacctgaagacactcttagaaattctggatggaaagatatttgaactaacagaattacgagataacttggccaagctactagaatgcagctaaggaaagtgaaatttcagtgccaattaattaaaagatacactgtctctcttcataggactgtttaggctctgcatcaagattgcacaaaaaaaaaaaaaaaaaaattgaatatcactcctccaggaggaggatcttttgaaattggaattgtatatttcactgtaaattttagaatccagcttgtagctagttggggaaaaaagatgaaaaacttgaactacaaattacctccatgtatattattggccatagttaactagaaagttataaatagacacttaatgcaatcttttttcctgatattagccaatgggagaattaacaatgtct

SEQ ID NO: 37365 - DNA, 1107 bp, Homo sapiens
cttttgcagagacaatcagaagaaagattgtatgtcctttaatagtttttctttggtcttaaattttcctttcttgcttatttttccctttaccccgcaagattcctttctcttccttttatcttctgctttttggaactgtcttcagcctttctaagactacctcctcaagtttcgtttatactgttaagttcctttcttatagtctgctctggttttctagaacttttttttcagtattctggcattcacactggtagtggttttctccttcttggggttaccgtagtttagtctgagcccttttgttctctactcttctgggcattgcccccacaactctgccttcccttttgcaaagggttagagtgagagcttgagaaatacctctgctggaaattggtgcttatattttctaattaaaggcaatttgatgtttgtattgttctgtatcttctagttatgtcgaagtcatggaatttgcatgcctttgtatagtttgtatagtttatatagtttggggaggatagaggactgtgattgcagtgtacacagtcactattaccttggctgcccagaaatctattctgtttacctctttatagccagagtcttccttatagaatgtatgttctattaaaacaagaaccatctttgttttatttactactttatccccaatgcctagtacatagaaaatgtaattgttgaataactgcttcaaaatgtgtgtatgttttacccatttttctattaaattattctacttgtcttgattatttatagttcctattatatagaaggtaacagtcttatagggcaataatacatcttattcataagagcttaagaagtatatcagatgtcaatttttctacagcttttatttagattaaatgatgcaagatttaaatttatagaaaattaaagctgggtttagtactgtaatcccagtactttgggaggctgaagcagaaggattgcttgagactaggagtttgcaactagcctgggcaacatagtaggaccctatctccacaaaaatattttaaaaattagctgggcatggtgatgtgcacctatagtcctagctactcaggagctgag

SEQ ID NO: 37366 - DNA, 1052 bp, Homo sapiens
tgcctcagcctcctgagtagctgggattacaggcgcccaccaccacatccagctaatttttgtatttttagtagagacgggttttgccatgttggccattctgttctcaaactcctggcctcaagtgattcactcatgttggcctcccaaagtgctgggattaaggcatgagccacccccttggcctcttcaatttttaaatagtgttgttcaaagagaagtttttaagtttatgaagttcctgtgatcagtttttttaatggaccatgtttttggtattgtataatatctaagaaatttttgcctagcccaaggtcacaaagaattttttcaagttttatagttttatatcttatagaagttttatatttttaatttgcgtatagactatgagatatgggttgagatttatttatgtttgtatgtggttatccaattgttttagcaccatttgtttaaaagactgttatttctccttcgtattatcatacctttggaccttttataattatcttcattttaataattttcatctctgtgtagatctacatttctctctggggtcatactctcacttaaagaactttctttaatatttcttgtaggacacatcttctagtaataaattatctgagctcttgtttacctgaaaaactctttatttcaccttcattttgaaagatatttttcctatgtgtagaattctaggatgaggattgttttctttcaacactgtcactccactgtcttctggattgcatcatctgtgatgaagtattactatgcagtagtccctccttaaccacaggggatatattgcatactcccagtggatgcctgaaaccatggatagtagtgaaccctatatgtagggtttatgtttatgtttttttctgtagatacatacctgtgataaagtttaatttctacagtaggcacagtaagagattaacaacatgaactaataataaaataggacaattataggaatatactgtaataaaagttatgtgaatgtggtctctccctctctcaaaatattttatcatact

SEQ ID NO: 37367 - DNA, 1045 bp, Homo sapiens
atacatgtgatacaggatatgtttgcacttgtatttctcttgggcttcttgaatttgtgtttctgtcttttgctgactttgccaataatctagtttcctgtgattatttccttaagtagtcttcctgaactgtactctttctcttatttttctcaaagtcagattgcataaatgttagactttctagtatttcccacaggttcctggggctctatcaaatttttctcccatttttctctctgatgttcaaactggaaaatttgtattgattaagctttaagttcactgaccctttcctttctcactaccattctgctattgggtccattcagtgtatttttaaatttcagttattatattctttagttctgaattttccatttgattcctccttatatcttctatttaatggctgaaactttctccctttccagtccctcctattgtatttgcccttagttgttatagcattttcataactgctttaatgtctttgtgagataattccaacatctgtgtcatctcgtcactgacgtttattgaactatcattgtctatacaacttcagattttcctcattctttgtgtcaactaattttgaattgtattccagatattttgtctattatgttatgagacactgggtcttgtttatatcctatggagaatgttgatattgttgttttaggggaccatagttagttaggttcaacagttgcaagtttccgtgagccttctgtgagctgcagttccaataccagttcagttttcaagtcttcttgcagggctatttgcatctgtcccatgtgtgcactacacattaaccagtctgagacttgggtaatggaatatgccactgttcagttctcaaagtgtgtagactgttaagagcagatcctcaaatgcacagctcaggaataagcttataaacacagataactttaagaggttgctttcctgagcttatctcactctgcaatgttccaagtattttttagtagactggacacaaatagttttaagtcaatattggttgcttctgcgt

SEQ ID NO: 37368 - DNA, 1091 bp, Homo sapiens
ggccaacatggagaaacaccgtgtctactaaaaaatacaaaaaaattagctgggcatggtggcgggtgcctgtaatcccagctactcgggaggctgaggcaggagaatcacttgaacccggagatggaggttgcagtgagccaagattgcgccattgcactccagcctgggcgacaagagcaaggccccttctcaaaaaaaaaaaaagaaaaataacagggtttagtgtgtgtgtgtgtgctcatagtattcttgattatgtaactggtagtttatatttacaaagcaaaagtattagagaatcttagattaaggtaatttacatgattataggccatagtaaactttccttatatgttatattatttctttgctcttttgtctattgatttagtagtatagctaagaatccagtctgcatgtttaccaagtagctggctaaagctttcagttccactgagagttaagcttatgtttctgaaaccagcataacataactaaacatttggaacacttgttctacaagttttcggatttgaatgtaagggtatctcaaccttacagcatctgggggcactttgtaacaaaagtcatttcttggaagtagaaagttgaaacttgtaacatagcttcaaaggtattctgcaaaatattgccctaatagttcaaaaatagtttctaaattttatttgaaaataaagagctcaaaagtagttctattgtaaaccagtgactgaaacatatcaagagtctgggagtacctggaaagcacagttatctttgtggagtattttgtaggcatgttgtatacatatataatcatatgaattagaaatcatttaactagcaagttatgcatctaaaatcaccatgagcacacacatgtaagcagttagtgtccagactgagcatgagcaactctttggcataggtccattttaatactacttagttcaaaatcatgtatggagcatgtctttgtgccaggtgaaaggtgaataagattgccttcgaggagcttcatgagacagcagaatatataaccagtatggatgatgtggaggtagtgatccatggggtgctctggaaac

SEQ ID NO: 37369 - DNA, 1006 bp, Homo sapiens
aatagatacatttacattttcatgtcttgattttttttaagaactgaccttcattctctaaagattttgaggaaagtgttaaaatttgctaaaccattttgtcaagcactatcacttggtaaagattattcacaagaaaaaaactattctttatgtgagataaagacattactaacccacctccaatggcgattagacccttcctcttctctacctctgccttactgttacaattaatgggaaagaattgttcatcaatccattcctagtgattctcagtttctcttttcaagaagactagctggaattacaggtgtggtcatttgccatggaacagattgatcctagattaattatgatctctttcttgtggagggctttaaaaaattcctttttcccctccatttctgttcttagcctgctacatggggatttcattggaagggaggtaggtgatacggacagttttgctctaggacgtagagaagaatgtttttttcctttggatttggccatctttcctcttacccaaatagttagggccaagatcaaggtgtaaacctaggcagaggccaggcaagccacaaaatgtgtgacatttgtgatatatgtgacagtaaatagtggtaaggcctttggtaaaatggagtgtgcagggttcacctaaacatattaaagctgtttaaaatgaagccaaaagaggttggagactaggtaacccacatagtttctagtctacatctttaaaagaaatctctgtaaagattggatccagttcttgcttcatggggataatacataagattcatacttcatgtggaaataaggtcacaatcactgatattgaaagtggtcattctccagggactgccttccttgtagaatgtgtcaaatgtagatatgactgaacagtttaaataaatgtacattgtacttttgttttctgtctgccattttccatttagagtttagcttggccgtatattcactgttgacaaaattgtta

SEQ ID NO: 37370 - DNA, 1025 bp, Homo sapiens
attaccctcaaagtgaccggagcatttatcccagaagatggtaacaaccatgagtcaaactgctactgctcttcctctctctcttttgatcctaatgtacttttgcacactcttgtcaaccagttccagcaaatccctgagttaatccttaattgctaaccctagttatgccctttaagtttaataaggtaatttatttttatttttattttttattttgagatggagtctcactctgttgcccaggctggagtgcagtgatctcggctcgctggaacctccacctcccaggttcaagcgattcttccacctcagcctcccgaatagctgggactacaggcacctgccatcatgcccagctaattttgtttgtatttttgtagagattgggtttcatcatgtcagccaggctggtcttgaactcctgacctcaggtgatccgcctgccttggcctcccaaggattacaggcgtgaggcaccacgtcccggccggtaacttgtttctgttatcatttctactgaattgaatcttcaccaatttaactgtttagcaggttgcacattcaacctttcattattttagtttggcttggcctgtcttggagagaaataagcctgatttgttaataccagagatgattattttatgatatcttactggctggttaaattttttctgactaattaatatggtccataactgacctagaagtagtcactttgtgattgctattcccattattcacttaataggatttgactttgttgtaaaacatttttatattgtcacattatactgtagattttattcgtgcattgactgtcagctaaaggaaacagctgatttaggagaaatatttaataaaaatgaaattaaaggtcaaaattagaagttttactgaaaattgaaaaatagttaagtgataatgtggaattaagaaagtatccttttgatctttaacagcttgtatagtttatagcattatggaaccattagttaaaatacttaaatgtgaaataaaat

SEQ ID NO: 37371 - DNA, 1083 bp, Homo sapiens
gttgtaaggattaaatgagttaatatctgcaaagcactgaaatcagtgcttagaggacagtgtgcccttcagaagagttggttggggatcccttttttttttttttttttgagacggagtcttgctctgtcacccagcctggagtacagctcagctcactgcaacctctgcctcctgggttcaagtgattttcttgcctcagcctccccagtagctggtattacaggcgtgcgcctccatgcctggataatttttgtatttttagtagagacagggtttcaccatgttggccaggctggtcttgaactcctgacctctcgatctgtctgcctcagcctcccaaagtgctgggattacaggcatgagctaccgcgctgggacgggggatcctttaatcatcaatgaacttcatggaactcacttagagaaagaaattccaaagaaaaatcagactctaagattctaggtttgaagtgtgtagaaagatgaggtcttcagtttcttaaagccatgaagcctttccactttcaggaattttagcaattaaatgaagaaggggttaagtgcacacactgtagagccagactgactggtttgaatttttgtttctactacctgcttgccatctatattagtccattctcatacttctatgaagaaatacctgagactgggtaatttataaaggaaagaggtttacttgactcacagttccacatggctggggaagcctcaggaaacttacaatcgtggcagaaggtacgtcttcacagggcggcaggagagagagtgagagcaagcaggggaaatgccagatgcgtataaaaccatcagatctcgtgagagtcactatcacaagaacagcattggggaaactgccccccatgattcaattacctccaccgggttccacccttgacacatggggattacaattcaaggtgagatttggatggggacacagagccaaaccatatcaccatctgatcttgagcaaagtatttagcttctgcatgcagggctgggcactgaggtttgtgcctgtaattctagcactttgggaggccgaggcatgaggatcac

SEQ ID NO: 37372 - DNA, 1052 bp, Homo sapiens
cagtgcagtcgaagatacccagttggcaaacatattgcctaaaattgctttaataaatataaagttccttttattaagattttatgctggttttcggtaattctatcactattaaacattcttaatgaaaaaacacatataatagaatttagaataattttaggtggtagagagttgatagattttaactggatgatggtttttatcactattactgtattagttttctatatctactataagaaattacactaacttggtggcttaaaacaacacacgttcattctcatatggttctagaggtcagaagtacgaaagcagtttaactgggctgaaatcaaagtgtgagaagcccacactccttcaggaggctgtaggggacaatggttcccttgacttttctagcttctagaactgcattcctggttcatggcctctcccttcatctttagagccagcacatggaatcttcaaatctgtatcttccttcatcatatcaccttctgtagctaaatgtccctctgcatccctcttgtgaggatagttatgattacatttggggcccactcggctaatccagggtaatccccccatctcaagatccttaacttaatcacatctgcaaaatcccttttgccaaataaggcaacattcacaggttctaggtctaggtttctttcggggccattattcagccttctacattcatttgaaggacctatcaacaaattcaatttttcaaatgttagtgttttttatgcagtcctacatttaaaagtctgtcagtttattgaagtcttctgttgattttccctcttctgtttacggttttactcagtgaagtttgtttttcctcctgtgcctgtgtcacaaatatttagttgtgatgattcagaagaaaaacctaccttaaaacttgcgtcattttcaaagaactaataataagtactttctaaaataggccatattaaaatttatttttatggaatccagcttttctttttttgacggagtctcgctttgtcacccaggctggagtgcagtggcacaat

SEQ ID NO: 37373 - DNA, 1300 bp, Homo sapiens
tacctgttctatcatctatgtcatttctgggtgtgtttctgtttattgaatttcctgctcattatgggttatgttttacttatccactgaatgttagatatttaggattttatcttattgggtgctatttttgtattctattattttttatttttttgagacagggtgtcactcttgttgcccaggctggagtgcagtggtgtaccatggctcactgcagcctcaacttcctggactcaagtggtcctcccacctcagcctcccaagtagctgggactacatgtacacaccaccatgcccagctaattttttgtatttttaggagagatggggtttcaccatgttgcccaggcttgtcttgaattcctgggctcaagtgatctgcctgccttggcctcccaaaatgctggtattacaggtgtgagccaccgtgcccagacttatattcttttaaatattcttgagctttgttctgagactcagtgaagttgattggaaacagtatgatcttttcaaagcttacttttaagctgtgttgtgtgggaccagagcagccttttactgtacagctaattttagctcattactgaggagatgcctttatggaaactttacccaatgtcccatgtgctctcccttctggctgaatgaacatgaactgtttctggttttatgtgagtcctggggattgttctacttgctcttcctagtggctcttctctggacttagactgtcttgacaaaggtatgtactgatcactacttagctgaaaacatgagaggaatcctctatagatttcaagtgctttttctgtgcagctcacctgtgttcagctccctcctctttaatactctgtcctgcaaattctagctgccttacctctccaaattttcaactttgtcttaaactcagggctctgttatggctcccttccctgtgctgtggtctggagctctctccagtaagcaagaatatgtgtagagcaaggttgtttcctgcctctcagagatcacggtgccatgctatttattgtgcagtgtctgaaaacttgtttcttatattttgtctagtgttttagttatttaaggtggaaggatagatctggtactccataaatgtctgggggtagactcttaaaatatcacagttaaaaataaagttgtaattgtgacacgtgtcgtgaggagagataactggtgctatgagagtgtttatttggagactctgaaagtgctgcccagtaatcatcccatacctaagtgatgaaagaaaaagcaattaagaagatggaaagtatga

SEQ ID NO: 37374 - DNA, 1029 bp, Homo sapiens
gaaccatagagaaggtcatggggccatttattctttggaccactggctacttctgaagttctggcttccttctctctaggaggagtcgtgtattcaagcttttaagttaaatgcataaaaatgagttttacttctcttctgacttgatttttaattttatgaaatgggaaataatgtttttccatttttctgttcattttgaagtgggaatttgaggtgtttgtaatgtcatgttactgttctgaaagattgacagtaaagaagacaagaaatatatgtatgtagtatgcatattagttttgtcccaccaagcctatctttgaatggcaaacattttaaaaacatctgttctagttgcacaactactctagcttctttataaagtaaacaatcttaaagtaagcaatgttggccataatttcaatattctagccttgccgagtgtgaatatattttactcagagactatgtacaaatacactaaagtggtgatggtgatcaatattgtaaagaatttattctgataaatgagaaactggatataatgtcaaaatagctattttctcaataaaaatctcaaatctcctgactgcttatgaattctcgatttaatgttatttattctttgaggtaaatcttttcatcgcgaagaattttttgctggttgaatgtggttgttcagggctgggactgagctatagacatagtgggtttttaaaaaatgtccattctttttttttttttttgagacagagttttgctcttatcacccaggctggagtgcaatggtgtgaactcggctcactgcaaccttcgccacctgggttcaagcaattctcctgccttagcctcccaagtagctgggattacaggcacctgccaccttacccggctaaattttttttttttttttttggtatttttttttttttttttaagtagagacggggtttcaccatgttggccaggctggtcttgaactcctgacctcaggtgatccacccgtctcggtctcccagagtgctggga

SEQ ID NO: 37375 - DNA, 1721 bp, Homo sapiens
ccaaaaatatgcatttaccaggcttgttacaattttttgacagtttttcatcaactgtcaaaaacttcaacccttttaaaacctagatataaatgcttacatgtaaagaaaggaagctaagcagtgggtacctgggatctctctgaactatttttataacttcttgtgagtcttaagtatttcaaaataaaagtggttttaaagtaaattcatagattaaatgtatcattatctatatataaaccatgatttaaaactttaattttctaaacatagtattcaacttagttgaataaatatatgatagaagttaaatagaatttttatttcattcttaagaaaaactcatgtttgtaacaaatgatatctaaagatctattttgccttaccagaaaagaaaaaaaaaaccctaaaaccaaaaactccttttccctaggaagtcaaaaatgctgtgatttaaaatatctaattatatttttttctttctatggtagtggggtttacttctgaggataaaatattttgaaaaagctctgtcccttgacatggtagttctcccgtgccttgtacttgttctctctccatatgcacagtgtgacaagatgctcacctttaatgaagaaggtgtagcttttcgttttaagctgtaattgtctttgtcttgatttggctatttttataactgaaatcctgagcaacagagataatttgggtggtaatgatcatcttttgtatatgttcttgatgttaagaaatattttttgctgccattcagctttgtggaatttatgtttacttttcaatattttcatatttcttaaccagattttaaagaaatttgttgttagttacgtgaaatcaaaggtcaggtcagtaagcccattatcctcaaacttgaagtttcgttggatgttcaaaatgctaatttttgcagagatataaggataaattagttttagtttgtgttcttaagggtttgcaaaataatttggctcccaaactcttgttggggtgtagtgtttgctaggagcccaggatacctgccctggacttaaattgtgattgaagtggagaggtactctaggaatttaaaaagacacaaaattatttttttccagactagtgtgccatggatttctgataagaattaacattcttgaacaaaggtatcagaaagggtaactcgagttgaaggtttgtgaatagaaggggaaatgtgatagaagattattcagaacaaaataagtagacaaaataacaaaagacaggaaaataagtctctttgtatccttattaatcatttgaaattatgctataatattttttaaaactcacctgtttggttctgggtgaagcagttcctgaaggagtgttttgtcagaatatattgttaggagaatagagggttctgtggccaagtaagtttgggaaatagtgggttagacaaagttgagttactgttggcctttcagacctttgatacgctaatgtgcattttaaatctccaagaagcacctctattttatacatcatttccctaatttattttaatatggatttcttgtttttgttttcttgagacggagtcttggtcttgtcacccaggctggagtgcagtggcacgatctcggctcactacaacctccgcctcccaggttcaagcgattctcctgcctcagcctcccaatttactgggattacaggcacctgccaccacgccc

SEQ ID NO: 37376 - DNA, 1029 bp, Homo sapiens
acccccgccgaaggccggcggcgacatcaaggcttctccgcttggctccgagttttgtccgcctcacaaagctgtctgggcggtggagtgaaaccccgaagcaaggggcgcgccctccctactctgcatccccaggaccttttggggagcaaagtcctcgaaagccgggtggctggcgcccgcgtccctacttgagatcacggggagggatgcggcctcagtatcagtcgccttctgcctttgggggatggggctgtgaagtaaagctgctctgcagctttgcattacgcacttggtctaaaatgtttgattgcaaactctgtttcaggcttatgccaaattttctggtgcacccttgaaagtcaatgtgatagataacacctggagaggttcaagaggtatagtgtaaacctttacactcccctttctgcactcttttttttcttcttccatttaaagctgtgaggtatatagctataatattgaggatttagtttcttaccgtgaccttggctctgtgttgtttatggtttgatcattctgagtaatacctcaaagtgcaagcgaaatcactggaaattatgagaaacgaaaatgttctttagaaccgctctttgtgaaacagcaaaaaaaccaagacaagcttactcattttttcccctctaaatgtgcaactgctatagtttttaggatattggaatctctcagaggaaatcacactgtgtccttgtatgtaaactgttttttgattataggcgatgtaccaattttgacaactgaagacgacatggtttctcagccagcaaaaatactaaactttttaagaaaacaggtgggtggttcactttgaagaagtagattggtagattgttgatccctgcatgttgggctttattttatttatttatttttttttgccaactcattagacaattggagatacctgggacaagatgtaaaaatagatttgagaatcactgctctaaagcatgagttctgtgatttgaaagtcatatgaagaggtagtca

SEQ ID NO: 37377 - DNA, 1039 bp, Homo sapiens
acatatacactatggaatctatggaatacggtgtagccataaaaaggaaagagatcatgtcctttgcaggaacgtggatggggctggaggacattatccttagcaaactaacacaggaacagaaaaccaaataccacatgttcttgcttaaaagtgggagctaaatgatgagaacatgtggacacatagaggggaacaacacacactggggcctatcagagggtggaggtgggaggaaggagaggatcaggaaagataactaatgggtactaggcttaatacctgggtgacgaaataatctatatgacaaacccctgtggcaattttccccttacaacaaacctgcacatacacccctaaacctaaaataaaagttaaaaataaatgaataaataaataaataaccttaaagccattctcccagtgaatgctgagccccatagccttcctctttagccaagagcagttcttgtattctgtccccaaaagctttttgatcattggcaggtaagagctttttgccctgtcatagactgtagtatgtgatgaccttgtagaatccagaatacatcccctatgaaatctggtttaccacttactcccctccccaattaagctatgtggttttatcaacaactatggtaattttttttctgatcttgtgatttaagaactaatgttacaaacctcagggagactagttagtgtgttttaagtgtagccataggcttgataaagtattggtagataacttggcagaacctgatgtctttgaagtagcaatgttcagttcagcgtgtaactctctcccccttaatatctttttagttttatctgagaaacatactacatttttttctcttttctttcctttaaaggtggatgctcaagtttgaggactgtcatggggactatcaggttttttaggcatgtgctttctttttcttcaaattaaaacctgttgtctgtctcttgtcacttttcaggacagccacactcggggctcttacaatcaggggtcataagctgctatgtcacc

SEQ ID NO: 37378 - DNA, 1032 bp, Homo sapiens
agtagagacggggtttcaccatgttagccaggatggtctcgatctcctgacctcgtgatccgcctgcctcagcctcccaaagtgctgggattacaggcgtgagccactgtgcccagccaaagttataaagtcttctaaggcctaaaacaaggcagaaattacgagtctcgctctgttgcccaagctagagtgcagtggcacaatcatggctctctgcagccttgacctcccaggctcaatcgatcctcctgcctcagccttctgagtagttgggactacaggcgtgagccaccatgctggctagtttttctatctgaaagcgtagattttaactcttattctgagcgtccacttaatctcccatgtactacttgtgtttttttaagtaatacagtaaattacttaaatttactctttgtaaattcaacaagcttgaatttctaaatccattaaggtggcttgatgatccactgtggtactgtggtgggaactctgctgtgcactggttgtagtgtgatccctgctcttaataagttgctattctttaatagaattaagccctgcatccaaaaaacaaaatctattactaaacaaatagatagtatcccacagtggtgaatttattgagacgttagagggagagataatttgggagccattggtatgtgttttaggacgtgaatttcataatgataatattcacacctgattaccatccaagtaacctgccccatgaagcagttctagcaattccagtcagtatttatgctttctgactgttaacggatcatttgagaaacagaagatgttccactggtgttgctaggaaaggcttcgtgaaataagtgacttgtatgagtaataataactatttcaatagctaattattgagtgataccatgtgtcaggttttattctgagcactttccctgtattttcttacttcatcagcactgtactcacctgaacagtaggtactagcattacccctgccctacagatggggaaactgaaacatcgagccatttaagt

SEQ ID NO: 37379 - DNA, 1028 bp, Homo sapiens
agctactctggaggctgaggtgggaggatcacttgagcccaggaagtcaaggctgcagtgagctgagattgtgccactgcactgcagcctgggtgatggagtgagaccttgtctcaaaaaaaaggaatgagtactatgcttggctggcatgtggagataattttatcatatagacccttttcctacattacacattgggcttgggttttagttctatattacctatattttcattgcctatgtcattatatttggtaaaaagtgttctgttgtgggatatgctattctcatttatcctttccatctagactaggaagcctgtccttgcctaacaggccattagtaacatagacttctccacattctgtcctcaaaactcaacgctggaagatctttgttcccggatgtaagggagagggaaatatgaaccatgtggccttctttggtgaatgttccctgctgggcttcaccacccagtgttctcccatgctcaccctcgggctgtgtgacaactcaaacatttttctcacttcccagctctgcaggactttgtggcattctggttgaaattaagaatgttatcaatttgcttaatatgaactcagagaggagcagaagacatgcttattcagattgaacagttctgcatttccagcgtaaaaactttagctttggctgggcgtggtggctcatgcctgtaatcccaactactcgggaggctgaggcaggagaatggcttgaacctgggaggcgaaggttgcggtgagccgagatcacgccattgcactctagcctgagcaacaaaagcgaaactccgtgtcaaaaaaaaaaaaaaaaatcacttttactctggtacttaatcatattgctcagagttttccacagaaacagaaccaatagaatatatatatattatatatatatatatatatatatatatatatatatatatatatatatagagaatagaaccaatagaatatataaagatttattttaaccagaacctattttccccaaagctagcc

SEQ ID NO: 37380 - DNA, 1078 bp, Homo sapiens
cacacattaagaaaactgatgttgttttatttcaaaggaagccatgaatcacccaggccatcttaaactatttgtgacaaggatcatgcaagactttgaaagtgacacgttttttccagaaattgatttggagaaatataaacttctgccagagtaagtataaggttattaattagtctgaagcactttggatttcctgcttaagactatagaaaataacatgtcttttcagactacaaattgggttcactgtgtactgctaggatgatgggtgcaccaaaatctcacagatcactactaaagaacttactcatgtaaccaaatacaacctgttccccaaaaacctatggaaataataaattaaaaaaaaaaaaaaaaagcttggcacagtgactcatgcctgtaatcccagcactttgggaggtcgaggcaggggcagatcacctgaggtcaggagttcaagaccagcctggccaacatggtgaaaccccgtctctactaaaaatacaacaaattagctgggcatggtggtgcatgcctgtaatcccagctacttgggaggctcaggcaggagaactgcttgttcctgggaggcagaggtcgtagtaagccaagatcacgccattgcactccagcctgggcgacagagcaagaccgtctcaaaaacaaacaaaaaaaaatattaagtattttaacacctgagcatgtgatgtctttccccttgtttaggtcctatttcgttcagcgatgttttatacctttcagtgttaatttcatacttatgtattctattccttttgatgctattgtaaatggtattttctttagtttcagactgtttattgctagttacagaaatgcaaatgatttttgtttattgatcttgtatcttgcaaccttgctgaactcatttgtaattctgtcaatagattccttaggattttctctatacagtataatgtcatctgcaaatataggtttacttcttcctttttaatctggattttttctttgcctaattgccgtggctagacctgccagtacagtgttgactaaaagatagcaagagcagacttac

SEQ ID NO: 37381 - DNA, 1059 bp, Homo sapiens
tttaaggctgagaaaatttaaagtctttgttatcaagcatgccagggaaatagtgataccagttagtaaaaaatgttagagctcttttttgttgttgttcttccttccacttccttacttgttggtcagtcccacacatatagtgaacagctgctgagtgccaggcactgcagggtcctgaataagagggcagagatttatacatggaaatcacttgcttatgccaactctaaagatacttcatttttcacccctctcccccaatgtaagaagaaactgaatcctcaaagtgatcacaaaattttctaccaaacactatagtaatttagggtaaatatttcttaagtaaggtattgagggaaaatgcttttccaaagttgtctagacagtcaagttgtggctttaaaagaacttgaggtgagaagggtgggaatggccactgatgagtacagaatgttttcttttttggtgtgatggaactgttctaaaagtagataggagtgatgcttgctcgactctgaatctactaaacgtcactgaactatacactttaaaagggtaaatgttatggtgtgtgatttatatcaataaagtggcttttaaaagtctttggaaccagccgggcacagtggctcacatctgtaatcccagcactttgggaggccgaggtgggcagatcacgaggtcaggtgttcgagaccagcctggccaacatagcaaaaccccgtctctactgaaaatacaaaaattagccaggcgtggtggcaagcacctgtaatcccagctactcgggaagctgaggcaggagaagctcttgaaccaggaggcagaagttgcagtgagccaagactataccactgcactccagcctgggcaacagagcaagactccgtctcaaaaaaaaaaaaaaaacctcgttggaaccaaaaattaaataaacaagttttactgtaatgctatagtagcctggacaccatctttagaaaatccaaaattgcctccattatgtaagatttaaatagtctcccatccacgaaagttaacttaatttcatgttat

SEQ ID NO: 37382 - DNA, 1050 bp, Homo sapiens
tcaagcacgcagcaacgcagctcaaaacgcttagcctagccacacccccacgggagacagcagtgataaacctttagcaataaacgaaagtttaactaagctatactaaccctagggttcgtcaagttcgtgccagccaccgcggtcacacgattaacccaagtcaatagaaaccggcgtaaagagtgttttagatcaattcccctcaataaagctaaaattcacctgagttgtaaaaaactccagttgatacaaaataaactacgaaagtggctttaacgcatctgaacacacaatagctaagacccaaactgggattagataccccactatgcttagccctaaacttcaacagttaaattaacaaaactgctcgccagaacactacgagccacagcttaaaactcaaaggacctggcggtgcttcatatccctctagaggagcctgttctgtaatcgataaaccccgatcaacctcaccacctcttgctcagcctatataccgccatcttcagcaaaccctgacgaaggctgcaaagtaagcgcaagtacccacgtaaagatgttaggtcaaggtgtagcccatgagctggcaagaaatgggctacattttctacttcagaaaactacgataacccttatgaaatttaagggtcgaaggtggatttagcagtaaactaagagtagagtgcgtagttgaacagggccctgaagcgcgtacacaccgcccgtcaccctcctcaagtatacttcaaaggacatttaactaaaacccctgcgcatttatatagaggagataagtcgtaacatggtaagtgtactggaaagtgcacttggacgaaccagagtgtagcttaacataaagcacccaacttacacttaggagatttcaactcaacttgaccactctgagctaaacctagccccaaacccattccaccttactaccaaacaaccttaaccaaaccatttactcaaataaagtataggcgatagaaattgtaaaccggcgcaatagatatagtaccgcaagggaaagatgaaaaatta

SEQ ID NO: 37383 - DNA, 1096 bp, Homo sapiens
tgtgaaggatatcaggttactgtttagaccgtgctgagggtcaattagtggtttgatcaaccggcattagtgagtacctactgtgccccatactgggctcaacgggggaggggggagtggggtgggggacgcttctggggccccaggatggcaaatgtgggaaaggtcttgttaagaaaagcataatgtaattttattattttgaactctgggaagactggtctgagagggacctttgaaggacttaatgaaatctgccaagacactatttgaagcatgacaaatggtcgcagttgaatagttgctttgctgctgatgatataaatcagactctgatataatgcaaagcagaatctctgatagtggagtatgaaatggaagaatttttgccatccataattttcacttacatttgcacaggtttttacaatgtacaaagtgacctttagtatataattttttgttgttatttgtttgtttttgagacagagtttcactctattgcccaggctggagtgtggcacaatctgggctcactgtagcctctgcctcccaggttcaatggattctcacacctcagcctcccgagcagctgtgactacaggtgcacaccaccacgcccagctaatttttgtattttttgtagagatggggtttcgccatgttggccaggctggtctcgaactcctgacttcaaatgatctgcccttcttggcctcccaaagtgctgcagttacacgcgtgagccacggtgcccggccgtgtataaaattttaatccttccttagctgacccagcatcagacaagtcaggaaccataatctcatggtctcccgtcacatatcggccacacaggctgaagagaggtgatcacatgggctgagatgagaagcatggggaaatggaggggctgggacaagaacaccagtccttctgactccttcgtagtcctttatacttgcccttctcaaactgtcatgtgcacagggctcactaggggttgtggctaaaattagattctgattcaggggatctggaacagagataaggattctgcatttccaacaagctcccgggtgatgctgatgctgctggc

SEQ ID NO: 37384 - DNA, 1055 bp, Homo sapiens
aggccgggtgcagtgggtcacacctggaatcctagcactttgggaggctgaggcgggttgatcacctgaggccaggagtttgagaccatcctggctaacatggtgaaaccccatctctattgaaagtacaaaaattagtcgggtatggtggcatatgcctgtaatcccagctactcgggaggctgaggcaggagaatcacttgaacccgggaggcggaggttgcagtgagccgagattgcgccactgtatgccagcctgggcaacagagcgagactccatctcaaaaaaaaaaaaaaaaaaaaagattctatattcagcatgtgcttgtcaattatttttgacaagtggaatttacaggcgcatgccaccacatgcggctaacttttgtacttttagtagagacagagtttcacgatgttggccaggctggtctcaaactcctgacctcgagtgatctgcccgcctcggcctcccaaaatgtggggattacagcatgagtcactgcaccaggccgaatatagaatcttaaaggagaggtctcatgtcagacagcttttgcgatgaaccctttagagtgttaatctccaaatgactaaagcacatgtttggttaccttggtattgactaagcaatgtcctctactacagatcttttcttttgtgatcttcttcatccatttgttagagaagtataactgataattactgagaaataacattgttgttgacattggtctggggtttcttccatgaacataggagagtggtagggtggcccttggggaggataacccattcctgggaatacccacatccaggcagcgtggctgggcatggaggatccaggtcctgcctggagaagaacttggaatgcccaggttgagggtcctcaaactactttgtctcacctggagaggagctgcacagcttcctgagaggcaaagggctgtcttcccagttctggtgtctgagggctcttagagatggcatgcttggtccagggctaaccttgctcaaaaaagtttcaaaagtacaacctgtcctacagcaacaga

SEQ ID NO: 37385 - DNA, 1048 bp, Homo sapiens
tggagacagtaaggcggtatatgatgtgaactgaaccttaagaaaaaagtaggggccatataatgcgagacttcacagtcatgtcaaagattcttaattttttttaatcctaagaccaacgggaagccaggaaaatgttttatgtaagggagaaaataatccactttgcatttcagaaagctctacctagctgtaatttgtagaatgaattttgcatcctagagtgaatgcaagtagagcaggcaacagatatcggcagcttggaccaagggttctggcagtgaagacaaatggaagaggattcacaagaaatataagaagtaaaatcaatagaacttgatgatgaattgatgttctttttttttttttttttaatcagactagccaaagattttctattttactggtcttttctatgagctagcttttggtattttggatcaacttttactgttgttttctaattcattaatttccccttttttctttattaatttcttcacagccacataatattacctttggctgatgatctattctgtaggaagtctgctggaactggcgtatctctctgatgatgtgtgatatctaacagagaaaaaaacaaaacaaaatgacaacaacaaaagcaaagaaaggtatttcctgcattgcagcacattcttctgaggcctcttcccagaagggtcagtcccttcctccagtgaggcgggtggagcctgcctgaccattccctatggttggtgctttcttgactctcaaggaggcacatgaaatgccaaaagcaaaaagatactgaattcaaaactggggaacagctggcaatatgtggcctcatgtttgggagaggcaagctctgggtgctgtcatccgtgggctccttgcttctagcttagtgcttagaacctggctgtccaggctgggcatggtggctcatgcctgtaatcccagcactttgggaggccgaggtgggtggatcaattgagttcaggagtttgagaccagcctggccccaacacagcgaaaccctgtctctactaataataca

SEQ ID NO: 37386 - DNA, 1079 bp, Homo sapiens
acactcttaaccacggccctctgctgggcaactagaaattgtgtgtgatttgtgctctacttggggagccagagcctgttggggggtcctgggagggcatggttggctatgggacagaccattcaacgatgttgtttgaggagccttgtcaggtcttaagcataccaaagtactgtattgcatgcctccacctgccctgggactaggacaggtcacaccctgcaaaggattcgagtggaaacgatgaatagacccctgcacacccatgtgcatcagtggaggactgtggatgccacgtgcccccactcctccctccccaaagctgctttccaggcatcttccaggtggggaaatggccattcccctcagcccagagcagacttagcctgcccttgaatgctgccaaaaaaaagaaagggctaaatgtgtcccctgttctattcctagtccagattcctaagatgaggacacagcatcctgggccactgtcactaatacaaatttgcctctggagggactctacggaagataattcccctgaaatttggagagttgaattaagctaggactgattctggctggaatttgtggtggctacgtaccctagagggcctcaaggaaacccacggttcaagacagccctgacagattctggagtctagaacagaaatggatttgaacatgggcaaggccaaccacccagttcacggcctgtgtacagcaaagattacgttacagcctgagagctaagcctggaagctctttcatccatccgtttgtccatctatccatccatctgctcatccatccctccatctgctcaacaaacgttagagaatcaatccttgtgtcagatactggggctgccctcaaggagcttttatagagttcagggtacagccaggtgggggagacagatcactataaaaacctaccactataatccaaaggacaagagcaaaaatagtaaagaggagagaagacccaaatttgcctggtgggtcagagagggctttctagaagaggtaaaaaatcttcggggctatcacttcaccttgcctggtggataaagggaggac

SEQ ID NO: 37387 - DNA, 1024 bp, Homo sapiens
gcatggtgataggcacctgtaatcccagctacttgggaggctgaggcaggagaattacttgaacccaggaagcgaaggctgcagtgagcagagattgtgcctctgcactacagcctgggctatggagtaagactctgtctcaaaaaaaaaaaaaaaaaaaaaatagtgagggggatgcatgcccacacaaaggaatcctgatagaggaacaatggcttggtccgtttcccctcctgtgtagcactgtgataaaggaaagcctttcaggtatgtgcctcgatggagccagtgggtggaagaggaagggcaatgagaggtttgaggacaagctgctgataccctcatgtgtcatcacagtggtgccctttgggagcctgctttggtatactcgtccactcagggaagaggaagtctcttatccacagttttgtcttcaaaattgaaatttctttgggcagagcctaaaagagagttgcctcatttcgtgtaactgtagcatatgtagtgtagaggctccaatgtgtttttgaggcaatctgagagctctttctggaaatccctggcagatgacatctgcgtctgattttactttgtcttacaaccaggctaagacctccagcatcatcagactgtcgaactgctcaggtcaaggcagacaggtagaaaggcccacatagatagtggttactcatcccaagaacacagaggcccacaccaggaaggggcaggtgatgttaatgatgaggcaggcaattatatcttgcgatttctatgagccatgatgcattacagtaaggaactttacctcacttggcttgtgacttctgttagtgaaaagtggcctgctggcctatgctgtggaggacttgcagaaaacttcccagtcaccggcagacggttgacatctcccctggttcctccccaacccgtttagtgtgaaacgggacaaagggaaacatttcctttgatctatttttggggaaagaggcaaatgtcaactaaataagatcatattagggactgg

SEQ ID NO: 37388 - DNA, 1074 bp, Homo sapiens
ttctagggaactgccttcagctccctgcaacagaagaacccaaaagggtggacctgaaggaggagggctgcaggcatttgcctcagcggagaggctgctctgtggaggggacgcatagtggctgagcactgttccagccgaccaccctgtgcttctgcattgaggatgaggatgccgaggtcatgggatttatccaagagacttagtgaattcagtagtctgggctacagtgatcgtctaatcagtaataggagagaaatcagtaataataatagaataagaggagaattcctcatattcccaaagatacactgaaccctcctcccgacccccacccaataaagctcagccacaaacacatcagctcctaatgtcttactggtgaatacacaccattcaattttattgtttctgtaccaactcatccacttgacaagctcagagttctgtcatgcaattcattcctccacagggagggatcttagcacagcagcaagggaagccttgtccctgggaagctatagacctcattgtttcagaaagcattccagatggttctgctggagctggcttccctttatgagagcccttcctgagaaggcagaaagttggccccatagagaagaaaaggaccccaggactgtgcaagtcagtcatatccagagcatccctcccaccctggaaccagcagccaatagttttacctcataggactcctcgtcaccagccaccatgcccacagtctttatgaaggggtggccagggttgtccactccagtctggatgcactggtccagcgtgtagccgttgggtgtcaccttgttgcgaagcttggcataaatggcgggggtgaggcactcggccatgcagttgttgtgcttgcgcaggtctgggtagtctgcgctgtgtggggaggagggcaggctgtcagccagcagcccccgaggaaaggggccaatggaaggacttgttgtttgcccatccttccactaggctcccttcagccagtgggcacagggatacttggctagaactgcctaggagtcataaatgaatacaccaggtttcaaaaaa

SEQ ID NO: 37389 - DNA, 1053 bp, Homo sapiens
aacatagtacctggcctgtactaagcacttgatgaatgttagttggtggcatttttcatgccaagagagtaggagaatacaggaattatcagcaggtgagtctatggtcaggctacattctctgtcatctgtatgcttagaatagctcagagcgatattaaataaatcaaaaaacaagtaatgatccacagacttccccaaaccacagtggaatggggaagtaagcgtaatagctttctaataacaagagaaagtcacttattttctgaagcactaccttggaagttgcactccaaaaaatgccttgaggctgggcgtggtggctcatccaaaaaatgccttgaggctgggcgtggtggctcatgcctgtaatcccagcactttgagaggctgaggccagcagatcacctgtggtcaggagttcgaggctagtctggccaacatggtgaaacacccctctctactaaaaatacaaaaattagccaggtgtggtggtggcacctgtaatcccagctactctagaggctgaggcgggataatcacttgaacctgggaggcggcagttgctttgatttctagaaaaaaattagctccatcttggaagttaccatagtgtcttctttcaagaacaaacaatacggtaattttattttaataaatatccagaaatctcagataacatcttacttcttttagtccacgacagaatcgctcaaatactcgtttcatattgcctcctttttccattgagattaccctggtgtgatcctcctcatttatccagatgagaaatgtcttatcataattatgcctaatgaagagagaaatatggtactgagtgttaattgcatttgtttcaacacatgaaaattcccattacctccctagcttgattgcttcatttcaccttcctcatttcctagatggccctaatctcttaactgtgcctgaacaagtatgacaaaataatgttactttgacagaaggaagattaagaccaactctcaccctaaaagatgtcatgtttttaccaaacaagaatataattaattc

SEQ ID NO: 37390 - DNA, 1050 bp, Homo sapiens
attttgcaacattagcctgcatgtgccatagatactgtacagcacggagtggctaagattccagtagagaaccaagctcttttctggcctagtaaaccaggaaatggagcctggaataagcatagccaccagaagggggtattctagaggagagacccagagaagtggaggtccaggttctctggatgaactctgctcaaatctttacttgacccctgaactacacatgaatgaagcagcttcaaaacaaccactgaggcttaagtaacttaactgtatattgaacttgcagtcattgcaggtgagaccacagtttgagtctaatcaaggtaattgcctgctaaaacaaatacctcagtcatttttaaagcaatacggtagaactcaggttatactaaatataactttctcaatgtccaggatacaatccaaaattacttgacagagaatgaactaggaaaatatgacaagaaaaagacagccaacaggtttacccagagatgaacaaggtgaccaaaagatataacacaaggactttataccagctattctaactgtgctcaatgaataaaggcaaagatgtttacaatgaatgaaaagatggaatatctcagcagagaaatagaatatgtaaaaaaaaaaaaatttgagaagtaaaagttacaatatctgtgatgataaaagatcactggttgagctcagtagcagaatagagagaacagaggtagaatagagaggtaagaatttagaaacttaaagatagaacaatagaaattattcattctgaagaaaaggaaatgattgaataaacagaaaaggggggaaattatttttaaaatggacactcagagtactgtggaacaatagcagtaggtccagtatatgtctaattatgagtcctaaaagagagaatgaggccgaaaaaagcatttgaagaaatgatagccaaaaactttccaaactttgtaaaagatataaatcaacataagaagcccagtgaaactcaagtataaatatgtagaaaatcacctaggcacattaactgctgaa

SEQ ID NO: 37391 - DNA, 1032 bp, Homo sapiens
ggctggagtgcaatggcgcgatctcggctcactgcaacctctgcgtcccgggttcaagcgattcttctgcctcagccgcccaagtagctgagattacaggcgcccgccaccgcgcccggctagattttgtatttttagtagtgatgggatatcgccatgttggccaggttggtctcaaactcctgagttaggcgatccgcccacctcttccctccaaagtgctgggattacaggcgtgagccaccgcgcctggccctcgtatttgttaagtaaatgaagaataagtactttgcgatgtttgtttaaagcaaactagaaagtggcccagttttctttaagagaagggattttaaagtcagtgcttgtaggaatgttgagatttggtatggtacatatcacaaataccgtagttcatatggtggagaaagttttaaaagacaacaaacaaacaacagcaacttccagctcttgaagatagggaacttcctaaaagatgtgtggtagtgctgcccatactgtaatgatctcaaccagctggtttcagggtagtgacatttcatgaagaggttttatctttggtagatgcaaggtacttacacataacataccactagagggcgcatttaactaaaacttttctttttagtggtatattgcattttaaactgtaggtcgttcattcttggaagcaaaggaacataccgatttctttttgtagcggtatgtccaataaagattagtagttgagcaaatagggcgtagaataagtcctttggaattcggaggaaactattgctactaatagctaactttactgaacattttataggtgccagcagtatgcttaatggtttgcattcgttacctaattagtccactcagtattctgtgaggttggtactattattttctccattttgcaatgagggaataaattcacagagctgacgtaacttatccaaggtcagacagctaataagaggtagagtcaggatttgaaccaagatctcaatccaaacctgtgtgctctgc

SEQ ID NO: 37392 - DNA, 1032 bp, Homo sapiens
tttctctattttttcactcagtttcctccctgggccaacctcactcttttaacttcccaacaaatcagtaacaaagtatcatttttctgtaagattgacttaaaacatttgaaatatcacagataaaaaaatgttaacagttgccagtgttgagatgatagcaataaataaaaatggttgataatagagtatatgcgtatgtatagcttgacatatatacatactcttaacaacgtatagtataatgaaggctattctatattttcaacactatttcctaacataacctgacatatgaatgaactggaataatttttttttttttgagacggagtcttgctctgtcacccaggctagagtgcagtggcacaatcttggctcactgcaacctccgcctcctgggttcaagcgattctcctgcctcagcctcctgagtagctaggattataggcacctgccacctcgcctggctaactttttgtattttttagtagagacagagtttcaccatcttggccaggctggtctcaaactcctgacctcgtgatccacccgcctcagcctcccaaagtgctggaattacaggcatgagccaccacacccagccccagaaacatttttaaaaagcatttcctttgaggtcctttctgaaatgcttagtatcttttactggtttatattattgacacagtatactcaataagatctttgttttaaaagaatgattgattatctagctgccctattaattaaaattacatacgactaaaatttcagttcctaaattgtactagctacatttcatgaactcagtagcaacctctggctagtggctgttgcagtaaacagcacagaattataacatcatcatcacagaaagttatattggactgatggaatcaccaatatttattgtaaataacagtagctgcggaaagcatagattaaatttatctgtgcccattttgccatattctctgattttttctactctagtaaaatcttgctaaccacttattttctttttattta

SEQ ID NO: 37393 - DNA, 1036 bp, Homo sapiens
gagagctccaatggacttcagaggatccttgttctcagatcctccctgcggggtgcacagcaagacaagacacagtgtatttctaccagctcatctatctatctctgctttacattttaaccattttcttctgggaataactcattcatgaaatgttaatttttatgatacaagttgttgtagttaagacaaaattctctgagcaattttctttaaaaaaaaatctaaaaactaattccaaaacaatgtaaataggaatggcttaggaaaaagtaagccagtaagtaagtaagttatttcttccatttgaaataacaactaaaaaatgtttaactctgaagtttttttttacaagttaatgaattggaccttcaaagaattacagttatactactgtataaacatggtttatagtccaatgtcattctacatttcctattgatgtggagtatcaggtatcctgccatggctaaaattgtgcggtaataatgagactagcaaatttaaatagaatatgaagcaacgcactgctaacttggtgttcgattagattgctaataacagtcattttatcttccaaggaaagttccaaagtaaatctactcttaaactaatgataggaaaatattctaaagcagttttcttttgagcctccttttcctctaagagtacataataaattctcaagtcctaaggtgtctcttgttcttaagtacagttgttagctatctttcttttttccttaaagttcatgtaaaaatggttgaaatagtgttatctgtatactgcatgtagaattaaaaggaaatgtttattaaaacagtgacctttcaaagtttggttagtgaaatgactaagggagttattgttccatcttgccttatcagtgggtaggatctcttcatcatgcccctgctgggaatgttttaaactctccagtgttttaggaactctataagctgagggtgggaaattgaataaatattgattctgaagctaagaaaatagttgtggtaggttattgggggttttttta

SEQ ID NO: 37394 - DNA, 1139 bp, Homo sapiens
actaagatgaatgaaggatgaagaagtacttacagtattatttaccctacatgtctataagtatttattagtcagcttataaattcactatgtaataataaaagttttttatcttctaaactaaaacatacttcaatgttttcataatccttttatataattactttaaatagttttatcatttatttttgagactttcacacagactattaaatgtgtcttggggttgttaacagtggaagactaaattggcgcacccttcttagaaaatgctatgataaaatgtgtcaagagccatgaaaaggttcataccatgtgactctatacttctaatactagaaatgacagagatacaacccaagatttatgtagaaggatgctcatttgttatactcaagagtaaaacagtagacacaaactcatgcctaattcaattttagtggaattagtaaattaatgtttaaggtgtaggttagaatataatagagccattataattattatcaaagaatttgtaatgacatggaaaaataaaatctcatgattcaatgcaatataatcacagtttcatttgaaaccgtaacacaaatctagaaagtagaaaacaaagaaataggctaaaactctatcagttattactttgggatgattaagtagatgggaaattttaataattataaagtatttttgattatgatgttttactgttaaactcatatgtttttaactggcttgttgaaattaagatagaagcttgaaattcagtatcattgatcataccaataaaaatttttaattttgagccctttcaatttagaaaaatcataaacttgataattaatacaaaattttactttgcttcactaactccttggatatttaatggtctgtgtcctgaaggcatcttcattgaaaatgatacaattcatcgaagatagaattatatcaactgatcatcttgcccatatttatgttcttatatggtgaagttaatgtttaatttatgaaggtagcatgtgaataataaatgcttcactgcaagactaaaaaaaagtttttggagcaacactgaacattgcaggcaataagtaatcttcctttcaaaccagaaattgccacaagtacatcttcctagtctt

SEQ ID NO: 37395 - DNA, 1028 bp, Homo sapiens
tgctgtcctccactaaaaggaattaaggccccttggggaaagagctgattccaagcctaggtcagaagaagtatgaggtgagcctggaacatcttatgccataaattaaggaaatgctcaaaaatggatgtgggtatgttacacacacacaacacacatacacacacacacacatacacacacacacctgaaggcttctcactagccaaatctgagataatttgactattgaaataaatgatgatagtaatagattacaacccattgaacaatatagaaatctatgactgagtaaataggtgaataaataagaaaagcttttccttatagtgaaataccaactaataaatataaaaagaatgatggacatggaatgtctctatttgacagttatcatagtggttagttgttagtggaggctacagctgatgggttgataaaggattgttgaggaatggaatattgacaatctcagaatagctcttatactaaaagtaatcaattactgtgtagaaacctgcagacaccagcacattcagatgataaaggttaccatcaccagtagtgggatagatcaacataatttgccctctaatgtgatacactgagaaaggcatagcatcatttctctggtattcctgctaagaaaatataactagatcataaagaaacatcagacaccatgctgtagaatttaagacctgttctctttaaaattgttgaggacatgataggtagggatagaatagacatagataggaacaataggaaatgattcctgcttagaagaacatgaagagacaggacaactaaatgtaacatgtcttccatgatgttctggtaccagaaagaaaaaagaaacattattgagacaaatggcaaaattaattgagatcttggacttggatggtagtgttgctgtcaatgttgatttcctgacttgaaaggctgtatggtggttatgtaggaaatattcttattgggggaattatactttgcagtatttaggggtaatgaggtatcatgtc

SEQ ID NO: 37396 - DNA, 1053 bp, Homo sapiens
gcatgaaaagcttaagctcttactaccttttctttttttttcctgcaaccctttggcagtacagagtttatagccacaggactgttcctatctaaatagagagcaatgcagtgaaattttaaaaaggcttctgattgttaatttgaaggacttgatattttaagaccagtgaaagttacctatactcttgaaatttgaacacaatcttttttgtaaaattggaaatgacatgagaatctagcagcatgactctttttttcctaaccaagtaagaagtgttatacaattaatcgtggcacatagtaaacagcgcaattgatattctgttgtattctgttatttaatatagtttaagttaaagtttatttttctggggaagcaatcatatttttcagtttttgattgtgagaattatattgtgtatgttgaaatcacaaaataattgaatgaaattatgtatttactcagtatagttttgcttaataagtaaattaaaagcttatttaataattttagattacttatggacaaataaaactagacttctgatgccttatgtaatactctatcagaatagattatattatgctaaatcactgtttttttagtttttttgacgtttaagattttgacagttgctttatgtaatgacatttttatggaataaaaatggcttaaatatgtacaagaccaaattattactgtagtcatatgtattaaaatgaaggatatgttttagaaatgtggttaaatgatacttttataagaaggcaaattaattataaagttcaataactcacataatttaaggtagaaacctgctactggtttgcagttcatttctattatttgtttcttataatattataaataattttttttccttttttgtgatggaatctcactctgttgccaggctggagcgccatggtgcaacctcagcctcctgggttcaagttattctcctgcctcagcctcccaaatagctgggactacaggcatgtgccaccatgcccagctaatttttttttttttttttttttgatgaaatct

SEQ ID NO: 37397 - DNA, 1068 bp, Homo sapiens
cataaatctgcacattgattacacacggctcatataacctatacatgtaaacatataaaaatacatgtagcataattttatatgatgtatcataaatgtgacctaaactaacatgccatctataatatgcacgaaacatttaattaataagtttgcttgccttcctggaacttaattaaaggaggtttggcttgtttatttgtttttgtaatgatgtagattctcttattctcttaaaacccagccaaggaaaactaaaactatatacttttttcaaatagttttttgaatgcaattattttattgattagactgctgtacttttaaaaaacaccctgaacttcttctgccctttagtttgcacttgatgaactctctgaaaggcacagtattcctttaatttatctagagttaaggatataattataccatgaagttttactattgaaaatcagatttttgaaaattaaagtaagctttaggcagtatttggtaaagtttcttatttctgtttctgaggaaggagatttagaaatgtgaaggtcagacatctagtttgtggtagaacccacctacatcccagtcaagagcttttagttggttaagtaagtacacagactctgaagcctaggtttcaattctagcctttttattatctaggcgatcttgttaatgaacctctctgtgctttggtttctccactgataaaataaggataataatgatacttacaccatttactagttgagagaatttaatgagtttatataagacacttagaatagtgcctaacatatagtgttatatgtaagttatgatatactctacatgttgctattttagcagaataatctcaaatatttcacttgcatataaaattagtccagaaaacataatgtatttgaatttttaagttttggggagtagtagcaaaaactgacaattattccttaacaagaaatgacaaaaaaaaaaaaagaagcctgatagaggaagaaggagatgtagactgtgcagcttggcactggggagtctgaatgctactatgaactaaactatgcacaaact

SEQ ID NO: 37398 - DNA, 1065 bp, Homo sapiens
aatagctatttctgcatctgactcaaacccccacccccattctagaattctcaagggttcttggttaactcttgagtaataattttcattaaaaaaatcttttattcatttacaacatctcaatccattacagttcaaaaacttttaaaaagtttgaaaactgcttattttagtcatttgaatagataagaaatctggtacctggagaagttaaggacatgtcattgtttaaagactgagtgtggtttaaccatgaaaatttaggttttccaaattctcattagtacttttccaactacactggatgaaacttttgcttcatctgccatagtcattttttagcatattcaaaaaataggaaattatattttaggatggtgaatctgagggcatgatgaggactgaagaaaggcaaggattaaaggccaacacagttaggaggctattctaatagtgttgatatacgctgaaaattcagcccctgaattaaaatggtgacaaataaaatggaaaataatgaatgagaatgaagaagaaaagagactgtctagttgtaagtattgaggaagagagaaaaattaaaaataatttgtaattaatgtggctgatgatatgggacttgtgatatgcttagcagaaatctgaaattagggaggaagaacatagagaaagtggattaagggataagagtgggttaaattaatgaagtagtaaagataaaataagaattgaggcctggggatagaaaggtgtgaaaaaggctcacatttaaggagtaataggaaggaagagactagcatgaaaacaagggaaaatacaacttggtgagaagtaaatacttaccacactaggtagactgacttggatagcataactgttatgttctgtaacccagtacatttcccaaagctgttcactgtttcagaatgcttccagctcgaactctgcatcccaaggcaactaatttgtttggtgtgaacatagtatcttgagtacctaagatattcaaaagctgtttgtggttgttgaagcaagacttgagactcaaactatgtcaatggctga

SEQ ID NO: 37399 - DNA, 1071 bp, Homo sapiens
aagccacacttccacagggagatcctgctactgaaaggagcctgctatatagcttattgtgttagggtaggaaaaagagttgagaagcactgatgtaggaagtgtcattcaatttgaatatgtttggagatgtttctaaattacattcatcctcactgtcaataacttactttctatgagtaactttaacaggtctactctctcaaggtgtttagtagctacagaataactctcattttaagtatttggcaattttggaatggggaaagaattaaatggacagagcaactgaatttgtacaagctttctcttttcatgacagatgcatgatatgttttcatgaaaataaggaaaatactcatttttgtaaatgccatcaatctttaacagtcgaaaatctgcttggcaagagaagtggtacaactataaccacagaattgtggttattgttacattgtattgtttactgtaaacctggttcaatattggtaaatatagtgtagcagaaactgaactgttgtgagctatctgggcattggtccaagatatcattaaaaatactgcctcagactaatttgggtttatgaataatattttgttaacagctcaactgaaattgagccacatggtgtagcttcaaaattctgaatccacaagataatgagagtagtttgtgtatacaacacattgaatattctatatttgaatgaaaaatttatacataattttgttaacctttaaactgtaagctcccatatgcttaatatgatctgatatctttaaagtttacataatgctgtagtttgctgtgaatttgaatgccttataaactaaagtattattggcttaacaatcaaatctaaagaataaggagaagttgctgagcaaatattaaaatggatattcaacgcaagttgtggcatatgtttctacaaacagctagagtttatattaacattcgccaaaaagattgaaggacataaagtattgggaaagttcactaacttaattcatttcttttactaatgaaaggttattatgtcttcaaatgggatttagagattattaata

SEQ ID NO: 37400 - DNA, 1083 bp, Homo sapiens
acaatatatacatgtatcaagacatcatgttgtatattatgaatatttatatgacaaaattttatacaatttttatttatcaattaaaaaataaagtttctgttctgttgtcaaaattttattttaaatagctaaatcctccttccctctaaaaaacctgactaaaattaagtcacacaacaaactaggaaaagaatttgcagaaaataaaccagagatttaatatttttatatagctgaataccttcgatatttgtttagagtgccacaaagtttaatcttttactggtgacataaagctaccattatgattgttgattagaggacagtactgtaataagagttgcccttaggccttctgagggaggcacagggatatttggcccaactccaagttggccatactagtttcactggtttacttagtttttctgccccattcctacttgttggacttcatctgttacttcttatttttgttaatgtttctaccagtagccattactcttatttccttatactctttttctacacacattgtatatatttggggagttttaattttagcaatgaattatgaacatttcttaatatcattaaacattttgcaaaaatatatttccccatcacatgtatttatcataatctaattatttcttctttctcagatatttagattgccagtttttcactgctataattttgccccaggcattattataaattgtttggctttctgattctttacaatagtattttagaataaaaattgctgggatataaaaggatataaaggtttagtatttaattttttattgcttgtttatttctttctaaataggaaatataagctcaggggaagtaatcaaacaaaagaaaagttatgcggtaaaaaattctccctcttattccaggcccccagtctctaggaaaaaaggcctgcaataaaagatactgtttgaactcaaatgattccatgagcgtgggaagcatgggagtgacttgttccagtgcttgtatgtacatacaatatttctgtaatacagatgagagcatactatacaaactgttctgcacttaaaa

SEQ ID NO: 37401 - DNA, 1052 bp, Homo sapiens
atgtggatgaaagggaaccattgtacactgttggtgggaatataaattagtacagccattatggaaaacagtacggaggtttctcaaaaaattaaaaatagaactaccatatgatctcgcaatcccactctgtatatccacagggaatgaaatcagtatgtcagagagatatctgcattcccatagtcattgccgctttaatcacaatagacaagatatggaatcaaccttagtgtccatcaacagatgaaggaaaatagactatatatgcaaaattgaatactattcaacctttaacaagaaggaaatcctgtctttaaaaaacaattttttaaagttccaggatacatgtgcagaatgttcagatttgttacgtagtatacatgcgccattgtggtttgctgtacctatcaacctgtcatctaggtgttaagccccacattcattaggtattagtcctaatgctctccctcccctgaccccccacccctcaacaggctccggtttatgttgttctcctccctgtgtccatgtgttctcattgttcaactcccacttatgactgagaacatgtggtgtttggttttcttttcctgtgctagtttgctgagaatgatggcttccagcttcatccatgtccctgcagagaacatgatctcattcttttttatggctgcatagtattccatggtgtgtatgtgccacattttcttgacccagtctatcattgatggtcatttgggtttgttccaggtctttgctattgtaagcagtgttgcagtaaacatacatgtgcatatgtctttatagtagaatgatttataattctttgggtatatacccagtaatgggattgctgggtcacatggtatttctggttctaggtccttgaggaattgccacactgtcttccacaatggttgaactaatttacattcccaccaacagtgtaaaagcattcctgtttctctacagcctcaccagcatctgttgtttcctgatgttttaataattgccattttgactggtatgagatggtatctcattgtggt

SEQ ID NO: 37402 - DNA, 1013 bp, Homo sapiens
tctagaactggcacacattatatatagtacattttctgaaaagttttgtgaatattaaatcatacggttttataactagcacataaaatgtaaggaaacacttgatgaatcctgttcacaaagttaaaaaatcttttctgtgatacaaagtcatatctactttaattgttctataaattgggattaaaaataagaccattttattagctgacttctgttaaataatgatttgttatatatagtcgtattatatacatacatacatacggacatgtatatatgtagaaagagagttaggaattagctgtgagctaataggtaattaaaaggcagtatttaccttttatttatgtgtttcttggtaaacttgtttgtgaatccacaatactgtcttagaaaacttacctttaatatcttgcctatctttcttattttctaccaattctaaattttagagcattatatttaacctcaaattagataactagaccatagaaagaattgagtaaagtaagatctttactcctttcccagactgtacattcattcgtttacaagaatggttcagaatctgtaattagacacttaagtaacagtctctgttgtagatacctaattagttaaatagttcatctgtcctagtactgttagatgatacctgttggcaagcatgtaatggattttgttcatatgaatggaaagaattcaggtttctttcttagaagttgtaattttcttttttttctttttgtttctgtttttgagattgagtcttgctctgtcacccaggctggagtgtagtggctcgatcttggcttgctgcaacctccgcctccagggttcaagcaattgtctgcctcagcctcctgagtagctgagattacagatgtccaccaccatgcccagctaatttttgtattcttagtagagacggggtttcaccatcttggccaggctggtcttgaactcctgacctcgtgattcacctgcctcagcctcccaaagggttggga

SEQ ID NO: 37403 - DNA, 1025 bp, Homo sapiens
cttgacttgtctcttttctcctcatctttgtaggactattacctctttttttctagttcttatagtctattaatgcattttaaggtaaaattagctcttttggcagggcaaatacacgattaattcatcttgaatttgcagtcaactaaaacctgtcttttcatatgggctgttgttaagtcatatttgtcatcctttacaagtttttttgattcaagcacaggattttacattggtttttgttaagttagtcttaatggatttagtgcagtatttcagagttccctattcttttgggatcctaattcaggaatataaatatattagttagctccttagttttattttcaaatttggtgattatgctgtgattgcttatccaaaatcaaagagttagtctgattattttcatctggacttagggaagtcaagacgtcttagcttactgtctttttatttggtcacccatgggtgctaaatgcttcttagtgcaagtgattagaaagtaaatatctggaccgagtgtggtggctcatgcctgtaattccagcactttgggaggccgaggacggcagatcactacctgaggtcagaagtttgagatcagcctggccaacatggcaaaacctcgtctctactaaaaatacaaaaattagccatcgtggtggcaaggcgcctgtaagtcccagctactcaggaggctgaggcgtgagaatcgctttatcctgggaggcagaggttgcctgagggatagcacgagactgtttaaaaaaaaaaaaaagaggccaggtgaggtggctaacgcctgtaatcccagcactttgggaggccaaggcaggcagatcacctgaggtcaggagtttgagatcagcctggtcaatatggtgaaatcccgtctctactaaaaatacaaaaaaattagctggatgtggtggcaggcacctgcaatcccagctacacaggatgccgaggcaggagaatcacttgtacctgggaggtggaggttgcagtgagtcaagatcgtg

SEQ ID NO: 37404 - DNA, 1029 bp, Homo sapiens
gaaataaaacttgcaaaagtgtggaggcctctccagtaactggttccccgtggagtttttttactcttggacttgtccacgctgagcctccagcaatttatcaattacagattagattttccttccctggcgctgattcctgcagagatttctgctcagggttttttgtttgtttgtttgtttgtttcttatggtaagctgtgattctctatacctgcctgtctcttcagttttggagggcagtggtttgccctgtgacctcacttattttatggagctaagaatagctgttgatttttctgtttgttcagctttttacttgttgttgggatagattggtgatttctaagcttcttatatgctggactagaaactggatgtccaataggcaactttttatgctttggggcacattagttttataaataatttttctgccactcttaaagagtattgaaatttgggggaaaaggagagtaggccttaaacgaatattattattctgagactaaagtaaacttgagaaacagatggaagatcataacactttaccctgcgtattaattactgagtgaccttgaataaattttgaaatcttcctggctcttaatttttctgatagagttatgaggactaaagagccaggcttccttcttttccttttctttcctttatctttttctttttctttccttttccctttcttcccttcctttcttctttccactaacatctaccaggtgtcagagaattgctagggatgcaaagataatttgtatttttttctagtattaaattctaaaataactagctactatactcagtcataattatttatttgcgtaatttctataacaaagatacagtagttctacaaagaggggaaggagggggtaagagaggatggtagttaggaaaggcttcacggttaagaaatactggattaggctcttcaaggaggaggagccattttcctggtttagcaggaggggaaattctaggcagcagcatctggaaaggtaattagct

SEQ ID NO: 37405 - DNA, 1030 bp, Homo sapiens
cagtgctaagaactaagggaaggaaagatttttttttgttttttctgtgtttagaccataacttttagtaaagatcagggtgccccaatggaccagtatagggatgaagcagcagagaaggtgtaatcaggaggtgatactcatgtgcatagagtccagtgtttttgaacaaattatccattttccatcagtgaacttggagatttttttgtttcatttttacaaaggcatttgattccttataatgatgctgatgaaatggttcaggaaactaaatgtcatgtctgtgatctcataatctgttagagagttctgttgttttagagaatttagttcaggttttgaatttgctacaggatagtaaggttttgattgccaatttttgaaaaggcttcatggctgcctagtttttgtttttgtttttgtttttgttttcagtttccatgttgattagttagtcactggatactgaactgctaaagaattagatttctgttacagattttggcattataaaactctttggtttgtgtataggacttggttggaacgtaaccttagtcggtttttggttctttgtattttgcttagtgtgtgaactggttcatgagctttttcatttgggtgcttcactgggacatcagtctgaagtagctacctgtaagatttttgtttgtttttgtttttgcttgttgtctgtgttggaagagttgtatagaagttaggaaagatattcggggacatttttaggtcgtgtgattctcaagcctgatctagaaggattaactagatgccttagtatgaagcatacagattggattgccatattcagatgctgtaactaaacatctcatcaagcagtagtaggtttatattttttatggtatccatccagacttgattaacagttgacagattttaggtttcctactattgtggctctttataaaaatccctgaaaatctgtatatctttggctttatttccatttagttttgtttttaaaccagtcttctacctaatattttgt

SEQ ID NO: 37406 - DNA, 1066 bp, Homo sapiens
caatctttcatttgtaaagtggtatattatttaaatttttatttctctgattattagtgaggttagttatctcttcacgtatttgttttctgttctccttaagacctcccattcttgctgttttattatgcctaaaaaactctttccccttattcacgtggctcactcactccattcagatctcttcttaaatgtcatgtccccagagagttctgctttatctttcattgtctttatcacaacaaaaccttatattatgttatgtatttatttattttctctgctcaagttccttgaaggcagagaccttacctgtgttcacacctgtatccctagcacttaaaaaggtaagttctctataaatatttgttgaataaataaacatgaattggctatttatatcctttgtccattttgcctactcaataggagcgtcttgaatattctagacattaacctgtgttggttttagatgttgttataatttgttatttctgtccatcgtagctgcgtttgataaggaatccttaattttcaagtggttaaatcatcacgtcacaacatgtaaatcaacacattgtggtttgtgtttttgtggtctgaagaaatgctcttctaacccgatattacatatccctctccattttctatttgctttataattttatattttatatttgggtctgtaatttcttaggagtttacctttgtataggctgtgaggtgtggggggtgattttatttttcttcctgtagaatacaagcagtttgcacttttcctgctgattggtagtacacacttactatgtacgaattatttctcatatttcattgatcagttgtctatttgtgtttagtatcaatgttttttatacagtggctttgcactgtgttctaaagtctgatagggcaagtcctcccccttttaaaaaattgacttagcaacattcgtaataggaacaatcaagtagctaacctttaaaaagaatgcaaaagatcattatggagtaattatgaaactctattaaaggatatgaaaaaagacataactaatagaagagaatta

SEQ ID NO: 37407 - DNA, 1038 bp, Homo sapiens
tgttggagccttcatatttttttccttcagtcatcttgccgattgacactaaaatgagcttaataagatttttatctattattggaggattccaggcctatttattttccctaggaaggctataatatttaacaaacaagtttattgaaatattttagaactttaaatcttttgaagttacccaaattggagggtcttacaactttgaattactttctaagacctctttccttccagtaatgagaaacatttattcaactttttaaaagacagaaatcatctttttaaaatgtactgttttctaattgtctgaaatgacaagagatcacttacccagcagtgcacaagacttccaaaatagctgagcagcgggtgaggggctagaaggcggggggtggtggtggtatctttttttaaaaaagtatgtttactagaaagggtataagatactttgcttttgttataggtgcacttgcacaaaactcattttaacctgtagtcacaatttcttctgtatgacccacccaaagtaaccaggctgcaaagcattataccacatataaaagcaacattcagattgcttgttttgcttttatttatttgcatatgtaatttattgtgcctgtgaaaaaaggaagttcttataaagagcaacaaaataggaaaaacaagcaaattgtcatttcttctggtagattatgatttagaatttaggtaaaaaaattaagtttgagtgattccatttaatcttggtagagttgtgatagcttatatgtaaaagcaaaatcattttatttaaaacattatgaaaagatgctgacagtaaatttacggagtgcattagtgttactattggatgtgttggaatccagactgtaaattattgttactctgttacataaagactactaatttttagtacatgtttatattgatttattcatattatagatcatggaataccacttcattttgaaaaaagagaattatagttttcatatttagaaactgagaaaggattttttaaaaatgaagaaa

SEQ ID NO: 37408 - DNA, 1063 bp, Homo sapiens
caagtaaagagtattttagccagagagagaatcatgtacagcaacatggaggcattaaaaggtatgatatagttggtgaactgcagtaaagttggtagggataaatctggcagattaaatacgaactatttcaagaacagccttaaatgacaacttgacctaggagataaacaatttttttttttttttttttttttttttttttggagatggagtctcactctgtcaccaggctggagtgcaatggtatgatctcggctcaccgaaacctccacctcccaggttcaagcgattgtcctgcttcagcctcccaagtagctgggactacaggcgtgcaccaccatgcccggctaatttttgtatttttagtagagatgggatttcactatgttggccaggctggtctcgaactcctgacctcgagtgatccacccacctcagccacccaaagtgctgggattacagacgtgggccactgtgcccgccctgagataagcaattttaagcagaaaagttacaccatctgaggtgcattttagaagaatcgttttggaaatcatatggagcatggagtaaagggggaggtagatccattaggaagcgattgctataacaatacaaatgcttatagcgtcatcatttttctacaccaatgcagtggtcatttcaggatgtagaatagatcagacttggtggcctaagtgtgaaaattaggatttttaaagatggctgcaattgttggtagaagttttagtcacagactttgggatacaggaggaggaacaggtaattttaaaggtgtaaggaggaagatgatgagtttagtttgagatgccattaagacctagcgatggagaagtttgggaggaacttggatatgtagcttttgagttcctggaagaagtctaggctggagatacagaaatgagaaaggataagtgtgaggaaactaaggctttaataggataagtaatttagctgaagtacacatgttagagctgaaatctgaactcaaggtttagtttattatttctctctttaaaaaaatagcgttattgaaatc

SEQ ID NO: 37409 - DNA, 1025 bp, Homo sapiens
gaagatgtatcttgaggatatagggagaataaaatgagtccctgctttcatgagactttgaaggttgaaggagaaatatataataataagcaaataaatgtactaggcaacttcaaatagtcatatatactataaaaataataaaatagtgtgatgtagtgtagagaatgactgggaggctatgctagattgggtagtcgggaaggttcttggaggagaggacatttcaacggagaactgaaagaatcagccatagaaagaccaggttacagtatttcaggcatgtctaagctactattgaggaaaccttagcatcaacataattgctcaaggatatgttaaatatgagtgaaaattgggatgaagaagccatacttgcctggttttgtttttaaaatggaggaattgggtgttgggttcagtttatctgatcttcctagataataggattgatatcttttatctttcaaaccctaaggataaacttgttctgaaggacagtggggcttttataatgatgattatagaaataactaagatttgttgaacacttacagtatactgggttaacagaggttggtacaattggcgtaattatttctcctaaaccttctagattggattggatactctcatagcagacttttttctttttcatatttattataaataacaaattatttgtattattatttttttgagatggagttttgctcttttgcccaggctggagtgaagtggcgcaatctcggctctctgcaacttccacacaccccccaggttcaagcgattctcctgcctcagcctccctagtagctgggattacaggcatgcaccaccacacttggctaatttttgtatttttagcagagagggagtttcaccatgttggccaggctgggcgcgaactcctgacctcagatgatccacctgcctcagcctcccaaagtgctaggattacaggcatgagccactgagcccggccatttgtgtgatgtttaatgcctcatcttccagttagattg

SEQ ID NO: 37410 - DNA, 1050 bp, Homo sapiens
ttagattgaaaagatagaaacagtttctcattagttctctagttaatatgaaaagataatctttttcagaaagccagctcacagtgctgtgccttttgtatttcagaggagttgaagccaaacagccaaattctgccattaggaagtgtgtaagggtccagctgatcaagaatggcaagaaaatcacagcctttgtacccaatgacggttgcttgaactttattgaggtgagtatttcaactctatcgtaccttctgttcttggggtggcctccctcacatttttatctgatgcaagggagtttcctcacatgaaagtatttttgtgatcgccaccaacaccagaaataaacttcttattttattccaggaaaatgatgaagttctggttgctggatttggtcgcaaaggtcatgctgttggtgatattcctggagtccgctttaaggttgtcaaagtagccaatgtttctcttttggccctatacaaaggcaagaaggaaagaccaagatcataaatattaatggtgaaaacactgtagtaataaattttcatatgccaaaaaatgtttgtatcttactgtcccctgttctcaccacgaagatcatgttcattaccaccaccacccccccttattttttttatcctaaaccagcaaacgcaggacctgtaccaattttaggagacaataagacagggttgtttcaggattctctagagttaataacatttgtaacctggcacagtttccctcatcctgtggaataagaaaatgggatagatctggaataaatgtgcagtattgtagtattactttaagaactttaagggaacttcaaaaactcactgaaattctagtgagatactttcttttttattcttggtattttccatatcgggtgcaacacttcagttaccaaatttcattgcacatagattatcttaggtacccttggaaatgcacattcttgtatccatcttacaggggcccaagatgataaatagtaaactcaaaattgctccccactctgtttattatttaaaggtgtca

SEQ ID NO: 37411 - DNA, 1047 bp, Homo sapiens
ccagcgcttcctcccgggcattcgagcggggcctcgtccttcgggagaacacattctccggagccctcttcgaacgtttattagtcggttcagggcaacttgaaggccaaatgtttggcccacaggccaataaatagtacgagagccaatcggcttaagggtttattccaggtgaggcgagtgtcttagaagatgggaaacacgtagatggcgtgtttttacggaagaactaaaatatttaatttttaggcaagtgtcgtggacttcgtactgctaggaagctccgtagtcaccgacgagaccagaagtggcatgataaacagtataagaaagctcatttgggcacagccctaaaggccaacccttttggaggtgcttctcatgcaaaaggaatcgtgctggaaaaagtgtaagtccattgctcccgtcaagttttagtttattataggaattcgagacatgaacttacgaattcttgttttgaaagtaattgcaggtttttgtgtagtagtattcatttgggcattgtggggtaaaattgcaaagcgtttgttctatttaaaagttggtaaaattagtttttgggaattaggtagttaaggttttaatttaacgttggcctggaaggaattggagaagatactagcaatgatgaagtaaaggacacaaacacctttactgtgggagttgttataagtaaatggcacgtgtcagctattgaactttatcgacttgataaaactaaggtgaagagaagtgacttgcatcagaattaattgaggtcatacacctaagattgagacatgaaactgccagtatttgactggttttgactttttaaaataataatttcatatagttctatcatatttgatggtagagccattttaacccagactttttttttttttttttttttttttgagacagtctagctctgtcacccaggctggtgtgcagtagcgcaagactccctgcaaccttagcctcccaggttcaagcatttctcctgcctcagcctcccaggtagctgggattacaggcgcc

SEQ ID NO: 37412 - DNA, 1042 bp, Homo sapiens
tggtctttctttcttctttctttcctccctcccttccttccttccttccttccttcctctttctttctttctttctttctttctttctttctttctttctttctttctttctttttcttttctccctttctttctttcttttttttctgcaggaaaaactccctttaagcatttcttataagatgagtctgaaggtggtgaattttctgcacttttgtttgtctgggaaataccttatctcgccttcatattggaagaatgactgctgcatgcagtatttttgatggaaggtttttctttcagcacttagaaaatgtcattctactccctcctggcatgtacagtttccattgagaagtctgttgccagatgaattgtacctcttttgctatttgtgtattttcccttactgcttttaggatcctctctctatctttgacctttgagagtttgattattgcatacttaggagtagtcttatttgggtcaaatctgtttagtgttctctgactttcctgaacctggatatttatatctttctcacattttagaacatcttctgttatttctttgaataagttttctaccccttgttcttgctcatctcccacttgaatactaataattcttaaatttgctcttttgaggtaattgtctgtatcttgcaggtggtcttttttccttatcattctcttttctcccctgtgtattctcaaatatacagggcctttctttgggctcactgagtctttcctctgcttgatccattctgctattgagggcctctaatgaatttttaattcagcaaatatatttctgagttccaagatttccgtttgatttttttgtcagttatttcaatctcattgttaaatttctctgataaatttatgtttttatttataattttctttctcattggaggggagggaaagaaagcaagcagaggtgggggtatggttacactatttaaggaagagctgaatacaaagacaatgagtctttcatagtctcaacaactccacaatgaatgtggattatc

SEQ ID NO: 37413 - DNA, 1041 bp, Homo sapiens
gtagcatcatacatgtttttatagttaataatatactcctatccattcaccctgtatatgtaacatttaacacggtacccagcacatagtagactctcaaatgattaagtgaatcaattaacatgtattttattgcatcattcatcagtattttttttttttttggagatggagtcttgcagtgttgcccaggctggagtgcagtggcacgatctccgctcactgcaagctccgcctcccaggttcaagtgtttctcctgcctcagtctcccgagtagctgggattacaggcacccaccaccacgcccagctaattttttgtatttttagtagagacagggtttcactatgtcggccaggctgctctccaactcctgaccttgtgatccgcccgcctcggcctcccaaagtgctgggattacaggcatgagccactgtgcccagccattcatcagtattcttgaataataaattacacccttttttaacctttttaattaaaaaaaaaaaaagactccagacatttgtacatataccacttggactgaaattgaatatttcttatctgtcctctttggaatcatttgtataaccaaagaaaaattcttttgtttagtactcttcttctaactttgaatttatgcttaactacttttctttcataaagctgttagacatttataatgaaaaatattttttctacgtttgacatttattgttagccagtctgacaacagcctaaattctctcaactaatcccttttaataggatagagaattgaagaggcatctccattagataaactgtgttccctttagagtattgtgttttattttggctttcaacttctcagagatgtggaaaatttagaggatggtccataaaggaaacaaacttcatgagattgaaaaatacaaactgtatagtttgaagtcaggtactcaatgggtgcagctattcttcctcagtgttctgtcatactttgttctctcttacggtgataggtctaagagtctttcttttgtaataagtatcattac
